United States Patent Application Publication US 2024/0409597 A1 - sequence listing, part 3

SEQ ID NO: 4342 - DNA, 1272 bp, synthetic construct
  misc_feature 1..1272: note = source = /note="Description of Artificial Sequence: Synthetic coding sequence"
  source 1..1272: mol_type = other DNA
atggagctggagctgatgcccttcaacgtgctgctgagaaccaccctggacctgctgcaggagaaggaccccgcccacatcttcgccgagcccgtgaacctgagcgaggtgcccgactacctggagttcatcagcaagcccatggacttcagcaccatgagaagaaagctggagagccacctgtacagaaccctggaggagttcgaggaggacttcaacctgatcgtgaccaactgcatgaagtacaacgccaaggacaccatcttccacagagccgccgtgagactgagagacctgggcggcgccatcctgagacacgccagaagacaggccgagaacatcggctacgaccccgagagaggcacccacctgcccgagagccccaagctggaggacttctacagattcagctgggaggacgtggacaacatcctgatccccgagaacagagcccacctgagccccgaggtgcagctgaaggagctgctggagaagctggacctggtgagcgccatgagaagcagcggcgccagaaccagaagagtgagactgctgagaagagagatcaacgccctgagacagaagctggcccagcccccccccccccagccccccagcctgaacaagaccgtgagcaacggcgagctgcccgccggcccccagggcgacgccgccgtgctggagcaggccctgcaggaggagcccgaggacgacggcgacagagacgacagcaagctgccccccccccccaccctggagcccaccggccccgcccccagcctgagcgagcaggagagcccccccgagccccccaccctgaagcccatcaacgacagcaagccccccagcagattcctgaagcccagaaaggtggaggaggacgagctgctggagaagagccccctgcagctgggcaacgagcccctgcagagactgctgagcgacaacggcatcaacagactgagcctgatggcccccgacacccccgccggcacccccctgagcggcgtgggcagaagaaccagcgtgctgttcaagaaggccaagaacggcgtgaagctgcagagaagccccgacagagtgctggagaacggcgaggaccacggcgtggccggcagccccgccagccccgccagcatcgaggaggagagacacagcagaaagagacccagaagcagaagctgcagcgagagcgagggcgagagaagcccccagcaggaggaggagaccggcatgaccaacggcttcggcaagcacagaaagagagtgtag

SEQ ID NO: 4343 - DNA, 3030 bp, synthetic construct
  misc_feature 1..3030: note = source = /note="Description of Artificial Sequence: Synthetic coding sequence"
  source 1..3030: mol_type = other DNA
atgggcagcggcagagtgcccggcctgtgcctgctggtgctgctggtgcacgccagagccgcccagtacagcaaggccgcccaggacgtggacgagtgcgtggagggcaccgacaactgccacatcgacgccatctgccagaacacccccagaagctacaagtgcatctgcaagagcggctacaccggcgacggcaagcactgcaaggacgtggacgagtgcgagagagaggacaacgccggctgcgtgcacgactgcgtgaacatccccggcaactacagatgcacctgctacgacggcttccacctggcccacgacggccacaactgcctggacgtggacgagtgcgccgagggcaacggcggctgccagcagagctgcgtgaacatgatgggcagctacgagtgccactgcagagagggcttcttcctgagcgacaaccagcacacctgcatccagagacccgaggagggcatgaactgcatgaacaagaaccacggctgcgcccacatctgcagagagacccccaagggcggcatcgcctgcgagtgcagacccggcttcgagctgaccaagaaccagagagactgcaagctgacctgcaactacggcaacggcggctgccagcacacctgcgacgacaccgagcagggccccagatgcggctgccacatcaagttcgtgctgcacaccgacggcaagacctgcatcggcgagagaagactggagcagcacatccccacccaggccgtgagcaacgagacctgcgccgtgaacaacggcggctgcgacagcaagtgccacgacgccgccaccggcgtgcactgcacctgccccgtgggcttcatgctgcagcccgacagaaagacctgcaaggacatcgacgagtgcagactgaacaacggcggctgcgaccacatctgcagaaacaccgtgggcagcttcgagtgcagctgcaagaagggctacaagctgctgatcaacgagagaaactgccaggacatcgacgagtgcagcttcgacagaacctgcgaccacatctgcgtgaacacccccggcagcttccagtgcctgtgccacagaggctacctgctgtacggcatcacccactgcggcgacgtggacgagtgcagcatcaacagaggcggctgcagattcggctgcatcaacacccccggcagctaccagtgcacctgccccgccggccagggcagactgcactggaacggcaaggactgcaccgagcccctgaagtgccagggcagccccggcgccagcaaggccatgctgagctgcaacagaagcggcaagaaggacacctgcgccctgacctgccccagcagagccagattcctgcccgagagcgagaacggcttcaccgtgagctgcggcacccccagccccagagccgcccccgccagagccggccacaacggcaacagcaccaacagcaaccactgccacgaggccgccgtgctgagcatcaagcagagagccagcttcaagatcaaggacgccaagtgcagactgcacctgagaaacaagggcaagaccgaggaggccggcagaatcaccggccccggcggcgccccctgcagcgagtgccaggtgaccttcatccacctgaagtgcgacagcagcagaaagggcaagggcagaagagccagaaccccccccggcaaggaggtgaccagactgaccctggagctggaggccgaggtgagagccgaggagaccaccgccagctgcggcctgccctgcctgagacagagaatggagagaagactgaagggcagcctgaagatgctgagaaagagcatcaaccaggacagattcctgctgagactggccggcctggactacgagctggcccacaagcccggcctggtggccggcgagagagccgagcccatggagagctgcagacccggccagcacagagccggcaccaagtgcgtgagctgcccccagggcacctactaccacggccagaccgagcagtgcgtgccctgccccgccggcaccttccaggagagagagggccagctgagctgcgacctgtgccccggcagcgacgcccacggccccctgggcgccaccaacgtgaccacctgcgccggccagtgcccccccggccagcacagcgtggacggcttcaagccctgccagccctgccccagaggcacctaccagcccgaggccggcagaaccctgtgcttcccctgcggcggcggcctgaccaccaagcacgagggcgccatcagcttccaggactgcgacaccaaggtgcagtgcagccccggccactactacaacaccagcatccacagatgcatcagatgcgccatgggcagctaccagcccgacttcagacagaacttctgcagcagatgccccggcaacaccagcaccgacttcgacggcagcaccagcgtggcccagtgcaagaacagacagtgcggcggcgagctgggcgagttcaccggctacatcgagagccccaactaccccggcaactaccccgccggcgtggagtgcatctggaacatcaaccccccccccaagagaaagatcctgatcgtggtgcccgagatcttcctgcccagcgaggacgagtgcggcgacgtgctggtgatgagaaagaacagcagccccagcagcatcaccacctacgagacctgccagacctacgagagacccatcgccttcaccgccagaagcagaaagctgtggatcaacttcaagaccagcgaggccaacagcgccagaggcttccagatcccctacgtgacctacgacgaggactacgagcagctggtggaggacatcgtgagagacggcagactgtacgccagcgagaaccaccaggagatcctgaaggacaagaagctgatcaaggccttcttcgaggtgctggcccacccccagaactacttcaagtacaccgagaagcacaaggagatgctgcccaagagcttcatcaagctgctgagaagcaaggtgagcagcttcctgagaccctacaagtag

SEQ ID NO: 4344 - DNA, 984 bp, synthetic construct
  misc_feature 1..984: note = source = /note="Description of Artificial Sequence: Synthetic coding sequence"
  source 1..984: mol_type = other DNA
atgaccgccctggagctggccagaagaggcgccagagtggtgctggcctgcagaagccaggagagaggcgaggccgccgccttcgacctgagacaggagagcggcaacaacgaggtgatcttcatggccctggacctggccagcctggccagcgtgagagccttcgccaccgccttcctgagcagcgagcccagactggacatcctgatccacaacgccggcatcagcagctgcggcagaaccagagaggccttcaacctgctgctgagagtgaaccacatcggccccttcctgctgacccacctgctgctgccctgcctgaaggcctgcgcccccagcagagtggtggtggtggccagcgccgcccactgcagaggcagactggacttcaagagactggacagacccgtggtgggctggagacaggagctgagagcctacgccgacaccaagctggccaacgtgctgttcgccagagagctggccaaccagctggaggccaccggcgtgacctgctacgccgcccaccccggccccgtgaacagcgagctgttcctgagacacgtgcccggctggctgagacccctgctgagacccctggcctggctggtgctgagagcccccagaggcggcgcccagacccccctgtactgcgccctgcaggagggcatcgagcccctgagcggcagatacttcgccaactgccacgtggaggaggtgccccccgccgccagagacgacagagccgcccacagactgtgggaggccagcaagagactggccggcctgggccccggcgaggacgccgagcccgacgaggacccccagagcgaggacagcgaggcccccagcagcctgagcaccccccaccccgaggagcccaccgtgagccagccctaccccagcccccagagcagccccgacctgagcaagatgacccacagaatccaggccaaggtggagcccgagatccagctgagctag

SEQ ID NO: 4345 - DNA, 1320 bp, synthetic construct; identical to SEQ ID NO: 3641
  misc_feature 1..1320: note = source = /note="Description of Artificial Sequence: Synthetic coding sequence"
  source 1..1320: mol_type = other DNA

SEQ ID NO: 4346 - DNA, 3687 bp, synthetic construct; identical to SEQ ID NO: 3602
  misc_feature 1..3687: note = source = /note="Description of Artificial Sequence: Synthetic coding sequence"
  source 1..3687: mol_type = other DNA

SEQ ID NO: 4347 - DNA, 1596 bp, synthetic construct
  misc_feature 1..1596: note = source = /note="Description of Artificial Sequence: Synthetic coding sequence"
  source 1..1596: mol_type = other DNA
atgaagggcgccagactgttcgtgctgctgagcagcctgtggagcggcggcatcggcctgaacaacagcaagcacagctggaccatccccgaggacggcaacagccagaagaccatgcccagcgccagcgtgccccccaacaagatccagagcctgcagatcctgcccaccaccagagtgatgagcgccgagatcgccaccacccccgagaaggccgagggcgtggtgaagctgcagaacctgaccctgcccaccaacgccagcatcaagttcaaccccggcgccgagagcgtggtgctgagcaacagcaccctgaagttcctgcagagcttcgccagaaagagcaacgagcaggccaccagcctgaacaccgtgggcggcaccggcggcatcggcggcgtgggcggcaccggcggcgtgggcaacagagcccccagagagacctacctgagcagaggcgacagcagcagcagccagagaaccgactaccagaagagcaacttcgagaccaccagaggcaagaactggtgcgcctacgtgcacaccagactgagccccaccgtgatcctggacaaccaggtgacctacgtgcccggcggcaagggcccctgcggctggaccggcggcagctgcccccagagaagccagaagatcagcaaccccgtgtacagaatgcagcacaagatcgtgaccagcctggactggagatgctgccccggctacagcggccccaagtgccagctgagagcccaggagcagcagagcctgatccacaccaaccaggccgagagccacaccgccgtgggcagaggcgtggccgagcagcagcagcagcagggctgcggcgaccccgaggtgatgcagaagatgaccgaccaggtgaactaccaggccatgaagctgaccctgctgcagaagaagatcgacaacatcagcctgaccgtgaacgacgtgagaaacacctacagcagcctggagggcaaggtgagcgaggacaagagcagagagttccagagcctgctgaaggaggagtacagcagctgcagcagacacccctgccagaacggcggcacctgcatcaacggcagaaccagcttcacctgcgcctgcagacaccccttcaccggcgacaactgcaccatcaagctggtggaggagaacgccctggcccccgacttcagcaagggcagctacagatacgcccccatggtggccttcttcgccagccacacctacggcatgaccatccccggccccatcctgttcaacaacctggacgtgaactacggcgccagctacacccccagaaccggcaagttcagaatcccctacctgggcgtgtacgtgttcaagtacaccatcgagagcttcagcgcccacatcagcggcttcctggtggtggacggcatcgacaagctggccttcgagagcgagaacatcaacagcgagatccactgcgacagagtgctgaccggcgacgccctgctggagctgaactacggccaggaggtgtggctgagactggccaagggcaccatccccgccaagttcccccccgtgaccaccttcagcggctacctgctgtacagaacctag

SEQ ID NO: 4348 - DNA, 942 bp, synthetic construct; identical to SEQ ID NO: 3906
  misc_feature 1..942: note = source = /note="Description of Artificial Sequence: Synthetic coding sequence"
  source 1..942: mol_type = other DNA

SEQ ID NO: 4349 - DNA, 834 bp, synthetic construct
  misc_feature 1..834: note = source = /note="Description of Artificial Sequence: Synthetic coding sequence"
  source 1..834: mol_type = other DNA
atgtgcaccgtggtggaccccagaatcgtgagaagatacctgctgagaagacagctgggccagggcgcctacggcatcgtgtggaaggccgtggacagaagaaccggcgaggtggtggccatcaagaagatcttcgacgccttcagagacaagaccgacgcccagagaaccttcagagagatcaccctgctgcaggagttcggcgaccaccccaacatcatcagcctgctggacgtgatcagagccgagaacgacagagacatctacctggtgttcgagttcatgggctgcccccccagcccccccccccccaccgccgtgagaaccctgagcgccgacaccgacctgaacgccgtgatcagaaagggcggcctgctgcaggacgtgcacgtgagaagcatcttctaccagctgctgagagccaccagattcctgcacagcggccacgtggtgcacagagaccagaagcccagcaacgtgctgctggacgccaactgcaccgtgaagctgtgcgacttcggcctggccagaagcctgggcgacctgcccgagggccccgaggaccaggccgtgaccgagtacgtggccaccagatggtacagagcccccgaggtgctgctgagcagccacagatacaccctgggcgtggacatgtggagcctgggctgcatcctgggcgagatgctgagaggcagacccctgttccccggcaccagcaccctgcaccagctggagctgatcctggagaccatccccccccccagcgaggaggacctgctggccctgggcagcggctgcagagccagcgtgctgcaccagctgggcagcagatag

SEQ ID NO: 4350 - DNA, 765 bp, synthetic construct
  misc_feature 1..765: note = source = /note="Description of Artificial Sequence: Synthetic coding sequence"
  source 1..765: mol_type = other DNA
atgtgcaccgtggtggaccccagaatcgtgagaagatacctgctgagaagacagctgggccagggcgcctacggcatcgtgtggaaggccgtggacagaagaaccggcgaggtggtggccatcaagaagatcttcgacgccttcagagacaagaccgacgcccagagaaccttcagagagatcaccctgctgcaggagttcggcgaccaccccaacatcatcagcctgctggacgtgatcagagccgagaacgacagagacatctacctggtgttcgagttcatggacaccgacctgaacgccgtgatcagaaagggcggcctgctgcaggacgtgcacgtgagaagcatcttctaccagctgctgagagccaccagattcctgcacagcggccacgtggtgcacagagaccagaagcccagcaacgtgctgctggacgccaactgcaccgtgaagctgtgcgacttcggcctggccagaagcctgggcgacctgcccgagggccccgaggaccaggccgtgaccgagtacgtggccaccagatggtacagagcccccgaggtgctgctgagcagccacagatacaccctgggcgtggacatgtggagcctgggctgcatcctgggcgagatgctgagaggcagacccctgttccccggcaccagcaccctgcaccagctggagctgatcctggagaccatccccccccccagcgaggagggcgcccagaccgcctgcagaagcggcaccggcgccagcacctag

SEQ ID NO: 4351 - DNA, 474 bp, synthetic construct
  misc_feature 1..474: note = source = /note="Description of Artificial Sequence: Synthetic coding sequence"
  source 1..474: mol_type = other DNA
atggccctgctgctgtgcctggtgtgcctgaccgccgccctggcccacggctgcctgcactgccacagcaacttcagcaagaagttcagcttctacagacaccacgtgaacttcaagagctggtgggtgggcgacatccccgtgagcggcgccctgctgaccgactggagcgacgacaccatgaaggagctgcacctggccatccccgccaagatcaccagagagaagctggaccaggtggccaccgccgtgtaccagatgatggaccagctgtaccagggcaagatgtacttccccggctacttccccaacgagctgagaaacatcttcagagagcaggtgcacctgatccagaacgccatcatcgagagacacctggcccccggcagctggggcggcggccagctgagcagagagggccccagcctggcccccgagggcagcatgcccagccccagaggcgacctgccctag

SEQ ID NO: 4352 - DNA, 699 bp, synthetic construct
  misc_feature 1..699: note = source = /note="Description of Artificial Sequence: Synthetic coding sequence"
  source 1..699: mol_type = other DNA
atggccctgctgctgtgcctggtgtgcctgaccgccgccctggcccacggctgcctgcactgccacagcaacttcagcaagaagttcagcttctacagacaccacgtgaacttcaagagctggtgggtgggcgacatccccgtgagcggcgccctgctgaccgactggagcgacgacaccatgaaggagctgcacctggccatccccgccaagatcaccagagagaagctggaccaggtggccaccgccgtgtaccagatgatggaccagctgtaccagggcaagatgtacttccccggctacttccccaacgagctgagaaacatcttcagagagcaggtgcacctgatccagaacgccatcatcgagagcagaatcgactgccagcacagatgcggcatcttccagtacgagaccatcagctgcaacaactgcaccgacagccacgtggcctgcttcggctacaactgcgagagcagcgcccagtggaagagcgccgtgcagggcctgctgaactacatcaacaactggcacaagcaggacaccagcatgagacccagaagcagcgccttcagctggcccggcacccacagagccacccccgccttcctggtgagccccgccctgagatgcctggagcccccccacctggccaacctgaccctggaggacgccgccgagtgcctgaagcagcactag

SEQ ID NO: 4353 - DNA, 396 bp, synthetic construct
  misc_feature 1..396: note = source = /note="Description of Artificial Sequence: Synthetic coding sequence"
  source 1..396: mol_type = other DNA
atgggcggcgacggcagatacgtgctgaacggccactgggtggtgagcccccccggcacctacgaggccgccggcacccacgtggtgtacaccagagacaccggcccccaggagaccctgcaggccgccggccccaccagccacgacctgctgctgcaggtgctgctgcaggagcccaaccccggcatcgagttcgagttctggctgcccagagagagatacagccccttccaggccagagtgcaggccctgggctggcccctgagacagccccagcccagaggcgtggagccccagccccccgccgcccccgccgtgacccccgcccagacccccaccctggcccccggccccagcgccggcccccccccccccggccccggcgaccccctgtag

SEQ ID NO: 4354 - DNA, 447 bp, synthetic construct
  misc_feature 1..447: note = source = /note="Description of Artificial Sequence: Synthetic coding sequence"
  source 1..447: mol_type = other DNA
atggccagaatccccaccgccgccctgggctgcatcagcctgctgtgcctgcagctgcccggcagcctgagcagaagcctgggcggcgaccccagacccgtgaagcccagagagccccccgccagaagccccagcagcagcctgcagcccagacaccccgcccccagacccgtggtgtggaagctgcacagagccctgcaggcccagagaggcgccggcctggcccccgtgatgggccagcccctgagagacggcggcagacagcacagcggccccagaagacacagcggccccagaagaacccaggcccagctgctgagagtgggctgcgtgctgggcacctgccaggtgcagaacctgagccacagactgtggcagctgatgggccccgccggcagacaggacagcgcccccgtggaccccagcagcccccacagctacggctag

SEQ ID NO: 4355 - DNA, 447 bp, synthetic construct; identical to SEQ ID NO: 4354
  misc_feature 1..447: note = source = /note="Description of Artificial Sequence: Synthetic coding sequence"
  source 1..447: mol_type = other DNA

SEQ ID NO: 4356 - DNA, 537 bp, synthetic construct
  misc_feature 1..537: note = source = /note="Description of Artificial Sequence: Synthetic coding sequence"
  source 1..537: mol_type = other DNA
atggacagagccgccagatgcagcggcgccagcagcctgcccctgctgctggccctggccctgggcctggtgatcctgcactgcgtggtggccgacggcaacagcaccagaagccccgagaccaacggcctgctgtgcggcgaccccgaggagaactgcgccgccaccaccacccagagcaagagaaagggccacttcagcagatgccccaagcagtacaagcactactgcatcaagggcagatgcagattcgtggtggccgagcagacccccagctgcgtgtgcgacgagggctacatcggcgccagatgcgagagagtggacctgttctacctgagaggcgacagaggccagatcctggtgatctgcctgatcgccgtgatggtggtgttcatcatcctggtgatcggcgtgtgcacctgctgccaccccctgagaaagagaagaaagagaaagaagaaggaggaggagatggagaccctgggcaaggacatcacccccatcaacgaggacatcgaggagaccaacatcgcctag

SEQ ID NO: 4357 - DNA, 1251 bp, synthetic construct
  misc_feature 1..1251: note = source = /note="Description of Artificial Sequence: Synthetic coding sequence"
  source 1..1251: mol_type = other DNA
atgagcatcagcctgagcagcctgatcctgctgcccatctggatcaacatggcccagatccagcagggcggccccgacgagaaggagaagaccaccgccctgaaggacctgctgagcagaatcgacctggacgagctgatgaagaaggacgagccccccctggacttccccgacaccctggagggcttcgagtacgccttcaacgagaagggccagctgagacacatcaagaccggcgagcccttcgtgttcaactacagagaggacctgcacagatggaaccagaagagatacgaggccctgggcgagatcatcaccaagtacgtgtacgagctgctggagaaggactgcaacctgaagaaggtgagcatccccgtggacgccaccgagagcgagcccaagagcttcatcttcatgagcgaggacgccctgaccaacccccagaagctgatggtgctgatccacggcagcggcgtggtgagagccggccagtgggccagaagactgatcatcaacgaggacctggacagcggcacccagatccccttcatcaagagagccgtggccgagggctacggcgtgatcgtgctgaaccccaacgagaactacatcgaggtggagaagcccaagatccacgtgcagagcagcagcgacagcagcgacgagcccgccgagaagagagagagaaaggacaaggtgagcaaggagaccaagaagagaagagacttctacgagaagtacagaaacccccagagagagaaggagatgatgcagctgtacatcagagagaacggcagccccgaggagcacgccatctacgtgtgggaccacttcatcgcccaggccgccgccgagaacgtgttcttcgtggcccacagctacggcggcctggccttcgtggagctgatgatccagagagaggccgacgtgaagaacaaggtgaccgccgtggccctgaccgacagcgtgcacaacgtgtggcaccaggaggccggcaagaccatcagagagtggatgagagagaactgctgcaactgggtgagcagcagcgagcccctggacaccagcgtggagagcatgctgcccgactgccccagagtgagcgccggcaccgacagacacgagctgaccagctggaagagcttccccagcatcttcaagttcttcaccgaggccagcgaggccaagaccagcagcctgaagcccgccgtgaccagaagaagccacagaatcaagcacgaggagctgtag

SEQ ID NO: 4358 - DNA, 840 bp, synthetic construct
  misc_feature 1..840: note = source = /note="Description of Artificial Sequence: Synthetic coding sequence"
  source 1..840: mol_type = other DNA
atgaagatcatcatcctgctgggcttcctgggcgccaccctgagcgcccccctgatcccccagagactgatgagcgccagcaacagcaacgagctgctgctgaacctgaacaacggccagctgctgcccctgcagctgcagggccccctgaacagctggatcccccccttcagcggcatcctgcagcagcagcagcaggcccagatccccggcctgagccagttcagcctgagcgccctggaccagttcgccggcctgctgcccaaccagatccccctgaccggcgaggccagcttcgcccagggcgcccaggccggccaggtggaccccctgcagctgcagacccccccccagacccagcccggccccagccacgtgatgccctacgtgttcagcttcaagatgccccaggagcagggccagatgttccagtactaccccgtgtacatggtgctgccctgggagcagccccagcagaccgtgcccagaagcccccagcagaccagacagcagcagtacgaggagcagatccccttctacgcccagttcggctacatcccccagctggccgagcccgccatcagcggcggccagcagcagctggccttcgacccccagctgggcaccgcccccgagatcgccgtgatgagcaccggcgaggagatcccctacctgcagaaggaggccatcaacttcagacacgacagcgccggcgtgttcatgcccagcaccagccccaagcccagcaccaccaacgtgttcaccagcgccgtggaccagaccatcacccccgagctgcccgaggagaaggacaagaccgacagcctgagagagccctag

SEQ ID NO: 4359 - DNA, 444 bp, synthetic construct
  misc_feature 1..444: note = source = /note="Description of Artificial Sequence: Synthetic coding sequence"
  source 1..444: mol_type = other DNA
atgggccccgaggccctgagcagcctgctgctgctgctgctggtggccagcggcgacgccgacatgaagggccacttcgaccccgccaagtgcagatacgccctgggcatgcaggacagaaccatccccgacagcgacatcagcgccagcagcagctggagcgacagcaccgccgccagacacagcagactggagagcagcgacggcgacggcgcctggtgccccgccggcagcgtgttccccaaggaggaggagtacctgcaggtggacctgcagagactgcacctggtggccctggtgggcacccagggcagacacgccggcggcctgggcaaggagttcagcagaagctacagactgagatacagcagagacggcagaagatggatgggctggaaggacagatggggccaggaggtgatcagcggcaacgaggacccctag

SEQ ID NO: 4360 - DNA, 618 bp, synthetic construct
  misc_feature 1..618: note = source = /note="Description of Artificial Sequence: Synthetic coding sequence"
  source 1..618: mol_type = other DNA
atgggcggccccgtgagagagcccgccctgagcgtggccctgtggctgagctggggcgccgccctgggcgccgtggcctgcgccatggccctgctgacccagcagaccgagctgcagagcctgagaagagaggtgagcagactgcagggcaccggcggccccagccagaacggcgagggctacccctggcagagcctgcccgagcagcacagcgtgctgcacctggtgcccatcaacgccaccagcaaggacgacagcgacgtgaccgaggtgatgtggcagcccgccctgagaagaggcagaggcctgcaggcccagggctacggcgtgagaatccaggacgccggcgtgtacctgctgtacagccaggtgctgttccaggacgtgaccttcaccatgggccaggtggtgagcagagagggccagggcagacaggagaccctgttcagatgcatcagaagcatgcccagccaccccgacagagcctacaacagctgctacagcgccggcgtgttccacctgcaccagggcgacatcctgagcgtgatcatccccagagccagagccaagctgaacctgagcccccacggcaccttcctgggcttcgtgaagctgtag

SEQ ID NO: 4361 - DNA, 744 bp, synthetic construct
  misc_feature 1..744: note = source = /note="Description of Artificial Sequence: Synthetic coding sequence"
  source 1..744: mol_type = other DNA
atgcccgccagcagccccttcctgctggcccccaagggcccccccggcaacatgggcggccccgtgagagagcccgccctgagcgtggccctgtggctgagctggggcgccgccctgggcgccgtggcctgcgccatggccctgctgacccagcagaccgagctgcagagcctgagaagagaggtgagcagactgcagggcaccggcggccccagccagaacggcgagggctacccctggcagagcctgcccgagcagagcagcgacgccctggaggcctgggagaacggcgagagaagcagaaagagaagagccgtgctgacccagaagcagaagaagcagcacagcgtgctgcacctggtgcccatcaacgccaccagcaaggacgacagcgacgtgaccgaggtgatgtggcagcccgccctgagaagaggcagaggcctgcaggcccagggctacggcgtgagaatccaggacgccggcgtgtacctgctgtacagccaggtgctgttccaggacgtgaccttcaccatgggccaggtggtgagcagagagggccagggcagacaggagaccctgttcagatgcatcagaagcatgcccagccaccccgacagagcctacaacagctgctacagcgccggcgtgttccacctgcaccagggcgacatcctgagcgtgatcatccccagagccagagccaagctgaacctgagcccccacggcaccttcctgggcctgtag

SEQ ID NO: 4362 - DNA, 39 bp, synthetic construct
  misc_feature 1..39: note = source = /note="Description of Artificial Sequence: Synthetic coding sequence"
  source 1..39: mol_type = other DNA
atgggcaagagcgagagcctgcagagcctgcagagatag

SEQ ID NO: 4363 - DNA, 4266 bp, synthetic construct
  misc_feature 1..4266: note = source = /note="Description of Artificial Sequence: Synthetic coding sequence"
  source 1..4266: mol_type = other DNA
atgatgctgccccagaacagctggcacatcgacttcggcagatgctgctgccaccagaacctgttcagcgccgtggtgacctgcatcctgctgctgaacagctgcttcctgatcagcagcttcaacggcaccgacctggagctgagactggtgaacggcgacggcccctgcagcggcaccgtggaggtgaagttccagggccagtggggcaccgtgtgcgacgacggctggaacaccaccgccagcaccgtggtgtgcaagcagctgggctgccccttcagcttcgccatgttcagattcggccaggccgtgaccagacacggcaagatctggctggacgacgtgagctgctacggcaacgagagcgccctgtgggagtgccagcacagagagtggggcagccacaactgctaccacggcgaggacgtgggcgtgaactgctacggcgaggccaacctgggcctgagactggtggacggcaacaacagctgcagcggcagagtggaggtgaagttccaggagagatggggcaccatctgcgacgacggctggaacctgaacaccgccgccgtggtgtgcagacagctgggctgccccagcagcttcatcagcagcggcgtggtgaacagccccgccgtgctgagacccatctggctggacgacatcctgtgccagggcaacgagctggccctgtggaactgcagacacagaggctggggcaaccacgactgcagccacaacgaggacgtgaccctgacctgctacgacagcagcgacctggagctgagactggtgggcggcaccaacagatgcatgggcagagtggagctgaagatccagggcagatggggcaccgtgtgccaccacaagtggaacaacgccgccgccgacgtggtgtgcaagcagctgggctgcggcaccgccctgcacttcgccggcctgccccacctgcagagcggcagcgacgtggtgtggctggacggcgtgagctgcagcggcaacgagagcttcctgtgggactgcagacacagcggcaccgtgaacttcgactgcctgcaccagaacgacgtgagcgtgatctgcagcgacggcgccgacctggagctgagactggccgacggcagcaacaactgcagcggcagagtggaggtgagaatccacgagcagtggtggaccatctgcgaccagaactggaagaacgagcaggccctggtggtgtgcaagcagctgggctgccccttcagcgtgttcggcagcagaagagccaagcccagcaacgaggccagagacatctggatcaacagcatcagctgcaccggcaacgagagcgccctgtgggactgcacctacgacggcaaggccaagagaacctgcttcagaagaagcgacgccggcgtgatctgcagcgacaaggccgacctggacctgagactggtgggcgcccacagcccctgctacggcagactggaggtgaagtaccagggcgagtggggcaccgtgtgccacgacagatggagcaccagaaacgccgccgtggtgtgcaagcagctgggctgcggcaagcccctgcacgtgttcggcatgacctacttcaaggaggccagcggccccatctggctggacgacgtgagctgcatcggcaacgagagcaacatctgggactgcgagcacagcggctggggcaagcacaactgcgtgcacagagaggacgtgatcgtgacctgcagcggcgacgccacctggggcctgagactggtgggcggcagcaacagatgcagcggcagactggaggtgtacttccagggcagatggggcaccgtgtgcgacgacggctggaacagcaaggccgccgccgtggtgtgcagccagctggactgccccagcagcatcatcggcatgggcctgggcaacgccagcaccggctacggcaagatctggctggacgacgtgagctgcgacggcgacgagagcgacctgtggagctgcagaaacagcggctggggcaacaacgactgcagccacagcgaggacgtgggcgtgatctgcagcgacgccagcgacatggagctgagactggtgggcggcagcagcagatgcgccggcaaggtggaggtgaacgtgcagggcgccgtgggcatcctgtgcgccaacggctggggcatgaacatcgccgaggtggtgtgcagacagctggagtgcggcagcgccatcagagtgagcagagagccccacttcaccgagagaaccctgcacatcctgatgagcaacagcggctgcaccggcggcgaggccagcctgtgggactgcatcagatgggagtggaagcagaccgcctgccacctgaacatggaggccagcctgatctgcagcgcccacagacagcccagactggtgggcgccgacatgccctgcagcggcagagtggaggtgaagcacgccgacacctggagaagcgtgtgcgacagcgacttcagcctgcacgccgccaacgtgctgtgcagagagctgaactgcggcgacgccatcagcctgagcgtgggcgaccacttcggcaagggcaacggcctgacctgggccgagaagttccagtgcgagggcagcgagacccacctggccctgtgccccatcgtgcagcaccccgaggacacctgcatccacagcagagaggtgggcgtggtgtgcagcagatacaccgacgtgagactggtgaacggcaagagccagtgcgacggccaggtggagatcaacgtgctgggccactggggcagcctgtgcgacacccactgggaccccgaggacgccagagtgctgtgcagacagctgagctgcggcaccgccctgagcaccaccggcggcaagtacatcggcgagagaagcgtgagagtgtggggccacagattccactgcctgggcaacgagagcctgctggacaactgccagatgaccgtgctgggcgcccccccctgcatccacggcaacaccgtgagcgtgatctgcaccggcagcctgacccagcccctgttcccctgcctggccaacgtgagcgacccctacctgagcgccgtgcccgagggcagcgccctgatctgcctggaggacaagagactgagactggtggacggcgacagcagatgcgccggcagagtggagatctaccacgacggcttctggggcaccatctgcgacgacggctgggacctgagcgacgcccacgtggtgtgccagaagctgggctgcggcgtggccttcaacgccaccgtgagcgcccacttcggcgagggcagcggccccatctggctggacgacctgaactgcaccggcatggagagccacctgtggcagtgccccagcagaggctggggccagcacgactgcagacacaaggaggacgccggcgtgatctgcagcgagttcaccgccctgagactgtacagcgagaccgagaccgagagctgcgccggcagactggaggtgttctacaacggcacctggggcagcgtgggcagaagaaacatcaccaccgccatcgccggcatcgtgtgcagacagctgggctgcggcgagaacggcgtggtgagcctggcccccctgagcaagaccggcagcggcttcatgtgggtggacgacatccagtgccccaagacccacatcagcatctggcagtgcctgagcgccccctgggagagaagaatcagcagccccgccgaggagacctggatcacctgcgaggacagaatcagagtgagaggcggcgacaccgagtgcagcggcagagtggagatctggcacgccggcagctggggcaccgtgtgcgacgacagctgggacctggccgaggccgaggtggtgtgccagcagctgggctgcggcagcgccctggccgccctgagagacgccagcttcggccagggcaccggcaccatctggctggacgacatgagatgcaagggcaacgagagcttcctgtgggactgccacgccaagccctggggccagagcgactgcggccacaaggaggacgccggcgtgagatgcagcggccagagcctgaagagcctgaacgccagcagcggccacctggccctgatcctgagcagcatcttcggcctgctgctgctggtgctgttcatcctgttcctgacctggtgcagagtgcagaagcagaagcacctgcccctgagagacgacacccccaaccacggctgcgaggacgccagcgacaccagcctgctgggcgtgctgcccgccagcgaggccaccaagtag

SEQ ID NO: 4364 - DNA, 1410 bp, synthetic construct; identical to SEQ ID NO: 3555
  misc_feature 1..1410: note = source = /note="Description of Artificial Sequence: Synthetic coding sequence"
  source 1..1410: mol_type = other DNA

SEQ ID NO: 4365 - DNA, 837 bp, synthetic construct; identical to SEQ ID NO: 3875
  misc_feature 1..837: note = source = /note="Description of Artificial Sequence: Synthetic coding sequence"
  source 1..837: mol_type = other DNA

SEQ ID NO: 4366 - DNA, 1128 bp, synthetic construct
  misc_feature 1..1128: note = source = /note="Description of Artificial Sequence: Synthetic coding sequence"
  source 1..1128: mol_type = other DNA
atggagttcgagatcaccttcagacccgacagcggcgacggcgtgctgctgtacagctacgacaccggcagcaaggacttcctgagcatcaacctggccggcggccacgtggagttcagattcgactgcggcagcggcaccggcgtgctgagaagcgaggaccccctgaccctgggcaactggcacgagctgagagtgagcagaaccgccaagaacggcatcctgcaggtggacaagcagaagatcgtggagggcatggccgagggcggcttcacccagatcaagtgcaacaccgacatcttcatcggcggcgtgcccaactacgacgacgtgaagaagaacagcggcgtgctgaagcccttcagcggcagcatccagaagatcatcctgaacgacagaaccatccacgtgaagcacgacttcaccagcggcgtgaacgtggagaacgccgcccacccctgcgtgagagccccctgcgcccacggcggcagctgcagacccagaaaggagggctacgactgcgactgccccctgggcttcgagggcctgcactgccagaaggccatcatcgaggccatcgagatcccccagttcatcggcagaagctacctgacctacgacaaccccgacatcctgaagagagtgagcggcagcagaagcaacgtgttcatgagattcaagaccaccgccaaggacggcctgctgctgtggagaggcgacagccccatgagacccaacagcgacttcatcagcctgggcctgagagacggcgccctggtgttcagctacaacctgggcagcggcgtggccagcatcatggtgaacggcagcttcaacgacggcagatggcacagagtgaaggccgtgagagacggccagagcggcaagatcaccgtggacgactacggcgccagaaccggcaagagccccggcatgatgagacagctgaacatcaacggcgccctgtacgtgggcggcatgaaggagatcgccctgcacaccaacagacagtacatgagaggcctggtgggctgcatcagccacttcaccctgagcaccgactaccacatcagcctggtggaggacgccgtggacggcaagaacatcaacacctgcggcgccaagtag

SEQ ID NO: 4367 - DNA, 459 bp, synthetic construct
  misc_feature 1..459: note = source = /note="Description of Artificial Sequence: Synthetic coding sequence"
  source 1..459: mol_type = other DNA
atgagattcaagaccaccgccaaggacggcctgctgctgtggagaggcgacagccccatgagacccaacagcgacttcatcagcctgggcctgagagacggcgccctggtgttcagctacaacctgggcagcggcgtggccagcatcatggtgaacggcagcttcaacgacggcagatggcacagagtgaaggccgtgagagacggccagagcggcaagatcaccgtggacgactacggcgccagaaccggcaagagccccggcatgatgagacagctgaacatcaacggcgccctgtacgtgggcggcatgaaggagatcgccctgcacaccaacagacagtacatgagaggcctggtgggctgcatcagccacttcaccctgagcaccgactaccacatcagcctggtggaggacgccgtggacggcaagaacatcaacacctgcggcgccaagtag

SEQ ID NO: 4368 - DNA, 1050 bp, synthetic construct
  misc_feature 1..1050: note = source = /note="Description of Artificial Sequence: Synthetic coding sequence"
  source 1..1050: mol_type = other DNA
atgaccgccctgcccggccccctgtggctgctgggcctggccctgtgcgccctgggcggcggcggccccggcctgagacccccccccggctgcccccagagaagactgggcgccagagagagaagagacgtgcagagagagatcctggccgtgctgggcctgcccggcagacccagacccagagccccccccgccgccagcagactgcccgccagcgcccccctgttcatgctggacctgtaccacgccatggccggcgacgacgacgaggacggcgcccccgccgagagaagactgggcagagccgacctggtgatgagcttcgtgaacatggtggagagagacagagccctgggccaccaggagccccactggaaggagttcagattcgacctgacccagatccccgccggcgaggccgtgaccgccgccgagttcagaatctacaaggtgcccagcatccacctgctgaacagaaccctgcacgtgagcatgttccaggtggtgcaggagcagagcaacagagagagcgacctgttcttcctggacctgcagaccctgagagccggcgacgagggctggctggtgctggacgtgaccgccgccagcgactgctggctgctgaagagacacaaggacctgggcctgagactgtacgtggagaccgaggacggcgagacctggaccggctggggctggaccaaggacagcagactgcagatgtggaagctgagactgagcagaaccccctgggtgctgagcctgcacgcccccggccccgcccaggcccccgccgagagacccctgctgtgcctgctgcagggccactgccccgccagccccagccccatcagaacccccagagccgtgagacccctgagaagaagacagcccaagaagagcaacgagctgccccaggccaacagactgcccggcatcttcgacgacgtgcacggcagccacggcagacaggtgtgcagaagacacgagctgtacgtgagcttccaggacctgggctggctggtgatcgccgacagcagctgcttctag

SEQ ID NO: 4369 - DNA, 1617 bp, synthetic construct; identical to SEQ ID NO: 3701
  misc_feature 1..1617: note = source = /note="Description of Artificial Sequence: Synthetic coding sequence"
  source 1..1617: mol_type = other DNA

SEQ ID NO: 4370 - DNA, 630 bp, synthetic construct
  misc_feature 1..630: note = source = /note="Description of Artificial Sequence: Synthetic coding sequence"
  source 1..630: mol_type = other DNA
atgagcttcagcgccaccatcctgttcagcccccccagcggcagcgaggccagatgctgctgctgcgcctgcaagagcgagaccaacggcggcaacaccggcagccagggcggcaaccccccccccagcacccccatcaccgtgaccggccacggcctggccgtgcagagcagcgagcagctgctgcacgtgatctaccagagagtggacaaggccgtgggcctggccgaggccgccctgggcctggccagagccaacaacgagctgctgaagagactgcaggaggaggtgggcgacctgagacagggcaaggtgagcatccccgacgaggacggcgagagcagagcccacagcagcccccccgaggagcccggccccctgaaggagagccccggcgaggccttcaaggccctgagcgccgtggaggaggagtgcgacagcgtgggcagcggcgtgcaggtggtgatcgaggagctgagacagctgggcgccgccagcgtgggccccggccccctgggcttccccgccacccagagagacatgagactgcccggctgcaccctggccgccagcgaggccgcccccctgctgaaccccctggtggacgactacgtggccagcgagggctag

SEQ ID NO: 4371 - DNA, 1617 bp, synthetic construct; identical to SEQ ID NO: 3701
  misc_feature 1..1617: note = source = /note="Description of Artificial Sequence: Synthetic coding sequence"
  source 1..1617: mol_type = other DNA

SEQ ID NO: 4372 - DNA, 1524 bp, synthetic construct; identical to SEQ ID NO: 3707
  misc_feature 1..1524: note = source = /note="Description of Artificial Sequence: Synthetic coding sequence"
  source 1..1524: mol_type = other DNA

SEQ ID NO: 4373 - DNA, 753 bp, synthetic construct
  misc_feature 1..753: note = source = /note="Description of Artificial Sequence: Synthetic coding sequence"
  source 1..753: mol_type = other DNA
atggccagcgagagactgcccaacagacccgcctgcctgctggtggccagcggcgccgccgagggcgtgagcgcccagagcttcctgcactgcttcaccatggccagcaccgccttcaacctgcaggtggccacccccggcggcaaggccatggagttcgtggacgtgaccgagagcaacgccagatgggtgcaggacttcagactgaaggcctacgccagccccgccaagctggagagcatcgacggcgccagataccacgccctgctgatccccagctgccccggcgccctgaccgacctggccagcagcggcagcctggccagaatcctgcagcacttccacagcgagagcaagcccatctgcgccgtgggccacggcgtggccgccctgtgctgcgccaccaacgaggacagaagctgggtgttcgacagctacagcctgaccggccccagcgtgtgcgagctggtgagagcccccggcttcgccagactgcccctggtggtggaggacttcgtgaaggacagcggcgcctgcttcagcggcgccgccgccagctgccccaaggccgacagacactggcagcacttccccgtggaggagatcttcctggcctgcggcttcaaggtggccggcctgggcgccgcccccggctggggcagaggcggcaagcaggaggacagaccccccgaggagcagagaagagccggcgaggacttccccatctaccagtgcgtgttcatctacccctag

SEQ ID NO: 4374 - DNA, 1386 bp, synthetic construct; identical to SEQ ID NO: 3950
  misc_feature 1..1386: note = source = /note="Description of Artificial Sequence: Synthetic coding sequence"
  source 1..1386: mol_type = other DNA

SEQ ID NO: 4375 - DNA, 1386 bp, synthetic construct; identical to SEQ ID NO: 3950
  misc_feature 1..1386: note = source = /note="Description of Artificial Sequence: Synthetic coding sequence"
  source 1..1386: mol_type = other DNA

SEQ ID NO: 4376 - DNA, 1386 bp, synthetic construct; identical to SEQ ID NO: 3950
  misc_feature 1..1386: note = source = /note="Description of Artificial Sequence: Synthetic coding sequence"
  source 1..1386: mol_type = other DNA

SEQ ID NO: 4377 - DNA, 1452 bp, synthetic construct
  misc_feature 1..1452: note = source = /note="Description of Artificial Sequence: Synthetic coding sequence"
  source 1..1452: mol_type = other DNA
atgatcaccgcccactgcagcctggacctgctgggcagcgtggccgtgctgtgcgtgtgcgacctgagccccgcccagtgcgacatcaactgctgctgcgaccccgactgcagcagcgtggacttcagcgtgttcagcgcctgcagcgtgcccgtggtgaccggcgacagccagttctgcagccagaaggccgtgatctacagcctgaacttcaccgccaaccccccccagagagtgttcgagctggtggaccagatcaaccccagcatcttctgcatccacatcaccaactacaagcccgccctgagcttcatcaaccccgaggtgcccgacgagaacaacttcgacaccctgatgaagaccagcgacggcttcaccctgaacgccgagagctacgtgagcttcaccaccaagctggacatccccaccgccgccaagtacgagtacggcgtgcccctgcagaccagcgacagcttcctgagattccccagcagcctgaccagcagcctgtgcaccgacaacaaccccgccgccttcctggtgaaccaggccgtgaagtgcaccagaaagatcaacctggagcagtgcgaggagatcgaggccctgagcatggccttctacagcagccccgagatcctgagagtgcccgacagcagaaagaaggtgcccatcaccgtgcagagcatcgtgatccagagcctgaacaagaccctgaccagaagagaggacaccgacgtgctgcagcccaccctggtgaacgccggccacttcagcctgtgcgtgaacgtggtgctggaggtgaagtacagcctgacctacaccgacgccggcgaggtgaccaaggccgacctgagcttcgtgctgggcaccgtgagcagcgtggtggtgcccctgcagcagaagttcgagatccacttcctgcaggagaacacccagcccgtgcccctgagcggcaaccccggctacgtggtgggcctgcccctggccgccggcttccagccccacaagaccggcgccctgccctgccagctggtggcccagaaggtgaagagcctgctgtggggccagggcttccccgactacgtggcccccttcggcaacagccaggcccaggacatgctggactgggtgcccatccacttcatcacccagagcttcaacagaaagcacttcgtgctgcaggacagctgccagctgcccggcgccctggtgatcgaggtgaagtggaccaagtacggcagcctgctgaacccccaggccaagatcgtgaacgtgaccgccaacctgatcagcagcagcttccccgaggccaacagcggcaacgagagaaccatcctgatcagcaccgccgtgaccttcgtggacgtgagcgcccccgccgaggccggcttcagagccccccccgccatcaacgccagactgcccttcaacttcttcttccccttcgtgtag

SEQ ID NO: 4378 - DNA, 1596 bp, synthetic construct
  misc_feature 1..1596: note = source = /note="Description of Artificial Sequence: Synthetic coding sequence"
  source 1..1596: mol_type = other DNA
atgtgccagctgctggagagcaccgtgatccagccccagggcgacagccccgtggccgtgctgtgcgtgtgcgacctgagccccgcccagtgcgacatcaactgctgctgcgaccccgactgcagcagcgtggacttcagcgtgttcagcgcctgcagcgtgcccgtggtgaccggcgacagccagttctgcagccagaaggccgtgatctacagcctgaacttcaccgccaaccccccccagagagtgttcgagctggtggaccagatcaaccccagcatcttctgcatccacatcaccaactacaagcccgccctgagcttcatcaaccccgaggtgcccgacgagaacaacttcgacaccctgatgaagaccagcgacggcttcaccctgaacgccgagagctacgtgagcttcaccaccaagctggacatccccaccgccgccaagtacgagtacggcgtgcccctgcagaccagcgacagcttcctgagattccccagcagcctgaccagcagcctgtgcaccgacaacaaccccgccgccttcctggtgaaccaggccgtgaagtgcaccagaaagatcaacctggagcagtgcgaggagatcgaggccctgagcatggccttctacagcagccccgagatcctgagagtgcccgacagcagaaagaaggtgcccatcaccgtgcagagcatcgtgatccagagcctgaacaagaccctgaccagaagagaggacaccgacgtgctgcagcccaccctggtgaacgccggccacttcagcctgtgcgtgaacgtggtgctggaggtgaagtacagcctgacctacaccgacgccggcgaggtgaccaaggccgacctgagcttcgtgctgggcaccgtgagcagcgtggtggtgcccctgcagcagaagttcgagatccacttcctgcaggagaacacccagcccgtgcccctgagcggcaaccccggctacgtggtgggcctgcccctggccgccggcttccagccccacaagatgagcggcatcatccagaccaccaacagatacggccagctgaccatcctgcacagcaccaccgagcaggactgcctggccctggagggcgtgagaacccccgtgctgttcggctacaccatgcagagcggctgcaagctgagactgaccggcgccctgccctgccagctggtggcccagaaggtgaagagcctgctgtggggccagggcttccccgactacgtggcccccttcggcaacagccaggcccaggacatgctggactgggtgcccatccacttcatcacccagagcttcaacagaaaggacagctgccagctgcccggcgccctggtgatcgaggtgaagtggaccaagtacggcagcctgctgaacccccaggccaagatcgtgaacgtgaccgccaacctgatcagcagcagcttccccgaggccaacagcggcaacgagagaaccatcctgatcagcaccgccgtgaccttcgtggacgtgagcgcccccgccgaggccggcttcagagccccccccgccatcaacgccagactgcccttcaacttcttcttccccttcgtgtag

SEQ ID NO: 4379 - DNA, 1722 bp, synthetic construct
  misc_feature 1..1722: note = source = /note="Description of Artificial Sequence: Synthetic coding sequence"
  source 1..1722: mol_type = other DNA
atgagacccagaggcctgccccccctgctggtggtgctgctgggctgctgggccagcgtgagcgcccagaccgacgccacccccgccgtgaccaccgagggcctgaacagcaccgaggccgccctggccaccttcggcaccttccccagcaccagaccccccggcacccccagagcccccggccccagcagcggccccagacccacccccgtgaccgacgtggccgtgctgtgcgtgtgcgacctgagccccgcccagtgcgacatcaactgctgctgcgaccccgactgcagcagcgtggacttcagcgtgttcagcgcctgcagcgtgcccgtggtgaccggcgacagccagttctgcagccagaaggccgtgatctacagcctgaacttcaccgccaaccccccccagagagtgttcgagctggtggaccagatcaaccccagcatcttctgcatccacatcaccaactacaagcccgccctgagcttcatcaaccccgaggtgcccgacgagaacaacttcgacaccctgatgaagaccagcgacggcttcaccctgaacgccgagagctacgtgagcttcaccaccaagctggacatccccaccgccgccaagtacgagtacggcgtgcccctgcagaccagcgacagcttcctgagattccccagcagcctgaccagcagcctgtgcaccgacaacaaccccgccggccaggcctactggttcacccccgtgatccccgccctgtgggaggccgaggccagaggcagcctggaggtgcccgacagcagaaagaaggtgcccatcaccgtgcagagcatcgtgatccagagcctgaacaagaccctgaccagaagagaggacaccgacgtgctgcagcccaccctggtgaacgccggccacttcagcctgtgcgtgaacgtggtgctggaggtgaagtacagcctgacctacaccgacgccggcgaggtgaccaaggccgacctgagcttcgtgctgggcaccgtgagcagcgtggtggtgcccctgcagcagaagttcgagatccacttcctgcaggagaacacccagcccgtgcccctgagcggcaaccccggctacgtggtgggcctgcccctggccgccggcttccagccccacaagggcagcggcatcatccagaccaccaacagatacggccagctgaccatcctgcacagcaccaccgagcaggactgcctggccctggagggcgtgagaacccccgtgctgttcggctacaccatgcagagcggctgcaagctgagactgaccggcgccctgccctgccagctggtggcccagaaggtgaagagcctgctgtggggccagggcttccccgactacgtggcccccttcggcaacagccaggcccaggacatgctggactgggtgcccatccacttcatcacccagagcttcaacagaaaggacagctgccagctgcccggcgccctggtgatcgaggtgaagtggaccaagtacggcagcctgctgaacccccaggccaagatcgtgaacgtgaccgccaacctgatcagcagcagcttccccgaggccaacagcggcaacgagagaaccatcctgatcagcaccgccgtgaccttcgtggacgtgagcgcccccgccgaggccggcttcagagccccccccgccatcaacgccagactgcccttcaacttcttcttccccttcgtgtag

SEQ ID NO: 4380 - DNA, 1230 bp, synthetic construct
  misc_feature 1..1230: note = source = /note="Description of Artificial Sequence: Synthetic coding sequence"
  source 1..1230: mol_type = other DNA
atgaagaccagcgacggcttcaccctgaacgccgagagctacgtgagcttcaccaccaagctggacatccccaccgccgccaagtacgagtacggcgtgcccctgcagaccagcgacagcttcctgagattccccagcagcctgaccagcagcctgtgcaccgacaacaaccccgccgccttcctggtgaaccaggccgtgaagtgcaccagaaagatcaacctggagcagtgcgaggagatcgaggccctgagcatggccttctacagcagccccgagatcctgagagtgcccgacagcagaaagaaggtgcccatcaccgtgcagagcatcgtgatccagagcctgaacaagaccctgaccagaagagaggacaccgacgtgctgcagcccaccctggtgaacgccggccacttcagcctgtgcgtgaacgtggtgctggaggtgaagtacagcctgacctacaccgacgccggcgaggtgaccaaggccgacctgagcttcgtgctgggcaccgtgagcagcgtggtggtgcccctgcagcagaagttcgagatccacttcctgcaggagaacacccagcccgtgcccctgagcggcaaccccggctacgtggtgggcctgcccctggccgccggcttccagccccacaagggcagcggcatcatccagaccaccaacagatacggccagctgaccatcctgcacagcaccaccgagcaggactgcctggccctggagggcgtgagaacccccgtgctgttcggctacaccatgcagagcggctgcaagctgagactgaccggcgccctgccctgccagctggtggcccagaaggtgaagagcctgctgtggggccagggcttccccgactacgtggcccccttcggcaacagccaggcccaggacatgctggactgggtgcccatccacttcatcacccagagcttcaacagaaaggacagctgccagctgcccggcgccctggtgatcgaggtgaagtggaccaagtacggcagcctgctgaacccccaggccaagatcgtgaacgtgaccgccaacctgatcagcagcagcttccccgaggccaacagcggcaacgagagaaccatcctgatcagcaccgccgtgaccttcgtggacgtgagcgcccccgccgaggccggcttcagagccccccccgccatcaacgccagactgcccttcaacttcttcttccccttcgtgtag

SEQ ID NO: 4381 - DNA, 1779 bp, synthetic construct
  misc_feature 1..1779: note = source = /note="Description of Artificial Sequence: Synthetic coding sequence"
  source 1..1779: mol_type = other DNA
atgagacccagaggcctgccccccctgctggtggtgctgctgggctgctgggccagcgtgagcgcccagaccgacgccacccccgccgtgaccaccgagggcctgaacagcaccgaggccgccctggccaccttcggcaccttccccagcaccagaccccccggcacccccagagcccccggccccagcagcggccccagacccacccccgtgaccgacgtggccgtgctgtgcgtgtgcgacctgagccccgcccagtgcgacatcaactgctgctgcgaccccgactgcagcagcgtggacttcagcgtgttcagcgcctgcagcgtgcccgtggtgaccggcgacagccagttctgcagccagaaggccgtgatctacagcctgaacttcaccgccaaccccccccagagagtgttcgagctggtggaccagatcaaccccagcatcttctgcatccacatcaccaactacaagcccgccctgagcttcatcaaccccgaggtgcccgacgagaacaacttcgacaccctgatgaagaccagcgacggcttcaccctgaacgccgagagctacgtgagcttcaccaccaagctggacatccccaccgccgccaagtacgagtacggcgtgcccctgcagaccagcgacagcttcctgagattccccagcagcctgaccagcagcctgtgcaccgacaacaaccccgccgccttcctggtgaaccaggccgtgaagtgcaccagaaagatcaacctggagcagtgcgaggagatcgaggccctgagcatggccttctacagcagccccgagatcctgagagtgcccgacagcagaaagaaggtgcccatcaccgtgcagagcatcgtgatccagagcctgaacaagaccctgaccagaagagaggacaccgacgtgctgcagcccaccctggtgaacgccggccacttcagcctgtgcgtgaacgtggtgctggaggtgaagtacagcctgacctacaccgacgccggcgaggtgaccaaggccgacctgagcttcgtgctgggcaccgtgagcagcgtggtggtgcccctgcagcagaagttcgagatccacttcctgcaggagaacacccagcccgtgcccctgagcggcaaccccggctacgtggtgggcctgcccctggccgccggcttccagccccacaagggcagcggcatcatccagaccaccaacagatacggccagctgaccatcctgcacagcaccaccgagcaggactgcctggccctggagggcgtgagaacccccgtgctgttcggctacaccatgcagagcggctgcaagctgagactgaccggcgccctgccctgccagctggtggcccagaaggtgaagagcctgctgtggggccagggcttccccgactacgtggcccccttcggcaacagccaggcccaggacatgctggactgggtgcccatccacttcatcacccagagcttcaacagaaagcacttcgtgctgcaggacagctgccagctgcccggcgccctggtgatcgaggtgaagtggaccaagtacggcagcctgctgaacccccaggccaagatcgtgaacgtgaccgccaacctgatcagcagcagcttccccgaggccaacagcggcaacgagagaaccatcctgatcagcaccgccgtgaccttcgtggacgtgagcgcccccgccgaggccggcttcagagccccccccgccatcaacgccagactgcccttcaacttcttcttccccttcgtgtag

SEQ ID NO: 4382 - DNA, 552 bp, synthetic construct
  misc_feature 1..552: note = source = /note="Description of Artificial Sequence: Synthetic coding sequence"
  source 1..552: mol_type = other DNA
atgatcttcctgctgctgatgctgagcctggagctgcagctgcaccagatcgccgccctgttcaccgtgaccgtgcccaaggagctgtacatcatcgagcacggcagcaacgtgaccctggagtgcaacttcgacaccggcagccacgtgaacctgggcgccatcaccgccagcctgcagaaggtggagaacgacaccagcccccacagagagagagccaccctgctggaggagcagctgcccctgggcaaggccagcttccacatcccccaggtgcaggtgagagacgagggccagtaccagtgcatcatcatctacggcgtggcctgggactacaagtacctgaccctgaaggtgaagggccagatggagcccagaacccaccccacctggctgctgcacatcttcatccccttctgcatcatcgccttcatcttcatcgccaccgtgatcgccctgagaaagcagctgtgccagaagctgtacagcagcaaggacaccaccaagagacccgtgaccaccaccaagagagaggtgaacagcgccatctag

SEQ ID NO: 4383 - DNA, 822 bp, synthetic construct
  misc_feature 1..822: note = source = /note="Description of Artificial Sequence: Synthetic coding sequence"
  source 1..822: mol_type = other DNA
atgatcttcctgctgctgatgctgagcctggagctgcagctgcaccagatcgccgccctgttcaccgtgaccgtgcccaaggagctgtacatcatcgagcacggcagcaacgtgaccctggagtgcaacttcgacaccggcagccacgtgaacctgggcgccatcaccgccagcctgcagaaggtggagaacgacaccagcccccacagagagagagccaccctgctggaggagcagctgcccctgggcaaggccagcttccacatcccccaggtgcaggtgagagacgagggccagtaccagtgcatcatcatctacggcgtggcctgggactacaagtacctgaccctgaaggtgaaggccagctacagaaagatcaacacccacatcctgaaggtgcccgagaccgacgaggtggagctgacctgccaggccaccggctaccccctggccgaggtgagctggcccaacgtgagcgtgcccgccaacaccagccacagcagaacccccgagggcctgtaccaggtgaccagcgtgctgagactgaagcccccccccggcagaaacttcagctgcgtgttctggaacacccacgtgagagagctgaccctggccagcatcgacctgcagagccagatggagcccagaacccaccccacctggctgctgcacatcttcatccccttctgcatcatcgccttcatcttcatcgccaccgtgatcgccctgagaaagcagctgtgccagaagctgtacagcagcaaggacaccaccaagagacccgtgaccaccaccaagagagaggtgaacagcgccatctag

SEQ ID NO: 4384 - DNA, 372 bp, synthetic construct
  misc_feature 1..372: note = source = /note="Description of Artificial Sequence: Synthetic coding sequence"
  source 1..372: mol_type = other DNA
ctgggcgacagaagaggcagaagcagcggcgccagagccgccgccgtgggcagcaccggcgagagactggagatggaggaggacatcctgcagctgcaggccgaggccaccgccgaggtgctgggcgaggtggcccaggcccagaaggtgctgagagacagcgtgcagagactggaggtgcagctgagaagcgcctggctgggccccgcctacagagagttcgaggtgctgaaggcccacgccgacaagcagagccacatcctgtgggccctgaccggccacgtgcagagacagagaagagagatggtggcccagcagcacagactgagacagatccaggagagactgcacaccgccgccctgcccgcctag

SEQ ID NO: 4385 - DNA, 345 bp, synthetic construct
  misc_feature 1..345: note = source = /note="Description of Artificial Sequence: Synthetic coding sequence"
  source 1..345: mol_type = other DNA
atggccagcttcaagctggccgacagcgtgtgggaggacagcctgagcaagagacagagaaaccagggcagaatgaagaccctgcccgtgctggtgctgagcctgaccctgctgaccgtgttcagcgagaccagccccatcctgaccgagaagcaggccaagcagctgctgagaagcagaagacaggacagacccagcaagcccggcttccccgacgagcccatgagagagtacatgcaccacctgctggccctggagcacagagccgaggagcagttcctggagcactggctgaacccccactgcaagccccactgcgacagaaacagaatccaccccgtgtag

SEQ ID NO: 4386 - DNA, 345 bp, synthetic construct; identical to SEQ ID NO: 4385
  misc_feature 1..345: note = source = /note="Description of Artificial Sequence: Synthetic coding sequence"
  source 1..345: mol_type = other DNA

SEQ ID NO: 4387 - DNA, 444 bp, synthetic construct
  misc_feature 1..444: note = source = /note="Description of Artificial Sequence: Synthetic coding sequence"
  source 1..444: mol_type = other DNA
atggccctgcagagaacccacagcctgctgctgctgctgctgctgaccctgctgggcctgggcctggtgcagcccagctacggccaggacggcatgtaccagagattcctgagacagcacgtgcaccccgaggagaccggcggcagcgacagatactgcaacctgatgatgcagagaagaaagatgaccctgtaccactgcaagagattcaacaccttcatccacgaggacatctggaacatcagaagcatctgcagcaccaccaacatccagtgcaagaacggcaagatgaactgccacgagggcgtggtgaaggtgaccgactgcagagacaccggcagcagcagagcccccaactgcagatacagagccatcgccagcaccagaagagtggtgatcgcctgcgagggcaacccccaggtgcccgtgcacttcgacggctag

SEQ ID NO: 4388 - DNA, 1302 bp, synthetic construct
  misc_feature 1..1302: note = source = /note="Description of Artificial Sequence: Synthetic coding sequence"
  source 1..1302: mol_type = other DNA
atggagccccagctgggccccgaggccgccgccctgagacccggctggctggccctgctgctgtgggtgagcgccctgagctgcagcttcagcctgcccgccagcagcctgagcagcctggtgccccaggtgagaaccagctacaacttcggcagaaccttcctgggcctggacaagtgcaacgcctgcatcggcaccagcatctgcaagaagttcttcaaggaggagatcagaagcgacaactggctggccagccacctgggcctgccccccgacagcctgctgagctaccccgccaactacagcgacgacagcaagatctggagacccgtggagatcttcagactggtgagcaagtaccagaacgagatcagcgacagaagaatctgcgccagcgccagcgcccccaagacctgcagcatcgagagagtgctgagaaagaccgagagattccagaagtggctgcaggccaagagactgacccccgacctggtgcagggcctggccagccccctgctgagatgccccagccagagactgctggacagagtggtgagaagatacgccgaggtggccgacgccggcagcatcttcatggaccacttcaccgacagagacaagctgagactgctgtacaccctggccgtgaacagccaccccatcctgctgcagatcttccccggcgccgagggctggcccctgcccaagtacctgggcagctgcggcagattcctggtgagcaccagcaccagacccctgcaggagttctacgacgccccccccgaccaggccgccgacctggcctaccagctgctgggcgtgctggagagcctgagaagcaacgacctgaactacttcttctacttcacccacatcgacgccggcatgttcggcgtgttcaacaacggccacctgttcatcagagacgccagcgccgtgggcgtgatcgacaagcaggagggcagccaggaggccaacagagccggcgagaacaaggacatcttcagctgcctggtgagcggctgccaggcccagctgcccagctgcgagagcatcagcgagaagcagagcctggtgctggtgtgccagaagctgctgcccagactgctgcagggcagattccccagccccgtgcaggacgacatcgacagcatcctggtgcagtgcggcgacagcatcagacccgaccccgaggtgctgggcgccgccagccagctgaaggacatcctgagacccctgagaacctgcgacagcagattcgcctacagataccccgactgcaagtacaacgacaagttctag

SEQ ID NO: 4389 - DNA, 600 bp, synthetic construct; identical to SEQ ID NO: 3864
  misc_feature 1..600: note = source = /note="Description of Artificial Sequence: Synthetic coding sequence"
  source 1..600: mol_type = other DNA

SEQ ID NO: 4390 - DNA, 600 bp, synthetic construct; identical to SEQ ID NO: 3864
  misc_feature 1..600: note = source = /note="Description of Artificial Sequence: Synthetic coding sequence"
  source 1..600: mol_type = other DNA

SEQ ID NO: 4391 - DNA, 291 bp, synthetic construct
  misc_feature 1..291: note = source = /note="Description of Artificial Sequence: Synthetic coding sequence"
  source 1..291: mol_type = other DNA
atgctgccctgcctggccctgctgctgctgatggagctgagcgtgtgcaccgtggccggcgacggcggcgaggagcagaccctgagcaccgaggccgagacctgggagggcgccggccccagcatccagctgcagctgcaggaggtgaagaccggcaaggccagccagttcttcggcctgatgggcaagagagtgggcgcctaccagctggagcacaccttccagggcctgctgggcaagagaagcctgttcaccgagggcagagaggacgaggcccagggcagcgagtag

SEQ ID NO: 4392 - DNA, 981 bp, synthetic construct
  misc_feature 1..981: note = source = /note="Description of Artificial Sequence: Synthetic coding sequence"
  source 1..981: mol_type = other DNA
atgaccggcctgtgcggctacagcgcccccgacatgagaggcctgagactgatcatgatccccgtggagctgctgctgtgctacctgctgctgcaccccgtggacgccaccagctacggcaagcagaccaacgtgctgatgcacttccccctgagcctggagagccagacccccagcagcgaccccctgagctgccagttcctgcaccccaagagcctgcccggcttcagccacatggcccccctgcccaagttcctggtgagcctggccctgagaaacgccctggaggaggccggctgccaggccgacgtgtgggccctgcagctgcagctgtacagacagggcggcgtgaacgccacccaggtgctgatccagcacctgagaggcctgcagaagggcagaagcaccgagagaaacgtgagcgtggaggccctggccagcgccctgcagctgctggccagagagcagcagagcaccggcagagtgggcagaagcctgcccaccgaggactgcgagaacgagaaggagcaggccgtgcacaacgtggtgcagctgctgcccggcgtgggcaccttctacaacctgggcaccgccctgtactacgccacccagaactgcctgggcaaggccagagagagaggcagagacggcgccatcgacctgggctacgacctgctgatgaccatggccggcatgagcggcggccccatgggcctggccatcagcgccgccctgaagcccgccctgagaagcggcgtgcagcagctgatccagtactaccaggaccagaaggacgccaacatcagccagcccgagaccaccaaggagggcctgagagccatcagcgacgtgagcgacctggaggagaccaccaccctggccagcttcatcagcgaggtggtgagcagcgccccctactggggctgggccatcatcaagagctacgacctggaccccggcgccggcagcctggagatctag

SEQ ID NO: 4393 - DNA, 1476 bp, synthetic construct
  misc_feature 1..1476: note = source = /note="Description of Artificial Sequence: Synthetic coding sequence"
  source 1..1476: mol_type = other DNA
atgagatggatcctgtgctggagcctgaccctgtgcctgatggcccagaccgccctgggcgccctgcacaccaagagaccccaggtggtgaccaagtacggcaccctgcagggcaagcagatgcacgtgggcaagacccccatccaggtgttcctgggcgtgcccttcagcagaccccccctgggcatcctgagattcgccccccccgagccccccgagccctggaagggcatcagagacgccaccacctacccccccggctgcctgcaggagagctggggccagctggccagcatgtacgtgagcaccagagagagatacaagtggctgagattcagcgaggactgcctgtacctgaacgtgtacgcccccgccagagcccccggcgacccccagctgcccgtgatggtgtggttccccggcggcgccttcatcgtgggcgccgccagcagctacgagggcagcgacctggccgccagagagaaggtggtgctggtgttcctgcagcacagactgggcatcttcggcttcctgagcaccgacgacagccacgccagaggcaactggggcctgctggaccagatggccgccctgagatgggtgcaggagaacatcgccgccttcggcggcgaccccggcaacgtgaccctgttcggccagagcgccggcgccatgagcatcagcggcctgatgatgagccccctggccagcggcctgttccacagagccatcagccagagcggcaccgccctgttcagactgttcatcaccagcaaccccctgaaggtggccaagaaggtggcccacctggccggctgcaaccacaacagcacccagatcctggtgaactgcctgagagccctgagcggcaccaaggtgatgagagtgagcaacaagatgagattcctgcagctgaacttccagagagaccccgaggagatcatctggagcatgagccccgtggtggacggcgtggtgatccccgacgaccccctggtgctgctgacccagggcaaggtgagcagcgtgccctacctgctgggcgtgaacaacctggagttcaactggctgctgccctacaacatcaccaaggagcaggtgcccctggtggtggaggagtacctggacaacgtgaacgagcacgactggaagatgctgagaaacagaatgatggacatcgtgcaggacgccaccttcgtgtacgccaccctgcagaccgcccactaccacagaggcctgagcatgggcaaggagaaggccctgagcctgcagatgatgaagtactgggccaacttcgccagaaccggcaaccccaacgacggcaacctgccctgctggcccagatacaacaaggacgagaagtacctgcagctggacttcaccaccagagtgggcatgaagctgaaggagaagaagatggccttctggatgagcctgtaccagagccagagacccgagaagcagagacagttctag

SEQ ID NO: 4394 - DNA, 285 bp, synthetic construct
  misc_feature 1..285: note = source = /note="Description of Artificial Sequence: Synthetic coding sequence"
  source 1..285: mol_type = other DNA
atggccgccttcccccacaagatcatcttcttcctggtgtgcagcaccctgacccacgtggccttcagcggcatcttcaacaagagagacttcaccagatggcccaagcccagatgcaagatgtacatccccctggaccccgactacaacgccgactgccccaacgtgaccgcccccgtgtgcgccagcaacggccacaccttccagaacgagtgcttcttctgcgtggagcagagagagttccactacagaatcaagttcgagaagtacggcaagtgcgactag

SEQ ID NO: 4395 - DNA, 402 bp, synthetic construct
  misc_feature 1..402: note = source = /note="Description of Artificial Sequence: Synthetic coding sequence"
  source 1..402: mol_type = other DNA
atgagacagagactgctgcccagcgtgaccagcctgctgctggtggccctgctgttccccggcagcagccaggccagacacgtgaaccacagcgccaccgaggccctgggcgagctgagagagagagcccccggccagggcaccaacggcttccagctgctgagacacgccgtgaagagagacctgctgccccccagaacccccccctaccagggcgacgtgccccccggcatcagaaacaccatctgccacatgcagcagggcatctgcagactgttcttctgccacagcggcgagaagaagagagacatctgcagcgacccctggaacagatgctgcgtgagcaacaccgacgaggagggcaaggagaagcccgagatggacggcagaagcggcatctag

SEQ ID NO: 4396 - DNA, 564 bp, synthetic construct
  misc_feature 1..564: note = source = /note="Description of Artificial Sequence: Synthetic coding sequence"
  source 1..564: mol_type = other DNA
atgggctgctgcggctgcagcggcggctgcggcagcggctgcggcggctgcggcagcggctgcggcggctgcggcagcagctgctgcgtgcccatctgctgctgcaagcccgtgtgctgctgcgtgcccgcctgcagctgcagcagctgcggcagctgcggcggcagcaagggcggcagaggcagctgcggcggcagcaagggcgactgcggcagctgcggcggcagcaagggcggctgcggcagctgcggctgcagccagtgcagctgctacaagccctgctgctgcagcagcggctgcggcagcagctgctgccagagcagctgctgcaagccctgctgcagccagagcagctgctgcaagccctgcagctgcagcagcggctgcggcagcagctgctgccagagcagctgctgcaagccctgctgcagccagagcagctgctgcaagccctgctgctgcagcagcggctgcggcagcagctgctgccagagcagctgctgcaagccctgctgcagccagagcagctgctgcgtgcccatctgctgccagtgcaagatctag

SEQ ID NO: 4397 - DNA, 564 bp, synthetic construct
  misc_feature 1..564: note = source = /note="Description of Artificial Sequence: Synthetic coding sequence"
  source 1..564: mol_type = other DNA
atgagacccctggccggcgcccccgtgcccaagagacagaagtgcgaccactggaccccctgccccagcgacacctacgcctacagactgctgagcggcggcggcagaagcaagtacgccaagatctgcttcgaggacaacctgctgatgggcgagcagctgggcaacgtggccagaggcatcaacatcgccatcgtgaactacgtgaccggcaacgtgaccgccaccagatgcttcgacatgtacgagggcgacaacagcggccccatgaccaagttcatccagagcgccgcccccaagagcctgctgttcatggtgacctacgacgacggcagcaccagactgaacaacgacgccaagaacgccatcgaggccctgggcagcaaggagatcagaaacatgaagttcagaagcagctgggtgttcatcgccgccaagggcctggagctgcccagcgagatccagagagagaagatcaaccacagcgacgccaagaacaacagatacagcggctggcccgccgagatccagatcgagggctgcatccccaaggagagaagctag

SEQ ID NO: 4398 - DNA, 249 bp, synthetic construct
  misc_feature 1..249: note = source = /note="Description of Artificial Sequence: Synthetic coding sequence"
  source 1..249: mol_type = other DNA
atgaagatcctgtgcatcttcctgaccttcgtgttcaccgtgagctgcggccccagcgtgccccagaagaagaccagagaggtggccgagagaaagagagagtgccagctggtgagaggcgcctgcaagcccgagtgcaacagctgggagtacgtgtactactactgcaacgtgaacccctgctgcgccgtgtgggagtaccagaagcccatcatcaacaagatcaccagcaagctgcaccagaagtag

SEQ ID NO: 4399 - DNA, 186 bp, synthetic construct
  misc_feature 1..186: note = source = /note="Description of Artificial Sequence: Synthetic coding sequence"
  source 1..186: mol_type = other DNA
atgaagatccacgtgttcctgttcgtgctgttcttcttcctggtgcccatcgccaccagagtgaagtgcgccgtgaaggacacctacagctgcttcatcatgagaggcaagtgcagacacgagtgccacgacttcgagaagcccatcggcttctgcaccaagctgaacgccaactgctacatgtag

SEQ ID NO: 4400 - DNA, 1056 bp, synthetic construct
  misc_feature 1..1056: note = source = /note="Description of Artificial Sequence: Synthetic coding sequence"
  source 1..1056: mol_type = other DNA
atgggcaacctgttcatgctgtgggccgccctgggcatctgctgcgccgccttcagcgccagcgcctggagcgtgaacaacttcctgatcaccggccccaaggcctacctgacctacaccaccagcgtggccctgggcgcccagagcggcatcgaggagtgcaagttccagttcgcctgggagagatggaactgccccgagaacgccctgcagctgagcacccacaacagactgagaagcgccaccagagagaccagcttcatccacgccatcagcagcgccggcgtgatgtacatcatcaccaagaactgcagcatgggcgacttcgagaactgcggctgcgacggcagcaacaacggcaagaccggcggccacggctggatctggggcggctgcagcgacaacgtggagttcggcgagagaatcagcaagctgttcgtggacagcctggagaagggcaaggacgccagagccctgatgaacctgcacaacaacagagccggcagactggccgtgagagccaccatgaagagaacctgcaagtgccacggcatcagcggcagctgcagcatccagacctgctggctgcagctggccgagttcagagagatgggcgactacctgaaggccaagtacgaccaggccctgaagatcgagatggacaagagacagctgagagccggcaacagcgccgagggccactgggtgcccgccgaggccttcctgcccagcgccgaggccgagctgatcttcctggaggagagccccgactactgcacctgcaacagcagcctgggcatctacggcaccgagggcagagagtgcctgcagaacagccacaacaccagcagatgggagagaagaagctgcggcagactgtgcaccgagtgcggcctgcaggtggaggagagaaagaccgaggtgatcagcagctgcaactgcaagttccagtggtgctgcaccgtgaagtgcgaccagtgcagacacgtggtgagcaagtactactgcgccagaagccccggcagcgcccagagcctgggcaagggcagcgcctag

SEQ ID NO: 4401 - DNA, 1446 bp, synthetic construct
  misc_feature 1..1446: note = source = /note="Description of Artificial Sequence: Synthetic coding sequence"
  source 1..1446: mol_type = other DNA
atgcagagcagactgctgctgctgggcgcccccggcggccacggcggccccgccagcagaagaatgagactgctgctgagacaggtggtgcagagaagacccggcggcgacagacagagacccgaggtgagactgctgcacgccggcagcggcgccgacaccggcgacaccgtgaacatcggcgacgtgagctacaagctgaagatccccaagaaccccgagctggtgccccagaactacatcagcgacagcctggcccagagcgtggtgcagcacctgagatggatcatgcagaaggacctgctgggccaggacgtgttcctgatcggcccccccggccccctgagaagaagcatcgccatgcagtacctggagctgaccaagagagaggtggagtacatcgccctgagcagagacaccaccgagaccgacctgaagcagagaagagagatcagagccggcaccgccttctacatcgaccagtgcgccgtgagagccgccaccgagggcagaaccctgatcctggagggcctggagaaggccgagagaaacgtgctgcccgtgctgaacaacctgctggagaacagagagatgcagctggaggacggcagattcctgatgagcgccgagagatacgacaagctgctgagagaccacaccaagaaggagctggacagctggaagatcgtgagagtgagcgagaacttcagagtgatcgccctgggcctgcccgtgcccagatacagcggcaaccccctggacccccccctgagaagcagattccaggccagagacatctactacctgcccttcaaggaccagctgaagctgctgtacagcatcggcgccaacgtgagcgccgagaaggtgagccagctgctgagcttcgccaccaccctgtgcagccaggagagcagcaccctgggcctgcccgacttccccctggacagcctggccgccgccgtgcagatcctggacagcttccccatgatgcccatcaagcacgccatccagtggctgtacccctacagcatcctgctgggccacgagggcaagatggccgtggagggcgtgctgaagagattcgagctgcaggacagcggcagcagcctgctgcccaaggagatcgtgaaggtggagaagatgatggagaaccacgtgagccaggccagcgtgaccatcagaatcgccgacaaggaggtgaccatcaaggtgcccgccggcaccagactgctgagccagccctgcgccagcgacagattcatccagaccctgagccacaagcagctgcaggccgagatgatgcagagccacatggtgaaggacatctgcctgatcggcggcaagggctgcggcaagaccgtgatcgccaagaacttcgccgacaccctgggctacaacatcgagcccatcatgctgtaccagcacaaggtgccccacatctag

SEQ ID NO: 4402 - DNA, 786 bp, synthetic construct
  misc_feature 1..786: note = source = /note="Description of Artificial Sequence: Synthetic coding sequence"
  source 1..786: mol_type = other DNA
atggccagcctggccgtgagcaactggcccaagcccatgcccctgatcccctgcctgagctggagcaccgccagcggcgtgttcaccaccggcgtgctgagcaagagcatcaactggagagagctggagaagcagtactacacccagaccgtgtacgaggaggagatcatccacatgctggagtactgcggcaccgacagcttcaagatgggccaggagttcgtgaagcacttcaccagcagcgccgacaagctgaccaacctgaacctggtgagcagaaccctgaacctggacatcagcaaccaggtggtgagccagaagcccgccgactgccacaacagcagcaagaccagcgtgagcgccaccagcgagggcctgctgctgcaggacaccagcaagatgaagagattcaaccagaccctgagcaccaacaagagcggctacaccagcagaaacccccagagctaccacctgctgagcaaggagcagagcagaaacagcctgagaaaggagagcctgatcttcatgaagggcgtgatggacgagtgcacccacgtggccaacttcagcgtgcccgtggaccccagcctgatcatcgtggtgcaggccaaggaggacgcctacatccccagaaccggcgtgagaagcctgcaggagatctggcccggctgcgagatcagatacctggagggcggccacatcagcgcctacctgttcaagcagggcctgttcagacaggccatctacgacgccttcgacagattcctgcacaagtacgccaactag

SEQ ID NO: 4403 - DNA, 1245 bp, synthetic construct
  misc_feature 1..1245: note = source = /note="Description of Artificial Sequence: Synthetic coding sequence"
  source 1..1245: mol_type = other DNA
atgggcgtgagcaagctggacatcctgtacagaagactgctgctgaccaagctgttcatcagaggctggggcagacccgaggacctgaagagactgttcgagttcagaaagatgatcggcaacagagagagatgccagaacctggtgagcagcgactaccccgtgcacatcgacaagatcgaggagcagagcgactgcaagatcctggacggccacttcgtgagccccatggcccactacgtgcccgacatcatgcccatcgagagcgtgatcgccagattccagttcatcgtgcccaaggagtggaacagcaagtacagacccgtgtgcatccacctggccggcaccggcgaccaccactactggagaagaagaaccctgatggccagacccatgatcaaggaggccagaatggccagcctgctgctggagaacccctactacggctgcagaaagcccaaggaccaggtgagaagcagcctgaagaacgtgagcgacctgttcgtgatgggcggcgccctggtgctggagagcgccgccctgctgcactggctggagagagagggctacggccccctgggcatgaccggcatcagcatgggcggccacatggccagcctggccgtgagcaactggcccaagcccatgcccctgatcccctgcctgagctggagcaccgccagcggcgtgttcaccaccaccgacagcttcaagatgggccaggagttcgtgaagcacttcaccagcagcgccgacaagctgaccaacctgaacctggtgagcagaaccctgaacctggacatcagcaaccaggtggtgagccagaagcccgccgactgccacaacagcagcaagaccagcgtgagcgccaccagcgagggcctgctgctgcaggacaccagcaagatgaagagattcaaccagaccctgagcaccaacaagagcggctacaccagcagaaacccccagagctaccacctgctgagcaaggagcagagcagaaacagcctgagaaaggagagcctgatcttcatgaagggcgtgatggacgagtgcacccacgtggccaacttcagcgtgcccgtggaccccagcctgatcatcgtggtgcaggccaaggaggacgcctacatccccagaaccggcgtgagaagcctgcaggagatctggcccggctgcgagatcagatacctggagggcggccacatcagcgcctacctgttcaagcagggcctgttcagatag

SEQ ID NO: 4404 - DNA, 747 bp, synthetic construct
  misc_feature 1..747: note = source = /note="Description of Artificial Sequence: Synthetic coding sequence"
  source 1..747: mol_type = other DNA
atgaagctgaccttcttcctgggcctgctggccctgatcagctgcttcacccccagcgagagccagagattcagcagaagaccctacctgcccggccagctgccccccccccccctgtacagacccagatgggtgccccccagccccccccccccctacgacagcagactgaacagccccctgagcctgcccttcgtgcccggcagagtgccccccagcagcttcagcagattcagccaggccgtgatcctgagccagctgttccccctggagagcatcagacagcccagactgttccccggctaccccaacctgcacttccccctgagaccctactacgtgggccccatcagaatcctgaagccccccttcccccccatccccttcttcctggccatctacctgcccatcagcaaccccgagccccagatcaacatcaccaccgccgacaccaccatcaccaccaacccccccaccaccgccaccgccaccaccagcaccagcaccaagcccaccatgaccatcagcagcagcaccgtgcccatcagcagcacccccgagcccgccaccagcatcagcgccgccacccccgccgccagcaccgagaacaccacccagatcctggccaacagaccccacaccgtgctgctgaacgccaccgtgcaggtgaccaccagcaaccagaccatcctgagcagccccgccttcaagagcttctggcagaagctgttcgccatcttcggctag

SEQ ID NO: 4405 - DNA, 231 bp, synthetic construct
  misc_feature 1..231: note = source = /note="Description of Artificial Sequence: Synthetic coding sequence"
  source 1..231: mol_type = other DNA
atgggcgccgccatcagccagggcgccctgatcgccatcgtgtgcaacggcctggtgggcttcctgctgctgctgctgtgggtgatcctgtgctgggcctgccacagcagaagcgccgacgtggacagcctgagcgagagcagccccaacagcagccccggcccctgccccgagaaggccccccccccccagaagcccagccacgagggcagctacctgctgcagccctag

SEQ ID NO: 4406 - DNA, 1536 bp, synthetic construct; identical to SEQ ID NO: 3595
  misc_feature 1..1536: note = source = /note="Description of Artificial Sequence: Synthetic coding sequence"
  source 1..1536: mol_type = other DNA

SEQ ID NO: 4407 - DNA, 1536 bp, synthetic construct; identical to SEQ ID NO: 3595
  misc_feature 1..1536: note = source = /note="Description of Artificial Sequence: Synthetic coding sequence"
  source 1..1536: mol_type = other DNA

SEQ ID NO: 4408 - DNA, 240 bp, synthetic construct
  misc_feature 1..240: note = source = /note="Description of Artificial Sequence: Synthetic coding sequence"
  source 1..240: mol_type = other DNA
atgaagctgcacagcctgatcagcgtgctgctgctgttcgtgaccctgatccccaagggcaagaccggcgtgatccccggccagaagcagtgcatcgccctgaagggcgtgtgcagagacaagctgtgcagcaccctggacgacaccatcggcatctgcaacgagggcaagaagtgctgcagaagatggtggatcctggagccctaccccacccccgtgcccaagggcaagagcccctag

SEQ ID NO: 4409 - DNA, 351 bp, synthetic construct; identical to SEQ ID NO: 4162
  misc_feature 1..351: note = source = /note="Description of Artificial Sequence: Synthetic coding sequence"
  source 1..351: mol_type = other DNA

SEQ ID NO: 4410 - DNA, 543 bp, synthetic construct
  misc_feature 1..543: note = source = /note="Description of Artificial Sequence: Synthetic coding sequence"
  source 1..543: mol_type = other DNA
caggtgatccccatcaacagcggcgacctgttcgtgcaccccctgtggaacagaagctgcgtggcctgcggcaacgacatcgccctgatcaagctgagcagaagcgcccagctgggcgacgccgtgcagctggccagcctgccccccgccggcgacatcctgcccaacgagaccccctgctacatcaccggctggggcagactgtacaccaacggccccctgcccgacaagctgcaggaggccctgctgcccgtggtggactacgagcactgcagcagatggaactggtggggcagcagcgtgaagaagaccatggtgtgcgccggcggcgacatcagaagcggctgcaacggcgacagcggcggccccctgaactgccccaccgaggacggcggctggcaggtgcacggcgtgaccagcttcgtgagcgccttcggctgcaacaccagaagaaagcccaccgtgttcaccagagtgagcgccttcatcgactggatcgaggagaagctgcagggcaacaaggcccccgagagcagaacctag

SEQ ID NO: 4411 - DNA, 1215 bp, synthetic construct
  misc_feature 1..1215: note = source = /note="Description of Artificial Sequence: Synthetic coding sequence"
  source 1..1215: mol_type = other DNA
atgccccccttcctgatcaccctgttcctgttccacagctgctgcctgagagccaacggccacctgagagagggcatgaccctgctgaagaccgagttcgccctgcacctgtaccagagcgtggccgcctgcagaaacgagaccaacttcgtgatcagccccgccggcgtgagcctgcccctggagatcctgcagttcggcgccgagggcagcaccggccagcagctggccgacgccctgggctacaccgtgcacgacaagagagtgaaggacttcctgcacgccgtgtacgccaccctgcccaccagcagccagggcaccgagatggagctggcctgcagcctgttcgtgcaggtgggcacccccctgagcccctgcttcgtggagcacgtgagctggtgggccaacagcagcctggagcccgccgacctgagcgagcccaacagcaccgccatccagaccagcgagggcgccagcagagagaccgccggcggcggccccagcgagggccccggcggctggccctgggagcaggtgagcgccgccttcgcccagctggtgctggtgagcaccatgagcttccagggcacctggagaaagagattcagcagcaccgacacccagatcctgcccttcacctgcgcctacggcctggtgctgcaggtgcccatgatgcaccagaccaccgaggtgaactacggccagttccaggacaccgccggccaccaggtgggcgtgctggagctgccctacctgggcagcgccgtgagcctgttcctggtgctgcccagagacaaggacacccccctgagccacatcgagccccacctgaccgccagcaccatccacctgtggaccaccagcctgagaagagccagaatggacgtgttcctgcccagattcagaatccagaaccagttcaacctgaagagcatcctgaacagctggggcgtgaccgacctgttcgaccccctgaaggccaacctgaagggcatcagcggccaggacggcttctacgtgagcgaggccatccacaaggccaagatcgaggtgctggaggagggcaccaaggccagcggcgccaccgccctgctgctgctgaagagaagcagaatccccatcttcaaggccgacagacccttcatctacttcctgagagagcccaacaccggcttcgtgttcagcatcggcagagtgagcaaccccctggactag

SEQ ID NO: 4412 - DNA, 444 bp, synthetic construct; identical to SEQ ID NO: 4359
  misc_feature 1..444: note = source = /note="Description of Artificial Sequence: Synthetic coding sequence"
  source 1..444: mol_type = other DNA

SEQ ID NO: 4413 - DNA, 2631 bp, synthetic construct; identical to SEQ ID NO: 3583
  misc_feature 1..2631: note = source = /note="Description of Artificial Sequence: Synthetic coding sequence"
  source 1..2631: mol_type = other DNA

SEQ ID NO: 4414 - DNA, 2631 bp, synthetic construct; identical to SEQ ID NO: 3583
  misc_feature 1..2631: note = source = /note="Description of Artificial Sequence: Synthetic coding sequence"
  source 1..2631: mol_type = other DNA

SEQ ID NO: 4415 - DNA, 2742 bp, synthetic construct; identical to SEQ ID NO: 3799
  misc_feature 1..2742: note = source = /note="Description of Artificial Sequence: Synthetic coding sequence"
  source 1..2742: mol_type = other DNA

SEQ ID NO: 4416 - DNA, 444 bp, synthetic construct; identical to SEQ ID NO: 4359
  misc_feature 1..444: note = source = /note="Description of Artificial Sequence: Synthetic coding sequence"
  source 1..444: mol_type = other DNA

SEQ ID NO: 4417 - DNA, 2631 bp, synthetic construct; identical to SEQ ID NO: 3583
  misc_feature 1..2631: note = source = /note="Description of Artificial Sequence: Synthetic coding sequence"
  source 1..2631: mol_type = other DNA

SEQ ID NO: 4418 - DNA, 2631 bp, synthetic construct; identical to SEQ ID NO: 3583
  misc_feature 1..2631: note = source = /note="Description of Artificial Sequence: Synthetic coding sequence"
  source 1..2631: mol_type = other DNA

SEQ ID NO: 4419 - DNA, 2631 bp, synthetic construct; identical to SEQ ID NO: 3583
  misc_feature 1..2631: note = source = /note="Description of Artificial Sequence: Synthetic coding sequence"
  source 1..2631: mol_type = other DNA

SEQ ID NO: 4420 - DNA, 2742 bp, synthetic construct; identical to SEQ ID NO: 3799
  misc_feature 1..2742: note = source = /note="Description of Artificial Sequence: Synthetic coding sequence"
  source 1..2742: mol_type = other DNA

SEQ ID NO: 4421 - DNA, 2742 bp, synthetic construct; identical to SEQ ID NO: 3799
  misc_feature 1..2742: note = source = /note="Description of Artificial Sequence: Synthetic coding sequence"
  source 1..2742: mol_type = other DNA

SEQ ID NO: 4422 - DNA, 309 bp, synthetic construct
  misc_feature 1..309: note = source = /note="Description of Artificial Sequence: Synthetic coding sequence"
  source 1..309: mol_type = other DNA
atgagcgtgatgaagccctgcctgatgaccatcgccatcctgatgatcctggcccagaagacccccggcggcctgttcagaagccacaacggcaagagcagagagccctggaacccctgcgagctgtaccagggcatgtgcagaaacgcctgcagagagtacgagatccagtacctgacctgccccaacgaccagaagtgctgcctgaagctgagcgtgaagatcaccagcagcaagaacgtgaaggaggactacgacagcaacagcaacctgagcgtgaccaacagcagcagctacagccacatctag

SEQ ID NO: 4423 - DNA, 267 bp, synthetic construct
  misc_feature 1..267: note = source = /note="Description of Artificial Sequence: Synthetic coding sequence"
  source 1..267: mol_type = other DNA
atgctgcccgaccacttcagccccctgagcggcgacatcaagctgagcgtgctggccctggtggtgctggtggtgctggcccagaccgcccccgacggctggatcagaagatgctactacggcaccggcagatgcagaaagagctgcaaggagatcgagagaaagaaggagaagtgcggcgagaagcacatctgctgcgtgcccaaggagaaggacaagctgagccacatccacgaccagaaggagaccagcgagctgtacatctag

SEQ ID NO: 4424 - DNA, 1401 bp, synthetic construct; identical to SEQ ID NO: 3878
  misc_feature 1..1401: note = source = /note="Description of Artificial Sequence: Synthetic coding sequence"
  source 1..1401: mol_type = other DNA

SEQ ID NO: 4425 - DNA, 207 bp, synthetic construct
  misc_feature 1..207: note = source = /note="Description of Artificial Sequence: Synthetic coding sequence"
  source 1..207: mol_type = other DNA
atgaagctgtgcgtgaccgtgctgagcctgctggtgctggtggccgccttctgcagcctggccctgagcgcccccaccaagagcagcgagtggaagctgcagggcgtgtgcttccagtgctgcagcggcaaggaccccatccaccagagctgccccacctggaccatggtgagacagagaaagatgcccaccaccggcaagggctag

SEQ ID NO: 4426 - DNA, 420 bp, synthetic construct
  misc_feature 1..420: note = source = /note="Description of Artificial Sequence: Synthetic coding sequence"
  source 1..420: mol_type = other DNA
atgtacaagctggccagctgctgcctgctgttcatcggcttcctgaaccccctgctgagcctgcccctgctggacagcagagagatcagcttccagctgagcgccccccacgaggacgccagactgacccccgaggagctggagagagccagcctgctgcagatcctgcccgagatgctgggcgccgagagaggcgacatcctgagaaaggccgacagcagcaccaacatcttcaaccccagaggcaacctgagaaagttccaggacttcagcggccaggaccccaacatcctgctgagccacctgctggccagaatctggaagccctacaagaagcagagaagaaagctgagacaggacctgagactgtggaagaaggagcccggcctgagaatcttcaagaactacgtgtacatctag

SEQ ID NO: 4427 - DNA, 1974 bp, synthetic construct
  misc_feature 1..1974: note = source = /note="Description of Artificial Sequence: Synthetic coding sequence"
  source 1..1974: mol_type = other DNA
atgagaaccgtggtgctgaccatgaaggccagcgtgatcgagatgttcctggtgctgctggtgaccggcgtgcacagcaacaaggagaccgccaagaagatcaagagacccaagttcaccgtgccccagatcaactgcgacgtgaaggccggcaagatcatcgaccccgagttcatcgtgaagtgccccgccggctgccaggaccccaagtaccacgtgtacggcaccgacgtgtacgccagctacagcagcgtgtgcggcgccgccgtgcacagcggcgtgctggacaacagcggcggcaagatcctggtgagaaaggtggccggccagagcggctacaagggcagctacagcaacggcgtgcagagcctgagcctgcccagatggagagagagcttcatcgtgctggagagcaagcccaagaagggcgtgacctaccccagcgccctgacctacagcagcagcaagagccccgccgcccaggccggcgagaccaccaaggcctaccagagaccccccatccccggcaccaccgcccagcccgtgaccctgatgcagctgctggccgtgaccgtggccgtggccacccccaccaccctgcccagacccagccccagcgccgccagcaccaccagcatccccagaccccagagcgtgggccacagaagccaggagatggacctgtggagcaccgccacctacaccagcagccagaacagacccagagccgaccccggcatccagagacaggaccccagcggcgccgccttccagaagcccgtgggcgccgacgtgagcctggactgcaagatcgacctgagcttcctgatcgacggcagcaccagcatcggcaagagaagattcagaatccagaagcagctgctggccgacgtggcccaggccctggacatcggccccgccggccccctgatgggcgtggtgcagtacggcgacaaccccgccacccacttcaacctgaagacccacaccaacagcagagacctgaagaccgccatcgagaagatcacccagagaggcggcctgagcaacgtgggcagagccatcagcttcgtgaccaagaacttcttcagcaaggccaacggcaacagaagcggcgcccccaacgtggtggtggtgatggtggacggctggcccaccgacaaggtggaggaggccagcagactggccagagagagcggcatcaacatcttcttcatcaccatcgagggcgccgccgagaacgagaagcagtacgtggtggagcccaacttcgccaacaaggccgtgtgcagaaccaacggcttctacagcctgcacgtgcagagctggttcggcctgcacaagaccctgcagcccctggtgaagagagtgtgcgacaccgacagactggcctgcagcaagacctgcctgaacagcgccgacatcggcttcgtgatcgacggcagcagcagcgtgggcaccggcaacttcagaaccgtgctgcagttcgtgaccaacctgaccaaggagttcgagatcagcgacaccgacaccagaatcggcgccgtgcagtacacctacgagcagagactggagttcggcttcgacaagtacagcagcaagcccgacatcctgaacgccatcaagagagtgggctactggagcggcggcaccagcaccggcgccgccatcaacttcgccctggagcagctgttcaagaagagcaagcccaacaagagaaagctgatgatcctgatcaccgacggcagaagctacgacgacgtgagaatccccgccatggccgcccacctgaagggcgtgatcacctacgccatcggcgtggcctgggccgcccaggaggagctggaggtgatcgccacccaccccgccagagaccacagcttcttcgtggacgagttcgacaacctgcaccagtacgtgcccagaatcatccagaacatctgcaccgagttcaacagccagcccagaaactag

SEQ ID NO: 4428 - DNA, 3975 bp, synthetic construct
  misc_feature 1..3975: note = source = /note="Description of Artificial Sequence: Synthetic coding sequence"
  source 1..3975: mol_type = other DNA
atgagacacggcgtggcctgggccctgctggtggccgccgccctgggcctgggcgccagaggcgtgagaggcgccgtggccctggccgacttctaccccttcggcgccgagagaggcgacgccgtgacccccaagcaggacgacggcggcagcggcctgagacccctgagcgtgcccttccccttcttcggcgccgagcacagcggcctgtacgtgaacaacaacggcatcatcagcttcctgaaggaggtgagccagttcacccccgtggccttccccatcgccaaggacagatgcgtggtggccgccttctgggccgacgtggacaacagaagagccggcgacgtgtactacagagaggccaccgaccccgccatgctgagaagagccaccgaggacgtgagacactacttccccgagctgctggacttcaacgccacctgggtgttcgtggccacctggtacagagtgaccttcttcggcggcagcagcagcagccccgtgaacaccttccagaccgtgctgatcaccgacggcaagctgagcttcaccatcttcaactacgagagcatcgtgtggaccaccggcacccacgccagcagcggcggcaacgccaccggcctgggcggcatcgccgcccaggccggcttcaacgccggcgacggccagagatacttcagcatccccggcagcagaaccgccgacatggccgaggtggagaccaccaccaacgtgggcgtgcccggcagatgggccttcagaatcgacgacgcccaggtgagagtgggcggctgcggccacaccaccagcgtgtgcctggccctgagaccctgcctgaacggcggcaagtgcatcgacgactgcgtgaccggcaaccccagctacacctgcagctgcctgagcggcttcaccggcagaagatgccacctggacgtgaacgagtgcgccagccagccctgccagaacggcggcacctgcacccacggcatcaacagcttcagatgccagtgccccgccggcttcggcggccccacctgcgagaccgcccagagcccctgcgacaccaaggagtgccagcacggcggccagtgccaggtggagaacggcagcgccgtgtgcgtgtgccaggccggctacaccggcgccgcctgcgagatggacgtggacgactgcagccccgacccctgcctgaacggcggcagctgcgtggacctggtgggcaactacacctgcctgtgcgccgagcccttcaagggcctgagatgcgagaccggcgaccaccccgtgcccgacgcctgcctgagcgccccctgccacaacggcggcacctgcgtggacgccgaccagggctacgtgtgcgagtgccccgagggcttcatgggcctggactgcagagagagagtgcccgacgactgcgagtgcagaaacggcggcagatgcctgggcgccaacaccaccctgtgccagtgccccctgggcttcttcggcctgctgtgcgagttcgagatcaccgccatgccctgcaacatgaacacccagtgccccgacggcggctactgcatggagcacggcggcagctacctgtgcgtgtgccacaccgaccacaacgccagccacagcctgcccagcccctgcgacagcgacccctgcttcaacggcggcagctgcgacgcccacgacgacagctacacctgcgagtgccccagaggcttccacggcaagcactgcgagaaggccagaccccacctgtgcagcagcggcccctgcagaaacggcggcacctgcaaggaggccggcggcgagtaccactgcagctgcccctacagattcaccggcagacactgcgagatcggcaagcccgacagctgcgccagcggcccctgccacaacggcggcacctgcttccactacatcggcaagtacaagtgcgactgcccccccggcttcagcggcagacactgcgagatcgcccccagcccctgcttcagaagcccctgcgtgaacggcggcacctgcgaggacagagacaccgacttcttctgccactgccaggccggctacatgggcagaagatgccaggccgaggtggactgcggcccccccgaggaggtgaagcacgccaccctgagattcaacggcaccagactgggcgccgtggccctgtacgcctgcgacagaggctacagcctgagcgcccccagcagaatcagagtgtgccagccccacggcgtgtggagcgagcccccccagtgcctggagatcgacgagtgcagaagccagccctgcctgcacggcggcagctgccaggacagagtggccggctacctgtgcctgtgcagcaccggctacgagggcgcccactgcgagctggagagagacgagtgcagagcccacccctgcagaaacggcggcagctgcagaaacctgcccggcgcctacgtgtgcagatgccccgccggcttcgtgggcgtgcactgcgagaccgaggtggacgcctgcgacagcagcccctgccagcacggcggcagatgcgagagcggcggcggcgcctacctgtgcgtgtgccccgagagcttcttcggctaccactgcgagaccgtgagcgacccctgcttcagcagcccctgcggcggcagaggctactgcctggccagcaacggcagccacagctgcacctgcaaggtgggctacaccggcgaggactgcgccaaggagctgttcccccccaccgccctgaagatggagagagtggaggagagcggcgtgagcatcagctggaacccccccaacggccccgccgccagacagatgctggacggctacgccgtgacctacgtgagcagcgacggcagctacagaagaaccgacttcgtggacagaaccagaagcagccaccagctgcaggccctggccgccggcagagcctacaacatcagcgtgttcagcgtgaagagaaacagcaacaacaagaacgacatcagcagacccgccgtgctgctggccagaaccagacccagacccgtggagggcttcgaggtgaccaacgtgaccgccagcaccatcagcgtgcagtgggccctgcacagaatcagacacgccaccgtgagcggcgtgagagtgagcatcagacaccccgaggccctgagagaccaggccaccgacgtggacagaagcgtggacagattcaccttcagagccctgctgcccggcaagagatacaccatccagctgaccaccctgagcggcctgagaggcgaggagcaccccaccgagagcctggccaccgcccccacccacgtgtggaccagacccctgccccccgccaacctgaccgccgccagagtgaccgccaccagcgcccacgtggtgtgggacgcccccacccccggcagcctgctggaggcctacgtgatcaacgtgaccaccagccagagcaccaagagcagatacgtgcccaacggcaagctggccagctacaccgtgagagacctgctgcccggcagaagataccagctgagcgtgatcgccgtgcagagcaccgagctgggcccccagcacagcgagcccgcccacctgtacatcatcaccagccccagagacggcgccgacagaagatggcaccagggcggccaccaccccagagtgctgaagaacagacccccccccgccagactgcccgagctgagactgctgaacgaccacagcgcccccgagacccccacccagccccccagattcagcgagctggtggacggcagaggcagagtgagcgccagattcggcggcagccccagcaaggccgccaccgtgagaagccagcccaccgccagcgcccagctggagaacatggaggaggcccccaagagagtgagcctggccctgcagctgcccgagcacggcagcaaggacatcggcagcgagagcgccgccctggtgggcaccctgggcctgaccgactgcagccagggcccctag

SEQ ID NO: 4429 - DNA, 732 bp, synthetic construct
  misc_feature 1..732: note = source = /note="Description of Artificial Sequence: Synthetic coding sequence"
  source 1..732: mol_type = other DNA
atgggcatcttcctggtgtacgtgggcttcgtgttcttcagcgtgctgtacgtgcagcagggcctgagcagccaggccaagttcaccgagttccccagaaacgtgaccgccaccgagggccagaacgtggagatgagctgcgccttccagagcggcagcgccagcgtgtacctggagatccagtggtggttcctgagaggccccgaggacctggaccccggcgccgagggcgccggcgcccaggtggagctgctgcccgacagagaccccgacagcgacggcaccaagatcagcaccgtgaaggtgcagggcaacgacatcagccacaagctgcagatcagcaaggtgagaaagaaggacgagggcctgtacgagtgcagagtgaccgacgccaactacggcgagctgcaggagcacaaggcccaggcctacctgaaggtgaacgccaacagccacgccagaagaatgcaggccttcgaggccagccccatgtggctgcaggacatgaagcccagaaagaacgtgagcgccgccatccccagcagcatccacggcagcgccaaccagagaacccacagcaccagcagcccccaggtggtggccaagatccccaagcagagcccccagagcggcatggagacccacttcgagcccttcatcctgcccctgaccaacgccccccagaagggccagagctacagagtggacagattcatgaacggcgacttctag

SEQ ID NO: 4430 - DNA, 1218 bp, synthetic construct; identical to SEQ ID NO: 3919
  misc_feature 1..1218: note = source = /note="Description of Artificial Sequence: Synthetic coding sequence"
  source 1..1218: mol_type = other DNA

SEQ ID NO: 4431 - DNA, 573 bp, synthetic construct
  misc_feature 1..573: note = source = /note="Description of Artificial Sequence: Synthetic coding sequence"
  source 1..573: mol_type = other DNA
atgagaaccgtggtgctgaccatgaaggccagcgtgatcgagatgttcctggtgctgctggtgaccggcgtgcacagcaacaaggagaccgccaagaagatcaagagacccaagttcaccgtgccccagatcaactgcgacgtgaaggccggcaagatcatcgaccccgagttcatcgtgaagtgccccgccggctgccaggaccccaagtaccacgtgtacggcaccgacgtgtacgccagctacagcagcgtgtgcggcgccgccgtgcacagcggcgtgctggacaacagcggcggcaagatcctggtgagaaaggtggccggccagagcggctacaagggcagctacagcaacggcgtgcagagcctgagcctgcccagatggagagagagcttcatcgtgctggagagcaagcccaagaagggcgtgacctaccccagcgccctgacctacagcagcagcaagagccccgccgcccaggccgacctgtggagcaccgccacctacaccagcagccagaacagacccagagccgaccccgtgcagagacagccctgctacagcctgtag

SEQ ID NO: 4432 - DNA, 399 bp, synthetic construct
  misc_feature 1..399: note = source = /note="Description of Artificial Sequence: Synthetic coding sequence"
  source 1..399: mol_type = other DNA
atggcccccagccccagaaccggcagcagacaggacgccaccgccctgcccagcatgagcagcaccttctgggccttcatgatcctggccagcctgctgatcgcctactgcagccagctggccgccggcacctgcgagatcgtgaccctggacagagacagcagccagcccagaagaaccatcgccagacagaccgccagatgcgcctgcagaaagggccagatcgccggcaccaccagagccagacccgcctgcgtggacgccagaatcatcaagaccaagcagtggtgcgacatgctgccctgcctggagggcgagggctgcgacctgctgatcaacagaagcggctggacctgcacccagcccggcggcagaatcaagaccaccaccgtgagctag

SEQ ID NO: 4433 - DNA, 957 bp, synthetic construct; identical to SEQ ID NO: 3752
  misc_feature 1..957: note = source = /note="Description of Artificial Sequence: Synthetic coding sequence"
  source 1..957: mol_type = other DNA

SEQ ID NO: 4434 - DNA, 399 bp, synthetic construct
  misc_feature 1..399: note = source = /note="Description of Artificial Sequence: Synthetic coding sequence"
  source 1..399: mol_type = other DNA
atgctgcccctgaccatgaccgtgctgatcctgctgctgctgcccaccggccaggccgcccccaaggacggcgtgaccagacccgacagcgaggtgcagcaccagctgctgcccaaccccttccagcccggccaggagcagctgggcctgctgcagagctacctgaagggcctgggcagaaccgaggtgcagctggagcacctgagcagagagcaggtgctgctgtacctgttcgccctgcacgactacgaccagagcggccagctggacggcctggagctgctgagcatgctgaccgccgccctggcccccggcgccgccaacagccccaccaccaaccccggcaacctggacgccagactggacggcggcgagaaggccatgcagccccagtggtag

SEQ ID NO: 4435 - DNA, 732 bp, synthetic construct
  misc_feature 1..732: note = source = /note="Description of Artificial Sequence: Synthetic coding sequence"
  source 1..732: mol_type = other DNA
atgctgctgagcctgctgggcgcctgcgccgtggtgggccccttccacggccccgagtgggagcccgtgcagggcctgctgagccagaaccacagctgcagagacccccagtgctgcggcaacctgctggtgctgtgcctgttcctggtgtggcaggtgagacactgctggcaccaggtgaccagaaccagattcagcaccagaaacgtgatcaaggtgcccctgcagaagagagccgtgcccagcatgagatgcgagaccgtgttcaagctgacccccgagttcttcagccccggcaagagcagaggcctggacagccagcagtgcgcccagagacagagatggggctacagaagaagcctgcaggagagctgggcccagaacctgctgagcccccagcacccctgccccggcccccccagcggcgtgcacacccacagcgagcccatcttctgcaccaccagcatcagcaacacctgcctgctgccccagaacagcagctggaaggcctggcaggtgccctggtgcctgcacgacggccagaccagacccgccctggacatgtgccaggagatggagcagctgctgctgcacagccaggagagactggtgagcctggagcccgtgatcagcgtgagaagcagacccaccagcatgaccctgaccaccagcctgcccaacctgctgagcgccgagagactgcagttctgcccccagagagcccccgcctag

SEQ ID NO: 4436 - DNA, 2505 bp, synthetic construct; identical to SEQ ID NO: 3768
  misc_feature 1..2505: note = source = /note="Description of Artificial Sequence: Synthetic coding sequence"
  source 1..2505: mol_type = other DNA

SEQ ID NO: 4437 - DNA, 1185 bp, synthetic construct
  misc_feature 1..1185: note = source = /note="Description of Artificial Sequence: Synthetic coding sequence"
  source 1..1185: mol_type = other DNA
atgtggagatgccccctgggcctgctgctgctgctgcccctggccggccacctggccctgggcgcccagcagggcagaggcagaagagagctggcccccggcctgcacctgagaggcatcagagacgccggcggcagatactgccaggagcaggacctgtgctgcagaggcagagccgacgactgcgccctgccctacctgggcgccatctgctactgcgacctgttctgcaacagaaccgtgagcgactgctgccccttcccccccatccagggctgcatgcacggcggcagaatctaccccgtgctgggcacctactgggacaactgcaacagatgcacctgccaggagaacagacagtggcagtgcgaccaggagccctgcctggtggaccccgacatgatcaaggccatcaaccagggcaactacggctggcaggccggcaaccacagcgccttctggggcatgaccctggacgagggcatcagatacagactgggcaccatcagacccagcagcagcgtgatgaacatgcacgagatctacaccgtgctgaaccccggcgaggtgctgcccaccgccttcgaggccagcgagaagtggcccaacctgatccacgagcccctggaccagggcaactgcgccggcagctgggccttcagcaccgccgccgtggccagcgacagagtgagcatccacagcctgggccacatgacccccgtgctgagcccccagaacctgctgagctgcgacacccaccagcagcagggctgcagaggcggcagactggacggcgcctggtggttcctgagaagaagaggcgtggtgagcgaccactgctaccccttcagcggcagagagagagacgaggccggccccgcccccccctgcatgatgcacagcagagccatgggcagaggcaagagacaggccaccgcccactgccccaacagctacgtgaacaacaacgacatctaccaggtgacccccgtgtacagactgggcagcaacgacaaggagatcatgaaggagctgatggagaacggccccgtgcaggccctgatggaggtgcacgaggacttcttcctgtacaagggcggcatctacagccacacccccgtgagcctgggcagacccgagagatacagaagacacggcacccacagcgtgaagatcaccggctag

SEQ ID NO: 4438 - DNA, 303 bp, synthetic construct
  misc_feature 1..303: note = source = /note="Description of Artificial Sequence: Synthetic coding sequence"
  source 1..303: mol_type = other DNA
atggccgccgccctggccctggtggccggcgtgctgagcggcgccgtgctgcccctgtggagcgccctgccccagtacaagaagaagatcaccgacagatgcttccaccacagcgagtgctacagcggctgctgcctgatggacctggacagcggcggcgccttctgcgcccccagagccagaatcaccatgatctgcctgccccagaccaagggcgccaccaacatcatctgcccctgcagaatgggcctgacctgcatcagcaaggacctgatgtgcagcagaagatgccacatgatctag

SEQ ID NO: 4439 - DNA, 978 bp, synthetic construct
  misc_feature 1..978: note = source = /note="Description of Artificial Sequence: Synthetic coding sequence"
  source 1..978: mol_type = other DNA
atgagactgcccagaagagccgccctgggcctgctgcccctgctgctgctgctgccccccgcccccgaggccgccaagaagcccaccccctgccacagatgcagaggcctggtggacaagttcaaccagggcatggtggacaccgccaagaagaacttcggcggcggcaacaccgcctgggaggagaagaccctgagcaagtacgagagcagcgagatcagactgctggagatcctggagggcctgtgcgagagcagcgacttcgagtgcaaccagatgctggaggcccaggaggagcacctggaggcctggtggctgcagctgaagagcgagtaccccgacctgttcgagtggttctgcgtgaagaccctgaaggtgtgctgcagccccggcacctacggccccgactgcctggcctgccagggcggcagccagagaccctgcagcggcaacggccactgcagcggcgacggcagcagacagggcgacggcagctgcagatgccacatgggctaccagggccccctgtgcaccgactgcatggacggctacttcagcagcctgagaaacgagacccacagcatctgcaccgcctgcgacgagagctgcaagacctgcagcggcctgaccaacagagactgcggcgagtgcgaggtgggctgggtgctggacgagggcgcctgcgtggagtgcgacagcagctgcgtgggctgcaccggcgagggccccggcaactgcaaggagtgcatcagcggctacgccagagagcacggccagtgcgccgacgtggacgagtgcagcctggccgagaagacctgcgtgagaaagaacgagaactgctacaacacccccggcagctacgtgtgcgtgtgccccgacggcttcgaggagaccgaggacgcctgcgtgccccccgccgaggccgaggccaccgagggcgagagccccacccagctgcccagcagagaggacctgtag

SEQ ID NO: 4440 - DNA, 459 bp, synthetic construct
  misc_feature 1..459: note = source = /note="Description of Artificial Sequence: Synthetic coding sequence"
  source 1..459: mol_type = other DNA
atgagaggccccggccaccccctgctgctgggcctgctgctggtgctgggcgccgccggcagaggcagaggcggcgccgagcccagagagcccgccgacggccaggccctgctgagactggtggtggagctggtgcaggagctgagaaagcaccacagcgccgagcacaagggcctgcagctgctgggcagagactgcgccctgggcagagccgaggccgccggcctgggccccagccccgagcagagagtggagatcgtgcccagagacctgagaatgaaggacaagttcctgaagcacctgaccggccccctgtacttcagccccaagtgcagcaagcacttccacagactgtaccacaacaccagagactgcaccatccccgcctactacaagagatgcgccagactgctgaccagactggccgtgagccccgtgtgcatggaggacaagcagtag

SEQ ID NO: 4441 - DNA, 411 bp, synthetic construct; identical to SEQ ID NO: 3832
  misc_feature 1..411: note = source = /note="Description of Artificial Sequence: Synthetic coding sequence"
  source 1..411: mol_type = other DNA

SEQ ID NO: 4442 - DNA, 1209 bp, synthetic construct
  misc_feature 1..1209: note = source = /note="Description of Artificial Sequence: Synthetic coding sequence"
  source 1..1209: mol_type = other DNA
atgagactgcccagaagagccgccctgggcctgctgcccctgctgctgctgctgccccccgcccccgaggccgccaagaagcccaccccctgccacagatgcagaggcctggtggacaagttcaaccagggcatggtggacaccgccaagaagaacttcggcggcggcaacaccgcctgggaggagaagaccctgagcaagtacgagagcagcgagatcagactgctggagatcctggagggcctgtgcgagagcagcgacttcgagtgcaaccagatgctggaggcccaggaggagcacctggaggcctggtggctgcagctgaagagcgagtaccccgacctgttcgagtggttctgcgtgaagaccctgaaggtgtgctgcagccccggcacctacggccccgactgcctggcctgccagggcggcagccagagaccctgcagcggcaacggccactgcagcggcgacggcagcagacagggcgacggcagctgcagatgccacatgggctaccagggccccctgtgcaccgactgcatggacggctacttcagcagcctgagaaacgagacccacagcatctgcaccgtgagaaccggcctgagcgacagctaccccccctgctgcctgagcctgggctgctggagaggcgtgggccacgcctggatcagaggcagaaacacccacacccagcccggctacagcagcagagtgtggatcgccgccttcagccccgcctgcgacgagagctgcaagacctgcagcggcctgaccaacagagactgcggcgagtgcgaggtgggctgggtgctggacgagggcgcctgcgtggacgtggacgagtgcgccgccgagccccccccctgcagcgccgcccagttctgcaagaacgccaacggcagctacacctgcgaggagtgcgacagcagctgcgtgggctgcaccggcgagggccccggcaactgcaaggagtgcatcagcggctacgccagagagcacggccagtgcgccgacgtggacgagtgcagcctggccgagaagacctgcgtgagaaagaacgagaactgctacaacacccccggcagctacgtgtgcgtgtgccccgacggcttcgaggagaccgaggacgcctgcgtgccccccgccgaggccgaggccaccgagggcgagagccccacccagctgcccagcagagaggacctgtag

SEQ ID NO: 4443 - DNA, 633 bp, synthetic construct
  misc_feature 1..633: note = source = /note="Description of Artificial Sequence: Synthetic coding sequence"
  source 1..633: mol_type = other DNA
atgagcgccggcaagatgatgagaaccctgatcaccacccaccccctgcccctgctgctgctgccccagcagctgctgcagctggtgcagttccaggaggtggacaccgacttcgacttccccgaggaggacaagaaggaggagttcgaggagtgcctggagaagttcttcagcaccggccccgccagaccccccaccaaggagaaggtgaagagaagagtgctgatcgagcccggcatgcccctgaaccacatcgagtactgcaaccacgagatcatgggcaagaacgtgtactacaagcacagatgggtggccgagcactacttcctgctgatgcagtacgacgagctgcagaagatctgctacaacagattcgtgccctgcaagaacggcatcagaaagtgcaacagaagcaagggcctggtggagggcgtgtactgcaacctgaccgaggccttcgagatccccgcctgcaagtacgagagcctgtacagaaagggctacgtgctgatcacctgcagctggcagaacgagatgcagaagagaatcccccacaccatcaacgacctggtggagccccccgagcacagaagcttcctgagcgaggacggcgtgttcgtgatcagcccctag

SEQ ID NO: 4444 - DNA, 585 bp, synthetic construct; identical to SEQ ID NO: 3585
  misc_feature 1..585: note = source = /note="Description of Artificial Sequence: Synthetic coding sequence"
  source 1..585: mol_type = other DNA

SEQ ID NO: 4445 - DNA, 4059 bp, synthetic construct
  misc_feature 1..4059: note = source = /note="Description of Artificial Sequence: Synthetic coding sequence"
  source 1..4059: mol_type = other DNA
atgagacacggcgtggcctgggccctgctggtggccgccgccctgggcctgggcgccagaggcgtgagaggcgccgtggccctggccgacttctaccccttcggcgccgagagaggcgacgccgtgacccccaagcaggacgacggcggcagcggcctgagacccctgagcgtgcccttccccttcttcggcgccgagcacagcggcctgtacgtgaacaacaacggcatcatcagcttcctgaaggaggtgagccagttcacccccgtggccttccccatcgccaaggacagatgcgtggtggccgccttctgggccgacgtggacaacagaagagccggcgacgtgtactacagagaggccaccgaccccgccatgctgagaagagccaccgaggacgtgagacactacttccccgagctgctggacttcaacgccacctgggtgttcgtggccacctggtacagagtgaccttcttcggcggcagcagcagcagccccgtgaacaccttccagaccgtgctgatcaccgacggcaagctgagcttcaccatcttcaactacgagagcatcgtgtggaccaccggcacccacgccagcagcggcggcaacgccaccggcctgggcggcatcgccgcccaggccggcttcaacgccggcgacggccagagatacttcagcatccccggcagcagaaccgccgacatggccgaggtggagaccaccaccaacgtgggcgtgcccggcagatgggccttcagaatcgacgacgcccaggtgagagtgggcggctgcggccacaccaccagcgtgtgcctggccctgagaccctgcctgaacggcggcaagtgcatcgacgactgcgtgaccggcaaccccagctacacctgcagctgcctgagcggcttcaccggcagaagatgccacctggacgtgaacgagtgcgccagccagccctgccagaacggcggcacctgcacccacggcatcaacagcttcagatgccagtgccccgccggcttcggcggccccacctgcgagaccgcccagagcccctgcgacaccaaggagtgccagcacggcggccagtgccaggtggagaacggcagcgccgtgtgcgtgtgccaggccggctacaccggcgccgcctgcgagatggacgtggacgactgcagccccgacccctgcctgaacggcggcagctgcgtggacctggtgggcaactacacctgcctgtgcgccgagcccttcaagggcctgagatgcgagaccggcgaccaccccgtgcccgacgcctgcctgagcgccccctgccacaacggcggcacctgcgtggacgccgaccagggctacgtgtgcgagtgccccgagggcttcatgggcctggactgcagagagagagtgcccgacgactgcgagtgcagaaacggcggcagatgcctgggcgccaacaccaccctgtgccagtgccccctgggcttcttcggcctgctgtgcgagttcgagatcaccgccatgccctgcaacatgaacacccagtgccccgacggcggctactgcatggagcacggcggcagctacctgtgcgtgtgccacaccgaccacaacgccagccacagcctgcccagcccctgcgacagcgacccctgcttcaacggcggcagctgcgacgcccacgacgacagctacacctgcgagtgccccagaggcttccacggcaagcactgcgagaaggccagaccccacctgtgcagcagcggcccctgcagaaacggcggcacctgcaaggaggccggcggcgagtaccactgcagctgcccctacagattcaccggcagacactgcgagatcggcaagcccgacagctgcgccagcggcccctgccacaacggcggcacctgcttccactacatcggcaagtacaagtgcgactgcccccccggcttcagcggcagacactgcgagatcgcccccagcccctgcttcagaagcccctgcgtgaacggcggcacctgcgaggacagagacaccgacttcttctgccactgccaggccggctacatgggcagaagatgccaggccgaggtggactgcggcccccccgaggaggtgaagcacgccaccctgagattcaacggcaccagactgggcgccgtggccctgtacgcctgcgacagaggctacagcctgagcgcccccagcagaatcagagtgtgccagccccacggcgtgtggagcgagcccccccagtgcctggagatcgacgagtgcagaagccagccctgcctgcacggcggcagctgccaggacagagtggccggctacctgtgcctgtgcagcaccggctacgagggcgcccactgcgagctggagagagacgagtgcagagcccacccctgcagaaacggcggcagctgcagaaacctgcccggcgcctacgtgtgcagatgccccgccggcttcgtgggcgtgcactgcgagaccgaggtggacgcctgcgacagcagcccctgccagcacggcggcagatgcgagagcggcggcggcgcctacctgtgcgtgtgccccgagagcttcttcggctaccactgcgagaccgtgagcgacccctgcttcagcagcccctgcggcggcagaggctactgcctggccagcaacggcagccacagctgcacctgcaaggtgggctacaccggcgaggactgcgccaaggagctgttcccccccaccgccctgaagatggagagagtggaggagagcggcgtgagcatcagctggaacccccccaacggccccgccgccagacagatgctggacggctacgccgtgacctacgtgagcagcgacggcagctacagaagaaccgacttcgtggacagaaccagaagcagccaccagctgcaggccctggccgccggcagagcctacaacatcagcgtgttcagcgtgaagagaaacagcaacaacaagaacgacatcagcagacccgccgtgctgctggccagaaccagacccagacccgtggagggcttcgaggtgaccaacgtgaccgccagcaccatcagcgtgcagtgggccctgcacagaatcagacacgccaccgtgagcggcgtgagagtgagcatcagacaccccgaggccctgagagaccaggccaccgacgtggacagaagcgtggacagattcaccttcagagccctgctgcccggcaagagatacaccatccagctgaccaccctgagcggcctgagaggcgaggagcaccccaccgagagcctggccaccgcccccacccacgtgtggaccagacccctgccccccgccaacctgaccgccgccagagtgaccgccaccagcgcccacgtggtgtgggacgcccccacccccggcagcctgctggaggcctacgtgatcaacgtgaccaccagccagagcaccaagagcagatacgtgcccaacggcaagctggccagctacaccgtgagagacctgctgcccggcagaagataccagctgagcgtgatcgccgtgcagagcaccgagctgggcccccagcacagcgagcccgcccacctgtacatcatcaccagccccagagacggcgccgacagaagatggcaccagggcggccaccaccccagagtgctgaagaacagacccccccccgccagactgcccgagctgagactgctgaacgaccacagcgcccccgagacccccacccagccccccagattcagcgagctggtggacggcagaggcagagtgagcgccagattcggcggcagccccagcaaggccgccaccgtgagaagccacgtgcccggcaactgcagcgagaacccctgccagaacggcggcacctgcgtgcccggcgccgacgcccacagctgcgactgcggccccggcttcaagggcagaagatgcgagctggcctgcatcaaggtgagcagaccctgcaccagactgttcagcgagaccaaggccttccccgtgtgggagggcggcgtgtgccaccacgtgaagcagagcaagagccagaccctggagaagagctag

SEQ ID NO: 4446 - DNA, 957 bp, synthetic construct; identical to SEQ ID NO: 3752
  misc_feature 1..957: note = source = /note="Description of Artificial Sequence: Synthetic coding sequence"
  source 1..957: mol_type = other DNA

SEQ ID NO: 4447 - DNA, 816 bp, synthetic construct
  misc_feature 1..816: note = source = /note="Description of Artificial Sequence: Synthetic coding sequence"
  source 1..816: mol_type = other DNA
atgcaggccgcctgctggtacgtgctgttcctgctgcagcccaccgtgtacctggtgacctgcgccaacctgaccaacggcggcaagagcgagctgctgaagagcggcagcagcaagagcaccctgaagcacatctggaccgagagcagcaaggacctgagcatcagcagactgctgagccagaccttcagaggcaaggagaacgacaccgacctggacctgagatacgacacccccgagccctacagcgagcaggacctgtgggactggctgagaaacagcaccgacctgcaggagcccagacccagagccaagagaagacccatcgtgaagaccggcaagttcaagaagatgttcggctggggcgacttccacagcaacatcaagaccgtgaagctgaacctgctgatcaccggcaagatcgtggaccacggcaacggcaccttcagcgtgtacttcagacacaacagcaccggccagggcaacgtgagcgtgagcctggtgccccccaccaagatcgtggagttcgacctggcccagcagaccgtgatcgacgccaaggacagcaagagcttcaactgcagaatcgagtacgagaaggtggacaaggccaccaagaacaccctgtgcaactacgaccccagcaagacctgctaccaggagcagacccagagccacgtgagctggctgtgcagcaagcccttcaaggtgatctgcatctacatcagcttctacagcaccgactacaagctggtgcagaaggtgtgccccgactacaactaccacagcgacaccccctacttccccagcggctag

SEQ ID NO: 4448 - DNA, 999 bp, synthetic construct
  misc_feature 1..999: note = source = /note="Description of Artificial Sequence: Synthetic coding sequence"
  source 1..999: mol_type = other DNA
atgctgctgctggccgccgccttcctggtggccttcgtgctgctgctgtacatggtgagccccctgatcagccccaagcccctggccctgcccggcgcccacgtggtggtgaccggcggcagcagcggcatcggcaagtgcatcgccatcgagtgctacaagcagggcgccttcatcaccctggtggccagaaacgaggacaagctgctgcaggccaagaaggagatcgagatgcacagcatcaacgacaagcaggtggtgctgtgcatcagcgtggacgtgagccaggactacaaccaggtggagaacgtgatcaagcaggcccaggagaagctgggccccgtggacatgctggtgaactgcgccggcatggccgtgagcggcaagttcgaggacctggaggtgagcaccttcgagagactgatgagcatcaactacctgggcagcgtgtaccccagcagagccgtgatcaccaccatgaaggagagaagagtgggcagaatcgtgttcgtgagcagccaggccggccagctgggcctgttcggcttcaccgcctacagcgccagcaagttcgccatcagaggcctggccgaggccctgcagatggaggtgaagccctacaacgtgtacatcaccgtggcctacccccccgacaccgacacccccggcttcgccgaggagaacagaaccaagcccctggagaccagactgatcagcgagaccaccagcgtgtgcaagcccgagcaggtggccaagcagatcgtgaaggacgccatccagggcaacttcaacagcagcctgggcagcgacggctacatgctgagcgccctgacctgcggcatggcccccgtgaccagcatcaccgagggcctgcagcaggtggtgaccatgggcctgttcagaaccatcgccctgttctacctgggcagcttcgacagcatcgtgagaagatgcatgatgcagagagagaagagcgagaacgccgacaagaccgcctag

SEQ ID NO: 4449 - DNA, 1497 bp, synthetic construct
  misc_feature 1..1497: note = source = /note="Description of Artificial Sequence: Synthetic coding sequence"
  source 1..1497: mol_type = other DNA
atgagcttcagcgccaccatcctgttcagcccccccagcggcagcgaggccagatgctgctgctgcgcctgcaagagcgagaccaacggcggcaacaccggcagccagggcggcaaccccccccccagcacccccatcaccgtgaccggccacggcctggccgtgcagagcagcgagcagctgctgcacgtgatctaccagagagtggacaaggccgtgggcctggccgaggccgccctgggcctggccagagccaacaacgagctgctgaagagactgcaggaggaggtgggcgacctgagacagggcaaggtgagcatccccgacgaggacggcgagagcagagcccacagcagcccccccgaggagcccggccccctgaaggagagccccggcgaggccttcaaggccctgagcgccgtggaggaggagtgcgacagcgtgggcagcggcgtgcaggtggtgatcgaggagctgagacagctgggcgccgccagcgtgggccccggccccctgggcttccccgccacccagagagacatgagactgcccggctgcaccctggccgccagcgaggccgcccccctgctgaaccccctggtggacgactacgtggccagcgagggcgccgtgcagagagtgctggtgcccgcctacgccaagcagctgagccccgccacccagctggccatccagagagccacccccgagaccggccccgagaacggcaccaagctgcccccccccagacccgaggacatgctgaacgccgccgccgccctggacagcgccctggaggagagcggccccggcagcaccggcgagctgagacacagcctgggcctgaccgtgagcccctgcagaaccagaggcagcggccagaagaacagcagaagaaagagagacctggtgctgagcaagctggtgcacaacgtgcacaaccacatcaccaacgacaagagattcaacggcagcgagagcatcaagagcagctggaacatcagcgtggtgaagttcctgctggagaagctgaagcaggagctggtgaccagcccccacaactacaccgacaaggagctgaagggcgcctgcgtggcctacttcctgaccaagagaagagagtacagaaacagcctgaaccccttcaagggcctgaaggagaaggaggagaagaagctgagaagcagaagatacagactgttcgccaacagaagcagcatcatgagacacttcggccccgaggaccagagactgtggaacgacgtgaccgaggagctgatgagcgacgaggaggacagcctgaacgagcccgacagactgcccagcgccgaggcccagctgctgccccccgagctgtacaaccccaacttccaggaggaggaggacgagggcggcgacgagaacgcccccggcagccccagcttcgaccagccccacaagacctgctgccccgacctgaacagcttcatcgagatcaaggtggagaaggacgagtag

SEQ ID NO: 4450 - DNA, 966 bp, synthetic construct
  misc_feature 1..966: note = source = /note="Description of Artificial Sequence: Synthetic coding sequence"
  source 1..966: mol_type = other DNA
atgagactgcccagaagagccgccctgggcctgctgcccctgctgctgctgctgccccccgcccccgaggccgccaagaagcccaccccctgccacagatgcagaggcctggtggacaagttcaaccagggcatggtggacaccgccaagaagaacttcggcggcggcaacaccgcctgggaggagaagaccctgagcaagtacgagagcagcgagatcagactgctggagatcctggagggcctgtgcgagagcagcgacttcgagtgcaaccagatgctggaggcccaggaggagcacctggaggcctggtggctgcagctgaagagcgagtaccccgacctgttcgagtggttctgcgtgaagaccctgaaggtgtgctgcagccccggcacctacggccccgactgcctggcctgccagggcggcagccagagaccctgcagcggcaacggccactgcagcggcgacggcagcagacagggcgacggcagctgcagatgccacatgggctaccagggccccctgtgcaccgactgcatggacggctacttcagcagcctgagaaacgagacccacagcatctgcaccgcctgcgacgagagctgcaagacctgcagcggcctgaccaacagagactgcggcgagtgcgaggtgggctgggtgctggacgagggcgcctgcgtggacgtggacgagtgcgccgccgagccccccccctgcagcgccgcccagttctgcaagaacgccaacggcagctacacctgcgaggacgtggacgagtgcagcctggccgagaagacctgcgtgagaaagaacgagaactgctacaacacccccggcagctacgtgtgcgtgtgccccgacggcttcgaggagaccgaggacgcctgcgtgccccccgccgaggccgaggccaccgagggcgagagccccacccagctgcccagcagagaggacctgtag

SEQ ID NO: 4451 - DNA, 711 bp, synthetic construct
  misc_feature 1..711: note = source = /note="Description of Artificial Sequence: Synthetic coding sequence"
  source 1..711: mol_type = other DNA
atgatgggcatcttcctggtgtacgtgggcttcgtgttcttcagcgtgctgtacgtgcagcagggcctgagcagccaggccaagttcaccgagttccccagaaacgtgaccgccaccgagggccagaacgtggagatgagctgcgccttccagagcggcagcgccagcgtgtacctggagatccagtggtggttcctgagaggccccgaggacctggaccccggcgccgagggcgccggcgcccaggtggagctgctgcccgacagagaccccgacagcgacggcaccaagatcagcaccgtgaaggtgcagggcaacgacatcagccacaagctgcagatcagcaaggtgagaaagaaggacgagggcctgtacgagtgcagagtgaccgacgccaactacggcgagctgcaggagcacaaggcccaggcctacctgaaggtgaacgccaacagccacgccagaagaatgcaggccttcgaggccagccccatgtggctgcaggacatgaagcccagaaagaacgtgagcgccgccatccccagcagcatccacggcagcgccaaccagagaacccacagcaccagcagcccccaggtggtggccaagatccccaagcagagcccccagagcggcgccagaatcgccaccagccacggcctgagcgtgctgctgctggtgtgcggcttcgtgaagggcgccctgctgtag

SEQ ID NO: 4452 - DNA, 273 bp, synthetic construct
  misc_feature 1..273: note = source = /note="Description of Artificial Sequence: Synthetic coding sequence"
  source 1..273: mol_type = other DNA
atgaacatgaagcccgccaccgccagcgccctgctgctgctgctgctgggcctggcctggacccagggcagccacggctggggcgccgacgccagcagcctgcagaagagagccggcagagacgaccagaactacaactacaaccagcacgcctaccccaccgcctacggcggcaagtacagcgtgaagacccccgccaagggcggcgtgagccccagcagcagcgccagcagagtgcagcccggcctgctgcagtgggtgaagttctggtag

SEQ ID NO: 4453 - DNA, 360 bp, synthetic construct
  misc_feature 1..360: note = source = /note="Description of Artificial Sequence: Synthetic coding sequence"
  source 1..360: mol_type = other DNA
atgcccgccgtgttcatgctggccagcagcagcgccctgcagtgcggcagaggcgtgcccagattccccagaaccgaggtgggcgccggccacagcgtgaacgaggagaccaaggccgagaaggtgggcaaccagaccagcgtgatccccgccaccagcagacaggccgccctgggcaccagctggacccagagaagaacccagcccctgcaggagagaagccactggcaccccagaggcaacaacgccagcggcatgggcggccacagaatgttccccggccccctgagaggccccgccgcccaggtgctggagaacgagtgcggcagcctgggcagagccgccgagggcagaagctag

SEQ ID NO: 4454 - DNA, 639 bp, synthetic construct; identical to SEQ ID NO: 3841
  misc_feature 1..639: note = source = /note="Description of Artificial Sequence: Synthetic coding sequence"
  source 1..639: mol_type = other DNA

SEQ ID NO: 4455 - DNA, 387 bp, synthetic construct
  misc_feature 1..387: note = source = /note="Description of Artificial Sequence: Synthetic coding sequence"
  source 1..387: mol_type = other DNA
atgagagtggccagaagaaccagaaacgtgtgcagatgccccagagccgccggccccggcgtgcccgagcccagagccgcccccctgcccctgctggccatggcccccccccccgcctgcagaagccccatgagccccccccccccccccctgctgctgctgctgctgagcctggccctgctgggcgccagagccagagccgagcccgccggcagcgccgtgcccgcccagagcagaccctgcgtggactgccacgccttcgagttcatgcagagagccctgcaggacctgagaaagaccgcctgcagcctggacgccagaaccgagaccctgctgctgcaggccgagagaagagccctgtgcgcctgctggcccgccggccactag

SEQ ID NO: 4456 - DNA, 399 bp, synthetic construct
  misc_feature 1..399: note = source = /note="Description of Artificial Sequence: Synthetic coding sequence"
  source 1..399: mol_type = other DNA
atgggccccagagtgctgcagccccccctgctgctgctgctgctggccctgctgctggccgccctgccctgcggcgccgaggaggccagccccctgagacccgcccaggtgaccctgagccccccccccgccgtgaccaacggcagccagcccggcgccccccacaacagcacccacaccagaccccccggcgccagcggcagcgccctgaccagaagcttctacgtgatcctgggcttctgcggcctgaccgccctgtacttcctgatcagagccttcagactgaagaagccccagagaagaagatacggcctgctggccaacaccgaggaccccaccgagatggccagcctggacagcgacgaggagaccgtgttcgagagcagaaacctgagatag

SEQ ID NO: 4457 - DNA, 585 bp, synthetic construct; identical to SEQ ID NO: 3737
  misc_feature 1..585: note = source = /note="Description of Artificial Sequence: Synthetic coding sequence"
  source 1..585: mol_type = other DNA

SEQ ID NO: 4458 - DNA, 441 bp, synthetic construct
  misc_feature 1..441: note = source = /note="Description of Artificial Sequence: Synthetic coding sequence"
  source 1..441: mol_type = other DNA
atggtgatcaccatctactacgacgtgaaggtgagattcatcgtgagaggctgcggccagtacatcagctacagatgccaggagaagagaaacacctacttcgccgagtactggtaccaggcccagtgctgccagtacgactactgcaacagctggagcagcccccagctgcagagcagcctgcccgagccccacgacagacccctggccctgcccctgagcgacagccagatccagtggttctaccaggccctgaacctgagcctgcccctgcccaacttccacgccggcaccgagcccgacggcctggaccccatggtgaccctgagcctgaacctgggcctgagcttcgccgagctgagaagaatgtacctgttcctgaacagcagcggcctgctggtgctgccccaggccggcctgctgaccccccaccccagctag

SEQ ID NO: 4459 - DNA, 234 bp, synthetic construct
  misc_feature 1..234: note = source = /note="Description of Artificial Sequence: Synthetic coding sequence"
  source 1..234: mol_type = other DNA
atgggcagcagcggcctgctgagcctgctggtgctgttcgtgctgctggccaacgtgcagggccccggcctgaccgactggctgttccccagaagatgccccaagatcagagaggagtgcgagttccaggagagagacgtgtgcaccaaggacagacagtgccaggacaacaagaagtgctgcgtgttcagctgcggcaagaagtgcctggacctgaagcagggcaagcagtag

SEQ ID NO: 4460 - DNA, 444 bp, synthetic construct
  misc_feature 1..444: note = source = /note="Description of Artificial Sequence: Synthetic coding sequence"
  source 1..444: mol_type = other DNA
atgggccaggaggtgcacggcagctgctgggccctgggcgccggcggcggccagagacagtgggtgggcagaagcatgccccccctggccccccagctgtgcagagccgtgttcctggtgcccatcctgctgctgctgcaggtgaagcccctgaacggcagccccggccccaaggacggcagccagaccgagaagacccccagcgccgaccagaaccaggagcagttcgaggagcacttcgtggccagcagcgtgggcgagatgtggcaggtggtggacatggcccagcaggaggaggaccagagcagcaagaccgccgccgtgcacaagcacagcttccacctgagcttctgcttcagcctggccagcgtgatggtgttcagcggcggccccctgagaagaaccttccccaacatccagctgtgcttcatgctgacccactag

SEQ ID NO: 4461 - DNA, 1695 bp, synthetic construct; identical to SEQ ID NO: 3963
  misc_feature 1..1695: note = source = /note="Description of Artificial Sequence: Synthetic coding sequence"
  source 1..1695: mol_type = other DNA

SEQ ID NO: 4462 - DNA, 423 bp, synthetic construct; identical to SEQ ID NO: 3735
  misc_feature 1..423: note = source = /note="Description of Artificial Sequence: Synthetic coding sequence"
  source 1..423: mol_type = other DNA

SEQ ID NO: 4463 - DNA, 528 bp, synthetic construct; identical to SEQ ID NO: 3724
  misc_feature 1..528: note = source = /note="Description of Artificial Sequence: Synthetic coding sequence"
  source 1..528: mol_type = other DNA

SEQ ID NO: 4464 - DNA, 381 bp, synthetic construct; identical to SEQ ID NO: 3676
  misc_feature 1..381: note = source = /note="Description of Artificial Sequence: Synthetic coding sequence"
  source 1..381: mol_type = other DNA

SEQ ID NO: 4465 - DNA, 288 bp, synthetic construct
  misc_feature 1..288: note = source = /note="Description of Artificial Sequence: Synthetic coding sequence"
  source 1..288: mol_type = other DNA
atggcccccccccccgcctgcagaagccccatgagccccccccccccccccctgctgctgctgctgctgagcctggccctgctgggcgccagagccagagccgagcccgccggcagcgccgtgcccgcccagagcagaccctgcgtggactgccacgccttcgagttcatgcagagagccctgcaggacctgagaaagaccgcctgcagcctggacgccagaaccgagaccctgctgctgcaggccgagagaagagccctgtgcgcctgctggcccgccggccactag

SEQ ID NO: 4466 - DNA, 423 bp, synthetic construct; identical to SEQ ID NO: 3735
  misc_feature 1..423: note = source = /note="Description of Artificial Sequence: Synthetic coding sequence"
  source 1..423: mol_type = other DNA

SEQ ID NO: 4467 - DNA, 291 bp, synthetic construct; identical to SEQ ID NO: 3992
  misc_feature 1..291: note = source = /note="Description of Artificial Sequence: Synthetic coding sequence"
  source 1..291: mol_type = other DNA

SEQ ID NO: 4468 - DNA, 678 bp, synthetic construct
  misc_feature 1..678: note = source = /note="Description of Artificial Sequence: Synthetic coding sequence"
  source 1..678: mol_type = other DNA
tgagccgacctgcccagctgctggggcgccggcccctgctacaccggccacaaggtgggcgccctgagaagagacaccgtgatctgctgctgcagacacggcgactacagcaccccctgcctgttcacccccggcaagcccagcagaaaccccagcccctggaagagaaccctgtggaccctgagcgccccctgggccggccccgccggctggaccggcgaggagcagaacgccaccaagaccggcctgatcaccagaagacccagacccctgagaagaagaccccaccccgcccccgccagccccctgcccgagatcatcagaggcaacatccccagaatgctgggcaagttcgtgcccgtgaactgggagcccccccagcccctgcccttccccaagtacctgagatgctacagatgcctgctggagaccaaggagctgggctgcctgctgggcagcgacatctgcctgacccccgccggcagcagctgcatcaccctgcacaagaagaacagcagcggcagcgacgtgatggtgagcgactgcagaagcaaggagcagatgagcgactgcagcaacaccagaaccagccccgtgagcggcttctggatcttcagccagtactgcttcctggacttctgcaacgacccccagaacagaggcctgtacaccccctag

SEQ ID NO: 4469 - DNA, 684 bp, synthetic construct
  misc_feature 1..684: note = source = /note="Description of Artificial Sequence: Synthetic coding sequence"
  source 1..684: mol_type = other DNA
atgggcgccgtgatgggcaccttcagcagcctgcagaccaagcagagaagacccagcaaggacatcgcctggtggtactaccagtaccagagagacaagatcgaggacgagctggagatgaccatggtgtgccacagacccgagggcctggagcagctggaggcccagaccaacttcaccaagagagagctgcaggtgctgtacagaggcttcaagaacgagtgccccagcggcgtggtgaacgaggacaccttcaagcagatctacgcccagttcttcccccacggcgacgccagcacctacgcccactacctgttcaacgccttcgacaccacccagaccggcagcgtgaagttcgaggacttcgtgaccgccctgagcatcctgctgagaggcaccgtgcacgagaagctgagatggaccttcaacctgtacgacatcaacaaggacggctacatcaacaaggaggagatgatggacatcgtgaaggccatctacgacatgatgggcaagtacacctaccccgtgctgaaggaggacacccccagacagcacgtggacgtgttcttccagaagatggacaagaacaaggacggcatcgtgaccctggacgagttcctggagagctgccaggaggacgacaacatcatgagaagcctgcagctgttccagaacgtgatgtag

SEQ ID NO: 4470 - DNA, 546 bp, synthetic construct
  misc_feature 1..546: note = source = /note="Description of Artificial Sequence: Synthetic coding sequence"
  source 1..546: mol_type = other DNA
atgcaggtgaacttcgtgagctacgtgcagctgaccagcagagccctgcccagcctgaccgacagcaagggcagcctggtggtggtgagcagcctgctgggcagagtgcccaccagcttcagcaccccctacagcgccgccaagttcgccctggacggcttcttcggcagcctgagaagagagctggacgtgcaggacgtgaacgtggccatcaccatgtgcgtgctgggcctgagagacagagccagcgccgccgaggccgtgagaagcagcaccagcagacccagacagcccgagcacagaggcgtgcccctgcagagccagaccgccatgttcctgccccccaccgtgcccggcgccagaaccctgaccgagacccccctgagaggctggccccagcccaagatgaagagcagcagacagaagagcaagaccgagaagaacgacggccacctggagcccgtgaccgcctgggaggtgcaggtgcccagagtgagaagactgtgcagaggcctggccagaccccacctgttcggccacgactag

SEQ ID NO: 4471 - DNA, 423 bp, synthetic construct
  misc_feature 1..423: note = source = /note="Description of Artificial Sequence: Synthetic coding sequence"
  source 1..423: mol_type = other DNA
atgagcgacctgctgctgctgggcctgatcggcggcctgaccctgctgctgctgctgaccctgctggccttcgccggctacagcggcctgctggccggcgtggaggtgagcgccggcagcccccccatcagaaacgtgaccgtggcctacaagttccacatgggcctgtacggcgagaccggcagactgttcaccgagagctgcagcatcagccccaagctgagaagcatcgccgtgtactacgacaacccccacatggtgccccccgacaagtgcagatgcgccgtgggcagcatcctgagcgagggcgaggagagccccagccccgagctgatcgacctgtaccagaagttcggcttcaaggtgttcagcttccccgcccccagccacgtggtgaccgccaccttcccctacaccacctag

SEQ ID NO: 4472 - DNA, 177 bp, synthetic construct
  misc_feature 1..177: note = source = /note="Description of Artificial Sequence: Synthetic coding sequence"
  source 1..177: mol_type = other DNA
atgggccccgaggccctgagcagcctgctgctgctgctgctggtggccagcggcgacgccgacatgaagggccacttcgaccccgccaagtgcagatacgccctgggcatgcaggacagaaccatccccgacagcgacatcagcgccagcagcagctggagcgacagcaccgcctag

SEQ ID NO: 4473 - DNA, 2742 bp, synthetic construct; identical to SEQ ID NO: 3799
  misc_feature 1..2742: note = source = /note="Description of Artificial Sequence: Synthetic coding sequence"
  source 1..2742: mol_type = other DNA

SEQ ID NO: 4474 - DNA, 1146 bp, synthetic construct
  misc_feature 1..1146: note = source = /note="Description of Artificial Sequence: Synthetic coding sequence"
  source 1..1146: mol_type = other DNA
atgagactgctggcctggctgatcttcctggccaactggggcggcgccagagccgagcccggcaagttctggcacatcgccgacctgcacctggaccccgactacaaggtgagcaaggaccccttccaggtgtgccccagcgccggcagccagcccgtgcccgacgccggcccctggggcgactacctgtgcgacagcccctgggccctgatcaacagcagcatctacgccatgaaggagatcgagcccgagcccgacttcatcctgtggaccggcgacgacaccccccacgtgcccgacgagaagctgggcgaggccgccgtgctggagatcgtggagagactgaccaagctgatcagagaggtgttccccggcgccttctactgcgagaagctgcccggccccagcggcgccggcagaatcgtggtgctgaacaccaacctgtactacaccagcaacgccctgaccgccgacatggccgaccccggccagcagttccagtggctggaggacgtgctgaccgacgccagcaaggccggcgacatggtgtacatcgtgggccacgtgccccccggcttcttcgagaagacccagaacaaggcctggttcagagagggcttcaacgagaagtacctgaaggtggtgagaaagcaccacagagtgatcgccggccagttcttcggccaccaccacaccgacagcttcagaatgctgtacgacgacgccggcgtgcccatcagcgccatgttcatcacccccggcgtgaccccctggaagaccaccctgcccggcgtggtgaacggcgccaacaaccccgccatcagagtgttcgagtacgacagagccaccctgagcctgaaggacatggtgacctacttcatgaacctgagccaggccaacgcccagggcacccccagatgggagctggagtaccagagcaccctgcagagatactacgtgtacaacagcgtgagctacagcgccggcgtgtgcgacgaggcctgcagcatgcagcacgtgtgcgccatgagacaggtggacatcgacgcctacaccacctgcctgtacgccagcggcaccacccccgtgccccagctgcccctgctgctgatggccctgctgggcctgtgcaccctggtgctgtag

SEQ ID NO: 4475 - DNA, 456 bp, synthetic construct
  misc_feature 1..456: note = source = /note="Description of Artificial Sequence: Synthetic coding sequence"
  source 1..456: mol_type = other DNA
atgagagtggccggcgccgccaagctggtggtggccgtggccgtgttcctgctgaccttctacgtgatcagccaggtgttcgagatcaagatggacgccagcctgggcaacctgttcgccagaagcgccctggacaccgccgccagaagcaccaagccccccagatacaagtgcggcatcagcaaggcctgccccgagaagcacttcgccttcaagatggccagcggcgccgccaacgtggtgggccccaagatctgcctggaggacaacgtgctgatgagcggcgtgaagaacaacgtgggcagaggcatcaacgtggccctggccaacggcaagaccggcgaggtgctggacaccaagtacttcgacatgtggggcggcgacgtggcccccttcatcgagttcctgaaggccatccaggacggcaccatcgtgctgatgggcacctacgactag

SEQ ID NO: 4476 - DNA, 936 bp, synthetic construct
  misc_feature 1..936: note = source = /note="Description of Artificial Sequence: Synthetic coding sequence"
  source 1..936: mol_type = other DNA
tgagcccccagcccctgcagccacttcaactgcggcagccaggtgaccgacggcggcaccatcaagcagaagatcttcaccttcgacgccatgttcagcaccaactacagccacatggagaactacagaaagagagaggacctggtgtaccagagcaccgtgagactgcccgaggtgagaatcagcgacaacggcccctacgagtgccacgtgggcatctacgacagagccaccagagagaaggtggtgctggccagcggcaacatcttcctgaacgtgatggccccccccaccagcatcgaggtggtggccgccgacacccccgcccccttcagcagataccaggcccagaacttcaccctggtgtgcatcgtgagcggcggcaagcccgcccccatggtgtacttcaagagagacggcgagcccatcgacgccgtgcccctgagcgagccccccgccgccagcagcggccccctgcaggacagcagacccttcagaagcctgctgcacagagacctggacgacaccaagatgcagaagagcctgagcctgctggacgccgagaacagaggcggcagaccctacaccgagagacccagcagaggcctgacccccgaccccaacatcctgctgcagcccaccaccgagaacatccccgagaccgtggtgagcagagagttccccagatgggtgcacagcgccgagcccacctacttcctgagacacagcagaacccccagcagcgacggcaccgtggaggtgagagccctgctgacctggaccctgaacccccagatcgacaacgaggccctgttcagctgcgaggtgaagcaccccgccctgagcatgcccatgcaggccgaggtgaccctggtggcccccaagggccccaagatcgtgatgacccccagcagagccagagtgggcgacacctag

SEQ ID NO: 4477 - DNA, 978 bp, synthetic construct; identical to SEQ ID NO: 3582
  misc_feature 1..978: note = source = /note="Description of Artificial Sequence: Synthetic coding sequence"
  source 1..978: mol_type = other DNA

SEQ ID NO: 4478 - DNA, 957 bp, synthetic construct
  misc_feature 1..957: note = source = /note="Description of Artificial Sequence: Synthetic coding sequence"
  source 1..957: mol_type = other DNA
atgggcctgcacctgagaccctacagagtgggcctgctgcccgacggcctgctgttcctgctgctgctgctgatgctgctggccgaccccgccctgcccgccggcagacacccccccgtggtgctgggctggttcaccaccaagcaccccggcccccccagcttcctgatggtgtggatgtacgtgagcctggccctgggcagacccagccactggagcagctggacccccgccaaggccgcctgggtgcccatcagcaccccctggtggagagccctgtgggccggcgccacccacggcgtgagaatgagcgagggcctgcccatgaccggcgccgagccccagagacagccccaggcctggaaggacaagtacatcagagccttcgtgagcctgggcgccccctggggcggcgtggccaagaccctgagagtgctggccagcggcgacaacaacagaatccccgtgatcggccccctgaagatcagagagcagcagagaagcgccgtgagcaccagctggctgctgccctacaactacacctggagccccgagaaggtgttcgtgcagacccccaccatcaactacaccctgagagactacagaaagttcttccaggacatcggcttcgaggacggctggctgatgagacaggacaccgagggcctggtggaggccaccatgccccccggcgtgcagctgcactgcctgtacggcaccggcgtgcccacccccgacagcttctactacgagagcttccccgacagagaccccaagatctgcttcggcgacggcgacggcaccgtgaacctgaagagcgccctgcagtgccaggcctggcagagcagacaggagcaccaggtgctgctgcaggagctgcccggcagcgagcacatcgagatgctggccaacgccaccaccctggcctacctgaagagagtgctgctgggcccctag

SEQ ID NO: 4479 - DNA, 1575 bp, synthetic construct
  misc_feature 1..1575: note = source = /note="Description of Artificial Sequence: Synthetic coding sequence"
  source 1..1575: mol_type = other DNA
tacgccctgagagacagacagggcaacgccatcggcgtgaccgcctgcgacatcgacggcgacggcagagaggagatctacttcctgaacaccaacaacgccttcagcggcgtggccacctacaccgacaagctgttcaagttcagaaacaacagatgggaggacatcctgagcgacgaggtgaacgtggccagaggcgtggccagcctgttcgccggcagaagcgtggcctgcgtggacagaaagggcagcggcagatacagcatctacatcgccaactacgcctacggcaacgtgggccccgacgccctgatcgagatggaccccgaggccagcgacctgagcagaggcatcctggccctgagagacgtggccgccgaggccggcgtgagcaagtacaccggcggcagaggcgtgagcgtgggccccatcctgagcagcagcgccagcgacatcttctgcgacaacgagaacggccccaacttcctgttccacaacagaggcgacggcaccttcgtggacgccgccgccagcgccggcgtggacgacccccaccagcacggcagaggcgtggccctggccgacttcaacagagacggcaaggtggacatcgtgtacggcaactggaacggcccccacagactgtacctgcagatgagcacccacggcaaggtgagattcagagacatcgccagccccaagttcagcatgcccagccccgtgagaaccgtgatcaccgccgacttcgacaacgaccaggagctggagatcttcttcaacaacatcgcctacagaagcagcagcgccaacagactgttcagagtgatcagaagagagcacggcgaccccctgatcgaggagctgaaccccggcgacgccctggagcccgagggcagaggcaccggcggcgtggtgaccgacttcgacggcgacggcatgctggacctgatcctgagccacggcgagagcatggcccagcccctgagcgtgttcagaggcaaccagggcttcaacaacaactggctgagagtggtgcccagaaccagattcggcgccttcgccagaggcgccaaggtggtgctgtacaccaagaagagcggcgcccacctgagaatcatcgacggcggcagcggctacctgtgcgagatggagcccgtggcccacttcggcctgggcaaggacgaggccagcagcgtggaggtgacctggcccgacggcaagatggtgagcagaaacgtggccagcggcgagatgaacagcgtgctggagatcctgtaccccagagacgaggacaccctgcaggaccccgcccccctggagacccccatgaacgccagcagcagccacagctgcgccctggagaccagcccctacgtgagcacccccatggaggccaccggcgccggccccaccagaagcgccgtgggcgccaccagccccaccagaatggcccagcccgcctggggcctgagcgccagccacagagcccccgcccccccccccccccccctgctgctgcccctgcccctgctgctgcccctgctggagctgcccctgctgcacagaagcagctag

SEQ ID NO: 4480 - DNA, 636 bp, synthetic construct
  misc_feature 1..636: note = source = /note="Description of Artificial Sequence: Synthetic coding sequence"
  source 1..636: mol_type = other DNA
atggtgagcagaatggtgagcaccatgctgagcggcctgctgttctggctggccagcggctggacccccgccttcgcctacagccccagaacccccgacagagtgagcgaggccgacatccagagactgctgcacggcgtgatggagcagctgggcatcgccagacccagagtggagtaccccgcccaccaggccatgaacctggtgggcccccagagcatcgagggcggcgcccacgagggcctgcagcacctgggccccttcggcaacatccccaacatcgtggccgagctgaccggcgacaacatccccaaggacttcagcgaggaccagggctaccccgacccccccaacccctgccccgtgggcaagaccgacgacggctgcctggagaacacccccgacaccgccgagttcagcagagagttccagctgcaccagcacctgttcgaccccgagcacgactaccccggcctgggcaagtggaacaagaagctgctgtacgagaagatgaagggcggcgagagaagaaagagaagaagcgtgaacccctacctgcagggccagagactggacaacgtggtggccaagaagagcgtgccccacttcagcgacgaggacaaggaccccgagtag

SEQ ID NO: 4481 - DNA, 465 bp, synthetic construct
  misc_feature 1..465: note = source = /note="Description of Artificial Sequence: Synthetic coding sequence"
  source 1..465: mol_type = other DNA
atggccctgggcgtgcccatcagcgtgtacctgctgttcaacgccatgaccgccctgaccgaggaggccgccgtgaccgtgaccccccccatcaccgcccagcagggcaactggaccgtgaacaagaccgaggccgacaacatcgagggccccatcgccctgaagttcagccacctgtgcctggaggaccacaacagctactgcatcaacggcgcctgcgccttccaccacgagctggagaaggccatctgcagatgcttcaccggctacaccggcgagagatgcgagcacctgaccctgaccagctacgccgtggacagctacgagaagtacatcgccatcggcatcggcgtgggcctgctgctgagcggcttcctggtgatcttctactgctacatcagaaagagatgcctgaagctgaagagcccctacaacgtgtgcagcggcgagagaagacccctgtag

SEQ ID NO: 4482 - DNA, 1446 bp, synthetic construct
  misc_feature 1..1446: note = source = /note="Description of Artificial Sequence: Synthetic coding sequence"
  source 1..1446: mol_type = other DNA
atgggcaagctgagacccggcagagtggagtggctggccagcggccacaccgagagaccccacctgttccagaacctgctgctgttcctgtgggccctgctgaactgcggcctgggcgtgagcgcccagggccccggcgagtggaccccctgggtgagctggaccagatgcagcagcagctgcggcagaggcgtgagcgtgagaagcagaagatgcctgagactgcccggcgaggagccctgctggggcgacagccacgagtacagactgtgccagctgcccgactgcccccccggcgccgtgcccttcagagacctgcagtgcgccctgtacaacggcagacccgtgctgggcacccagaagacctaccagtgggtgcccttccacggcgcccccaaccagtgcgacctgaactgcctggccgagggccacgccttctaccacagcttcggcagagtgctggacggcaccgcctgcagccccggcgcccagggcgtgtgcgtggccggcagatgcctgagcgccggctgcgacggcctgctgggcagcggcgccctggaggacagatgcggcagatgcggcggcgccaacgacagctgcctgttcgtgcagagagtgttcagagacgccggcgccttcgccggctactggaacgtgaccctgatccccgagggcgccagacacatcagagtggagcacagaagcagaaaccacctggccctgatgggcggcgacggcagatacgtgctgaacggccactgggtggtgagcccccccggcacctacgaggccgccggcacccacgtggtgtacaccagagacaccggcccccaggagaccctgcaggccgccggccccaccagccacgacctgctgctgcaggtgctgctgcaggagcccaaccccggcatcgagttcgagttctggctgcccagagagagatacagccccttccaggccagagtgcaggccctgggctggcccctgagacagccccagcccagaggcgtggagccccagccccccgccgcccccgccgtgacccccgcccagacccccaccctggcccccgacccctgccccccctgccccgacaccagaggcagagcccacagactgctgcactactgcggcagcgacttcgtgttccaggccagagtgctgggccaccaccaccaggcccaggagaccagatacgaggtgagaatccagctggtgtacaagaacagaagccccctgagagccagagagtacgtgtgggcccccggccactgcccctgccccatgctggccccccacagagactacctgatggccgtgcagagactggtgagccccgacggcacccaggaccagctgctgctgccccacgccggctacgccagaccctggagccccgccgaggacagcagaatcagactgaccgccagaagatgccccggctag

SEQ ID NO: 4483 - DNA, 627 bp, synthetic construct
  misc_feature 1..627: note = source = /note="Description of Artificial Sequence: Synthetic coding sequence"
  source 1..627: mol_type = other DNA
atggccgacatgcagaacctggtggagagactggagagagccgtgggcagactggaggccgtgagccacaccagcgacatgcacagaggctacgccgacagccccagcaaggccggcgccgccccctacgtgcaggccttcgacagcctgctggccggccccgtggccgagtacctgaagatcagcaaggagatcggcggcgacgtgcagaagcacgccgagatggtgcacaccggcctgaagctggagagagccctgctggtgaccgccagccagtgccagcagcccgccgagaacaagctgagcgacctgctggcccccatcagcgagcagatcaaggaggtgatcaccttcagagagaagaacagaggcagcaagctgttcaaccacctgagcgccgtgagcgagagcatccaggccctgggctgggtggccatggcccccaagcccggcccctacgtgaaggagatgaacgacgccgccatgttctacaccaacagagtgctgaaggagtacaaggacgtggacaagaagcacgtggactgggtgaaggcctacctgagcatctggaccgagctgcaggcctacatcaaggagttccacaccaccggcctggcctggagctag

SEQ ID NO: 4484 - DNA, 1482 bp, synthetic construct
  misc_feature 1..1482: note = source = /note="Description of Artificial Sequence: Synthetic coding sequence"
  source 1..1482: mol_type = other DNA
agcgaggccgtgtacctgaacgacagcacctacgacggccacaccgtgggcggcctgcagtacggcggcctgggccagctggccgacggcgtggtgggcctggacgacttcagaaagagccaggagctgagagtgtggcccggctacgactacgtgggctggagcaaccacagcttcagcagcggctacgtggagatggagttcgagttcgacagactgagagccttccaggccatgcaggtgcactgcaacaacatgcacaccctgggcgccagactgcccggcggcgtggagtgcagattcagaagaggccccgccatggcctgggagggcgagcccatgagacacaacctgggcggcaacctgggcgaccccagagccagagccgtgagcgtgcccctgggcggcagagtggccagattcctgcagtgcagattcctgttcgccggcccctggctgctgttcagcgagatcagcttcatcagcgacgtggtgaacaacagcagccccgccctgggcggcaccttcccccccgccccctggtggccccccggccccccccccaccaacttcagcagcctggagctggagcccagaggccagcagcccgtggccaaggccgagggcagccccaccgccatcctgatcggctgcctggtggccatcatcctgctgctgctgctgatcatcgccctgatgctgtggagactgcactggagaagactgctgagcaaggtgctggagagccaccccagaaccagaagccccggcctggtgggcatcagacccacccccctgcccgtgagccccatggccctgagatgctgcagccccatccagcccaccgccagcttctggcccctgacccccgtgcccctggaggccagagcccccccccacccccccggccccaacccccccacccccagaggcgtgaccggcggcaacacctacgccgtgcccgccctgccccccggcgccgtgggcgacggcccccccagagtggacttccccagaagcagactgagattcaaggagaagctgggcgagggccagttcggcgaggtgcacctgtgcgaggtggacagcccccaggacctggtgagcctggacttccccctgaacgtgagaaagggccaccccctgctggtggccgtgaagatcctgagacccgacgccaccaagaacgccagaaacgacttcctgaaggaggtgaagatcatgagcagactgaaggaccccaacatcatcagactgctgggcgtgtgcgtgcaggacgaccccctgtgcatgatcaccgactacatggagaacggcgacctgaaccagttcctgagcgcccaccagctggaggacaaggccgccgagggcgcccccggcgacggccaggccgcccagggccccaccatcagctaccccatgctgctgcacgtggccgcccagatcgccagcggcatgagatacctggccaccctgaactag

SEQ ID NO: 4485 - DNA, 2319 bp, synthetic construct
  misc_feature 1..2319: note = source = /note="Description of Artificial Sequence: Synthetic coding sequence"
  source 1..2319: mol_type = other DNA
atgcagttccagctgaccctgttcctgcacctgggctggctgagctacagcaaggcccaggacgactgcaacagaggcgcctgccaccccaccaccggcgacctgctggtgggcagaaacacccagctgatggccagcagcacctgcggcctgagcagagcccagaagtactgcatcctgagctacctggagggcgagcagaagtgcttcatctgcgacagcagattcccctacgacccctacgaccagcccaacagccacaccatcgagaacgtgatcgtgagcttcgagcccgacagagagaagaagtggtggcagagcgagaacggcctggaccacgtgagcatcagactggacctggaggccctgttcagattcagccacctgatcctgaccttcaagaccttcagacccgccgccatgctggtggagagaagcaccgactacggccacaactggaaggtgttcaagtacttcgccaaggactgcgccaccagcttccccaacatcaccagcggccaggcccagggcgtgggcgacatcgtgtgcgacagcaagtacagcgacatcgagcccagcaccggcggcgaggtggtgctgaaggtgctggaccccagcttcgagatcgagaacccctacagcccctacatccaggacctggtgaccctgaccaacctgagaatcaacttcaccaagctgcacaccctgggcgacgccctgctgggcagaagacagaacgacagcctggacaagtactactacgccctgtacgagatgatcgtgagaggcagctgcttctgcaacggccacgccagcgagtgcagacccatgcagaagatgagaggcgacgtgttcagcccccccggcatggtgcacggccagtgcgtgtgccagcacaacaccgacggccccaactgcgagagatgcaaggacttcttccaggacgccccctggagacccgccgccgacctgcaggacaacgcctgcagaagctgcagctgcaacagccacagcagcagatgccacttcgacatgaccacctacctggccagcggcggcctgagcggcggcgtgtgcgaggactgccagcacaacaccgagggccagcactgcgacagatgcagacccctgttctacagagaccccctgaagaccatcagcgacccctacgcctgcatcccctgcgagtgcgaccccgacggcaccatcagcggcggcatctgcgtgagccacagcgaccccgccctgggcagcgtggccggccagtgcctgtgcaaggagaacgtggagggcgccaagtgcgaccagtgcaagcccaaccactacggcctgagcgccaccgaccccctgggctgccagccctgcgactgcaaccccctgggcagcctgcccttcctgacctgcgacgtggacaccggccagtgcctgtgcctgagctacgtgaccggcgcccactgcgaggagtgcaccgtgggctactggggcctgggcaaccacctgcacggctgcagcccctgcgactgcgacatcggcggcgcctacagcaacgtgtgcagccccaagaacggccagtgcgagtgcagaccccacgtgaccggcagaagctgcagcgagcccgcccccggctacttcttcgcccccctgaacttctacctgtacgaggccgaggaggccaccaccctgcagggcctggcccccctgggcagcgagaccttcggccagagccccgccgtgcacgtggtgctgggcgagcccgtgcccggcaaccccgtgacctggaccggccccggcttcgccagagtgctgcccggcgccggcctgagattcgccgtgaacaacatccccttccccgtggacttcaccatcgccatccactacgagacccagagcgccgccgactggaccgtgcagatcgtggtgaacccccccggcggcagcgagcactgcatccccaagaccctgcagagcaagccccagagcttcgccctgcccgccgccaccagaatcatgctgctgcccacccccatctgcctggagcccgacgtgcagtacagcatcgacgtgtacttcagccagcccctgcagggcgagagccacgcccacagccacgtgctggtggacagcgccgccgtgcagtggcacaacctgggcagcctgcagccccccccccccgagtgcaagcagttcagctgcttcagcttccccagcagctgggactacagacacccccccccccacctggccaacttctgcatcttcagcagagacggcgtgagcccccactggcccggctggagccagacccccgacctgagatag

SEQ ID NO: 4486 - DNA, 1371 bp, synthetic construct
  misc_feature 1..1371: note = source = /note="Description of Artificial Sequence: Synthetic coding sequence"
  source 1..1371: mol_type = other DNA
atgggcagagccggcgccgccgccgtgatccccggcctggccctgctgtgggccgtgggcctgggcagcgccgcccccagcccccacctgagactgagcttccaggagctgcaggcctggcacggcctgcagaccttcagcctggagagaacctgctgctaccaggccctgctggtggacgaggagagaggcagactgttcgtgggcgccgagaaccacgtggccagcctgaacctggacaacatcagcaagagagccaagaagctggcctggcccgcccccgtggagtggagagaggagtgcaactgggccggcaaggacatcggcaccgagtgcatgaacttcgtgaagctgctgcacgcctacaacagaacccacctgctggcctgcggcaccggcgccttccaccccacctgcgccttcgtggaggtgggccacagagccgaggagcccgtgctgagactggaccccggcagaatcgaggacggcaagggcaagagcccctacgaccccagacacagagccgccagcgtgctggtgggcgaggagctgtacagcggcgtggccgccgacctgatgggcagagacttcaccatcttcagaagcctgggccagagacccagcctgagaaccgagccccacgacagcagatggctgaacgagcccaagttcgtgaaggtgttctggatccccgagagcgagaaccccgacgacgacaagatctacttcttcttcagagagaccgccgtggaggccgcccccgccctgggcagactgagcgtgagcagagtgggccagatctgcagaaacgacgtgggcggccagagaagcctggtgaacaagtggaccaccttcctgaaggccagactggtgtgcagcgtgcccggcgtggagggcgacacccacttcgaccagctgcaggacgtgttcctgctgagcagcagagaccacagaacccccctgctgtacgccgtgttcagcaccagcagcagcatcttccagggcagcgccgtgtgcgtgtacagcatgaacgacgtgagaagagccttcctgggccccttcgcccacaaggagggccccatgcaccagtgggtgagctaccagggcagagtgccctaccccagacaggcctgcgcccccgccagacccctggcccccagcgtgccccccagaaccagccagaccatgagcagcagcctgagaggcaccacccccagctgcaccaccctgagctgccccctgggcggcgccctgttcagctacaagctggagcccatcacccccagcctgaagctgcccagaaccggcctgcagcccctgaccgacaccatgaccagcagcagcctggcccagaccctggccagatgctag

SEQ ID NO: 4487 - DNA, 333 bp, synthetic construct
  misc_feature 1..333: note = source = /note="Description of Artificial Sequence: Synthetic coding sequence"
  source 1..333: mol_type = other DNA
ctgttcatgctgcacaagatcgtgcaggtgtacaacagcgacgtgatcgacaagcagagcgccagcatgaccagcgacaacgccgacgacaaggccgtgatcatcctggtgcccgtgagactgggcggcgagagaaccaacaccgactacctggagttcgtgaagggcatcctgagcctggagtactgcgtgggcatcatcggcggcaagcccaagcagagctactacttcgccggcttccaggacgacagcctgatctacatggacccccactactgccagagcttcgtggacgtgagcatcaaggacttccccctggaggtgatcctgtag

SEQ ID NO: 4488 - DNA, 420 bp, synthetic construct
  misc_feature 1..420: note = source = /note="Description of Artificial Sequence: Synthetic coding sequence"
  source 1..420: mol_type = other DNA
atgggccccgaggccctgagcagcctgctgctgctgctgctggtggccagcggcgacgccgacatgaagggccacttcgaccccgccaagtgcagatacgccctgggcatgcaggacagaaccatccccgacagcgacatcagcgccagcagcagctggagcgacagcaccgccgccagacacagcagactggagagcagcgacggcgacggcgcctggtgccccgccggcagcgtgttccccaaggaggaggagtacctgcaggtggacctgcagagactgcacctggtggccctggtgggcacccagggcagacacgccggcggcctgggcaaggagttcagcagaagctacagactgagatacagcagagacggcagaagatggatgggctggaaggacagatggggccaggagtag

SEQ ID NO: 4489 - DNA, 570 bp, synthetic construct
  misc_feature 1..570: note = source = /note="Description of Artificial Sequence: Synthetic coding sequence"
  source 1..570: mol_type = other DNA
atgctgggcatcaccagctgcagcgaccagcaggccaaggagggcgagggcctggagggcagcagcaccggcagcagcagcggcaaccacggcggcagcggcggcggcaacggccacaagcccggctgcgagaagcccggcaacgaggccagaggcagcggcgagagcggcatccagaacagcgagaccagccccggcatgttcaacttcgacaccttctggaagaacttcaagagcaagctgggcttcatcaactgggacgccatcaacaagaaccaggtgcccccccccagcaccagagccctgctgtacttcagcagactgtgggaggacttcaagcagaacacccccttcctgaactggaaggccatcatcgagggcgccgacgccagcagcctgcagaagagagccggcagagacgaccagaactacaactacaaccagcacgcctaccccaccgcctacggcggcaagtacagcgtgaagacccccgccaagggcggcgtgagccccagcagcagcgccagcagagtgcagcccggcctgctgcagtgggtgaagttctggtag

SEQ ID NO: 4490 - DNA, 438 bp, synthetic construct; identical to SEQ ID NO: 4107
  misc_feature 1..438: note = source = /note="Description of Artificial Sequence: Synthetic coding sequence"
  source 1..438: mol_type = other DNA

SEQ ID NO: 4491 - DNA, 264 bp, synthetic construct
  misc_feature 1..264: note = source = /note="Description of Artificial Sequence: Synthetic coding sequence"
  source 1..264: mol_type = other DNA
tgcaagagaaagccctacctgctgcccagcatcagagagggcgccagactgggcatccaggagtgcggcagccagttcagacacgagagatggaactgcatgatcaccgccgccgccaccaccgcccccatgggcgccagccccctgttcggctacgagctgagcagcggctgcagacaggtggacgtgagcagactgcccctgcccagaagcttcagactgctgtgctgcgagaacatgctggagaaccacgtgttcttctag

SEQ ID NO: 4492 - DNA, 2535 bp, synthetic construct; identical to SEQ ID NO: 3960
  misc_feature 1..2535: note = source = /note="Description of Artificial Sequence: Synthetic coding sequence"
  source 1..2535: mol_type = other DNA

SEQ ID NO: 4493 - DNA, 2631 bp, synthetic construct; identical to SEQ ID NO: 3583
  misc_feature 1..2631: note = source = /note="Description of Artificial Sequence: Synthetic coding sequence"
  source 1..2631: mol_type = other DNA

SEQ ID NO: 4494 - DNA, 942 bp, synthetic construct; identical to SEQ ID NO: 3906
  misc_feature 1..942: note = source = /note="Description of Artificial Sequence: Synthetic coding sequence"
  source 1..942: mol_type = other DNA

SEQ ID NO: 4495 - DNA, 843 bp, synthetic construct
  misc_feature 1..843: note = source = /note="Description of Artificial Sequence: Synthetic coding sequence"
  source 1..843: mol_type = other DNA
atgaagaccttcacctggaccctgggcgtgctgttcttcctgctggtggacaccggccactgcagaggcggccagttcaagatcaagaagatcaaccagagaagataccccagaaccatcaaggacatgatcaccagaatggacctggagaacctgaaggacgtgctgagcagacagaagagagagatcgacgtgctgcagctggtggtggacgtggacggcaacatcgtgaacgaggtgaagctgctgagaaaggagagcagaaacatgaacagcagagtgacccagctgtacatgcagctgctgcacgagatcatcagaaagagagacaacagcctggagctgagccagctggagaacaagatcctgaacgtgaccaccgagatgctgaagatggccaccagatacagagagctggaggtgaagtacgccagcctgaccgacctggtgaacaaccagagcgtgatgatcaccctgctggaggagcagtgcctgagaatcttcagcagacaggacacccacgtgagcccccccctggtgcaggtggtgccccagcacatccccaacagccagcagtacacccccggcctgctgggcggcaacgagatccagagagaccccggctaccccagagacctgatgcccccccccgacctggccaccagccccaccaagagccccttcaagatcccccccgtgaccttcatcaacgagggccccttcaaggactgccagcaggccaaggaggccggccacagcgtgaacggcatcttctgggccgagtacagaggcggcagctacagcctgagagccgtgcagatgatgatcaagcccatcgactag

SEQ ID NO: 4496 - DNA, 522 bp, synthetic construct; identical to SEQ ID NO: 3879
  misc_feature 1..522: note = source = /note="Description of Artificial Sequence: Synthetic coding sequence"
  source 1..522: mol_type = other DNA

SEQ ID NO: 4497 - DNA, 309 bp, synthetic construct
  misc_feature 1..309: note = source = /note="Description of Artificial Sequence: Synthetic coding sequence"
  source 1..309: mol_type = other DNA
atggagagaggcgccggcgccaagctgctgcccctgctgctgctgctgagagccaccggcttcacctgcgcccagaccgacggcagaaacggctacaccgccgtgatcgaggtgaccagcggcggcccctggggcgactgggcctggcccgagatgtgccccgacggcttcttcgccagcggcttcagcctgaaggtggagcccccccagggcatccccggcgacgacaccgccctgaacggcatcagactgcactgcgccagaggcaacgtgctgggcaacacccacgtgctgggcagaatggagtag

SEQ ID NO: 4498 - DNA, 351 bp, synthetic construct; identical to SEQ ID NO: 4162
  misc_feature 1..351: note = source = /note="Description of Artificial Sequence: Synthetic coding sequence"
  source 1..351: mol_type = other DNA

SEQ ID NO: 4499 - DNA, 1137 bp, synthetic construct
  misc_feature 1..1137: note = source = /note="Description of Artificial Sequence: Synthetic coding sequence"
  source 1..1137: mol_type = other DNA
tgatacagcggcgactacatggagcccgagaagcccggcgcccccctgctgcccccccccccccagaacagcgtgccccactacgccgaggccgacatcgtgaccctgcagggcgtgaccggcggcaacacctacgccgtgcccgccctgccccccggcgccgtgggcgacggcccccccagagtggacttccccagaagcagactgagattcaaggagaagctgggcgagggccagttcggcgaggtgcacctgtgcgaggtggacagcccccaggacctggtgagcctggacttccccctgaacgtgagaaagggccaccccctgctggtggccgtgaagatcctgagacccgacgccaccaagaacgccagcttcagcctgttcagcagaaacgacttcctgaaggaggtgaagatcatgagcagactgaaggaccccaacatcatcagactgctgggcgtgtgcgtgcaggacgaccccctgtgcatgatcaccgactacatggagaacggcgacctgaaccagttcctgagcgcccaccagctggaggacaaggccgccgagggcgcccccggcgacggccaggccgcccagggccccaccatcagctaccccatgctgctgcacgtggccgcccagatcgccagcggcatgagatacctggccaccctgaacttcgtgcacagagacctggccaccagaaactgcctggtgggcgagaacttcaccatcaagatcgccgacttcggcatgagcagaaacctgtacgccggcgactactacagagtgcagggcagagccgtgctgcccatcagatggatggcctgggagtgcatcctgatgggcaagttcaccaccgccagcgacgtgtgggccttcggcgtgaccctgtgggaggtgctgatgctgtgcagagcccagcccttcggccagctgaccgacgagcaggtgatcgagaacgccggcgagttcttcagagaccagggcagacaggtgtacctgagcagaccccccgcctgcccccagggcctgtacgagctgatgctgagatgctggagcagagagagcgagcagagaccccccttcagccagctgcacagattcctggccgaggacgccctgaacaccgtgtag

SEQ ID NO: 4500 - DNA, 942 bp, synthetic construct; identical to SEQ ID NO: 3906
  misc_feature 1..942: note = source = /note="Description of Artificial Sequence: Synthetic coding sequence"
  source 1..942: mol_type = other DNA

SEQ ID NO: 4501 - DNA, 420 bp, synthetic construct; identical to SEQ ID NO: 4488
  misc_feature 1..420: note = source = /note="Description of Artificial Sequence: Synthetic coding sequence"
  source 1..420: mol_type = other DNA

SEQ ID NO: 4502 - DNA, 342 bp, synthetic construct
  misc_feature 1..342: note = source = /note="Description of Artificial Sequence: Synthetic coding sequence"
  source 1..342: mol_type = other DNA
atggacaacgtgcagcccaagatcaagcacagacccttctgcttcagcgtgaagggccacgtgaagatgctgagactggccctgaccgtgaccagcatgaccttcttcatcatcgcccaggcccccgagccctacatcgtgatcaccggcttcgaggtgaccgtgatcctgttcttcatcctgctgtacgtgctgagactggacagactgatgaagtggctgttctggcccctgctggacatcatcaacagcctggtgaccaccgtgttcatgctgatcgtgagcgtgctggccctgatccccgagaccaccaccctgaccgtgggcggcggcctgttctag

SEQ ID NO: 4503 - DNA, 465 bp, synthetic construct
  misc_feature 1..465: note = source = /note="Description of Artificial Sequence: Synthetic coding sequence"
  source 1..465: mol_type = other DNA
atgttcggctggggcgacttccacagcaacatcaagaccgtgaagctgaacctgctgatcaccggcaagatcgtggaccacggcaacggcaccttcagcgtgtacttcagacacaacagcaccggccagggcaacgtgagcgtgagcctggtgccccccaccaagatcgtggagttcgacctggcccagcagaccgtgatcgacgccaaggacagcaagagcttcaactgcagaatcgagtacgagaaggtggacaaggccaccaagaacaccctgtgcaactacgaccccagcaagacctgctaccaggagcagacccagagccacgtgagctggctgtgcagcaagcccttcaaggtgatctgcatctacatcagcttctacagcaccgactacaagctggtgcagaaggtgtgccccgactacaactaccacagcgacaccccctacttccccagcggctag

SEQ ID NO: 4504 - DNA, 531 bp, synthetic construct
  misc_feature 1..531: note = source = /note="Description of Artificial Sequence: Synthetic coding sequence"
  source 1..531: mol_type = other DNA
atggccgacatgcagaacctggtggagagactggagagagccgtgggcagactggaggccgtgagccacaccagcgacatgcacagaggctacgccgacagccccagcaaggccggcgccgccccctacgtgcaggccttcgacagcctgctggccggccccgtggccgagtacctgaagatcagcaaggagatcggcggcgacgtgcagaagcacgccgagatggtgcacaccggcctgaagctggagagagccctgctggtgaccgccagccagtgccagcagcccgccgagaacaagctgagcgacctgctggcccccatcagcgagcagatcaaggaggtgatcaccttcagagagaagaacagaggcagcaagctgttcaaccacctgagcgccgtgagcgagagcatccaggccctgggctgggtggccatggcccccaagcccggcccctacgtgaaggagatgaacgacgccgccatgttctacaccaacagagtgctgaaggagtacaaggacgtggactag

SEQ ID NO: 4505 - DNA, 2535 bp, synthetic construct; identical to SEQ ID NO: 3960
  misc_feature 1..2535: note = source = /note="Description of Artificial Sequence: Synthetic coding sequence"
  source 1..2535: mol_type = other DNA

SEQ ID NO: 4506 - DNA, 2055 bp, synthetic construct
  misc_feature 1..2055: note = source = /note="Description of Artificial Sequence: Synthetic coding sequence"
  source 1..2055: mol_type = other DNA
tgacccagaagcagcacccacgtgcccctggtgctgcccctgctggtgctgctgctgctggcccccgccagacaggccgccgcccagagatgcccccaggcctgcatctgcgacaacagcagaagacacgtggcctgcagataccagaacctgaccgaggtgcccgacgccatccccgagctgacccagagactggacctgcagggcaacctgctgaaggtgatccccgccgccgccttccagggcgtgccccacctgacccacctggacctgagacactgcgaggtggagctggtggccgagggcgccttcagaggcctgggcagactgctgctgctgaacctggccagcaaccacctgagagagctgccccaggaggccctggacggcctgggcagcctgagaagactggagctggagggcaacgccctggaggagctgagacccggcaccttcggcgccctgggcgccctggccaccctgaacctggcccacaacgccctggtgtacctgcccgccatggccttccagggcctgctgagagtgagatggctgagactgagccacaacgccctgagcgtgctggcccccgaggccctggccggcctgcccgccctgagaagactgagcctgcaccacaacgagctgcaggccctgcccggccccgtgctgagccaggccagaggcctggccagactggagctgggccacaaccccctgacctacgccggcgaggaggacggcctggccctgcccggcctgagagagctgctgctggacggcggcgccctgcaggccctgggccccagagccttcgcccactgccccagactgcacaccctggacctgagaggcaaccagctggacaccctgccccccctgcagggccccggccagctgagaagactgagactgcagggcaaccccctgtggtgcggctgccaggccagacccctgctggagtggctggccagagccagagtgagaagcgacggcgcctgccagggccccagaagactgagaggcgaggccctggacgccctgagaccctgggacctgagatgccccggcgacgccgcccaggaggaggaggagctggaggagagagccgtggccggccccagagccccccccagaggcccccccagaggccccggcgaggagagagccgtggccccctgccccagagcctgcgtgtgcgtgcccgagagcagacacagcagctgcgagggctgcggcctgcaggccgtgcccagaggcttccccagcgacacccagctgctggacctgagaagaaaccacttccccagcgtgcccagagccgccttccccggcctgggccacctggtgagcctgcacctgcagcactgcggcatcgccgagctggaggccggcgccctggccggcctgggcagactgatctacctgtacctgagcgacaaccagctggccggcctgagcgccgccgccctggagggcgcccccagactgggctacctgtacctggagagaaacagattcctgcaggtgcccggcgccgccctgagagccctgcccagcctgttcagcctgcacctgcaggacaacgccgtggacagactggcccccggcgacctgggcagaaccagagccctgagatgggtgtacctgagcggcaacagaatcaccgaggtgagcctgggcgccctgggccccgccagagagctggagaagctgcacctggacagaaaccagctgagagaggtgcccaccggcgccctggagggcctgcccgccctgctggagctgcagctgagcggcaaccccctgagagccctgagagacggcgccttccagcccgtgggcagaagcctgcagcacctgttcctgaacagcagcggcctggagcagatctgccccggcgccttcagcggcctgggccccggcctgcagagcctgcacctgcagaagaaccagctgagagccctgcccgccctgcccagcgccagaagaacccccatcaagggcagacagtgcggcgccgacaaggtgggcaaggagaagggcagactgtag

SEQ ID NO: 4507 - DNA, 2259 bp, synthetic construct
  misc_feature 1..2259: note = source = /note="Description of Artificial Sequence: Synthetic coding sequence"
  source 1..2259: mol_type = other DNA
atggccagacacctgctgctgcccctggtgatgctggtgatcagccccatccccggcgccttccaggacagcgccctgagccccacccaggaggagcccgaggacctggactgcggcagacccgagcccagcgccagaatcgtgggcggcagcaacgcccagcccggcacctggccctggcaggtgagcctgcaccacggcggcggccacatctgcggcggcagcctgatcgcccccagctgggtgctgagcgccgcccactgcttcatgaccaacggcaccctggagcccgccgccgagtggagcgtgctgctgggcgtgcacagccaggacggccccctggacggcgcccacaccagagccgtggccgccatcgtggtgcccgccaactacagccaggtggagctgggcgccgacctggccctgctgagactggccagccccgccagcctgggccccgccgtgtggcccgtgtgcctgcccagagccagccacagattcgtgcacggcaccgcctgctgggccaccggctggggcgacgtgcaggaggccgaccccctgcccctgccctgggtgctgcaggaggtggagctgagactgctgggcgaggccacctgccagtgcctgtacagccagcccggccccttcaacctgaccctgcagatcctgcccggcatgctgtgcgccggctaccccgagggcagaagagacacctgccagggcgacagcggcggccccctggtgtgcgaggagggcggcagatggttccaggccggcatcaccagcttcggcttcggctgcggcagaagaaacagacccggcgtgttcaccgccgtggccacctacgaggcctggatcagagagcaggtgatgggcagcgagcccggccccgccttccccacccagccccagaagacccagagcgacccccaggagcccagagaggagaactgcaccatcgccctgcccgagtgcggcaaggcccccagacccggcgcctggccctgggaggcccaggtgatggtgcccggcagcagaccctgccacggcgccctggtgagcgagagctgggtgctggcccccgccagctgcttcctggaccccaacagcagcgacagcccccccagagacctggacgcctggagagtgctgctgcccagcagacccagagccgagagagtggccagactggtgcagcacgagaacgccagctgggacaacgccagcgacctggccctgctgcagctgagaacccccgtgaacctgagcgccgccagcagacccgtgtgcctgccccaccccgagcactacttcctgcccggcagcagatgcagactggccagatggggcagaggcgagcccgccctgggccccggcgccctgctggaggccgagctgctgggcggctggtggtgccactgcctgtacggcagacagggcgccgccgtgcccctgcccggcgaccccccccacgccctgtgccccgcctaccaggagaaggaggaggtgggcagctgctggaacgacagcagatggagcctgctgtgccaggaggagggcacctggttcctggccggcatcagagacttccccagcggctgcctgagacccagagccttcttccccctgcagacccacggcccctggatcagccacgtgaccagaggcgcctacctggaggaccagctggcctgggactggggccccgacggcgaggagaccgagacccagacctgccccccccacaccgagcacggcgcctgcggcctgagactggaggccgcccccgtgggcgtgctgtggccctggctggccgaggtgcacgtggccggcgacagagtgtgcaccggcatcctgctggcccccggctgggtgctggccgccacccactgcgtgctgagacccggcagcaccaccgtgccctacatcgaggtgtacctgggcagagccggcgccagcagcctgccccagggccaccagatgaccagcgccccccccctgctgtgccagatgaccgagggcagctggatcctggtgggcatggccgtgcagggcagcagagagctgttcgccgccatcggccccgaggaggcctggatcagccagaccgtgggcgaggccaacttcctgccccccagcggcagcccccactggcccaccggcggcagcaacctgtgcccccccgagctggccaaggccagcggcagcccccacgccgtgtacttcctgctgctgctgaccctgctgatccagagctag

SEQ ID NO: 4508 - DNA, 453 bp, synthetic construct; identical to SEQ ID NO: 3797
  misc_feature 1..453: note = source = /note="Description of Artificial Sequence: Synthetic coding sequence"
  source 1..453: mol_type = other DNA

SEQ ID NO: 4509 - DNA, 1161 bp, synthetic construct
  misc_feature 1..1161: note = source = /note="Description of Artificial Sequence: Synthetic coding sequence"
  source 1..1161: mol_type = other DNA
atgaagttccagggccccctggcctgcctgctgctggccctgtgcctgggcagcggcgaggccggccccctgcagagcggcgaggagagcaccggcaccaacatcggcgaggccctgggccacggcctgggcgacgccctgagcgagggcgtgggcaaggccatcggcaaggaggccggcggcgccgccggcagcaaggtgagcgaggccctgggccagggcaccagagaggccgtgggcaccggcgtgagacaggtgcccggcttcggcgtggccgacgccctgggcaacagagtgggcgaggccgcccacgccctgggcaacaccggccacgagatcggcagacaggccgaggacgtgatcagacacggcgccgacgccgtgagaggcagctggcagggcgtgcccggccacaacggcgcctgggagaccagcggcggccacggcatcttcggcagccagggcggcctgggcggccagggccagggcaaccccggcggcctgggcaccccctgggtgcacggctaccccggcaacagcgccggcagcttcggcatgaacccccagggcgccccctggggccagggcggcaacggcggcccccccaacttcggcaccaacacccagggcgccgtggcccagcccggctacggcagcgtgagagccagcaaccagaacgagggctgcaccaaccccccccccagcggcagcggcggcggcagcagcaacagcggcggcggcagcggcagccagagcggcagcagcggcagcggcagcaacggcgacaacaacaacggcagcagcagcggcggcagcagcagcggcagcagcagcggcggcagcagcggcggcagcagcggcggcagcagcggcaacagcggcggcagcagaggcgacagcggcagcgagagcagctggggcagcagcaccggcagcagcagcggcaaccacggcggcagcggcggcggcaacggccacaagcccggctgcgagaagcccggcaacgaggccagaggcagcggcgagagcggcatccagaacagcgagaccagccccggcatgttcaacttcgacaccttctggaagaacttcaagagcaagctgggcttcatcaactgggacgccatcaacaaggaccagagaagcagcagaatcccctag

SEQ ID NO: 4510 - DNA, 1995 bp, synthetic construct; identical to SEQ ID NO: 3643
  misc_feature 1..1995: note = source = /note="Description of Artificial Sequence: Synthetic coding sequence"
  source 1..1995: mol_type = other DNA

SEQ ID NO: 4511 - DNA, 420 bp, synthetic construct; identical to SEQ ID NO: 4488
  misc_feature 1..420: note = source = /note="Description of Artificial Sequence: Synthetic coding sequence"
  source 1..420: mol_type = other DNA

SEQ ID NO: 4512 - DNA, 285 bp, synthetic construct; identical to SEQ ID NO: 3803
  misc_feature 1..285: note = source = /note="Description of Artificial Sequence: Synthetic coding sequence"
  source 1..285: mol_type = other DNA

SEQ ID NO: 4513 - DNA, 699 bp, synthetic construct
  misc_feature 1..699: note = source = /note="Description of Artificial Sequence: Synthetic coding sequence"
  source 1..699: mol_type = other DNA
atgctgcccaagagcagaagagccctgaccatccaggagatcgccgccctggccagaagcagcctgcacggcatcagccaggtggtgaaggaccacgtgaccaagcccaccgccatggcccagggcagagtggcccacctgatcgagtggaagggctggagcaagcccagcgacagccccgccgccctggagagcgccttcagcagctacagcgacctgagcgagggcgagcaggaggccagattcgccgccggcgtggccgagcagttcgccatcgccgaggccaagctgagagcctggagcagcgtggacggcgaggacagcaccgacgacagctacgacgaggacttcgccggcggcatggacaccgacatggccggccagctgcccctgggcccccacctgcaggacctgttcaccggccacagattcagcagacccgtgagacagggcagcgtggagcccgagagcgactgcagccagaccgtgagccccgacaccctgtgcagcagcctgtgcagcctggaggacggcctgctgggcagccccgccagactggccagccagctgctgggcgacgagctgctgctggccaagctgccccccagcagagagagcgccttcagaagcctgggccccctggaggcccaggacagcctgtacaacagccccctgaccgagagctgcctgagcccctag

SEQ ID NO: 4514 - DNA, 2631 bp, synthetic construct; identical to SEQ ID NO: 3583
  misc_feature 1..2631: note = source = /note="Description of Artificial Sequence: Synthetic coding sequence"
  source 1..2631: mol_type = other DNA

SEQ ID NO: 4515 - DNA, 165 bp, synthetic construct
  misc_feature 1..165: note = source = /note="Description of Artificial Sequence: Synthetic coding sequence"
  source 1..165: mol_type = other DNA
atgtgcagagagaccgccggctacggctggctgctggccagcaccgagctgctgagcctgctggagcccctgagcccccagctgctgaaggagcacatcagctgcaccagccaggtggccgccggcgccaaggtgacccccgacagcgccgtgtgggccccctag

SEQ ID NO: 4516 - DNA, 2256 bp, synthetic construct; identical to SEQ ID NO: 3606
  misc_feature 1..2256: note = source = /note="Description of Artificial Sequence: Synthetic coding sequence"
  source 1..2256: mol_type = other DNA

SEQ ID NO: 4517 - DNA, 630 bp, synthetic construct
  misc_feature 1..630: note = source = /note="Description of Artificial Sequence: Synthetic coding sequence"
  source 1..630: mol_type = other DNA
atgggccccgaggccctgagcagcctgctgctgctgctgctggtggccagcggcgacgccgacatgaagggccacttcgaccccgccaagtgcagatacgccctgggcatgcaggacagaaccatccccgacagcgacatcagcgccagcagcagctggagcgacagcaccgccgccagacacagcagactggagagcagcgacggcgacggcgcctggtgccccgccggcagcgtgttccccaaggaggaggagtacctgcaggtggacctgcagagactgcacctggtggccctggtgggcacccagggcagacacgccggcggcctgggcaaggagttcagcagaagctacagactgagatacagcagagacggcagaagatggatgggctggaaggacagatggggccaggaggtgatcagcggcaacgaggaccccgagggcgtggtgctgaaggacctgggcccccccatggtggccagactggtgagattctaccccagagccgacagagtgatgagcgtgtgcctgagagtggagctgtacggctgcctgtggagagacggcctgctgagctacaccgcccccgtgggccagaccatgtacctgagcgaggccgtgtactag

SEQ ID NO: 4518 - DNA, 315 bp, synthetic construct
  misc_feature 1..315: note = source = /note="Description of Artificial Sequence: Synthetic coding sequence"
  source 1..315: mol_type = other DNA
atgagcgacctgctgctgctgggcctgatcggcggcctgaccctgctgctgctgctgaccctgctggccttcgccggctacagcggcctgctggccggcgtggaggtgagcgccggcagcccccccatcagaaacgtgaccgtggcctacaagttccacatgggcctgtacggcgagaccggcagactgttcaccgagagctgcagcatcagccccaagctgagaagcatcgccgtgtactacgacaacccccacatggtgccccccgacaagtgcagatgcgccgtgggcagcatcctgagcgagggcgagtag

SEQ ID NO: 4519 - DNA, 2631 bp, synthetic construct; identical to SEQ ID NO: 3583
  misc_feature 1..2631: note = source = /note="Description of Artificial Sequence: Synthetic coding sequence"
  source 1..2631: mol_type = other DNA

SEQ ID NO: 4520 - DNA, 1053 bp, synthetic construct
  misc_feature 1..1053: note = source = /note="Description of Artificial Sequence: Synthetic coding sequence"
  source 1..1053: mol_type = other DNA
atggaggccttcgccctgggccccgccagaagaggcagaagaagaaccagagccgccggcagcctgctgagcagagccgccatcctgctgttcatcagcgccttcctggtgagagtgcccagcagcgtgggccacctggtgagactgcccagagccttcagactgaccaaggacagcgtgaagatcgtgggcagcaccagcttccccgtgaaggcctacgtgatgctgcaccagaagagcccccacgtgctgtgcgtgacccagcagctgagaaacgccgagctgatcgaccccagcttccagtggtacggccccaagggcaaggtggtgagcgagaacagaaccgcccagatcaccagcaccggcagcctggtgttccagaacttcgaggagagcatgagcggcatctacacctgcttcctggagtacaagcccaccgtggaggagatcgtgaagagactgcagctgaagtacgccatctacgcctacagagagccccactactactaccagttcaccgccagataccacgccgccccctgcaacagcatctacaacatcagcttcgagaagaagctgctgcagatcctgagcaagctgctgctggacctgagctgcgagatcagcctgctgaagagcgagtgccacagagtgaagatgcagagagccggcctgcagaacgagctgttcttcgccttcagcgtgagcagcctggacaccgagaagggccccaagagatgcaccgaccacaactgcgagccctacaagagactgttcaaggccaagaacctgatcgagagattcttcaaccagcaggtggagatcctgggcagaagagccgagcagctgccccagatctactacatcgagggcaccctgcagatggtgtggatcaacagatgcttccccggctacggcatgaacgtgcagcagcaccccaagtgccccgagtgctgcgtgatctgcagccccggcagctacaaccccagagacggcatccactgcctgcagtgcaacagcagcctggtgtacggcgccaagacctgcctgtag

SEQ ID NO: 4521 - DNA, 1392 bp, synthetic construct
  misc_feature 1..1392: note = source = /note="Description of Artificial Sequence: Synthetic coding sequence"
  source 1..1392: mol_type = other DNA
tgactggccctggtgctgtgcaccgtggacagcagaccccccgcccagctggccctgagccacgccggcagactgctggccagcagcaccgccgccagcgtgcccaacaccctgagactggagctgagaggcccccagcccagagacgagggcttctacagctgcagcgccagaagccccctgggccaggccaacaccagcctggagctgagactggagggcgtgagagtgatcctggcccccgaggccgccgtgcccgagggcgcccccatcaccgtgacctgcgccgaccccgccgcccacgcccccaccctgtacacctggtaccacaacggcagatggctgcaggagggccccgccgccagcctgagcttcctggtggccaccagagcccacgccggcgcctacagctgccaggcccaggacgcccagggcaccagaagcagcagacccgccgccctgcaggtgctgtacgccccccaggacgccgtgctgagcagcttcagagacagcagagccagaagcatggccgtgatccagtgcaccgtggacagcgagccccccgccgagctggccctgagccacgacggcaaggtgctggccaccagcagcggcgtgcacagcctggccagcggcaccggccacgtgcaggtggccagaaacgccctgagactgcaggtgcaggacgtgcccgccggcgacgacacctacgtgtgcaccgcccagaacctgctgggcagcatcagcaccatcggcagactgcaggtggagggcgccagagtggtggccgagcccggcctggacgtgcccgagggcgccgccctgaacctgagctgcagactgctgggcggccccggccccgtgggcaacagcaccttcgcctggttctggaacgacagaagactgcacgccgagcccgtgcccaccctggccttcacccacgtggccagagcccaggccggcatgtaccactgcctggccgagctgcccaccggcgccgccgccagcgcccccgtgatgctgagagtgctgtacccccccaagacccccaccatgatggtgttcgtggagcccgagggcggcctgagaggcatcctggactgcagagtggacagcgagcccctggccagcctgaccctgcacctgggcagcagactggtggccagcagccagccccagggcgcccccgccgagccccacatccacgtgctggccagccccaacgccctgagagtggacatcgaggccctgagacccagcgaccagggcgagtacatctgcagcgccagcaacgtgctgggcagcgccagcaccagcacctacttcggcgtgagaggcgagggcagaggcctgcacctgcccggccacagcgcccagaagcccagcagctag

SEQ ID NO: 4522 - DNA, 1398 bp, synthetic construct
  misc_feature 1..1398: note = source = /note="Description of Artificial Sequence: Synthetic coding sequence"
  source 1..1398: mol_type = other DNA
atgaagttccagggccccctggcctgcctgctgctggccctgtgcctgggcagcggcgaggccggccccctgcagagcggcgaggagagcaccggcaccaacatcggcgaggccctgggccacggcctgggcgacgccctgagcgagggcgtgggcaaggccatcggcaaggaggccggcggcgccgccggcagcaaggtgagcgaggccctgggccagggcaccagagaggccgtgggcaccggcgtgagacaggtgcccggcttcggcgtggccgacgccctgggcaacagagtgggcgaggccgcccacgccctgggcaacaccggccacgagatcggcagacaggccgaggacgtgatcagacacggcgccgacgccgtgagaggcagctggcagggcgtgcccggccacaacggcgcctgggagaccagcggcggccacggcatcttcggcagccagggcggcctgggcggccagggccagggcaaccccggcggcctgggcaccccctgggtgcacggctaccccggcaacagcgccggcagcttcggcatgaacccccagggcgccccctggggccagggcggcaacggcggcccccccaacttcggcaccaacacccagggcgccgtggcccagcccggctacggcagcgtgagagccagcaaccagaacgagggctgcaccaaccccccccccagcggcagcggcggcggcagcagcaacagcggcggcagcagcaccggcagcagcagcggcaaccacggcggcagcggcggcggcaacggccacaagcccggctgcgagaagcccggcaacgaggccagaggcagcggcgagagcggcatccagggcttcagaggccagggcgtgagcagcaacatgagagagatcagcaaggagggcaacagactgctgggcggcagcggcgacaactacagaggccagggcagcagctggggcagcggcggcggcgacgccgtgggcggcgtgaacaccgtgaacagcgagaccagccccggcatgttcaacttcgacaccttctggaagaacttcaagagcaagctgggcttcatcaactgggacgccatcaacaagaaccaggtgcccccccccagcaccagagccctgctgtacttcagcagactgtgggaggacttcaagcagaacacccccttcctgaactggaaggccatcatcgagggcgccgacgccagcagcctgcagaagagagccggcagagacgaccagaactacaactacaaccagcacgcctaccccaccgcctacggcggcaagtacagcgtgaagacccccgccaagggcggcgtgagccccagcagcagcgccagcagagtgcagcccggcctgctgcagtgggtgaagttctggtag

SEQ ID NO: 4523 - DNA, 2700 bp, synthetic construct; identical to SEQ ID NO: 4183
  misc_feature 1..2700: note = source = /note="Description of Artificial Sequence: Synthetic coding sequence"
  source 1..2700: mol_type = other DNA

SEQ ID NO: 4524 - DNA, 381 bp, synthetic construct
  misc_feature 1..381: note = source = /note="Description of Artificial Sequence: Synthetic coding sequence"
  source 1..381: mol_type = other DNA
atgtggtacgtgagcaccagaggcgtggcccccagagtgaacttcgagggcgccctgttcagcggctacgcccccgacggcggcctgttcatgcccgaggagctgccccagctggacagaggcaccctgtgccagtggagcaccctgagctaccccggcctggtgaaggagctgtgcgccctgttcatcggcagcgagctgctgcccaaggacgagctgaacgacctgatcgacagagccttcagcagattcagacacagagaggtggtgcacctgagcagactgagaaacggcctgaacgtgctggagctgtggcacggcgtgacctacgccttcaaggacctgagcctgagctgcaccacccagttcctgcagtactag

SEQ ID NO: 4525 - DNA, 147 bp, synthetic construct
  misc_feature 1..147: note = source = /note="Description of Artificial Sequence: Synthetic coding sequence"
  source 1..147: mol_type = other DNA
atgccccccttcctgatcaccctgttcctgttccacagctgctgcctgagagccaacggccacctgagagagggcatgaccctgctgaagaccgagttcgccctgcacctgtaccagagcgtggccgcctgcagaaacgagacctag

SEQ ID NO: 4526 - DNA, 390 bp, synthetic construct; identical to SEQ ID NO: 4161
  misc_feature 1..390: note = source = /note="Description of Artificial Sequence: Synthetic coding sequence"
  source 1..390: mol_type = other DNA

SEQ ID NO: 4527 - DNA, 462 bp, synthetic construct
  misc_feature 1..462: note = source = /note="Description of Artificial Sequence: Synthetic coding sequence"
  source 1..462: mol_type = other DNA
atgaccatccacatcctgatcctgctgctgctgctggccttcagcgcccagggcgacctggacaccgccgccagaagaggccagcaccaggtgccccagcacagaggccacgtgtgctacctgggcgtgtgcagaacccacagactggccgagatcatctactggatcagatgcctgcaccagggcgccctgggcgagggccagcccagagcccccggccccctgcagctgtgggccccccccgtggccagaggcggcagccccgccagattccccggcttcagacccgccgccagaggcctggcccagtgccccgccagatgggtgaccagcggcaccgccagacccctgctgggcttcagcctgcccatctgcatgctggagctgctgctgcacatcagcagccccctgacccccgcccccgagaccgtgttccccagccccagccccggctgcgactag

SEQ ID NO: 4528 - DNA, 450 bp, synthetic construct
  misc_feature 1..450: note = source = /note="Description of Artificial Sequence: Synthetic coding sequence"
  source 1..450: mol_type = other DNA
atgggctggctgaccagaatcgtgtgcctgttctggggcgtgctgctgaccgccagagccaactaccagaacggcaagaacaacgtgcccagactgaagctgagctacaaggagatgctggagagcaacaacgtgatcaccttcaacggcctggccaacagcagcagctaccacaccttcctgctggacgaggagagaagcagactgtacgtgggcgccaaggaccacatcttcagcttcgacctggtgaacatcaaggacttccagaagatcgtgtggcccgtgagctacaccagaagagacgagtgcaagtgggccggcaaggacatcctgaaggagtgcgccaacttcatcaaggtgctgaaggcctacaaccagacccacctgtacgcctgcggcaccggcgccttccaccccatctgcacctacatcgagatcggccaccactag

SEQ ID NO: 4529 - DNA, 543 bp, synthetic construct
  misc_feature 1..543: note = source = /note="Description of Artificial Sequence: Synthetic coding sequence"
  source 1..543: mol_type = other DNA
atggccgacatgcagaacctggtggagagactggagagagccgtgggcagactggaggccgtgagccacaccagcgacatgcacagaggctacgccgacagccccagcaaggccggcgccgccccctacgtgcaggccttcgacagcctgctggccggccccgtggccgagtacctgaagatcagcaaggagatcggcggcgacgtgcagaagcacgccgagatggtgcacaccggcctgaagctggagagagccctgctggtgaccgccagccagtgccagcagcccgccgagaacaagctgagcgacctgctggcccccatcagcgagcagatcaaggaggtgatcaccttcagagagaagaacagaggcagcaagctgttcaaccacctgagcgccgtgagcgagagcatccaggccctgggctgggtggccatggcccccaagcccggcccctacgtgaaggagatgaacgacgccgccatgttctacaccaacagagtgctgaaggagtacaaggacgtggacaagaagcacgtgtag

SEQ ID NO: 4530 - DNA, 630 bp, synthetic construct; identical to SEQ ID NO: 4517
  misc_feature 1..630: note = source = /note="Description of Artificial Sequence: Synthetic coding sequence"
  source 1..630: mol_type = other DNA

SEQ ID NO: 4531 - DNA, 630 bp, synthetic construct; identical to SEQ ID NO: 4517
  misc_feature 1..630: note = source = /note="Description of Artificial Sequence: Synthetic coding sequence"
  source 1..630: mol_type = other DNA

SEQ ID NO: 4532 - DNA, 2631 bp, synthetic construct; identical to SEQ ID NO: 3583
  misc_feature 1..2631: note = source = /note="Description of Artificial Sequence: Synthetic coding sequence"
  source 1..2631: mol_type = other DNA

SEQ ID NO: 4533 - DNA, 2103 bp, synthetic construct
  misc_feature 1..2103: note = source = /note="Description of Artificial Sequence: Synthetic coding sequence"
  source 1..2103: mol_type = other DNA
atgctggcccccttcctgctgctgctgacccacagcagaagccccctgagcttcagaccctgcagccacgtgcccggcgccctgatcgcccagaagcccatgggcagcagcagactggccgccctgctgctgcccctgctgctgatcgtgatcgacctgagcgacagcgccggcatcggcttcagacacctgccccactggaacaccagatgccccctggccagccacaccgacgacagcttcaccggcagcagcgcctacatcccctgcagaacctggtgggccctgttcagcaccaagccctggtgcgtgagagtgtggcactgcagcagatgcctgtgccagcacctgctgagcggcggcagcggcctgcagagaggcctgttccacctgctggtgcagaagagcaagaagagcagcaccttcaagttctacagaagacacaagatgcccgcccccgcccagagaaagctgctgcccagaagacacctgagcgagaagagccaccacatcagcatccccagccccgacatcagccacaagggcctgagaagcaagagaacccagcccagcgaccccgagacctgggagagcctgcccagactggacagccagagacacggcggccccgagttcagcttcgacctgctgcccgaggccagagccatcagagtgaccatcagcagcggccccgaggtgagcgtgagactgtgccaccagtgggccctggagtgcgaggagctgagcagcccctacgacgtgcagaagatcgtgagcggcggccacaccgtggagctgccctacgagttcctgctgccctgcctgtgcatcgaggccagctacctgcaggaggacaccgtgagaagaaagaagtgccccttccagagctggcccgaggcctacggcagcgacttctggaagagcgtgcacttcaccgactacagccagcacacccagatggtgatggccctgaccctgagatgccccctgaagctggaggccgccctgtgccagagacacgactggcacaccctgtgcaaggacctgcccaacgccaccgccagagagagcgacggctggtacgtgctggagaaggtggacctgcacccccagctgtgcttcaagttcagcttcggcaacagcagccacgtggagtgcccccaccagaccggcagcctgaccagctggaacgtgagcatggacacccaggcccagcagctgatcctgcacttcagcagcagaatgcacgccaccttcagcgccgcctggagcctgcccggcctgggccaggacaccctggtgccccccgtgtacaccgtgagccaggccagaggcagcagccccgtgagcctggacctgatcatccccttcctgagacccggctgctgcgtgctggtgtggagaagcgacgtgcagttcgcctggaagcacctgctgtgccccgacgtgagctacagacacctgggcctgctgatcctggccctgctggccctgctgaccctgctgggcgtggtgctggccctgacctgcagaagaccccagagcggccccggccccgccagacccgtgctgctgctgcacgccgccgacagcgaggcccagagaagactggtgggcgccctggccgagctgctgagagccgccctgggcggcggcagagacgtgatcgtggacctgtgggagggcagacacgtggccagagtgggccccctgccctggctgtgggccgccagaaccagagtggccagagagcagggcaccgtgctgctgctgtggagcggcgccgacctgagacccgtgagcggccccgaccccagagccgcccccctgctggccctgctgcacgccgcccccagacccctgctgctgctggcctacttcagcagactgtgcgccaagggcgacatccccccccccctgagagccctgcccagatacagactgctgagagacctgcccagactgctgagagccctggacgccagacccttcgccgaggccaccagctggggcagactgggcgccagacagagaagacagagcagactggagctgtgcagcagactggagagagaggccgccagactggccgacctgggctag

SEQ ID NO: 4534 - DNA, 1194 bp, synthetic construct
  misc_feature 1..1194: note = source = /note="Description of Artificial Sequence: Synthetic coding sequence"
  source 1..1194: mol_type = other DNA
atgagaagcctgctgctgctgagcgccttctgcctgctggaggccgccctggccgccgaggtgaagaagcccgccgccgccgccgcccccggcaccgccgagaagctgagccccaaggccgccaccctggccgagagaagcgccggcctggccttcagcctgtaccaggccatggccaaggaccaggccgtggagaacatcctggtgagccccgtggtggtggccagcagcctgggcctggtgagcctgggcggcaaggccaccaccgccagccaggccaaggccgtgctgagcgccgagcagctgagaaacgtgacctggaagctgggcagcagactgtacggccccagcagcgtgagcttcgccgacgacttcgtgagaagcagcaagcagcactacaactgcgagcacagcaagatcaacttcagagacaagagaagcgccctgcagagcatcaacgagtgggccgcccagaccaccgacggcaagctgcccgaggtgaccaaggacgtggagagaaccgacggcgccctgctggtgaacgccatgttcttcaagccccactgggacgagaagttccaccacaagatggtggacaacagaggcttcatggtgaccagaagctacaccgtgggcgtgatgatgatgcacagaaccggcctgtacaactactacgacgacgagaaggagaagctgcagatcgtggagatgcccctggcccacaagctgagcagcctgatcatcctgatgccccaccacgtggagcccctggagagactggagaagctgctgaccaaggagcagctgaagatctggatgggcaagatgcagaagaaggccgtggccatcagcctgcccaagggcgtggtggaggtgacccacgacctgcagaagcacctggccggcctgggcctgaccgaggccatcgacaagaacaaggccgacctgagcagaatgagcggcaagaaggacctgtacctggccagcgtgttccacgccaccgccttcgagctggacaccgacggcaaccccttcgaccaggacatctacggcagagaggagctgagaagccccaagctgttctacgccgaccaccccttcatcttcctggtgagagacacccagagcggcagcctgctgttcatcggcagactggtgagacccaagggcgacaagatgagagacgagctgtag

SEQ ID NO: 4535 - DNA, 612 bp, synthetic construct
  misc_feature 1..612: note = source = /note="Description of Artificial Sequence: Synthetic coding sequence"
  source 1..612: mol_type = other DNA
atggccgacatgcagaacctggtggagagactggagagagccgtgggcagactggaggccgtgagccacaccagcgacatgcacagaggctacgccgacagccccagcaaggccggcgccgccccctacgtgcaggccttcgacagcctgctggccggccccgtggccgagtacctgaagatcagcaaggagatcggcggcgacgtgcagaagcacgccgagatggtgcacaccggcctgaagctggagagagccctgctggtgaccgccagccagtgccagcagcccgccgagaacaagctgagcgacctgctggcccccatcagcgagcagatcaaggaggtgatcaccttcagagagaagaacagaggcagcaagctgttcaaccacctgagcgccgtgagcgagagcatccaggccctgggctgggtggccatggcccccaagcccggcccctacgtgaaggagatgaacgacgccgccatgttctacaccaacagagtgctgaaggagtacaaggacgtggacaagaagcacgtggactgggtgaaggcctacctgagcatctggaccgagctgcaggcctacatcaaggagttccacaccacctag

SEQ ID NO: 4536 - DNA, 1293 bp, synthetic construct
  misc_feature 1..1293: note = source = /note="Description of Artificial Sequence: Synthetic coding sequence"
  source 1..1293: mol_type = other DNA
atgagaaagctgatgaagcaggtgcaggagcagtgccccaacatcaccagaatctacagcatcggcaagagctaccagggcctgaagctgtacgtgatggagatgagcgacaagcccggcgagcacgagctgggcgagcccgaggtgagatacgtggccggcatgcacggcaacgaggccctgggcagagagctgctgctgctgctgatgcagttcctgtgccacgagttcctgagaggcaaccccagagtgaccagactgctgagcgagatgagaatccacctgctgcccagcatgaaccccgacggctacgagatcgcctaccacagaggcagcgagctggtgggctgggccgagggcagatggaacaaccagagcatcgacctgaaccacaacttcgccgacctgaacacccccctgtgggaggcccaggacgacggcaaggtgccccacatcgtgcccaaccaccacctgcccctgcccacctactacaccctgcccaacgccaccgtggcccccgagaccagagccgtgatcaagtggatgaagagaatccccttcgtgctgagcgccaacctgcacggcggcgagctggtggtgagctaccccttcgacatgaccagaaccccctgggccgccagagagctgacccccacccccgacgacgccgtgttcagatggctgagcaccgtgtacgccggcagcaacctggccatgcaggacaccagcagaagaccctgccacagccaggacttcagcgtgcacggcaacatcatcaacggcgccgactggcacaccgtgcccggcagcatgaacgacttcagctacctgcacaccaactgcttcgaggtgaccgtggagctgagctgcgacaagttcccccacgagaacgagctgccccaggagtgggagaacaacaaggacgccctgctgacctacctggagcaggtgagaatgggcatcgccggcgtggtgagagacaaggacaccgagctgggcatcgccgacgccgtgatcgccgtggacggcatcaaccacgacgtgaccaccgcctggggcggcgactactggagactgctgacccccggcgactacatggtgaccgccagcgccgagggctaccacagcgtgaccagaaactgcagagtgaccttcgaggagggccccttcccctgcaacttcgtgctgaccaagacccccaagcagagactgagagagctgctggccgccggcgccaaggtgccccccgacctgagaagaagactggagagactgagaggccagaaggactag

SEQ ID NO: 4537 - DNA, 1680 bp, synthetic construct; identical to SEQ ID NO: 3622
  misc_feature 1..1680: note = source = /note="Description of Artificial Sequence: Synthetic coding sequence"
  source 1..1680: mol_type = other DNA

SEQ ID NO: 4538 - DNA, 8199 bp, synthetic construct
  misc_feature 1..8199: note = source = /note="Description of Artificial Sequence: Synthetic coding sequence"
  source 1..8199: mol_type = other DNA
atggagcagaccgactgcaagccctaccagcccctgcccaaggtgaagcacgagatggacctggcctacaccagcagcagcgacgagagcgaggacggcagaaagcccagacagagctacaacagcagagagaccctgcacgagtacaaccaggagctgagaatgaactacaacagccagagcagaaagagaaaggaggtggagaagagcacccaggagatggagttctgcgagaccagccacaccctgtgcagcggctaccagaccgacatgcacagcgtgagcagacacggctaccagctggagatgggcagcgacgtggacaccgagaccgagggcgccgccagccccgaccacgccctgagaatgtggatcagaggcatgaagagcgagcacagcagctgcctgagcagcagagccaacagcgccctgagcctgaccgacaccgaccacgagagaaagagcgacggcgagaacggcttcaagttcagccccgtgtgctgcgacatggaggcccaggccggcagcacccaggacgtgcagagcagcccccacaaccagttcaccttcagacccctgccccccccccccccccccccccacgcctgcacctgcgccagaaagcccccccccgccgccgacagcctgcagagaagaagcatgaccaccagaagccagcccagccccgccgcccccgccccccccaccagcacccaggacagcgtgcacctgcacaacagctgggtgctgaacagcaacatccccctggagaccagacacttcctgttcaagcacggcagcggcagcagcgccatcttcagcgccgccagccagaactaccccctgaccagcaacaccgtgtacagccccccccccagacccctgcccagaagcaccttcagcagacccgccttcaccttcaacaagccctacagatgctgcaactggaagtgcaccgccctgagcgccaccgccatcaccgtgaccctggccctgctgctggcctacgtgatcgccgtgcacctgttcggcctgacctggcagctgcagcccgtggagggcgagctgtacgccaacggcgtgagcaagggcaacagaggcaccgagagcatggacaccacctacagccccatcggcggcaaggtgagcgacaagagcgagaagaaggtgttccagaagggcagagccatcgacaccggcgaggtggacatcggcgcccaggtgatgcagaccatcccccccggcctgttctggagattccagatcaccatccaccaccccatctacctgaagttcaacatcagcctggccaaggacagcctgctgggcatctacggcagaagaaacatcccccccacccacacccagttcgacttcgtgaagctgatggacggcaagcagctggtgaagcaggacagcaagggcagcgacgacacccagcacagccccagaaacctgatcctgaccagcctgcaggagaccggcttcatcgagtacatggaccagggcccctggtacctggccttctacaacgacggcaagaagatggagcaggtgttcgtgctgaccaccgccatcgagatcatggacgactgcagcaccaactgcaacggcaacggcgagtgcatcagcggccactgccactgcttccccggcttcctgggccccgactgcgccagagacagctgccccgtgctgtgcggcggcaacggcgagtacgagaagggccactgcgtgtgcagacacggctggaagggccccgagtgcgacgtgcccgaggagcagtgcatcgaccccacctgcttcggccacggcacctgcatcatgggcgtgtgcatctgcgtgcccggctacaagggcgagatctgcgaggaggaggactgcctggaccccatgtgcagcaaccacggcatctgcgtgaagggcgagtgccactgcagcaccggctggggcggcgtgaactgcgagacccccctgcccgtgtgccaggagcagtgcagcggccacggcaccttcctgctggacgccggcgtgtgcagctgcgaccccaagtggaccggcagcgactgcagcaccgagctgtgcaccatggagtgcggcagccacggcgtgtgcagcagaggcatctgccagtgcgaggagggctgggtgggccccacctgcgaggagagaagctgccacagccactgcaccgagcacggccagtgcaaggacggcaagtgcgagtgcagccccggctgggagggcgaccactgcaccatcgcccactacctggacgccgtgagagacggctgccccggcctgtgcttcggcaacggcagatgcaccctggaccagaacggctggcactgcgtgtgccaggtgggctggagcggcaccggctgcaacgtggtgatggagatgctgtgcggcgacaacctggacaacgacggcgacggcctgaccgactgcgtggaccccgactgctgccagcagagcaactgctacatcagccccctgtgccagggcagccccgaccccctggacctgatccagcagagccagaccctgttcagccagcacaccagcagactgttctacgacagaatcaagttcctgatcggcaaggacagcacccacgtgatcccccccgaggtgagcttcgacagcagaagagcctgcgtgatcagaggccaggtggtggccatcgacggcacccccctggtgggcgtgaacgtgagcttcctgcaccacagcgactacggcttcaccatcagcagacaggacggcagcttcgacctggtggccatcggcggcatcagcgtgatcctgatcttcgacagaagccccttcctgcccgagaagagaaccctgtggctgccctggaaccagttcatcgtggtggagaaggtgaccatgcagagagtggtgagcgacccccccagctgcgacatcagcaacttcatcagccccaaccccatcgtgctgcccagccccctgaccagcttcggcggcagctgccccgagagaggcaccatcgtgcccgagctgcaggtggtgcaggaggagatccccatccccagcagcttcgtgagactgagctacctgagcagcagaacccccggctacaagaccctgctgagaatcctgctgacccacagcaccatccccgtgggcatgatcaaggtgcacctgaccgtggccgtggagggcagactgacccagaagtggttccccgccgccatcaacctggtgtacaccttcgcctggaacaagaccgacatctacggccagaaggtgtggggcctggccgaggccctggtgagcgtgggctacgagtacgagacctgccccgacttcatcctgtgggagcagagaaccgtggtgctgcagggcttcgagatggacgccagcaacctgggcggctggagcctgaacaagcaccacatcctgaacccccagagcggcatcatccacaagggcaacggcgagaacatgttcatcagccagcagccccccgtgatcagcaccatcatgggcaacggccaccagagaagcgtggcctgcaccaactgcaacggccccgcccacaacaacaagctgttcgcccccgtggccctggccagcggccccgacggcagcgtgtacgtgggcgacttcaacttcgtgagaagaatcttccccagcggcaacagcgtgagcatcctggagctgagaaacagagacaccagacacagcaccagccccgcccacaagtactacctggccatggaccccgtgagcgagagcctgtacctgagcgacaccaacaccagaaaggtgtacaagctgaagagcctggtggagaccaaggacctgagcaagaacttcgaggtggtggccggcaccggcgaccagtgcctgcccttcgaccagagccactgcggcgacggcggcagagccagcgaggccagcctgaacagccccagaggcatcaccgtggacagacacggcttcatctacttcgtggacggcaccatgatcagaaagatcgacgagaacgccgtgatcaccaccgtgatcggcagcaacggcctgaccagcacccagcccctgagctgcgacagcggcatggacatcacccaggtgagactggagtggcccaccgacctggccgtgaaccccatggacaacagcctgtacgtgctggacaacaacatcgtgctgcagatcagcgagaacagaagagtgagaatcatcgccggcagacccatccactgccaggtgcccggcatcgaccacttcctggtgagcaaggtggccatccacagcaccctggagagcgccagagccatcagcgtgagccacagcggcctgctgttcatcgccgagaccgacgagagaaaggtgaacagaatccagcaggtgaccaccaacggcgagatctacatcatcgccggcgcccccaccgactgcgactgcaagatcgaccccaactgcgactgcttcagcggcgacggcggctacgccaaggacgccaagatgaaggcccccagcagcctggccgtgagccccgacggcaccctgtacgtggccgacctgggcaacgtgagaatcagaaccatcagcagaaaccaggcccacctgaacgacatgaacatctacgagatcgccagccccgccgaccaggagctgtaccagttcaccgtgaacggcacccacctgcacaccctgaacctgatcaccagagactacgtgtacaacttcacctacaacagcgagggcgacctgggcgccatcaccagcagcaacggcaacagcgtgcacatcagaagagacgccggcggcatgcccctgtggctggtggtgcccggcggccaggtgtactggctgaccatcagcagcaacggcgtgctgaagagagtgagcgcccagggctacaacctggccctgatgacctaccccggcaacaccggcctgctggccaccaagagcaacgagaacggctggaccaccgtgtacgagtacgaccccgagggccacctgaccaacgccaccttccccaccggcgaggtgagcagcttccacagcgacctggagaagctgaccaaggtggagctggacaccagcaacagagagaacgtgctgatgagcaccaacctgaccgccaccagcaccatctacatcctgaagcaggagaacacccagagcacctacagagtgaaccccgacggcagcctgagagtgaccttcgccagcggcatggagatcggcctgagcagcgagccccacatcctggccggcgccgtgaaccccaccctgggcaagtgcaacatcagcctgcccggcgagcacaacgccaacctgatcgagtggagacagagaaaggagcagaacaagggcaacgtgagcgccttcgagagaagactgagagcccacaacagaaacctgctgagcatcgacttcgaccacatcaccagaaccggcaagatctacgacgaccacagaaagttcaccctgagaatcctgtacgaccagaccggcagacccatcctgtggagccccgtgagcagatacaacgaggtgaacatcacctacagccccagcggcctggtgaccttcatccagagaggcacctggaacgagaagatggagtacgaccagagcggcaagatcatcagcagaacctgggccgacggcaagatctggagctacacctacctggagaagagcgtgatgctgctgctgcacagccagagaagatacatcttcgagtacgaccagcccgactgcctgctgagcgtgaccatgcccagcatggtgagacacagcctgcagaccatgctgagcgtgggctactacagaaacatctacaccccccccgacagcagcaccagcttcatccaggactacagcagagacggcagactgctgcagaccctgcacctgggcaccggcagaagagtgctgtacaagtacaccaagcaggccagactgagcgaggtgctgtacgacaccacccaggtgaccctgacctacgaggagagcagcggcgtgatcaagaccatccacctgatgcacgacggcttcatctgcaccatcagatacagacagaccggccccctgatcggcagacagatcttcagattcagcgaggagggcctggtgaacgccagattcgactacagctacaacaacttcagagtgaccagcatgcaggccgtgatcaacgagacccccctgcccatcgacctgtacagatacgtggacgtgagcggcagaaccgagcagttcggcaagttcagcgtgatcaactacgacctgaaccaggtgatcaccaccaccgtgatgaagcacaccaagatcttcagcgccaacggccaggtgatcgaggtgcagtacgagatcctgaaggccatcgcctactggatgaccatccagtacgacaacgtgggcagaatggtgatctgcgacatcagagtgggcgtggacgccaacatcaccagatacttctacgagtacgacgccgacggccagctgcagaccgtgagcgtgaacgacaagacccagtggagatacagctacgacctgaacggcaacatcaacctgctgagccacggcaagagcgccagactgacccccctgagatacgacctgagagacagaatcaccagactgggcgagatccagtacaagatggacgaggacggcttcctgagacagagaggcaacgacatcttcgagtacaacagcaacggcctgctgcagaaggcctacaacaaggccagcggctggaccgtgcagtactactacgacggcctgggcagaagagtggccagcaagagcagcctgggccagcacctgcagttcttctacgccgacctgaccaaccccatcagagtgacccacctgtacaaccacaccagcagcgagatcaccagcctgtactacgacctgcagggccacctgatcgccatggagctgagcagcggcgaggagtactacgtggcctgcgacaacaccggcacccccctggccgtgttcagcagcagaggccaggtgatcaaggagatcctgtacaccccctacggcgacatctaccacgacacctaccccgacttccaggtgatcatcggcttccacggcggcctgtacgacttcctgaccaagctggtgcacctgggccagagagactacgacgtggtggccggcagatggaccacccccaaccaccacatctggaagcagctgaacctgctgcccaagcccttcaacctgtacagcttcgagaacaactaccccgtgggcaagatccaggacgtggccaagtacaccaccgacatcagaagctggctggagctgttcggcttccagctgcacaacgtgctgcccggcttccccaagcccgagctggagaacctggagctgacctacgagctgctgagactgcagaccaagacccaggagtgggaccccggcaagaccatcctgggcatccagtgcgagctgcagaagcagctgagaaacttcatcagcctggaccagctgcccatgacccccagatacaacgacggcagatgcctggagggcggcaagcagcccagattcgccgccgtgcccagcgtgttcggcaagggcatcaagttcgccatcaaggacggcatcgtgaccgccgacatcatcggcgtggccaacgaggacagcagaagactggccgccatcctgaacaacgcccactacctggagaacctgcacttcaccatcgagggcagagacacccactacttcatcaagctgggcagcctggaggaggacctggtgctgatcggcaacaccggcggcagaagaatcctggagaacggcgtgaacgtgaccgtgagccagatgaccagcgtgctgaacggcagaaccagaagattcgccgacatccagctgcagcacggcgccctgtgcttcaacatcagatacggcaccaccgtggaggaggagaagaaccacgtgctggagatcgccagacagagagccgtggcccaggcctggaccaaggagcagagaagactgcaggagggcgaggagggcatcagagcctggaccgagggcgagaagcagcagctgctgagcaccggcagagtgcagggctacgacggctacttcgtgctgagcgtggagcagtacctggagctgagcgacagcgccaacaacatccacttcatgagacagagcgagatcggcagaagatag

SEQ ID NO: 4539 - DNA, 264 bp, synthetic construct
  misc_feature 1..264: note = source = /note="Description of Artificial Sequence: Synthetic coding sequence"
  source 1..264: mol_type = other DNA
atgaaggtgctgctgctgaccggcctgggcgccctgttcttcgcctactactgggacgacaacttcgaccccgccagcctgcagggcgccagagtgctgctgaccggcgccaacgccggcgtgggcgaggagctggcctaccactacgccagactgggcagccacctggtgctgaccgcccacaccgaggccctgctgcagaaggccagatggctgaccctggtggtgagcaccctgggcggcagaggcaagtggatcacctag

SEQ ID NO: 4540 - DNA, 1233 bp, synthetic construct
  misc_feature 1..1233: note = source = /note="Description of Artificial Sequence: Synthetic coding sequence"
  source 1..1233: mol_type = other DNA
atgagagcctgcatcagcctggtgctggccgtgctgtgcggcctggcctgggccggcaagatcgagagctgcgccagcagatgcaacgagaagttcaacagagacgccgcctgccagtgcgacagaagatgcctgtggcacggcaactgctgcgaggactacgagcacctgtgcaccgaggaccacaaggagagcgagcccctgccccagctggaggaggagaccgaggaggccctggccagcaacctgtacagcgcccccaccagctgccagggcagatgctacgaggccttcgacaagcaccaccagtgccactgcaacgccagatgccaggagttcggcaactgctgcaaggacttcgagagcctgtgcagcgaccacgaggtgagccacagcagcgacgccatcaccaaggaggagatccagagcatcagcgagaagatctacagagccgacaccaacaaggcccagaaggaggacatcgtgctgaacagccagaactgcatcagccccagcgagaccagaaaccaggtggacagatgccccaagcccctgttcacctacgtgaacgagaagctgttcagcaagcccacctacgccgccttcatcaacctgctgaacaactaccagagagccaccggccacggcgagcacttcagcgcccaggagctggccgagcaggacgccttcctgagagagatcatgaagaccgccgtgatgaaggagctgtacagcttcctgcaccaccagaacagatacggcagcgagcaggagttcgtggacgacctgaagaacatgtggttcggcctgtacagcagaggcaacgaggagggcgacagcagcggcttcgagcacgtgttcagcggcgaggtgaagaagggcaaggtgaccggcttccacaactggatcagattctacctggaggagaaggagggcctggtggactactacagccacatctacgacggcccctgggacagctaccccgacgtgctggccatgcagttcaactgggacggctactacaaggaggtgggcagcgccttcatcggcagcagccccgagttcgagttcgccctgtacagcctgtgcttcatcgccagacccggcaaggtgtgccagctgagcctgggcggctaccccctggccgtgagaacctacacctgggacaagagcacctacggcaacggcaagaagtacatcgccaccgcctacatcgtgagcagcacctag

SEQ ID NO: 4541 - DNA, 351 bp, synthetic construct; identical to SEQ ID NO: 4162
  misc_feature 1..351: note = source = /note="Description of Artificial Sequence: Synthetic coding sequence"
  source 1..351: mol_type = other DNA

SEQ ID NO: 4542 - DNA, 1200 bp, synthetic construct
  misc_feature 1..1200: note = source = /note="Description of Artificial Sequence: Synthetic coding sequence"
  source 1..1200: mol_type = other DNA
atgagcgccagaggcagatgggagggcggcggcagaagagcctgcagaggcagcctgggcctggccagagcccagggcgccgagagagtgaccagcagcgagcagagacccgccatggccagcctgggcctgctgctgctgctgctgctgaccgccctgccccccctgtggagcagcagcctgcccggcctggacaccgccgagagcaaggccaccatcgccgacctgatcctgagcgccctggagagagccaccgtgttcctggagcagagactgcccgagatcaacctggacggcatggtgggcgtgagagtgctggaggagcagctgaagagcgtgagagagaagtgggcccaggagcccctgctgcagcccctgagcctgagagtgggcatgctgggcgagaagctggaggccgccatccagagaagcctgcactacctgaagctgagcgaccccaagtacctgagagagttccagctgaccctgcagcccggcttctggaagctgccccacgcctggatccacaccgacgccagcctggtgtaccccaccttcggcccccaggacagcttcagcgaggagagaagcgacgtgtgcctggtgcagctgctgggcaccggcaccgacagcagcgagccctgcggcctgagcgacctgtgcagaagcctgatgaccaagcccggctgcagcggctactgcctgagccaccagctgctgttcttcctgtgggccagaatgagaggctgcacccagggccccctgcagcagagccaggactacatcaacctgttctgcgccaacatgatggacctgaacagaagagccgaggccatcggctacgcctaccccaccagagacatcttcatggagaacatcatgttctgcggcatgggcggcttcagcgacttctacaagctgagatggctggaggccatcctgagctggcagaagcagcaggagggctgcttcggcgagcccgacgccgaggacgaggagctgagcaaggccatccagtaccagcagcacttcagcagaagagtgaagagaagagagaagcagttccccgacggctgcagcagccacaacaccgccaccgccgtggccgccctgggcggcttcctgtacatcctggccgagtacccccccgccaacagagagccccaccccagcaccccccccccccccagcagcagatag

SEQ ID NO: 4543 - DNA, 510 bp, synthetic construct
  misc_feature 1..510: note = source = /note="Description of Artificial Sequence: Synthetic coding sequence"
  source 1..510: mol_type = other DNA
atgctgagcagcgtggtgttctggggcctgatcgccctgatcggcaccagcagaggcagctaccccttcagccacagcatgaagccccacctgcaccccagactgtaccacggctgctacggcgacatcatgaccatgaagaccagcggcgccacctgcgacgccaacagcgtgatgaactgcggcatcagaggcagcgagatgttcgccgagatggacctgagagccatcaagccctaccagaccctgatcaaggaggtgggccagagacactgcgtggaccccgccgtgatcgccgccatcatcagcagagagagccacggcggcagcgtgctgcaggacggctgggaccacagaggcctgaagttcggcctgatgcagctggacaagcagacctaccaccccgtgggcgcctgggacagcaaggagcacctgagccaggccaccggcatcctgaccgagagaatcaaggccatccagaagaagttccccacctggagcgtggcctag

SEQ ID NO: 4544 - DNA, 300 bp, synthetic construct
  misc_feature 1..300: note = source = /note="Description of Artificial Sequence: Synthetic coding sequence"
  source 1..300: mol_type = other DNA
atggagagaatcagcgccttcttcagcagcatctgggacaccatcctgaccaagcaccaggagggcatctacaacaccatctgcctgggcgtgctgctgggcctgcccctgctggtgatcatcaccctgctgttcatctgctgccactgctgctggagcccccccggcaagagaggccagcagcccgagaagaacaagaagaagaagaagaagaagaagaagaaggacgaggaggacctgtggatcagcgcccagcccaagctgctgcagatggagaagagacccagcctgcccgtgtag

SEQ ID NO: 4545 - DNA, 468 bp, synthetic construct
  misc_feature 1..468: note = source = /note="Description of Artificial Sequence: Synthetic coding sequence"
  source 1..468: mol_type = other DNA
atgaccagcctgaagtgcggcgagaacctgtacatgagcagcgccagcagcagctggagccaggccatccagagctggttcgacgagtacaacgacttcgacttcggcgtgggccccaagacccccaacgccgtggtgggccactacacccaggtggtgtggtacagcagctacctggtgggctgcggcaacgcctactgccccaaccagaaggtgctgaagtactactacgtgtgccagtactgccccgccggcaactgggccaacagactgtacgtgccctacgagcagggcgccccctgcgccagctgccccgacaactgcgacgacggcctgtgcaccaacggctgcaagtacgaggacctgtacagcaactgcaagagcctgaagctgaccctgacctgcaagcaccagctggtgagagacagctgcaaggccagctgcaactgcagcaacagcatctactag

SEQ ID NO: 4546 - DNA, 2886 bp, synthetic construct; identical to SEQ ID NO: 4184
  misc_feature 1..2886: note = source = /note="Description of Artificial Sequence: Synthetic coding sequence"
  source 1..2886: mol_type = other DNA

SEQ ID NO: 4547 - DNA, 444 bp, synthetic construct
  misc_feature 1..444: note = source = /note="Description of Artificial Sequence: Synthetic coding sequence"
  source 1..444: mol_type = other DNA
atggccggcccctggaccttcaccctgctgtgcggcctgctggccgccaccctgatccaggccaccctgagccccaccgccgtgctgatcctgggccccaaggtgatcaaggagaagctgacccaggagctgaaggaccacaacgccaccagcatcctgcagcagctgcccctgctgagcgccatgagagagaagcccgccggcggcatccccgtgctgggcagcctggtgaacaccgtgctgaagcacatcatctggctgaaggtgatcaccgccaacatcctgcagctgcaggtgaagcccagcgccaacgaccaggagctgctggtgaagatccccctggacatggtggccggcttcaacacccccctggtgaagaccatcgtggagttccacatgaccaccgaggcccaggccaccatcagaatggacaccagcgcctag

SEQ ID NO: 4548 - DNA, 948 bp, synthetic construct
  misc_feature 1..948: note = source = /note="Description of Artificial Sequence: Synthetic coding sequence"
  source 1..948: mol_type = other DNA
atgaaggtgctgctgctgaccggcctgggcgccctgttcttcgcctactactgggacgacaacttcgaccccgccagcctgcagggcgccagagtgctgctgaccggcgccaacgccggcgtgggcgaggagctggcctaccactacgccagactgggcagccacctggtgctgaccgcccacaccgaggccctgctgcagaaggtggtgggcaactgcagaaagctgggcgcccccaaggtgttctacatcgccgccgacatggccagccccgaggcccccgagagcgtggtgcagttcgccctggacaagctgggcggcctggactacctggtgctgaaccacatcggcggcgcccccgccggcaccagagccagaagcccccaggccaccagatggctgatgcaggtgaacttcgtgagctacgtgcagctgaccagcagagccctgcccagcctgaccgacagcaagggcagcctggtggtggtgagcagcctgctgggcagagtgcccaccagcttcagcaccccctacagcgccgccaagttcgccctggacggcttcttcggcagcctgagaagagagctggacgtgcaggacgtgaacgtggccatcaccatgtgcgtgctgggcctgagagacagagccagcgccgccgaggccgtgagaagcagcaccagcagacccagacagcccgagcacagaggcgtgcccctgcagagccagaccgccatgttcctgccccccaccgtgcccggcgccagaaccctgaccgagacccccctgagaggctggccccagcccaagatgaagagcagcagacagaagagcaagaccgagaagaacgacggccacctggagcccgtgaccgcctgggaggtgcaggtgcccagagtgagaagactgtgcagaggcctggccagaccccacctgttcggccacgactag

SEQ ID NO: 4549 - DNA, 285 bp, synthetic construct; identical to SEQ ID NO: 3803
  misc_feature 1..285: note = source = /note="Description of Artificial Sequence: Synthetic coding sequence"
  source 1..285: mol_type = other DNA

SEQ ID NO: 4550 - DNA, 783 bp, synthetic construct
  misc_feature 1..783: note = source = /note="Description of Artificial Sequence: Synthetic coding sequence"
  source 1..783: mol_type = other DNA
atggagaagttcaacaccatcagcgtgagcaagtgcaacaaggagaccgtggccatgaaggagaagtgcaagttcggcatgaccagcaccatccccagcggccacgtgtggagaaacacctggaaccccgtgagctgcagcctggccaccgtgaagatgaaggagtgcctgagaggcaagctgatctacctgatgggcgacagcaccatcagacagtggatggagtacttcaaggccagcatcaacaccctgaagagcgtggacctgcacgagagcggcaagctgcagcaccagctggccgtggacctggacagaaacatcaacatccagtggcagaagtactgctaccccctgatcggcagcatgacctacagcgtgaaggagatggagtacctgaccagagccatcgacagaaccggcggcgagaagaacaccgtgatcgtgatcagcctgggccagcacttcagacccttccccatcgacgtgttcatcagaagagccctgaacgtgcacaaggccatccagcacctgctgctgagaagccccgacaccatggtgatcatcaagaccgagaacatcagagagatgtacaacgacgccgagagattcagcgacttccacggctacatccagtacctgatcatcaaggacatcttccaggacctgagcgtgagcatcatcgacgcctgggacatcaccatcgcctacggcaccaacaacgtgcaccccccccagcacgtggtgggcaaccagatcaacatcctgctgaactacatctgctag

SEQ ID NO: 4551 - DNA, 1644 bp, synthetic construct
  misc_feature 1..1644: note = source = /note="Description of Artificial Sequence: Synthetic coding sequence"
  source 1..1644: mol_type = other DNA
atgagcagcaacaccatgctgcagaagaccctgctgatcctgatcagcttcagcgtggtgacctggatgatcttcatcatcagccagaacttcaccaagctgtggagcgccctgaacctgagcatcagcgtgcactactggaacaacagcgccaagagcctgttccccaagaccagcctgatccccctgaagcccctgaccgagaccgagctgagaatcaaggagatcatcgagaagctggaccagcagatcccccccagacccttcacccacgtgaacaccaccaccagcgccacccacagcaccgccaccatcctgaaccccagagacacctactgcagaggcgaccagctggacatcctgctggaggtgagagaccacctgggccagagaaagcagtacggcggcgacttcctgagagccagaatgagcagccccgccctgaccgccggcgccagcggcaaggtgatggacttcaacaacggcacctacctggtgagcttcaccctgttctgggagggccaggtgagcctgagcctgctgctgatccaccccagcgagggcgccagcgccctgtggagagccagaaaccagggctacgacaagatcatcttcaagggcaagttcgtgaacggcaccagccacgtgttcaccgagtgcggcctgaccctgaacagcaacgccgagctgtgcgagtacctggacgacagagaccaggaggccttctactgcatgaagccccagcacatgccctgcgaggccctgacctacatgaccaccagaaacagagaggtgagctacctgaccgacaaggagaacagcctgttccacagaagcaaggtgggcgtggagatgatgaaggacagaaagcacatcgacgtgaccaactgcaacaagagagagaagatcgaggagacctgccaggtgggcatgaagccccccgtgcccggcggctacaccctgcagggcaagtggatcaccaccttctgcaaccaggtgcagctggacaccatcaagatcaacggctgcctgaagggcaagctgatctacctgctgggcgacagcaccctgagacagtggatctactacttccccaaggtggtgaagaccctgaagttcttcgacctgcacgagaccggcatcttcaagaagcacctgctgctggacgccgagagacacacccagatccagtggaagaagcacagctaccccttcgtgaccttccagctgtacagcctgatcgaccacgactacatccccagagagatcgacagactgagcggcgacaagaacaccgccatcgtgatcaccttcggccagcacttcagacccttccccatcgacatcttcatcagaagagccatcggcgtgcagaaggccatcgagagactgttcctgagaagccccgccaccaaggtgatcatcaagaccgagaacatcagagagatgcacatcgagaccgagagattcggcgacttccacggctacatccactacctgatcatgaaggacatcttcaaggacctgaacgtgggcatcatcgacgcctgggacatgaccatcgcctacggcaccgacaccatccacccccccgaccacgtgatcggcaaccagatcaacatgttcctgaactacatctgctag

SEQ ID NO: 4552 - DNA, 399 bp, synthetic construct
  misc_feature 1..399: note = source = /note="Description of Artificial Sequence: Synthetic coding sequence"
  source 1..399: mol_type = other DNA
atgctgatgctgttcgtgttcggcgtgctgctgcacgaggtgagcctgagcggccagaacgaggccccccccaacacccacagcatccccggcgagcccctgtacaactacgccagcatcagactgcccgaggagcacatccccttcttcctgcacaacaacagacacatcgccaccgtgtgcagaaaggacagcctgtgcccctacaagaagcacctggagaagctgaagtactgctggggctacgagaagagctgcaagcccgagttcagattcggctaccccgtgtgcagctacgtggacatgggctggaccgacaccctggagagcgccgaggacatcttctggaagcaggccgacttcggctacgccagagagagactggaggagatgcactag

SEQ ID NO: 4553 - DNA, 861 bp, synthetic construct
  misc_feature 1..861: note = source = /note="Description of Artificial Sequence: Synthetic coding sequence"
  source 1..861: mol_type = other DNA
atgggcagcgccctgttcgtgaagaaggagctgcagctgcaggccaacttcctgggcaacgtgaagagactgtacgaggccgaggtgttcagcaccgacttcagcaaccccagcatcgcccaggccagaatcaacagccacgtgaagaagaagacccagggcaaggtggtggacatcatccagggcctggacctgctgaccgccatggtgctggtgaaccacatcttcttcaaggccaagtgggagaagcccttccaccccgagtacaccagaaagaacttccccttcctggtgggcgagcaggtgaccgtgcacgtgcccatgatgcaccagaaggagcagttcgccttcggcgtggacaccgagctgaactgcttcgtgctgcagatggactacaagggcgacgccgtggccttcttcgtgctgcccagcaagggcaagatgagacagctggagcaggccctgagcgccagaaccctgagaaagtggagccacagcctgcagaagagatggatcgaggtgttcatccccagattcagcatcagcgccagctacaacctggagaccatcctgcccaagatgggcatccagaacgtgttcgacaagaacgccgacttcagcggcatcgccaagagagacagcctgcaggtgagcaaggccacccacaaggccgtgctggacgtgagcgaggagggcaccgaggccaccgccgccaccaccaccaagttcatcgtgagaagcaaggacggccccagctacttcaccgtgagcttcaacagaaccttcctgatgatgatcaccaacaaggccaccgacggcatcctgttcctgggcaaggtggagaaccccaccaagagctag

SEQ ID NO: 4554 - DNA, 60 bp, synthetic construct
  misc_feature 1..60: note = source = /note="Description of Artificial Sequence: Synthetic coding sequence"
  source 1..60: mol_type = other DNA
atgggctggctgaccagaatcgtgtgcctgttctggggcgtgctgctgaccgccagatag

SEQ ID NO: 4555 - DNA, 1197 bp, synthetic construct
  misc_feature 1..1197: note = source = /note="Description of Artificial Sequence: Synthetic coding sequence"
  source 1..1197: mol_type = other DNA
atgaagttccagggccccctggcctgcctgctgctggccctgtgcctgggcagcggcgaggccggccccctgcagagcggcgaggagagcaccggcaccaacatcggcgaggccctgggccacggcctgggcgacgccctgagcgagggcgtgggcaaggccatcggcaaggaggccggcggcgccgccggcagcaaggtgagcgaggccctgggccagggcaccagagaggccgtgggcaccggcgtgagacaggtgcccggcttcggcgtggccgacgccctgggcaacagagtgggcgaggccgcccacgccctgggcaacaccggccacgagatcggcagacaggccgaggacgtgatcagacacggcgccgacgccgtgagaggcagctggcagggcgtgcccggccacaacggcgcctgggagaccagcggcggccacggcatcttcggcagccagggcggcctgggcggccagggccagggcaaccccggcggcctgggcaccccctgggtgcacggctaccccggcaacagcgccggcagcttcggcatgaacccccagggcgccccctggggccagggcggcaacggcggcccccccaacttcggcaccaacacccagggcgccgtggcccagcccggctacggcagcgtgagagccagcaaccagaacgagggctgcaccaaccccccccccagcggcagcggcggcggcagcagcaacagcggcggcggcagcggcagccagagcggcagcagcggcagcggcagcaacggcgacaacaacaacggcagcagcagcggcggcagcagcagcggcagcagcagcggcggcagcagcggcggcagcagcggcggcagcagcggcaacagcggcggcagcagaggcgacagcggcagcgagagcagctggggcagcagcaccggcagcagcagcggcaaccacggcggcagcggcggcggcaacggccacaagcccggctgcgagaagcccggcaacgaggccagaggcagcggcgagagcggcatccagggcttcagaggccagggcgtgagcagcaacatgagaaacagcgagaccagccccggcatgttcaacttcgacaccttctggaagaacttcaagagcaagctgggcttcatcaactgggacgccatcaacaaggaccagagaagcagcagaatcccctag

SEQ ID NO: 4556 - DNA, 81 bp, synthetic construct
  misc_feature 1..81: note = source = /note="Description of Artificial Sequence: Synthetic coding sequence"
  source 1..81: mol_type = other DNA
atggcccccaagaagctgagctgcctgagaagcctgctgctgcccctgagcctgaccctgctgctgccccaggccgactag

SEQ ID NO: 4557 - DNA, 696 bp, synthetic construct
  misc_feature 1..696: note = source = /note="Description of Artificial Sequence: Synthetic coding sequence"
  source 1..696: mol_type = other DNA
atggcccagctgttcctgcccctgctggccgccctggtgctggcccaggcccccgccgccctggccgacgtgctggagggcgacagcagcggcatctacagatgcgaggtgcagcacggcatcgacgacagcagcgacgccgtggaggtgaaggtgaagggcgtggtgttcctgtacagagagggcagcgccagatacgccttcagcttcagcggcgcccaggaggcctgcgccagaatcggcgcccacatcgccacccccgagcagctgtacgccgcctacctgggcggctacgagcagtgcgacgccggctggctgagcgaccagaccgtgagataccccatccagacccccagagaggcctgctacggcgacatggacggcttccccggcgtgagaaactacggcgtggtggaccccgacgacctgtacgacgtgtactgctacgccgaggacctgaacggcgagctgttcctgggcgacccccccgagaagctgaccctggaggaggccagagcctactgccaggagagaggcgccgagatcgccaccaccggccagctgtacgccgcctgggacggcggcctggaccactgcagccccggctggctggccgacggcagcgtgagataccccatcgtgacccccagccagagatgcggcggcggcctgcccggcgtgaagaccctgttctag

SEQ ID NO: 4558 - DNA, 600 bp, synthetic construct
  misc_feature 1..600: note = source = /note="Description of Artificial Sequence: Synthetic coding sequence"
  source 1..600: mol_type = other DNA
atggacgagctgctgcccctgatccccgtgctggagcagtacaagaccgacgccaagctgatcacccagttcaaggaggagatcagaaacctgagcgccgtgctgaccggcatccaggaggagatcggcgcctacgactacgaggagctgcaccagagagtgctgagcctggagaccagactgagagactgcatgaagaagctgacctgcggcaagctgatgaagatcaccggccccgtgaccgtgaagaccagcggcaccagattcggcgcctggatgaccgaccccctggccagcgagaagaacaacagagtgtggtacatggacagctacaccaacaacaagatcgtgagagagtacaagagcatcgccgacttcgtgagcggcgccgagagcagaacctacaacctgcccttcaagtgggccggcaccaaccacgtggtgtacaacggcagcctgtacttcaacaagtaccagagcaacatcatcatcaagtacagcttcgacatgggcagagtgctggcccagagaagcctggagtacgccggcttccacaacgtgacccccacccacggcgtggacagcctgaccagcacctag

SEQ ID NO: 4559 - DNA, 609 bp, synthetic construct
  misc_feature 1..609: note = source = /note="Description of Artificial Sequence: Synthetic coding sequence"
  source 1..609: mol_type = other DNA
atggccgacatgcagaacctggtggagagactggagagagccgtgggcagactggaggccgtgagccacaccagcgacatgcacagaggctacgccgacagccccagcaaggccggcgccgccccctacgtgcaggccttcgacagcctgctggccggccccgtggccgagtacctgaagatcagcaaggagatcggcggcgacgtgcagaagcacgccgagatggtgcacaccggcctgaagctggagagagccctgctggtgaccgccagccagtgccagcagcccgccgagaacaagctgagcgacctgctggcccccatcagcgagcagatcaaggaggtgatcaccttcagagagaagaacagaggcagcaagctgttcaaccacctgagcgccgtgagcgagagcatccaggccctgggctgggtggccatggcccccaagcccggcccctacgtgaaggagatgaacgacgccgccatgttctacaccaacagagtgctgaaggagtacaaggacgtggacaagaagcacgtggactgggtgaaggcctacctgagcatctggaccgagctgcaggcctacatcaaggagttccacacctag

SEQ ID NO: 4560 - DNA, 2886 bp, synthetic construct; identical to SEQ ID NO: 4184
  misc_feature 1..2886: note = source = /note="Description of Artificial Sequence: Synthetic coding sequence"
  source 1..2886: mol_type = other DNA

SEQ ID NO: 4561 - DNA, 351 bp, synthetic construct; identical to SEQ ID NO: 4162
  misc_feature 1..351: note = source = /note="Description of Artificial Sequence: Synthetic coding sequence"
  source 1..351: mol_type = other DNA

SEQ ID NO: 4562 - DNA, 2334 bp, synthetic construct
  misc_feature 1..2334: note = source = /note="Description of Artificial Sequence: Synthetic coding sequence"
  source 1..2334: mol_type = other DNA
atggccgccgccggcctggtggccgtggccgccgccgccgagtacagcggcaccgtggccagcggcggcaacctgcccggcgtgcactgcggccccagcagcggcgccggccccggcttcggccccggcagctggagcagaagcctggacagagccctggaggaggccgccgtgaccggcgtgctgagcctgagcggcagaaagctgagagagttccccagaggcgccgccaaccacgacctgaccgacaccaccagagccgacctgagcagaaacagactgagcgagatccccatcgaggcctgccacttcgtgagcctggagaacctgaacctgtaccagaactgcatcagatacatccccgaggccatcctgaacctgcaggccctgaccttcctgaacatcagcagaaaccagctgagcaccctgcccgtgcacctgtgcaacctgcccctgaaggtgctgatcgccagcaacaacaagctggtgagcctgcccgaggagatcggccacctgagacacctgatggagctggacgtgagctgcaacgagatccagaccatccccagccagatcggcaacctggaggccctgagagacctgaacgtgagaagaaaccacctggtgcacctgcccgaggagctggccgagctgcccctgatcagactggacttcagctgcaacaagatcaccaccatccccgtgtgctacagaaacctgagacacctgcagaccatcaccctggacaacaaccccctgcagagcccccccgcccagatctgcatcaagggcaaggtgcacatcttcaagtacctgaacatccaggcctgcaagatcgcccccgacctgcccgactacgacagaagacccctgggcttcggcagctgccacgaggagctgtacagcagcagaccctacggcgccctggacagcggcttcaacagcgtggacagcggcgacaagagatggagcggcaacgagcccaccgacgagttcagcgacctgcccctgagagtggccgagatcaccaaggagcagagactgagaagagagagccagtaccaggagaacagaggcagcctggtggtgaccaacggcggcgtggagcacgacctggaccagatcgactacatcgacagctgcaccgccgaggaggaggaggccgaggtgagacagcccaagggccccgaccccgacagcctgagcagccagttcatggcctacatcgagcagagaagaatcagccacgagggcagccccgtgaagcccgtggccatcagagagttccagaagaccgaggacatgagaagatacctgcaccagaacagagtgcccgccgagcccagcagcctgctgagcctgagcgccagccacaaccagctgagccacaccgacctggagctgcaccagagaagagagcagctggtggagagaaccagaagagaggcccagctggccgccctgcagtacgaggaggagaagatcagaaccaagcagatccagagagacgccgtgctggacttcgtgaagcagaaggccagccagagcccccagaagcagcaccccctgctggacggcgtggacggcgagtgccccttccccagcagaagaagccagcacaccgacgacagcgccctgtgcatgagcctgagcggcctgaaccaggtgggctgcgccgccaccctgccccacagcagcgccttcacccccctgaagagcgacgacagacccaacgccctgctgagcagccccgccaccgagaccgtgcaccacagccccgcctacagcttccccgccgccatccagagaaaccagccccagagacccgagagcttcctgttcagagccggcgtgagagccgagaccaacaagggccacgccagccccctgccccccagcgccgcccccaccaccgacagcaccgacagcatcaccggccagaacagcagacagagagaggaggagctggagctgatcgaccagctgagaaagcacatcgagtacagactgaaggtgagcctgccctgcgacctgggcgccgccctgaccgacggcgtggtgctgtgccacctggccaaccacgtgagacccagaagcgtgcccagcatccacgtgcccagccccgccgtgcccaagctgaccatggccaagtgcagaagaaacgtggagaacttcctggaggcctgcagaaagatcggcgtgccccaggagcagctgtgcctgcccctgcacatcctggaggagaagggcctgagccaggtggccgtgaccgtgcaggccctgctggagctggccccccccaagcagcagcagcaccagctgagcgccgtgtag

SEQ ID NO: 4563 - DNA, 834 bp, synthetic construct
  misc_feature 1..834: note = source = /note="Description of Artificial Sequence: Synthetic coding sequence"
  source 1..834: mol_type = other DNA
atgctgcaccccgagaccagccccggcagaggccacctgctggccgtgctgctggccctgctgggcaccacctgggccgaggtgtggcccccccagctgcaggagcaggcccccatggccggcgccctgaacagaaaggagagcttcctgctgctgagcctgcacaacagactgagaagctgggtgcagccccccgccgccgacatgagaagactgctggtgtgggccaccagcagccagctgggctgcggcagacacctgtgcagcgccggccagaccgccatcgaggccttcgtgtgcgcctacagccccggcggcaactgggaggtgaacggcaagaccatcatcccctacaagaagggcgcctggtgcagcctgtgcaccgccagcgtgagcggctgcttcaaggcctgggaccacgccggcggcctgtgcgaggtgcccagaaacccctgcagaatgagctgccagaaccacggcagactgaacatcagcacctgccactgccactgcccccccggctacaccggcagatactgccagggccacctgcccaacagcaacatgccccacagcgccatgggcaccaagcccaagacccccggcgtgcccgccatcggcagcctggtgagatgcagcctgcagtgcgtgcacggcagattcagagaggaggagtgcagctgcgtgtgcgacatcggctacggcggcgcccagtgcgccagcgagagctgccccagagcccccaaggagcccgcccccctgaagacccccctgcagtggggcatcagcagccaggagcccgccgtgtgcctgagcttccagctgatccagtag

SEQ ID NO: 4564 - DNA, 456 bp, synthetic construct
  misc_feature 1..456: note = source = /note="Description of Artificial Sequence: Synthetic coding sequence"
  source 1..456: mol_type = other DNA
atgagcgacctgctgctgctgggcctgatcggcggcctgaccctgctgctgctgctgaccctgctggccttcgccggctacagcggcctgctggccggcgtggaggtgagcgccggcagcccccccatcagaaacgtgaccgtggcctacaagttccacatgggcctgtacggcgagaccggcagactgttcaccgagagctgcagcatcagccccaagctgagaagcatcgccgtgtactacgacaacccccacatggtgccccccgacaagtgcagatgcgccgtgggcagcatcctgagcgagggcgaggagagccccagccccgagctgatcgacctgtaccagaagttcggcttcaaggtgttcagcttccccgcccccagccacgtggtgaccgccaccttcccctacaccaccatcctgagcatctggctggccaccagaagagtgtag

SEQ ID NO: 4565 - DNA, 390 bp, synthetic construct; identical to SEQ ID NO: 4161
  misc_feature 1..390: note = source = /note="Description of Artificial Sequence: Synthetic coding sequence"
  source 1..390: mol_type = other DNA

SEQ ID NO: 4566 - DNA, 390 bp, synthetic construct; identical to SEQ ID NO: 4161
  misc_feature 1..390: note = source = /note="Description of Artificial Sequence: Synthetic coding sequence"
  source 1..390: mol_type = other DNA

SEQ ID NO: 4567 - DNA, 891 bp, synthetic construct
  misc_feature 1..891: note = source = /note="Description of Artificial Sequence: Synthetic coding sequence"
  source 1..891: mol_type = other DNA
atggaggccctgctgctgggcgccggcctgctgctgggcgcctacgtgctggtgtactacaacctggtgaaggcccccccctgcggcggcatgggcaacctgagaggcagaaccgccgtggtgaccggcatcagcagctgcggcagaaccagagaggccttcaacctgctgctgagagtgaaccacatcggccccttcctgctgacccacctgctgctgccctgcctgaaggcctgcgcccccagcagagtggtggtggtggccagcgccgcccactgcagaggcagactggacttcaagagactggacagacccgtggtgggctggagacaggagctgagagcctacgccgacaccaagctggccaacgtgctgttcgccagagagctggccaaccagctggaggccaccggcgtgacctgctacgccgcccaccccggccccgtgaacagcgagctgttcctgagacacgtgcccggctggctgagacccctgctgagacccctggcctggctggtgctgagagcccccagaggcggcgcccagacccccctgtactgcgccctgcaggagggcatcgagcccctgagcggcagatacttcgccaactgccacgtggaggaggtgccccccgccgccagagacgacagagccgcccacagactgtgggaggccagcaagagactggccggcctgggccccggcgaggacgccgagcccgacgaggacccccagagcgaggacagcgaggcccccagcagcctgagcaccccccaccccgaggagcccaccgtgagccagccctaccccagcccccagagcagccccgacctgagcaagatgacccacagaatccaggccaaggtggagcccgagatccagctgagctag

SEQ ID NO: 4568 - DNA, 567 bp, synthetic construct; identical to SEQ ID NO: 4160
  misc_feature 1..567: note = source = /note="Description of Artificial Sequence: Synthetic coding sequence"
  source 1..567: mol_type = other DNA

SEQ ID NO: 4569 - DNA, 978 bp, synthetic construct; identical to SEQ ID NO: 3582
  misc_feature 1..978: note = source = /note="Description of Artificial Sequence: Synthetic coding sequence"
  source 1..978: mol_type = other DNA

SEQ ID NO: 4570 - DNA, 2631 bp, synthetic construct; identical to SEQ ID NO: 3583
  misc_feature 1..2631: note = source = /note="Description of Artificial Sequence: Synthetic coding sequence"
  source 1..2631: mol_type = other DNA

SEQ ID NO: 4571 - DNA, 1482 bp, synthetic construct
  misc_feature 1..1482: note = source = /note="Description of Artificial Sequence: Synthetic coding sequence"
  source 1..1482: mol_type = other DNA
atggccctgctggccggcggcctgagcagaggcctgggcagccaccccgccgccgccggcagagacgccgtggtgttcgtgtggctgctgctgagcacctggtgcaccgcccccgccagagccatccaggtgaccgtgagcaacccctaccacgtggtgatcctgttccagcccgtgaccctgccctgcacctaccagatgaccagcacccccacccagcccatcgtgatctggaagtacaagagcttctgcagagacagaatcgccgacgccttcagccccgccagcgtggacaaccagctgaacgcccagctggccgccggcaaccccggctacaacccctacgtggagtgccaggacagcgtgagaaccgtgagagtggtggccaccaagcagggcaacgccgtgaccctgggcgactactaccagggcagaagaatcaccatcaccggcatgtacgccgccggcaaggccgccaccagcggcgtgcccagcatctacgcccccagcacctacgcccacctgagccccgccaagaccccccccccccccgccatgatccccatgggccccgcctacaacggctaccccggcggctaccccggcgacgtggacagaagcagcagcgccggcggccagggcagctacgtgcccctgctgagagacaccgacagcagcgtggccagcgaggtgagaagcggctacagaatccaggccagccagcaggacgacagcatgagagtgctgtactacatggagaaggagctggccaacttcgaccccagcagacccggcccccccagcggcagagtggagagagccatgagcgaggtgaccagcctgcacgaggacgactggagaagcagacccagcagaggccccgccctgacccccatcagagacgaggagtggggcggccacagccccagaagccccagaggctgggaccaggagcccgccagagagcaggccggcggcggctggagagccagaagacccagagccagaagcgtggacgccctggacgacctgaccccccccagcaccgccgagagcggcagcagaagccccaccagcaacggcggcagaagcagagcctacatgccccccagaagcagaagcagagacgacctgtacgaccaggacgacagcagagacttccccagaagcagagacccccactacgacgacttcagaagcagagagagaccccccgccgaccccagaagccaccaccacagaaccagagaccccagagacaacggcagcagaagcggcgacctgccctacgacggcagactgctggaggaggccgtgagaaagaagggcagcgaggagagaagaagaccccacaaggaggaggaggaggaggcctactacccccccgccccccccccctacagcgagaccgacagccaggccagcagagagagaagactgaagaagaacctggccctgagcagagagagcctggtggtgtag

SEQ ID NO: 4572 - DNA, 1788 bp, synthetic construct
  misc_feature 1..1788: note = source = /note="Description of Artificial Sequence: Synthetic coding sequence"
  source 1..1788: mol_type = other DNA
atggacttcctgctggccctggtgctggtgagcagcctgtacctgcaggccgccgccgagttcgacggcagatggcccagacagatcgtgagcagcatcggcctgtgcagatacggcggcagaatcgactgctgctggggctgggccagacagagctggggccagtgccagcccgtgtgccagcccagatgcaagcacggcgagtgcatcggccccaacaagtgcaagtgccaccccggctacgccggcaagacctgcaaccaggacgagcacatccccgcccccctggaccagggcagcgagcagcccctgttccagcccctggaccaccaggccaccagcctgcccagcagagacctgaacgagtgcggcctgaagcccagaccctgcaagcacagatgcatgaacacctacggcagctacaagtgctactgcctgaacggctacatgctgatgcccgacggcagctgcagcagcgccctgacctgcagcatggccaactgccagtacggctgcgacgtggtgaagggccagatcagatgccagtgccccagccccggcctgcagctggcccccgacggcagaacctgcgtggacgtggacgagtgcgccaccggcagagccagctgccccagattcagacagtgcgtgaacaccttcggcagctacatctgcaagtgccacaagggcttcgacctgatgtacatcggcggcaagtaccagtgccacgacatcgacgagtgcagcctgggccagtaccagtgcagcagcttcgccagatgctacaacatcagaggcagctacaagtgcaagtgcaaggagggctaccagggcgacggcctgacctgcgtgtacatccccaaggtgatgatcgagcccagcggccccatccacgtgcccaagggcaacggcaccatcctgaagggcgacaccggcaacaacaactggatccccgacgtgggcagcacctggtggccccccaagaccccctacatcccccccatcatcaccaacagacccaccagcaagcccaccaccagacccacccccaagcccacccccatccccaccccccccccccccccccccctgcccaccgagctgagaacccccctgccccccaccacccccgagagacccaccaccggcctgaccaccatcgcccccgccgccagcaccccccccggcggcatcaccgtggacaacagagtgcagaccgacccccagaagcccagaggcgacgtgttcatccccagacagcccagcaacgacctgttcgagatcttcgagatcgagagaggcgtgagcgccgacgacgaggccaaggacgaccccggcgtgctggtgcacagctgcaacttcgaccacggcctgtgcggctggatcagagagaaggacaacgacctgcactgggagcccatcagagaccccgccggcggccagtacctgaccgtgagcgccgccaaggcccccggcggcaaggccgccagactggtgctgcccctgggcagactgatgcacagcggcgacctgtgcctgagcttcagacacaaggtgaccggcctgcacagcggcaccctgcaggtgttcgtgagaaagcacggcgcccacggcgccgccctgtggggcagaaacggcggccacggctggagacagacccagatcaccctgagaggcgccgacatcaagagcgtggtgttcaagggcgagaagagaagaggccacaccggcgagatcggcctggacgacgtgagcctgaagaagggccactgcagcgaggagagatag

SEQ ID NO: 4573 - DNA, 210 bp, synthetic construct
  misc_feature 1..210: note = source = /note="Description of Artificial Sequence: Synthetic coding sequence"
  source 1..210: mol_type = other DNA
atgaagaaccaggacaagaagaacggcgccgccaagcagagcaaccccaagagcagccccggccagcccgaggccggcagcttcgacagcctggacctggagaaggtgagcctgggcagagccctggccggcagaagcgagctgggcatcagctgcctggagcagggcacctggagaatgttcctgagaggcatgatgtgctggagctag

SEQ ID NO: 4574 - DNA, 483 bp, synthetic construct
  misc_feature 1..483: note = source = /note="Description of Artificial Sequence: Synthetic coding sequence"
  source 1..483: mol_type = other DNA
atggccagagactacgaccacctgttcaagctgctgatcatcggcgacagcggcgtgggcaagagcagcctgctgctgagattcgccgacaacaccttcagcggcagctacatcaccaccatcggcgtggacttcaagatcagaaccgtggagatcaacggcgagaaggtgaagctgcagatctgggacaccgccggccaggagagattcagaaccatcaccagcaccgccgagaccgccctgagaagcctgccccagcccgaggcccacggcggcagcagcggcgacagcctgagcttcgtgcccctgttcaaggagttcagcccctgcttctgcatcggcagatgccacagacacttcctgcccagaccccccagagtgcccagaagatgctggaccagcccccccttccccaccggcgcccccagcagccccgccaaggcccccggccccggcgaggacgccgccagaagagccgactag

SEQ ID NO: 4575 - DNA, 360 bp, synthetic construct; identical to SEQ ID NO: 3899
  misc_feature 1..360: note = source = /note="Description of Artificial Sequence: Synthetic coding sequence"
  source 1..360: mol_type = other DNA

SEQ ID NO: 4576 - DNA, 2514 bp, synthetic construct
  misc_feature 1..2514: note = source = /note="Description of Artificial Sequence: Synthetic coding sequence"
  source 1..2514: mol_type = other DNA
atgttcaagtgctggagcgtggtgctggtgctgggcttcatcttcctggagagcgagggcagacccaccaaggagggcggctacggcctgaagagctaccagcccctgatgagactgagacacaaggagaagaaccaggagagcagcagagtgaagggcttcatgatccaggacggccccttcggcagctgcgagaacaagtactgcggcctgggcagacactgcgtgaccagcagagagaccggccaggccgagtgcgcctgcatggacctgtgcaagagacactacaagcccgtgtgcggcagcgacggcgagttctacgagaaccactgcgaggtgcacagagccgcctgcctgaagaagcagaagatcaccatcgtgcacaacgaggactgcttcttcaagggcgacaagtgcaagaccaccgagtacagcaagatgaagaacatgctgctggacctgcagaaccagaagtacatcatgcaggagaacgagaaccccaacggcgacgacatcagcagaaagaagctgctggtggaccagatgttcaagtacttcgacgccgacagcaacggcctggtggacatcaacgagctgacccaggtgatcaagcaggaggagctgggcaaggacctgttcgactgcaccctgtacgtgctgctgaagtacgacgacttcaacgccgacaagcacctggccctggaggagttctacagagccttccaggtgatccagctgagcctgcccgaggaccagaagctgagcatcaccgccgccaccgtgggccagagcgccgtgctgagctgcgccatccagggcaccctgagaccccccatcatctggaagagaaacaacatcatcctgaacaacctggacctggaggacatcaacgacttcggcgacgacggcagcctgtacatcaccaaggtgaccaccacccacgtgggcaactacacctgctacgccgacggctacgagcaggtgtaccagacccacatcttccaggtgaacgtgccccccgtgatcagagtgtaccccgagagccaggccagagagcccggcgtgaccgccagcctgagatgccacgccgagggcatccccaagccccagctgggctggctgaagaacggcatcgacatcacccccaagctgagcaagcagctgaccctgcaggccaacggcagcgaggtgcacatcagcaacgtgagatacgaggacaccggcgcctacacctgcatcgccaagaacgaggccggcgtggacgaggacatcagcagcctgttcgtggaggacagcgccagaaagaccagactgggcatcggcaacatgttctacgtgttctacgaggacggcatcaaggtgatccagcccatcgagtgcgagttccagagacacatcaagcccagcgagaagctgctgggcttccaggacgaggtgtgccccaaggccgagggcgacgaggtgcagagatgcgtgtgggccagcgccgtgaacgtgaaggacaagttcatctacgtggcccagcccaccctggacagagtgctgatcgtggacgtgcagagccagaaggtggtgcaggccgtgagcaccgaccccgtgcccgtgaagctgcactacgacaagagccacgaccaggtgtgggtgctgagctggggcaccctggagaagaccagccccaccctgcaggtgatcaccctggccagcggcaacgtgccccaccacaccatccacacccagcccgtgggcaagcagttcgacagagtggacgacttcttcatccccaccaccaccctgatcatcacccacatgagattcggcttcatcctgcacaaggacgaggccgccctgcagaagatcgacctggagaccatgagctacatcaagaccatcaacctgaaggactacaagtgcgtgccccagagcctggcctacacccacctgggcggctactacttcatcggctgcaagcccgacagcaccggcgccgtgagcccccaggtgatggtggacggcgtgaccgacagcgtgatcggcttcaacagcgacgtgaccggcaccccctacgtgagccccgacggccactacctggtgagcatcaacgacgtgaagggcctggtgagagtgcagtacatcaccatcagaggcgagatccaggaggccttcgacatctacaccaacctgcacatcagcgacctggccttccagcccagcttcaccgaggcccaccagtacaacatctacggcagcagcagcacccagaccgacgtgctgttcgtggagctgagcagcggcaaggtgaagatgatcaagagcctgaaggagcccctgaaggccgaggagtggccctggaacagaaagaacagacagatccaggacagcggcctgttcggccagtacctgatgacccccagcaaggacagcctgttcatcctggacggcagactgaacaagctgaactgcgagatcaccgaggtggagaagggcaacaccgtgatctgggtgggcgacgcctag

SEQ ID NO: 4577 - DNA, 648 bp, synthetic construct
  misc_feature 1..648: note = source = /note="Description of Artificial Sequence: Synthetic coding sequence"
  source 1..648: mol_type = other DNA
atggccgacatgcagaacctggtggagagactggagagagccgtgggcagactggaggccgtgagccacaccagcgacatgcacagaggctacgccgacagccccagcaaggccggcgccgccccctacgtgcaggccttcgacagcctgctggccggccccgtggccgagtacctgaagatcagcaaggagatcggcggcgacgtgcagaagcacgccgagatggtgcacaccggcctgaagctggagagagccctgctggtgaccgccagccagtgccagcagcccgccgagaacaagctgagcgacctgctggcccccatcagcgagcagatcaaggaggtgatcaccttcagagagaagaacagaggcagcaagctgttcaaccacctgagcgccgtgagcgagagcatccaggccctgggctgggtggccatggcccccaagcccggcccctacgtgaaggagatgaacgacgccgccatgttctacaccaacagagtgctgaaggagtacaaggacgtggacaagaagcacgtggactgggtgaaggcctacctgagcatctggaccgagctgcaggcctacatcaaggagttccacaccaccggcctggcctggagcaagaccggccccgtggccaagtag

SEQ ID NO: 4578 - DNA, 3837 bp, synthetic construct
  misc_feature 1..3837: note = source = /note="Description of Artificial Sequence: Synthetic coding sequence"
  source 1..3837: mol_type = other DNA
atgagactgctgctgctggtgcccctgctgctggcccccgcccccggcagcagcgcccccaaggtgagaagacagagcgacacctggggcccctggagccagtggagcccctgcagcagaacctgcggcggcggcgtgagcttcagagagagaccctgctacagccagagaagagacggcggcagcagctgcgtgggccccgccagaagccacagaagctgcagaaccgagagctgccccgacggcgccagagacttcagagccgagcagtgcgccgagttcgacggcgccgagttccagggcagaagatacagatggctgccctactacagcgcccccaacaagtgcgagctgaactgcatccccaagggcgagaacttctactacaagcacagagaggccgtggtggacggcaccccctgcgagcccggcaagagagacgtgtgcgtggacggcagctgcagagtggtgggctgcgaccacgagctggacagcagcaagcaggaggacaagtgcctgagatgcggcggcgacggcaccacctgctaccccgtggccggcaccttcgacgccaacgacctgagcagaggctacaaccagatcctgatcgtgcccatgggcgccaccagcatcctgatcgacgaggccgccgccagcagaaacttcctggccgtgaagaacgtgagaggcgagtactacctgaacggccactggaccatcgaggccgccagagccctgcccgccgccagcaccatcctgcactacgagagaggcgccgagggcgacctggcccccgagagactgcacgccagaggccccaccagcgagcccctggtgatcgagctgatcagccaggagcccaaccccggcgtgcactacgagtaccacctgcccctgagaagacccagccccggcttcagctggagccacggcagctggagcgactgcagcgccgagtgcggcggcggccaccagagcagactggtgttctgcaccatcgaccacgaggcctaccccgaccacatgtgccagagacagcccagacccgccgacagaagaagctgcaacctgcacccctgccccgagaccaagagatggaaggccggcccctgggccccctgcagcgccagctgcggcggcggcagccagagcagaagcgtgtactgcatcagcagcgacggcgccggcatccaggaggccgtggaggaggccgagtgcgccggcctgcccggcaagccccccgccatccaggcctgcaacctgcagagatgcgccgcctggagccccgagccctggggcgagtgcagcgtgagctgcggcgtgggcgtgagaaagagaagcgtgacctgcagaggcgagagaggcagcctgctgcacaccgccgcctgcagcctggaggacagaccccccctgaccgagccctgcgtgcacgaggactgccccctgctgagcgaccaggcctggcacgtgggcacctggggcctgtgcagcaagagctgcagcagcggcaccagaagaagacaggtgatctgcgccatcggcccccccagccactgcggcagcctgcagcacagcaagcccgtggacgtggagccctgcaacacccagccctgccacctgccccaggaggtgcccagcatgcaggacgtgcacacccccgccagcaacccctggatgcccctgggcccccaggagagccccgccagcgacagcagaggccagtggtgggccgcccaggagcaccccagcgccagaggcgaccacagaggcgagagaggcgaccccagaggcgaccagggcacccacctgagcgccctgggccccgcccccagcctgcagcagcccccctaccagcagcccctgagaagcggcagcggcccccacgactgcagacacagcccccacggctgctgccccgacggccacaccgccagcctgggcccccagtggcagggctgccccggcgccccctgccagcagagcagatacggctgctgccccgacagagtgagcgtggccgagggcccccaccacgccggctgcaccaagagctacggcggcgacagcaccggcggcatgcccagaagcagagccgtggccagcaccgtgcacaacacccaccagccccaggcccagcagaacgagcccagcgagtgcagaggcagccagttcggctgctgctacgacaacgtggccaccgccgccggccccctgggcgagggctgcgtgggccagcccagccacgcctaccccgtgagatgcctgctgcccagcgcccacggcagctgcgccgactgggccgccagatggtacttcgtggccagcgtgggccagtgcaacagattctggtacggcggctgccacggcaacgccaacaacttcgccagcgagcaggagtgcatgagcagctgccagggcagcctgcacggccccagaagaccccagcccggcgccagcggcagaagcacccacaccgacggcggcggcagcagccccgccggcgagcaggagcccagccagcacagaaccggcgccgccgtgcagagaaagccctggcccagcggcggcctgtggagacaggaccagcagcccggccccggcgaggccccccacacccaggccttcggcgagtggccctggggccaggagctgggcagcagagcccccggcctgggcggcgacgccggcagccccgccccccccttccacagcagcagctacagaatcagcctggccggcgtggagcccagcctggtgcaggccgccctgggccagctggtgagactgagctgcagcgacgacaccgcccccgagagccaggccgcctggcagaaggacggccagcccatcagcagcgacagacacagactgcagttcgacggcagcctgatcatccaccccctgcaggccgaggacgccggcacctacagctgcggcagcaccagacccggcagagacagccagaagatccagctgagaatcatcggcggcgacatggccgtgctgagcgaggccgagctgagcagattcccccagcccagagaccccgcccaggacttcggccaggccggcgccgccggccccctgggcgccatccccagcagccacccccagcccgccaacagactgagactggaccagaaccagcccagagtggtggacgccagccccggccagagaatcagaatgacctgcagagccgagggcttccccccccccgccatcgagtggcagagagacggccagcccgtgagcagccccagacaccagctgcagcccgacggcagcctggtgatcagcagagtggccgtggaggacggcggcttctacacctgcgtggccttcaacggccaggacagagaccagagatgggtgcagctgagagtgctgggcgagctgaccatcagcggcctgccccccaccgtgaccgtgcccgagggcgacaccgccagactgctgtgcgtggtggccggcgagagcgtgaacatcagatggagcagaaacggcctgcccgtgcaggccgacggccacagagtgcaccagagccccgacggcaccctgctgatctacaacctgagagccagagacgagggcagctacacctgcagcgcctaccagggcagccaggccgtgagcagaagcaccgaggtgaaggtggtgagccccgcccccaccgcccagcccagagaccccggcagagactgcgtggaccagcccgagctggccaactgcgacctgatcctgcaggcccagctgtgcggcaacgagtactacagcagcttctgctgcgccagctgcagcagattccagccccacgcccagcccatctggcagtag

SEQ ID NO: 4579 - DNA, 546 bp, synthetic construct
  misc_feature 1..546: note = source = /note="Description of Artificial Sequence: Synthetic coding sequence"
  source 1..546: mol_type = other DNA
tgaaagggccacgccagccccctgccccccagcgccgcccccaccaccgacagcaccgacagcatcaccggccagaacagcagacagagagaggaggagctggagctgatcgaccagctgagaaagcacatcgagtacagactgaaggtgagcctgccctgcgacctgggcgccgccctgaccgacggcgtggtgctgtgccacctggccaaccacgtgagacccagaagcgtgcccagcatccacgtgcccagccccgccgtgcccaagctgaccatggccaagtgcagaagaaacgtggagaacttcctggaggcctgcagaaagatcggcgtgccccaggacaacctgtgcagccccagcgacatcctgcagctgaacctgagcgtgaagagaaccgtggagaccctgctgagcctgggcgcccacagcgaggagagcagcttcgtgtgcctgagcctgcagctgctgggcttcgtggccttctactgcaccgtgatgctgaccctgtgcgtgctgtactactggctgttccccgccagatag

SEQ ID NO: 4580 - DNA, 804 bp, synthetic construct
  misc_feature 1..804: note = source = /note="Description of Artificial Sequence: Synthetic coding sequence"
  source 1..804: mol_type = other DNA
atgggccccgaggccctgagcagcctgctgctgctgctgctggtggccagcggcgacgccgacatgaagggccacttcgaccccgccaagtgcagatacgccctgggcatgcaggacagaaccatccccgacagcgacatcagcgccagcagcagctggagcgacagcaccgccgccagacacagcagactggagagcagcgacggcgacggcgcctggtgccccgccggcagcgtgttccccaaggaggaggagtacctgcaggtggacctgcagagactgcacctggtggccctggtgggcacccagggcagacacgccggcggcctgggcaaggagttcagcagaagctacagactgagatacagcagagacggcagaagatggatgggctggaaggacagatggggccaggaggtgatcagcggcaacgaggaccccgagggcgtggtgctgaaggacctgggcccccccatggtggccagactggtgagattctaccccagagccgacagagtgatgagcgtgtgcctgagagtggagctgtacggctgcctgtggagagacggcctgctgagctacaccgcccccgtgggccagaccatgtacctgagcgaggccgtgtacctgaacgacagcacctacgacggccacaccgtgggcggcctgcagtacggcggcctgggccagctggccgacggcgtggtgggcctggacgacttcagaaagagccaggagctgagagtgtggcccggctacgactacgtgggctggagcaaccacagcttcagcagcggctactag

SEQ ID NO: 4581 - DNA, 345 bp, synthetic construct
  misc_feature 1..345: note = source = /note="Description of Artificial Sequence: Synthetic coding sequence"
  source 1..345: mol_type = other DNA
atggcccccaagaagctgagctgcctgagaagcctgctgctgcccctgagcctgaccctgctgctgccccaggccgacaccagaagcttcgtggtggacagaggccacgacagattcctgctggacggcgcccccttcagatacgtgagcggcagcctgcactacttcagagtgcccagagtgctgtgggccgacagactgctgaagatgagatggagcggcctgaacgccatccagttctacgtgccctggaactaccacgagccccagcccggcgtgtacaacttcaacggcagcagagacctgatcgccttcctgaacgaggccgccctggccaacctgtag

SEQ ID NO: 4582 - DNA, 507 bp, synthetic construct
  misc_feature 1..507: note = source = /note="Description of Artificial Sequence: Synthetic coding sequence"
  source 1..507: mol_type = other DNA
gcccccagaatggagatgttccagggcctgctgctgctgctgctgctgagcatgggcggcacctgggccagcaaggagcccctgagacccagatgcagacccatcaacgccaccctggccgtggagaaggagggctgccccgtgtgcatcaccgtgaacaccaccatctgcgccggctactgccccaccatgaccagagtgctgcagggcgtgctgcccgccctgccccaggtggtgtgcaactacagagacgtgagattcgagagcatcagactgcccggctgccccagaggcgtgaaccccgtggtgagctacgccgtggccctgagctgccagtgcgccctgtgcagaagaagcaccaccgactgcggcggccccaaggaccaccccctgacctgcgacgaccccagattccaggacagcagcagcagcaaggcccccccccccagcctgcccagccccagcagactgcccggccccagcgacacccccatcctgccccagtag

SEQ ID NO: 4583 - DNA, 1203 bp, synthetic construct
  misc_feature 1..1203: note = source = /note="Description of Artificial Sequence: Synthetic coding sequence"
  source 1..1203: mol_type = other DNA
atggagacccaggagctgagaggcgccctggccctgctgctgctgtgcttcttcaccagcgccagccaggacctgcaggtgatcgacctgctgaccgtgggcgagagcagacagatggtggccgtggccgagaagatcagaaccgccctgctgaccgccggcgacatctacctgctgagcaccttcagactgccccccaagcagggcggcgtgctgttcggcctgtacagcagacaggacaacaccagatggctggaggccagcgtggtgggcaagatcaacaaggtgaccaacgccctgcacagcatcctgggcgagggcaacgtgcccgaccccaagcaccactacggcgtgagcggcttccacgagcagagaagccactgcagccccaacccctgcttcagaggcgtggactgcatggaggtgtacgagtaccccggctacagatgcggcccctgcccccccggcctgcagggcaacggcacccactgcagcgacatcaacgagtgcgcccacgccgacccctgcttccccggcagcagctgcatcaacaccatgcccggcttccactgcgaggcctgccccagaggctacaagggcacccaggtgagcggcgtgggcatcgactacgccagagccagcaagcaggtgtgcaacgacatcgacgagtgcaacgacggcaacaacggcggctgcgaccccaacagcatctgcaccaacaccgtgggcagcttcaagtgcggcccctgcagactgggcttcctgggcaaccagagccagggctgcctgcccgccagaacctgccacagccccgcccacagcccctgccacatccacgcccactgcctgttcgagagaaacggcgccgtgagctgccagtgcaacgtgggctgggccggcaacggcaacgtgtgcggcaccgacaccgacatcgacggctaccccgaccaggccctgccctgcatggacaacaacaagcactgcaagcaggacaactgcctgctgacccccaacagcggccaggaggacgccgacaacgacggcgtgggcgaccagtgcgacgacgacgccgacggcgacggcatcaagaacgtggaggccagccccatggactggaccatcgccctgaagagccccacccactacagacagaccggcatgagaaccggctgggagatgctggccaccgccgccctgaagtag

SEQ ID NO: 4584 - DNA, 618 bp, synthetic construct; identical to SEQ ID NO: 3886
  misc_feature 1..618: note = source = /note="Description of Artificial Sequence: Synthetic coding sequence"
  source 1..618: mol_type = other DNA

SEQ ID NO: 4585 - DNA, 177 bp, synthetic construct
  misc_feature 1..177: note = source = /note="Description of Artificial Sequence: Synthetic coding sequence"
  source 1..177: mol_type = other DNA
atggacctgctgcagttcctggccttcctgttcgtgctgctgctgagcggcatgggcgccaccggcaccctgagaaccagcctggaccccagcctggagatctacaagaagatgttcgaggtgaagagaagagagcagctgctggccctgaagaacctggcccagctgaacgactag

SEQ ID NO: 4586 - DNA, 450 bp, synthetic construct
  misc_feature 1..450: note = source = /note="Description of Artificial Sequence: Synthetic coding sequence"
  source 1..450: mol_type = other DNA
atgaaggtgatcgccatcctgaccctgctgctgttctgcagccccacccacagcagcttctggcagttccagagaagagtgaagcacatcaccggcagaagcgccttcttcagctactacggctacggctgctactgcggcctgggcgacaagggcatccccgtggacgacaccgacagacacagccccagcagccccagcccctacgagaagctgaaggagttcagctgccagcccgtgctgaacagctaccagttccacatcgtgaacggcgccgtggtgtgcggctgcaccctgggccccggcgccagctgccactgcagactgaaggcctgcgagtgcgacaagcagagcgtgcactgcttcaaggagagcctgcccacctacgagaagaacttcaagcagttcagcagccagcccagatgcggcagacacaagccctggtgctag

SEQ ID NO: 4587 - DNA, 237 bp, synthetic construct; identical to SEQ ID NO: 3991
  misc_feature 1..237: note = source = /note="Description of Artificial Sequence: Synthetic coding sequence"
  source 1..237: mol_type = other DNA

SEQ ID NO: 4588 - DNA, 1461 bp, synthetic construct
  misc_feature 1..1461: note = source = /note="Description of Artificial Sequence: Synthetic coding sequence"
  source 1..1461: mol_type = other DNA
atgatcagccccagccccagccaggaggagctgcagaccaccctggaggagaccgaccagagcacccaggagcccttcaccaccaagatccccagaaccaccgagctggccaagaccacccaggccccccacagattctacaccaccgtgagacccagaaccagcgacaagccccacatcagacccgtgctgaacagaaccaccaccagacccaccagacccaagcccagcggcatgcccagcggcaacggcgtgggcaccggcgtgaagcaggcccccagacccagcggcgccgacagaaacgtgagcgtggacagcacccaccccaccaagaagcccggcaccagaagaccccccctgccccccagacccacccaccccagaagaaagcccctgccccccaacaacgtgaccggcaagcccggcagcgccggcatcatcagcagcggccccatcaccaccccccccctgagaagcacccccagacccaccggcacccccctggagagaatcgagaccgacatcaagcagcccaccgtgcccgccagcggcgaggagctggagaacatcaccgacttcagcagcagccccaccagagagaccgaccccctgggcaagcccagattcaagggcccccacgtgagatacatccagaagcccgacaacagcccctgcagcatcaccgacagcgtgaagagattccccaaggaggaggccaccgagggcaacgccaccagccccccccagaacccccccaccaacctgaccgtggtgaccgtggagggctgccccagcttcgtgatcctggactgggagaagcccctgaacgacaccgtgaccgagtacgaggtgatcagcagagagaacggcagcttcagcggcaagaacaagagcatccagatgaccaaccagaccttcagcaccgtggagaacctgaagcccaacaccagctacgagttccaggtgaagcccaagaaccccctgggcgagggccccgtgagcaacaccgtggccttcagcaccgagagcgccgaccccagagtgagcgagcccgtgagcgccggcagagacgccatctggaccgagagacccttcaacagcgacagctacagcgagtgcaagggcaagcagtacgtgaagagaacctggtacaagaagttcgtgggcgtgcagctgtgcaacagcctgagatacaagatctacctgagcgacagcctgaccggcaagttctacaacatcggcgaccagagaggccacggcgaggaccactgccagttcgtggacagcttcctggacggcagaaccggccagcagctgaccagcgaccagctgcccatcaaggagggctacttcagagccgtgagacaggagcccgtgcagttcggcgagatcggcggccacacccagatcaactacgtgcagtggtacgagtgcggcaccaccatccccggcaagtggtag

SEQ ID NO: 4589 - DNA, 243 bp, synthetic construct
  misc_feature 1..243: note = source = /note="Description of Artificial Sequence: Synthetic coding sequence"
  source 1..243: mol_type = other DNA
tgaaacggccccgtgctgtggttcaagggcaccggccccaacagaaagctgatctacaacttcaagcaggagcagaaccccagaccccccaagaacagacccgccggcagagccggcagcagagcccaccacgacgcccacacctgcctgagcgccctgcccgagagaaacagcaccaactacttcgtgcagccctgctgctgcctgagactgctgggcctgaccggcctgctgagcaagtag

SEQ ID NO: 4590 - DNA, 1341 bp, synthetic construct
  misc_feature 1..1341: note = source = /note="Description of Artificial Sequence: Synthetic coding sequence"
  source 1..1341: mol_type = other DNA
atgctgcaccccgagaccagccccggcagaggccacctgctggccgtgctgctggccctgctgggcaccacctgggccgaggtgtggcccccccagctgcaggagcaggcccccatggccggcgccctgaacagaaaggagagcttcctgctgctgagcctgcacaacagactgagaagctgggtgcagccccccgccgccgacatgagaagactggactggagcgacagcctggcccagctggcccaggccagagccgccctgtgcggcatccccacccccagcctggccagcggcctgtggagaaccctgcaggtgggctggaacatgcagctgctgcccgccggcctggccagcttcgtggaggtggtgagcctgtggttcgccgagggccagagatacagccacgccgccggcgagtgcgccagaaacgccacctgcacccactacacccagctggtgtgggccaccagcagccagctgggctgcggcagacacctgtgcagcgccggccagaccgccatcgaggccttcgtgtgcgcctacagccccagaggcaactgggaggtgaacggcaagaccatcatcccctacaagaagggcgcctggtgcagcctgtgcaccgccagcgtgagcggctgcttcaaggcctgggaccacgccggcggcctgtgcgaggtgcccagaaacccctgcagaatgagctgccagaaccacggcagactgaacatcagcacctgccactgccactgcccccccggctacaccggcagatactgccaggtgagatgcagcctgcagtgcgtgcacggcagattcagagaggaggagtgcagctgcgtgtgcgacatcggctacggcggcgcccagtgcgccaccaaggtgcacttccccttccacacctgcgacctgagaatcgacggcgactgcttcatggtgagcagcgaggccgacacctactacagagccagaatgaagtgccagagaaagggcggcgtgctggcccagatcaagagccagaaggtgcaggacatcctggccttctacctgggcagactggagaccaccaacgaggtgatcgacagcgacttcgagaccagaaacttctggatcggcctgacctacaagaccgccaaggacagcttcagatgggccaccggcgagcaccaggccttcaccagcttcgccttcggccagcccgacaaccacggcttcggcaactgcgtggagctgcaggccagcgccgccttcaactggaacgaccagagatgcaagaccagaaacagatacatctgccagttcgcccaggagcacatcagcagatggggccccggcagctag

SEQ ID NO: 4591 - DNA, 432 bp, synthetic construct
  misc_feature 1..432: note = source = /note="Description of Artificial Sequence: Synthetic coding sequence"
  source 1..432: mol_type = other DNA
atgcaggccgcctgctggtacgtgctgttcctgctgcagcccaccgtgtacctggtgacctgcgccaacctgaccaacggcggcaagagcgagctgctgaagagcggcagcagcaagagcaccctgaagcacatctggaccgagagcagcaaggacctgagcatcagcagactgctgagccagaccttcagaggcaaggagaacgacaccgacctggacctgagatacgacacccccgagccctacagcgagcaggacctgtgggactggctgagaaacagcaccgacctgcaggagcccagacccagagccaagagaagacccatcgtgaagaccggcaagttcaagaagatgttcggctggggcgacttccacagcaacatcaagaccgtgaagctgaacctgctgatcaccggcaagatcgtggactag

SEQ ID NO: 4592 - DNA, 783 bp, synthetic construct
  misc_feature 1..783: note = source = /note="Description of Artificial Sequence: Synthetic coding sequence"
  source 1..783: mol_type = other DNA
atgcagggcgagcccttcgcctgcctgacccaccaggagcccctgcccaagatgttcaagctgctgagcagagcctacgccgacgtgcaccccatgatgatggacagaagcgagaacagatgcggcggcaacttcctgaagagaggcagcatcatcaacggcgccgactggtacagcttcaccggcggcatgagcgacttcaactacctgcacaccaactgcttcgagatcaccgtggagctgggctgcgtgaagttcccccccgaggaggccctgtacatcctgtggcagcacaacaaggagagcctgctgaacttcgtggagaccgtgcacagaggcatcaagggcgtggtgaccgacaagttcggcaagcccgtgaagaacgccagaatcagcgtgaagggcatcagacacgacatcaccaccgcccccgacggcgactactggagactgctgccccccggcatccacatcgtgatcgcccaggcccccggctacgccaaggtgatcaagaaggtgatcatccccgccagaatgaagagagccggcagagtggacttcatcctgcagcccctgggcatgggccccaagaacttcatccacggcctgagaagaaccggcccccacgaccccctgggcggcgccagcagcctgggcgaggccaccgagcccgaccccctgagagccagaagacagcccagcgccgacggcagcaagccctggtggtggagctacttcaccagcctgagcacccacagacccagatggctgctgaagtactag

SEQ ID NO: 4593 - DNA, 882 bp, synthetic construct
  misc_feature 1..882: note = source = /note="Description of Artificial Sequence: Synthetic coding sequence"
  source 1..882: mol_type = other DNA
atgagcagcggcggcggcagcagaggcctgctggcctggctgctgctgctgcagccctggcccggccagaactgggccggcatggccgcccccagactgcccagccccctgctgagcgaggagggcggcgagaaccccgaggccagccccgcccccggccccgaggccggcccccccctgaacctgttcaccagcttccccggcgacagcctgctgtgcggcagaacccccctgagaatcgtgggcggcgtggacgccgaggagggcagatggccctggcaggtgagcgtgagaaccaagggcagacacatctgcggcggcaccctggtgaccgccacctgggtgctgaccgccggccactgcatcagcagcagattccactacagcgtgaagatgggcgacagaagcgtgtacaacgagaacaccagcgtggtggtgagcgtgcagagagccttcgtgcaccccaagttcagcaccgtgaccaccatcagaaacgacctggccctgctgcagctgcagcaccccgtgaacttcaccagcaacatccagcccatctgcatcccccaggagaacttccaggtggagggcagaaccagatgctgggtgaccggctggggcaagacccccgagagagagaagctggccagcgagatcctgcaggacgtggaccagtacatcatgtgctacgaggagtgcaacaagatcatccagaaggccctgagcagcaccaaggacgtgatcatcaagggcatggtgtgcggctacaaggagcagggcaaggacagctgccagggcgacagcggcggcagactggcctgcgagtacaacgacacctgggtgcaggtgggcatcgtgagctggggcatcggctgcggcagatag

SEQ ID NO: 4594 - DNA, 870 bp, synthetic construct
  misc_feature 1..870: note = source = /note="Description of Artificial Sequence: Synthetic coding sequence"
  source 1..870: mol_type = other DNA
atgttcgtgctgctgtacgtgaccagcttcgccatctgcgccagcggccagcccagaggcaaccagctgaagggcgagaactacagccccagatacatctgcagcatccccggcctgcccggcccccccggcccccccggcgccaacggcagccccggcccccacggcagaatcggcctgcccggcagagacggcagagacggcagaaagggcgagaagggcgagaagggcaccgccggcctgagaggcaagaccggccccctgggcctggccggcgagaagggcgaccagggcgagaccggcaagaagggccccatcggccccgagggcgagaagggcgaggtgggccccatcggcccccccggccccaagggcgacagaggcgagcagggcgaccccggcctgcccggcgtgtgcagatgcggcagcatcgtgctgaagagcgccttcagcgtgggcatcaccaccagctaccccgaggagagactgcccatcatcttcaacaaggtgctgttcaacgagggcgagcactacaaccccgccaccggcaagttcatctgcgccttccccggcatctactacttcagctacgacatcaccctggccaacaagcacctggccatcggcctggtgcacaacggccagtacagaatcaagaccttcgacgccaacaccggcaaccacgacgtggccagcggcagcaccgtgatctacctgcagcccgaggacgaggtgtggctggagatcttcttcaccgaccagaacggcctgttcagcgaccccggctgggccgacagcctgttcagcggcttcctgctgtacgtggacaccgactacctggacagcatcagcgaggacgacgagctgtag

SEQ ID NO: 4595 - DNA, 2742 bp, synthetic construct; identical to SEQ ID NO: 3799
  misc_feature 1..2742: note = source = /note="Description of Artificial Sequence: Synthetic coding sequence"
  source 1..2742: mol_type = other DNA

SEQ ID NO: 4596 - DNA, 1089 bp, synthetic construct
  misc_feature 1..1089: note = source = /note="Description of Artificial Sequence: Synthetic coding sequence"
  source 1..1089: mol_type = other DNA
atgagaaccctgttcaacctgctgtggctggccctggcctgcagccccgtgcacaccaccctgagcaagagcgacgccaagaaggccgccagcaagaccctgctggagaagagccagttcagcgacaagcccgtgcaggacagaggcctggtggtgaccgacctgaaggccgagagcgtggtgctggagcacagaagctactgcagcgccaaggccagagacagacacttcgccggcgacgtgctgggctacgtgaccccctggaacagccacggctacgacgtgaccaaggtgttcggcagcaagttcacccagatcagccccgtgtggctgcagctgaagagaagaggcagagagatgttcgaggtgaccggcctgcacgacgtggaccagggctggatgagagccgtgagaaagcacgccaagggcctgcacatcgtgcccagactgctgttcgaggactggacctacgacgacttcagaaacgtgctggacagcgaggacgagatcgaggagctgagcaagaccgtggtgcaggtggccaagaaccagcacttcgacggcttcgtggtggaggtgtggaaccagctgctgagccagaagagagtgaccgaccagctgggcatgttcacccacaaggagttcgagcagctggcccccgtgctggacggcttcagcctgatgacctacgactacagcaccgcccaccagcccggccccaacgcccccctgagctgggtgagagcctgcgtgcaggtgctggaccccaagagcaagtggagaagcaagatcctgctgggcctgaacttctacggcatggactacgccaccagcaaggacgccagagagcccgtggtgggcgccagatacatccagaccctgaaggaccacagacccagaatggtgtgggacagccaggccagcgagcacttcttcgagtacaagaagagcagaagcggcagacacgtggtgttctaccccaccctgaagagcctgcaggtgagactggagctggccagagagctgggcgtgggcgtgagcatctgggagctgggccagggcctggactacttctacgacctgctgtag

SEQ ID NO: 4597 - DNA, 1350 bp, synthetic construct
  misc_feature 1..1350: note = source = /note="Description of Artificial Sequence: Synthetic coding sequence"
  source 1..1350: mol_type = other DNA
atgaagttccagggccccctggcctgcctgctgctggccctgtgcctgggcagcggcgaggccggccccctgcagagcggcgaggagagcaccggcaccaacatcggcgaggccctgggccacggcctgggcgacgccctgagcgagggcgtgggcaaggccatcggcaaggaggccggcggcgccgccggcagcaaggtgagcgaggccctgggccagggcaccagagaggccgtgggcaccggcgtgagacaggtgcccggcttcggcgtggccgacgccctgggcaacagagtgggcgaggccgcccacgccctgggcaacaccggccacgagatcggcagacaggccgaggacgtgatcagacacggcgccgacgccgtgagaggcagctggcagggcgtgcccggccacaacggcgcctgggagaccagcggcggccacggcatcttcggcagccagggcggcctgggcggccagggccagggcaaccccggcggcctgggcaccccctgggtgcacggctaccccggcaacagcgccggcagcttcggcatgaacccccagggcgccccctggggccagggcggcaacggcggcccccccaacttcggcaccaacacccagggcgccgtggcccagcccggctacggcagcgtgagagccagcaaccagaacgagggctgcaccaaccccccccccagcggcagcggcggcggcagcagcaacagcggcggcagcagcaccggcagcagcagcggcaaccacggcggcagcggcggcggcaacggccacaagcccggctgcgagaagcccggcaacgaggccagaggcagcggcgagagcggcatccagggccagggcagcagctggggcagcggcggcggcgacgccgtgggcggcgtgaacaccgtgaacagcgagaccagccccggcatgttcaacttcgacaccttctggaagaacttcaagagcaagctgggcttcatcaactgggacgccatcaacaagaaccaggtgcccccccccagcaccagagccctgctgtacttcagcagactgtgggaggacttcaagcagaacacccccttcctgaactggaaggccatcatcgagggcgccgacgccagcagcctgcagaagagagccggcagagacgaccagcccggcgccggctggcaggaggtggccgccgtgaccagcaagaactacaactacaaccagcacgcctaccccaccgcctacggcggcaagtacagcgtgaagacccccgccaagggcggcgtgagccccagcagcagcgccagcagagtgcagcccggcctgctgcagtgggtgaagttctggtag

SEQ ID NO: 4598 - DNA, 735 bp, synthetic construct
  misc_feature 1..735: note = source = /note="Description of Artificial Sequence: Synthetic coding sequence"
  source 1..735: mol_type = other DNA
atgtggggcgcccccctgcccagaagacccgtgtgggacgtgagaagcgccagcgccggcccccagccctgcctgggcggcaagatgaagctgaacctggtgcagatcttcttcatgctgctgatgctgctgctgggcctgggcatgggcctgggcctgggcctgcacatggccaccgccgtgctggaggagagcgaccagcccctgaacgagttctggagcagcgacagccaggacaaggccgaggccaccgaggagggcgacggcacccagaccaccgagaccctggtgctgagcaacaaggaggtggtgcagcccggctggcccgaggaccccatcctgggcgaggacgaggtgggcggcaacaagatgctgagagccagcgccctgttccagagcaacaaggactacctgagactggaccagaccgacagagagtgcaacgacatgatggcccacaagatgaaggagcccagccagagctgcatcgcccagtacgccttcatccacgaggacctgaacaccgtgaaggccgtgtgcaacagccccgtgatcgcctgcgagctgaagggcggcaagtgccacaagagcagcagacccttcgacctgaccctgtgcgagctgagccagcccgaccaggtgacccccaactgcaactacctgaccagcgtgatcaagaagcacatcatcatcacctgcaacgacatgaagagacagctgcccaccggccagtag

SEQ ID NO: 4599 - DNA, 1728 bp, synthetic construct; identical to SEQ ID NO: 3621
  misc_feature 1..1728: note = source = /note="Description of Artificial Sequence: Synthetic coding sequence"
  source 1..1728: mol_type = other DNA

SEQ ID NO: 4600 - DNA, 390 bp, synthetic construct; identical to SEQ ID NO: 4161
  misc_feature 1..390: note = source = /note="Description of Artificial Sequence: Synthetic coding sequence"
  source 1..390: mol_type = other DNA

SEQ ID NO: 4601 - DNA, 567 bp, synthetic construct; identical to SEQ ID NO: 4160
  misc_feature 1..567: note = source = /note="Description of Artificial Sequence: Synthetic coding sequence"
  source 1..567: mol_type = other DNA

SEQ ID NO: 4602 - DNA, 2676 bp, synthetic construct; identical to SEQ ID NO: 4153
  misc_feature 1..2676: note = source = /note="Description of Artificial Sequence: Synthetic coding sequence"
  source 1..2676: mol_type = other DNA

SEQ ID NO: 4603 - DNA, 2742 bp, synthetic construct; identical to SEQ ID NO: 3799
  misc_feature 1..2742: note = source = /note="Description of Artificial Sequence: Synthetic coding sequence"
  source 1..2742: mol_type = other DNA

SEQ ID NO: 4604 - DNA, 453 bp, synthetic construct; identical to SEQ ID NO: 3797
  misc_feature 1..453: note = source = /note="Description of Artificial Sequence: Synthetic coding sequence"
  source 1..453: mol_type = other DNA

SEQ ID NO: 4605 - DNA, 192 bp, synthetic construct
  misc_feature 1..192: note = source = /note="Description of Artificial Sequence: Synthetic coding sequence"
  source 1..192: mol_type = other DNA
atgggccccgaggccctgagcagcctgctgctgctgctgctggtggccagcggcgacgccgacatgaagggccacttcgaccccgccaagtgcagatacgccctgggcatgcaggacagaaccatccccgacagcgacatcagcgccagcagcagctggagcgacagcaccgccgccagacacagcagatag

SEQ ID NO: 4606 - DNA, 1212 bp, synthetic construct
  misc_feature 1..1212: note = source = /note="Description of Artificial Sequence: Synthetic coding sequence"
  source 1..1212: mol_type = other DNA
atgcagggcacccccggcggcggcaccagacccggccccagccccgtggacagaagaaccctgctggtgttcagcttcatcctggccgccgccctgggccagatgaacttcaccggcgaccaggtgctgagagtgctggccaaggacgagaagcagctgagcctgctgggcgacctggagggcctgaagccccagaaggtggacttctggagaggccccgccagacccagcctgcccgtggacatgagagtgcccttcagcgagctgaaggacatcaaggcctacctggagagccacggcctggcctacagcatcatgatcaaggacatccaggtgctgctggacgaggagagacaggccatggccaagagcagaagactggagagaagcaccaacagcttcagctacagcagctaccacaccctggaggagatctacagctggatcgacaacttcgtgatggagcacagcgacatcgtgagcaagatccagatcggcaacagcttcgagaaccagagcatcctggtgctgaagttcagcaccggcggcagcagacaccccgccatctggatcgacaccggcatccacagcagagagtggatcacccacgccaccggcatctggaccgccaacaagatcgtgagcgactacggcaaggacagagtgctgaccgacatcctgaacgccatggacatcttcatcgagctggtgaccaaccccgacggcttcgccttcacccacagcatgaacagactgtggagaaagaacaagagcatcagacccggcatcttctgcatcggcgtggacctgaacagaaactggaagagcggcttcggcggcaacggcagcaacagcaacccctgcagcgagacctaccacggccccagcccccagagcgagcccgaggtggccgccatcgtgaacttcatcaccgcccacggcaacttcaaggccctgatcagcatccacagctacagccagatgctgatgtacccctacggcagactgctggagcccgtgagcaaccagagagagctgatgtggcccgtgggcagccccagcaccggccccatgaccgtggccagcagcacccccagcgccctgagcagcggcaccctgggcagcatggccagctgctgcagaccccacagaagcagccccagacccagaagaagaggctggagattcggccccagctggagcaccccctag

SEQ ID NO: 4607 - DNA, 1542 bp, synthetic construct
  misc_feature 1..1542: note = source = /note="Description of Artificial Sequence: Synthetic coding sequence"
  source 1..1542: mol_type = other DNA
atggcccccgccagaaccatggccagagccagactggcccccgccggcatccccgccgtggccctgtggctgctgtgcaccctgggcctgcagggcacccaggccggccccccccccgccccccccggcctgcccgccggcgccgactgcctgaacagcttcaccgccggcgtgcccggcttcgtgctggacaccaacgccagcgtgagcaacggcgccaccttcctggagagccccaccgtgagaagaggctgggactgcgtgagagcctgctgcaccacccagaactgcaacctggccctggtggagctgcagcccgacagaggcgaggacgccatcgccgcctgcttcctgatcaactgcctgtacgagcagaacttcgtgtgcaagttcgcccccagagagggcttcatcaactacctgaccagagaggtgtacagaagctacagacagctgagaacccagggcttcggcggcagcggcatccccaaggcctgggccggcatcgacctgaaggtgcagccccaggagcccctggtgctgaaggacgtggagaacaccgactggagactgctgagaggcgacaccgacgtgagagtggagagaaaggaccccaaccaggtggagctgtggggcctgaaggagggcacctacctgttccagctgaccgtgaccagcagcgaccaccccgaggacaccgccaacgtgaccgtgaccgtgctgagcaccaagcagaccgaggactactgcctggccagcaacaaggtgggcagatgcagaggcagcttccccagatggtactacgaccccaccgagcagatctgcaagagcttcgtgtacggcggctgcctgggcaacaagaacaactacctgagagaggaggagtgcatcctggcctgcagaggcgtgcagggccccagcatggagagaagacaccccgtgtgcagcggcacctgccagcccacccagttcagatgcagcaacggctgctgcatcgacagcttcctggagtgcgacgacacccccaactgccccgacgccagcgacgaggccgcctgcgagaagtacaccagcggcttcgacgagctgcagagaatccacttccccagcgacaagggccactgcgtggacctgcccgacaccggcctgtgcaaggagagcatccccagatggtactacaaccccttcagcgagcactgcgccagattcacctacggcggctgctacggcaacaagaacaacttcgaggaggagcagcagtgcctggagagctgcagaggcatcagcaagaaggacgtgttcggcctgagaagagagatccccatccccagcaccggcagcgtggagatggccgtggccgtgttcctggtgatctgcatcgtggtggtggtggccatcctgggctactgcttcttcaagaaccagagaaaggacttccacggccaccaccaccaccccccccccacccccgccagcagcaccgtgagcaccaccgaggacaccgagcacctggtgtacaaccacaccaccagacccctgtag

SEQ ID NO: 4608 - DNA, 798 bp, synthetic construct
  misc_feature 1..798: note = source = /note="Description of Artificial Sequence: Synthetic coding sequence"
  source 1..798: mol_type = other DNA
atggccccctggagccaccccagcgcccagctgcagcccgtgggcggcgacgccgtgagccccgccctgatggtgctgctgtgcctgggcctgagcctgggccccagaacccacgtgcaggccggcaacctgagcaaggccaccctgtgggccgagcccggcagcgtgatcagcagaggcaacagcgtgaccatcagatgccagggcaccctggaggcccaggagtacagactggtgaaggagggcagccccgagccctgggacacccagaaccccctggagcccaagaacaaggccagattcagcatccccagcatgaccgagcaccacgccggcagatacagatgctactactacagccccgccggctggagcgagcccagcgaccccctggagctggtggtgaccggcttctacaacaagcccaccctgagcgccctgcccagccccgtggtgaccagcggcgagaacgtgaccctgcagtgcggcagcagactgagattcgacagattcatcctgaccgaggagggcgaccacaagctgagctggaccctggacagccagctgacccccagcggccagttccaggccctgttccccgtgggccccgtgacccccagccacagatggatgctgagatgctacggcagcagaagacacatcctgcaggtgtggagcgagcccagcgacctgctggagatccccgtgagcggcgaggaggccaccgtgttcagcagcaccatccagggcagccagaccggctgcggcgagctgtacagacagggcagcccctgctag

SEQ ID NO: 4609 - DNA, 795 bp, synthetic construct
  misc_feature 1..795: note = source = /note="Description of Artificial Sequence: Synthetic coding sequence"
  source 1..795: mol_type = other DNA
atggagaagcccatcctgaagaacctgaacgagatgctgtgccccatcatcgccagcgaggtgaaggccctgaacgccaacctgagcaccctggaggtgctgaccaagatcgacaactacaccctgctggactacagcctgatcagcagccccgagatcaccgagaactacctggacctgaacctgaagggcgtgttctaccccctggagaacctgaccgacccccccttcagccccgtgcccttcgtgctgcccgagagaagcaacagcatgctgtacatcggcatcgccgagtacttcttcaagagcgccagcttcgcccacttcaccgccggcgtgttcaacgtgaccctgagcaccgaggagatcagcaaccacttcgtgcagaacagccagggcctgggcaacgtgctgagcagagtggccagcaccagcgtgggcctggtgatcctgggccagagactggtgtgcagcctgagcctgaacagattcagactggccctgcccgagagcaacagaagcaacatcgaggtgctgagattcgagaacatcctgagcagcatcctgcacttcggcgtgctgcccctggccaacgccaagctgcagcagggcttccccctgagcaacccccacaagttcctgttcgtgaacagcgacatcgaggtgctggagggcttcctgctgatcagcaccgacctgaagtacgagaccagcagcaagcagcagcccagcttccacgtgtgggagggcctgaacctgatcagcagacagtggagaggcaagagcgccccctag

SEQ ID NO: 4610 - DNA, 117 bp, synthetic construct
  misc_feature 1..117: note = source = /note="Description of Artificial Sequence: Synthetic coding sequence"
  source 1..117: mol_type = other DNA
atgaacaagatcctgagcagcaccgtgtgcttcggcctgctgaccctgctgagcgtgctgagcttcctgcagagcgtgcacggcagaccctacctgacccagggcaacgagatctag

SEQ ID NO: 4611 - DNA, 567 bp, synthetic construct; identical to SEQ ID NO: 4160
  misc_feature 1..567: note = source = /note="Description of Artificial Sequence: Synthetic coding sequence"
  source 1..567: mol_type = other DNA

SEQ ID NO: 4612 - DNA, 600 bp, synthetic construct; identical to SEQ ID NO: 3864
  misc_feature 1..600: note = source = /note="Description of Artificial Sequence: Synthetic coding sequence"
  source 1..600: mol_type = other DNA

SEQ ID NO: 4613 - DNA, 30 bp, synthetic construct
  misc_feature 1..30: note = source = /note="Description of Artificial Sequence: Synthetic coding sequence"
  source 1..30: mol_type = other DNA
atggcccccaagaagctgagctgcctgtag

SEQ ID NO: 4614 - DNA, 831 bp, synthetic construct
  misc_feature 1..831: note = source = /note="Description of Artificial Sequence: Synthetic coding sequence"
  source 1..831: mol_type = other DNA
atggcccccagccccctgcagagactgcactgcggccccagccccagccccagacccaccgaggtgcccagaggcaccgtgagcgtgagctgcagatacctgaagaacagcctgcacgtgttcgtgagcggcggcgccatcggcaccagcagccccgccctgctggagtgccaggagggcgtgggccccgccagacccagcctgctggtgccccccccccccagacccagaagactggacctggccagaaccctgcccgccgagagaaccgacagccagagcctgtacatcgtgtacatcgccctgcccggcagaacccccagacccgccctggccttcgccttcctgatgcccgcctgctgcaacagacccagccccagacccagccccgcccacctgaccgccagcagcgtgctgagaagacagagacacgtgctggccgccagcgccgccagcccctgccagtggagcggcctgagagtggcccacagcctgagacaggtggtgagcctgtgccccagatgcaccggcagctgccccttcagcggcgcctgcgccagcagcctgcccagccccctgagctgcccccacagccacagcggcagctggggcacctggagccagggcagaccctgcagcagcaccgaggtggccggcctggccctgtggcccaccgacttcctgagctgcctgctggacgccagcgagctgcagacccagggcagccacggcttcagcttcacccccaccggcttcagcagcaacagaaaggtgggcgtgggcagctgcagagacggcgccggcagaggcgccatgggcggcctgttctag

SEQ ID NO: 4615 - DNA, 678 bp, synthetic construct; identical to SEQ ID NO: 4468
  misc_feature 1..678: note = source = /note="Description of Artificial Sequence: Synthetic coding sequence"
  source 1..678: mol_type = other DNA

SEQ ID NO: 4616 - DNA, 534 bp, synthetic construct
  misc_feature 1..534: note = source = /note="Description of Artificial Sequence: Synthetic coding sequence"
  source 1..534: mol_type = other DNA
atggtgcccgccgccggcgccctgctgtgggtgctgctgctgaacctgggccccagagccgccggcgcccagggcctgacccagacccccaccgagatgcagagagtgagcctgagattcggcggccccatgaccagaagctacagaagcaccgccagaaccggcctgcccagaaagaccagaatcatcctggaggacgagaacgacgccatggccgacgccgacagactggccggccccgccgccgccgagctgctggccgccaccgtgagcaccggcttcagcagaagcagcgccatcaacgaggaggacggcagcagcgaggagggcgtggtgatcaacgccggcaaggacagcaccagcagagagctgcccagcgccacccccaacaccgccggcagcagcagcaccagattcatcgccaacagccaggagcccgagatcagactgaccagcagcctgcccagaagccccggcagaagcaccgaggacctgcccccctgccacctgctgagaatctgcggctggtgctag

SEQ ID NO: 4617 - DNA, 912 bp, synthetic construct
  misc_feature 1..912: note = source = /note="Description of Artificial Sequence: Synthetic coding sequence"
  source 1..912: mol_type = other DNA
atgctgcaccccgagaccagccccggcagaggccacctgctggccgtgctgctggccctgctgggcaccgcctgggccgaggtgtggcccccccagctgcaggagcaggcccccatggccggcgccctgaacagaaaggagagcttcctgctgctgagcctgcacaacagactgagaagctgggtgcagccccccgccgccgacatgagaagactggactggagcgacagcctggcccagctggcccaggccagagccgccctgtgcggcatccccacccccagcctggccagcggcctgtggagaaccctgcaggtgggctggaacatgcagctgctgcccgccggcctggccagcttcgtggaggtggtgagcctgtggttcgccgagggccagagatacagccacgccgccggcgagtgcgccagaaacgccacctgcacccactacacccagctggtgtgggccaccagcagccagctgggctgcggcagacacctgtgcagcgccggccaggccgccatcgaggccttcgtgtgcgcctacagccccagaggcaactgggaggtgaacggcaagaccatcgtgccctacaagaagggcgcctggtgcagcctgtgcaccgccagcgtgagcggctgcttcaaggcctgggaccacgccggcggcctgtgcgaggtgcccagaaacccctgcagaatgagctgccagaaccacggcagactgaacatcagcacctgccactgccactgcccccccggctacaccggcagatactgccaggtgagatgcagcctgcagtgcgtgcacggcagattcagagaggaggagtgcagctgcgtgtgcgacatcggctacggcgagcccagcgtgccccccagatgcatcttccccagcacccccgtgacctag

SEQ ID NO: 4618 - DNA, 1482 bp, synthetic construct; identical to SEQ ID NO: 4484
  misc_feature 1..1482: note = source = /note="Description of Artificial Sequence: Synthetic coding sequence"
  source 1..1482: mol_type = other DNA

SEQ ID NO: 4619 - DNA, 807 bp, synthetic construct
  misc_feature 1..807: note = source = /note="Description of Artificial Sequence: Synthetic coding sequence"
  source 1..807: mol_type = other DNA
atgaagcagatcctgcaccccgccctggagaccaccgacccctgcagcaccggcttcgtgttccccgccatgaccctgttccccgtgctgctgttcctggtggccggcctgctgcccagcttccccgccaacgaggacaaggaccccgccttcaccgccctgctgaccacccagacccaggtgcagagagagatcgtgaacaagcacaacgagctgagaagagccgtgagcccccccgccagaaacatgctgaagatggagtggaacaaggaggccgccgccaacgcccagaagtgggccaaccagtgcaactacagacacagcaaccccaaggacagaatgaccagcctgaagtgcggcgagaacctgtacatgagcagcgccagcagcagctggagccaggccatccagagctggttcgacgagtacaacgacttcgacttcggcgtgggccccaagacccccaacgccgtggtgggccactacacccaggtggtgtggtacagcagctacctggtgggctgcggcaacgcctactgccccaaccagaaggtgctgaagtactactacgtgtgccagtactgccccgccggcaactgggccaacagactgtacgtgccctacgagcagggcgccccctgcgccagctgccccgacaactgcgacgacggcctgtgcaccaacggctgcaagtacgaggacctgtacagcaactgcaagagcctgaagctgaccctgacctgcaagcaccagctggtgagagacagctgcaaggccagctgcaactgcagcaacagcatctactag

SEQ ID NO: 4620 - DNA, 372 bp, synthetic construct
  misc_feature 1..372: note = source = /note="Description of Artificial Sequence: Synthetic coding sequence"
  source 1..372: mol_type = other DNA
atgctgcccaagagcagaagagccctgaccatccaggagatcgccgccctggccagaagcagcctgcacggcatcagccaggtggtgaaggaccacgtgaccaagcccaccgccatggcccagggcagagtggcccacctgatcgagtggaagggctggagcaagcccagcgacagccccgccgccctggagagcgccttcagcagctacagcgacctgagcgagggcgagcaggaggccagattcgccgccggcgtggccgagcagttcgccatcgccgaggccaagctgagagcctggagcagcgtggacggcgaggacagcaccgacgacagctacgacgaggacttcgccggcggcatggacacctag

SEQ ID NO: 4621 - DNA, 726 bp, synthetic construct
  misc_feature 1..726: note = source = /note="Description of Artificial Sequence: Synthetic coding sequence"
  source 1..726: mol_type = other DNA
atgggcgccgtgatgggcaccttcagcagcctgcagaccaagcagagaagacccagcaaggacaagatcgaggacgagctggagatgaccatggtgtgccacagacccgagggcctggagcagctggaggcccagaccaacttcaccaagagagagctgcaggtgctgtacagaggcttcaagaacgagtgccccagcggcgtggtgaacgaggacaccttcaagcagatctacgcccagttcttcccccacggcgccctgccctgcctggagggcagcccctgcgtggagttcctgccccccagccccgccctgctgttctgcctggtggacgccagcacctacgcccactacctgttcaacgccttcgacaccacccagaccggcagcgtgaagttcgaggacttcgtgaccgccctgagcatcctgctgagaggcaccgtgcacgagaagctgagatggaccttcaacctgtacgacatcaacaaggacggctacatcaacaaggaggagatgatggacatcgtgaaggccatctacgacatgatgggcaagtacacctaccccgtgctgaaggaggacacccccagacagcacgtggacgtgttcttccagaagatggacaagaacaaggacggcatcgtgaccctggacgagttcctggagagctgccaggaggacgacaacatcatgagaagcctgcagctgttccagaacgtgatgtag

SEQ ID NO: 4622 - DNA, 630 bp, synthetic construct; identical to SEQ ID NO: 4517
  misc_feature 1..630: note = source = /note="Description of Artificial Sequence: Synthetic coding sequence"
  source 1..630: mol_type = other DNA

SEQ ID NO: 4623 - DNA, 312 bp, synthetic construct
  misc_feature 1..312: note = source = /note="Description of Artificial Sequence: Synthetic coding sequence"
  source 1..312: mol_type = other DNA
atgagacagagactgctgcccagcgtgaccagcctgctgctggtggccctgctgttccccggcagcagccaggccagacacgtgaaccacagcgccaccgaggccctgggcgagctgagagagagagcccccggccagggcaccaacggcttccagctgctgagacacgccgtgaagagagacctgctgccccccagaacccccccctaccaggtgcacatcagccaccaggaggccagaggccccagcttcaagatctgcgtgggcttcctgggccccagatgggccagaggctgcagcaccggcaactag

SEQ ID NO: 4624 - DNA, 426 bp, synthetic construct
  misc_feature 1..426: note = source = /note="Description of Artificial Sequence: Synthetic coding sequence"
  source 1..426: mol_type = other DNA
atgaagaccggcctgttcttcctgtgcctgctgggcaccgccgccgccatccccaccaacgccagactgctgagcgaccacagcaagcccaccgccgagaccgtggcccccgacaacaccgccatccccagcctgagagccgaggccgaggagaacgagaaggagaccgccgtgagcaccgaggacgacagccaccacaaggccgagaagagcagcgtgctgaagagcaaggaggagagccacgagcagagcgccgagcagggcaagagcagcagccaggagctgggcctgaaggaccaggaggacagcgacggccacctgagcgtgaacctggagtacgcccccaccgagggcaccctggacatcaaggaggacatgagcgagccccaggagaagaagctgagcgagaacaccgacttcctgtag

SEQ ID NO: 4625 - DNA, 642 bp, synthetic construct
  misc_feature 1..642: note = source = /note="Description of Artificial Sequence: Synthetic coding sequence"
  source 1..642: mol_type = other DNA
atgagactggccggccccctgagaatcgtggtgctggtggtgagcgtgggcgtgacctggatcgtggtgagcatcctgctgggcggccccggcagcggcttccccagaatccagcagctgttcaccagccccgagagcagcgtgaccgccgcccccagagccagaaagtacaagtgcggcctgccccagccctgccccgaggagcacctggccttcagagtggtgagcggcgccgccaacgtgatcggccccaagatctgcctggaggacaagatgctgatgagcagcgtgaaggacaacgtgggcagaggcctgaacatcgccctggtgaacgacgtgaacgacctgctgaagttcatcagacccctgcacgagggcaccctggtgttcgtggccagctacgacgaccccgccaccaagatgaacgaggagaccagaaagctgttcagcgagctgggcagcagaaacgccaaggagctggccttcagagacagctgggtgttcgtgggcgccaagggcgtgcagaacaagagccccttcgagcagcacgtgaagaacagcaagcacagcaacaagtacgagggctggcccgaggccctggagatggagggctgcatccccagaagaagcaccgccagctag

SEQ ID NO: 4626 - DNA, 2700 bp, synthetic construct; identical to SEQ ID NO: 4183
  misc_feature 1..2700: note = source = /note="Description of Artificial Sequence: Synthetic coding sequence"
  source 1..2700: mol_type = other DNA

SEQ ID NO: 4627 - DNA, 192 bp, synthetic construct; identical to SEQ ID NO: 4605
  misc_feature 1..192: note = source = /note="Description of Artificial Sequence: Synthetic coding sequence"
  source 1..192: mol_type = other DNA

SEQ ID NO: 4628 - DNA, 489 bp, synthetic construct
  misc_feature 1..489: note = source = /note="Description of Artificial Sequence: Synthetic coding sequence"
  source 1..489: mol_type = other DNA
gacgaggacagatacaccacctgctggcccaagacctggctggccaaggactgccccgccctgagaatcatcagcgtggagtacgacaccagcctgagcgactggagagccagatgccccatggagagaaagagcatcgccttcagaagcaacgagctgctgagaaagctgagagccgccggcgtgggcgacagacccgtggtgtggatcagccacagcatgggcggcctgctggtgaagaagatgctgctggaggccagcaccaagcccgagatgagcaccgtgatcaacaacaccagaggcatcatcttctacagcgtgccccaccacggcagcagactggccgagtacagcgtgaacatcagatacctgctgttccccagcctggaggtgaaggagctgagcaagggcaacaccttctgccacaagggcaactggggctacatcaacatcagctacaccgagaagaagaagaagttcctgccctag

SEQ ID NO: 4629 - DNA, 1083 bp, synthetic construct
  misc_feature 1..1083: note = source = /note="Description of Artificial Sequence: Synthetic coding sequence"
  source 1..1083: mol_type = other DNA
atgcccgagctggtggtgaccgccctgctggcccccagcagactgagcctgaagctgctgagagccttcatgtggagcctggtgttcagcgtggccctggtggccgccgccgtgtacggctgcatcgccctgacccacgtgctgtgcagacccagaagaggctgctgcggcagaagaagaagcgccagccccgcctgcctgagcgaccccagcctgggcgagcacggcttcctgaacctgaagagcagcggcctgagactgcactacgtgagcgccggcagaggcaacggccccctgatgctgttcctgcacggcttccccgagaactggttcagctggagataccagctgagagagttccagagcagattccacgtggtggccgtggacctgagaggctacggccccagcgacgcccccagagacgtggactgctacaccatcgacctgctgctggtggacatcaaggacgtgatcctgggcctgggctacagcaagtgcatcctggtggcccacgactggggcgccctgctggcctggcacttcagcatctactaccccagcctggtggagagaatggtggtggtgagcggcgcccccatgagcgtgtaccaggactacagcctgcaccacatcagccagttcttcagaagccactacatgttcctgttccagctgccctggctgcccgagaagctgctgagcatgagcgacttccagatcctgaagaccaccctgacccacagaaagaccggcatcccctgcctgacccccagcgagctggaggccttcctgtacaacttcagccagcccggcggcctgaccggccccctgaactactacagaaacctgttcagaaacttccccctggagccccaggagctgaccacccccaccctgctgctgtggggcgagaaggacacctacctggagctgggcctggtggaggccatcggcagcagattcgtgcccggcagactggaggcccacatcctgcccggcatcggccactggatcccccagagcaacccccaggagatgcaccagtacatgtgggccttcctgcaggacctgctggactag

SEQ ID NO: 4630 - DNA, 678 bp, synthetic construct; identical to SEQ ID NO: 4468
  misc_feature 1..678: note = source = /note="Description of Artificial Sequence: Synthetic coding sequence"
  source 1..678: mol_type = other DNA

SEQ ID NO: 4631 - DNA, 192 bp, synthetic construct; identical to SEQ ID NO: 3578
  misc_feature 1..192: note = source = /note="Description of Artificial Sequence: Synthetic coding sequence"
  source 1..192: mol_type = other DNA

SEQ ID NO: 4632 - DNA, 5235 bp, synthetic construct; identical to SEQ ID NO: 4137
  misc_feature 1..5235: note = source = /note="Description of Artificial Sequence: Synthetic coding sequence"
  source 1..5235: mol_type = other DNA

SEQ ID NO: 4633 - DNA, 792 bp, synthetic construct
  misc_feature 1..792: note = source = /note="Description of Artificial Sequence: Synthetic coding sequence"
  source 1..792: mol_type = other DNA
atggccgacatgcagaacctggtggagagactggagagagccgtgggcagactggaggccgtgagccacaccagcgacatgcacagaggctacgccgacagccccagcaagggcgccgccccctacgtgcaggccttcgacagcctgctggccggccccgtggccgagtacctgaagatcagcaaggagatcggcggcgacgtgcagaagcacgccgagatggtgcacaccggcctgaagctggagagagccctgctggtgaccgccagccagtgccagcagcccgccgagaacaagctgagcgacctgctggcccccatcagcgagcagatcaaggaggtgatcaccttcagagagaagaacagaggcagcaagctgttcaaccacctgagcgccgtgagcgagagcatccaggccctgggctgggtggccatggcccccaagcccggcccctacgtgaaggagatgaacgacgccgccatgttctacaccaacagagtgctgaaggagtacaaggacgtggacaagaagcacgtggactgggtgaaggcctacctgagcatctggaccgagctgcaggcctacatcaaggagttccacaccaccggcctggcctggagcaagaccggccccgtggccaaggagctgagcggcctgcccagcggccccagcgccggcagctgccccccccccccccccccctgccccccccccccccccgtgagcaccatcagctgcagctacgagagcgccagcagaagcagcctgttcgcccagatcaaccagggctag

SEQ ID NO: 4634 - DNA, 501 bp, synthetic construct
  misc_feature 1..501: note = source = /note="Description of Artificial Sequence: Synthetic coding sequence"
  source 1..501: mol_type = other DNA
atgggccccgaggccctgagcagcctgctgctgctgctgctggtggccagcggcgacgccgacatgaagggccacttcgaccccgccaagtgcagatacgccctgggcatgcaggacagaaccatccccgacagcgacatcagcgccagcagcagctggagcgacagcaccgccgccagacacagcagactggagagcagcgacggcgacggcgcctggtgccccgccggcagcgtgttccccaaggaggaggagtacctgcaggtggacctgcagagactgcacctggtggccctggtgggcacccagggcagacacgccggcggcctgggcaaggagttcagcagaagctacagactgagatacagcagagacggcagaagatggatgggctggaaggacagatggggccaggaggtgatcagcggcaacgaggaccccgagggcgtggtgctgaaggacctgggcccccccatggtggccagactggtgagattctag

SEQ ID NO: 4635 - DNA, 2349 bp, synthetic construct
  misc_feature 1..2349: note = source = /note="Description of Artificial Sequence: Synthetic coding sequence"
  source 1..2349: mol_type = other DNA
agcatcctgagagtggaggccgtggacgccgactgcagcccccagttcagccagatctgcagctacgagatcatcacccccgacgtgcccttcaccgtggacaaggacggctacatcaagaacaccgagaagctgaactacggcaaggagcaccagtacaagctgaccgtgaccgcctacgactgcggcaagaagagagccaccgaggacgtgctggtgaagatcagcatcaagcccacctgcacccccggctggcagggctggaacaacagaatcgagtacgagcccggcaccggcgccctggccgtgttccccaacatccacctggagacctgcgacgagcccgtggccagcgtgcaggccaccgtggagctggagaccagccacatcggcaagggctgcgacagagacacctacagcgagaagagcctgcacagactgtgcggcgccgccgccggcaccgccgagctgctgcccagccccagcggcagcctgaactggaccatgggcctgcccaccgacaacggccacgacagcgaccaggtgttcgagttcaacggcacccaggccgtgagaatccccgacggcgtggtgagcgtgagccccaaggagcccttcaccatcagcgtgtggatgagacacggccccttcggcagaaagaaggagaccatcctgtgcagcagcgacaagaccgacatgaacagacaccactacagcctgtacgtgcacggctgcagactgatcttcctgttcagacaggaccccagcgaggagaagaagtacagacccgccgagttccactggaagctgaaccaggtgtgcgacgaggagtggcaccactacgtgctgaacgtggagttccccagcgtgaccctgtacgtggacggcaccagccacgagcccttcagcgtgaccgaggactaccccctgcaccccagcaagatcgagacccagctggtggtgggcgcctgctggcagggcggcgacctgcacatgacccagttcttcagaggcaacctggccggcctgaccctgagaagcggcaagctggccgacaagaaggtgatcgactgcctgtacacctgcaaggagggcctggacctgcaggtgctggaggacagcggcagaggcgtgcagatccaggcccaccccagccagctggtgctgaccctggagggcgaggacctgggcgagctggacaaggccatgcagcacatcagctacctgaacagcagacagttccccacccccggcatcagaagactgaagatcaccagcaccatcaagtgcttcaacgaggccacctgcatcagcgtgccccccgtggacggctacgtgatggtgctgcagcccgaggagcccaagatcagcctgagcggcgtgcaccacttcgccagagccgccagcgagttcgagagcagcgagggcgtgttcctgttccccgagctgagaatcatcagcaccatcaccagagaggtggagcccgagggcgacggcgccgaggaccccaccgtgcaggagagcctggtgagcgaggagatcgtgcacgacctggacacctgcgaggtgaccgtggagggcgaggagctgaaccacgagcaggagagcctggaggtggacatggccagactgcagcagaagggcatcgaggtgagcagcagcgagctgggcatgaccttcaccggcgtggacaccatggccagctacgaggaggtgctgcacctgctgagatacagaaactggcacgccagaagcctgctggacagaaagttcaagctgatctgcagcgagctgaacggcagatacatcagcaacgagttcaaggtggaggtgaacgtgatccacaccgccaaccccatggagcacgccaaccacatggccgcccagccccagttcgtgcaccccgagcacagaagcttcgtggacctgagcggccacaacctggccaacccccaccccttcgccgtggtgcccagcaccgccaccgtggtgatcgtggtgtgcgtgagcttcctggtgttcatgatcatcctgggcgtgttcagaatcagagccgcccacagaagaaccatgagagaccaggacaccggcaaggagaacgagatggactgggacgacagcgccctgaccatcaccgtgaaccccatggagacctacgaggaccagcacagcagcgaggaggaggaggaggaggaggaggaggaggagagcgaggacggcgaggaggaggacgacatcaccagcgccgagagcgagagcagcgaggaggaggagggcgagcagggcgacccccagaacgccaccagacagcagcagctggagtgggacgacagcaccctgagctactag

SEQ ID NO: 4636 - DNA, 531 bp, synthetic construct
  misc_feature 1..531: note = source = /note="Description of Artificial Sequence: Synthetic coding sequence"
  source 1..531: mol_type = other DNA
atggccagaagacactgcttcagctactggctgctggtgtgctggctggtggtgaccgtggccgaggccctgagcaccttctacctgcagcagcacatcaacctgcacatggacaagaagagatacctgagactgctggagatccacaagatcatgagaaccctgcccaccgccagaagcctgcacagccccctgcacctgcccagaggcgtgagaagccagggccccagccccagccagagacaccccggcgtgcccagcatcttcttccacgagggccccgagagcatcctgggcttccagaccgacctgagcagcctgcagggcgtgaccaccgtgttccacagcagccacttcatcggccacaccgtgaccctgctgatcggcatcagccccgaggaggacagcagagaggaggcccacctgagaaaggccgagagagaggagaagcccaagcacaccgaggccaagaagagcctgagcttcagaaagaagcagcagaaggacttctgcttcatcttcagaaactag

SEQ ID NO: 4637 - DNA, 1182 bp, synthetic construct; identical to SEQ ID NO: 3793
  misc_feature 1..1182: note = source = /note="Description of Artificial Sequence: Synthetic coding sequence"
  source 1..1182: mol_type = other DNA

SEQ ID NO: 4638 - DNA, 324 bp, synthetic construct
  misc_feature 1..324: note = source = /note="Description of Artificial Sequence: Synthetic coding sequence"
  source 1..324: mol_type = other DNA
atgctgccctgcctggccctgctgctgctgatggagctgagcgtgtgcaccgtggccggcgacggcggcgaggagcagaccctgagcaccgaggccgagacctgggagggcgccggccccagcatccagctgcagctgcaggaggtgaagaccggcaaggccagccagttcttcggcctgatgggcaagagagtgggcggcagacccctgatccagcccagaagaaagaaggcctaccagctggagcacaccttccagggcctgctgggcaagagaagcctgttcaccgagggcagagaggacgaggcccagggcagcgagtag

SEQ ID NO: 4639 - DNA, 1086 bp, synthetic construct
  misc_feature 1..1086: note = source = /note="Description of Artificial Sequence: Synthetic coding sequence"
  source 1..1086: mol_type = other DNA
atgggcatcatccagagcatcctggccaccagcagagactgctacagcttcaagaagaagcccatccccaagaagcccaccatgctggccctggccaagatcctgctgatcagcaccctgttctacagcctgctgagcggcagccacggcaaggagaaccaggacatcaacaccacccagaacatcgccgaggtgttcaagaccatggagaacaagcccatcagcctggagagcgaggccaacctgaacagcgacaaggagaacatcaccaccagcaacctgaaggccagccacagcccccccctgaacctgcccaacaacagccacggcatcaccgacttcagcagcaacagcagcgccgagcacagcctgggcagcctgaagcccaccagcaccatcagcaccagcccccccctgatccacagcttcgtgagcaaggtgccctggaacgcccccatcgccgacgaggacctgctgcccatcagcgcccaccccaacgccacccccgccctgagcagcgagaacttcacctggagcctggtgaacgacaccgtgaagacccccgacaacagcagcatcaccgtgagcatcctgagcagcgagcccaccagccccagcgtgacccccctgatcgtggagcccagcggctggctgaccaccaacagcgacagcttcaccggcttcaccccctaccaggagaagaccaccctgcagcccaccctgaagttcaccaacaacagcaagctgttccccaacaccagcgacccccagaaggagaacagaaacaccggcatcgtgttcggcgccatcctgggcgccatcctgggcgtgagcctgctgaccctggtgggctacctgctgtgcggcaagagaaagaccgacagcttcagccacagaagactgtacgacgacagaaacgagcccgtgctgagactggacaacgcccccgagccctacgacgtgagcttcggcaacagcagctactacaaccccaccctgaacgacagcgccatgcccgagagcgaggagaacgccagagacggcatccccatggacgacatcccccccctgagaaccagcgtgtag

SEQ ID NO: 4640 - DNA, 279 bp, synthetic construct
  misc_feature 1..279: note = source = /note="Description of Artificial Sequence: Synthetic coding sequence"
  source 1..279: mol_type = other DNA
atgagaggccccggccaccccctgctgctgggcctgctgctggtgctgggccccagccccgagcagagagtggagatcgtgcccagagacctgagaatgaaggacaagttcctgaagcacctgaccggccccctgtacttcagccccaagtgcagcaagcacttccacagactgtaccacaacaccagagactgcaccatccccgcctactacaagagatgcgccagactgctgaccagactggccgtgagccccgtgtgcatggaggacaagcagtag

SEQ ID NO: 4641 - DNA, 1125 bp, synthetic construct
  misc_feature 1..1125: note = source = /note="Description of Artificial Sequence: Synthetic coding sequence"
  source 1..1125: mol_type = other DNA
tgaagagtgagaagaggccccctgcccgccgacagacccagagccctgggccccgccagaagatgcagcagacacccccaccccgcccccttcagagtgtgcagcgagggcgccgcccacagactgagaagacccgagagactgcccctgcccagcagagccctgagacccagacccgcccacacccccatcctgggccccgcccccagagcctgccccggcgcccccagagccagcgacagccccacctgcgccgccgccgccgccaccgcctggcccagaaccagagccgtggagagaaagggctgccaggtggccgccgccgccggcgtgagaggcaccggctgccccagcagagccgacctggagaaggacagctggaacgacaccaaggaggacgtgttcgtgcaccagaccgccatcaagaagaacaaccccagaaagtacctgagaagcgtgggcgacggcgagaccgtggagttcgacgtggtggagggcgagaagggcgccgaggccgccaacgtgaccggccccggcggcgtgcccgtgcagggcagcaagtacgccgccgacagaaaccactacagaagataccccagaagaagaggcccccccagaaactaccagcagaactaccagaacagcgagagcggcgagaagaacgagggcagcgagagcgcccccgagggccaggcccagcagagaagaccctacagaagaagaagattccccccctactacatgagaagaccctacggcagaagaccccagtacagcaacccccccgtgcagggcgaggtgatggagggcgccgacaaccagggcgccggcgagcagggcagacccgtgagacagaacatgtacagaggctacagacccagattcagaagaggcccccccagacagagacagcccagagaggacggcaacgaggaggacaaggagaaccagggcgacgagacccagggccagcagcccccccagagaagatacagaagaaacttcaactacagaagaagaagacccgagaaccccaagccccaggacggcaaggagaccaaggccgccgacccccccgccgagaacagcagcgcccccgaggccgagcagggcggcgccgagtag

SEQ ID NO: 4642 - DNA, 420 bp, synthetic construct
  misc_feature 1..420: note = source = /note="Description of Artificial Sequence: Synthetic coding sequence"
  source 1..420: mol_type = other DNA
atggccctgagaatgctgtgggccggccaggccaagggcatcctgggcggctggggcatcatctgcctggtgatgagcctgctgctgcagcaccccggcgtgtacagcaagtgctacttccaggcccaggccccctgccactacgagggcaagtacttcaccctgggcgagagctggctgagaaaggactgcttccactgcacctgcctgcaccccgtgggcgtgggctgctgcgacaccagccagcaccccatcgacttccccgccggctgcgaggtgagacaggaggccggcacctgccagttcagcctggtgcagaagagcgaccccagactgccctgcaagggcggcggccccgaccccgagtggggcagcgccaacacccccgtgcccggcgcccccgccccccacagcagctag

SEQ ID NO: 4643 - DNA, 462 bp, synthetic construct
  misc_feature 1..462: note = source = /note="Description of Artificial Sequence: Synthetic coding sequence"
  source 1..462: mol_type = other DNA
cactactgcaaggagggctactacagagacatgggcaagcccatcacccacagaaaggcctgcaaggcctgcgactgccaccccgtgggcgccgccggcaagacctgcaaccagaccaccggccagtgcccctgcaaggacggcgtgaccggcatcacctgcaacagatgcgccaagggctaccagcagagcagaagccccatcgccccctgcatcaagatccccgtggccccccccaccaccgccgccagcagcgtggaggagcccgaggccgccagacagcccaacaccttccaggccgagggcctgagcctgctgcccggcgccgccgagaaggagggcgccagatgctggggctacagaagaagactgggccacagagtggcccaggccgagtgcagaggccccagaagctgggcctggggcagaatcaccagcagcttcagcttcgccagcaactag

SEQ ID NO: 4644 - DNA, 213 bp, synthetic construct
  misc_feature 1..213: note = source = /note="Description of Artificial Sequence: Synthetic coding sequence"
  source 1..213: mol_type = other DNA
atgctggtgctgttcctgctgggcaccgtgttcctgctgtgcccctactggggcgagctgcacgaccccatcaagggccagagcatgtaccactacagcaagctgagctgcatgaccagctgcgaggacatcaacttcctgggcttcaccaagagagtggagctgatctgctgcgaccacagcaactactgcaacctgcccgagggcgtgtag

SEQ ID NO: 4645 - DNA, 567 bp, synthetic construct; identical to SEQ ID NO: 4160
  misc_feature 1..567: note = source = /note="Description of Artificial Sequence: Synthetic coding sequence"
  source 1..567: mol_type = other DNA

SEQ ID NO: 4646 - DNA, 2316 bp, synthetic construct; identical to SEQ ID NO: 3607
  misc_feature 1..2316: note = source = /note="Description of Artificial Sequence: Synthetic coding sequence"
  source 1..2316: mol_type = other DNA

SEQ ID NO: 4647 - DNA, 1014 bp, synthetic construct
  misc_feature 1..1014: note = source = /note="Description of Artificial Sequence: Synthetic coding sequence"
  source 1..1014: mol_type = other DNA
atggccagacccatgatcaaggaggccagaatggccagcctgctgctggagaacccctactacggctgcagaaagcccaaggaccaggtgagaagcagcctgaagaacgtgagcgacctgttcgtgatgggcggcgccctggtgctggagagcgccgccctgctgcactggctggagagagagggctacggccccctgggcatgaccggcatcagcatgggcggccacatggccagcctggccgtgagcaactggcccaagcccatgcccctgatcccctgcctgagctggagcaccgccagcggcgtgttcaccaccggcgtgctgagcaagagcatcaactggagagagctggagaagcagtactacacccagaccgtgtacgaggaggagatcatccacatgctggagtactgcggcaccgacagcttcaagatgggccaggagttcgtgaagcacttcaccagcagcgccgacaagctgaccaacctgaacctggtgagcagaaccctgaacctggacatcagcaaccaggtggtgagccagaagcccgccgactgccacaacagcagcaagaccagcgtgagcgccaccagcgagggcctgctgctgcaggacaccagcaagatgaagagattcaaccagaccctgagcaccaacaagagcggctacaccagcagaaacccccagagctaccacctgctgagcaaggagcagagcagaaacagcctgagaaaggagagcctgatcttcatgaagggcgtgatggacgagtgcacccacgtggccaacttcagcgtgcccgtggaccccagcctgatcatcgtggtgcaggccaaggaggacgcctacatccccagaaccggcgtgagaagcctgcaggagatctggcccggctgcgagatcagatacctggagggcggccacatcagcgcctacctgttcaagcagggcctgttcagacaggccatctacgacgccttcgacagattcctgcacaagtacgccaactag

SEQ ID NO: 4648 - DNA, 462 bp, synthetic construct
  misc_feature 1..462: note = source = /note="Description of Artificial Sequence: Synthetic coding sequence"
  source 1..462: mol_type = other DNA
atgggccccgaggccctgagcagcctgctgctgctgctgctggtggccagcggcgacgccgacatgaagggccacttcgaccccgccaagtgcagatacgccctgggcatgcaggacagaaccatccccgacagcgacatcagcgccagcagcagctggagcgacagcaccgccgccagacacagcagactggagagcagcgacggcgacggcgcctggtgccccgccggcagcgtgttccccaaggaggaggagtacctgcaggtggacctgcagagactgcacctggtggccctggtgggcacccagggcagacacgccggcggcctgggcaaggagttcagcagaagctacagactgagatacagcagagacggcagaagatggatgggctggaaggacagatggggccaggaggtgatcagcggcaacgaggaccccgagggcgtggtgctgaagtag

SEQ ID NO: 4649 - DNA, 345 bp, synthetic construct
  misc_feature 1..345: note = source = /note="Description of Artificial Sequence: Synthetic coding sequence"
  source 1..345: mol_type = other DNA
atggacaagagcctgctgctggagctgcccatcctgctgtgctgcttcagagccctgagcggcagcctgagcatgagaaacgacgccgtgatcgagatcgtgcagtgcagaatgtgccacctgcagttccccggcgagaagtgcagcagaggcagaggcatctgcaccgccaccaccgaggaggcctgcatggtgggcagaatgttcaagagagacggcaacccctggctgaccttcatgggctgcctgaagaactgcgccgacgtgaagggcatcagatggagcgtgtacctggtgaacttcagatgctgcagaagccacgacctgtgcaacgaggacctgtag

SEQ ID NO: 4650 - DNA, 630 bp, synthetic construct; identical to SEQ ID NO: 4517
  misc_feature 1..630: note = source = /note="Description of Artificial Sequence: Synthetic coding sequence"
  source 1..630: mol_type = other DNA

SEQ ID NO: 4651 - DNA, 639 bp, synthetic construct
  misc_feature 1..639: note = source = /note="Description of Artificial Sequence: Synthetic coding sequence"
  source 1..639: mol_type = other DNA
gacttcggctactgccccagagtgtactgcgagaaccagcccatgctgcccatcggcgtgctggtgatggtgggcttcaccgtgggcaaggtgcccgtgcccgacatcagaacctgccacttctgcctggtggaggaccccagcgtgggctgcatcagcggcagcgagaagtgcaccatcagcagcagcagcctgtgcatggtgatcaccatctactacgacgtgaaggtgagattcatcgtgagaggctgcggccagtacatcagctacagatgccaggagaagagaaacacctacttcgccgagtactggtaccaggcccagtgctgccagtacgactactgcaacagctggagcagcccccagctgcagagcagcctgcccgagccccacgacagacccctggccctgcccctgagcgacagccagatccagtggttctaccaggccctgaacctgagcctgcccctgcccaacttccacgccggcaccgagcccgacggcctggaccccatggtgaccctgagcctgaacctgggcctgagcttcgccgagctgagaagaatgtacctgttcctgaacagcagcggcctgctggtgctgccccaggccggcctgctgaccccccaccccagctag

SEQ ID NO: 4652 - DNA, 240 bp, synthetic construct; identical to SEQ ID NO: 4408
  misc_feature 1..240: note = source = /note="Description of Artificial Sequence: Synthetic coding sequence"
  source 1..240: mol_type = other DNA

SEQ ID NO: 4653 - DNA, 1620 bp, synthetic construct
  misc_feature 1..1620: note = source = /note="Description of Artificial Sequence: Synthetic coding sequence"
  source 1..1620: mol_type = other DNA
atgagcgagccccaggagaagaagctgagcgagaacaccgacttcctggcccccggcgtgagcagcttcaccgacagcaaccagcaggagagcatcaccaagagagaggagaaccaggagcagcccagaaactacagccaccaccagctgaacagaagcagcaagcacagccagggcctgagagaccagggcaaccaggagcaggaccccaacatcagcaacggcgaggaggaggaggagaaggagcccggcgaggtgggcacccacaacgacaaccaggagagaaagaccgagctgcccagagagcacgccaacagcaagcaggaggaggacaacacccagagcgacgacatcctggaggagagcgaccagcccacccaggtgagcaagatgcaggaggacgagttcgaccagggcaaccaggagcaggaggacaacagcaacgccgagatggaggaggagaacgccagcaacgtgaacaagcacatccaggagaccgagtggcagagccaggagggcaagaccggcctggaggccatcagcaaccacaaggagaccgaggagaagaccgtgagcgaggccctgctgatggagcccaccgacgacggcaacaccacccccagaaaccacggcgtggacgacgacggcgacgacgacggcgacgacggcggcaccgacggccccagacacagcgccagcgacgactacttcatccccagccaggccttcctggaggccgagagagcccagagcatcgcctaccacctgaagatcgaggagcagagagagaaggtgcacgagaacgagaacatcggcaccaccgagcccggcgagcaccaggaggccaagaaggccgagaacagcagcaacgaggaggagaccagcagcgagggcaacatgagagtgcacgccgtggacagctgcatgagcttccagtgcaagagaggccacatctgcaaggccgaccagcagggcaagccccactgcgtgtgccaggaccccgtgacctgcccccccaccaagcccctggaccaggtgtgcggcaccgacaaccagacctacgccagcagctgccacctgttcgccaccaagtgcagactggagggcaccaagaagggccaccagctgcagctggactacttcggcgcctgcaagagcatccccacctgcaccgacttcgaggtgatccagttccccctgagaatgagagactggctgaagaacatcctgatgcagctgtacgaggccaacagcgagcacgccggctacctgaacgagaagcagagaaacaaggtgaagaagatctacctggacgagaagagactgctggccggcgaccaccccatcgacctgctgctgagagacttcaagaagaactaccacatgtacgtgtaccccgtgcactggcagttcagcgagctggaccagcaccccatggacagagtgctgacccacagcgagctggcccccctgagagccagcctggtgcccatggagcactgcatcaccagattcttcgaggagtgcgaccccaacaaggacaagcacatcaccctgaaggagtggggccactgcttcggcatcaaggaggaggacatcgacgagaacctgctgttctag

SEQ ID NO: 4654 - DNA, 2535 bp, synthetic construct; identical to SEQ ID NO: 3960
  misc_feature 1..2535: note = source = /note="Description of Artificial Sequence: Synthetic coding sequence"
  source 1..2535: mol_type = other DNA

SEQ ID NO: 4655 - DNA, 993 bp, synthetic construct
  misc_feature 1..993: note = source = /note="Description of Artificial Sequence: Synthetic coding sequence"
  source 1..993: mol_type = other DNA
atgcagctgttcctgctgctgtgcctggtgctgctgagcccccagggcgccagcctgcacagacaccaccccagagagatgaagaagagagtggaggacctgcacgtgggcgccaccgtggcccccagcagcagaagagacttcaccttcgacctgctgggcaacgccctgttcaccgacctggtggtggacctgcaggacaccttcgtgagcgccatgaagaccctgtacctggccgacaccttccccaccaacttcagagacagcgccggcgccatgaagcagatcaacgactacgtggccaagcagaccaagggcaagatcgtggacctgctgaagaacctggacagcaacgccgtggtgatcatggtgaactacatcttcttcaaggccaagtgggagaccagcttcaaccacaagggcacccaggagcaggacttctacgtgaccagcgagaccgtggtgagagtgcccatgatgagcagagaggaccagtaccactacctgctggacagaaacctgagctgcagagtggtgggcgtgccctaccagggcaacgccaccgccctgttcatcctgcccagcgagggcaagatgcagcaggtggagaacggcctgagcgagaagaccctgagaaagtggctgaagatgttcaagaagagacagctggagctgtacctgcccaagttcagcatcgagggcagctaccagctggagaaggtgctgcccagcctgggcatcagcaacgtgttcaccagccacgccgacctgagcggcatcagcaaccacagcaacatccaggtgagcgagatggtgcacaaggccgtggtggaggtggacgagagcggcaccagagccgccgccgccaccggcaccatcttcaccttcagaagcgccagactgaacagccagagactggtgttcaacagacccttcctgatgttcatcgtggacaacaacatcctgttcctgggcaaggtgaacagaccctag

SEQ ID NO: 4656 - DNA, 2676 bp, synthetic construct; identical to SEQ ID NO: 4153
  misc_feature 1..2676: note = source = /note="Description of Artificial Sequence: Synthetic coding sequence"
  source 1..2676: mol_type = other DNA

SEQ ID NO: 4657 - DNA, 708 bp, synthetic construct; identical to SEQ ID NO: 3939
  misc_feature 1..708: note = source = /note="Description of Artificial Sequence: Synthetic coding sequence"
  source 1..708: mol_type = other DNA

SEQ ID NO: 4658 - DNA, 1386 bp, synthetic construct; identical to SEQ ID NO: 3950
  misc_feature 1..1386: note = source = /note="Description of Artificial Sequence: Synthetic coding sequence"
  source 1..1386: mol_type = other DNA

SEQ ID NO: 4659 - DNA, 2676 bp, synthetic construct; identical to SEQ ID NO: 4153
  misc_feature 1..2676: note = source = /note="Description of Artificial Sequence: Synthetic coding sequence"
  source 1..2676: mol_type = other DNA

SEQ ID NO: 4660 - DNA, 501 bp, synthetic construct; identical to SEQ ID NO: 4634
  misc_feature 1..501: note = source = /note="Description of Artificial Sequence: Synthetic coding sequence"
  source 1..501: mol_type = other DNA

SEQ ID NO: 4661 - DNA, 420 bp, synthetic construct
  misc_feature 1..420: note = source = /note="Description of Artificial Sequence: Synthetic coding sequence"
  source 1..420: mol_type = other DNA
atgcaggccgcctgctggtacgtgctgttcctgctgcagcccaccgtgtacctggtgacctgcgccaacctgaccaacggcggcaagagcgagctgctgaagagcggcagcagcaagagcaccctgaagcacatctggaccgagagcagcaaggacctgagcatcagcagactgctgagccagaccttcagaggcaaggagaacgacaccgacctggacctgagatacgacacccccgagccctacagcgagcaggacctgtgggactggctgagaaacagcaccgacctgcaggagcccagacccagagccaagagaagacccatcgtgaagaccggcaagttcaagaagatgttcggctggggcgacttccacagcaacatcaagaccgtgaagctgaacctgctgatcaccggctag

SEQ ID NO: 4662 - DNA, 2412 bp, synthetic construct
  misc_feature 1..2412: note = source = /note="Description of Artificial Sequence: Synthetic coding sequence"
  source 1..2412: mol_type = other DNA
atggccgccgccggcctggtggccgtggccgccgccgccgagtacagcggcaccgtggccagcggcggcaacctgcccggcgtgcactgcggccccagcagcggcgccggccccggcttcggccccggcagctggagcagaagcctggacagagccctggaggaggccgccgtgaccggcgtgctgagcctgagcggcagaaagctgagagagttccccagaggcgccgccaaccacgacctgaccgacaccaccagagccgacctgagcagaaacagactgagcgagatccccatcgaggcctgccacttcgtgagcctggagaacctgaacctgtaccagaactgcatcagatacatccccgaggccatcctgaacctgcaggccctgaccttcctgaacatcagcagaaaccagctgagcaccctgcccgtgcacctgtgcaacctgcccctgaaggtgctgatcgccagcaacaacaagctggtgagcctgcccgaggagatcggccacctgagacacctgatggagctggacgtgagctgcaacgagatccagaccatccccagccagatcggcaacctggaggccctgagagacctgaacgtgagaagaaaccacctggtgcacctgcccgaggagctggccgagctgcccctgatcagactggacttcagctgcaacaagatcaccaccatccccgtgtgctacagaaacctgagacacctgcagaccatcaccctggacaacaaccccctgcagagcccccccgcccagatctgcatcaagggcaaggtgcacatcttcaagtacctgaacatccaggcctgcaagatcgcccccgacctgcccgactacgacagaagacccctgggcttcggcagctgccacgaggagctgtacagcagcagaccctacggcgccctggacagcggcttcaacagcgtggacagcggcgacaagagatggagcggcaacgagcccaccgacgagttcagcgacctgcccctgagagtggccgagatcaccaaggagcagagactgagaagagagagccagtaccaggagaacagaggcagcctggtggtgaccaacggcggcgtggagcacgacctggaccagatcgactacatcgacagctgcaccgccgaggaggaggaggccgaggtgagacagcccaagggccccgaccccgacagcctgagcagccagttcatggcctacatcgagcagagaagaatcagccacgagggcagccccgtgaagcccgtggccatcagagagttccagaagaccgaggacatgagaagatacctgcaccagaacagagtgcccgccgagcccagcagcctgctgagcctgagcgccagccacaaccagctgagccacaccgacctggagctgcaccagagaagagagcagctggtggagagaaccagaagagaggcccagctggccgccctgcagtacgaggaggagaagatcagaaccaagcagatccagagagacgccgtgctggacttcgtgaagcagaaggccagccagagcccccagaagcagcaccccctgctggacggcgtggacggcgagtgccccttccccagcagaagaagccagcacaccgacgacagcgccctgtgcatgagcctgagcggcctgaaccaggtgggctgcgccgccaccctgccccacagcagcgccttcacccccctgaagagcgacgacagacccaacgccctgctgagcagccccgccaccgagaccgtgcaccacagccccgcctacagcttccccgccgccatccagagaaaccagccccagagacccgagagcttcctgttcagagccggcgtgagagccgagaccaacaagggccacgccagccccctgccccccagcgccgcccccaccaccgacagcaccgacagcatcaccggccagaacagcagacagagagaggaggagctggagctgatcgaccagctgagaaagcacatcgagtacagactgaaggtgagcctgccctgcgacctgggcgccgccctgaccgacggcgtggtgctgtgccacctggccaaccacgtgagacccagaagcgtgcccagcatccacgtgcccagccccgccgtgcccaagctgaccatggccaagtgcagaagaaacgtggagaacttcctggaggcctgcagaaagatcggcgtgccccaggacaacctgtgcagccccagcgacatcctgcagctgaacctgagcgtgaagagaaccgtggagaccctgctgagcctgggcgcccacagcgaggagagcagcttcgtgtgcctgagcctgcagctgctgggcttcgtggccttctactgcaccgtgatgctgaccctgtgcgtgctgtactactggctgttccccgccagatag

SEQ ID NO: 4663 - DNA, 633 bp, synthetic construct
  misc_feature 1..633: note = source = /note="Description of Artificial Sequence: Synthetic coding sequence"
  source 1..633: mol_type = other DNA
atgtacaaggccagaccccccgccggcagcggcggccccggcgccgagccccccgccatggccgcccccagaggcagagccgccccctggaccaccgccctgctgctgctgctggccagccaggtgctgagccccggcagctgcgccgacgaggaggaggtgcccgaggagtgggtgctgctgcacgtggtgcagggccagatcggcgccggcaactacagctacctgagactgaaccacgagggcaagatcgtgctgagaatgagaagcctgaagggcgacgccgacctgtacgtgagcgccagcagcctgcaccccagcttcgacgactacgagctgcagagcgccacctgcggccccgacgccgtgagcatccccgcccacttcagaagacccgtgggcatcggcgtgtacggccaccccagccacctggagagcgagttcgagatgaaggtgtactacgacggcaccgtggagcagcaccccttcggcgaggccgcctaccccgccgacggcgccgacgccggccagaagcacgccggcgcccccgaggacgccagccaggaggaggagagcgtgctgtggaccatcctgatcagcatcctgaagctggtgctggagatcctgttctag

SEQ ID NO: 4664 - DNA, 486 bp, synthetic construct
  misc_feature 1..486: note = source = /note="Description of Artificial Sequence: Synthetic coding sequence"
  source 1..486: mol_type = other DNA
tgatgccccaccgagatcatcgccttcggcgacagactggaggagttcagaagcatcaacaccgaggtggtggcctgcagcgtggacagccagttcacccacctggcctggatcaacacccccagaagacagggcggcctgggccccatcagaatccccctgctgagcgacctgacccaccagatcagcaaggactacggcgtgtacctggaggacagcggccacaccctgagaggcctgttcatcatcgacgacaagggcatcctgagacagatcaccctgaacgacctgcccgtgggcagaagcgtggacgagaccctgagactggtgcaggccttccagtacaccgacaagcacggcgaggtgtgccccgccggctggaagcccggcagcgagaccatcaagcccgaggacaccatgaaggcctggtggcccagagagagctacaaccccagaagcagctggaaggccgaggtgttcagatag

SEQ ID NO: 4665 - DNA, 2886 bp, synthetic construct; identical to SEQ ID NO: 4184
  misc_feature 1..2886: note = source = /note="Description of Artificial Sequence: Synthetic coding sequence"
  source 1..2886: mol_type = other DNA

SEQ ID NO: 4666 - DNA, 2853 bp, synthetic construct
  misc_feature 1..2853: note = source = /note="Description of Artificial Sequence: Synthetic coding sequence"
  source 1..2853: mol_type = other DNA
atgacctggagaatgggccccagattcaccatgctgctggccatgtggctggtgtgcggcagcgagccccacccccacgccaccatcagaggcagccacggcggcagaaaggtgcccctggtgagccccgacagcagcagacccgccagattcctgagacacaccggcagaagcagaggcatcgagagaagcaccctggaggagcccaacctgcagcccctgcagagaagaagaagcgtgcccgtgctgagactggccagacccaccgagccccccgccagaagcgacatcaacggcgccgccgtgagacccgagcagagacccgccgccagaggcagccccagagagatgatcagagacgagggcagcagcgccagaagcagaatgctgagattccccagcggcagcagcagccccaacatcctggccagcttcgccggcaagaacagagtgtgggtgatcagcgccccccacgccagcgagggctactacagactgatgatgagcctgctgaaggacgacgtgtactgcgagctggccgagagacacatccagcagatcgtgctgttccaccaggccggcgaggagggcggcaaggtgagaagaatcaccagcgagggccagatcctggagcagcccctggaccccagcctgatccccaagctgatgagcttcctgaagctggagaagggcaagttcggcatggtgctgctgaagaagaccctgcaggtggaggagagatacccctaccccgtgagactggaggccatgtacgaggtgatcgaccagggccccatcagaagaatcgagaagatcagacagaagggcttcgtgcagaagtgcaaggccagcggcgtggagggccaggtggtggccgagggcaacgacggcggcggcggcgccggcagacccagcctgggcagcgagaagaagaaggaggaccccagaagagcccaggtgccccccaccagagagagcagagtgaaggtgctgagaaagctggccgccaccgcccccgccctgccccagccccccagcacccccagagccaccaccctgccccccgcccccgccaccaccgtgaccagaagcaccagcagagccgtgaccgtggccgccagacccatgaccaccaccgccttccccaccacccagagaccctggacccccagccccagccacagaccccccaccaccaccgaggtgatcaccgccagaagacccagcgtgagcgagaacctgtacccccccagcagaaaggaccagcacagagagagaccccagaccaccagaagacccagcaaggccaccagcctggagagcttcaccaacgccccccccaccaccatcagcgagcccagcaccagagccgccggccccggcagattcagagacaacagaatggacagaagagagcacggccacagagaccccaacgtggtgcccggcccccccaagcccgccaaggagaagccccccaagaagaaggcccaggacaagatcctgagcaacgagtacgaggagaagtacgacctgagcagacccaccgccagccagctggaggacgagctgcaggtgggcaacgtgcccctgaagaaggccaaggagagcaagaagcacgagaagctggagaagcccgagaaggagaagaagaagaagatgaagaacgagaacgccgacaagctgctgaagagcgagaagcagatgaagaagagcgagaagaagagcaagcaggagaaggagaagagcaagaagaagaagggcggcaagaccgagcaggacggctaccagaagcccaccaacaagcacttcacccagagccccaagaagagcgtggccgacctgctgggcagcttcgagggcaagagaagactgctgctgatcaccgcccccaaggccgagaacaacatgtacgtgcagcagagagacgagtacctggagagcttctgcaagatggccaccagaaagatcagcgtgatcaccatcttcggccccgtgaacaacagcaccatgaagatcgaccacttccagctggacaacgagaagcccatgagagtggtggacgacgaggacctggtggaccagagactgatcagcgagctgagaaaggagtacggcatgacctacaacgacttcttcatggtgctgaccgacgtggacctgagagtgaagcagtactacgaggtgcccatcaccatgaagagcgtgttcgacctgatcgacaccttccagagcagaatcaaggacatggagaagcagaagaaggagggcatcgtgtgcaaggaggacaagaagcagagcctggagaacttcctgagcagattcagatggagaagaagactgctggtgatcagcgcccccaacgacgaggactgggcctacagccagcagctgagcgccctgagcggccaggcctgcaacttcggcctgagacacatcaccatcctgaagctgctgggcgtgggcgaggaggtgggcggcgtgctggagctgttccccatcaacggcagcagcgtggtggagagagaggacgtgcccgcccacctggtgaaggacatcagaaactacttccaggtgagccccgagtacttcagcatgctgctggtgggcaaggacggcaacgtgaagagctggtaccccagccccatgtggagcatggtgatcgtgtacgacctgatcgacagcatgcagctgagaagacaggagatggccatccagcagagcctgggcatgagatgccccgaggacgagtacgccggctacggctaccacagctaccaccagggctaccaggacggctaccaggacgactacagacaccacgagagctaccaccacggctacccctactag

SEQ ID NO: 4667 - DNA, 351 bp, synthetic construct; identical to SEQ ID NO: 4162
  misc_feature 1..351: note = source = /note="Description of Artificial Sequence: Synthetic coding sequence"
  source 1..351: mol_type = other DNA

SEQ ID NO: 4668 - DNA, 1251 bp, synthetic construct
  misc_feature 1..1251: note = source = /note="Description of Artificial Sequence: Synthetic coding sequence"
  source 1..1251: mol_type = other DNA
atgaagttccagggccccctggcctgcctgctgctggccctgtgcctgggcagcggcgaggccggccccctgcagagcggcgaggagagcaccggcaccaacatcggcgaggccctgggccacggcctgggcgacgccctgagcgagggcgtgggcaaggccatcggcaaggaggccggcggcgccgccggcagcaaggtgagcgaggccctgggccagggcaccagagaggccgtgggcaccggcgtgagacaggtgcccggcttcggcgtggccgacgccctgggcaacagagtgggcgaggccgcccacgccctgggcaacaccggccacgagatcggcagacaggccgaggacgtgatcagacacggcgccgacgccgtgagaggcagctggcagggcgtgcccggccacaacggcgcctgggagaccagcggcggccacggcatcttcggcagccagggcggcctgggcggccagggccagggcaaccccggcggcctgggcaccccctgggtgcacggctaccccggcaacagcgccggcagcttcggcatgaacccccagggcgccccctggggccagggcggcaacggcggcccccccaacttcggcaccaacacccagggcgccgtggcccagcccggctacggcagcgtgagagccagcaaccagaacgagggctgcaccaaccccccccccagcggcagcggcggcggcagcagcaacagcggcggcggcagcggcagccagagcggcagcagcggcagcggcagcaacggcgacaacaacaacggcagcagcagcggcggcagcagcagcggcagcagcagcggcggcagcagcggcggcagcagcggcggcagcagcggcaacagcggcggcagcagaggcgacagcggcagcgagagcagctggggcagcagcaccggcagcagcagcggcaaccacggcggcagcggcggcggcaacggccacaagcccggctgcgagaagcccggcaacgaggccagaggcagcggcgagagcggcatccagggcttcagaggccagggcgtgagcagcaacatgagagagatcagcaaggagggcaacagactgctgggcggcagcggcgacaactacagaaacagcgagaccagccccggcatgttcaacttcgacaccttctggaagaacttcaagagcaagctgggcttcatcaactgggacgccatcaacaaggaccagagaagcagcagaatcccctag

SEQ ID NO: 4669 - DNA, 933 bp, synthetic construct
  misc_feature 1..933: note = source = /note="Description of Artificial Sequence: Synthetic coding sequence"
  source 1..933: mol_type = other DNA
atggtggacaaggacaccgagagagacatcgagatgaagagacagctgagaagactgagagagctgcacctgtacagcacctggaagaagtaccaggaggccatgaagaccagcctgggcgtgccccagtgcgagagagacgagggcagcctgggcaagcccctgtgcccccccgagatcctgagcgagaccctgcccggcagcgtgaagaagagagtgtgcttccccagcgaggaccacctggaggagttcatcgccgagcacctgcccgaggccagcaaccagagcctgctgaccgtggcccacgccgacgccggcacccagaccaacggcgacctggaggacctggaggagcacggccccggccagaccgtgagcgaggaggccaccgaggtgcacaccatggagggcgaccccgacaccctggccgagttcctgatcagagacgtgctgcaggagctgagcagctacaacggcgaggaggaggaccccgaggaggtgaagaccagcctgggcgtgccccagagaggcgacctggaggacctggaggagcacgtgcccggccagaccgtgagcgaggaggccaccggcgtgcacatgatgcaggtggaccccgccaccctggccaagagcgacctggaggacctggaggagcacgtgcccgagcagaccgtgagcgaggaggccaccggcgtgcacatgatgcaggtggaccccgccaccctggccaagcagctggaggacagcaccatcaccggcagccaccagcagatgagcgccagccccagcagcgcccccgccgaggaggccaccgagaagaccaaggtggaggaggaggtgaagaccagaaagcccaagaagaagaccagaaagcccagcaagaagagcagatggaacgtgctgaagtgctgggacatcttcaacatcttctag

SEQ ID NO: 4670 - DNA, 150 bp, synthetic construct
  misc_feature 1..150: note = source = /note="Description of Artificial Sequence: Synthetic coding sequence"
  source 1..150: mol_type = other DNA
atggccccccccagcgtgcccctggtgctgctgctggtgctgctgctgagcctggccgagacccccgccagcgcccccgcccacagaagcagcaccttccccaagtgggtgaccaagaccgagagaggcagacagcccctgagaagctag

SEQ ID NO: 4671 - DNA, 978 bp, synthetic construct; identical to SEQ ID NO: 3582
  misc_feature 1..978: note = source = /note="Description of Artificial Sequence: Synthetic coding sequence"
  source 1..978: mol_type = other DNA

SEQ ID NO: 4672 - DNA, 390 bp, synthetic construct; identical to SEQ ID NO: 4161
  misc_feature 1..390: note = source = /note="Description of Artificial Sequence: Synthetic coding sequence"
  source 1..390: mol_type = other DNA

SEQ ID NO: 4673 - DNA, 1056 bp, synthetic construct
  misc_feature 1..1056: note = source = /note="Description of Artificial Sequence: Synthetic coding sequence"
  source 1..1056: mol_type = other DNA
atggccggcatccccggcctgctgttcctgctgttcttcctgctgtgcgccgtgggccaggtgagcccctacagcgccccctggaagcccacctggcccgcctacagactgcccgtggtgctgccccagagcaccctgaacctggccaagcagtacctgagctacgagaccctgtacgccaacggcagcagaaccgagacccaggtgggcatctacatcctgagcagcagcggcgacggcgcccagcacagagacagcggcagcagcggcaagagcagaagaaagagacagatctacggctacgacagcagattcagcatcttcggcaaggacttcctgctgaactaccccttcagcaccagcgtgaagctgagcaccggctgcaccggcaccctggtggccgagaagcacgtgctgaccgccgcccactgcatccacgacggcaagacctacgtgaagggcacccagaagctgagagtgggcttcctgaagcccaagttcaaggacggcggcagaggcgccaacgacagcaccagcgccatgcccgagcagatgaagttccagtggatcagagtgaagagaacccacgtgcccaagggctggatcaagggcaacgccaacgacatcggcatggactacgactacgccctgctggagctgaagaagccccacaagagaaagttcatgaagatcggcgtgagcccccccgccaagcagctgcccggcggcagaatccacttcagcggctacgacaacgacagacccggcaacctggtgtacagattctgcgacgtgaaggacgagacctacgacctgctgtaccagcagtgcgacgcccagcccggcgccagcggcagcggcgtgtacgtgagaatgtggaagagacagcagcagaagtgggagagaaagatcatcggcatcttcagcggccaccagtgggtggacatgaacggcagcccccaggacttcaacgtggccgtgagaatcacccccctgaagtacgcccagatctgctactggatcaagggcaactacctggactgcagagagggctag

SEQ ID NO: 4674 - DNA, 345 bp, synthetic construct
  misc_feature 1..345: note = source = /note="Description of Artificial Sequence: Synthetic coding sequence"
  source 1..345: mol_type = other DNA
atggagagaggcgccggcgccaagctgctgcccctgctgctgctgctgagagccaccggcttcacctgcgcccagaccgacggcagaaacggctacaccgccgtgatcgaggtgaccagcggcggcccctggggcgactgggcctggcccgagatgtgccccgacggcttcttcgccagcggcttcagcctgaaggtggagcccccccagggcatccccggcgacgacaccgccctgaacggcatcagactgcactgcgccagaggcaacgtgctgggcaacacccacgtggtggagagccagagcggcagatggggcgccggcgtggaggaccccctgggctag

SEQ ID NO: 4675 - DNA, 825 bp, synthetic construct
  misc_feature 1..825: note = source = /note="Description of Artificial Sequence: Synthetic coding sequence"
  source 1..825: mol_type = other DNA
atgtggagatgccccctgggcctgctgctgctgctgcccctggccggccacctggccctgggcgcccagcagggcagaggcagaagagagctggcccccggcctgcacctgagaggcatcagagacgccggcggcagatactgccaggagcaggacctgtgctgcagaggcagagccgacgactgcgccctgccctacctgggcgccatctgctactgcgacctgttctgcaacagaaccgtgagcgactgctgccccgacttctgggacttctgcctgggcgtgcccccccccttcccccccatccagggctgcatgcacggcggcagaatctaccccgtgctgggcacctactgggacaactgcaacagatggccccccctggagtgctgggacctgctgccccccgccctgcccggccccgtgtgggccgccctgggcgccaaggaggagatggccggcaaggacagaaccgtgtactgccccctgctgatgaaggccctgggcgccagagtgggcgagtgccccggctgccagagcccccagagaatgctgcccgagagcagcagagtgctgctgcccagatgcgccgagggcgagcagcccggcgtgcagagaggcaagggcagaatgagaaaggccttccccgccctgcagacccccctggccctgcccagcagcgcccccgccagccccggcgccggcaagcccagccacaccggcagctggctgcccctgagactgctgaagagacagcactggagatgggagccctggaccgcctgcaaggaggccgtgcagcacctggtgatcaccgagctgtag

SEQ ID NO: 4676 - DNA, 438 bp, synthetic construct
  misc_feature 1..438: note = source = /note="Description of Artificial Sequence: Synthetic coding sequence"
  source 1..438: mol_type = other DNA
atggcccagctgttcctgcccctgctggccgccctggtgctggcccaggcccccgccgccctggccgacgtgctggagggcgacagcagcgaggacagagccttcagagtgagaatcgccggcgacgcccccctgcagggcgtgctgggcggcgccctgaccatcccctgccacgtgcactacctgagacccccccccagcagaagagccgtgctgggcagccccagagtgaagtggaccttcctgagcagaggcagagaggccgaggtgctggtggccagaggcgtgagagtgaaggtgaacgaggcctacagattcagagtggccctgcccgcctaccccgccagcctgaccgacgtgagcctggccctgagcgagctgagacccaacgacagcggcatctacagatgcgaggtgcagcacggcatcgacgactag

SEQ ID NO: 4677 - DNA, 567 bp, synthetic construct; identical to SEQ ID NO: 4160
  misc_feature 1..567: note = source = /note="Description of Artificial Sequence: Synthetic coding sequence"
  source 1..567: mol_type = other DNA

SEQ ID NO: 4678 - DNA, 558 bp, synthetic construct
  misc_feature 1..558: note = source = /note="Description of Artificial Sequence: Synthetic coding sequence"
  source 1..558: mol_type = other DNA
atgggccccgccggctgcgccttcaccctgctgctgctgctgggcatcagcgacagagactaccacagcgccctgcaggaggccgaggtgcccatcatcgacagacaggcctgcgagcagctgtacaaccccatcggcatcttcctgcccgccctggagcccgtgatcaaggaggacaagatctgcgccggcgacacccagaacatgaaggacagctgcaagggcgacagcggcggccccctgagctgccacatcgacggcgtgtggatccagaccggcgtggtgagctggggcctggagtgcggcaagagcctgcccggcgtgtacaccaacgtgatctactaccagaagtggatcaacgccaccatcagcagagccaacaacctggacttcagcgacttcctgttccccatcgtgctgctgagcctggccctgctgagacccagctgcgccttcggccccaacaccatccacagagtgggcaccgtggccgaggccgtggcctgcatccagggctgggaggagaacgcctggagattcagccccagaggcagatag

SEQ ID NO: 4679 - DNA, 1653 bp, synthetic construct
  misc_feature 1..1653: note = source = /note="Description of Artificial Sequence: Synthetic coding sequence"
  source 1..1653: mol_type = other DNA
cccgcccccgccagcagaaagctgctgcccagaagacacctgagcgagaagagccaccacatcagcatccccagccccgacatcagccacaagggcctgagaagcaagagaacccagcccagcgaccccgagacctgggagagcctgcccagactggacagccagagacacggcggccccgagttcagcttcgacctgctgcccgaggccagagccatcagagtgaccatcagcagcggccccgaggtgagcgtgagactgtgccaccagtgggccctggagtgcgaggagctgagcagcccctacgacgtgcagaagatcgtgagcggcggccacaccgtggagctgccctacgagttcctgctgccctgcctgtgcatcgaggccagctacctgcaggaggacaccgtgagaagaaagaagtgccccttccagagctggcccgaggcctacggcagcgacttctggaagagcgtgcacttcaccgactacagccagcacacccagatggtgatggccctgaccctgagatgccccctgaagctggaggccgccctgtgccagagacacgactggcacaccctgtgcaaggacctgcccaacgccaccgccagagagagcgacggctggtacgtgctggagaaggtggacctgcacccccagctgtgcttcaagttcagcttcggcaacagcagccacgtggagtgcccccaccagaccggcagcctgaccagctggaacgtgagcatggacacccaggcccagcagctgatcctgcacttcagcagcagaatgcacgccaccttcagcgccgcctggagcctgcccggcctgggccaggacaccctggtgccccccgtgtacaccgtgagccaggccagaggcagcagccccgtgagcctggacctgatcatccccttcctgagacccggctgctgcgtgctggtgtggagaagcgacgtgcagttcgcctggaagcacctgctgtgccccgacgtgagctacagacacctgggcctgctgatcctggccctgctggccctgctgaccctgctgggcgtggtgctggccctgacctgcagaagaccccagagcggccccggccccgccagacccgtgctgctgctgcacgccgccgacagcgaggcccagagaagactggtgggcgccctggccgagctgctgagagccgccctgggcggcggcagagacgtgatcgtggacctgtgggagggcagacacgtggccagagtgggccccctgccctggctgtgggccgccagaaccagagtggccagagagcagggcaccgtgctgctgctgtggagcggcgccgacctgagacccgtgagcggccccgaccccagagccgcccccctgctggccctgctgcacgccgcccccagacccctgctgctgctggcctacttcagcagactgtgcgccaagggcgacatccccccccccctgagagccctgcccagatacagactgctgagagacctgcccagactgctgagagccctggacgccagacccttcgccgaggccaccagctggggcagactgggcgccagacagagaagacagagcagactggagctgtgcagcagactggagagagaggccgccagactggccgacctgggctag

SEQ ID NO: 4680 - DNA, 816 bp, synthetic construct
  misc_feature 1..816: note = source = /note="Description of Artificial Sequence: Synthetic coding sequence"
  source 1..816: mol_type = other DNA
atgggcatcgtgtgcgcccagtgcagcttcatcctgctgctgagcatcatcagagccagacccccccccttcctgttctgccccctgagcagccagagaaccgagagcccctacaagcccgtgcacctgggcctgggccccaccgacaaggtggccgccatcgccatggccagaatcatcgacctggtgccctgggacgacggcagcacccacgtgtacgccagccccgccatcctgctgcccatggagagacagagaaaccagctggccggcgtgaagcagcagctgtaccaccccgccctgcccaccctgagacacatggacagagacaccgtgaaggcctgcctgcccgacgagcactgccagagcaccacctactgcagaaaggacgagttcgacaacgcccacttcaccctgctgggcgtgcccaacaagcccctgcagtgcctggacatcaccgccaccggccagaagctgagaaacagataccacgagggcaagctggcccccatcgcccccggcatcaacagagtggactggccctgcttcaccagagccatcgaggactggagccacttcgtgagcagcgccggcgagttcaagctgccctgcctgagaaagagagccgagggcctgagcggctacgccgtgagatacctgaagcccgacgtgacccagacctggagatactgcctgagccagaaccccagcctggacagatacggccagaagcccctgcccttcgacagcctgaacaccttcagaagcttcggcagcagctacagcagagtgaactacctgaccccctggcactag

SEQ ID NO: 4681 - DNA, 1743 bp, synthetic construct; identical to SEQ ID NO: 3924
  misc_feature 1..1743: note = source = /note="Description of Artificial Sequence: Synthetic coding sequence"
  source 1..1743: mol_type = other DNA

SEQ ID NO: 4682 - DNA, 513 bp, synthetic construct
  misc_feature 1..513: note = source = /note="Description of Artificial Sequence: Synthetic coding sequence"
  source 1..513: mol_type = other DNA
atggagttcgtggacgtgaccgagagcaacgccagatgggtgcaggacttcagactgaaggcctacgccagccccgccaagctggagagcatcgacggcgccagataccacgccctgctgatccccagctgccccggcgccctgaccgacctggccagcagcggcagcctggccagaatcctgcagcacttccacagcgagagcaagcccatctgcgccgtgggccacggcgtggccgccctgtgctgcgccaccaacgaggacagaagctgggtgttcgacagctacagcctgaccggccccagcgtgtgcgagctggtgagagcccccggcttcgccagactgcccctggtggtggaggacttcgtgaaggacagcggcgcctgcttcagcgccagcgagcccgacgccgtgcacgtggtgctggacagacacctggtgaccggccagaacgccagcagcaccgtgcccgccgtgcagaacctgctgttcctgtgcggcagcagaaagtag

SEQ ID NO: 4683 - DNA, 1041 bp, synthetic construct
  misc_feature 1..1041: note = source = /note="Description of Artificial Sequence: Synthetic coding sequence"
  source 1..1041: mol_type = other DNA
atgagactgctgttcctggccgtgctgagaccccacaccggcaacgccgtgaccgcccagagagtgagagcccacctggaggccgccggccacgtgtgcgtgctgaaggacgccttcgacttcgagagcagaagcgagatcgccaacctgatcctggccgagaactgcgaggccgccctggccctgcacctgtacagaggcggcagactgctgcagggccacagaatccccttcggcgtgatcttcggcggcaccgacgtgaacgaggacgccaaccaggccgagaagaacaccgtgatgggcagagtgctggaggaggccagattcgccgtggccttcaccgagagcatgaaggagatggcccaggcccagtggccccacgccaagggcaaggtgtacgtgcagagccagggcatcgccaccacccccaacgccgccttcaactggaacaccttcctgcagagaagcgagatcaaccagagcgccgacaacctgcacatcttcctgctgatctgcggcctgagacaggtgaaggaccccctgtacctggtggacgccttcagcgcctggcaccaggaggagcccaacgtgcacctggtgatcgtgggccccgaggtggaccccgtgttcaccagagaggtgaaggccaaggtgaagagagccgccggcgtgagactgatcggcgagatgccccaggaggacctgcacgccgtggtgaagaactgcttcgccgtggtgaacagcagcgtgagcgagggcatgagcgccgccatcctggaggccatggacctggaggtgcccgtgctggccagaaacatccccggcaacgccgccgtggtgaagcacgaggtgaccggcctgctgttcagcaacccccaggagttcgtgcacctggccaagagactggtgagcgaccccgccctggagaaggagatcgtggtgaacggcagagagtacgtgagaatgtaccacagctggcaggtggagagagacacctaccagcagctgatcagaaagctggagggcagcaccgaggactag

SEQ ID NO: 4684 - DNA, 1482 bp, synthetic construct; identical to SEQ ID NO: 4484
  misc_feature 1..1482: note = source = /note="Description of Artificial Sequence: Synthetic coding sequence"
  source 1..1482: mol_type = other DNA

SEQ ID NO: 4685 - DNA, 354 bp, synthetic construct
  misc_feature 1..354: note = source = /note="Description of Artificial Sequence: Synthetic coding sequence"
  source 1..354: mol_type = other DNA
atgctgatcttctggaccatcaccctgttcctgctgggcgccgccaagggcaaggaggtgtgctacgaggacctgggctgcttcagcgacaccgagccctggggcggcaccgccatcagacccctgaagatcctgccctggagccccgagaagatcggcaccagattcctgctgtacaccaacgagaaccccaacaacttccagatcctgctgctgagcgaccccagcaccatcgaggccagcaacttccagatggacagaaagaccagattcatcatccacggcttcatcgacaagggcgacgagagctgggtgaccgacatgtgcaagcccggcgccagccccagagcctag

SEQ ID NO: 4686 - DNA, 1581 bp, synthetic construct
  misc_feature 1..1581: note = source = /note="Description of Artificial Sequence: Synthetic coding sequence"
  source 1..1581: mol_type = other DNA
atgcagggccccctgctgctgcccggcctgtgcttcctgctgagcctgttcggcgccgtgacccagaagaccaagaccagctgcgccaagtgcccccccaacgccagctgcgtgaacaacacccactgcacctgcaaccacggctacaccagcggcagcggccagaagctgttcaccttccccctggagacctgcaacgccatcgagacccaggccatcaccgacaactgcagcgaggagagaaagaccttcaacctgaacgtgcagatgaacagcatggacatcagatgcagcgacatcatccagggcgacacccagggccccagcgccatcgccttcatcagctacagcagcctgggcaacatcatcaacgccaccttcttcgaggagatggacaagaaggaccaggtgtacctgaacagccaggtggtgagcgccgccatcggccccaagagaaacgtgagcctgagcaagagcgtgaccctgaccttccagcacgtgaagatgacccccagcaccaagaaggtgttctgcgtgtactggaagagcaccggccagggcagccagtggagcagagacggctgcttcctgatccacgtgaacaagagccacaccatgtgcaactgcagccacctgagcagcttcgccgtgctgatggccctgaccagccaggaggaggaccccgtgctgaccgtgatcacctacgtgggcctgagcgtgagcctgctgtgcctgctgctggccgccctgaccttcctgctgtgcaaggccatcagaaacaccagcaccagcctgcacctgcagctgagcctgtgcctgttcctggcccacctgctgttcctggtgggcatcgacagaaccgagcccaaggtgctgtgcagcatcatcgccggcgccctgcactacctgtacctggccgccttcacctggatgctgctggagggcgtgcacctgttcctgaccgccagaaacctgaccgtggtgaactacagcagcatcaacagactgatgaagtggatcatgttccccgtgggctacggcgtgcccgccgtgaccgtggccatcagcgccgccagctggccccacctgtacggcaccgccgacagatgctggctgcacctggaccagggcttcatgtggagcttcctgggccccgtgtgcgccatcttcagcgccaacctggtgctgttcatcctggtgttctggatcctgaagagaaagctgagcagcctgaacagcgaggtgagcaccatccagaacaccagaatgctggccttcaaggccaccgcccagctgttcatcctgggctgcacctggtgcctgggcctgctgcaggtgggccccgccgcccaggtgatggcctacctgttcaccatcatcaacagcctgcagggcttcttcatcttcctggtgtactgcctgctgagccagcaggtgcagaagcagtaccagaagtggttcagagagatcgtgaagagcaagagcgagagcgagacctacaccctgagcagcaagatgggccccgacagcaagcccagcgagggcgacgtgttccccggccaggtgaagagaaagtactag

SEQ ID NO: 4687 - DNA, 5832 bp, synthetic construct
  misc_feature 1..5832: note = source = /note="Description of Artificial Sequence: Synthetic coding sequence"
  source 1..5832: mol_type = other DNA
tgacccagcctggccggcagaggcgccggcagaatggcccccggcgccctgagaggcggctgcgagcagagagcccccggcggcggcgccagaaccgccgccctgggcccctggccctggcccagccccggccccgcccccagccccggcgccgccccccccagaagcagaaagatgagcggcgccctgctgtggcccctgctgcccctgctgctgctgctgctgagcgccagagacggcgtgagagccgcccagccccaggcccccggctacctgatcgccgcccccagcgtgttcagagccggcgtggaggaggtgatcagcgtgaccatcttcaacagccccagagaggtgaccgtgcaggcccagctggtggcccagggcgagcccgtggtgcagagccagggcgccatcctggacaagggcaccatcaagctgaaggtgcccaccggcctgagaggccaggccctgctgaaggtgtggggcagaggctggcaggccgaggagggccccctgttccacaaccagaccagcgtgaccgtggacggcagaggcgccagcgtgttcatccagaccgacaagcccgtgtacagaccccagcacagagtgctgatcagcatcttcaccgtgagccccaacctgagacccgtgaacgagaagctggaggcctacatcctggaccccagaggcagcagaatgatcgagtggagacacctgaagcccttctgctgcggcatcaccaacatgagcttccccctgagcgaccagcccgtgctgggcgagtggttcatcttcgtggagatgcagggccacgcctacaacaagagcttcgaggtgcagaagtacgtgctgcccaagttcgagctgctgatcgacccccccagatacatccaggacctggacgcctgcgagaccggcaccgtgagagccagatacaccttcggcaagcccgtggccggcgccctgatgatcaacatgaccgtgaacggcgtgggctactacagccacgaggtgggcagacccgtgctgagaaccaccaagatcctgggcagcagagacttcgacatctgcgtgagagacatgatccccgccgacgtgcccgagcacttcagaggcagagtgagcatctgggccatggtgaccagcgtggacggcagccagcaggtggccttcgacgacagcacccccgtgcagagacagctggtggacatcagatacagcaaggacaccagaaagcagttcaagcccggcctggcctacgtgggcaaggtggagctgagctaccccgacggcagccccgccgagggcgtgaccgtgcagatcaaggccgagctgacccccaaggacaacatctacaccagcgaggtggtgagccagagaggcctggtgggcttcgagatccccagcatccccaccagcgcccagcacgtgtggctggagaccaaggtgatggccctgaacggcaagcccgtgggcgcccagtacctgcccagctacctgagcctgggcagctggtacagccccagccagtgctacctgcagctgcagccccccagccaccccctgcaggtgggcgaggaggcctacttcagcgtgaagagcacctgcccctgcaacttcaccctgtactacgaggtggccgccagaggcaacatcgtgctgagcggccagcagcccgcccacaccacccagcagagaagcaagagagccgcccccgccctggagaagcccatcagactgacccacctgagcgagaccgagcccccccccgcccccgaggccgaggtggacgtgtgcgtgaccagcctgcacctggccgtgacccccagcatggtgcccctgggcagactgctggtgttctacgtgagagagaacggcgagggcgtggccgacagcctgcagttcgccgtggagaccttcttcgagaaccaggtgagcgtgacctacagcgccaacgagacccagcccggcgaggtggtggacctgagaatcagagccgccagaggcagctgcgtgtgcgtggccgccgtggacaagagcgtgtacctgctgagaagcggcttcagactgacccccgcccaggtgttccaggagctggaggactacgacgtgagcgacagcttcggcgtgagcagagaggacggccccttctggtgggccggcctgaccgcccagagaagaagaagaagcagcgtgttcccctggccctggggcatcaccaaggacagcggcttcgccttcaccgagaccggcctggtggtgatgaccgacagagtgagcctgaaccacagacaggacggcggcctgtacaccgacgaggccgtgcccgccttccagccccacaccggcagcctggtggccgtggcccccagcagacacccccccagaaccgagaagagaaagagaaccttcttccccgagacctggatctggcactgcctgaacatcagcgaccccagcggcgagggcaccctgagcgtgaaggtgcccgacagcatcaccagctgggtgggcgaggccgtggccctgagcaccagccagggcctgggcatcgccgagcccagcctgctgaagaccttcaagcccttcttcgtggacttcatgctgcccgccctgatcatcagaggcgagcaggtgaagatccccctgagcgtgtacaactacatgggcacctgcgccgaggtgtacatgaagctgagcgtgcccaagggcatccagttcgtgggccaccccggcaagagacacgtgaccaagaagatgtgcgtggcccccggcgaggccgagcccatctgggtggtgctgagcttcagcgacctgggcctgaacaacatcaccgccaaggccctggcctacggcgacaccaactgctgcagagacggcagaagcagcaagcaccccgaggagaaccacgccgacagaagagtgcccatcggcgtggaccacgtgagaagaagcgtgatggtggaggccgagggcgtgcccagagcctacacctacagcgccttcttctgccccagcgagagagtgcacatcagcacccccaacaagtacgagttccagtacgtgcagagacccctgagactgaccagattcgacgtggccgtgagagcccacaacgacgccagagtggccctgagcagcggcccccaggacaccgccggcatgatcgagatcgtgctgggcggccaccagaacaccagaagctggatcagcaccagcaagatgggcgagcccgtggccagcgcccacaccgccaagatcctgagctgggacgagttcagaaccttctggatcagctggagaggcggcctgatccaggtgggccacggccccgagcccagcaacgagagcgtgatcgtggcctggaccctgcccagaccccccgaggtgcagttcatcggcttcagcaccggctggggcagcatgggcgagttcagaatctggagaaagatggaggtggacgagagctacagcgaggccttcaccctgggcgtgccccacggcgccatccccggcagcgagagagccaccgccagcatcatcggcgacgtgatgggccccaccctgaaccacctgaacaacctgctgagactgcccttcggctgcggcgagcagaacatgatccacttcgcccccaacgtgttcgtgctgaagtacctgcagaagacccagcagctgagccccgaggtggagagagagaccaccgactacctggtgcagggctaccagagacagctgacctacaagagacaggacggcagctacagcgccttcggcgagagagacgccagcggcagcatgtggctgaccgccttcgtgctgaagagcttcgcccaggccagaagcttcatcttcgtggaccccagagagctggccgccgccaagagctggatcatccagcagcagcaggccgacggcagcttcctggccgtgggcagagtgctgaacaaggacatccagggcggcatccacggcaccgtgcccctgaccgcctacgtggtggtggccctgctggagaccggcaccgccagcgaggaggagagaggcagcaccgacaaggccagacacttcctggagagcgccgcccccctggccatggacccctacagctgcgccctgaccacctacgccctgaccctgctgagaagccccgccgcccccgaggccctgagaaagctgagaagcctggccatcatgagagacggcgtgacccactggagcctgagcaacagctgggacgtggacaagggcaccttcctgagcttcagcgacagagtgagccagagcgtggtgagcgccgaggtggagatgaccgcctacgccctgctgacctacaccctgctgggcgacgtggccgccgccctgcccgtggtgaagtggctgagccagcagagaaacgccctgggcggcttcagcagcacccaggacacctgcgtggccctgcaggccctggccgagtacgccatcctgagctacgccggcggcatcaacctgaccgtgagcctggccagcaccaacctggactaccaggagaccttcgagctgcacagaaccaaccagaaggtgctgcagaccgccgccatccccagcctgcccaccggcctgttcgtgagcgccaagggcgacggctgctgcctgatgcagatcgacgtgacctacaacgtgcccgaccccgtggccaagcccgccttccagctgctggtgagcctgcaggagcccgaggcccagggcagacccccccccatgcccgccagcgccgccgagggcagcagaggcgactggccccccgccgacgacgacgaccccgccgccgaccagcaccaccaggagtacaaggtgatgctggaggtgtgcaccagatggctgcacgccggcagcagcaacatggccgtgctggaggtgcccctgctgagcggcttcagagccgacatcgagagcctggagcagctgctgctggacaagcacatgggcatgaagagatacgaggtggccggcagaagagtgctgttctacttcgacgagatccccagcagatgcctgacctgcgtgagattcagagccctgagagagtgcgtggtgggcagaaccagcgccctgcccgtgagcgtgtacgactactacgagcccgccttcgaggccaccagattctacaacgtgagcacccacagccccctggccagagagctgtgcgccggccccgcctgcaacgaggtggagagagcccccgccagaggccccggctggttccccggcgagagcggccccgccgtggcccccgaggagggcgccgccatcgccagatgcggctgcgaccacgactgcggcgcccagggcaaccccgtgtgcggcagcgacggcgtggtgtacgccagcgcctgcagactgagagaggccgcctgcagacaggccgcccccctggagcccgccccccccagctgctgcgccctggagcagagactgcccgccagcagcagcagcacctacggcgacgacctggccagcgtggcccccggccccctgcagcaggacgtgaagctgaacggcgccggcctggaggtggaggacagcgaccccgagcccgagggcgaggccgaggacagagtgaccgccggccccagaccccccgtgagcagcggcaacctggagagcagcacccagagcgccagccccttccacagatggggccagacccccgccccccagagacacagcggcagagtggtgggcgcccacagacccggcctgctgagccccgtgttcgtgtacagccccgccttccagagcggcggcgaggagggcctgtggatgagcaacacctgcaccctgagatag

SEQ ID NO: 4688 - DNA, 456 bp, synthetic construct
  misc_feature 1..456: note = source = /note="Description of Artificial Sequence: Synthetic coding sequence"
  source 1..456: mol_type = other DNA
atggaggccaccggcaccgacgaggtggacaagctgaagaccaagttcatcagcgcctggaacaacatgaagtacagctgggtgctgaagaccaagacctacttcagcagaaacagccccgtgctgctgctgggcaagtgctaccacttcaagtacgaggacgaggacaagaccctgcccgccgagagcggctgcaccatcgaggaccacgtgatcgccggcaacgtggaggagttcagaaaggacttcatcagcagaatctggctgacctacagagaggagttcccccagatcgagggcagcgccctgaccaccgactgcggctggggctgcaccctgagaaccggccagatgctgctggcccagggcctgatcctgcacttcctgggcagagcctggacctggcccgacgccctgaacatcgagaacagcgacagcgagagctggaccagctag

SEQ ID NO: 4689 - DNA, 2616 bp, synthetic construct
  misc_feature 1..2616: note = source = /note="Description of Artificial Sequence: Synthetic coding sequence"
  source 1..2616: mol_type = other DNA
atgagaaagcccagaagaaagagcagacagaacgccgagggcagaagaagccccagcccctacagcctgaagtgcagccccaccagagagaccctgacctacgcccaggcccagagaatcgtggaggtggacatcgacggcagactgcacagaatcagcatctacgaccccctgaagatcatcaccgaggacgagctgaccgcccaggacatcaccgagtgcaacagcaacaaggagaacagcgagcagccccagttccccggcaagagcaagaagcccagcagcaagggcaagaagaaggagagctgcagcaagcacgccagcggcaccagcttccacctgccccagcccagcttcagaatggtggacagcggcatccagcccgaggccccccccctgcccgccgcctactacagatacatcgagaagccccccgaggacctggacgccgaggtggagtacgacatggacgaggaggacctggcctggctggacatggtgaacgagaagagaagagtggacggccacagcctggtgagcgccgacaccttcgagctgctggtggacagactggagaaggagagctacctggagagcagaagcagcggcgcccagcagagcctgatcgacgaggacgccttctgctgcgtgtgcctggacgacgagtgccacaacagcaacgtgatcctgttctgcgacatctgcaacctggccgtgcaccaggagtgctacggcgtgccctacatccccgagggccagtggctgtgcagatgctgcctgcagagccccagcagacccgtggactgcatcctgtgccccaacaagggcggcgccttcaagcagaccagcgacggccactgggcccacgtggtgtgcgccatctggatccccgaggtgtgcttcgccaacaccgtgttcctggagcccatcgagggcatcgacaacatcccccccgccagatggaagctgacctgctacatctgcaagcagaagggcctgggcgccgccatccagtgccacaaggtgaactgctacaccgccttccacgtgacctgcgcccagagagccggcctgttcatgaagatcgagcccatgagagagaccagcctgaacggcaccatcttcaccgtgagaaagaccgcctactgcgaggcccacagcccccccggcgccgccaccgccagaagaaagggcgacagccccagaagcatcagcgagaccggcgacgaggagggcctgaaggagggcgacggcgaggaggaggaggaggaggaggtggaggaggaggagcaggaggcccagggcggcgtgagcggcagcctgaagggcgtgcccaagaagagcaagatgagcctgaagcagaagatcaagaaggagcccgaggaggccggccaggacacccccagcaccctgcccatgctggccgtgccccagatccccagctacagactgaacaagatctgcagcggcctgagcttccagagaaagaaccagttcatgcagagactgcacaactactggctgctgaagagacaggccagaaacggcgtgcccctgatcagaagactgcacagccacctgcagagccagagaaacgccgagcagagagagcaggacgagaagaccagcgccgtgaaggaggagctgaagtactggcagaagctgagacacgacctggagagagccagactgctgatcgagctgatcagaaagagagagaagctgaagagagagcaggtgaaggtgcagcaggccgccatggagctggagctgatgcccttcaacgtgctgctgagaaccaccctggacctgctgcaggagaaggaccccgcccacatcttcgccgagcccgtgaacctgagcgaggtgcccgactacctggagttcatcagcaagcccatggacttcagcaccatgagaagaaagctggagagccacctgtacagaaccctggaggagttcgaggaggacttcaacctgatcgtgaccaactgcatgaagtacaacgccaaggacaccatcttccacagagccgccgtgagactgagagacctgggcggcgccatcctgagacacgccagaagacaggccgagaacatcggctacgaccccgagagaggcacccacctgcccgagagccccaagctggaggacttctacagattcagctgggaggacggcagaagcctgctgctgcccttcgaggacagaggcgacctggagcccctggagctggtgtgggccaagtgcagaggctaccccagctaccccgccctgatcatcgaccccaagatgcccagagagggcctgctgcacaacggcgtgcccatccccgtgccccccctggacgtgctgaagctgggcgagcagaagcaggccgaggccggcgagaagctgttcctggtgctgttcttcgacaacaagagaacctggcagtggctgcccagagacaaggtgctgcccctgggcgtggaggacaccgtggacaagctgaagatgctggagggcagaaagaccagcatcagaaagagcgtgcaggtggcctacgacagagccatgatccacctgagcagagtgagaggcccccacagcttcgtgaccagcagctacctgtag

SEQ ID NO: 4690 - DNA, 2700 bp, synthetic construct; identical to SEQ ID NO: 4183
  misc_feature 1..2700: note = source = /note="Description of Artificial Sequence: Synthetic coding sequence"
  source 1..2700: mol_type = other DNA

SEQ ID NO: 4691 - DNA, 537 bp, synthetic construct
  misc_feature 1..537: note = source = /note="Description of Artificial Sequence: Synthetic coding sequence"
  source 1..537: mol_type = other DNA
atggagaccttccccctgctgctgctgagcctgggcctggtgctggccgaggccagcgagagcaccatgaagatcatcaaggaggagttcaccgacgaggagatgcagtacgacatggccaagagcggccaggagaagcagaccatcgagatcctgatgaaccccatcctgctggtgaagaacaccagcctgagcatgagcaaggacgacatgagcagcaccctgctgaccttcagaagcctgcactacaacgaccccaagggcaacagcagcggcaacgacaaggagtgctgcaacgacatgaccgtgtggagaaaggtgagcgaggccaacggcagctgcaagtggagcaacaacttcatcagaagcagcaccgaggtgatgagaagagtgcacagagcccccagctgcaagttcgtgcagaaccccggcatcagctgctgcgagagcctggagctggagaacaccgtgtgccagttcaccaccggcaagcagttccccagatgccagtaccacagcgtgaccagcctggagtag

SEQ ID NO: 4692 - DNA, 2184 bp, synthetic construct
  misc_feature 1..2184: note = source = /note="Description of Artificial Sequence: Synthetic coding sequence"
  source 1..2184: mol_type = other DNA
atgatcctgagcctgctgttcagcctgggcggccccctgggctggggcctgctgggcgcctgggcccaggccagcagcaccagcctgagcgacctgcagagcagcagaacccccggcgtgtggaaggccgaggccgaggacaccggcaaggaccccgtgggcagaaactggtgcccctaccccatgagcaagctggtgaccctgctggccctgtgcaagaccgagaagttcctgatccacagccagcagccctgcccccagggcgcccccgactgccagaaggtgaaggtgatgtacagaatggcccacaagcccgtgtaccaggtgaagcagaaggtgctgaccagcctggcctggagatgctgccccggctacaccggccccaactgcgagcaccacggccccatggccgtgtggtgctggcccgagcccgacagcctgcaggccagactgggccagctgcagagaaacctgagcgagctgcacatgaccaccgccagaagagaggaggagctgcagtacaccctggaggacatgagagccaccctgaccagacacgtggacgagatcaaggagctgtacagcgagagcgacgagaccttcgaccagatcagcaaggtggagagacaggtggaggagctgcaggtgaaccacaccgccctgagagagctgagagtgatcctgatggagaagagcctgatcatggaggagaacaaggaggaggtggagagacagctgctggagctgaacctgaccctgcagcacctgcagggcggccacgccgacctgatcaagtacgtgaaggactgcaactgccagaagctgtacctggacctggacgtgatcagagagggccagagagacgccaccagagccctggaggagacccaggtgagcctggacgagagaagacagctggacggcagcagcctgcaggccctgcagaacgccgtggacgccgtgagcctggccgtggacgcccacaaggccgagggcgagagagccagagccgccaccagcagactgagaagccaggtgcaggccctggacgacgaggtgggcgccctgaaggccgccgccgccgaggccagacacgaggtgagacagctgcacagcgccttcgccgccctgctggaggacgccctgagacacgaggccgtgctggccgccctgttcggcgaggaggtgctggaggagatgagcgagcagacccccggccccctgcccctgagctacgagcagatcagagtggccctgcaggacgccgccagcggcctgcaggagcaggccctgggctgggacgagctggccgccagagtgaccgccctggagcaggccagcgagccccccagacccgccgagcacctggagcccagccacgacgccggcagagaggaggccgccaccaccgccctggccggcctggccagagagctgcagagcctgagcaacgacgtgaagaacgtgggcagatgctgcgaggccgaggccggcgccggcgccgccagcctgaacgccagcctgcacggcctgcacaacgccctgttcgccacccagagaagcctggagcagcaccagagactgttccacagcctgttcggcaacttccagggcctgatggaggccaacgtgagcctggacctgggcaagctgcagaccatgctgagcagaaagggcaagaagcagcagaaggacctggaggcccccagaaagagagacaagaaggaggccgagcccctggtggacatcagagtgaccggccccgtgcccggcgccctgggcgccgccctgtgggaggccggcagccccgtggccttctacgccagcttcagcgagggcaccgccgccctgcagaccgtgaagttcaacaccacctacatcaacatcggcagcagctacttccccgagcacggctacttcagagcccccgagagaggcgtgtacctgttcgccgtgagcgtggagttcggccccggccccggcaccggccagctggtgttcggcggccaccacagaacccccgtgtgcaccaccggccagggcagcggcagcaccgccaccgtgttcgccatggccgagctgcagaagggcgagagagtgtggttcgagctgacccagggcagcatcaccaagagaagcctgagcggcaccgccttcggcggcttcctgatgttcaagacctag

SEQ ID NO: 4693 - DNA, 828 bp, synthetic construct
  misc_feature 1..828: note = source = /note="Description of Artificial Sequence: Synthetic coding sequence"
  source 1..828: mol_type = other DNA
atgggcagcgccccctgggcccccgtgctgctgctggccctgggcctgagaggcctgcaggccggcggcgagtggagaagaccccccgcccacagccccgtgcccgccccccccctgagattcgccagcccccacagcccccagggccccggccccagactgcccggcgccctgctgcccgccgccagcggccccctgcagctgagagccctgagacagcaggacctgcccagcgccctgcccggcgtgggccaggtgctgggccccggcagaggcgcccacctgctgctgcactgggagagaggcagaagagtgggcctgagacagcagctgggcctgagaagaggcgccggcggcagagccggcggcagcaccggcctgagaggcgcccccctgctgagagaggtggccgccgtgagatgcgccgtgcacgccgccagagcccacggcgccgccgacggcggcgccggccccggcagactgagaagagccgcccccagagccaccaccagacccagaggccccggctgccccagacacagactgagatggaagctgtggggcgacgcccagtgcctgcccgaggacgaggtgagcccccccggcggcggcggcgccggcggccagagagccagaagcagctgcggcagacccagaagactgcagcccgtgctgcccggcagacacggcggcagcctgagacacggccccctgggcgtgagacacctgcccgccgccgtgagaagagagggccccgaccccgccctgcacgtgagacccgagtgcctgcacagagccggccacgacggcctgcccctgccccactag

SEQ ID NO: 4694 - DNA, 351 bp, synthetic construct; identical to SEQ ID NO: 4162
  misc_feature 1..351: note = source = /note="Description of Artificial Sequence: Synthetic coding sequence"
  source 1..351: mol_type = other DNA

SEQ ID NO: 4695 - DNA, 522 bp, synthetic construct; identical to SEQ ID NO: 3879
  misc_feature 1..522: note = source = /note="Description of Artificial Sequence: Synthetic coding sequence"
  source 1..522: mol_type = other DNA

SEQ ID NO: 4696 - DNA, 1482 bp, synthetic construct
  misc_feature 1..1482: note = source = /note="Description of Artificial Sequence: Synthetic coding sequence"
  source 1..1482: mol_type = other DNA
agcgaggccgtgtacctgaacgacagcacctacgacggccacaccgtgggcggcctgcagtacggcggcctgggccagctggccgacggcgtggtgggcctggacgacttcagaaagagccaggagctgagagtgtggcccggctacgactacgtgggctggagcaaccacagcttcagcagcggctacgtggagatggagttcgagttcgacagactgagagccttccaggccatgcaggtgcactgcaacaacatgcacaccctgggcgccagactgcccggcggcgtggagtgcagattcagaagaggccccgccatggcctgggagggcgagcccatgagacacaacctgggcggcaacctgggcgaccccagagccagagccgtgagcgtgcccctgggcggcagagtggccagattcctgcagtgcagattcctgttcgccggcccctggctgctgttcagcgagatcagcttcatcagcgacgtggtgaacaacagcagccccgccctgggcggcaccttcccccccgccccctggtggccccccggccccccccccaccaacttcagcagcctggagctggagcccagaggccagcagcccgtggccaaggccgagggcagccccaccgccatcctgatcggctgcctggtggccatcatcctgctgctgctgctgatcatcgccctgatgctgtggagactgcactggagaagactgctgagcaaggtgctggagagccaccccagaaccagaagccccggcctggtgggcatcagacccaccctgctgcccgtgagccccatggccctgagatgctgcagccccatccagcccaccgccagcttctggcccctgacccccgtgcccctggaggccagagcccccccccacccccccggccccaacccccccacccccagaggcgtgaccggcggcaacacctacgccgtgcccgccctgccccccggcgccgtgggcgacggcccccccagagtggacttccccagaagcagactgagattcaaggagaagctgggcgagggccagttcggcgaggtgcacctgtgcgaggtggacagcccccaggacctggtgagcctggacttccccctgaacgtgagaaagggccaccccctgctggtggccgtgaagatcctgagacccgacgccaccaagaacgccagaaacgacttcctgaaggaggtgaagatcatgagcagactgaaggaccccaacatcatcagactgctgggcgtgtgcgtgcaggacgaccccctgtgcatgatcaccgactacatggagaacggcgacctgaaccagttcctgagcgcccaccagctggaggacaaggccgccgagggcgcccccggcgacggccaggccgcccagggccccaccatcagctaccccatgctgctgcacgtggccgcccagatcgccagcggcatgagatacctggccaccctgaactag

SEQ ID NO: 4697 - DNA, 639 bp, synthetic construct
  misc_feature 1..639: note = source = /note="Description of Artificial Sequence: Synthetic coding sequence"
  source 1..639: mol_type = other DNA
atgggcctgcacctgagaccctacagagtgggcctgctgcccgacggcctgctgttcctgctgctgctgctgatgctgctggccgaccccgccctgcccgccggcagacacccccccgtggtgctgggcgacaacaacagaatccccgtgatcggccccctgaagatcagagagcagcagagaagcgccgtgagcaccagctggctgctgccctacaactacacctggagccccgagaaggtgttcgtgcagacccccaccatcaactacaccctgagagactacagaaagttcttccaggacatcggcttcgaggacggctggctgatgagacaggacaccgagggcctggtggaggccaccatgccccccggcgtgcagctgcactgcctgtacggcaccggcgtgcccacccccgacagcttctactacgagagcttccccgacagagaccccaagatctgcttcggcgacggcgacggcaccgtgaacctgaagagcgccctgcagtgccaggcctggcagagcagacaggagcaccaggtgctgctgcaggagctgcccggcagcgagcacatcgagatgctggccaacgccaccaccctggcctacctgaagagagtgctgctgggcccctag

SEQ ID NO: 4698 - DNA, 654 bp, synthetic construct
  misc_feature 1..654: note = source = /note="Description of Artificial Sequence: Synthetic coding sequence"
  source 1..654: mol_type = other DNA
atgagcgacctgctgctgctgggcctgatcggcggcctgaccctgctgctgctgctgaccctgctggccttcgccggctacagcggcctgctggccggcgtggaggtgagcgccggcagcccccccatcagaaacgtgaccgtggcctacaagttccacatgggcctgtacggcgagaccggcagactgttcaccgagagctgcagcatcagccccaagctgagaagcatcgccgtgtactacgacaacccccacatggtgccccccgacaagtgcagatgcgccgtgggcagcatcctgagcgagggcgaggagagccccagccccgagctgatcgacctgtaccagaagttcggcttcaaggtgttcagcttccccgcccccagccacgtggtgaccgccaccttcccctacaccaccatcctgagcatctggctggccaccagaagagtgcaccccgccctggacacctacatcaaggagagaaagctgtgcgcctaccccagactggagatctaccaggaggaccagatccacttcatgtgccccctggccagacagggcgacttctacgtgcccgagatgaaggagaccgagtggaagtggagaggcctggtggaggccatcgacacccaggtggacggcaccggctag

SEQ ID NO: 4699 - DNA, 345 bp, synthetic construct
  misc_feature 1..345: note = source = /note="Description of Artificial Sequence: Synthetic coding sequence"
  source 1..345: mol_type = other DNA
atgaagaccttcacctggaccctgggcgtgctgttcttcctgctggtggacaccggccactgcagaggcggccagttcaagatcaagaagatcaaccagagaagataccccagagccaccgacggcaaggaggaggccaagaagtgcgcctacaccttcctggtgcccgagcagagaatcaccggccccatctgcgtgaacaccaagggccaggacgccagcaccatcaaggacatgatcaccagaatggacctggagaacctgaaggacgtgctgagcagacagaagagagagatcgacgtgctgcagctggtggtggacgtggacggcaacatcgtgaactag

SEQ ID NO: 4700 - DNA, 870 bp, synthetic construct; identical to SEQ ID NO: 4594
  misc_feature 1..870: note = source = /note="Description of Artificial Sequence: Synthetic coding sequence"
  source 1..870: mol_type = other DNA

SEQ ID NO: 4701 - DNA, 1002 bp, synthetic construct; identical to SEQ ID NO: 4312
  misc_feature 1..1002: note = source = /note="Description of Artificial Sequence: Synthetic coding sequence"
  source 1..1002: mol_type = other DNA

SEQ ID NO: 4702 - DNA, 531 bp, synthetic construct
  misc_feature 1..531: note = source = /note="Description of Artificial Sequence: Synthetic coding sequence"
  source 1..531: mol_type = other DNA
atgagactgctgatcctgacctgcctggtggccgtggccctggccagacccaagctgcccctgagataccccgagagactgcagaaccccagcgagagcagcgagcccatccccctggagagcagagaggagtacatgaacggcatgaacagaagaaacatcctgagagagaagcagaccgacgagatcaaggacaccagaaacgagagcacccagaactgcgtggtggccgagcccgagaagatggagagcagcatcagcagcagcagcgaggagcagttctgcagactgaacgagtacaaccagctgcagctgcaggccgcccacgcccaggagcagatcagaagaatgaacgagaacagccacgtgcaggtgcccttccagcagctgaaccagctggccgcctacccctacgccgtgtggtactacccccagatcatgcagtacgtgcccttcccccccttcagcgacatcagcaaccccaccgcccacgagaactacgagaagaacaacgtgatgctgcagtggtag

SEQ ID NO: 4703 - DNA, 279 bp, synthetic construct
  misc_feature 1..279: note = source = /note="Description of Artificial Sequence: Synthetic coding sequence"
  source 1..279: mol_type = other DNA
atgaagctgtgcgtgaccgtgctgagcctgctggtgctggtggccgccttctgcagcctggccctgagcgcccccatgggcagcgacccccccaccgcctgctgcttcagctacaccgccagaaagctgcccagaaacttcgtggtggactactacgagaccagcagcctgtgcagccagcccgccgtggtgttccagaccaagagaggcaagcaggtgtgcgccgaccccagcgagagctgggtgcaggagtacgtgtacgacctggagctgaactag

SEQ ID NO: 4704 - DNA, 1656 bp, synthetic construct
  misc_feature 1..1656: note = source = /note="Description of Artificial Sequence: Synthetic coding sequence"
  source 1..1656: mol_type = other DNA
atgacctggagaatgggccccagattcaccatgctgctggccatgtggctggtgtgcggcagcgagccccacccccacgccaccatcagaggcagccacggcggcagaaaggtgcccctggtgagccccgacagcagcagacccgccagattcctgagacacaccggcagaagcagaggcatcgagagaagcaccctggaggagcccaacctgcagcccctgcagagaagaagaagcgtgcccgtgctgagactggccagacccagcagattcagagacaacagaatggacagaagagagcacggccacagagaccccaacgtggtgcccggcccccccaagcccgccaaggagaagccccccaagaagaaggcccaggacaagatcctgagcaacgagtacgaggagaagtacgacctgagcagacccaccgccagccagctggaggacgagctgcaggtgggcaacgtgcccctgaagaaggccaaggagagcaagaagcacgagaagctggagaagcccgagaaggagaagaagaagaagatgaagaacgagaacgccgacaagctgctgaagagcgagaagcagatgaagaagagcgagaagaagagcaagcaggagaaggagaagagcaagaagaagaagggcggcaagaccgagcaggacggctaccagaagcccaccaacaagcacttcacccagagccccaagaagagcgtggccgacctgctgggcagcttcgagggcaagagaagactgctgctgatcaccgcccccaaggccgagaacaacatgtacgtgcagcagagagacgagtacctggagagcttctgcaagatggccaccagaaagatcagcgtgatcaccatcttcggccccgtgaacaacagcaccatgaagatcgaccacttccagctggacaacgagaagcccatgagagtggtggacgacgaggacctggtggaccagagactgatcagcgagctgagaaaggagtacggcatgacctacaacgacttcttcatggtgctgaccgacgtggacctgagagtgaagcagtactacgaggtgcccatcaccatgaagagcgtgttcgacctgatcgacaccttccagagcagaatcaaggacatggagaagcagaagaaggagggcatcgtgtgcaaggaggacaagaagcagagcctggagaacttcctgagcagattcagatggagaagaagactgctggtgatcagcgcccccaacgacgaggactgggcctacagccagcagctgagcgccctgagcggccaggcctgcaacttcggcagcagcgtggtggagagagaggacgtgcccgcccacctggtgaaggacatcagaaactacttccaggtgagccccgagtacttcagcatgctgctggtgggcaaggacggcaacgtgaagagctggtaccccagccccatgtggagcatggtgatcgtgtacgacctgatcgacagcatgcagctgagaagacaggagatggccatccagcagagcctgggcatgagatgccccgaggacgagtacgccggctacggctaccacagctaccaccagggctaccaggacggctaccaggacgactacagacaccacgagagctaccaccacggctacccctactag

SEQ ID NO: 4705 - DNA, 1245 bp, synthetic construct; identical to SEQ ID NO: 4403
  misc_feature 1..1245: note = source = /note="Description of Artificial Sequence: Synthetic coding sequence"
  source 1..1245: mol_type = other DNA

SEQ ID NO: 4706 - DNA, 300 bp, synthetic construct; identical to SEQ ID NO: 4544
  misc_feature 1..300: note = source = /note="Description of Artificial Sequence: Synthetic coding sequence"
  source 1..300: mol_type = other DNA

SEQ ID NO: 4707 - DNA, 912 bp, synthetic construct; identical to SEQ ID NO: 3693
  misc_feature 1..912: note = source = /note="Description of Artificial Sequence: Synthetic coding sequence"
  source 1..912: mol_type = other DNA

SEQ ID NO: 4708 - DNA, 444 bp, synthetic construct; identical to SEQ ID NO: 4359
  misc_feature 1..444: note = source = /note="Description of Artificial Sequence: Synthetic coding sequence"
  source 1..444: mol_type = other DNA

SEQ ID NO: 4709 - DNA, 1173 bp, synthetic construct; identical to SEQ ID NO: 4072
  misc_feature 1..1173: note = source = /note="Description of Artificial Sequence: Synthetic coding sequence"
  source 1..1173: mol_type = other DNA

SEQ ID NO: 4710 - DNA, 297 bp, synthetic construct
  misc_feature 1..297: note = source = /note="Description of Artificial Sequence: Synthetic coding sequence"
  source 1..297: mol_type = other DNA
atgaacaagcacttcctgttcctgttcctgctgtactgcctgatcgtggccgtgaccagcctgcagtgcatcacctgccacctgagaaccagaaccgacagatgcagaagaggcttcggcgtgtgcaccgcccagaagggcgaggcctgcatgctgctgagaatctaccagagaaacaccctgcagatcagctacatggtgtgccagaagttctgcagagacatgaccttcgacctgagaaacagaacctacgtgcacacctgctgcaactacaactactgcaacttcaagctgtag

SEQ ID NO: 4711 - DNA, 600 bp, synthetic construct
  misc_feature 1..600: note = source = /note="Description of Artificial Sequence: Synthetic coding sequence"
  source 1..600: mol_type = other DNA
atggcctggggcggcgtgcacacctgctgcttccacctgtgctgctgctgcagctggccccagggcgccgtgcccgaggagctgcacaagcaccccggccagaccctgctgctgcagtgccagtacagccccaagagaggcccctaccagcccaagagctggtgccagcagaccagccccagcagatgcaccctgctggtgaccagcagcaagccctggaccgccgtgcagaagagccactacaccatctgggacaagcccaacgccggcttcttcaacatcaccatgatccagctgacccagaacgacagcggcttctactggtgcggcatctacaacgccagcgagaacatcatcaccgtgctgagaaacatcagcctggtggtgagccccgcccccaccaccagccccatgtggaccctgccctggctgcccaccagcaccgcctgggagccccagatccaggagatcaagttcagagcccccaccgacagcaccctgtggaagagcagagcccccgcctgcctgggcagcggcggccccagattcctggtgctggtgctgtgcggcctgctgctggccaagggcctgatgctgtag

SEQ ID NO: 4712 - DNA, 2025 bp, synthetic construct
  misc_feature 1..2025: note = source = /note="Description of Artificial Sequence: Synthetic coding sequence"
  source 1..2025: mol_type = other DNA
atgaccaccgacgacaccgaggtgcccgccatgaccctggcccccggccacgccgccctggagacccagaccctgagcgccgagaccagcagcagagccagcacccccgccggccccatccccgaggccgagaccagaggcgccaagagaatcagccccgccagagagaccagaagcttcaccaagaccagccccaacttcatggtgctgatcgccaccagcgtggagaccagcgccgccagcggcagccccgagggcgccggcatgaccaccgtgcagaccatcaccggcagcgaccccagagaggccatcttcgacaccctgtgcaccgacgacagcagcgaggaggccaagaccctgaccatggacatcctgaccctggcccacaccagcaccgaggccaagggcctgagcagcgagagcagcgccagcagcgacagcccccaccccgtgatcacccccagcagagccagcgagagcagcgccagcagcgacggcccccaccccgtgatcacccccagcagagccagcgagagcagcgccagcagcgacggcccccaccccgtgatcacccccagcagagccagcgagagcagcgccagcagcgacggcccccaccccgtgatcacccccagcagagccagcgagagcagcgccagcagcgacggcccccaccccgtgatcacccccagcagagccagcgagagcagcgccagcagcgacggcccccaccccgtgatcacccccagcagagccagcgagagcagcgccagcagcgacggcccccaccccgtgatcacccccagcagagccagcgagagcagcgccagcagcgacggcccccaccccgtgatcacccccagcagagccagcgagagcagcgccagcagcgacggcccccaccccgtgatcacccccagcagagccagcgagagcagcgccagcagcgacggcctgcaccccgtgatcacccccagcagagccagcgagagcagcgccagcagcgacggcccccaccccgtgatcacccccagcagagccagcgagagcagcgccagcagcgacggcccccaccccgtgatcacccccagctggagccccggcagcgacgtgaccctgctggccgaggccctggtgaccgtgaccaacatcgaggtgatcaactgcagcatcaccgagatcgagaccaccaccagcagcatccccggcgccagcgacaccgacctgatccccaccgagggcgtgaaggccagcagcaccagcgacccccccgccctgcccgacagcaccgaggccaagccccacatcaccgaggtgaccgccagcgccgagaccctgagcaccgccggcaccaccgagagcgccgcccccgacgccaccgtgggcacccccctgcccaccaacagcgccaccgagagagaggtgaccgcccccggcgccaccaccctgagcggcgccctggtgaccgtgagcagaaaccccctggaggagaccagcgccctgagcgtggagacccccagctacgtgaaggtgagcggcgccgcccccgtgagcatcgaggccggcagcgccgtgggcaagaccaccagcttcgccggcagcagcgccagcagctacagccccagcgaggccgccctgaagaacttcacccccagcgagacccccaccatggacatcgccaccaagggccccttccccaccagcagagaccccctgcccagcgtgccccccaccaccaccaacagcagcagaggcaccaacagcaccctggccaagatcaccaccagcgccaagaccaccatgaagccccccaccgccacccccaccaccgccagaaccagacccaccaccgacgtgagcgccggcgagaacggcggcttcctgctgctgagactgagcgtggccagccccgaggacctgaccgaccccagagtggccgagagactgatgcagcagctgcacagagagctgcacgcccacgccccccacttccaggtgagcctgctgagagtgagaagaggctag

SEQ ID NO: 4713 - DNA, 738 bp, synthetic construct
  misc_feature 1..738: note = source = /note="Description of Artificial Sequence: Synthetic coding sequence"
  source 1..738: mol_type = other DNA
atgcaggccgcctggctgctgggcgccctggtggtgccccagctgctgggcttcggccacggcgccagaggcgccgagagagagtgggagggcggctggggcggcgcccaggaggaggagagagagagagaggccctgatgctgaagcacctgcaggaggccctgggcctgcccgccggcagaggcgacgagaaccccgccggcaccgtggagggcaaggaggactgggagatggaggaggaccagggcgaggaggaggaggaggaggccacccccacccccagcagcggccccagccccagccccacccccgaggacatcgtgacctacatcctgggcagactggccggcctggacgccggcctgcaccagctgcacgtgagactgcacgccctggacaccagagtggtggagctgacccagggcctgagacagctgagaaacgccgccggcgacaccagagacgccgtgcaggccctgcaggaggcccagggcagagccgagagagagcacggcagactggagggctgcctgaagggcctgagactgggccacaagtgcttcctgctgagcagagacttcgaggcccagcccagcgccagcccccaccccctgagccccgaccagcccaacggcggcaccctggagaactgcgtggcccaggccagcgacgacggcagctggtgggaccacgactgccagagaagactgtactacgtgtgcgagttccccttctag

SEQ ID NO: 4714 - DNA, 279 bp, synthetic construct
  misc_feature 1..279: note = source = /note="Description of Artificial Sequence: Synthetic coding sequence"
  source 1..279: mol_type = other DNA
atgatctggagaagcagagccggcgccgagctgttcagcctgatggccctgtgggagtggatcgccctgagcctgcactgctgggtgctggccgtggccgccgtgagcgaccagcacgccaccagccccttcgactggctgctgagcgacaagggccccttccacagaagccaggagtacaccgacttcgtggacagaagcagacagggcttcagcaccagatacaagatctacagaaacatgggccacatcagctgctacctgctgctgtgggagtag

SEQ ID NO: 4715 - DNA, 177 bp, synthetic construct
  misc_feature 1..177: note = source = /note="Description of Artificial Sequence: Synthetic coding sequence"
  source 1..177: mol_type = other DNA
atggccgacatgcagaacctggtggagagactggagagagccgtgggcagactggaggccgtgagccacaccagcgacatgcacagaggctacgccgacagccccagcaaggccggcgccgccccctacgtgcaggccttcgacagcctgctggccggccccgtggccgagtactag

SEQ ID NO: 4716 - DNA, 732 bp, synthetic construct
  misc_feature 1..732: note = source = /note="Description of Artificial Sequence: Synthetic coding sequence"
  source 1..732: mol_type = other DNA
atgggccccgaggccctgagcagcctgctgctgctgctgctggtggccagcggcgacgccgacatgaagggccacttcgaccccgccaagtgcagatacgccctgggcatgcaggacagaaccatccccgacagcgacatcagcgccagcagcagctggagcgacagcaccgccgccagacacagcagactggagagcagcgacggcgacggcgcctggtgccccgccggcagcgtgttccccaaggaggaggagtacctgcaggtggacctgcagagactgcacctggtggccctggtgggcacccagggcagacacgccggcggcctgggcaaggagttcagcagaagctacagactgagatacagcagagacggcagaagatggatgggctggaaggacagatggggccaggaggtgatcagcggcaacgaggaccccgagggcgtggtgctgaaggacctgggcccccccatggtggccagactggtgagattctaccccagagccgacagagtgatgagcgtgtgcctgagagtggagctgtacggctgcctgtggagagactgcagcatgggcgtgtgggccagctggcagatggtgtggtggggctggatgaccctgggcagagtgagaagctgcggcagcggccaggccatgaccatgtgggacggcgccaccaccgccagccccgtggccatgtggagatggagcctgagcctgaccggctag

SEQ ID NO: 4717 - DNA, 2535 bp, synthetic construct; identical to SEQ ID NO: 3960
  misc_feature 1..2535: note = source = /note="Description of Artificial Sequence: Synthetic coding sequence"
  source 1..2535: mol_type = other DNA

SEQ ID NO: 4718 - DNA, 921 bp, synthetic construct
  misc_feature 1..921: note = source = /note="Description of Artificial Sequence: Synthetic coding sequence"
  source 1..921: mol_type = other DNA
agaagaacctgcgccggccccggcagagccggcggcgccagaagcgccagctggatgagcagactgagagccctgctgggcctgggcctgctggtggccggcagcagagtgcccagaatcaagagccagaccatcgcctgcagaagcggccccacctggtggggcccccagagactgaacagcggcggcagatgggacagcgaggtgatggccagcaccgtggtgaagtacctgagccaggaggaggcccaggccgtggaccaggagctgttcaacgagtaccagttcagcgtggaccagctgatggagctggccggcctgagctgcgccaccgccatcgccaaggcctacccccccaccagcatgagcagaagcccccccaccgtgctggtgatctgcggccccggcaacaacggcggcgacggcctggtgtgcgccagacacctgaagctgttcggctacgagcccaccatctactaccccaagagacccaacaagcccctgttcaccgccctggtgacccagtgccagaagatggacatccccttcctgggcgagatgcccgccgagcccatgaccatcgacgagctgtacgagctggtggtggacgccatcttcggcttcagcttcaagggcgacgtgagagagcccttccacagcatcctgagcgtgctgaagggcctgaccgtgcccatcgccagcatcgacatccccagcggctgggacgtggagaagggcaacgccggcggcatccagcccgacctgctgatcagcctgaccgcccccaagaagagcgccacccagttcaccggcagataccactacctgggcggcagattcgtgccccccgccctggagaagaagtaccagctgaacctgcccccctaccccgacaccgagtgcgtgtacagactgcagtag

SEQ ID NO: 4719 - DNA, 1137 bp, synthetic construct; identical to SEQ ID NO: 4499
  misc_feature 1..1137: note = source = /note="Description of Artificial Sequence: Synthetic coding sequence"
  source 1..1137: mol_type = other DNA

SEQ ID NO: 4720 - DNA, 762 bp, synthetic construct
  misc_feature 1..762: note = source = /note="Description of Artificial Sequence: Synthetic coding sequence"
  source 1..762: mol_type = other DNA
atggccccctggagccaccccagcgcccagctgcagcccgtgggcggcgacgccgtgagccccgccctgatggtgctgctgtgcctgggcaacctgagcaaggccaccctgtgggccgagcccggcagcgtgatcagcagaggcaacagcgtgaccatcagatgccagggcaccctggaggcccaggagtacagactggtgaaggagggcagccccgagccctgggacacccagaaccccctggagcccaagaacaaggccagattcagcatccccagcatgaccgagcaccacgccggcagatacagatgctactactacagccccgccggctggagcgagcccagcgaccccctggagctggtggtgaccggcttctacaacaagcccaccctgagcgccctgcccagccccgtggtgaccagcggcgagaacgtgaccctgcagtgcggcagcagactgagattcgacagattcatcctgaccgaggagggcgaccacaagctgagctggaccctggacagccagctgacccccagcggccagttccaggccctgttccccgtgggccccgtgacccccagccacagatggatgctgagatgctacggcagcagaagacacatcctgcaggtgtggagcgagcccagcgacctgctggagatccccgtgagcggcgaggaggccaccgtgttcagcagcaccatccagggcagccagaccggctgcggcgagctgtacagacagggcagcccctgctag

SEQ ID NO: 4721 - DNA, 288 bp, synthetic construct
  misc_feature 1..288: note = source = /note="Description of Artificial Sequence: Synthetic coding sequence"
  source 1..288: mol_type = other DNA
atgagaaagcccagaagaaagagcagacagaacgccgagggcagaagaagccccagcccctacagcctgaagtgcagccccaccagagagaccctgacctacgcccaggcccagagaatcgtggaggtggacatcgacggcagactgcacagaatcagcatctacgaccccctgaagatcatcaccgaggacgagctgaccgcccaggacatcaccgagtgcaacagcaacaaggagaacagcgagcagccccagttccccggcaagagcaagaagcccagcagctag

SEQ ID NO: 4722 - DNA, 1311 bp, synthetic construct
  misc_feature 1..1311: note = source = /note="Description of Artificial Sequence: Synthetic coding sequence"
  source 1..1311: mol_type = other DNA
atgaagttccagggccccctggcctgcctgctgctggccctgtgcctgggcagcggcgaggccggccccctgcagagcggcgaggagagcaccggcaccaacatcggcgaggccctgggccacggcctgggcgacgccctgagcgagggcgtgggcaaggccatcggcaaggaggccggcggcgccgccggcagcaaggtgagcgaggccctgggccagggcaccagagaggccgtgggcaccggcgtgagacaggtgcccggcttcggcgtggccgacgccctgggcaacagagtgggcgaggccgcccacgccctgggcaacaccggccacgagatcggcagacaggccgaggacgtgatcagacacggcgccgacgccgtgagaggcagctggcagggcgtgcccggccacaacggcgcctgggagaccagcggcggccacggcatcttcggcagccagggcggcctgggcggccagggccagggcaaccccggcggcctgggcaccccctgggtgcacggctaccccggcaacagcgccggcagcttcggcatgaacccccagggcgccccctggggccagggcggcaacggcggcccccccaacttcggcaccaacacccagggcgccgtggcccagcccggctacggcagcgtgagagccagcaaccagaacgagggctgcaccaaccccccccccagcggcagcggcggcggcagcagcaacagcggcggcggcagcggcagccagagcggcagcagcggcagcggcagcaacggcgacaacaacaacggcagcagcagcggcggcagcagcagcggcagcagcagcggcggcagcagcggcggcagcagcggcggcagcagcggcaacagcggcggcagcagaggcgacagcggcagcgagagcagctggggcagcagcaccggcagcagcagcggcaaccacggcggcagcggcggcggcaacggccacaagcccggctgcgagaagcccggcaacgaggccagaggcagcggcgagagcggcatccagggcttcagaggccagggcgtgagcagcaacatgagagagatcagcaaggagggcaacagactgctgggcggcagcggcgacaactacagaggccagggcagcagctggggcagcggcggcggcgacgccgtgggcggcgtgaacaccgtgaacagcgagaccagccccggcatgttcaacttcgacaccttctggaagaacttcaagagcaagctgggcttcatcaactgggacgccatcaacaaggaccagagaagcagcagaatcccctag

SEQ ID NO: 4723 - DNA, 240 bp, synthetic construct
  misc_feature 1..240: note = source = /note="Description of Artificial Sequence: Synthetic coding sequence"
  source 1..240: mol_type = other DNA
atgcccgcctgcagactgggccccctggccgccgccctgctgctgagcctgctgctgttcggcttcaccctggtgagcggcaccggcgccgagaagaccggcgtgtgccccgagctgcaggccgaccagaactgcacccaggagtgcgtgagcgacagcgagtgcgccgacaacctgaagtgctgcagcgccggctgcgccaccttctgcagcctgcccaacggccagctggccgagtag

SEQ ID NO: 4724 - DNA, 2130 bp, synthetic construct
  misc_feature 1..2130: note = source = /note="Description of Artificial Sequence: Synthetic coding sequence"
  source 1..2130: mol_type = other DNA
atgggctgcctgtggggcctggccctgcccctgttcttcttctgctgggaggtgggcgtgagcggcagcagcgccggccccagcaccagaagagccgacaccgccatgaccaccgacgacaccgaggtgcccgccatgaccctggcccccggccacgccgccctggagacccagaccctgagcgccgagaccagcagcagagccagcacccccgccggccccatccccgaggccgagaccagaggcgccaagagaatcagccccgccagagagaccagaagcttcaccaagaccagccccaacttcatggtgctgatcgccaccagcgtggagaccagcgccgccagcggcagccccgagggcgccggcatgaccaccgtgcagaccatcaccggcagcgaccccagagaggccatcttcgacaccctgtgcaccgacgacagcagcgaggaggccaagaccctgaccatggacatcctgaccctggcccacaccagcaccgaggccaagggcctgagcagcgagagcagcgccagcagcgacagcccccaccccgtgatcacccccagcagagccagcgagagcagcgccagcagcgacggcccccaccccgtgatcacccccagcagagccagcgagagcagcgccagcagcgacggcccccaccccgtgatcacccccagcagagccagcgagagcagcgccagcagcgacggcccccaccccgtgatcacccccagcagagccagcgagagcagcgccagcagcgacggcccccaccccgtgatcacccccagcagagccagcgagagcagcgccagcagcgacggcccccaccccgtgatcacccccagcagagccagcgagagcagcgccagcagcgacggcccccaccccgtgatcacccccagcagagccagcgagagcagcgccagcagcgacggcccccaccccgtgatcacccccagcagagccagcgagagcagcgccagcagcgacggcccccaccccgtgatcacccccagcagagccagcgagagcagcgccagcagcgacggcctgcaccccgtgatcacccccagcagagccagcgagagcagcgccagcagcgacggcccccaccccgtgatcacccccagcagagccagcgagagcagcgccagcagcgacggcccccaccccgtgatcacccccagctggagccccggcagcgacgtgaccctgctggccgaggccctggtgaccgtgaccaacatcgaggtgatcaactgcagcatcaccgagatcgagaccaccaccagcagcatccccggcgccagcgacaccgacctgatccccaccgagggcgtgaaggccagcagcaccagcgacccccccgccctgcccgacagcaccgaggccaagccccacatcaccgaggtgaccgccagcgccgagaccctgagcaccgccggcaccaccgagagcgccgcccccgacgccaccgtgggcacccccctgcccaccaacagcgccaccgagagagaggtgaccgcccccggcgccaccaccctgagcggcgccctggtgaccgtgagcagaaaccccctggaggagaccagcgccctgagcgtggagacccccagctacgtgaaggtgagcggcgccgcccccgtgagcatcgaggccggcagcgccgtgggcaagaccaccagcttcgccggcagcagcgccagcagctacagccccagcgaggccgccctgaagaacttcacccccagcgagacccccaccatggacatcgccaccaagggccccttccccaccagcagagaccccctgcccagcgtgccccccaccaccaccaacagcagcagaggcaccaacagcaccctggccaagatcaccaccagcgccaagaccaccatgaagccccccaccgccacccccaccaccgccagaaccagacccaccaccgacgtgagcgccggcgagaacggcggcttcctgctgctgagactgagcgtggccagccccgaggacctgaccgaccccagagtggccgagagactgatgcagcagctgcacagagagctgcacgcccacgccccccacttccaggtgagcctgctgagagtgagaagaggctag

SEQ ID NO: 4725 - DNA, 2067 bp, synthetic construct
  misc_feature 1..2067: note = source = /note="Description of Artificial Sequence: Synthetic coding sequence"
  source 1..2067: mol_type = other DNA
atgctgcccaccgaggtgccccagagccaccccggccccagcgccctgctgctgctgcagctgctgctgccccccaccagcgccttcttccccaacatctggagcctgctggccgcccccggcagcatcacccaccaggacctgaccgaggaggccgccctgaacgtgaccctgcagctgttcctggagcagcccccccccggcagaccccccctgagactggaggacttcctgggcagaaccctgctggccgacgacctgttcgccgcctacttcggccccggcagcagcagaagattcagagccgccctgggcgaggtgagcagagccaacgccgcccaggacttcctgcccaccagcagaaacgaccccgacctgcacttcgacgccgagagactgggccagggcagagccagactggtgggcgccctgagagagaccgtggtggccgccagagccctggaccacaccctggccagacagagactgggcgccgccctgcacgccctgcaggacttctacagccacagcaactgggtggagctgggcgagcagcagccccacccccacctgctgtggcccagacaggagctgcagaacctggcccaggtggccgaccccacctgcagcgactgcgaggagctgagctgccccagaaactggctgggcttcaccctgctgaccagcggctacttcggcacccacccccccaagccccccggcaagtgcagccacggcggccacttcgacagaagcagcagccagccccccagaggcggcatcaacaaggacagcaccagccccggcttcagcccccaccacatgctgcacctgcaggccgccaagctggccctgctggccagcatccaggccttcagcctgctgagaagcagactgggcgacagagacttcagcagactgctggacatcacccccgccagcagcctgagcttcgtgctggacaccaccggcagcatgggcgaggagatcaacgccgccaagatccaggccagacacctggtggagcagagaagaggcagccccatggagcccgtgcactacgtgctggtgcccttccacgaccccggcttcggccccgtgttcaccaccagcgaccccgacagcttctggcagcagctgaacgagatccacgccctgggcggcggcgacgagcccgagatgtgcctgagcgccctgcagctggccctgctgcacaccccccccctgagcgacatcttcgtgttcaccgacgccagccccaaggacgccttcctgaccaaccaggtggagagcctgacccaggagagaagatgcagagtgaccttcctggtgaccgaggacaccagcagagtgcagggcagagccagaagagagatcctgagccccctgagattcgagccctacaaggccgtggccctggccagcggcggcgaggtgatcttcaccaaggaccagcacatcagagacgtggccgccatcgtgggcgagagcatggccgccctggtgaccctgcccctggacccccccgtggtggtgcccggccagcccctggtgttcagcgtggacggcctgctgcagaagatcaccgtgagaatccacggcgacatcagcagcttctggatcaagaaccccgccggcgtgagccagggccaggaggagggcggcggccccctgggccacaccagaagattcggccagttctggatggtgaccatggacgaccccccccagaccggcacctgggagatccaggtgaccgccgaggacacccccggcgtgagagtgcaggcccagaccagcctggacttcctgttccacttcggcatccccatggaggacggcccccaccccggcctgtaccccctgacccagcccgtggccggcctgcagacccagctgctggtggagagccagagctggggcagcagcgccgccttcctgcccagacaccccagcagaggccccagaggctgcagaaccagacccggcgccctgggcgccagaggcaccagcggcgccagaagccccagaagcctggccgtggcccacgccgccgtgcacccctag

SEQ ID NO: 4726 - DNA, 1257 bp, synthetic construct
  misc_feature 1..1257: note = source = /note="Description of Artificial Sequence: Synthetic coding sequence"
  source 1..1257: mol_type = other DNA
aacaacctgaacgtgggcagcgacaccaccagcgagaccagcttcagcctgagcaaggaggcccccagagagcacctggaccaccaggccgcccaccagcccttccccagacccagattcagacaggagaccggccaccccagcctgcagagagacttccccagaagcttcctgctggacctgcccaacttccccgacctgagcaaggccgacatcaacggccagaaccccaacatccaggtgaccatcgaggtggtggacggccccgacagcgaggccgacaaggaccagcaccccgagaacaagcccagctggagcgtgcccagccccgactggagagcctggtggcagagaagcctgagcctggccagagccaacagcggcgaccaggactacaagtacgacagcaccagcgacgacagcaacttcctgaacccccccagaggctgggaccacaccgcccccggccacagaaccttcgagaccaaggaccagcccgagtacgacagcaccgacggcgagggcgactggagcctgtggagcgtgtgcagcgtgacctgcggcaacggcaaccagaagagaaccagaagctgcggctacgcctgcaccgccaccgagagcagaacctgcgacagacccaactgccccggcatcgaggacaccttcagaaccgccgccaccgaggtgagcctgctggccggcagcgaggagttcaacgccaccaagctgttcgaggtggacaccgacagctgcgagagatggatgagctgcaagagcgagttcctgaagaagtacatgcacaaggtgatgaacgacctgcccagctgcccctgcagctaccccaccgaggtggcctacagcaccgccgacatcttcgacagaatcaagagaaaggacttcagatggaaggacgccagcggccccaaggagaagctggagatctacaagcccaccgccagatactgcatcagaagcatgctgagcctggagagcaccaccctggccgcccagcactgctgctacggcgacaacatgcagctgatcaccagaggcaagggcgccggcacccccaacctgatcagcaccgagttcagcgccgagctgcactacaaggtggacgtgctgccctggatcatctgcaagggcgactggagcagatacaacgaggccagaccccccaacaacggccagaagtgcaccgagagccccagcgacgaggactacatcaagcagttccaggaggccagagagtactag

SEQ ID NO: 4727 - DNA, 693 bp, synthetic construct; identical to SEQ ID NO: 3999
  misc_feature 1..693: note = source = /note="Description of Artificial Sequence: Synthetic coding sequence"
  source 1..693: mol_type = other DNA

SEQ ID NO: 4728 - DNA, 192 bp, synthetic construct; identical to SEQ ID NO: 4605
  misc_feature 1..192: note = source = /note="Description of Artificial Sequence: Synthetic coding sequence"
  source 1..192: mol_type = other DNA

SEQ ID NO: 4729 - DNA, 1014 bp, synthetic construct
  misc_feature 1..1014: note = source = /note="Description of Artificial Sequence: Synthetic coding sequence"
  source 1..1014: mol_type = other DNA
atgctgagcctgggcgcccacagcgtgaccaagacccagatcctgcagggcctgggcttcaacctgacccacacccccgagagcgccatccaccagggcttccagcacctggtgcacagcctgaccgtgcccagcaaggacctgaccctgaagatgggcagcgccctgttcgtgaagaaggagctgcagctgcaggccaacttcctgggcaacgtgaagagactgtacgaggccgaggtgttcagcaccgacttcagcaaccccagcatcgcccaggccagaatcaacagccacgtgaagaagaagacccagggcaaggtggtggacatcatccagggcctggacctgctgaccgccatggtgctggtgaaccacatcttcttcaaggccaagtgggagaagcccttccaccccgagtacaccagaaagaacttccccttcctggtgggcgagcaggtgaccgtgcacgtgcccatgatgcaccagaaggagcagttcgccttcggcgtggacaccgagctgaactgcttcgtgctgcagatggactacaagggcgacgccgtggccttcttcgtgctgcccagcaagggcaagatgagacagctggagcaggccctgagcgccagaaccctgagaaagtggagccacagcctgcagaagagatggatcgaggtgttcatccccagattcagcatcagcgccagctacaacctggagaccatcctgcccaagatgggcatccagaacgtgttcgacaagaacgccgacttcagcggcatcgccaagagagacagcctgcaggtgagcaaggccacccacaaggccgtgctggacgtgagcgaggagggcaccgaggccaccgccgccaccaccaccaagttcatcgtgagaagcaaggacggccccagctacttcaccgtgagcttcaacagaaccttcctgatgatgatcaccaacaaggccaccgacggcatcctgttcctgggcaaggtggagaaccccaccaagagctag

SEQ ID NO: 4730 - DNA, 336 bp, synthetic construct
  misc_feature 1..336: note = source = /note="Description of Artificial Sequence: Synthetic coding sequence"
  source 1..336: mol_type = other DNA
atgttcttcaccatcagcagaaagaacatgagccagaagctgagcctgctgctgctggtgttcggcctgatctggggcctgatgctgctgcactacaccttccagcagcccagacaccagagcagcgtgaagctgagagagcagatcctggacctgagcaagagatacgtgaaggccctggccgaggagaacaagaacaccgtggacgtggagaacggcgccagcatggccggctacgccgacctgaagagaaccatcgccgtgctgctggacgacatcctgcagagactggtgaagctggagaacaaggtggactacatcgtggtgaacggctag

SEQ ID NO: 4731 - DNA, 498 bp, synthetic construct; identical to SEQ ID NO: 3716
  misc_feature 1..498: note = source = /note="Description of Artificial Sequence: Synthetic coding sequence"
  source 1..498: mol_type = other DNA

SEQ ID NO: 4732 - DNA, 699 bp, synthetic construct
  misc_feature 1..699: note = source = /note="Description of Artificial Sequence: Synthetic coding sequence"
  source 1..699: mol_type = other DNA
atggtgctgctgctggtgatcctgatccccgtgctggtgagcagcgccggcaccagcgcccactacgagatgctgggcacctgcagaatggtgtgcgacccctacggcggcaccaaggcccccagcaccgccgccacccccgacagaggcctgatgcagagcctgcccaccttcatccagggcccccccatgggcccccccggcgagaagggcgagcccggcagacagggcctgcccggcccccccggcgcccccggcctgaacgccgccggcgccatcagcgccgccacctacagcaccgtgcccaagatcgccttctacgccggcctgaagagacagcacgagggctacgaggtgctgaagttcgacgacgtggtgaccaacctgggcaaccactacgaccccaccaccggcaagttcacctgcagcatccccggcatctacttcttcacctaccacgtgctgatgagaggcggcgacggcaccagcatgtgggccgacctgtgcaagaacaaccaggtgagagccagcgccatcgcccaggacgccgaccagaactacgactacgccagcaacagcgtggtgctgcacctggagcccggcgacgaggtgtacatcaagctggacggcggcaaggcccacggcggcaacaacaacaagtacagcaccttcagcggcttcatcatctacgccgactag

SEQ ID NO: 4733 - DNA, 501 bp, synthetic construct; identical to SEQ ID NO: 4634
  misc_feature 1..501: note = source = /note="Description of Artificial Sequence: Synthetic coding sequence"
  source 1..501: mol_type = other DNA

SEQ ID NO: 4734 - DNA, 627 bp, synthetic construct
  misc_feature 1..627: note = source = /note="Description of Artificial Sequence: Synthetic coding sequence"
  source 1..627: mol_type = other DNA
atgatcatcaagcacttcttcggcaccgtgctggtgctgctggccagcaccaccatcttcagcctggacctgaagctgatcatcttccagcagagacaggtgaaccaggagagcctgaagctgctgaacaagctgcagaccctgagcatccagcagtgcctgccccacagaaagaacttcctgctgccccagaagagcctgagcccccagcagtaccagaagggccacaccctggccatcctgcacgagatgctgcagcagatcttcagcctgttcagagccaacatcagcctggacggctgggaggagaaccacaccgagaagttcctgatccagctgcaccagcagctggagtacctggaggccctgatgggcctggaggccgagaagctgagcggcaccctgggcagcgacaacctgagactgcaggtgaagatgtacttcagaagaatccacgactacctggagaaccaggactacagcacctgcgcctgggccatcgtgcaggtggagatcagcagatgcctgttcttcgtgttcagcctgaccgagaagctgagcaagcagggcagacccctgaacgacatgaagcaggagctgaccaccgagttcagaagccccagatag

SEQ ID NO: 4735 - DNA, 2241 bp, synthetic construct
  misc_feature 1..2241: note = source = /note="Description of Artificial Sequence: Synthetic coding sequence"
  source 1..2241: mol_type = other DNA
atgcccttcagacacaagcccggcagcgtgttcagcgtggagggcgagaacctggacctggccatgagcaaggaggaggtggtggccatgatcggcgacggcccctgcgtggtgaagaccctgaccagacaccacctgtactgcgagccccccgtggagcagcccctgcccagacaccacgccctgagagaggcccccgacagcctgcccgagttcaccgtgcagatgggcaacctgagattcagcctgggccacgtgcagtacgacggcgagagccccggcgccttccccgtggccgcccaggtgggcctgggcgtgggcaccagcctgctggccctgggcgtgatcatcatcgtgctgatgtacagaagaaagagcaagcaggccctgagagactacaagaaggtgcagatccagctggagaacctggagagcagcgtgagagacagatgcaagaaggagttcaccgacctgatgaccgagatgaccgacctgaccagcgacctgctgggcagcggcatccccttcctggactacaaggtgtacgccgagagaatcttcttccccggccacagagagagccccctgcacagagacctgggcgtgcccgagagcagaagacccaccgtggagcagggcctgggccagctgagcaacctgctgaacagcaagctgttcctgaccaagttcatccacaccctggagagccagagaaccttcagcgccagagacagagcctacgtggccagcctgctgaccgtggccctgcacggcaagctggagtacttcaccgacatcctgagaaccctgctgagcgacctggtggcccagtacgtggccaagaaccccaagctgatgctgagaagaaccgagaccgtggtggagaagctgctgaccaactggatgagcatctgcctgtacaccttcgtgagagacagcgtgggcgagcccctgtacatgctgttcagaggcatcaagcaccaggtggacaagggccccgtggacagcgtgaccggcaaggccaagtacaccctgaacgacaacagactgctgagagaggacgtggagtacagacccctgaccctgaacgccctgctggccgtgggccccggcgccggcgaggcccagggcgtgcccgtgaaggtgctggactgcgacaccatcagccaggccaaggagaagatgctggaccagctgtacaagggcgtgcccctgacccagagacccgaccccagaaccctggacgtggagtggagaagcggcgtggccggccacctgatcctgagcgacgaggacgtgaccagcgaggtgcagggcctgtggagaagactgaacaccctgcagcactacaaggtgcccgacggcgccaccgtggccctggtgccctgcctgaccaagcacgtgctgagagagaaccaggactacgtgcccggcgagagaacccccatgctggaggacgtggacgagggcggcatcagaccctggcacctggtgaagcccagcgacgagcccgagccccccagacccagaagaggcagcctgagaggcggcgagagagagagagccaaggccatccccgagatctacctgaccagactgctgagcatgaagggcaccctgcagaagttcgtggacgacctgttccaggtgatcctgagcaccagcagacccgtgcccctggccgtgaagtacttcttcgacctgctggacgagcaggcccagcagcacggcatcagcgaccaggacaccatccacatctggaagaccaacagcctgcccctgagattctggatcaacatcatcaagaacccccagttcgtgttcgacgtgcagaccagcgacaacatggacgccgtgctgctggtgatcgcccagaccttcatggacgcctgcaccctggccgaccacaagctgggcagagacagccccatcaacaagctgctgtacgccagagacatccccagatacaagagaatggtggagagatactacgccgacatcagacagaccgtgcccgccagcgaccaggagatgaacagcgtgctggccgagctgagctggaactacagcggcgacctgggcgccagagtggccctgcacgagctgtacaagtacatcaacaagtactacgaccagatcatcaccgccctggaggaggacggcaccgcccagaagatgcagctgggctacagactgcagcagatcgccgccgccgtggagaacaaggtgaccgacctgtag

SEQ ID NO: 4736 - DNA, 603 bp, synthetic construct; identical to SEQ ID NO: 3907
  misc_feature 1..603: note = source = /note="Description of Artificial Sequence: Synthetic coding sequence"
  source 1..603: mol_type = other DNA

SEQ ID NO: 4737 - DNA, 114 bp, synthetic construct
  misc_feature 1..114: note = source = /note="Description of Artificial Sequence: Synthetic coding sequence"
  source 1..114: mol_type = other DNA
atgggctggctgaccagaatcgtgtgcctgttctggggcgtgctgctgaccgccagagccaactaccagaacggcaagaacaacgtgcccagactgaagctgagctacaagtag

SEQ ID NO: 4738 - DNA, 525 bp, synthetic construct
  misc_feature 1..525: note = source = /note="Description of Artificial Sequence: Synthetic coding sequence"
  source 1..525: mol_type = other DNA
atgagactgctggccttcctgagcctgctggccctggtgctgcaggagaccggcaccgccagcctgcccagaaaggagagaaagagaagagaggagcagatgcccagagagggcgacagcttcgaggtgctgcccctgagaaacgacgtgctgaaccccgacaactacggcgaggtgatcgacctgagcaactacgaggagctgaccgactacggcgaccagctgcccgaggtgaaggtgaccagcctggcccccgccaccagcatcagccccgccaagagcaccaccgcccccggcacccccagcagcaaccccaccatgaccagacccaccaccgccggcctgctgctgagcagccagcccaaccacgaggacatcccccccctgcccagaagaaccgcctacctgtacgccagattcaacagaatcagcagaatcagagccgaggacttcaagggcctgaccaagctgaagagaatcgacctgagcaacaacctgatcagcagcatcgacaacgacgcctag

SEQ ID NO: 4739 - DNA, 657 bp, synthetic construct; identical to SEQ ID NO: 4208
  misc_feature 1..657: note = source = /note="Description of Artificial Sequence: Synthetic coding sequence"
  source 1..657: mol_type = other DNA

SEQ ID NO: 4740 - DNA, 2535 bp, synthetic construct; identical to SEQ ID NO: 3960
  misc_feature 1..2535: note = source = /note="Description of Artificial Sequence: Synthetic coding sequence"
  source 1..2535: mol_type = other DNA

SEQ ID NO: 4741 - DNA, 2007 bp, synthetic construct
  misc_feature 1..2007: note = source = /note="Description of Artificial Sequence: Synthetic coding sequence"
  source 1..2007: mol_type = other DNA
atggacctggtgctgaagagatgcctgctgcacctggccgtgatcggcgccctgctggccgtgggcgccaccaaggtgcccagaaaccaggactggctgggcgtgagcagacagctgagaaccaaggcctggaacagacagctgtaccccgagtggaccgaggcccagagactggactgctggagaggcggccaggtgagcctgaaggtgagcaacgacggccccaccctgatcggcgccaacgccagcttcagcatcgccctgaacttccccggcagccagaaggtgctgcccgacggccaggtgatctgggtgaacaacaccatcatcaacggcagccaggtgtggggcggccagcccgtgtacccccaggagaccgacgacgcctgcatcttccccgacggcggcccctgccccagcggcagctggagccagaagagaagcttcgtgtacgtgtggaagacctggggccagtactggcaggtgctgggcggccccgtgagcggcctgagcatcggcaccggcagagccatgctgggcacccacaccatggaggtgaccgtgtaccacagaagaggcagcagaagctacgtgcccctggcccacagcagcagcgccttcaccatcaccgaccaggtgcccttcagcgtgagcgtgagccagctgagagccctggacggcggcaacaagcacttcctgagaaaccagcccctgaccttcgccctgcagctgcacgaccccagcggctacctggccgaggccgacctgagctacacctgggacttcggcgacagcagcggcaccctgatcagcagagccctggtggtgacccacacctacctggagcccggccccgtgaccgcccaggtggtgctgcaggccgccatccccctgaccagctgcggcagcagccccgtgcccggcaccaccgacggccacagacccaccgccgaggcccccaacaccaccgccggccaggtgcccaccaccgaggtggtgggcaccacccccggccaggcccccaccgccgagcccagcggcaccaccagcgtgcaggtgcccaccaccgaggtgatcagcaccgcccccgtgcagatgcccaccgccgagagcaccggcatgacccccgagaaggtgcccgtgagcgaggtgatgggcaccaccctggccgagatgagcacccccgaggccaccggcatgacccccgccgaggtgagcatcgtggtgctgagcggcaccaccgccgcccaggtgaccaccaccgagtgggtggagaccaccgccagagagctgcccatccccgagcccgagggccccgacgccagcagcatcatgagcaccgagagcatcaccggcagcctgggccccctgctggacggcaccgccaccctgagactggtgaagagacaggtgcccctggactgcgtgctgtacagatacggcagcttcagcgtgaccctggacatcgtgcagggcatcgagagcgccgagatcctgcaggccgtgcccagcggcgagggcgacgccttcgagctgaccgtgagctgccagggcggcctgcccaaggaggcctgcatggagatcagcagccccggctgccagccccccgcccagagactgtgccagcccgtgctgcccagccccgcctgccagctggtgctgcaccagatcctgaagggcggcagcggcacctactgcctgaacgtgagcctggccgacaccaacagcctggccgtggtgagcacccagctgatcatgcccgtgcccggcatcctgctgaccggccaggaggccggcctgggccaggtgcccctgatcgtgggcatcctgctggtgctgatggccgtggtgctggccagcctgatctacagaagaagactgatgaagcaggacttcagcgtgccccagctgccccacagcagcagccactggctgagactgcccagaatcttctgcagctgccccatcggcgagaacagccccctgctgagcggccagcaggtgtag

SEQ ID NO: 4742 - DNA, 525 bp, synthetic construct
  misc_feature 1..525: note = source = /note="Description of Artificial Sequence: Synthetic coding sequence"
  source 1..525: mol_type = other DNA
atggccgacatgcagaacctggtggagagactggagagagccgtgggcagactggaggccgtgagccacaccagcgacatgcacagaggctacgccgacagccccagcaaggccggcgccgccccctacgtgcaggccttcgacagcctgctggccggccccgtggccgagtacctgaagatcagcaaggagatcggcggcgacgtgcagaagcacgccgagatggtgcacaccggcctgaagctggagagagccctgctggtgaccgccagccagtgccagcagcccgccgagaacaagctgagcgacctgctggcccccatcagcgagcagatcaaggaggtgatcaccttcagagagaagaacagaggcagcaagctgttcaaccacctgagcgccgtgagcgagagcatccaggccctgggctgggtggccatggcccccaagcccggcccctacgtgaaggagatgaacgacgccgccatgttctacaccaacagagtgctgaaggagtacaaggactag

SEQ ID NO: 4743 - DNA, 1368 bp, synthetic construct
  misc_feature 1..1368: note = source = /note="Description of Artificial Sequence: Synthetic coding sequence"
  source 1..1368: mol_type = other DNA
atgctgcaccccgagaccagccccggcagaggccacctgctggccgtgctgctggccctgctgggcaccgcctgggccgaggtgtggcccccccagctgcaggagcaggcccccatggccggcgccctgaacagaaaggagagcttcctgctgctgagcctgcacaacagactgagaagctgggtgcagccccccgccgccgacatgagaagactggactggagcgacagcctggcccagctggcccaggccagagccgccctgtgcggcacccccacccccagcctggccagcggcctgtggagaaccctgcaggtgggctggaacatgcagctgctgcccgccggcctggtgagcttcgtggaggtggtgagcctgtggttcgccgagggccagagatacagccacgccgccggcgagtgcgccagaaacgccacctgcacccactacacccagctggtgtgggccaccagcagccagctgggctgcggcagacacctgtgcagcgccggccaggccgccatcgaggccttcgtgtgcgcctacagccccagaggcaactgggaggtgaacggcaagaccatcgtgccctacaagaagggcgcctggtgcagcctgtgcaccgccagcgtgagcggctgcttcaaggcctgggaccacgccggcggcctgtgcgaggtgcccagaaacccctgcagaatgagctgccagaaccacggcagactgaacatcagcacctgccactgccactgcccccccggctacaccggcagatactgccaggtgagatgcagcctgcagtgcgtgcacggcagattcagagaggaggagtgcagctgcgtgtgcgacatcggctacggcggcgcccagtgcgccaccaaggtgcacttccccttccacacctgcgacctgagaatcgacggcgactgcttcatggtgagcagcgaggccgacacctactacagagccagaatgaagtgccagagaaagggcggcgtgctggcccagatcaagagccagaaggtgcaggacatcctggccttctacctgggcagactggagaccaccaacgaggtgatcgacagcgacttcgagaccagaaacttctggatcggcctgacctacaagaccgccaaggacagcttcagatgggccaccggcgagcaccaggccttcaccagcttcgccttcggccagcccgacaaccacggcctggtgtggctgagcgccgccatgggcttcggcaactgcgtggagctgcaggccagcgccgccttcaactggaacgaccagagatgcaagaccagaaacagatacatctgccagttcgcccaggagcacatcagcagatggggccccggcagctag

SEQ ID NO: 4744 - DNA, 297 bp, synthetic construct
  misc_feature 1..297: note = source = /note="Description of Artificial Sequence: Synthetic coding sequence"
  source 1..297: mol_type = other DNA
atggtgctggccatgctgggcgccctgcaccccagagccggcctgagcctgttcctgcacctgatcctggccgtggccctgctgagaagccagcccctgagaagccagagaagcgtgcccgaggccttcagcgcccccctggagctgagccagcccctgagcggcctggtggacgactacggcatcctgcccaagcaccccagacccagaggccccagacccctgctgagcagagcccagcagagaaagagagacggccccgacctggccgagtactactacgacgcccacctgtag

SEQ ID NO: 4745 - DNA, 2742 bp, synthetic construct; identical to SEQ ID NO: 3799
  misc_feature 1..2742: note = source = /note="Description of Artificial Sequence: Synthetic coding sequence"
  source 1..2742: mol_type = other DNA

SEQ ID NO: 4746 - DNA, 678 bp, synthetic construct; identical to SEQ ID NO: 4468
  misc_feature 1..678: note = source = /note="Description of Artificial Sequence: Synthetic coding sequence"
  source 1..678: mol_type = other DNA

SEQ ID NO: 4747 - DNA, 405 bp, synthetic construct
  misc_feature 1..405: note = source = /note="Description of Artificial Sequence: Synthetic coding sequence"
  source 1..405: mol_type = other DNA
atgcccagatgcagatggctgagcctgatcctgctgaccatccccctggccctggtggccagaaaggaccccaagaagaacgagaccggcgtgctgagaaagctgaagcccgtgaacgccagcaacgccaacgtgaagcagtgcctgtggttcgccatgcaggagtacaacaaggagagcgaggacaagtacgtgttcctggtggtgaagaccctgcaggcccagctgcaggtgaccaacctgctggagtacctgatcgacgtggagatcgccagaagcgactgcagaaagcccctgagcaccaacgagatctgcgccatccaggagaacagcaagctgaagagaaagctgagctgcagcttcctggtgggcgccctgccctggaacggcgagttcaccgtgtag

SEQ ID NO: 4748 - DNA, 1182 bp, synthetic construct; identical to SEQ ID NO: 3793
  misc_feature 1..1182: note = source = /note="Description of Artificial Sequence: Synthetic coding sequence"
  source 1..1182: mol_type = other DNA

SEQ ID NO: 4749 - DNA, 678 bp, synthetic construct; identical to SEQ ID NO: 4468
  misc_feature 1..678: note = source = /note="Description of Artificial Sequence: Synthetic coding sequence"
  source 1..678: mol_type = other DNA

SEQ ID NO: 4750 - DNA, 1410 bp, synthetic construct
  misc_feature 1..1410: note = source = /note="Description of Artificial Sequence: Synthetic coding sequence"
  source 1..1410: mol_type = other DNA
atgatgagactgggcggcagactggtgctgaacaccaaggaggagctggccaacgagagactgatgaccctgaagatcgccgagatgaaggaggccatgagaaccctgatcttcccccccagcatgcacttcttccaggccaagcacctgatcgagagaagccaggtgttcaacatcctgagaatgatgcccaagggcgccgccctgcacctgcacgacatcggcatcgtgaccatggactggctggtgagaaacgtgacctacagaccccactgccacatctgcttcacccccagaggcatcatgcagttcagattcgcccaccccacccccagacccagcgagaagtgcagcaagtggatcctgctggaggactacagaaagagagtgcagaacgtgaccgagttcgacgacagcctgctgagaaacttcaccctggtgacccagcaccccgaggtgatctacaccaaccagaacgtggtgtggagcaagttcgagaccatcttcttcaccatcagcggcctgatccactacgcccccgtgttcagagactacgtgttcagaagcatgcaggagttctacgaggacaacgtgctgtacatggagatcagagccagactgctgcccgtgtacgagctgagcggcgagcaccacgacgaggagtggagcgtgaagacctaccaggaggtggcccagaagttcgtggagacccaccccgagttcatcggcatcaagatcatctacagcgaccacagaagcaaggacgtggccgtgatcgccgagagcatcagaatggccatgggcctgagaatcaagttccccaccgtggtggccggcttcgacctggtgggccacgaggacaccggccacagcctgcacgactacaaggaggccctgatgatccccgccaaggacggcgtgaagctgccctacttcttccacgccggcgagaccgactggcagggcaccagcatcgacagaaacatcctggacgccctgatgctgaacaccaccagaatcggccacggcttcgccctgagcaagcaccccgccgtgagaacctacagctggaagaaggacatccccatcgaggtgtgccccatcagcaaccaggtgctgaagctggtgagcgacctgagaaaccaccccgtggccaccctgatggccaccggccaccccatggtgatcagcagcgacgaccccgccatgttcggcgccaagggcctgagctacgacttctacgaggtgttcatgggcatcggcggcatgaaggccgacctgagaaccctgaagcagctggccatgaacagcatcaagtacagcaccctgctggagagcgagaagaacaccttcatggagatctggaagaagagatgggacaagttcatcgccgacgtggccaccaagtag

SEQ ID NO: 4751 - DNA, 1137 bp, synthetic construct; identical to SEQ ID NO: 4499
  misc_feature 1..1137: note = source = /note="Description of Artificial Sequence: Synthetic coding sequence"
  source 1..1137: mol_type = other DNA

SEQ ID NO: 4752 - DNA, 678 bp, synthetic construct; identical to SEQ ID NO: 4468
  misc_feature 1..678: note = source = /note="Description of Artificial Sequence: Synthetic coding sequence"
  source 1..678: mol_type = other DNA

SEQ ID NO: 4753 - DNA, 846 bp, synthetic construct; identical to SEQ ID NO: 3902
  misc_feature 1..846: note = source = /note="Description of Artificial Sequence: Synthetic coding sequence"
  source 1..846: mol_type = other DNA

SEQ ID NO: 4754 - DNA, 1110 bp, synthetic construct
  misc_feature 1..1110: note = source = /note="Description of Artificial Sequence: Synthetic coding sequence"
  source 1..1110: mol_type = other DNA
atgaagttccagggccccctggcctgcctgctgctggccctgtgcctgggcagcggcgaggccggccccctgcagagcggcgaggagagcaccggcaccaacatcggcgaggccctgggccacggcctgggcgacgccctgagcgagggcgtgggcaaggccatcggcaaggaggccggcggcgccgccggcagcaaggtgagcgaggccctgggccagggcaccagagaggccgtgggcaccggcgtgagacaggtgcccggcttcggcgtggccgacgccctgggcaacagagtgggcgaggccgcccacgccctgggcaacaccggccacgagatcggcagacaggccgaggacgtgatcagacacggcgccgacgccgtgagaggcagctggcagggcgtgcccggccacaacggcgcctgggagaccagcggcggccacggcatcttcggcagccagggcggcctgggcggccagggccagggcaaccccggcggcctgggcaccccctgggtgcacggctaccccggcaacagcgccggcagcttcggcatgaacccccagggcgccccctggggccagggcggcaacggcggcccccccaacttcggcaccaacacccagggcgccgtggcccagcccggctacggcagcgtgagagccagcaaccagaacgagggctgcaccaaccccccccccagcggcagcggcggcggcagcagcaacagcggcggcggcagcggcagccagagcggcagcagcggcagcggcagcaacggcgacaacaacaacggcagcagcagcggcggcagcagcagcggcagcagcagcggcggcagcagcggcggcagcagcggcggcagcagcggcaacagcggcggcagcagaggcgacagcggcagcgagagcagctggggcagcagcaccggcagcagcagcggcaaccacggcggcagcggcggcggcaacggccacaagcccggcaacagcgagaccagccccggcatgttcaacttcgacaccttctggaagaacttcaagagcaagctgggcttcatcaactgggacgccatcaacaaggaccagagaagcagcagaatcccctag

SEQ ID NO: 4755 - DNA, 420 bp, synthetic construct; identical to SEQ ID NO: 4488
  misc_feature 1..420: note = source = /note="Description of Artificial Sequence: Synthetic coding sequence"
  source 1..420: mol_type = other DNA

SEQ ID NO: 4756 - DNA, 516 bp, synthetic construct
  misc_feature 1..516: note = source = /note="Description of Artificial Sequence: Synthetic coding sequence"
  source 1..516: mol_type = other DNA
atgagacacaacctgggcggcaacctgggcgaccccagagccagagccgtgagcgtgcccctgggcggcagagtggccagattcctgcagtgcagattcctgttcgccggcccctggctgctgttcagcgagatcagcttcatcagcgacgtggtgaacaacagcagccccgccctgggcggcaccttcccccccgccccctggtggccccccggccccccccccaccaacttcagcagcctggagctggagcccagaggccagcagcccgtggccaaggccgagggcagccccaccgccatcctgatcggctgcctggtggccatcatcctgctgctgctgctgatcatcgccctgatgctgtggagactgcactggagaagactgctgagcaaggtgctggagagccaccccagaaccagaagccccggcctggtgggcatcagacccacccccctgcccgtgagccccatggccctggtgcacctgtgcgaggtggacagcccccaggactag

SEQ ID NO: 4757 - DNA, 192 bp, synthetic construct; identical to SEQ ID NO: 4605
  misc_feature 1..192: note = source = /note="Description of Artificial Sequence: Synthetic coding sequence"
  source 1..192: mol_type = other DNA

SEQ ID NO: 4758 - DNA, 1137 bp, synthetic construct; identical to SEQ ID NO: 4499
  misc_feature 1..1137: note = source = /note="Description of Artificial Sequence: Synthetic coding sequence"
  source 1..1137: mol_type = other DNA

SEQ ID NO: 4759 - DNA, 2535 bp, synthetic construct; identical to SEQ ID NO: 3960
  misc_feature 1..2535: note = source = /note="Description of Artificial Sequence: Synthetic coding sequence"
  source 1..2535: mol_type = other DNA

SEQ ID NO: 4760 - DNA, 339 bp, synthetic construct
  misc_feature 1..339: note = source = /note="Description of Artificial Sequence: Synthetic coding sequence"
  source 1..339: mol_type = other DNA
atgctgaccgccgccctggcccccggcgccgccaacagccccaccaccaaccccgtgatcctgatcgtggacaaggtgctggagacccaggacctgaacggcgacggcctgatgacccccgccgagctgatcaacttccccggcgtggccctgagaccctaccccccctacatcggcgtgggccccaacagcaacatgtgcagcagaagcgacctgcccgaggacagcaacaccctgtaccccggcagccacctgtggctgagacacgccctgaacagcaagggcaacctggacgccagactggacggcggcgagaaggccatgcagccccagtggtag

SEQ ID NO: 4761 - DNA, 2676 bp, synthetic construct; identical to SEQ ID NO: 4153
  misc_feature 1..2676: note = source = /note="Description of Artificial Sequence: Synthetic coding sequence"
  source 1..2676: mol_type = other DNA

SEQ ID NO: 4762 - DNA, 2742 bp, synthetic construct; identical to SEQ ID NO: 3799
  misc_feature 1..2742: note = source = /note="Description of Artificial Sequence: Synthetic coding sequence"
  source 1..2742: mol_type = other DNA

SEQ ID NO: 4763 - DNA, 390 bp, synthetic construct; identical to SEQ ID NO: 4161
  misc_feature 1..390: note = source = /note="Description of Artificial Sequence: Synthetic coding sequence"
  source 1..390: mol_type = other DNA

SEQ ID NO: 4764 - DNA, 846 bp, synthetic construct; identical to SEQ ID NO: 3902
  misc_feature 1..846: note = source = /note="Description of Artificial Sequence: Synthetic coding sequence"
  source 1..846: mol_type = other DNA

SEQ ID NO: 4765 - DNA, 444 bp, synthetic construct; identical to SEQ ID NO: 4359
  misc_feature 1..444: note = source = /note="Description of Artificial Sequence: Synthetic coding sequence"
  source 1..444: mol_type = other DNA

SEQ ID NO: 4766 - DNA, 2631 bp, synthetic construct; identical to SEQ ID NO: 3583
  misc_feature 1..2631: note = source = /note="Description of Artificial Sequence: Synthetic coding sequence"
  source 1..2631: mol_type = other DNA

SEQ ID NO: 4767 - DNA, 1749 bp, synthetic construct
  misc_feature 1..1749: note = source = /note="Description of Artificial Sequence: Synthetic coding sequence"
  source 1..1749: mol_type = other DNA
atggacttcctgctggccctggtgctggtgagcagcctgtacctgcaggccgccgccgagttcgacggcagatggcccagacagatcgtgagcagcatcggcctgtgcagatacggcggcagaatcgactgctgctggggctgggccagacagagctggggccagtgccagcccttctacgtgctgagacagagaatcgccagaatcagatgccagctgaaggccgtgtgccagcccagatgcaagcacggcgagtgcatcggccccaacaagtgcaagtgccaccccggctacgccggcaagacctgcaaccaggacctgaacgagtgcggcctgaagcccagaccctgcaagcacagatgcatgaacacctacggcagctacaagtgctactgcctgaacggctacatgctgatgcccgacggcagctgcagcagcgccctgacctgcagcatggccaactgccagtacggctgcgacgtggtgaagggccagatcagatgccagtgccccagccccggcctgcagctggcccccgacggcagaacctgcgtggacgtggacgagtgcgccaccggcagagccagctgccccagattcagacagtgcgtgaacaccttcggcagctacatctgcaagtgccacaagggcttcgacctgatgtacatcggcggcaagtaccagtgccacgacatcgacgagtgcagcctgggccagtaccagtgcagcagcttcgccagatgctacaacatcagaggcagctacaagtgcaagtgcaaggagggctaccagggcgacggcctgacctgcgtgtacatccccaaggtgatgatcgagcccagcggccccatccacgtgcccaagggcaacggcaccatcctgaagggcgacaccggcaacaacaactggatccccgacgtgggcagcacctggtggccccccaagaccccctacatcccccccatcatcaccaacagacccaccagcaagcccaccaccagacccacccccaagcccacccccatccccaccccccccccccccccccccctgcccaccgagctgagaacccccctgccccccaccacccccgagagacccaccaccggcctgaccaccatcgcccccgccgccagcaccccccccggcggcatcaccgtggacaacagagtgcagaccgacccccagaagcccagaggcgacgtgttcatccccagacagcccagcaacgacctgttcgagatcttcgagatcgagagaggcgtgagcgccgacgacgaggccaaggacgaccccggcgtgctggtgcacagctgcaacttcgaccacggcctgtgcggctggatcagagagaaggacaacgacctgcactgggagcccatcagagaccccgccggcggccagtacctgaccgtgagcgccgccaaggcccccggcggcaaggccgccagactggtgctgcccctgggcagactgatgcacagcggcgacctgtgcctgagcttcagacacaaggtgaccggcctgcacagcggcaccctgcaggtgttcgtgagaaagcacggcgcccacggcgccgccctgtggggcagaaacggcggccacggctggagacagacccagatcaccctgagaggcgccgacatcaagagcgtggtgttcaagggcgagaagagaagaggccacaccggcgagatcggcctggacgacgtgagcctgaagaagggccactgcagcgaggagagatag

SEQ ID NO: 4768 - DNA, 1602 bp, synthetic construct
  misc_feature 1..1602: note = source = /note="Description of Artificial Sequence: Synthetic coding sequence"
  source 1..1602: mol_type = other DNA
atgggcagcagcagactggccgccctgctgctgcccctgctgctgatcgtgatcgacctgagcgacagcgccggcatcggcttcagacacctgccccactggaacaccagatgccccctggccagccacaccgacgacagcttcaccggcagcagcgcctacatcccctgcagaacctggtgggccctgttcagcaccaagccctggtgcgtgagagtgtggcactgcagcagatgcctgtgccagcacctgctgagcggcggcagcggcctgcagagaggcctgttccacctgctggtgcagaagagcaagaagagcagcaccttcaagttctacagaagacacaagatgcccgcccccgcccagagaaagctgctgcccagaagacacctgagcgagaagagccaccacatcagcatccccagccccgacatcagccacaagggcctgagaagcaagagaacccagcccagcgaccccgagacctgggagagcctgcccagactggacagccagagacacggcggccccgagttcagcttcgacctgctgcccgaggccagagccatcagagtgaccatcagcagcggccccgaggtgagcgtgagactgtgccaccagtgggccctggagtgcgaggagctgagcagcccctacgacgtgcagaagatcgtgagcggcggccacaccgtggagctgccctacgagttcctgctgccctgcctgtgcatcgaggccagctacctgcaggaggacaccgtgagaagaaagaagtgccccttccagagctggcccgaggcctacggcagcgacttctggaagagcgtgcacttcaccgactacagccagcacacccagatggtgatggccctgaccctgagatgccccctgaagctggaggccgccctgtgccagagacacgactggcacaccctgtgcaaggacctgcccaacgccaccgccagagagagcgacggctggtacgtgctggagaaggtggacctgcacccccagctgtgcttcaagttcagcttcggcaacagcagccacgtggagtgcccccaccagaccggcagcctgaccagctggaacgtgagcatggacacccaggcccagcagctgatcctgcacttcagcagcagaatgcacgccaccttcagcgccgcctggagcctgcccggcctgggccaggacaccctggtgccccccgtgtacaccgtgagccaggccagaggcagcagccccgtgagcctggacctgatcatccccttcctgagacccggctgctgcgtgctgctgcacgccagcctgagcagccccggcggcgaggacgcctggctgatcggcgtgggcggcagcgtgcccagcggcgtggccgtgagatgccccgtgtgcctggaggcccccctggtgagcggctgcctgctgcagacccccggcgccctggaccccggcaccgccggccccccccaccccaccggctgctgcagcggcccccacctgcccgcccccaccgtgagacccggccccagcgccgccagcgccccccccgccagaggcggcctgggcggcgccgccgcccccggcggcagcgccggctag

SEQ ID NO: 4769 - DNA, 1293 bp, synthetic construct
  misc_feature 1..1293: note = source = /note="Description of Artificial Sequence: Synthetic coding sequence"
  source 1..1293: mol_type = other DNA
atgggcgtgagcaagctggacatcctgtacagaagactgctgctgaccaagctgttcatcagaggctggggcagacccgaggacctgaagagactgttcgagttcagaaagatgatcggcaacagagagagatgccagaacctggtgagcagcgactaccccgtgcacatcgacaagatcgaggagcagagcgactgcaagatcctggacggccacttcgtgagccccatggcccactacgtgcccgacatcatgcccatcgagagcgtgatcgccagattccagttcatcgtgcccaaggagtggaacagcaagtacagacccgtgtgcatccacctggccggcaccggcgaccaccactactggagaagaagaaccctgatggccagacccatgatcaaggaggccagaatggccagcctgctgctggagaacccctactacggctgcagaaagcccaaggaccaggtgagaagcagcctgaagaacgtgagcgacctgttcgtgatgggcggcgccctggtgctggagagcgccgccctgctgcactggctggagagagagggctacggccccctgggcatgaccggcatcagcatgggcggccacatggccagcctggccgtgagcaactggcccaagcccatgcccctgatcccctgcctgagctggagcaccgccagcggcgtgttcaccaccaccgacagcttcaagatgggccaggagttcgtgaagcacttcaccagcagcgccgacaagctgaccaacctgaacctggtgagcagaaccctgaacctggacatcagcaaccaggtggtgagccagaagcccgccgactgccacaacagcagcaagaccagcgtgagcgccaccagcgagggcctgctgctgcaggacaccagcaagatgaagagattcaaccagaccctgagcaccaacaagagcggctacaccagcagaaacccccagagctaccacctgctgagcaaggagcagagcagaaacagcctgagaaaggagagcctgatcttcatgaagggcgtgatggacgagtgcacccacgtggccaacttcagcgtgcccgtggaccccagcctgatcatcgtggtgcaggccaaggaggacgcctacatccccagaaccggcgtgagaagcctgcaggagatctggcccggctgcgagatcagatacctggagggcggccacatcagcgcctacctgttcaagcagggcctgttcagacaggccatctacgacgccttcgacagattcctgcacaagtacgccaactag

SEQ ID NO: 4770 - DNA, 2631 bp, synthetic construct; identical to SEQ ID NO: 3583
  misc_feature 1..2631: note = source = /note="Description of Artificial Sequence: Synthetic coding sequence"
  source 1..2631: mol_type = other DNA

SEQ ID NO: 4771 - DNA, 237 bp, synthetic construct; identical to SEQ ID NO: 3991
  misc_feature 1..237: note = source = /note="Description of Artificial Sequence: Synthetic coding sequence"
  source 1..237: mol_type = other DNA

SEQ ID NO: 4772 - DNA, 2631 bp, synthetic construct; identical to SEQ ID NO: 3583
  misc_feature 1..2631: note = source = /note="Description of Artificial Sequence: Synthetic coding sequence"
  source 1..2631: mol_type = other DNA

SEQ ID NO: 4773 - DNA, 1257 bp, synthetic construct; identical to SEQ ID NO: 3870
  misc_feature 1..1257: note = source = /note="Description of Artificial Sequence: Synthetic coding sequence"
  source 1..1257: mol_type = other DNA

SEQ ID NO: 4774 - DNA, 390 bp, synthetic construct
  misc_feature 1..390: note = source = /note="Description of Artificial Sequence: Synthetic coding sequence"
  source 1..390: mol_type = other DNA
atgagaaagcccagaagaaagagcagacagaacgccgagggcagaagaagccccagcccctacagcctgaagtgcagccccaccagagagaccctgacctacgcccaggcccagagaatcgtggaggtggacatcgacggcagactgcacagaatcagcatctacgaccccctgaagatcatcaccgaggacgagctgaccgcccaggacatcaccgagtgcaacagcaacaaggagaacagcgagcagccccagttccccggcaagagcaagaagcccagcagcaagggcaagaagaaggagagctgcagcaagcacgccagcggcaccagcttccacctgccccagcccagcttcagaatggtggacagcggcatccagcccgagtag

SEQ ID NO: 4775 - DNA, 315 bp, synthetic construct
  misc_feature 1..315: note = source = /note="Description of Artificial Sequence: Synthetic coding sequence"
  source 1..315: mol_type = other DNA
atgagagtggtgaccatcgtgatcctgctgtgcttctgcaaggccgccgagctgagaaaggccagccccggcagcgtgagaagcagagtgaaccacggcagagccggcggcggcagaagaggcagcaaccccgtgaagagatacgcccccggcctgccctgcgacgtgtacacctacctgcacgagaagtacctggactgccaggagagaaagctggtgtacgtgctgcccggctggccccaggacctgctgcacatgctgctggccagaaacaagatcagaaccctgaagaacaacatgttcagcaagttctag

SEQ ID NO: 4776 - DNA, 639 bp, synthetic construct; identical to SEQ ID NO: 4651
  misc_feature 1..639: note = source = /note="Description of Artificial Sequence: Synthetic coding sequence"
  source 1..639: mol_type = other DNA

SEQ ID NO: 4777 - DNA, 1005 bp, synthetic construct
  misc_feature 1..1005: note = source = /note="Description of Artificial Sequence: Synthetic coding sequence"
  source 1..1005: mol_type = other DNA
atgctggccctggccaagatcctgctgatcagcaccctgttctacagcctgctgagcggcagccacggcaaggagaaccaggacatcaacaccacccagaacatcgccgaggtgttcaagaccatggagaacaagcccatcagcctggagagcgaggccaacctgaacagcgacaaggagaacatcaccaccagcaacctgaaggccagccacagcccccccctgaacctgcccaacaacagccacggcatcaccgacttcagcagcaacagcagcgccgagcacagcctgggcagcctgaagcccaccagcaccatcagcaccagcccccccctgatccacagcttcgtgagcaaggtgccctggaacgcccccatcgccgacgaggacctgctgcccatcagcgcccaccccaacgccacccccgccctgagcagcgagaacttcacctggagcctggtgaacgacaccgtgaagacccccgacaacagcagcatcaccgtgagcatcctgagcagcgagcccaccagccccagcgtgacccccctgatcgtggagcccagcggctggctgaccaccaacagcgacagcttcaccggcttcaccccctaccaggagaagaccaccctgcagcccaccctgaagttcaccaacaacagcaagctgttccccaacaccagcgacccccagaaggagaacagaaacaccggcatcgtgttcggcgccatcctgggcgccatcctgggcgtgagcctgctgaccctggtgggctacctgctgtgcggcaagagaaagaccgacagcttcagccacagaagactgtacgacgacagaaacgagcccgtgctgagactggacaacgcccccgagccctacgacgtgagcttcggcaacagcagctactacaaccccaccctgaacgacagcgccatgcccgagagcgaggagaacgccagagacggcatccccatggacgacatcccccccctgagaaccagcgtgtag

SEQ ID NO: 4778 - DNA, 987 bp, synthetic construct
  misc_feature 1..987: note = source = /note="Description of Artificial Sequence: Synthetic coding sequence"
  source 1..987: mol_type = other DNA
atgggccccgccggctgcgccttcaccctgctgctgctgctgggcatcagcgtgtgcggccagcccgtgtacagcagcagagtggtgggcggccaggacgccgccgccggcagatggccctggcaggtgagcctgcacttcgaccacaacttcatctgcggcggcagcctggtgagcgagagactgatcctgaccgccgcccactgcatccagcccacctggaccaccttcagctacaccgtgtggctgggcagcatcaccgtgggcgacagcagaaagagagtgaagtactacgtgagcaagatcgtgatccaccccaagtaccaggacaccaccgccgacgtggccctgctgaagctgagcagccaggtgaccttcaccagcgccatcctgcccatctgcctgcccagcgtgaccaagcagctggccatcccccccttctgctgggtgaccggctggggcaaggtgaaggagagcagcgacagagactaccacagcgccctgcaggaggccgaggtgcccatcatcgacagacaggcctgcgagcagctgtacaaccccatcggcatcttcctgcccgccctggagcccgtgatcaaggaggacaagatctgcgccggcgacacccagaacatgaaggacagctgcaagggcgacagcggcggccccctgagctgccacatcgacggcgtgtggatccagaccggcgtggtgagctggggcctggagtgcggcaagagcctgcccggcgtgtacaccaacgtgatctactaccagaagtggatcaacgccaccatcagcagagccaacaacctggacttcagcgacttcctgttccccatcgtgctgctgagcctggccctgctgagacccagctgcgccttcggccccaacaccatccacagagtgggcaccgtggccgaggccgtggcctgcatccagggctgggaggagaacgcctggagattcagccccagaggcagatag

SEQ ID NO: 4779 - DNA, 453 bp, synthetic construct; identical to SEQ ID NO: 3797
  misc_feature 1..453: note = source = /note="Description of Artificial Sequence: Synthetic coding sequence"
  source 1..453: mol_type = other DNA

SEQ ID NO: 4780 - DNA, 234 bp, synthetic construct
  misc_feature 1..234: note = source = /note="Description of Artificial Sequence: Synthetic coding sequence"
  source 1..234: mol_type = other DNA
atgagagtggccggcgccgccaagctggtggtggccgtggccgtgttcctgctgaccttctacgtgatcagccaggtgttcgagatcaagatggacgccagcctgggcaacctgttcgccagaagcgccctggacaccgccgccagaagcaccaagccccccagatacaagtgcggcatcagcaaggcctgccccgagaagcacttcgccttcaagatggccagcggcgcctag

SEQ ID NO: 4781 - DNA, 1143 bp, synthetic construct; identical to SEQ ID NO: 4084
  misc_feature 1..1143: note = source = /note="Description of Artificial Sequence: Synthetic coding sequence"
  source 1..1143: mol_type = other DNA

SEQ ID NO: 4782 - DNA, 558 bp, synthetic construct
  misc_feature 1..558: note = source = /note="Description of Artificial Sequence: Synthetic coding sequence"
  source 1..558: mol_type = other DNA
atgcccggctggctgaccctgcccaccctgtgcagattcctgctgtgggccttcaccatcttccacaaggcccagggcgaccccgccagccaccccggcccccactacctgctgccccccatccacgaggtgatccacagccacagaggcgccaccgccaccctgccctgcgtgctgggcaccaccccccccagctacaaggtgagatggagcaaggtggagcccggcgagctgagagagaccctgatcctgatcaccaacggcctgcacgccagaggctacggccccctgggcggcagagccagaatgagaagaggccacagactggacgccagcctggtgatcgccggcgtgagactggaggacgagggcagatacagatgcgagctgatcaacggcatcgaggacgagagcgtggccctgaccctgagcctggagggcgtggtgttcccctaccagcccagcagaggcagataccagttcaactactacgaggccaagcaggcctgcgaggagcaggacggcagactggccacctacagccagctgtaccagtag

SEQ ID NO: 4783 - DNA, 375 bp, synthetic construct
  misc_feature 1..375: note = source = /note="Description of Artificial Sequence: Synthetic coding sequence"
  source 1..375: mol_type = other DNA
atgctgatgctgttcgtgttcggcgtgctgctgcacgaggtgagcctgagcggccagaacgaggccccccccaacacccacagcatccccggcgagcccctgtacaactacgccagcatcagactgcccgaggagcacatccccttcttcctgcacaacaacagacacatcgccaccgtgtgcagaaaggacagcctgtgcccctacaagaagcacctggagaagctgaagtactgctggggctacgagaagagctgcaagcccgagttcagattcggctaccccgtgtgcagctacgtggacatgggctggaccgacaccctggagagcgccgaggacatcttctggaagcaggccgacttcggctacgcctag

SEQ ID NO: 4784 - DNA, 5859 bp, synthetic construct; identical to SEQ ID NO: 3982
  misc_feature 1..5859: note = source = /note="Description of Artificial Sequence: Synthetic coding sequence"
  source 1..5859: mol_type = other DNA

SEQ ID NO: 4785 - DNA, 612 bp, synthetic construct
  misc_feature 1..612: note = source = /note="Description of Artificial Sequence: Synthetic coding sequence"
  source 1..612: mol_type = other DNA
atgagaaccgtggtgctgaccatgaaggccagcgtgatcgagatgttcctggtgctgctggtgaccggcgtgcacagcaacaaggagaccgccaagaagatcaagagacccaagttcaccgtgccccagatcaactgcgacgtgaaggccggcaagatcatcgaccccgagttcatcgtgaagtgccccgccggctgccaggaccccaagtaccacgtgtacggcaccgacgtgtacgccagctacagcagcgtgtgcggcgccgccgtgcacagcggcgtgctggacaacagcggcggcaagatcctggtgagaaaggtggccggccagagcggctacaagggcagctacagcaacggcgtgcagagcctgagcctgcccagatggagagagagcttcatcgtgctggagagcaagcccaagaagggcgtgacctaccccagcgccctgacctacagcagcagcaagagccccgccgcccaggccggcaagtgcagcagagtgatcgagagcaagcccagcgagagcatgaacaccagaagagtgctgggcgacagcggcgagatcaacatcctgaccggccaggcccccctggccctggccatcttctag

SEQ ID NO: 4786 - DNA, 2511 bp, synthetic construct
  misc_feature 1..2511: note = source = /note="Description of Artificial Sequence: Synthetic coding sequence"
  source 1..2511: mol_type = other DNA
atggagacccaggagctgagaggcgccctggccctgctgctgctgtgcttcttcaccagcgccagccaggacctgcaggtgatcgacctgctgaccgtgggcgagagcagacagatggtggccgtggccgagaagatcagaaccgccctgctgaccgccggcgacatctacctgctgagcaccttcagactgccccccaagcagggcggcgtgctgttcggcctgtacagcagacaggacaacaccagatggctggaggccagcgtggtgggcaagatcaacaaggtgaccaacgccctgcacagcatcctgggcgagcagaccaaggccctggtgacccagctgaccctgttcaaccagatcctggtggagctgagagacgacatcagagaccaggtgaaggagatgagcctgatcagaaacaccatcatggagtgccaggtgtgcggcttccacgagcagagaagccactgcagccccaacccctgcttcagaggcgtggactgcatggaggtgtacgagtaccccggctacagatgcggcccctgcccccccggcctgcagggcaacggcacccactgcagcgacatcaacgagtgcgcccacgccgacccctgcttccccggcagcagctgcatcaacaccatgcccggcttccactgcgaggcctgccccagaggctacaagggcacccaggtgagcggcgtgggcatcgactacgccagagccagcaagcaggtgtgcaacgacatcgacgagtgcaacgacggcaacaacggcggctgcgaccccaacagcatctgcaccaacaccgtgggcagcttcaagtgcggcccctgcagactgggcttcctgggcaaccagagccagggctgcctgcccgccagaacctgccacagccccgcccacagcccctgccacatccacgcccactgcctgttcgagagaaacggcgccgtgagctgccagtgcaacgtgggctgggccggcaacggcaacgtgtgcggcaccgacaccgacatcgacggctaccccgaccaggccctgccctgcatggacaacaacaagcactgcaagcaggacaactgcctgctgacccccaacagcggccaggaggacgccgacaacgacggcgtgggcgaccagtgcgacgacgacgccgacggcgacggcatcaagaacgtggaggacaactgcagactgttccccaacaaggaccagcagaacagcgacaccgacagcttcggcgacgcctgcgacaactgccccaacgtgcccaacaacgaccagaaggacaccgacggcaacggcgagggcgacgcctgcgacaacgacgtggacggcgacggcatccccaacggcctggacaactgccccaaggtgcccaaccccctgcagaccgacagagacgaggacggcgtgggcgacgcctgcgacagctgccccgagatgagcaaccccacccagaccgacgccgacagcgacctggtgggcgacgtgtgcgacaccaacgaggacagcgacggcgacggccaccaggacaccaaggacaactgcccccagctgcccaacagcagccagctggacagcgacaacgacggcctgggcgacgagtgcgacggcgacgacgacaacgacggcatccccgactacgtgccccccggccccgacaactgcagactggtgcccaaccccaaccagaaggacagcgacggcaacggcgtgggcgacgtgtgcgaggacgacttcgacaacgacgccgtggtggaccccctggacgtgtgccccgagagcgccgaggtgaccctgaccgacttcagagcctaccagaccgtggtgctggaccccgagggcgacgcccagatcgaccccaactgggtggtgctgaaccagggcatggagatcgtgcagaccatgaacagcgaccccggcctggccgtgggctacaccgccttcaacggcgtggacttcgagggcaccttccacgtgaacaccgtgaccgacgacgactacgccggcttcctgttcagctaccaggacagcggcagattctacgtggtgatgtggaagcagaccgagcagacctactggcaggccacccccttcagagccgtggcccagcccggcctgcagctgaaggccgtgaccagcgtgagcggccccggcgagcacctgagaaacgccctgtggcacaccggccacacccccgaccaggtgagactgctgtggaccgaccccagaaacgtgggctggagagacaagaccagctacagatggcagctgctgcacagaccccaggtgggctacatcagagtgaagctgtacgagggcccccagctggtggccgacagcggcgtgatcatcgacaccagcatgagaggcggcagactgggcgtgttctgcttcagccaggagaacatcatctggagcaacctgcagtacagatgcaacgacaccgtgcccgaggacttcgagcccttcagaagacagctgctgcagggcagagtgtag

SEQ ID NO: 4787 - DNA, 1311 bp, synthetic construct
  misc_feature 1..1311: note = source = /note="Description of Artificial Sequence: Synthetic coding sequence"
  source 1..1311: mol_type = other DNA
atgtggagatgccccctgggcctgctgctgctgctgcccctggccggccacctggccctgggcgcccagcagggcagaggcagaagagagctggcccccggcctgcacctgagaggcatcagagacgccggcggcagatactgccaggagcaggacctgtgctgcagaggcagagccgacgactgcgccctgccctacctgggcgccatctgctactgcgacctgttctgcaacagaaccgtgagcgactgctgccccgacttctgggacttctgcctgggcgtgcccccccccttcccccccatccagggctgcatgcacggcggcagaatctaccccgtgctgggcacctactgggacaactgcaacagatgctggcaggccggcaaccacagcgccttctggggcatgaccctggacgagggcatcagatacagactgggcaccatcagacccagcagcagcgtgatgaacatgcacgagatctacaccgtgctgaaccccggcgaggtgctgcccaccgccttcgaggccagcgagaagtggcccaacctgatccacgagcccctggaccagggcaactgcgccggcagctgggccttcagcaccgccgccgtggccagcgacagagtgagcatccacagcctgggccacatgacccccgtgctgagcccccagaacctgctgagctgcgacacccaccagcagcagggctgcagaggcggcagactggacggcgcctggtggttcctgagaagaagaggcgtggtgagcgaccactgctaccccttcagcggcagagagagagacgaggccggccccgcccccccctgcatgatgcacagcagagccatgggcagaggcaagagacaggccaccgcccactgccccaacagctacgtgaacaacaacgacatctaccaggtgacccccgtgtacagactgggcagcaacgacaaggagatcatgaaggagctgatggagaacggccccgtgcaggccctgatggaggtgcacgaggacttcttcctgtacaagggcggcatctacagccacacccccgtgagcctgggcagacccgagagatacagaagacacggcacccacagcgtgaagatcaccggctggggcgaggagaccctgcccgacggcagaaccctgaagtactggaccgccgccaacagctggggccccgcctggggcgagagaggccacttcagaatcgtgagaggcgtgaacgagtgcgacatcgagagcttcgtgctgggcgtgtggggcagagtgggcatggaggacatgggccaccactag

SEQ ID NO: 4788 - DNA, 942 bp, synthetic construct; identical to SEQ ID NO: 3906
  misc_feature 1..942: note = source = /note="Description of Artificial Sequence: Synthetic coding sequence"
  source 1..942: mol_type = other DNA

SEQ ID NO: 4789 - DNA, 213 bp, synthetic construct
  misc_feature 1..213: note = source = /note="Description of Artificial Sequence: Synthetic coding sequence"
  source 1..213: mol_type = other DNA
atggtggcccccgccgccagagtgttcctgagagccgtgagagccgccctgaccagcaccgtgcccgacctgctgtgcctgctggccagaggcagccccagaggcctggccagcggcagactgcccctggccgtgcacagcgcccagcacggccccggcagcggcgccccctggctgagaatcgccagaagagccctgagccagagaatctag

SEQ ID NO: 4790 - DNA, 642 bp, synthetic construct
  misc_feature 1..642: note = source = /note="Description of Artificial Sequence: Synthetic coding sequence"
  source 1..642: mol_type = other DNA
atggcccagctgttcctgcccctgctggccgccctggtgctggcccaggcccccgccgccctggccgacgtgctggagggcgacagcagcgaggacagagccttcagagtgagaatcgccggcgacgcccccctgcagggcgtgctgggcggcgccctgaccatcccctgccacgtgcactacctgagacccccccccagcagaagagccgtgctgggcagccccagagtgaagtggaccttcctgagcagaggcagagaggccgaggtgctggtggccagaggcgtgagagtgaaggtgaacgaggcctacagattcagagtggccctgcccgcctaccccgccagcctgaccgacgtgagcctggccctgagcgagctgagacccaacgacagcggcatctacagatgcgaggtgcagcacggcatcgacgacagcagcgacgccgtggaggtgaaggtgaagggcgtggtgttcctgtacagagagggcagcgccagatacgccttcagcttcagcggcgcccaggaggcctgcgccagaatcggcgcccacatcgccacccccgagcagctgtacgccgcctacctgggcggctacgagcagtgcgacgccggctggctgagcgaccagaccgtgtag

SEQ ID NO: 4791 - DNA, 237 bp, synthetic construct; identical to SEQ ID NO: 3991
  misc_feature 1..237: note = source = /note="Description of Artificial Sequence: Synthetic coding sequence"
  source 1..237: mol_type = other DNA

SEQ ID NO: 4792 - DNA, 651 bp, synthetic construct
  misc_feature 1..651: note = source = /note="Description of Artificial Sequence: Synthetic coding sequence"
  source 1..651: mol_type = other DNA
atgagcgacctgctgctgctgggcctgatcggcggcctgaccctgctgctgctgctgaccctgctggccttcgccggctacagcggcctgctggccggcgtggaggtgagcgccggcagcccccccatcagaaacgtgaccgtggcctacaagttccacatgggcctgtacggcgagaccggcagactgttcaccgagagctgcagcatcagccccaagctgagaagcatcgccgtgtactacgacaacccccacatggtgccccccgacaagtgcagatgcgccgtgggcagcatcctgagcgagggcgaggagagccccagccccgagctgatcgacctgtaccagaagttcggcttcaaggtgttcagcttccccgcccccagccacgtggtgaccgccaccttcccctacaccaccatcctgagcatctggctggccaccagaagagtgcaccccgccctggacacctacatcaaggagagaaagctgtgcgcctaccccagactggagatctaccaggaggaccagatccacttcatgtgccccctggccagacagggcgacttctacgtgcccgagatgaaggagaccgagtggaagtggagaggcctggtggaggccatcgacacccaggtggacggcacctag

SEQ ID NO: 4793 - DNA, 453 bp, synthetic construct; identical to SEQ ID NO: 3797
  misc_feature 1..453: note = source = /note="Description of Artificial Sequence: Synthetic coding sequence"
  source 1..453: mol_type = other DNA

SEQ ID NO: 4794 - DNA, 171 bp, synthetic construct
  misc_feature 1..171: note = source = /note="Description of Artificial Sequence: Synthetic coding sequence"
  source 1..171: mol_type = other DNA
atgaagaccggcctgttcttcctgtgcctgctgggcaccgccgccgccatccccaccaacgccagactgctgagcgaccacagcaagcccaccgccgagaccgtggcccccgacaacaccgccatccccagcctgagagccgaggccgaggagaacgagaaggagacctag

SEQ ID NO: 4795 - DNA, 2346 bp, synthetic construct
  misc_feature 1..2346: note = source = /note="Description of Artificial Sequence: Synthetic coding sequence"
  source 1..2346: mol_type = other DNA
atggccgtggccgaggtgagcagaacctgcctgctgaccgtgagagtgctgcaggcccacagactgcccagcaaggacctggtgacccccagcgactgctacgtgaccctgtggctgcccaccgcctgcagccacagactgcagaccagaaccgtgaagaacagcagcagccccgtgtggaaccagagcttccacttcagaatccacagacagctgaagaacgtgatggagctgaaggtgttcgaccaggacctggtgaccggcgacgaccccgtgctgagcgtgctgttcgacgccggcaccctgagagccggcgagttcagaagagagagcttcagcctgagcccccagggcgagggcagactggaggtggagttcagactgcagagcctggccgacagaggcgagtggctggtgagcaacggcgtgctggtggccagagagctgagctgcctgcacgtgcagctggaggagaccggcgaccagaagagcagcgagcacagagtgcagctggtggtgcccggcagctgcgagggcccccaggaggccagcgtgggcaccggcaccttcagattccactgccccgcctgctgggagcaggagctgagcatcagactgcaggacgcccccgaggagcagctgaaggcccccctgagcgccctgcccagcggccaggtggtgagactggtgttccccaccagccaggagcccctgatgagagtggagctgaagaaggaggccggcctgagagagctggccgtgagactgggcttcggcccctgcgccgaggagcaggccttcctgagcagaagaaagcaggtggtggccgccgccctgagacaggccctgcagctggacggcgacctgcaggaggacgagatccccgtggtggccatcatggccaccggcggcggcatcagagccatgaccagcctgtacggccagctggccggcctgaaggagctgggcctgctggactgcgtgagctacatcaccggcgccagcggcagcacctgggccctggccaacctgtacgaggaccccgagtggagccagaaggacctggccggccccaccgagctgctgaagacccaggtgaccaagaacaagctgggcgtgctggcccccagccagctgcagagatacagacaggagctggccgagagagccagactgggctaccccagctgcttcaccaacctgtgggccctgatcaacgaggccctgctgcacgacgagccccacgaccacaagctgagcgaccagagagaggccctgagccacggccagaaccccctgcccatctactgcgccctgaacaccaagggccagagcctgaccaccttcgagttcggcgagtggtgcgagttcagcccctacgaggtgggcttccccaagtacggcgccttcatccccagcgagctgttcggcagcgagttcttcatgggccagctgatgaagagactgcccgagagcagaatctgcttcctggagggcatctggagcaacctgtacgccgccaacctgcaggacagcctgtactgggccagcgagcccagccagttctgggacagatgggtgagaaaccaggccaacctggacaaggagcaggtgcccctgctgaagatcgaggagccccccagcaccgccggcagaatcgccgagttcttcaccgacctgctgacctggagacccctggcccaggccacccacaacttcctgagaggcctgcacttccacaaggactacttccagcacccccacttcagcacctggaaggccaccaccctggacggcctgcccaaccagctgacccccagcgagccccacctgtgcctgctggacgtgggctacctgatcaacaccagctgcctgcccctgctgcagcccaccagagacgtggacctgatcctgagcctggactacaacctgcacggcgccttccagcagctgcagctgctgggcagattctgccaggagcagggcatccccttcccccccatcagccccagccccgaggagcagctgcagcccagagagtgccacaccttcagcgaccccacctgccccggcgcccccgccgtgctgcacttccccctggtgagcgacagcttcagagagtacagcgcccccggcgtgagaagaacccccgaggaggccgccgccggcgaggtgaacctgagcagcagcgacagcccctaccactacaccaaggtgacctacagccaggaggacgtggacaagctgctgcacctgacccactacaacgtgtgcaacaaccaggagcagctgctggaggccctgagacaggccgtgcagagaagaagacagagaagaccccactag

SEQ ID NO: 4796 - DNA, 219 bp, synthetic construct
  misc_feature 1..219: note = source = /note="Description of Artificial Sequence: Synthetic coding sequence"
  source 1..219: mol_type = other DNA
atggccgccgccaccagaggctgcagaccctggggcagcctgctgggcctgctgggcctggtgagcgccgccgccgccgcctgggacctggccagcctgagatgcaccctgggcgccttctgcgagtgcgacttcagacccgacctgcccgagggcagcgaggagctgggccccagagagccccactgcctgtggcccctgcccctgcccctgagatag

SEQ ID NO: 4797 - DNA, 243 bp, synthetic construct
  misc_feature 1..243: note = source = /note="Description of Artificial Sequence: Synthetic coding sequence"
  source 1..243: mol_type = other DNA
atgaaggtgttcttcctgttcgccgtgctgttctgcctggtgcagaccaacagcggcgacgtgccccccggcatcagaaacaccatctgccacatgcagcagggcatctgcagactgttcttctgccacagcggcgagaagaagagagacatctgcagcgacccctggaacagatgctgcgtgagcaacaccgacgaggagggcaaggagaagcccgagatggacggcagaagcggcatctag

SEQ ID NO: 4798 - DNA, 861 bp, synthetic construct
  misc_feature 1..861: note = source = /note="Description of Artificial Sequence: Synthetic coding sequence"
  source 1..861: mol_type = other DNA
atgggccccgaggccctgagcagcctgctgctgctgctgctggtggccagcggcgacgccgacatgaagggccacttcgaccccgccaagtgcagatacgccctgggcatgcaggacagaaccatccccgacagcgacatcagcgccagcagcagctggagcgacagcaccgccgccagacacagcagactggagagcagcgacggcgacggcgcctggtgccccgccggcagcgtgttccccaaggaggaggagtacctgcaggtggacctgcagagactgcacctggtggccctggtgggcacccagggcagacacgccggcggcctgggcaaggagttcagcagaagctacagactgagatacagcagagacggcagaagatggatgggctggaaggacagatggggccaggaggtgatcagcggcaacgaggaccccgagggcgtggtgctgaaggacctgggcccccccatggtggccagactggtgagattctaccccagagccgacagagtgatgagcgtgtgcctgagagtggagctgtacggctgcctgtggagagacggcctgctgagctacaccgcccccgtgggccagaccatgtacctgagcgaggccgtgtacctgaacgacagcacctacgacggccacaccgtgggcggcctgcagtacggcggcctgggccagctggccgacggcgtggtgggcctggacgacttcagaaagagccaggagctgagagtgtggcccggctacgactacgtgggctggagcaaccacagcttcagcagcggctacgtggagatggagttcgagttcgacagactgagagccttccaggccatgcaggtgcactag

SEQ ID NO: 4799 - DNA, 858 bp, synthetic construct
  misc_feature 1..858: note = source = /note="Description of Artificial Sequence: Synthetic coding sequence"
  source 1..858: mol_type = other DNA
atgagaggccagggcagaaaggagagcctgagcgacagcagagacctggacggcagctacgaccagctgaccggccacccccccggccccaccaagaaggccctgaagcagagattcctgaagctgctgccctgctgcggcccccaggccctgcccagcgtgagcgagatcggcagagtgttcagattcctgggcgacagcagcctgcccagcgccctggccgcccccgccagcctgagaccccacagacccagactgctggaccccgacagcgtggacgacgagttcgagctgagcaccgtgtgccacagacccgagggcctggagcagctgcaggagcagaccaagttcaccagaaaggagctgcaggtgctgtacagaggcttcaagaacgagtgccccagcggcatcgtgaacgaggagaacttcaagcagatctacagccagttcttcccccagggcgacagcagcacctacgccaccttcctgttcaacgccttcgacaccaaccacgacggcagcgtgagcttcgaggacttcgtggccggcctgagcgtgatcctgagaggcaccgtggacgacagactgaactgggccttcaacctgtacgacctgaacaaggacggctgcatcaccaaggaggagatgctggacatcatgaagagcatctacgacatgatgggcaagtacacctaccccgccctgagagaggaggcccccagagagcacgtggagagcttcttccagaagatggacagaaacaaggacggcgtggtgaccatcgaggagttcatcgagagctgccagaaggacgagaacatcatgagaagcatgcagctgttcgacaacgtgatctag

SEQ ID NO: 4800 - DNA, 1311 bp, synthetic construct; identical to SEQ ID NO: 3956
  misc_feature 1..1311: note = source = /note="Description of Artificial Sequence: Synthetic coding sequence"
  source 1..1311: mol_type = other DNA

SEQ ID NO: 4801 - DNA, 1218 bp, synthetic construct; identical to SEQ ID NO: 3601
  misc_feature 1..1218: note = source = /note="Description of Artificial Sequence: Synthetic coding sequence"
  source 1..1218: mol_type = other DNA

SEQ ID NO: 4802 - DNA, 300 bp, synthetic construct
  misc_feature 1..300: note = source = /note="Description of Artificial Sequence: Synthetic coding sequence"
  source 1..300: mol_type = other DNA
atgctggccctgctggtgctggtgaccgtggccctggccagcgcccaccacggcggcgagcacttcgagggcgagaaggtgttcagagtgaacgtggaggacgagaaccacatcaacatcatcagagagctggccagcaccacccagatcgacttctggaagcccgacagcgtgacccagatcaagccccacagcaccgtggacttcagagtgaaggccgaggacaccgtgaccgtggagaacgtgctgaagcagaacgagctgcagtacaaggtgctgatcagcaacctgagaaactag

SEQ ID NO: 4803 - DNA, 471 bp, synthetic construct
  misc_feature 1..471: note = source = /note="Description of Artificial Sequence: Synthetic coding sequence"
  source 1..471: mol_type = other DNA
atgctgctgctgctgctgctggcccccctgttcctgagaccccccggcgccggcggcgcccagacccccaacgccaccagcgagggctgccagatcatccaccccccctgggagggcggcatcagatacagaggcctgaccagagaccaggtgaaggccatcaacttcctgcccgtggactacgagatcgagtacgtgtgcagaggcgagagagaggtggtgggccccaaggtgagaaagtgcctggccaacggcagctggaccgacatggacacccccagcagatgcgtgagaatctgcagcaagagctacctgaccctggagaacggcaaggtgttcctgaccggcggcgacctgcccgccctggacggcgccagagtggacttcagatgcgaccccgacttccacctggtgggcagcagcagaagcatctgcagccagggccagtggagcacccccaagccccactag

SEQ ID NO: 4804 - DNA, 249 bp, synthetic construct
  misc_feature 1..249: note = source = /note="Description of Artificial Sequence: Synthetic coding sequence"
  source 1..249: mol_type = other DNA
atgggcagagtgttcctgaccggcgagaaggccaacagcatcctgaagagataccccagagccaacggcttcttcgaggagatcagacagggcaacatcgagagagagtgcaaggaggagttctgcaccttcgaggaggccagagaggccttcgagaacaacgagaagaccggcctggtgctgctgcccagactggagtgcagctgcgagcacggcagcctgcagccccagctgcccgtgcccaagtag

SEQ ID NO: 4805 - DNA, 372 bp, synthetic construct
  misc_feature 1..372: note = source = /note="Description of Artificial Sequence: Synthetic coding sequence"
  source 1..372: mol_type = other DNA
atgcagggcacccccggcggcggcaccagacccggccccagccccgtggacagaagaaccctgctggtgttcagcttcatcctggccgccgccctgggccagatgaacttcaccggcgaccaggtgctgagagtgctggccaaggacgagaagcagctgagcctgctgggcgacctggagggcctgaagccccagaaggtggacttctggagaggccccgccagacccagcctgcccgtggacatgagagtgcccttcagcgagctgaaggacatcaaggcctacctggagagccacggcctggcctacagcatcatgatcaaggacatccaggtgctgctggacgaggagagacaggccatggccaagtag

SEQ ID NO: 4806 - DNA, 840 bp, synthetic construct
  misc_feature 1..840: note = source = /note="Description of Artificial Sequence: Synthetic coding sequence"
  source 1..840: mol_type = other DNA
atgggcagagtgttcctgaccggcgagaaggccaacagcatcctgaagagataccccagagccaacggcttcttcgaggagatcagacagggcaacatcgagagagagtgcaaggaggagttctgcaccttcgaggaggccagagaggccttcgagaacaacgagaagaccatcaccggcgtgatcctgctggccgtgggcgtgtggggcaagctgaccctgggcacctacatcagcctgatcgccgagaacagcaccaacgccccctacgtgctgatcggcaccggcaccaccatcgtggtgttcggcctgttcggctgcttcgccacctgcagaggcagcccctggatgctgaagctgtacgccatgttcctgagcctggtgttcctggccgagctggtggccggcatcagcggcttcgtgttcagacacgagatcaaggacaccttcctgagaacctacaccgacgccatgcagacctacaacggcaacgacgagagaagcagagccgtggaccacgtgcagagaagcctgagctgctgcggcgtgcagaactacaccaactggagcaccagcccctacttcctggagcacggcatcccccccagctgctgcatgaacgagaccgactgcaacccccaggacctgcacaacctgaccgtggccgccaccaaggtgaaccagaagggctgctacgacctggtgaccagcttcatggagaccaacatgggcatcatcgccggcgtggccttcggcatcgccttcagccagctgatcggcatgctgctggcctgctgcctgagcagattcatcaccgccaaccagtacgagatggtgtag

SEQ ID NO: 4807 - DNA, 564 bp, synthetic construct
  misc_feature 1..564: note = source = /note="Description of Artificial Sequence: Synthetic coding sequence"
  source 1..564: mol_type = other DNA
atgtggtgcgccagccccgtggccgtggtggccttctgcgccggcctgctggtgagccaccccgtgctgacccagggccaggaggccggcggcagacccggcgccgactgcgaggtgtgcaaggagttcctgaacagattctacaagagcctgatcgacagaggcgtgaacttcagcctggacaccatcgagaaggagctgatcagcttctgcctggacaccaagggcaaggagaacagactgtgctactacctgggcgccaccaaggacgccgccaccaagatcctgagcgaggtgaccagacccatgagcgtgcacatgcccgccatgaagatctgcgagaagctgaagaagctggacagccagatctgcgagctgaagtacgagaagaccctggacctggccagcgtggacctgagaaagatgagagtggccgagctgaagcagatcctgcacagctggggcgaggagtgcagagcctgcgccgagaagaccgactacgtgaacctgatccaggagctggcccccaagtacgccgccacccaccccaagaccgagctgtag

SEQ ID NO: 4808 - DNA, 1311 bp, synthetic construct; identical to SEQ ID NO: 3956
  misc_feature 1..1311: note = source = /note="Description of Artificial Sequence: Synthetic coding sequence"
  source 1..1311: mol_type = other DNA

SEQ ID NO: 4809 - DNA, 450 bp, synthetic construct
  misc_feature 1..450: note = source = /note="Description of Artificial Sequence: Synthetic coding sequence"
  source 1..450: mol_type = other DNA
atgggcagagtgttcctgaccggcgagaaggccaacagcatcctgaagagataccccagagccaacggcttcttcgaggagatcagacagggcaacatcgagagagagtgcaaggaggagttctgcaccttcgaggaggccagagaggccttcgagaacaacgagaagaccaaggagttctggagcacctacaccaaggcccagcagggcgagagcaacagaggcagcgactggttccagttctacctgaccttccccctgatcttcggcctgttcatcatcctgctggtgatcttcctgatctggagatgcttcctgagaaacaagaccagaagacagaccgtgaccgagggccacatccccttcccccagcacctgaacatcatcacccccccccccccccccgacgaggtgttcgacagcagcggcctgagccccggcttcctgtag

SEQ ID NO: 4810 - DNA, 936 bp, synthetic construct
  misc_feature 1..936: note = source = /note="Description of Artificial Sequence: Synthetic coding sequence"
  source 1..936: mol_type = other DNA
atgctgtaccagaccatcaacagcctgaagaccaagaaccccaagctgaagatcctgctgagcatcggcggctacctgttcggcagcaagggcttccaccccatggtggacagcagcaccagcagactggagttcatcaacagcatcatcctgttcctgagaaaccacaacttcgacggcctggacgtgagctggatctaccccgaccagaaggagaacacccacttcaccgtgctgatccacgagctggccgaggccttccagaaggacttcaccaagagcaccaaggagagactgctgctgaccgccggcgtgagcgccggcagacagatgatcgacaacagctaccaggtggagaagctggccaaggacctggacttcatcaacctgctgagcttcgacttccacggcagctgggagaagcccctgatcaccggccacaacagccccctgagcaagggctggcaggacagaggccccagcagctactacaacgtggagtacgccgtgggctactggatccacaagggcatgcccagcgagaaggtggtgatgggcatccccacctacggccacagcttcaccctggccagcgccgagaccaccgtgggcgcccccgccagcggccccggcgccgccggccccatcaccgagagcagcggcttcctggcctactacgagatctgccagttcctgaagggcgccaagatcaccagactgcaggaccagcaggtgccctacgccgtgaagggcaaccagtgggtgggctacgacgacgtgaagagcatggagaccaaggtgcagttcctgaagaacctgaacctgggcggcgccatgatctggagcatcgacatggacgacttcaccggcaagagctgcaaccagggcccctaccccctggtgcaggccgtgaagagaagcctgggcagcctgtag

SEQ ID NO: 4811 - DNA, 621 bp, synthetic construct
  misc_feature 1..621: note = source = /note="Description of Artificial Sequence: Synthetic coding sequence"
  source 1..621: mol_type = other DNA
atggacaccatcttcctgtggagcctgctgctgctgttcttcggcagccaggccagcagatgcagcgcccagaagaacaccgagttcgccgtggacctgtaccaggaggtgagcctgagccacaaggacaacatcatcttcagccccctgggcatcaccctggtgctggagatggtgcagctgggcgccaagggcaaggcccagcagcagatcagacagaccctgaagcagcaggagaccagcgccggcgaggagttcttcgtgctgaagagcttcttcagcgccatcagcgagaagaagcaggagttcaccttcaacctggccaacgccctgtacctgcaggagggcttcaccgtgaaggagcagtacctgcacggcaacaaggagttcttccagagcgccatcaagctggtggacttccaggacgccaaggcctgcgccgagatgatcagcacctgggtggagagaaagaccgacggcaagatcaaggacatgttcagcggcgaggagttcggccccctgaccagactggtgctggtgaacgccatctacttcaagggcgactggaagcagaagttcagaaaggaggacacccagctgatcaacttcaccaagaagtag

SEQ ID NO: 4812 - DNA, 1218 bp, synthetic construct; identical to SEQ ID NO: 3601
  misc_feature 1..1218: note = source = /note="Description of Artificial Sequence: Synthetic coding sequence"
  source 1..1218: mol_type = other DNA

SEQ ID NO: 4813 - DNA, 399 bp, synthetic construct
  misc_feature 1..399: note = source = /note="Description of Artificial Sequence: Synthetic coding sequence"
  source 1..399: mol_type = other DNA
atgctgatcttctggaccatcaccctgttcctgctgggcgccgccaagggcaaggaggtgtgctacgaggacctgggctgcttcagcgacaccgagccctggggcggcaccgccatcagacccctgaagatcctgccctggagccccgagaagatcggcaccagattcctgctgtacaccaacgagaaccccaacaacttccagatcctgctgctgagcgaccccagcaccatcgaggccagcaacttccagatggacagaaagaccagattcatcatccacggcttcatcgacaagggcgacgagagctgggtgaccgacatgtgcaagaagctgttcgaggtggaggaggtgaactgcatctgcgtggactggaagaagggcagccaggccacctag

SEQ ID NO: 4814 - DNA, 606 bp, synthetic construct; identical to SEQ ID NO: 4157
  misc_feature 1..606: note = source = /note="Description of Artificial Sequence: Synthetic coding sequence"
  source 1..606: mol_type = other DNA

SEQ ID NO: 4815 - DNA, 1086 bp, synthetic construct
  misc_feature 1..1086: note = source = /note="Description of Artificial Sequence: Synthetic coding sequence"
  source 1..1086: mol_type = other DNA
atggccagcctgggcctgctgctgctgctgctgctgaccgccctgccccccctgtggagcagcagcctgcccggcctggacaccgccgagagcaaggccaccatcgccgacctgatcctgagcgccctggagagagccaccgtgttcctggagcagagactgcccgagatcaacctggacggcatggtgggcgtgagagtgctggaggagcagctgaagagcgtgagagagaagtgggcccaggagcccctgctgcagcccctgagcctgagagtgggcatgctgggcgagaagctggaggccgccatccagagaagcctgcactacctgaagctgagcgaccccaagtacctgagagagttccagctgaccctgcagcccggcttctggaagctgccccacgcctggatccacaccgacgccagcctggtgtaccccaccttcggcccccaggacagcttcagcgaggagagaagcgacgtgtgcctggtgcagctgctgggcaccggcaccgacagcagcgagccctgcggcctgagcgacctgtgcagaagcctgatgaccaagcccggctgcagcggctactgcctgagccaccagctgctgttcttcctgtgggccagaatgagaggctgcacccagggccccctgcagcagagccaggactacatcaacctgttctgcgccaacatgatggacctgaacagaagagccgaggccatcggctacgcctaccccaccagagacatcttcatggagaacatcatgttctgcggcatgggcggcttcagcgacttctacaagctgagatggctggaggccatcctgagctggcagaagcagcaggagggctgcttcggcgagcccgacgccgaggacgaggagctgagcaaggccatccagtaccagcagcacttcagcagaagagtgaagagaagagagaagcagttccccgacggctgcagcagccacaacaccgccaccgccgtggccgccctgggcggcttcctgtacatcctggccgagtacccccccgccaacagagagccccaccccagcaccccccccccccccagcagcagatag

SEQ ID NO: 4816 - DNA, 162 bp, synthetic construct
  misc_feature 1..162: note = source = /note="Description of Artificial Sequence: Synthetic coding sequence"
  source 1..162: mol_type = other DNA
atgtggaccaacttcttcaagctgagactgttctgctgcctgctggccgtgctgatggtggtggtgctggtgatcaacgtgacccaggtggagtacctggaccacgagaccgtgagcgccaccttcatcgacagcagcggccagttcgtgagcagccagtag

SEQ ID NO: 4817 - DNA, 1305 bp, synthetic construct
  misc_feature 1..1305: note = source = /note="Description of Artificial Sequence: Synthetic coding sequence"
  source 1..1305: mol_type = other DNA
atggccagcctgggcctgctgctgctgctgctgctgaccgccctgccccccctgtggagcagcagcctgcccggcctggacaccgccgagagcaaggccaccatcgccgacctgatcctgagcgccctggagagagccaccgtgttcctggagcagagactgcccgagatcaacctggacggcatggtgggcgtgagagtgctggaggagcagctgaagagcgtgagagagaagtgggcccaggagcccctgctgcagcccctgagcctgagagtgggcatgctgggcgagaagctggaggccgccatccagagaagcctgcactacctgaagctgagcgaccccaagtacctgagagagttccagctgaccctgcagcccggcttctggaagctgccccacgcctggatccacaccgacgccagcctggtgtaccccaccttcggcccccaggacagcttcagcgaggagagaagcgacgtgtgcctggtgcagctgctgggcaccggcaccgacagcagcgagccctgcggcctgagcgacctgtgcagaagcctgatgaccaagcccggctgcagcggctactgcctgagccaccagctgctgttcttcctgtgggccagaatgagaggctgcacccagggccccctgcagcagagccaggactacatcaacctgttctgcgccaacatgatggacctgaacagaagagccgaggccatcggctacgcctaccccaccagagacatcttcatggagaacagcgtgaccggccaccccgtgttctacctgcccctgtgcgacagcttcctgccccccaaggccgcccccgtgaccgagctgtacaccgacggccccgtgatgttctgcggcatgggcggcttcagcgacttctacaagctgagatggctggaggccatcctgagctggcagaagcagcaggagggctgcttcggcgagcccgacgccgaggacgaggagctgagcaaggccatccagtaccagcagcacttcagcagaagagtgaagagaagagagaagcagttccccgacagcagaagcgtggcccaggccggcgtgcagtggagaaacctgggcagcctgcagcccctgccccccggcttcaagcagttcagctgcctgatcctgcccagcagctgggactacagaagcgtgcccccctacctggccaacttctacatcttcctggtggagaccggcttccaccacgtggcccacgccggcctggagctgctgatcagcagagacccccccaccagcggcagccagagcgtgggcctgtag

SEQ ID NO: 4818 - DNA, 1311 bp, synthetic construct; identical to SEQ ID NO: 3956
  misc_feature 1..1311: note = source = /note="Description of Artificial Sequence: Synthetic coding sequence"
  source 1..1311: mol_type = other DNA

SEQ ID NO: 4819 - DNA, 1218 bp, synthetic construct; identical to SEQ ID NO: 3601
  misc_feature 1..1218: note = source = /note="Description of Artificial Sequence: Synthetic coding sequence"
  source 1..1218: mol_type = other DNA

SEQ ID NO: 4820 - DNA, 510 bp, synthetic construct
  misc_feature 1..510: note = source = /note="Description of Artificial Sequence: Synthetic coding sequence"
  source 1..510: mol_type = other DNA
atgctgtaccagaccatcaacagcctgaagaccaagaaccccaagctgaagatcctgctgagcatcggcggctacctgttcggcagcaagggcttccaccccatggtggacagcagcaccagcagactggagttcatcaacagcatcatcctgttcctgagaaaccacaacttcgacggcctggacgtgagctggatctaccccgaccagaaggagaacacccacttcaccgtgctgatccacgagctggccgaggccttccagaaggacttcaccaagagcaccaaggagagactgctgctgaccgccggcgtgagcgccggcagacagatgatcgacaacagctaccaggtggagaagctggccaaggacctggacttcatcaacctgctgagcttcgacttccacggcagctgggagaagcccctgatcaccggccacaacagccccctgagcaagggctggcaggacagaggccccagcagctactacaacgtggagtacgcctag

SEQ ID NO: 4821 - DNA, 1209 bp, synthetic construct
  misc_feature 1..1209: note = source = /note="Description of Artificial Sequence: Synthetic coding sequence"
  source 1..1209: mol_type = other DNA
atggccagcctgggcctgctgctgctgctgctgctgaccgccctgccccccctgtggagcagcagcctgcccggcctggacaccgccgagagcaaggccaccatcgccgacctgatcctgagcgccctggagagagccaccgtgttcctggagcagagactgcccgagatcaacctggacggcatggtgggcgtgagagtgctggaggagcagctgaagagcgtgagagagaagtgggcccaggagcccctgctgcagcccctgagcctgagagtgggcatgctgggcgagaagctggaggccgccatccagagaagcctgcactacctgaagctgagcgaccccaagtacctgagagagttccagctgaccctgcagcccggcttctggaagctgccccacgcctggatccacaccgacgccagcctggtgtaccccaccttcggcccccaggacagcttcagcgaggagagaagcgacgtgtgcctggtgcagctgctgggcaccggcaccgacagcagcgagccctgcggcctgagcgacctgtgcagaagcctgatgaccaagcccggctgcagcggctactgcctgagccaccagctgctgttcttcctgtgggccagaatgagaggctgcacccagggccccctgcagcagagccaggactacatcaacctgttctgcgccaacatgatggacctgaacagaagagccgaggccatcggctacgcctaccccaccagagacatcttcatggagaacatcatgttctgcggcatgggcggcttcagcgacttctacaagctgagatggctggaggccatcctgagctggcagaagcagcaggagggctgcttcggcgagcccgacgccgaggacgaggagctgagcaaggccatccagtaccagcagcacttcagcagaagagtgaagagaagagagaagcagttccccgacagcagaagcgtggcccaggccggcgtgcagtggagaaacctgggcagcctgcagcccctgccccccggcttcaagcagttcagctgcctgatcctgcccagcagctgggactacagaagcgtgcccccctacctggccaacttctacatcttcctggtggagaccggcttccaccacgtggcccacgccggcctggagctgctgatcagcagagacccccccaccagcggcagccagagcgtgggcctgtag

SEQ ID NO: 4822 - DNA, 1680 bp, synthetic construct; identical to SEQ ID NO: 3622
  misc_feature 1..1680: note = source = /note="Description of Artificial Sequence: Synthetic coding sequence"
  source 1..1680: mol_type = other DNA

SEQ ID NO: 4823 - DNA, 402 bp, synthetic construct
  misc_feature 1..402: note = source = /note="Description of Artificial Sequence: Synthetic coding sequence"
  source 1..402: mol_type = other DNA
atggccatggtgagcgccatgagctgggtgctgtacctgtggatcagcgcctgcgccatgctgctgtgccacggcagcctgcagcacaccttccagcagcaccacctgcacagacccgagggcggcacctgcgaggtgatcgccgcccacagatgctgcaacaagaacagaatcgaggagagaagccagaccgtgaagtgcagctgcctgcccggcaaggtggccggcaccaccagaaacagacccagctgcgtggacgccagcatcgtgatcggcaagtggtggtgcgagatggagccctgcctggagggcgaggagtgcaagaccctgcccgacaacagcggctggatgtgcgccaccggcaacaagatcaagaccaccagaatccaccccagaacctag

SEQ ID NO: 4824 - DNA, 606 bp, synthetic construct; identical to SEQ ID NO: 4157
  misc_feature 1..606: note = source = /note="Description of Artificial Sequence: Synthetic coding sequence"
  source 1..606: mol_type = other DNA

SEQ ID NO: 4825 - DNA, 606 bp, synthetic construct; identical to SEQ ID NO: 4157
  misc_feature 1..606: note = source = /note="Description of Artificial Sequence: Synthetic coding sequence"
  source 1..606: mol_type = other DNA

SEQ ID NO: 4826 - DNA, 732 bp, synthetic construct; identical to SEQ ID NO: 4716
  misc_feature 1..732: note = source = /note="Description of Artificial Sequence: Synthetic coding sequence"
  source 1..732: mol_type = other DNA

SEQ ID NO: 4827 - DNA, 258 bp, synthetic construct
  misc_feature 1..258: note = source = /note="Description of Artificial Sequence: Synthetic coding sequence"
  source 1..258: mol_type = other DNA
atgaagatccccgtgctgcccgccgtggtgctgctgagcctgctggtgctgcacagcgcccagggcgccaccctgggcggccccgaggaggagagcaccatcgagaactacgccagcagacccgaggccttcaaggccgacgagttcctgaactggcacgccctgttcgagagcatcaagagaaagctgcccttcctgaactgggacgccttccccaagctgaagggcctgagaagcgccacccccgacgcccagtag

SEQ ID NO: 4828 - DNA, 348 bp, synthetic construct
  misc_feature 1..348: note = source = /note="Description of Artificial Sequence: Synthetic coding sequence"
  source 1..348: mol_type = other DNA
atgggcagagtgttcctgaccggcgagaaggccaacagcatcctgaagagataccccagagccaacggcttcttcgaggagatcagacagggcaacatcgagagagagtgcaaggaggagttctgcaccttcgaggaggccagagaggccttcgagaacaacgagaagaccaaggagttctggagcacctacaccaaggcccagcagggcgagagcaacagaggcagcgactggttccagttctacctgaccttccccctgatcttcggcctgttcatcatcctgctggtgatcttcctgatctggagatgcttcctgagaaacaagaccagaagacagaccgtgtag

SEQ ID NO: 4829 - DNA, 606 bp, synthetic construct; identical to SEQ ID NO: 4157
  misc_feature 1..606: note = source = /note="Description of Artificial Sequence: Synthetic coding sequence"
  source 1..606: mol_type = other DNA

SEQ ID NO: 4830 - DNA, 1311 bp, synthetic construct; identical to SEQ ID NO: 3956
  misc_feature 1..1311: note = source = /note="Description of Artificial Sequence: Synthetic coding sequence"
  source 1..1311: mol_type = other DNA

SEQ ID NO: 4831 - DNA, 606 bp, synthetic construct
  misc_feature 1..606: note = source = /note="Description of Artificial Sequence: Synthetic coding sequence"
  source 1..606: mol_type = other DNA
atgggcgccaccaccatggaccagaagagcctgtgggccggcgtggtggtgctgctgctgctgcagggcggcagcgcctacaagctggtgtgctacttcaccaactggagccaggacagacaggagcccggcaagttcacccccgagaacatcgaccccttcctgtgcagccacctgatctacagcttcgccagcatcgagaacaacaaggtgatcatcaaggacaagagcgaggtgatgctgtaccagaccatcaacagcctgaagaccaagaaccccaagctgaagatcctgctgagcatcggcggctacctgttcggcagcaagggcttccaccccatggtggacagcagcaccagcagactggagttcatcaacagcatcatcctgttcctgagaaaccacaacttcgacggcctggacgtgagctggatctaccccgaccagaaggagaacacccacttcaccgtgctgatccacgagctggccgaggccttccagaaggacttcaccaagagcaccaaggagagactgctgctgaccgccggcgtgagcgccggcagacagatgatcgacaacagctaccaggtggagaagctggcctag

SEQ ID NO: 4832 - DNA, 75 bp, synthetic construct; identical to SEQ ID NO: 4022
  misc_feature 1..75: note = source = /note="Description of Artificial Sequence: Synthetic coding sequence"
  source 1..75: mol_type = other DNA

SEQ ID NO: 4833 - DNA, 252 bp, synthetic construct
  misc_feature 1..252: note = source = /note="Description of Artificial Sequence: Synthetic coding sequence"
  source 1..252: mol_type = other DNA
atgagacccagaggcctgccccccctgctggtggtgctgctgggctgctgggccagcgtgagcgcccagaccgacgccacccccgccgtgaccaccgagggcctgaacagcaccgaggccgccctggccaccttcggcaccttccccagcaccagaccccccggcacccccagagcccccggccccagcagcggccccagacccacccccgtgaccgacggcagccacagcgtgacccaggccggcgtgtag

SEQ ID NO: 4834 - DNA, 1254 bp, synthetic construct; identical to SEQ ID NO: 3644
  misc_feature 1..1254: note = source = /note="Description of Artificial Sequence: Synthetic coding sequence"
  source 1..1254: mol_type = other DNA

SEQ ID NO: 4835 - DNA, 1680 bp, synthetic construct; identical to SEQ ID NO: 3622
  misc_feature 1..1680: note = source = /note="Description of Artificial Sequence: Synthetic coding sequence"
  source 1..1680: mol_type = other DNA

SEQ ID NO: 4836 - DNA, 99 bp, synthetic construct
  misc_feature 1..99: note = source = /note="Description of Artificial Sequence: Synthetic coding sequence"
  source 1..99: mol_type = other DNA
atgcagggcacccccggcggcggcaccagacccggccccagccccgtggacagaagaaccctgctggtgttcagcttcatcctggccgccgccctgtag

SEQ ID NO: 4837 - DNA, 180 bp, synthetic construct
  misc_feature 1..180: note = source = /note="Description of Artificial Sequence: Synthetic coding sequence"
  source 1..180: mol_type = other DNA
atgctggccctgctggtgctggtgaccgtggccctggccagcgcccaccacggcggcgagcacttcgagggcgagaaggtgttcagagtgaacgtggaggacgagaaccacatcaacatcatcagagagctggccagcaccacccagatcgacttctggaagcccgacagcgtgacctag

SEQ ID NO: 4838 - DNA, 303 bp, synthetic construct
  misc_feature 1..303: note = source = /note="Description of Artificial Sequence: Synthetic coding sequence"
  source 1..303: mol_type = other DNA
atgagacccagaggcctgccccccctgctggtggtgctgctgggctgctgggccagcgtgagcgcccagaccgacgccacccccgccgtgaccaccgagggcctgaacagcaccgaggccgccctggccaccttcggcaccttccccagcaccagaccccccggcacccccagagcccccggccccagcagcggccccagacccacccccgtgaccgacggcggctaccacgtgcccgcccccggcgtgcacagcgaccccaccagcagaggccagcccagatgctgcagcctgtgcctgtag

SEQ ID NO: 4839 - DNA, 234 bp, synthetic construct
  misc_feature 1..234: note = source = /note="Description of Artificial Sequence: Synthetic coding sequence"
  source 1..234: mol_type = other DNA
atgagaagccccagaatgagagtgtgcgccaagagcgtgctgctgagccactggctgttcctggcctacgtgctgatggtgtgctgcaagctgatgagcgccagcagccagcacctgagaggccacgccggccaccaccagatcaagcagggcacctgcgaggtggtggccgtgcacagatgctgcaacaagaacagaatcgaggagagaagccagaccgtgaagtgcagctag

SEQ ID NO: 4840 - DNA, 12 bp, synthetic construct
  misc_feature 1..12: note = source = /note="Description of Artificial Sequence: Synthetic coding sequence"
  source 1..12: mol_type = other DNA
atgtggacctag

SEQ ID NO: 4841 - DNA, 402 bp, synthetic construct; identical to SEQ ID NO: 4823
  misc_feature 1..402: note = source = /note="Description of Artificial Sequence: Synthetic coding sequence"
  source 1..402: mol_type = other DNA

SEQ ID NO: 4842 - DNA, 600 bp, synthetic construct
  misc_feature 1..600: note = source = /note="Description of Artificial Sequence: Synthetic coding sequence"
  source 1..600: mol_type = other DNA
atgaccatgagacacaactggacccccgacctgagccccctgtgggtgctgctgctgtgcgcccacgtggtgaccctgctggtgagagccacccccgtgagccagaccaccaccgccgccaccgccagcgtgagaagcaccaaggacccctgccccagccagccccccgtgttccccgccgccaagcagtgccccgccctggaggtgacctggcccgaggtggaggtgcccctgaacggcaccctgagcctgagctgcgtggcctgcagcagattccccaacttcagcatcctgtactggctgggcaacggcagcttcatcgagcacctgcccggcagactgtgggagggcagcaccagcagagagagaggcagcaccggcacccagctgtgcaaggccctggtgctggagcagctgacccccgccctgcacagcaccaacttcagctgcgtgctggtggaccccgagcaggtggtgcagagacacgtggtgctggcccagctgtgggtgagaagccccagaagaggcctgcaggagcaggaggagctgtgcttccacatgtggggcggcaagggcggcctgtgccagagcagcctgtag

SEQ ID NO: 4843 - DNA, 1044 bp, synthetic construct
  misc_feature 1..1044: note = source = /note="Description of Artificial Sequence: Synthetic coding sequence"
  source 1..1044: mol_type = other DNA
atgggcgtggtgcagtacggcgacaaccccgccacccacttcaacctgaagacccacaccaacagcagagacctgaagaccgccatcgagaagatcacccagagaggcggcctgagcaacgtgggcagagccatcagcttcgtgaccaagaacttcttcagcaaggccaacggcaacagaagcggcgcccccaacgtggtggtggtgatggtggacggctggcccaccgacaaggtggaggaggccagcagactggccagagagagcggcatcaacatcttcttcatcaccatcgagggcgccgccgagaacgagaagcagtacgtggtggagcccaacttcgccaacaaggccgtgtgcagaaccaacggcttctacagcctgcacgtgcagagctggttcggcctgcacaagaccctgcagcccctggtgaagagagtgtgcgacaccgacagactggcctgcagcaagacctgcctgaacagcgccgacatcggcttcgtgatcgacggcagcagcagcgtgggcaccggcaacttcagaaccgtgctgcagttcgtgaccaacctgaccaaggagttcgagatcagcgacaccgacaccagaatcggcgccgtgcagtacacctacgagcagagactggagttcggcttcgacaagtacagcagcaagcccgacatcctgaacgccatcaagagagtgggctactggagcggcggcaccagcaccggcgccgccatcaacttcgccctggagcagctgttcaagaagagcaagcccaacaagagaaagctgatgatcctgatcaccgacggcagaagctacgacgacgtgagaatccccgccatggccgcccacctgaagggcgtgatcacctacgccatcggcgtggcctgggccgcccaggaggagctggaggtgatcgccacccaccccgccagagaccacagcttcttcgtggacgagttcgacaacctgcaccagtacgtgcccagaatcatccagaacatctgcaccgagttcaacagccagcccagaaactag

SEQ ID NO: 4844 - DNA, 27 bp, synthetic construct
  misc_feature 1..27: note = source = /note="Description of Artificial Sequence: Synthetic coding sequence"
  source 1..27: mol_type = other DNA
atgcagggcacccccggcggcggctag

SEQ ID NO: 4845 - DNA, 369 bp, synthetic construct
  misc_feature 1..369: note = source = /note="Description of Artificial Sequence: Synthetic coding sequence"
  source 1..369: mol_type = other DNA
atgctgtaccagaccatcaacagcctgaagaccaagaaccccaagctgaagatcctgctgagcatcggcggctacctgttcggcagcaagggcttccaccccatggtggacagcagcaccagcagactggagttcatcaacagcatcatcctgttcctgagaaaccacaacttcgacggcctggacgtgagctggatctaccccgaccagaaggagaacacccacttcaccgtgctgatccacgagctggccgaggccttccagaaggacttcaccaagagcaccaaggagagactgctgctgaccgccggcgtgagcgccggcagacagatgatcgacaacagctaccaggtggagaagctggcctag

SEQ ID NO: 4846 - DNA, 309 bp, synthetic construct
  misc_feature 1..309: note = source = /note="Description of Artificial Sequence: Synthetic coding sequence"
  source 1..309: mol_type = other DNA
atgagagtgagcggcgtgctgagactgctggccctgatcttcgccatcgtgaccacctggatgttcatcagaagctacatgagcttcagcatgaagaccatcagactgcccagatggctggccgccagccccaccaaggagatccaggtgaagaagtacaagtgcggcctgatcaagccctgccccgccaactacttcgccttcaagatctgcagcggcgccgccaacgtggtgggccccaccatgtgcttcgaggacagaatgatcatgagccccgtgaagaacaacgtgggcagaggcctgaactag

SEQ ID NO: 4847 - DNA, 660 bp, synthetic construct; identical to SEQ ID NO: 3923
  misc_feature 1..660: note = source = /note="Description of Artificial Sequence: Synthetic coding sequence"
  source 1..660: mol_type = other DNA

SEQ ID NO: 4848 - DNA, 1869 bp, synthetic construct
  misc_feature 1..1869: note = source = /note="Description of Artificial Sequence: Synthetic coding sequence"
  source 1..1869: mol_type = other DNA
atgggcaagagcgagggccccgtgggcatggtggagagcgccggcagagccggccagaagagacccggcttcctggagggcggcctgctgctgctgctgctgctggtgaccgccgccctggtggccctgggcgtgctgtacgccgacagaagaggcaagcagctgcccagactggccagcagactgtgcttcctgcaggaggagagaaccttcgtgaagagaaagcccagaggcatccccgaggcccaggaggtgagcgaggtgtgcaccacccccggctgcgtgatcgccgccgccagaatcctgcagaacatggaccccaccaccgagccctgcgacgacttctaccagttcgcctgcggcggctggctgagaagacacgtgatccccgagaccaacagcagatacagcatcttcgacgtgctgagagacgagctggaggtgatcctgaaggccgtgctggagaacagcaccgccaaggccaccgtgccccaggaggagagacacgacgtgatcgccctgtaccacagaatgggcctggaggagctgcagagccagttcggcctgaagggcttcaactggaccctgttcatccagaccgtgctgagcagcgtgaagatcaagctgctgcccgacgaggaggtggtggtgtacggcatcccctacctgcagaacctggagaacatcatcgacacctacagcgccagaaccatccagaactacctggtgtggagactggtgctggacagaatcggcagcctgagccagagattcaaggacaccagagtgaactacagaaaggccctgttcggcaccatggtggaggaggtgagatggagagagtgcgtgggctacgtgaacagcaacatggagaacgccgtgggcagcctgtacgtgagagaggccttccccggcgacagcaagagcatggtgagagagctgatcgacaaggtgagaaccgtgttcgtggagaccctggacgagctgggctggatggacgaggagagcaagaagaaggcccaggagaaggccatgagcatcagagagcagatcggccaccccgactacatcctggaggagatgaacagaagactggacgaggagtacagcaacctgaacttcagcgaggacctgtacttcgagaacagcctgcagaacctgaaggtgggcgcccagagaagcctgagaaagctgagagagaaggtggaccccaacctgtggatcatcggcgccgccgtggtgaacgccttctacagccccaacagaaaccagatcgtgttccccgccggcatcctgcagccccccttcttcagcaaggagcagccccaggccctgaacttcggcggcatcggcatggtgatcggccacgagatcacccacggcttcgacgacaacggcagaaacttcgacaagaacggcaacatgatggactggtggagcaacttcagcacccagcacttcagagagcagagcgagtgcatgatctaccagtacggcaactacagctgggacctggccgacgagcagaacgtgaacggcttcaacaccctgggcgagaacatcgccgacaacggcggcgtgagacaggcctacaaggcctacctgaagtggatggccgagggcggcaaggaccagcagctgcccggcctggacctgacccacgagcagctgttcttcatcaactacgcccaggtgtggtgcggcagctacagacccgagttcgccatccagagcatcaagaccgacgtgcacagccccctgaagtacagagtgctgggcagcctgcagaacctggccgccttcgccgacaccttccactgcgccagaggcacccccatgcaccccaaggagagatgcagagtgtggtag

SEQ ID NO: 4849 - DNA, 168 bp, synthetic construct
  misc_feature 1..168: note = source = /note="Description of Artificial Sequence: Synthetic coding sequence"
  source 1..168: mol_type = other DNA
atgggccccgaggccctgagcagcctgctgctgctgctgctggtggccagcggcgacgccgacatgaagggccacttcgaccccgccaagtgcagatacgccctgggcatgcaggacagaaccatccccgacagcgacatcagcgccagcagcagctggagcgactag

SEQ ID NO: 4850 - DNA, 156 bp, synthetic construct
  misc_feature 1..156: note = source = /note="Description of Artificial Sequence: Synthetic coding sequence"
  source 1..156: mol_type = other DNA
atgggccccgaggccctgagcagcctgctgctgctgctgctggtggccagcggcgacgccgacatgaagggccacttcgaccccgccaagtgcagatacgccctgggcatgcaggacagaaccatccccgacagcgacatcagcgccagcagctag

SEQ ID NO: 4851 - DNA, 1620 bp, synthetic construct; identical to SEQ ID NO: 4653
  misc_feature 1..1620: note = source = /note="Description of Artificial Sequence: Synthetic coding sequence"
  source 1..1620: mol_type = other DNA

SEQ ID NO: 4852 - DNA, 591 bp, synthetic construct
  misc_feature 1..591: note = source = /note="Description of Artificial Sequence: Synthetic coding sequence"
  source 1..591: mol_type = other DNA
atgccccacctggccagcctgttcaccgccagcagcagatgctgcccccaccccctgagacccgagggcagcggcgccatgggccccgaggccctgagcagcctgctgctgctgctgctggtggccagcggcgacgccgacatgaagggccacttcgaccccgccaagtgcagatacgccctgggcatgcaggacagaaccatccccgacagcgacatcagcgccagcagcagctggagcgacagcaccgccgccagacacagcagactggagagcagcgacggcgacggcgcctggtgccccgccggcagcgtgttccccaaggaggaggagtacctgcaggtggacctgcagagactgcacctggtggccctggtgggcacccagggcagacacgccggcggcctgggcaaggagttcagcagaagctacagactgagatacagcagagacggcagaagatggatgggctggaaggacagatggggccaggaggtgatcagcggcaacgaggaccccgagggcgtggtgctgaaggacctgggcccccccatggtggccagactggtgagattctaccccagagcctag

SEQ ID NO: 4853 - DNA, 162 bp, synthetic construct
  misc_feature 1..162: note = source = /note="Description of Artificial Sequence: Synthetic coding sequence"
  source 1..162: mol_type = other DNA
atgctgccctgcctggccctgctgctgctgatggagctgagcgtgtgcaccgtggccggcgacggcggcgaggagcagaccctgagcaccgaggccgagacctgggtgatcgtggccctggaggtgctgctgggcagaggcagcgacgagggcagaggctag

SEQ ID NO: 4854 - DNA, 126 bp, synthetic construct
  misc_feature 1..126: note = source = /note="Description of Artificial Sequence: Synthetic coding sequence"
  source 1..126: mol_type = other DNA
atgggccccgaggccctgagcagcctgctgctgctgctgctggtggccagcggcgacgccgacatgaagggccacttcgaccccgccaagtgcagatacgccctgggcatgcaggacagaacctag

SEQ ID NO: 4855 - DNA, 222 bp, synthetic construct
  misc_feature 1..222: note = source = /note="Description of Artificial Sequence: Synthetic coding sequence"
  source 1..222: mol_type = other DNA
atgggccccgaggccctgagcagcctgctgctgctgctgctggtggccagcggcgacgccgacatgaagggccacttcgaccccgccaagtgcagatacgccctgggcatgcaggacagaaccatccccgacagcgacatcagcgccagcagcagctggagcgacagcaccgccgccagacacagcagactggagagcagcgacggcgacggcgcctggtag

SEQ ID NO: 4856 - DNA, 369 bp, synthetic construct
  misc_feature 1..369: note = source = /note="Description of Artificial Sequence: Synthetic coding sequence"
  source 1..369: mol_type = other DNA
atgggccccgaggccctgagcagcctgctgctgctgctgctggtggccagcggcgacgccgacatgaagggccacttcgaccccgccaagtgcagatacgccctgggcatgcaggacagaaccatccccgacagcgacatcagcgccagcagcagctggagcgacagcaccgccgccagacacagcagactggagagcagcgacggcgacggcgcctggtgccccgccggcagcgtgttccccaaggaggaggagtacctgcaggtggacctgcagagactgcacctggtggccctggtgggcacccagggcagacacgccggcggcctgggcaaggagttcagcagaagctacagactgagatactag

SEQ ID NO: 4857 - DNA, 483 bp, synthetic construct
  misc_feature 1..483: note = source = /note="Description of Artificial Sequence: Synthetic coding sequence"
  source 1..483: mol_type = other DNA
atgggccccgaggccctgagcagcctgctgctgctgctgctggtggccagcggcgacgccgacatgaagggccacttcgaccccgccaagtgcagatacgccctgggcatgcaggacagaaccatccccgacagcgacatcagcgccagcagcagctggagcgacagcaccgccgccagacacagcagactggagagcagcgacggcgacggcgcctggtgccccgccggcagcgtgttccccaaggaggaggagtacctgcaggtggacctgcagagactgcacctggtggccctggtgggcacccagggcagacacgccggcggcctgggcaaggagttcagcagaagctacagactgagatacagcagagacggcagaagatggatgggctggaaggacagatggggccaggaggtgatcagcggcaacgaggaccccgagggcgtggtgctgaaggacctgggcccccccatggtgtag

SEQ ID NO: 4858 - DNA, 540 bp, synthetic construct
  misc_feature 1..540: note = source = /note="Description of Artificial Sequence: Synthetic coding sequence"
  source 1..540: mol_type = other DNA
atgggcagcagcggcctgctgagcctgctggtgctgttcgtgctgctggccaacgtgcagggccccggcctgaccgactggctgttccccagaagatgccccaagatcagagaggagtgcgagttccaggagagagacgtgtgcaccaaggacagacagtgccaggacaacaagaagtgctgcgtgttcagctgcggcaagaagtgcctggacctgaagcaggacgtgtgcgagatgcccaaggagaccggcccctgcctggcctacttcctgcactggtggtacgacaagaaggacaacacctgcagcatgttcgtgtacggcggctgccagggcaacaacaacaacttccagagcaaggccaactgcctgaacacctgcaagaacaagcagccctgccccaagatcaaggtggagtgcgaggtggaggagatcgaccagtgcaccaagcccagagactgccccgagaacatgaagtgctgccccttcagcagaggcaagaagtgcctggacttcagaaaggccagcctgagcacctag

SEQ ID NO: 4859 - DNA, 438 bp, synthetic construct
  misc_feature 1..438: note = source = /note="Description of Artificial Sequence: Synthetic coding sequence"
  source 1..438: mol_type = other DNA
atgctgttcagaaacagattcctgctgctgctggccctggccgccctgctggccttcgtgagcctgagcctgcagttcttccacctgatccccgtgagcacccccaagaacggcatgagcagcaagagcagaaagagaatcatgcccgaccccgtgaccgagccccccgtgaccgaccccgtgtacgaggccctgctgtactgcaacatccccagcgtggccgagagaagcatggagggccacgccccccaccacttcaagctggtgagcgtgcacgtgttcatcagacacggcgacagataccccctgtacgtgatccccaagaccaagagacccgagatcgactgcaccctggtggccaacagaaagccctaccaccccaagctggaggccttcatcagccacatgagcaagggcagcggcgccagcttcgagtag

SEQ ID NO: 4860 - DNA, 399 bp, synthetic construct
  misc_feature 1..399: note = source = /note="Description of Artificial Sequence: Synthetic coding sequence"
  source 1..399: mol_type = other DNA
atgggccccgaggccctgagcagcctgctgctgctgctgctggtggccagcggcgacgccgacatgaagggccacttcgaccccgccaagtgcagatacgccctgggcatgcaggacagaaccatccccgacagcgacatcagcgccagcagcagctggagcgacagcaccgccgccagacacagcagactggagagcagcgacggcgacggcgcctggtgccccgccggcagcgtgttccccaaggaggaggagtacctgcaggtggacctgcagagactgcacctggtggccctggtgggcacccagggcagacacgccggcggcctgggcaaggagttcagcagaagctacagactgagatacagcagagacggcagaagatggatgggctggtag

SEQ ID NO: 4861 - DNA, 306 bp, synthetic construct
  misc_feature 1..306: note = source = /note="Description of Artificial Sequence: Synthetic coding sequence"
  source 1..306: mol_type = other DNA
atgggccccgaggccctgagcagcctgctgctgctgctgctggtggccagcggcgacgccgacatgaagggccacttcgaccccgccaagtgcagatacgccctgggcatgcaggacagaaccatccccgacagcgacatcagcgccagcagcagctggagcgacagcaccgccgccagacacagcagactggagagcagcgacggcgacggcgcctggtgccccgccggcagcgtgttccccaaggaggaggagtacctgcaggtggacctgcagagactgcacctggtggccctggtgggctag

SEQ ID NO: 4862 - DNA, 393 bp, synthetic construct; identical to SEQ ID NO: 3753
  misc_feature 1..393: note = source = /note="Description of Artificial Sequence: Synthetic coding sequence"
  source 1..393: mol_type = other DNA

SEQ ID NO: 4863 - DNA, 420 bp, synthetic construct
  misc_feature 1..420: note = source = /note="Description of Artificial Sequence: Synthetic coding sequence"
  source 1..420: mol_type = other DNA
atgcccgccatcgccgtgctggccgccgccgccgccgcctggtgcttcctgcaggtggagagcagacacctggacgccctggccggcggcgccggccccaaccacggcaacttcctggacaacgaccagtggctgagcaccgtgagccagtacgacagagacaagtactggaacagattcagagacgacgactacttcagaaactggaaccccaacaagcccttcgaccaggccctggaccccagcaaggacccctgcctgaaggtgaagtgcagcccccacaaggtgtgcgtgacccaggactaccagaccgccctgtgcgtgagcagaaagcacctgctgcccagacagaagaagggcaacgtggcccagaagcactgggtgggccccagcaacctggtgaagtgcaagccctgctag

SEQ ID NO: 4864 - DNA, 510 bp, synthetic construct
  misc_feature 1..510: note = source = /note="Description of Artificial Sequence: Synthetic coding sequence"
  source 1..510: mol_type = other DNA
atgagactgctgatcctgacctgcctggtggccgtggccctggccagacccaagctgcccctgagataccccgagagactgcagaaccccagcgagagcagcgagcccatccccctggagagcagagaggagtacatgaacggcatgaacagacagagaaacatcctgagagagaagcagaccgacgagatcaagaactgcgtggtggccgagcccgagaagatggagagcagcatcagcagcagcagcgaggagcagttctgcagactgaacgagtacaaccagctgcagctgcaggccgcccacgcccaggagcagatcagaagaatgaacgagaacagccacgtgcaggtgcccttccagcagctgaaccagctggccgcctacccctacgccgtgtggtactacccccagatcatgcagtacgtgcccttcccccccttcagcgacatcagcaaccccaccgcccacgagaactacgagaagaacaacgtgatgctgcagtggtag

SEQ ID NO: 4865 - DNA, 921 bp, synthetic construct
  misc_feature 1..921: note = source = /note="Description of Artificial Sequence: Synthetic coding sequence"
  source 1..921: mol_type = other DNA
atgaagaaggacgagccccccctggacttccccgacaccctggagggcttcgagtacgccttcaacgagaagggccagctgagacacatcaagaccggcgagcccttcgtgttcaactacagagaggacctgcacagatggaaccagaagagatacgaggccctgggcgagatcatcaccaagtacgtgtacgagctgctggagaaggactgcaacctgaagaaggtgagcatccccgagggctacggcgtgatcgtgctgaaccccaacgagaactacatcgaggtggagaagcccaagatccacgtgcagagcagcagcgacagcagcgacgagcccgccgagaagagagagagaaaggacaaggtgagcaaggagaccaagaagagaagagacttctacgagaagtacagaaacccccagagagagaaggagatgatgcagctgtacatcagagagaacggcagccccgaggagcacgccatctacgtgtgggaccacttcatcgcccaggccgccgccgagaacgtgttcttcgtggcccacagctacggcggcctggccttcgtggagctgatgatccagagagaggccgacgtgaagaacaaggtgaccgccgtggccctgaccgacagcgtgcacaacgtgtggcaccaggaggccggcaagaccatcagagagtggatgagagagaactgctgcaactgggtgagcagcagcgagcccctggacaccagcgtggagagcatgctgcccgactgccccagagtgagcgccggcaccgacagacacgagctgaccagctggaagagcttccccagcatcttcaagttcttcaccgaggccagcgaggccaagaccagcagcctgaagcccgccgtgaccagaagaagccacagaatcaagcacgaggagctgtag

SEQ ID NO: 4866 - DNA, 2862 bp, synthetic construct
  misc_feature 1..2862: note = source = /note="Description of Artificial Sequence: Synthetic coding sequence"
  source 1..2862: mol_type = other DNA
tgacagctgtgctggctgcccctgctggcccccctgctgctgctgagaccccccggcgtgcagagcgccggccccatcagagccttcgtggtgccccacagccacatggacgtgggctgggtgtacaccgtgcaggagagcatgagagcctacgccgccaacgtgtacaccagcgtggtggaggagctggccagaggccagcagagaagattcatcgccgtggagcaggagttcttcagactgtggtgggacggcgtggccagcgaccagcagaagtaccaggtgagacagctgctggaggagggcagactggagttcgtgatcggcggccaggtgatgcacgacgaggccgtgacccacctggacgaccagatcctgcagctgaccgagggccacggcttcctgtacgagaccttcggcatcagaccccagttcagctggcacgtggaccccttcggcgccagcgccaccacccccaccctgttcgccctggccggcttcaacgcccacctgggcagcagaatcgactacgacctgaaggccgccatgcaggaggccagaggcctgcagttcgtgtggagaggcagccccagcctgagcgagagacaggagatcttcacccacatcatggaccagtacagctactgcacccccagccacatccccttcagcaacagaagcggcttctactggaacggcgtggccgtgttccccaagcccccccaggacggcgtgtaccccaacatgagcgagcccgtgacccccgccaacatcaacctgtacgccgaggccctggtggccaacgtgaagcagagagccgcctggttcagaaccccccacgtgctgtggccctggggctgcgacaagcagttcttcaacgccagcgtgcagttcgccaacatggaccccctgctggaccacatcaacagccacgccgccgagctgggcgtgagcgtgcagtacgccaccctgggcgactacttcagagccctgcacgccctgaacgtgacctggagagtgagagaccaccacgacttcctgccctacagcaccgagcccttccaggcctggaccggcttctacaccagcagaagcagcctgaagggcctggccagaagagccagcgccctgctgtacgccggcgagagcatgttcaccagatacctgtggcccgcccccagaggccacctggaccccacctgggccctgcagcagctgcagcagctgagatgggccgtgagcgaggtgcagcaccacgacgccatcaccggcaccgagagccccaaggtgagagacatgtacgccacccacctggccagcggcatgctgggcatgagaaagctgatggccagcatcgtgctggacgagctgcagccccaggcccccatggccgccagcagcgacgccggccccgccggccacttcgccagcgtgtacaaccccctggcctggaccgtgaccaccatcgtgaccctgaccgtgggcttccccggcgtgagagtgaccgacgaggccggccaccccgtgcccagccagatccagaacagcaccgagacccccagcgcctacgacctgctgatcctgaccaccatccccggcctgagctacagacactacaacatcagacccaccgccggcgcccaggagggcacccaggagcccgccgccaccgtggccagcaccctgcagttcggcagaagactgagaagaagaaccagccacgccggcagatacctggtgcccgtggccaacgactgctacatcgtgctgctggaccaggacaccaacctgatgcacagcatctgggagagacagagcaacagaaccgtgagagtgacccaggagttcctggagtaccacgtgaacggcgacgtgaagcagggccccatcagcgacaactacctgttcacccccggcaaggccgccgtgcccgcctgggaggccgtggagatggagatcgtggccggccagctggtgaccgagatcagacagtacttctacagaaacatgaccgcccagaactacacctacgccatcagaagcagactgacccacgtgccccagggccacgacggcgagctgctgtgccacagaatcgagcaggagtaccaggccggccccctggagctgaacagagaggccgtgctgagaaccagcaccaacctgaacagccagcaggtgatctacagcgacaacaacggctaccagatgcagagaagaccctacgtgagctacgtgaacaacagcatcgccagaaactactaccccatggtgcagagcgccttcatggaggacggcaagagcagactggtgctgctgagcgagagagcccacggcatcagcagccagggcaacggccaggtggaggtgatgctgcacagaagactgtggaacaacttcgactgggacctgggctacaacctgaccctgaacgacaccagcgtggtgcaccccgtgctgtggctgctgctgggcagctggagcctgaccaccgccctgagacagagaagcgccctggccctgcagcacagacccgtggtgctgttcggcgacctggccggcaccgcccccaagctgcccggcccccagcagcaggaggccgtgaccctgccccccaacctgcacctgcagatcctgagcatccccggctggagatacagcagcaaccacaccgagcacagccagaacctgagaaagggccacagaggcgaggcccaggccgacctgagaagagtgctgctgagactgtaccacctgtacgaggtgggcgaggaccccgtgctgagccagcccgtgaccgtgaacctggaggtgaacttccccacccccatccagaccatcagccagggcagcaagccctag

SEQ ID NO: 4867 - DNA, 459 bp, synthetic construct; identical to SEQ ID NO: 4367
  misc_feature 1..459: note = source = /note="Description of Artificial Sequence: Synthetic coding sequence"
  source 1..459: mol_type = other DNA

SEQ ID NO: 4868 - DNA, 1701 bp, synthetic construct
  misc_feature 1..1701: note = source = /note="Description of Artificial Sequence: Synthetic coding sequence"
  source 1..1701: mol_type = other DNA
atggacttcctgctggccctggtgctggtgagcagcctgtacctgcaggccgccgccgagttcgacggcagatggcccagacagatcgtgagcagcatcggcctgtgcagatacggcggcagaatcgactgctgctggggctgggccagacagagctggggccagtgccagcccgtgtgccagcccagatgcaagcacggcgagtgcatcggccccaacaagtgcaagtgccaccccggctacgccggcaagacctgcaaccaggacgagcacatccccgcccccctggaccagggcagcgagcagcccctgttccagcccctggaccaccaggccaccagcctgcccagcagagacctgaacgagtgcggcctgaagcccagaccctgcaagcacagatgcatgaacacctacggcagctacaagtgctactgcctgaacggctacatgctgatgcccgacggcagctgcagcagcgccctgacctgcagcatggccaactgccagtacggctgcgacgtggtgaagggccagatcagatgccagtgccccagccccggcctgcagctggcccccgacggcagaacctgcgtggacgtggacgagtgcgccaccggcagagccagctgccccagattcagacagtgcgtgaacaccttcggcagctacatctgcaagtgccacaagggcttcgacctgatgtacatcggcggcaagtaccagtgccacgacatcgacgagtgcagcctgggccagtaccagtgcagcagcttcgccagatgctacaacatcagaggcagctacaagtgcaagtgcaaggagggctaccagggcgacggcctgacctgcgtgtacatccccaaggtgatgatcgagcccagcggccccatccacgtgcccaagggcaacggcaccatcctgaagggcgacaccggcaacaacaactggatccccgacgtgggcagcacctggtggccccccaagaccccctacatcccccccatcatcaccaacagacccaccagcaagcccaccaccagacccacccccaagcccacccccatccccaccccccccccccccccccccctgcccaccgagctgagaacccccctgccccccaccacccccgagagacccaccaccggcctgaccaccatcgcccccgccgccagcaccccccccggcggcatcaccgtggacaacagagtgcagaccgacccccagaagcccagaggcgacgtgttcagcgtgctggtgcacagctgcaacttcgaccacggcctgtgcggctggatcagagagaaggacaacgacctgcactgggagcccatcagagaccccgccggcggccagtacctgaccgtgagcgccgccaaggcccccggcggcaaggccgccagactggtgctgcccctgggcagactgatgcacagcggcgacctgtgcctgagcttcagacacaaggtgaccggcctgcacagcggcaccctgcaggtgttcgtgagaaagcacggcgcccacggcgccgccctgtggggcagaaacggcggccacggctggagacagacccagatcaccctgagaggcgccgacatcaagagcgtggtgttcaagggcgagaagagaagaggccacaccggcgagatcggcctggacgacgtgagcctgaagaagggccactgcagcgaggagagatag

SEQ ID NO: 4869 - DNA, 213 bp, synthetic construct
  misc_feature 1..213: note = source = /note="Description of Artificial Sequence: Synthetic coding sequence"
  source 1..213: mol_type = other DNA
atgggccccgaggccctgagcagcctgctgctgctgctgctggtggccagcggcgacgccgacatgaagggccacttcgaccccgccaagtgcagatacgccctgggcatgcaggacagaaccatccccgacagcgacatcagcgccagcagcagctggagcgacagcaccgccgccagacacagcagactggagagcagcgacggcgactag

SEQ ID NO: 4870 - DNA, 237 bp, synthetic construct
  misc_feature 1..237: note = source = /note="Description of Artificial Sequence: Synthetic coding sequence"
  source 1..237: mol_type = other DNA
atgggccccgaggccctgagcagcctgctgctgctgctgctggtggccagcggcgacgccgacatgaagggccacttcgaccccgccaagtgcagatacgccctgggcatgcaggacagaaccatccccgacagcgacatcagcgccagcagcagctggagcgacagcaccgccgccagacacagcagactggagagcagcgacggcgacggcgcctggtgccccgccggcagctag

SEQ ID NO: 4871 - DNA, 339 bp, synthetic construct
  misc_feature 1..339: note = source = /note="Description of Artificial Sequence: Synthetic coding sequence"
  source 1..339: mol_type = other DNA
atgagattcaagaccaccgccaaggacggcctgctgctgtggagaggcgacagccccatgagacccaacagcgacttcatcagcctgggcctgagagacggcgccctggtgttcagctacaacctgggcagcggcgtggccagcatcatggtgaacggcagcttcaacgacggcagatggcacagagtgaaggccgtgagagacggccagagcggcaagatcaccgtggacgactacggcgccagaaccggcaagagccccggcatgatgagacagctgaacatcaacggcgccctgtacgtgggcggcatgaaggagatcgccctgcacaccaactag

SEQ ID NO: 4872 - DNA, 2685 bp, synthetic construct
  misc_feature 1..2685: note = source = /note="Description of Artificial Sequence: Synthetic coding sequence"
  source 1..2685: mol_type = other DNA
atgagcctgcccagatgctgcccccaccccctgagacccgagggcagcggcgccatgggccccgaggccctgagcagcctgctgctgctgctgctggtggccagcggcgacgccgacatgaagggccacttcgaccccgccaagtgcagatacgccctgggcatgcaggacagaaccatccccgacagcgacatcagcgccagcagcagctggagcgacagcaccgccgccagacacagcagactggagagcagcgacggcgacggcgcctggtgccccgccggcagcgtgttccccaaggaggaggagtacctgcaggtggacctgcagagactgcacctggtggccctggtgggcacccagggcagacacgccggcggcctgggcaaggagttcagcagaagctacagactgagatacagcagagacggcagaagatggatgggctggaaggacagatggggccaggaggtgatcagcggcaacgaggaccccgagggcgtggtgctgaaggacctgggcccccccatggtggccagactggtgagattctaccccagagccgacagagtgatgagcgtgtgcctgagagtggagctgtacggctgcctgtggagagacggcctgctgagctacaccgcccccgtgggccagaccatgtacctgagcgaggccgtgtacctgaacgacagcacctacgacggccacaccgtgggcggcctgcagtacggcggcctgggccagctggccgacggcgtggtgggcctggacgacttcagaaagagccaggagctgagagtgtggcccggctacgactacgtgggctggagcaaccacagcttcagcagcggctacgtggagatggagttcgagttcgacagactgagagccttccaggccatgcaggtgcactgcaacaacatgcacaccctgggcgccagactgcccggcggcgtggagtgcagattcagaagaggccccgccatggcctgggagggcgagcccatgagacacaacctgggcggcaacctgggcgaccccagagccagagccgtgagcgtgcccctgggcggcagagtggccagattcctgcagtgcagattcctgttcgccggcccctggctgctgttcagcgagatcagcttcatcagcgacgtggtgaacaacagcagccccgccctgggcggcaccttcccccccgccccctggtggccccccggccccccccccaccaacttcagcagcctggagctggagcccagaggccagcagcccgtggccaaggccgagggcagccccaccgccatcctgatcggctgcctggtggccatcatcctgctgctgctgctgatcatcgccctgatgctgtggagactgcactggagaagactgctgagcaaggccgagagaagagtgctggaggaggagctgaccgtgcacctgagcgtgcccggcgacaccatcctgatcaacaacagacccggccccagagagccccccccctaccaggagcccagacccagaggcaaccccccccacagcgccccctgcgtgcccaacggcagcgcctacagcggcgactacatggagcccgagaagcccggcgcccccctgctgcccccccccccccagaacagcgtgccccactacgccgaggccgacatcgtgaccctgcagggcgtgaccggcggcaacacctacgccgtgcccgccctgccccccggcgccgtgggcgacggcccccccagagtggacttccccagaagcagactgagattcaaggagaagctgggcgagggccagttcggcgaggtgcacctgtgcgaggtggacagcccccaggacctggtgagcctggacttccccctgaacgtgagaaagggccaccccctgctggtggccgtgaagatcctgagacccgacgccaccaagaacgccagaaacgacttcctgaaggaggtgaagatcatgagcagactgaaggaccccaacatcatcagactgctgggcgtgtgcgtgcaggacgaccccctgtgcatgatcaccgactacatggagaacggcgacctgaaccagttcctgagcgcccaccagctggaggacaaggccgccgagggcgcccccggcgacggccaggccgcccagggccccaccatcagctaccccatgctgctgcacgtggccgcccagatcgccagcggcatgagatacctggccaccctgaacttcgtgcacagagacctggccaccagaaactgcctggtgggcgagaacttcaccatcaagatcgccgacttcggcatgagcagaaacctgtacgccggcgactactacagagtgcagggcagagccgtgctgcccatcagatggatggcctgggagtgcatcctgatgggcaagttcaccaccgccagcgacgtgtgggccttcggcgtgaccctgtgggaggtgctgatgctgtgcagagcccagcccttcggccagctgaccgacgagcaggtgatcgagaacgccggcgagttcttcagagaccagggcagacaggtgtacctgagcagaccccccgcctgcccccagggcctgtacgagctgatgctgagatgctggagcagagagagcgagcagagaccccccttcagccagctgcacagattcctggccgaggacgccctgaacaccgtgtag

SEQ ID NO: 4873 - DNA, 384 bp, synthetic construct
  misc_feature 1..384: note = source = /note="Description of Artificial Sequence: Synthetic coding sequence"
  source 1..384: mol_type = other DNA
atgggccccgaggccctgagcagcctgctgctgctgctgctggtggccagcggcgacgccgacatgaagggccacttcgaccccgccaagtgcagatacgccctgggcatgcaggacagaaccatccccgacagcgacatcagcgccagcagcagctggagcgacagcaccgccgccagacacagcagactggagagcagcgacggcgacggcgcctggtgccccgccggcagcgtgttccccaaggaggaggagtacctgcaggtggacctgcagagactgcacctggtggccctggtgggcacccagggcagacacgccggcggcctgggcaaggagttcagcagaagctacagactgagatacagcagagacggcagatag

SEQ ID NO: 4874 - DNA, 1113 bp, synthetic construct
  misc_feature 1..1113: note = source = /note="Description of Artificial Sequence: Synthetic coding sequence"
  source 1..1113: mol_type = other DNA
atgaagaaggacgagccccccctggacttccccgacaccctggagggcttcgagtacgccttcaacgagaagggccagctgagacacatcaagaccggcgagcccttcgtgttcaactacagagaggacctgcacagatggaaccagaagagatacgaggccctgggcgagatcatcaccaagtacgtgtacgagctgctggagaaggactgcaacctgaagaaggtgagcatccccgtggacgccaccgagagcgagcccaagagcttcatcttcatgagcgaggacgccctgaccaacccccagaagctgatggtgctgatccacggcagcggcgtggtgagagccggccagtgggccagaagactgatcatcaacgaggacctggacagcggcacccagatccccttcatcaagagagccgtggccgagggctacggcgtgatcgtgctgaaccccaacgagaactacatcgaggtggagaagcccaagatccacgtgcagagcagcagcgacagcagcgacgagcccgccgagaagagagagagaaaggacaaggtgagcaaggagaccaagaagagaagagacttctacgagaagtacagaaacccccagagagagaaggagatgatgcagctgtacatcagagagaacggcagccccgaggagcacgccatctacgtgtgggaccacttcatcgcccaggccgccgccgagaacgtgttcttcgtggcccacagctacggcggcctggccttcgtggagctgatgatccagagagaggccgacgtgaagaacaaggtgaccgccgtggccctgaccgacagcgtgcacaacgtgtggcaccaggaggccggcaagaccatcagagagtggatgagagagaactgctgcaactgggtgagcagcagcgagcccctggacaccagcgtggagagcatgctgcccgactgccccagagtgagcgccggcaccgacagacacgagctgaccagctggaagagcttccccagcatcttcaagttcttcaccgaggccagcgaggccaagaccagcagcctgaagcccgccgtgaccagaagaagccacagaatcaagcacgaggagctgtag

SEQ ID NO: 4875 - DNA, 435 bp, synthetic construct
  misc_feature 1..435: note = source = /note="Description of Artificial Sequence: Synthetic coding sequence"
  source 1..435: mol_type = other DNA
atgaagaccggcctgttcttcctgtgcctgctgggcaccgccgccgccatccccaccaacgccagactgctgagcgaccacagcaagcccaccgccgagaccgtggcccccgacaacaccgccatccccagcctgagagccgaggccgaggagaacgagaaggagaccgccgtgagcaccgaggacgacagccaccacaaggccgagaagagcagcgtgctgaagagcaaggaggagagccacgagcagagcgccgagcagggcaagagcagcagccaggagctgggcctgaaggaccaggaggacagcgacggccacctgagcgtgaacctggagtacgcccccaccgagggcaccctggacatcaaggaggacatgagcgagccccaggagaagaagctgagcgagaacaccgacttcctggcccccggctag

SEQ ID NO: 4876 - DNA, 1341 bp, synthetic construct
  misc_feature 1..1341: note = source = /note="Description of Artificial Sequence: Synthetic coding sequence"
  source 1..1341: mol_type = other DNA
ctgaccctgcacagcctgacctgctacgaggacctggtgaccttcctgcagcagagcatccaccagttcgaggtgggcccctacggctgcatcctgctgaccctgagcgccatcctgagcagaagcaccgagctgatcagacaggacttcgacgtgcccaccagccacctgatcggcgcccacggctactgcacccaggagctggtgaacctgctgctgaccggcaaggccgtgagcaacgtgttcaacgacgtggtggagctggacagcggcgacggcaacatcaccctgctgagaggcatcgccgccagaagcgacatcggcttcctgagcctgttcgagcactacaacatgtgccaggtgggctgcttcctgaagacccccagattccccatctgggtggtgtgcagcgagagccacttcagcatcctgttcagcctgcagcccggcctgctgagagactggagaaccgagagactgttcgacctgtactactacgacggcctggccaaccagcaggagcagatcagactgaccatcgacaccacccagaccatcagcgaggacaccgacaacgacctggtgccccccctggagctgtgcatcagaaccaacatcggcagcgccctgggcttcaagtaccccgtgggcaacaaccagaccgccgtgcaggacaacgtgaaggtgagcctggccttcggcctgagcatcgccaccctggcccagagcgtgggccacatcagcggcgcccacctgaaccccgccgtgaccctgggcctgctgctgagctgccagatcagcatcttcagagccctgatgtacatcatcgcccagtgcgtgggcgccatcgtggccaccgccatcctgagcggcatcaccagcagcctgaccggcaacagcctgggcagaaacgacctggccgacggcgtgaacagcggccagggcctgggcatcgagatcatcggcaccctgcagctggtgctgtgcgtgctggccaccaccgacagaagaagaagagacctgggcggcagcgcccccctggccatcggcctgagcgtggccctgggccacctgctggccatcgactacaccggctgcggcatcaaccccgccagaagcttcggcagcgccgtgatcacccacaacttcagcaaccactggatcttctgggtgggccccttcatcggcggcgccctggccgtgctgatctacgacttcatcctggcccccagaagcagcgacctgaccgacagagtgaaggtgtggaccagcggccaggtggaggagtacgacctggacgccgacgacatcaacagcagagtggagatgaagcccaagtag

SEQ ID NO: 4877 - DNA, 81 bp, synthetic construct
  misc_feature 1..81: note = source = /note="Description of Artificial Sequence: Synthetic coding sequence"
  source 1..81: mol_type = other DNA
atgaagctgctgctgtgggcctgcatcgtgtgcgtggccttcgccagaaagaacgccggcctgggcttcctgtggctgtag

SEQ ID NO: 4878 - DNA, 348 bp, synthetic construct
  misc_feature 1..348: note = source = /note="Description of Artificial Sequence: Synthetic coding sequence"
  source 1..348: mol_type = other DNA
atgggccccgaggccctgagcagcctgctgctgctgctgctggtggccagcggcgacgccgacatgaagggccacttcgaccccgccaagtgcagatacgccctgggcatgcaggacagaaccatccccgacagcgacatcagcgccagcagcagctggagcgacagcaccgccgccagacacagcagactggagagcagcgacggcgacggcgcctggtgccccgccggcagcgtgttccccaaggaggaggagtacctgcaggtggacctgcagagactgcacctggtggccctggtgggcacccagggcagacacgccggcggcctgggcaaggagttcagctag

SEQ ID NO: 4879 - DNA, 165 bp, synthetic construct
  misc_feature 1..165: note = source = /note="Description of Artificial Sequence: Synthetic coding sequence"
  source 1..165: mol_type = other DNA
atgtacatccccctggaccccgactacaacgccgactgccccaacgtgaccgcccccgtgtgcgccagcaacggccacaccttccagaacgagtgcttcttctgcgtggagcagagagagttccactacagaatcaagttcgagaagtacggcaagtgcgactag

SEQ ID NO: 4880 - DNA, 351 bp, synthetic construct
  misc_feature 1..351: note = source = /note="Description of Artificial Sequence: Synthetic coding sequence"
  source 1..351: mol_type = other DNA
atggtgctgctgcactggtgcctgctgtggctgctgttccccctgagcagcagaacccagaagctgcccaccagagacgaggagctgttccagatgcagatcagagacaaggccttcttccacgacagcagcgtgatccccgacggcgccgagatcagcagctacctgttcagagacacccccaagagatacttcttcgtggtggaggaggacaacacccccctgagcgtgaccgtgaccccctgcgacgcccccctggagtggaagctgagcctgcaggagctgcccgaggacagaagcggcgagggcagcggcgacctggagcccctggagcagcagaagcagcagtag

SEQ ID NO: 4881 - DNA, 432 bp, synthetic construct
  misc_feature 1..432: note = source = /note="Description of Artificial Sequence: Synthetic coding sequence"
  source 1..432: mol_type = other DNA
atgggccccgaggccctgagcagcctgctgctgctgctgctggtggccagcggcgacgccgacatgaagggccacttcgaccccgccaagtgcagatacgccctgggcatgcaggacagaaccatccccgacagcgacatcagcgccagcagcagctggagcgacagcaccgccgccagacacagcagactggagagcagcgacggcgacggcgcctggtgccccgccggcagcgtgttccccaaggaggaggagtacctgcaggtggacctgcagagactgcacctggtggccctggtgggcacccagggcagacacgccggcggcctgggcaaggagttcagcagaagctacagactgagatacagcagagacggcagaagatggatgggctggaaggacagatggggccaggaggtgatcagcggctag

SEQ ID NO: 4882 - DNA, 747 bp, synthetic construct
  misc_feature 1..747: note = source = /note="Description of Artificial Sequence: Synthetic coding sequence"
  source 1..747: mol_type = other DNA
atggagctgctgcaggtgaccatcctgttcctgctgcccagcatctgcagcagcaacagcaccggcgtgctggaggccgccaacaacagcctggtggtgaccaccaccaagcccagcatcaccacccccaacaccgagagcctgcagaagaacgtggtgacccccaccaccggcaccacccccaagggcaccatcaccaacgagctgctgaagatgagcctgatgagcaccgccaccttcctgaccagcaaggacgagggcctgaaggccaccaccaccgacgtgagaaagaacgacagcatcatcagcaacgtgaccgtgaccagcgtgaccctgcccaacgccgtgagcaccctgcagagcagcaagcccaagagcagcgtgctgcagcccgacgccagccccagcaagaccggcaccctgaccagcatccccgtgaccatccccgagaacaccagccagagccaggtgatcggcaccgagggcggcaagaacgccagcaccagcgccaccagcagaagctacagcagcatcatcctgcccgtggtgatcgccctgatcgtgatcaccctgagcgtgttcgtgctggtgggcctgtacagaatgtgctggaaggccgaccccggcacccccgagaacggcaacgaccagccccagagcgacaaggagagcgtgaagctgctgaccgtgaagaccatcagccacgagagcggcgagcacagcgcccagggcaagaccaagaactag

SEQ ID NO: 4883 - DNA, 363 bp, synthetic construct
  misc_feature 1..363: note = source = /note="Description of Artificial Sequence: Synthetic coding sequence"
  source 1..363: mol_type = other DNA
atgaagaccggcctgttcttcctgtgcctgctgggcaccgccgccgccatccccaccaacgccagactgctgagcgaccacagcaagcccaccgccgagaccgtggcccccgacaacaccgccatccccagcctgagagccgaggccgaggagaacgagaaggagaccgccgtgagcaccgaggacgacagccaccacaaggccgagaagagcagcgtgctgaagagcaaggaggagagccacgagcagagcgccgagcagggcaagagcagcagccaggagctgggcctgaaggaccaggaggacagcgacggccacctgagcgtgaacctggagtacgcccccaccgagggcaccctgtag

SEQ ID NO: 4884 - DNA, 339 bp, synthetic construct
  misc_feature 1..339: note = source = /note="Description of Artificial Sequence: Synthetic coding sequence"
  source 1..339: mol_type = other DNA
atgggccccgaggccctgagcagcctgctgctgctgctgctggtggccagcggcgacgccgacatgaagggccacttcgaccccgccaagtgcagatacgccctgggcatgcaggacagaaccatccccgacagcgacatcagcgccagcagcagctggagcgacagcaccgccgccagacacagcagactggagagcagcgacggcgacggcgcctggtgccccgccggcagcgtgttccccaaggaggaggagtacctgcaggtggacctgcagagactgcacctggtggccctggtgggcacccagggcagacacgccggcggcctgggcaagtag

SEQ ID NO: 4885 - DNA, 513 bp, synthetic construct
  misc_feature 1..513: note = source = /note="Description of Artificial Sequence: Synthetic coding sequence"
  source 1..513: mol_type = other DNA
atgggccccgaggccctgagcagcctgctgctgctgctgctggtggccagcggcgacgccgacatgaagggccacttcgaccccgccaagtgcagatacgccctgggcatgcaggacagaaccatccccgacagcgacatcagcgccagcagcagctggagcgacagcaccgccgccagacacagcagactggagagcagcgacggcgacggcgcctggtgccccgccggcagcgtgttccccaaggaggaggagtacctgcaggtggacctgcagagactgcacctggtggccctggtgggcacccagggcagacacgccggcggcctgggcaaggagttcagcagaagctacagactgagatacagcagagacggcagaagatggatgggctggaaggacagatggggccaggaggtgatcagcggcaacgaggaccccgagggcgtggtgctgaaggacctgggcccccccatggtggccagactggtgagattctaccccagagcctag

SEQ ID NO: 4886 - DNA, 417 bp, synthetic construct
  misc_feature 1..417: note = source = /note="Description of Artificial Sequence: Synthetic coding sequence"
  source 1..417: mol_type = other DNA
atgggccccgaggccctgagcagcctgctgctgctgctgctggtggccagcggcgacgccgacatgaagggccacttcgaccccgccaagtgcagatacgccctgggcatgcaggacagaaccatccccgacagcgacatcagcgccagcagcagctggagcgacagcaccgccgccagacacagcagactggagagcagcgacggcgacggcgcctggtgccccgccggcagcgtgttccccaaggaggaggagtacctgcaggtggacctgcagagactgcacctggtggccctggtgggcacccagggcagacacgccggcggcctgggcaaggagttcagcagaagctacagactgagatacagcagagacggcagaagatggatgggctggaaggacagatggggccagtag

SEQ ID NO: 4887 - DNA, 285 bp, synthetic construct; identical to SEQ ID NO: 4394
  misc_feature 1..285: note = source = /note="Description of Artificial Sequence: Synthetic coding sequence"
  source 1..285: mol_type = other DNA

SEQ ID NO: 4888 - DNA, 156 bp, synthetic construct; identical to SEQ ID NO: 4850
  misc_feature 1..156: note = source = /note="Description of Artificial Sequence: Synthetic coding sequence"
  source 1..156: mol_type = other DNA

SEQ ID NO: 4889 - DNA, 2760 bp, synthetic construct; identical to SEQ ID NO: 4172
  misc_feature 1..2760: note = source = /note="Description of Artificial Sequence: Synthetic coding sequence"
  source 1..2760: mol_type = other DNA

SEQ ID NO: 4890 - DNA, 318 bp, synthetic construct
  misc_feature 1..318: note = source = /note="Description of Artificial Sequence: Synthetic coding sequence"
  source 1..318: mol_type = other DNA
atgggcgtgagcaagctggacatcctgtacagaagactgctgctgaccaagctgttcatcagaggctggggcagacccgaggacctgaagagactgttcgagttcagaaagatgatcggcaacagagagagatgccagaacctggtgagcagcgactaccccgtgcacatcgacaagatcgaggagcagagcgactgcaagatcctggacggccacttcgtgagccccatggcccactacgtgcccgacatcatgcccatcgagagcgtgatcgccagattccagttcatcgtgcccaaggagtggaacagcaagtag

SEQ ID NO: 4891 - DNA, 126 bp, synthetic construct
  misc_feature 1..126: note = source = /note="Description of Artificial Sequence: Synthetic coding sequence"
  source 1..126: mol_type = other DNA
atgaagctgagcggcatgttcctgctgctgagcctggccctgttctgcttcctgaccggcgtgttcagccagggcggccaggtggactgcggcgagttccaggaccccaaggtgtactgcacctag

SEQ ID NO: 4892 - DNA, 459 bp, synthetic construct; identical to SEQ ID NO: 4367
  misc_feature 1..459: note = source = /note="Description of Artificial Sequence: Synthetic coding sequence"
  source 1..459: mol_type = other DNA

SEQ ID NO: 4893 - DNA, 1611 bp, synthetic construct
  misc_feature 1..1611: note = source = /note="Description of Artificial Sequence: Synthetic coding sequence"
  source 1..1611: mol_type = other DNA
atggacttcctgctggccctggtgctggtgagcagcctgtacctgcaggccgccgccgagttcgacggcagatggcccagacagatcgtgagcagcatcggcctgtgcagatacggcggcagaatcgactgctgctggggctgggccagacagagctggggccagtgccagcccgtgtgccagcccagatgcaagcacggcgagtgcatcggccccaacaagtgcaagtgccaccccggctacgccggcaagacctgcaaccaggacctgaacgagtgcggcctgaagcccagaccctgcaagcacagatgcatgaacacctacggcagctacaagtgctactgcctgaacggctacatgctgatgcccgacggcagctgcagcagcgccctgacctgcagcatggccaactgccagtacggctgcgacgtggtgaagggccagatcagatgccagtgccccagccccggcctgcagctggcccccgacggcagaacctgcgtggacgtggacgagtgcgccaccggcagagccagctgccccagattcagacagtgcgtgaacaccttcggcagctacatctgcaagtgccacaagggcttcgacctgatgtacatcggcggcaagtaccagtgccacgacatcgacgagtgcagcctgggccagtaccagtgcagcagcttcgccagatgctacaacatcagaggcagctacaagtgcaagtgcaaggagggctaccagggcgacggcctgacctgcgtgtacatccccaaggtgatgatcgagcccagcggccccatccacgtgcccaagggcaacggcaccatcctgaagggcgacaccggcaacaacaactggatccccgacgtgggcagcacctggtggccccccaagaccccctacatcccccccatcatcaccaacagacccaccagcaagcccaccaccagacccacccccaagcccacccccatccccaccccccccccccccccccccctgcccaccgagctgagaacccccctgccccccaccacccccgagagacccaccaccggcctgaccaccatcgcccccgccgccagcaccccccccggcggcatcaccgtggacaacagagtgcagaccgacccccagaagcccagaggcgacgtgttcagcgtgctggtgcacagctgcaacttcgaccacggcctgtgcggctggatcagagagaaggacaacgacctgcactgggagcccatcagagaccccgccggcggccagtacctgaccgtgagcgccgccaaggcccccggcggcaaggccgccagactggtgctgcccctgggcagactgatgcacagcggcgacctgtgcctgagcttcagacacaaggtgaccggcctgcacagcggcaccctgcaggtgttcgtgagaaagcacggcgcccacggcgccgccctgtggggcagaaacggcggccacggctggagacagacccagatcaccctgagaggcgccgacatcaagagcgtggtgttcaagggcgagaagagaagaggccacaccggcgagatcggcctggacgacgtgagcctgaagaagggccactgcagcgaggagagatag

SEQ ID NO: 4894 - DNA, 288 bp, synthetic construct
  misc_feature 1..288: note = source = /note="Description of Artificial Sequence: Synthetic coding sequence"
  source 1..288: mol_type = other DNA
atgctgttcagaaacagattcctgctgctgctggccctggccgccctgctggccttcgtgagcctgagcctgcagttcttccacctgatccccgtgagcacccccaagaacggcatgagcagcaagagcagaaagagaatcatgcccgaccccgtgaccgagccccccgtgaccgaccccgtgtacgaggccctgctgtactgcaacatccccagcgtggccgagagaagcatggagggccacgccccccaccacttcaagctggtgagcgtgcacgtgttcatctag

SEQ ID NO: 4895 - DNA, 213 bp, synthetic construct
  misc_feature 1..213: note = source = /note="Description of Artificial Sequence: Synthetic coding sequence"
  source 1..213: mol_type = other DNA
atggccagcgacctgatcagaaccatcctggccgtggccctgatcagcaagctgggcaccgccgtggacgccgagctgatgcccagcggcgccatcctgcagaacaagagagagaacctgcccagagtgtgccacgccctggccttcctgggcatggccagatgccaggacctgttcctggtgagactgcagggctggaagctgggcacctag

SEQ ID NO: 4896 - DNA, 417 bp, synthetic construct; identical to SEQ ID NO: 4886
  misc_feature 1..417: note = source = /note="Description of Artificial Sequence: Synthetic coding sequence"
  source 1..417: mol_type = other DNA

SEQ ID NO: 4897 - DNA, 219 bp, synthetic construct
  misc_feature 1..219: note = source = /note="Description of Artificial Sequence: Synthetic coding sequence"
  source 1..219: mol_type = other DNA
atggccgtgagcgtgctgagactgaccgtggtgctgggcctgctggtgctgttcctgacctgctacgccgacgacaagcccgacaagcccgacgacaagcccgacgacagcggcaaggaccccaagcccgacttccccaagttcctgagcctgctgggcaccgagatcatcgagaacgccgtggagttcatcctgagaagcatgagcagaagcacctag

SEQ ID NO: 4898 - DNA, 438 bp, synthetic construct
  misc_feature 1..438: note = source = /note="Description of Artificial Sequence: Synthetic coding sequence"
  source 1..438: mol_type = other DNA
atggtgctgctgcactggtgcctgctgtggctgctgttccccctgagcagcagaacccagaagctgcccaccagagacgaggagctgttccagatgcagatcagagacaaggccttcttccacgacagcagcgtgatccccgacggcgccgagatcagcagctacctgttcagagacacccccaagagatacttcttcgtggtggaggaggacaacacccccctgagcgtgaccgtgaccccctgcgacgcccccctggagtggaagctgagcctgcaggagctgcccgaggacagaagcggcgagggcagcggcgacctggagcccctggagcagcagaagcagcagatcatcaacgaggagggcaccgagctgttcagctacaagggcaacgacgtggagtacttcatcagcagcagcagccccagcggcctgtag

SEQ ID NO: 4899 - DNA, 258 bp, synthetic construct
  misc_feature 1..258: note = source = /note="Description of Artificial Sequence: Synthetic coding sequence"
  source 1..258: mol_type = other DNA
atgggccccgaggccctgagcagcctgctgctgctgctgctggtggccagcggcgacgccgacatgaagggccacttcgaccccgccaagtgcagatacgccctgggcatgcaggacagaaccatccccgacagcgacatcagcgccagcagcagctggagcgacagcaccgccgccagacacagcagactggagagcagcgacggcgacggcgcctggtgccccgccggcagcgtgttccccaaggaggaggagtag

SEQ ID NO: 4900 - DNA, 1410 bp, synthetic construct
  misc_feature 1..1410: note = source = /note="Description of Artificial Sequence: Synthetic coding sequence"
  source 1..1410: mol_type = other DNA
atgctgaaggtgcactaccccaagttcggcgtgagcgaggactgcctgtacctgaacatctacgcccccgcccacgccgacaccggcagcaagctgcccgtgctggtgtggttccccggcggcgccttcaagaccggcagcgccagcatcttcgacggcagcgccctggccgcctacgaggacgtgctggtggtggtggtgcagtacagactgggcatcttcggcttcttcaccacctgggaccagcacgcccccggcaactgggccttcaaggaccaggtggccgccctgagctgggtgcagaagaacatcgagttcttcggcggcgaccccagcagcgtgaccatcttcggcgagagcgccggcgccatcagcgtgagcagcctgatcctgagccccatggccaagggcctgttccacaaggccatcatggagagcggcgtggccatcatcccctacctggaggcccacgactacgagaagagcgaggacctgcaggtggtggcccacttctgcggcaacaacgccagcgacagcgaggccctgctgagatgcctgagaaccaagcccagcaaggagctgctgaccctgagccagaagaccaagagcttcaccagagtggtggacggcgccttcttccccaacgagcccctggacctgctgagccagaaggccttcaaggccatccccagcatcatcggcgtgaacaaccacgagtgcggcttcctgctgcccatgaaggaggcccccgagatcctgagcggcagcaacaagagcctggccctgcacctgatccagaacatcctgcacatccccccccagtacctgcacctggtggccaacgagtacttccacgacaagcacagcctgaccgagatcagagacagcctgctggacctgctgggcgacgtgttcttcgtggtgcccgccctgatcaccgccagataccacagagacgccggcgcccccgtgtacttctacgagttcagacacagaccccagtgcttcgaggacaccaagcccgccttcgtgaaggccgaccacgccgacgaggtgagattcgtgttcggcggcgccttcctgaagggcgacatcgtgatgttcgagggcgccaccgaggaggagaagctgctgagcagaaagatgatgaagtactgggccaccttcgccagaaccggcaaccccaacggcaacgacctgagcctgtggcccgcctacaacctgaccgagcagtacctgcagctggacctgaacatgagcctgggccagagactgaaggagcccagagtggacttctggaccagcaccatccccctgatcctgagcgccagcgacatgctgcacagccccctgagcagcctgaccttcctgagcctgctgcagcccttcttcttcttctgcgccccctag

SEQ ID NO: 4901 - DNA, 393 bp, synthetic construct
  misc_feature 1..393: note = source = /note="Description of Artificial Sequence: Synthetic coding sequence"
  source 1..393: mol_type = other DNA
atgctgcccttcctgttcttcagcaccctgttcagcagcatcttcaccgaggcccagaagcagtactgggtgtgcaacagcagcgacgccagcatcagctacacctactgcggcagagacctgaagcagctgtacttcaacctgtacatcaccgtgaacaccatgaacctgcccaagagaaaggaggtgatctgcagaggcagcgacgacgactacagcttctgcagagccctgaagggcgagaccgtgaacaccaccatcagcttcagcttcaagggcatcaagttcagcaagggcaagtacaagtgcgtggtggaggccatcagcggcagccccgaggagatgctgttctgcctggagttcgtgatcctgcaccagcccaacagcaactag

SEQ ID NO: 4902 - DNA, 318 bp, synthetic construct
  misc_feature 1..318: note = source = /note="Description of Artificial Sequence: Synthetic coding sequence"
  source 1..318: mol_type = other DNA
atgaagtgcaccgccagagagtggctgagagtgaccaccgtgctgttcatggccagagccatccccgccatggtggtgcccaacgccaccctgctggagaagctgctggagaagtacatggacgaggacggcgagtggtggatcgccaagcagagaggcaagagagccatcaccgacaacgacatgcagagcatcctggacctgcacaacaagctgagaagccaggtgtaccccaccgccagcaacatggagtacatgacctgggacgtggagctggagagaagcgccgagagctgggccgagagctgcctgtggtag

SEQ ID NO: 4903 - DNA, 567 bp, synthetic construct
  misc_feature 1..567: note = source = /note="Description of Artificial Sequence: Synthetic coding sequence"
  source 1..567: mol_type = other DNA
atgaccatggtgtgccacagacccgagggcctggagcagctggaggcccagaccaacttcaccaagagagagctgcaggtgctgtacagaggcttcaagaacgagtgccccagcggcgtggtgaacgaggacaccttcaagcagatctacgcccagttcttcccccacggcgacgccagcacctacgcccactacctgttcaacgccttcgacaccacccagaccggcagcgtgaagttcgaggacttcgtgaccgccctgagcatcctgctgagaggcaccgtgcacgagaagctgagatggaccttcaacctgtacgacatcaacaaggacggctacatcaacaaggaggagatgatggacatcgtgaaggccatctacgacatgatgggcaagtacacctaccccgtgctgaaggaggacacccccagacagcacgtggacgtgttcttccagaagatggacaagaacaaggacggcatcgtgaccctggacgagttcctggagagctgccaggaggacgacaacatcatgagaagcctgcagctgttccagaacgtgatgtag

SEQ ID NO: 4904 - DNA, 1275 bp, synthetic construct
  misc_feature 1..1275: note = source = /note="Description of Artificial Sequence: Synthetic coding sequence"
  source 1..1275: mol_type = other DNA
atgccccccttcctgatcaccctgttcctgttccacagctgctgcctgagagccaacggccacctgagagagggcatgaccctgctgaagaccgagttcgccctgcacctgtaccagagcgtggccgcctgcagaaacgagaccaacttcgtgatcagccccgccggcgtgagcctgcccctggagatcctgcagttcggcgccgagggcagcaccggccagcagctggccgacgccctgggctacaccgtgcacgacaagagagtgaaggacttcctgcacgccgtgtacgccaccctgcccaccagcagccagggcaccgagatggagctggcctgcagcctgttcgtgcaggtgggcacccccctgagcccctgcttcgtggagcacgtgagctggtgggccaacagcagcctggagcccgccgacctgagcgagcccaacagcaccgccatccagaccagcgagggcgccagcagagagaccgccggcggcggccccagcgagggccccggcggctggccctgggagcaggtgagcgccgccttcgcccagctggtgctggtgagcaccatgagcttccagggcacctggagaaagagattcagcagcaccgacacccagatcctgcccttcacctgcgcctacggcctggtgctgcaggtgcccatgatgcaccagaccaccgaggtgaactacggccagttccaggacaccgccggccaccaggtgggcgtgctggagctgccctacctgggcagcgccgtgagcctgttcctggtgctgcccagagacaaggacacccccctgagccacatcgagccccacctgaccgccagcaccatccacctgtggaccaccagcctgagaagagccagaatggacgtgttcctgcccagattcagaatccagaaccagttcaacctgaagagcatcctgaacagctggggcgtgaccgacctgttcgaccccctgaaggccaacctgaagggcatcagcggccaggacggcttctacgtgagcgaggccatccacaaggccaagatcgaggtgctggaggagggcaccaaggccagcggcgccaccgccctgctgctgctgaagagaagcagaatccccatcttcaaggccgacagacccttcatctacttcctgagagagcccaacaccggcatcaccgtgttcttcgacagaatccagatcatctaccagtgcctgagcagcaacaagggcagcttcgtgcactaccccctgaagaacaagcacagcttctag

SEQ ID NO: 4905 - DNA, 1815 bp, synthetic construct
  misc_feature 1..1815: note = source = /note="Description of Artificial Sequence: Synthetic coding sequence"
  source 1..1815: mol_type = other DNA
atggccgtgctggtgtgccccgccagctgccacggcctgaaggagttcagaatcagaagaggcatgtggagactgtgcctggtgtactacttctaccccgccagcagcaccctgtacgtgctgagaatcgacgtgctgaactacaccagcaaggacgagggccccagcgccgagggcccccagagaaacaccagactgggctggatccagggcaagcaggtgaccgtgctgggcagccccgtgcccgtgaacgtgttcctgggcgtgcccttcgccgccccccccctgggcagcctgagattcaccaacccccagcccgccagcccctgggacaacctgagagaggccaccagctaccccaacctgtgcctgcagaacagcgagtggctgctgctggaccagcacatgctgaaggtgcactaccccaagttcggcgtgagcgaggactgcctgtacctgaacatctacgcccccgcccacgccgacaccggcagcaagctgcccgtgctggtgtggttccccggcggcgccttcaagaccggcagcgccagcatcttcgacggcagcgccctggccgcctacgaggacgtgctggtggtggtggtgcagtacagactgggcatcttcggcttcttcaccacctgggaccagcacgcccccggcaactgggccttcaaggaccaggtggccgccctgagctgggtgcagaagaacatcgagttcttcggcggcgaccccagcagcgtgaccatcttcggcgagagcgccggcgccatcagcgtgagcagcctgatcctgagccccatggccaagggcctgttccacaaggccatcatggagagcggcgtggccatcatcccctacctggaggcccacgactacgagaagagcgaggacctgcaggtggtggcccacttctgcggcaacaacgccagcgacagcgaggccctgctgagatgcctgagaaccaagcccagcaaggagctgctgaccctgagccagaagaccaagagcttcaccagagtggtggacggcgccttcttccccaacgagcccctggacctgctgagccagaaggccttcaaggccatccccagcatcatcggcgtgaacaaccacgagtgcggcttcctgctgcccatgaaggaggcccccgagatcctgagcggcagcaacaagagcctggccctgcacctgatccagaacatcctgcacatccccccccagtacctgcacctggtggccaacgagtacttccacgacaagcacagcctgaccgagatcagagacagcctgctggacctgctgggcgacgtgttcttcgtggtgcccgccctgatcaccgccagataccacagagacgccggcgcccccgtgtacttctacgagttcagacacagaccccagtgcttcgaggacaccaagcccgccttcgtgaaggccgaccacgccgacgaggtgagattcgtgttcggcggcgccttcctgaagggcgacatcgtgatgttcgagggcgccaccgaggaggagaagctgctgagcagaaagatgatgaagtactgggccaccttcgccagaaccggcaaccccaacggcaacgacctgagcctgtggcccgcctacaacctgaccgagcagtacctgcagctggacctgaacatgagcctgggccagagactgaaggagcccagagtggacttctggaccagcaccatccccctgatcctgagcgccagcgacatgctgcacagccccctgagcagcctgaccttcctgagcctgctgcagcccttcttcttcttctgcgccccctag

SEQ ID NO: 4906 - DNA, 939 bp, synthetic construct
  misc_feature 1..939: note = source = /note="Description of Artificial Sequence: Synthetic coding sequence"
  source 1..939: mol_type = other DNA
atgaacatctggggccagatctggcccaaggccgtgtacctggtgtgcaactacagccccaagggcaactggtggggccacgccccctacaagcacggcagaccctgcagcgcctgcccccccagcttcggcggcggctgcagagagaacctgtgctacaaggagggcagcgacagatactacccccccagagaggaggagaccaacgagatcgagagacagcagagccaggtgcacgacacccacgtgagaaccagaagcgacgacagcagcagaaacgaggtgatcagcgcccagcagatgagccagatcgtgagctgcgaggtgagactgagagaccagtgcaagggcaccacctgcaacagatacgagtgccccgccggctgcctggacagcaaggccaaggtgatcggcagcgtgcactacgagatgcagagcagcatctgcagagccgccatccactacggcatcatcgacaacgacggcggctgggtggacatcaccagacagggcagaaagcactacttcatcaagagcaacagaaacggcatccagaccatcggcaagtaccagagcgccaacagcttcaccgtgagcaaggtgaccgtgcaggccgtgacctgcgagaccaccgtggagcagctgtgccccttccacaagcccgccagccactgccccagagtgtactgccccagaaactgcatgcaggccaacccccactacgccagagtgatcggcaccagagtgtacagcgacctgagcagcatctgcagagccgccgtgcacgccggcgtggtgagaaaccacggcggctacgtggacgtgatgcccgtggacaagagaaagacctacatcgccagcttccagaacggcatcttcagcgagagcctgcagaacccccccggcggcaaggccttcagagtgttcgccgtggtgtag

SEQ ID NO: 4907 - DNA, 777 bp, synthetic construct; identical to SEQ ID NO: 3586
  misc_feature 1..777: note = source = /note="Description of Artificial Sequence: Synthetic coding sequence"
  source 1..777: mol_type = other DNA

SEQ ID NO: 4908 - DNA, 1215 bp, synthetic construct; identical to SEQ ID NO: 4411
  misc_feature 1..1215: note = source = /note="Description of Artificial Sequence: Synthetic coding sequence"
  source 1..1215: mol_type = other DNA

SEQ ID NO: 4909 - DNA, 936 bp, synthetic construct; identical to SEQ ID NO: 4810
  misc_feature 1..936: note = source = /note="Description of Artificial Sequence: Synthetic coding sequence"
  source 1..936: mol_type = other DNA

SEQ ID NO: 4910 - DNA, 555 bp, synthetic construct
  misc_feature 1..555: note = source = /note="Description of Artificial Sequence: Synthetic coding sequence"
  source 1..555: mol_type = other DNA
atggccagcgagagactgcccaacagacccgcctgcctgctggtggccagcggcgccgccgagggcgtgagcgcccagagcttcctgcactgcttcaccatggccagcaccgccttcaacctgcaggtggccacccccggcggcaaggccatggagttcgtggacgtgaccgagagcaacgccagatgggtgcaggacttcagactgaaggcctacgccagccccgccaagctggagagcatcgacgagcccatctgcgccgtgggccacggcgtggccgccctgtgctgcgccaccaacgaggacagaagctgggtgttcgacagctacagcctgaccggccccagcgtgtgcgagctggtgagagcccccggcttcgccagactgcccctggtggtggaggacttcgtgaaggacagcggcgcctgcttcagcgccagcgagcccgacgccgtgcacgtggtgctggacagacacctggtgaccggccagaacgccagcagcaccgtgcccgccgtgcagaacctgctgttcctgtgcggcagcagaaagtag

SEQ ID NO: 4911 - DNA, 1257 bp, synthetic construct; identical to SEQ ID NO: 3980
  misc_feature 1..1257: note = source = /note="Description of Artificial Sequence: Synthetic coding sequence"
  source 1..1257: mol_type = other DNA

SEQ ID NO: 4912 - DNA, 1425 bp, synthetic construct
  misc_feature 1..1425: note = source = /note="Description of Artificial Sequence: Synthetic coding sequence"
  source 1..1425: mol_type = other DNA
atggacagaaaccccagcccccccccccccggcagagacaaggaggaggaggaggaggtggccggcggcgactgcatcggcagcaccgtgtacagcaagcactggctgttcggcgtgctgagcggcctgatccagatcgtgagccccgagaacaccaagagcagcagcgacgacgaggagcagctgaccgagctggacgaggagatggagaacgagatctgcagagtgtgggacatgagcatggacgaggacgtggccctgttcctgcaggagttcaacgcccccgacatcttcatgggcgtgctggccaagagcaagtgccccagactgagagagatctgcgtgggcatcctgggcaacatggcctgcttccaggagatctgcgtgagcatcagcagcgacaagaacctgggccaggtgctgctgcactgcctgtacgacagcgacccccccaccctgctggagaccagcagactgctgctgacctgcctgagccaggccgaggtggccagcgtgtgggtggagagaatccaggagcaccccgccatctacgacagcatctgcttcatcatgagcagcagcaccaacgtggacctgctggtgaaggtgggcgaggtggtggacaagctgttcgacctggacgagaagctgatgctggagtgggtgagaaacggcgccgcccagcccctggaccagccccaggaggagagcgaggagcagcccgtgttcagactggtgccctgcatcctggaggccgccaagcaggtgagaagcgagaaccccgagtggctggacgtgtacatgcacatcctgcagctgctgaccaccgtggacgacggcatccaggccatcgtgcactgccccgacaccggcaaggacatctggaacctgctgttcgacctggtgtgccacgagttctgccagagcgacgacccccccatcatcctgcaggagcagaagaccgtgctggccagcgtgttcagcgtgctgagcgccatctacgccagccagaccgagcaggagtacctgaagatcgagaaggtggacctgcccctgatcgacagcctgatcagagtgctgcagaacatggagcagtgccagaagaagcccgagaacagcgccgagagcaacaccgaggagaccaagagaaccgacctgacccaggacgacttccacctgaagatcctgaaggacatcctgtgcgagttcctgagcaacatcttccaggccctgaccaaggagaccgtggcccagggcgtgaaggagggccagctgagcaagcagaagtgcagcagcgccttccagaacctgctgcccttctacagccccgtggtggaggacttcatcaagatcctgagagaggtggacaaggccctggccgacgacctggagaagaacttccccagcctgaaggtgcagacctag

SEQ ID NO: 4913 - DNA, 438 bp, synthetic construct; identical to SEQ ID NO: 3746
  misc_feature 1..438: note = source = /note="Description of Artificial Sequence: Synthetic coding sequence"
  source 1..438: mol_type = other DNA

SEQ ID NO: 4914 - DNA, 1728 bp, synthetic construct
  misc_feature 1..1728: note = source = /note="Description of Artificial Sequence: Synthetic coding sequence"
  source 1..1728: mol_type = other DNA
tgaatcttcggcggcagcatccactacttcagagtgcccagagagtactggagagacagactgctgaagatgaaggcctgcggcctgaacaccctgaccacctacgtgccctggaacctgcacgagcccgagagaggcaagttcgacttcagcggcaacctggacctggaggccttcgtgctgatggccgccgagatcggcctgtgggtgatcctgagacccggcccctacatctgcagcgagatggacctgggcggcctgcccagctggctgctgcaggaccccggcatgagactgagaaccacctacaagggcttcaccgaggccgtggacctgtacttcgaccacctgatgagcagagtggtgcccctgcagtacaagagaggcggccccatcatcgccgtgcaggtggagaacgagtacggcagctacaacaaggaccccgcctacatgccctacgtgaagaaggccctggaggacagaggcatcgtggagctgctgctgaccagcgacaacaaggacggcctgagcaagggcatcgtgcagggcgtgctggccaccatcaacctgcagagcacccacgagctgcagctgctgaccaccttcctgttcaacgtgcagggcacccagcccaagatggtgatggagtactggaccggctggttcgacagctggggcggcccccacaacatcctggacagcagcgaggtgctgaagaccgtgagcgccatcgtggacgccggcagcagcatcaacctgtacatgttccacggcggcaccaacttcggcttcatgaacggcgccatgcacttccacgactacaagagcgacgtgaccagctacgactacgacgccgtgctgaccgaggccggcgactacaccgccaagtacatgaagctgagagacttcttcggcagcatcagcggcatccccctgccccccccccccgacctgctgcccaagatgccctacgagcccctgacccccgtgctgtacctgagcctgtgggacgccctgaagtacctgggcgagcccatcaagagcgagaagcccatcaacatggagaacctgcccgtgaacggcggcaacggccagagcttcggctacatcctgtacgagaccagcatcaccagcagcggcatcctgagcggccacgtgcacgacagaggccaggtgttcgtgaacaccgtgagcatcggcttcctggactacaagaccaccaagatcgccgtgcccctgatccagggctacaccgtgctgagaatcctggtggagaacagaggcagagtgaactacggcgagaacatcgacgaccagagaaagggcctgatcggcaacctgtacctgaacgacagccccctgaagaacttcagaatctacagcctggacatgaagaagagcttcttccagagattcggcctggacaagtggagcagcctgcccgagacccccaccctgcccgccttcttcctgggcagcctgagcatcagcagcaccccctgcgacaccttcctgaagctggagggctgggagaagggcgtggtgttcatcaacggccagaacctgggcagatactggaacatcggcccccagaagaccctgtacctgcccggcccctggctgagcagcggcatcaaccaggtgatcgtgttcgaggagaccatggccggccccgccctgcagttcaccgagaccccccacctgggcagaaaccagtacatcaagtag

SEQ ID NO: 4915 - DNA, 255 bp, synthetic construct
  misc_feature 1..255: note = source = /note="Description of Artificial Sequence: Synthetic coding sequence"
  source 1..255: mol_type = other DNA
atgagaaccctgttcaacctgctgtggctggccctggcctgcagccccgtgcacaccaccctgagcaagagcgacgccaagaaggccgccagcaagaccctgctggagaagagccagttcagcgacaagcccgtgcaggacagaggcctggtggtgaccgacctgaaggccgagagcgtggtgctggagcacagaagctactgcagcgccaaggccagagacagacacttcgccggcgacgtgctgggctactag

SEQ ID NO: 4916 - DNA, 744 bp, synthetic construct
  misc_feature 1..744: note = source = /note="Description of Artificial Sequence: Synthetic coding sequence"
  source 1..744: mol_type = other DNA
atgagaagcctgctgctgctgagcgccttctgcctgctggaggccgccctggccgccgaggtgaagaagcccgccgccgccgccgcccccggcaccgccgagaagctgagccccaaggccgccaccctggccgagagaagcgccggcctggccttcagcctgtaccaggccatggccaaggaccaggccgtggagaacatcctggtgagccccgtggtggtggccagcagcctgggcctggtgagcctgggcggcaaggccaccaccgccagccaggccaaggccgtgctgagcgccgagcagctgagagacgaggaggtgcacgccggcctgggcgagctgctgagaagcctgagcaacagcaccgccagaaacgtgacctggaagctgggcagcagactgtacggccccagcagcgtgagcttcgccgacgacttcgtgagaagcagcaagcagcactacaactgcgagcacagcaagatcaacttcagagacaagagaagcgccctgcagagcatcaacgagtgggccgcccagaccaccgacggcaagctgcccgaggtgaccaaggacgtggagagaaccgacggcgccctgctggtgaacgccatgttcttcaagccccactgggacgagaagttccaccacaagatggtggacaacagaggcttcatggtgaccagaagctacaccgtgggcgtgatgatgatgcacagaaccggcctgtacaactactacgactag

SEQ ID NO: 4917 - DNA, 117 bp, synthetic construct
  misc_feature 1..117: note = source = /note="Description of Artificial Sequence: Synthetic coding sequence"
  source 1..117: mol_type = other DNA
atgagaaccctgttcaacctgctgtggctggccctggcctgcagccccgtgcacaccaccctgagcaagagcgacgccaagaaggccgccagcaagaccctgctggagaaggtgtag

SEQ ID NO: 4918 - DNA, 750 bp, synthetic construct
  misc_feature 1..750: note = source = /note="Description of Artificial Sequence: Synthetic coding sequence"
  source 1..750: mol_type = other DNA
atgagaagcctgctgctgctgagcgccttctgcctgctggaggccgccctggccgccgaggtgaagaagcccgccgccgccgccgcccccggcaccgccgagaagctgagccccaaggccgccaccctggccgagagaagcgccggcctggccttcagcctgtaccaggccatggccaaggaccaggccgtggagaacatcctggtgagccccgtggtggtggccagcagcctgggcctggtgagcctgggcggcaaggccaccaccgccagccaggccaaggccgtgctgagcgccgagcagctgagagacgaggaggtgcacgccggcctgggcgagctgctgagaagcctgagcaacagcaccgccagaaacgtgacctggaagctgggcagcagactgtacggccccagcagcgtgagcttcgccgacgacttcgtgagaagcagcaagcagcactacaactgcgagcacagcaagatcaacttcagagacaagagaagcgccctgcagagcatcaacgagtgggccgcccagaccaccgacggcaagctgcccgaggtgaccaaggacgtggagagaaccgacggcgccctgctggtgaacgccatgttcttcaagccccactgggacgagaagttccaccacaagatggtggacaacagaggcttcatggtgaccagaagctacaccgtgggcgtgatgatgatgcacagaaccggcctgtacaactactacgacgacgagtag

SEQ ID NO: 4919 - DNA, 201 bp, synthetic construct
  misc_feature 1..201: note = source = /note="Description of Artificial Sequence: Synthetic coding sequence"
  source 1..201: mol_type = other DNA
atgaagcccctgctggtggtgttcgtgttcctgttcctgtgggaccccgtgctggccggcatcaacagcctgagcagcgagatgcacaagaagtgctacaagaacggcatctgcagactggagtgctacgagagcgagatgctggtggcctactgcatgttccagctggagtgctgcgtgaagggcaaccccgccccctag

SEQ ID NO: 4920 - DNA, 1002 bp, synthetic construct; identical to SEQ ID NO: 4312
  misc_feature 1..1002: note = source = /note="Description of Artificial Sequence: Synthetic coding sequence"
  source 1..1002: mol_type = other DNA

SEQ ID NO: 4921 - DNA, 645 bp, synthetic construct
  misc_feature 1..645: note = source = /note="Description of Artificial Sequence: Synthetic coding sequence"
  source 1..645: mol_type = other DNA
atgagacccaagaccggccaggtgggctgcgagacccccgaggagctgggccccggccccagacagagatggcccctgctgctgctgggcctggccatggtggcccacggcctgctgagacccatggtggccccccagagcggcgaccccgaccccggcgccagcgtgggcagcagcagaagcagcctgagaagcctgtggggcagactgctgctgcagcccagcccccagagagccgaccccagatgctggcccagaggcttctggagcgagccccagagcctgtgctacgtgttcggcaccggcaccaaggtgaccgtgctgggccagcccaaggccaaccccaccgtgaccctgttcccccccagcagcgaggagctgcaggccaacaaggccaccctggtgtgcctgatcagcgacttctaccccggcgccgtgaccgtggcctggaaggccgacggcagccccgtgaaggccggcgtggagaccaccaagcccagcaagcagagcaacaacaagtacgccgccagcagctacctgagcctgacccccgagcagtggaagagccacagaagctacagctgccaggtgacccacgagggcagcaccgtggagaagaccgtggcccccaccgagtgcagctag

SEQ ID NO: 4922 - DNA, 1050 bp, synthetic construct
  misc_feature 1..1050: note = source = /note="Description of Artificial Sequence: Synthetic coding sequence"
  source 1..1050: mol_type = other DNA
tgactgtacaagaacagactgggcagcggcggcagaggcagatgcatcaagcagggcgagaactggtacagccccaccgagttcgaggccatggccggcagagccagcagcaaggactggaagagaagcatcagatacgccggcagacccctgcagtgcctgatccaggacggcatcctgaacccccacgccgccagctgcacctgcgccgcctgctgcgacgacatgaccctgagcggccccgtgagactgttcgtgccctacaagagaagaaagaaggagaacgagctgcccaccacccccgtgaagaaggacagccccaagaacatcaccctgctgcccgccaccgccgccaccaccttcaccgtgacccccagcggccagatcaccaccagcggcgccctgaccttcgacagagccagcaccgtggaggccaccgccgtgatcagcgagagccccgcccagggcgacgtgttcgccggcgccaccgtgcaggaggccagcgtgcagcccccctgcagagccagccaccccgagccccactaccccggctaccaggacagctgccagatcgcccccttccccgaggccgccctgcccaccagccaccccaagatcgtgctgaccagcctgcccgccctggccgtgcccccccccacccccaccaaggccgccccccccgccctggtgaacggcctggagctgagcgagcccagaagctggctgtacctggaggagatggtgaacagcctgctgaacaccgcccagcagctgaagaccctgttcgagcaggccaagcacgccagcacctacagagaggccgccaccaaccaggccaagatccacgccgacgccgagagaaaggagcagagctgcgtgaactgcggcagagaggccatgagcgagtgcaccggctgccacaaggtgaactactgcagcaccttctgccagagaaagagatggagcctgaccatgctgaccagcctggtgagcatcagctggctgagagccatcctgccctgccagccccccaaggtgctgggcctgtag

SEQ ID NO: 4923 - DNA, 600 bp, synthetic construct
  misc_feature 1..600: note = source = /note="Description of Artificial Sequence: Synthetic coding sequence"
  source 1..600: mol_type = other DNA
atgagcctggacatccagagcctggacatccagtgcgaggagctgagcgacgccagatgggccgagctgctgcccctgctgcagcagtgccaggtggtgagactggacgactgcggcctgaccgaggccagatgcaaggacatcagcagcgccctgagagtgaaccccgccctggccgagctgaacctgagaagcaacgagctgggcgacgtgggcgtgcactgcgtgctgcagggcctgcagacccccagctgcaagatccagaagctgagcctgcagaactgctgcctgaccggcgccggctgcggcgtgctgagcagcaccctgagaaccctgcccaccctgcaggagctgcacctgagcgacaacctgctgggcgacgccggcctgcagctgctgtgcgagggcctgctggacccccagtgcagactggagaagctgcagctggagtactgcagcctgagcgccgccagctgcgagcccctggccagcgtgctgagagccaagcccgacttcaaggagctgaccgtgagcaacaacgacatcaacgaggccggcgtgagagtgctgtgccagggcctgaaggacagcccctgctag

SEQ ID NO: 4924 - DNA, 465 bp, synthetic construct
  misc_feature 1..465: note = source = /note="Description of Artificial Sequence: Synthetic coding sequence"
  source 1..465: mol_type = other DNA
atggccggcatccccggcctgctgttcctgctgttcttcctgctgtgcgccgtgggccaggtgagcccctacagcgccccctggaagcccacctggcccgcctacagactgcccgtggtgctgccccagagcaccctgaacctggccaagcccgacttcggcgccgaggccaagctggaggtgagcagcagctgcggcccccagtgccacaagggcacccccctgcccacctacgaggaggccaagcagtacctgagctacgagaccctgtacgccaacggcagcagaaccgagacccaggtgggcatctacatcctgagcagcagcggcgacggcgcccagcacagagacagcggcagcagcggcaagagcagaagaaagagacagatctacggctacgacagcagattcagcatcttcggcaaggacttcctgctgaactaccccttcagcaccagcgtgtag

SEQ ID NO: 4925 - DNA, 936 bp, synthetic construct; identical to SEQ ID NO: 3636
  misc_feature 1..936: note = source = /note="Description of Artificial Sequence: Synthetic coding sequence"
  source 1..936: mol_type = other DNA

SEQ ID NO: 4926 - DNA, 1404 bp, synthetic construct; identical to SEQ ID NO: 3990
  misc_feature 1..1404: note = source = /note="Description of Artificial Sequence: Synthetic coding sequence"
  source 1..1404: mol_type = other DNA

SEQ ID NO: 4927 - DNA, 81 bp, synthetic construct
  misc_feature 1..81: note = source = /note="Description of Artificial Sequence: Synthetic coding sequence"
  source 1..81: mol_type = other DNA
atgagaaccctgttcaacctgctgtggctggccctggcctgcagccccgtgcacaccaccctgagcaagagcgacgcctag

SEQ ID NO: 4928 - DNA, 549 bp, synthetic construct
  misc_feature 1..549: note = source = /note="Description of Artificial Sequence: Synthetic coding sequence"
  source 1..549: mol_type = other DNA
atgagaagaatgtgggccacccagggcctggccgtggccctggccctgagcgtgctgcccggcagcagagccctgagacccggcgactgcgaggtgtgcatcagctacctgggcagattctaccaggacctgaaggacagagacgtgaccttcagccccgccaccatcgagaacgagctgatcaagttctgcagagaggccagaggcaaggagaacagactgtgctactacatcggcgccaccgacgacgccgccaccaagatcatcaacgaggtgagcaagcccctggcccaccacatccccgtggagaagatctgcgagaagctgaagaagaaggacagccagatctgcgagctgaagtacgacaagcagatcgacctgagcaccgtggacctgaagaagctgagagtgaaggagctgaagaagatcctggacgactggggcgagacctgcaagggctgcgccgagaagagcgactacatcagaaagatcaacgagctgatgcccaagtacgcccccaaggccgccagcgccagaaccgacctgtag

SEQ ID NO: 4929 - DNA, 153 bp, synthetic construct
  misc_feature 1..153: note = source = /note="Description of Artificial Sequence: Synthetic coding sequence"
  source 1..153: mol_type = other DNA
atgaaggtgttcttcctgttcgccgtgctgttctgcctggtgcagaccaacagcgtgcacatcagccacagagaggccagaggccccagcttcagaatctgcgtggacttcctgggccccagatgggccagaggctgcagcaccggcaactag

SEQ ID NO: 4930 - DNA, 666 bp, synthetic construct
  misc_feature 1..666: note = source = /note="Description of Artificial Sequence: Synthetic coding sequence"
  source 1..666: mol_type = other DNA
atgggcgccaccaccatggaccagaagagcctgtgggccggcgtggtggtgctgctgctgctgcagggcggcagcgcctacaagctggtgtgctacttcaccaactggagccaggacagacaggagcccggcaagttcacccccgagaacatcgaccccttcctgtgcagccacctgatctacagcttcgccagcatcgagaacaacaaggtgatcatcaaggacaagagcgaggtgatgctgtaccagaccatcaacagcctgaagaccaagaaccccaagctgaagatcctgctgagcatcggcggctacctgttcggcagcaagggcttccaccccatggtggacagcagcaccagcagactggagttcatcaacagcatcatcctgttcctgagaaaccacaacttcgacggcctggacgtgagctggatctaccccgaccagaaggagaacacccacttcaccgtgctgatccacgagctggccgaggccttccagaaggacttcaccaagagcaccaaggagagactgctgctgaccgccggcgtgagcgccggcagacagatgatcgacaacagctaccaggtggagaagctggccaaggacctggacttcatcaacctgctgagcttcgacttccacggcagctgggagaagccctag

SEQ ID NO: 4931 - DNA, 1257 bp, synthetic construct; identical to SEQ ID NO: 3870
  misc_feature 1..1257: note = source = /note="Description of Artificial Sequence: Synthetic coding sequence"
  source 1..1257: mol_type = other DNA

SEQ ID NO: 4932 - DNA, 612 bp, synthetic construct
  misc_feature 1..612: note = source = /note="Description of Artificial Sequence: Synthetic coding sequence"
  source 1..612: mol_type = other DNA
atgagaagcctgctgctgctgagcgccttctgcctgctggaggccgccctggccgccgaggtgaagaagcccgccgccgccgccgcccccggcaccgccgagaagctgagccccaaggccgccaccctggccgagagaagcgccggcctggccttcagcctgtaccaggccatggccaaggaccaggccgtggagaacatcctggtgagccccgtggtggtggccagcagcctgggcctggtgagcctgggcggcaaggccaccaccgccagccaggccaaggccgtgctgagcgccgagcagctgagagacgaggaggtgcacgccggcctgggcgagctgctgagaagcctgagcaacagcaccgccagaaacgtgacctggaagctgggcagcagactgtacggccccagcagcgtgagcttcgccgacgacttcgtgagaagcagcaagcagcactacaactgcgagcacagcaagatcaacttcagagacaagagaagcgccctgcagagcatcaacgagtgggccgcccagaccaccgacggcaagctgcccgaggtgaccaaggacgtggagagaaccgacggcgccctgctggtgaacgcctag

SEQ ID NO: 4933 - DNA, 492 bp, synthetic construct
  misc_feature 1..492: note = source = /note="Description of Artificial Sequence: Synthetic coding sequence"
  source 1..492: mol_type = other DNA
atgagaagcctgctgctgctgagcgccttctgcctgctggaggccgccctggccgccgaggtgaagaagcccgccgccgccgccgcccccggcaccgccgagaagctgagccccaaggccgccaccctggccgagagaagcgccggcctggccttcagcctgtaccaggccatggccaaggaccaggccgtggagaacatcctggtgagccccgtggtggtggccagcagcctgggcctggtgagcctgggcggcaaggccaccaccgccagccaggccaaggccgtgctgagcgccgagcagctgagagacgaggaggtgcacgccggcctgggcgagctgctgagaagcctgagcaacagcaccgccagaaacgtgacctggaagctgggcagcagactgtacggccccagcagcgtgagcttcgccgacgacttcgtgagaagcagcaagcagcactacaactgcgagcacagcaagatcaacttctag

SEQ ID NO: 4934 - DNA, 570 bp, synthetic construct
  misc_feature 1..570: note = source = /note="Description of Artificial Sequence: Synthetic coding sequence"
  source 1..570: mol_type = other DNA
atgagcctggacatccagagcctggacatccagtgcgaggagctgagcgacgccagatgggccgagctgctgcccctgctgcagcagtgccaggtggtgagactggacgactgcggcctgaccgaggccagatgcaaggacatcagcagcgccctgagagtgaaccccgccctggccgagctgaacctgagaagcaacgagctgggcgacgtgggcgtgcactgcgtgctgcagggcctgcagacccccagctgcaagatccagaagctgagcctgcagaactgctgcctgaccggcgccggctgcggcgtgctgagcagcaccctgagaaccctgcccaccctgcaggagctgcacctgagcgacaacctgctgggcgacgccggcctgcagctgctgtgcgagggcctgctggacccccagtgcagactggagaagctgcagctggagtactgcagcctgagcgccgccagctgcgagcccctggccagcgtgctgagagccaagcccgacttcaaggagctgaccgtgagcaacaacgacatcaacgaggccggcgtgagagtgtag

SEQ ID NO: 4935 - DNA, 585 bp, synthetic construct
  misc_feature 1..585: note = source = /note="Description of Artificial Sequence: Synthetic coding sequence"
  source 1..585: mol_type = other DNA
atgagcctggacatccagagcctggacatccagtgcgaggagctgagcgacgccagatgggccgagctgctgcccctgctgcagcagtgccaggtggtgagactggacgactgcggcctgaccgaggccagatgcaaggacatcagcagcgccctgagagtgaaccccgccctggccgagctgaacctgagaagcaacgagctgggcgacgtgggcgtgcactgcgtgctgcagggcctgcagacccccagctgcaagatccagaagctgagcctgcagaactgctgcctgaccggcgccggctgcggcgtgctgagcagcaccctgagaaccctgcccaccctgcaggagctgcacctgagcgacaacctgctgggcgacgccggcctgcagctgctgtgcgagggcctgctggacccccagtgcagactggagaagctgcagctggagtactgcagcctgagcgccgccagctgcgagcccctggccagcgtgctgagagccaagcccgacttcaaggagctgaccgtgagcaacaacgacatcaacgaggccggcgtgagagtgctgtgccagggcctgtag

SEQ ID NO: 4936 - DNA, 1086 bp, synthetic construct; identical to SEQ ID NO: 4639
  misc_feature 1..1086: note = source = /note="Description of Artificial Sequence: Synthetic coding sequence"
  source 1..1086: mol_type = other DNA

SEQ ID NO: 4937 - DNA, 327 bp, synthetic construct
  misc_feature 1..327: note = source = /note="Description of Artificial Sequence: Synthetic coding sequence"
  source 1..327: mol_type = other DNA
tgacccaagagcaagtggagaagcaagatcctgctgggcctgaacttctacggcatggactacgccaccagcaaggacgccagagagcccgtggtgggcgccagatacatccagaccctgaaggaccacagacccagaatggtgtgggacagccaggccagcgagcacttcttcgagtacaagaagagcagaagcggcagacacgtggtgttctaccccaccctgaagagcctgcaggtgagactggagctggccagagagctgggcgtgggcgtgagcatctgggagctgggccagggcctggactacttctacgacctgctgtag

SEQ ID NO: 4938 - DNA, 504 bp, synthetic construct
  misc_feature 1..504: note = source = /note="Description of Artificial Sequence: Synthetic coding sequence"
  source 1..504: mol_type = other DNA
atgagaagcctgctgctgctgagcgccttctgcctgctggaggccgccctggccgccgaggtgaagaagcccgccgccgccgccgcccccggcaccgccgagaagctgagccccaaggccgccaccctggccgagagaagcgccggcctggccttcagcctgtaccaggccatggccaaggaccaggccgtggagaacatcctggtgagccccgtggtggtggccagcagcctgggcctggtgagcctgggcggcaaggccaccaccgccagccaggccaaggccgtgctgagcgccgagcagctgagagacgaggaggtgcacgccggcctgggcgagctgctgagaagcctgagcaacagcaccgccagaaacgtgacctggaagctgggcagcagactgtacggccccagcagcgtgagcttcgccgacgacttcgtgagaagcagcaagcagcactacaactgcgagcacagcaagatcaacttcagagacaagagatag

SEQ ID NO: 4939 - DNA, 1209 bp, synthetic construct; identical to SEQ ID NO: 3820
  misc_feature 1..1209: note = source = /note="Description of Artificial Sequence: Synthetic coding sequence"
  source 1..1209: mol_type = other DNA

SEQ ID NO: 4940 - DNA, 975 bp, synthetic construct
  misc_feature 1..975: note = source = /note="Description of Artificial Sequence: Synthetic coding sequence"
  source 1..975: mol_type = other DNA
atgagaagcctgctgctgctgagcgccttctgcctgctggaggccgccctggccgccgaggtgaagaagcccgccgccgccgccgcccccggcaccgccgagaagctgagccccaaggccgccaccctggccgagagaagcgccggcctggccttcagcctgtaccaggccatggccaaggaccaggccgtggagaacatcctggtgagccccgtggtggtggccagcagcctgggcctggtgagcctgggcggcaaggccaccaccgccagccaggccaaggccgtgctgagcgccgagcagctgagagacgaggaggtgcacgccggcctgggcgagctgctgagaagcctgagcaacagcaccgccagaaacgtgacctggaagctgggcagcagactgtacggccccagcagcgtgagcttcgccgacgacttcgtgagaagcagcaagcagcactacaactgcgagcacagcaagatcaacttcagagacaagagaagcgccctgcagagcatcaacgagtgggccgcccagaccaccgacggcaagctgcccgaggtgaccaaggacgtggagagaaccgacggcgccctgctggtgaacgccatgttcttcaagccccactgggacgagaagttccaccacaagatggtggacaacagaggcttcatggtgaccagaagctacaccgtgggcgtgatgatgatgcacagaaccggcctgtacaactactacgacgacgagaaggagaagctgcagatcgtggagatgcccctggcccacaagctgagcagcctgatcatcctgatgccccaccacgtggagcccctggagagactggagaagctgctgaccaaggagcagctgaagatctggatgggcaagatgcagaagaaggccgtggccatcagcctgcccaagggcgtggtggaggtgacccacgacctgcaggtgagaggcggccccgcctag

SEQ ID NO: 4941 - DNA, 990 bp, synthetic construct
  misc_feature 1..990: note = source = /note="Description of Artificial Sequence: Synthetic coding sequence"
  source 1..990: mol_type = other DNA
atggtgagcaagagcagatggaagctgctggccatgctggccctggtgctggtggtgatggtgtggtacagcatcagcagagaggacagcttctacttccccatccccgagaagaaggagccctgcctgcagggcgaggccgagagcaaggccagcaagctgttcggcaactacagcagagaccagcccatcttcctgagactggaggactacttctgggtgaagacccccagcgcctacgagctgccctacggcaccaagggcagcgaggacctgctgctgagagtgctggccatcaccagcagcagcatccccaagaacatccagagcctgagatgcagaagatgcgtggtggtgggcaacggccacagactgagaaacagcagcctgggcgacgccatcaacaagtacgacgtggtgatcagactgaacaacgcccccgtggccggctacgagggcgacgtgggcagcaagaccaccatgagactgttctaccccgagagcgcccacttcgaccccaaggtggagaacaaccccgacaccctgctggtgctggtggccttcaaggccatggacttccactggatcgagaccatcctgagcgacaagaagagagtgagaaagggcttctggaagcagccccccctgatctgggacgtgaaccccaagcagatcagaatcctgaaccccttcttcatggagatcgccgccgacaagctgctgagcctgcccatgcagcagcccagaaagatcaagcagaagcccaccaccggcctgctggccatcaccctggccctgcacctgtgcgacctggtgcacatcgccggcttcggctaccccgacgcctacaacaagaagcagaccatccactactacgagcagatcaccctgaagagcatggccggcagcggccacaacgtgagccaggaggccctggccatcaagagaatgctggagatgggcgccatcaagaacctgaccagcttctag

SEQ ID NO: 4942 - DNA, 351 bp, synthetic construct
  misc_feature 1..351: note = source = /note="Description of Artificial Sequence: Synthetic coding sequence"
  source 1..351: mol_type = other DNA
atgagaaccctgttcaacctgctgtggctggccctggcctgcagccccgtgcacaccaccctgagcaagagcgacgccaagaaggccgccagcaagaccctgctggagaagagccagttcagcgacaagcccgtgcaggacagaggcctggtggtgaccgacctgaaggccgagagcgtggtgctggagcacagaagctactgcagcgccaaggccagagacagacacttcgccggcgacgtgctgggctacgtgaccccctggaacagccacggctacgacgtgaccaaggtgttcggcagcaagttcacccagatcagccccgtgtggctgcagctgaagagaagatag

SEQ ID NO: 4943 - DNA, 282 bp, synthetic construct; identical to SEQ ID NO: 4196
  misc_feature 1..282: note = source = /note="Description of Artificial Sequence: Synthetic coding sequence"
  source 1..282: mol_type = other DNA

SEQ ID NO: 4944 - DNA, 255 bp, synthetic construct
  misc_feature 1..255: note = source = /note="Description of Artificial Sequence: Synthetic coding sequence"
  source 1..255: mol_type = other DNA
atgagacccaagaccggccaggtgggctgcgagacccccgaggagctgggccccggccccagacagagatggcccctgctgctgctgggcctggccatggtggcccacggcctgctgagacccatggtggccccccagagcggcgaccccgaccccggcgccagcgtgggcagcagcagaagcagcctgagaagcctgtggggcagaagcgcccagggccagccccactgccacagcgtgcccgccctgctgtag

SEQ ID NO: 4945 - DNA, 27 bp, synthetic construct
  misc_feature 1..27: note = source = /note="Description of Artificial Sequence: Synthetic coding sequence"
  source 1..27: mol_type = other DNA
atgagcctggacatccagagcctgtag

SEQ ID NO: 4946 - DNA, 576 bp, synthetic construct
  misc_feature 1..576: note = source = /note="Description of Artificial Sequence: Synthetic coding sequence"
  source 1..576: mol_type = other DNA
atgctgatcttctggaccatcaccctgttcctgctgggcgccgccaagggcaaggaggtgtgctacgaggacctgggctgcttcagcgacaccgagccctggggcggcaccgccatcagacccctgaagatcctgccctggagccccgagaagatcggcaccagattcctgctgtacaccaacgagaaccccaacaacttccagatcctgctgctgagcgaccccagcaccatcgaggccagcaacttccagatggacagaaagaccagattcatcatccacggcttcatcgacaagggcgacgagagctgggtgaccgacatgtgcaagaagctgttcgaggtggaggaggtgaactgcatctgcgtggactggaagaagggcagccaggccacctacacccaggccgccaacaacgtgagagtggtgggcgcccaggtggcccagatgctggacatcctgctgaccgagtacagctacccccccagcaaggtgcacctgatcggccacagcctgggcgcccacgtggccggcgaggccggcagcaagacccccggcctgagcagaatcacctag

SEQ ID NO: 4947 - DNA, 123 bp, synthetic construct
  misc_feature 1..123: note = source = /note="Description of Artificial Sequence: Synthetic coding sequence"
  source 1..123: mol_type = other DNA
atgagcctggacatccagagcctggacatccagtgcgaggagctgagcgacgccagatgggccgagctgctgcccctgctgcagcagtgccaggtggtgagactggacgactgcggcctgtag

SEQ ID NO: 4948 - DNA, 648 bp, synthetic construct
  misc_feature 1..648: note = source = /note="Description of Artificial Sequence: Synthetic coding sequence"
  source 1..648: mol_type = other DNA
atgagacccaagaccggccaggtgggctgcgagacccccgaggagctgggccccggccccagacagagatggcccctgctgctgctgggcctggccatggtggcccacggcctgctgagacccatggtggccccccagagcggcgaccccgaccccggcgccagcgtgggcagcagcagaagcagcctgagaagcctgtggggcagcagactgctgctgcagcccagcccccagagagccgaccccagatgctggcccagaggcttctggagcgagccccagagcctgtgctacgtgttcggcaccggcaccaaggtgaccgtgctgggccagcccaaggccaaccccaccgtgaccctgttcccccccagcagcgaggagctgcaggccaacaaggccaccctggtgtgcctgatcagcgacttctaccccggcgccgtgaccgtggcctggaaggccgacggcagccccgtgaaggccggcgtggagaccaccaagcccagcaagcagagcaacaacaagtacgccgccagcagctacctgagcctgacccccgagcagtggaagagccacagaagctacagctgccaggtgacccacgagggcagcaccgtggagaagaccgtggcccccaccgagtgcagctag

SEQ ID NO: 4949 - DNA, 999 bp, synthetic construct
  misc_feature 1..999: note = source = /note="Description of Artificial Sequence: Synthetic coding sequence"
  source 1..999: mol_type = other DNA
atgtgccccgccggctggaagctgctggccatgctggccctggtgctggtggtgatggtgtggtacagcatcagcagagaggacagatacatcgagctgttctacttccccatccccgagaagaaggagccctgcctgcagggcgaggccgagagcaaggccagcaagctgttcggcaactacagcagagaccagcccatcttcctgagactggaggactacttctgggtgaagacccccagcgcctacgagctgccctacggcaccaagggcagcgaggacctgctgctgagagtgctggccatcaccagcagcagcatccccaagaacatccagagcctgagatgcagaagatgcgtggtggtgggcaacggccacagactgagaaacagcagcctgggcgacgccatcaacaagtacgacgtggtgatcagactgaacaacgcccccgtggccggctacgagggcgacgtgggcagcaagaccaccatgagactgttctaccccgagagcgcccacttcgaccccaaggtggagaacaaccccgacaccctgctggtgctggtggccttcaaggccatggacttccactggatcgagaccatcctgagcgacaagaagagagtgagaaagggcttctggaagcagccccccctgatctgggacgtgaaccccaagcagatcagaatcctgaaccccttcttcatggagatcgccgccgacaagctgctgagcctgcccatgcagcagcccagaaagatcaagcagaagcccaccaccggcctgctggccatcaccctggccctgcacctgtgcgacctggtgcacatcgccggcttcggctaccccgacgcctacaacaagaagcagaccatccactactacgagcagatcaccctgaagagcatggccggcagcggccacaacgtgagccaggaggccctggccatcaagagaatgctggagatgggcgccatcaagaacctgaccagcttctag

SEQ ID NO: 4950 - DNA, 888 bp, synthetic construct
  misc_feature 1..888: note = source = /note="Description of Artificial Sequence: Synthetic coding sequence"
  source 1..888: mol_type = other DNA
atgagaagcctgctgctgctgagcgccttctgcctgctggaggccgccctggccgccgaggtgaagaagcccgccgccgccgccgcccccggcaccgccgagaagctgagccccaaggccgccaccctggccgagagaagcgccggcctggccttcagcctgtaccaggccatggccaaggaccaggccgtggagaacatcctggtgagccccgtggtggtggccagcagcctgggcctggtgagcctgggcggcaaggccaccaccgccagccaggccaaggccgtgctgagcgccgagcagctgagagacgaggaggtgcacgccggcctgggcgagctgctgagaagcctgagcaacagcaccgccagaaacgtgacctggaagctgggcagcagactgtacggccccagcagcgtgagcttcgccgacgacttcgtgagaagcagcaagcagcactacaactgcgagcacagcaagatcaacttcagagacaagagaagcgccctgcagagcatcaacgagtgggccgcccagaccaccgacggcaagctgcccgaggtgaccaaggacgtggagagaaccgacggcgccctgctggtgaacgccatgttcttcaagccccactgggacgagaagttccaccacaagatggtggacaacagaggcttcatggtgaccagaagctacaccgtgggcgtgatgatgatgcacagaaccggcctgtacaactactacgacgacgagaaggagaagctgcagatcgtggagatgcccctggcccacaagctgagcagcctgatcatcctgatgccccaccacgtggagcccctggagagactggagaagctgctgaccaaggagcagctgaagatctggatgggctag

SEQ ID NO: 4951 - DNA, 399 bp, synthetic construct
  misc_feature 1..399: note = source = /note="Description of Artificial Sequence: Synthetic coding sequence"
  source 1..399: mol_type = other DNA
atgagaaccctgttcaacctgctgtggctggccctggcctgcagccccgtgcacaccaccctgagcaagagcgacgccaagaaggccgccagcaagaccctgctggagaagagccagttcagcgacaagcccgtgcaggacagaggcctggtggtgaccgacctgaaggccgagagcgtggtgctggagcacagaagctactgcagcgccaaggccagagacagacacttcgccggcgacgtgctgggctacgtgaccccctggaacagccacggctacgacgtgaccaaggtgttcggcagcaagttcacccagatcagccccgtgtggctgcagctgaagagaagaggcagagagatgttcgaggtgaccggcctgcacgacgtggaccagggctag

SEQ ID NO: 4952 - DNA, 360 bp, synthetic construct
  misc_feature 1..360: note = source = /note="Description of Artificial Sequence: Synthetic coding sequence"
  source 1..360: mol_type = other DNA
atgagaaccctgttcaacctgctgtggctggccctggcctgcagccccgtgcacaccaccctgagcaagagcgacgccaagaaggccgccagcaagaccctgctggagaagagccagttcagcgacaagcccgtgcaggacagaggcctggtggtgaccgacctgaaggccgagagcgtggtgctggagcacagaagctactgcagcgccaaggccagagacagacacttcgccggcgacgtgctgggctacgtgaccccctggaacagccacggctacgacgtgaccaaggtgttcggcagcaagttcacccagatcagccccgtgtggctgcagctgaagagaagaggcagagagtag

SEQ ID NO: 4953 - DNA, 390 bp, synthetic construct; identical to SEQ ID NO: 3632
  misc_feature 1..390: note = source = /note="Description of Artificial Sequence: Synthetic coding sequence"
  source 1..390: mol_type = other DNA

SEQ ID NO: 4954 - DNA, 1386 bp, synthetic construct; identical to SEQ ID NO: 3950
  misc_feature 1..1386: note = source = /note="Description of Artificial Sequence: Synthetic coding sequence"
  source 1..1386: mol_type = other DNA

SEQ ID NO: 4955 - DNA, 453 bp, synthetic construct
  misc_feature 1..453: note = source = /note="Description of Artificial Sequence: Synthetic coding sequence"
  source 1..453: mol_type = other DNA
atgagaagcctgctgctgctgagcgccttctgcctgctggaggccgccctggccgccgaggtgaagaagcccgccgccgccgccgcccccggcaccgccgagaagctgagccccaaggccgccaccctggccgagagaagcgccggcctggccttcagcctgtaccaggccatggccaaggaccaggccgtggagaacatcctggtgagccccgtggtggtggccagcagcctgggcctggtgagcctgggcggcaaggccaccaccgccagccaggccaaggccgtgctgagcgccgagcagctgagagacgaggaggtgcacgccggcctgggcgagctgctgagaagcctgagcaacagcaccgccagaaacgtgacctggaagctgggcagcagactgtacggccccagcagcgtgagcttcgccgacgacttcgtgagaagcagctag

SEQ ID NO: 4956 - DNA, 1257 bp, synthetic construct; identical to SEQ ID NO: 3980
  misc_feature 1..1257: note = source = /note="Description of Artificial Sequence: Synthetic coding sequence"
  source 1..1257: mol_type = other DNA

SEQ ID NO: 4957 - DNA, 1002 bp, synthetic construct; identical to SEQ ID NO: 4312
  misc_feature 1..1002: note = source = /note="Description of Artificial Sequence: Synthetic coding sequence"
  source 1..1002: mol_type = other DNA

SEQ ID NO: 4958 - DNA, 987 bp, synthetic construct
  misc_feature 1..987: note = source = /note="Description of Artificial Sequence: Synthetic coding sequence"
  source 1..987: mol_type = other DNA
atgtgccccgccggctggaagctgctggccatgctggccctggtgctggtggtgatggtgtggtacagcatcagcagagaggacagcttctacttccccatccccgagaagaaggagccctgcctgcagggcgaggccgagagcaaggccagcaagctgttcggcaactacagcagagaccagcccatcttcctgagactggaggactacttctgggtgaagacccccagcgcctacgagctgccctacggcaccaagggcagcgaggacctgctgctgagagtgctggccatcaccagcagcagcatccccaagaacatccagagcctgagatgcagaagatgcgtggtggtgggcaacggccacagactgagaaacagcagcctgggcgacgccatcaacaagtacgacgtggtgatcagactgaacaacgcccccgtggccggctacgagggcgacgtgggcagcaagaccaccatgagactgttctaccccgagagcgcccacttcgaccccaaggtggagaacaaccccgacaccctgctggtgctggtggccttcaaggccatggacttccactggatcgagaccatcctgagcgacaagaagagagtgagaaagggcttctggaagcagccccccctgatctgggacgtgaaccccaagcagatcagaatcctgaaccccttcttcatggagatcgccgccgacaagctgctgagcctgcccatgcagcagcccagaaagatcaagcagaagcccaccaccggcctgctggccatcaccctggccctgcacctgtgcgacctggtgcacatcgccggcttcggctaccccgacgcctacaacaagaagcagaccatccactactacgagcagatcaccctgaagagcatggccggcagcggccacaacgtgagccaggaggccctggccatcaagagaatgctggagatgggcgccatcaagaacctgaccagcttctag

SEQ ID NO: 4959 - DNA, 585 bp, synthetic construct; identical to SEQ ID NO: 3585
  misc_feature 1..585: note = source = /note="Description of Artificial Sequence: Synthetic coding sequence"
  source 1..585: mol_type = other DNA

SEQ ID NO: 4960 - DNA, 1386 bp, synthetic construct; identical to SEQ ID NO: 3950
  misc_feature 1..1386: note = source = /note="Description of Artificial Sequence: Synthetic coding sequence"
  source 1..1386: mol_type = other DNA

SEQ ID NO: 4961 - DNA, 1995 bp, synthetic construct
  misc_feature 1..1995: note = source = /note="Description of Artificial Sequence: Synthetic coding sequence"
  source 1..1995: mol_type = other DNA
atgccccaggcccccagcaccggcagcagcctgatcagagaccccagcatcgcccacagaaacacccagatcctgtggaccgaggccggcagagacctggcccaggacaccagatacaccggcgaggagagcctgaccatcttcgtggacaagagaaagctgagcaagagagccgagggcagcgacagcaccaccaacagcagcagcgtgaccctggagaccctgcaccagctggccgccagctacttcatcgacagagacagcaccctgagaagactgcaccacatccagatcgccagcaccgccatcaaggtgaccgagaccagaaccggccccctgggctgcagcaactacgacaacctggacagcgtgagcagcgtgctggtgcagagccccgagaacaagatccagctgcagggcctgcaggtgctgctgcccgactacctgcaggagagattcgtgcaggccgccctgagctacatcgcctgcaacagcgagggcgagttcatctgcaaggagaacgactgctggtgccactgcggccccaagttccccgagtgcaactgccccagcatggacatccaggccatggaggagaacctgctgagaatcaccgagacctggaaggcctacaacagcgacttcgaggagagcgacgagttcaagctgttcatgaagagactgcccatgaactacttcctgaacaccagcaccatcatgcacctgtggaccatggacagcaacttccagagaagatacgagcagctggagaacagcatgaagcagctgttcctgaaggcccagaagatcgtgcacaagctgttcagcctgagcaagagatgccacaagcagcccctgatcagcctgcccagacagagaaccagcacctactggctgaccagaatccagagcttcctgtactgcaacgagaacggcctgctgggcagcttcagcgaggagacccacagctgcacctgccccaacgaccaggtggtgtgcaccgccttcctgccctgcaccgtgggcgacgccagcgcctgcctgacctgcgcccccgacaacagaaccagatgcggcacctgcaacaccggctacatgctgagccagggcctgtgcaagcccgaggtggccgagagcaccgaccactacatcggcttcgagaccgacctgcaggacctggagatgaagtacctgctgcagaagaccgacagaagaatcgaggtgcacgccatcttcatcagcaacgacatgagactgaacagctggttcgaccccagctggagaaagagaatgctgctgaccctgaagagcaacaagtacaagagcagcctggtgcacatgatcctgggcctgagcctgcagatctgcctgaccaagaacagcaccctggagcccgtgctggccgtgtacgtgaaccccttcggcggcagccacagcgagagctggttcatgcccgtgaacgagaacagcttccccgactgggagagaaccaagctggacctgcccctgcagtgctacaactggaccctgaccctgggcaacaagtggaagaccttcttcgagaccgtgcacatctacctgagaagcagaatcaagagcaacggccccaacggcaacgagagcatctactacgagcccctggagttcatcgaccccagcagaaacctgggctacatgaagatcaacaacatccaggtgttcggctacagcatgcacttcgaccccgaggccatcagagacctgatcctgcagctggactacccctacacccagggcagccaggacagcgccctgctgcagctgctggagatcagagacagagtgaacaagctgagcccccccggccagagaagactggacctgttcagctgcctgctgagacacagactgaagctgagcaccagcgaggtggtgagaatccagagcgccctgcaggccttcaacgccaagctgcccaacaccatggactacgacaccaccaagctgtgcagctag

SEQ ID NO: 4962 - DNA, 459 bp, synthetic construct
  misc_feature 1..459: note = source = /note="Description of Artificial Sequence: Synthetic coding sequence"
  source 1..459: mol_type = other DNA
atggccagagactacgaccacctgttcaagctgctgatcatcggcgacagcggcgtgggcaagagcagcctgctgctgagattcgccgacaacaccttcagcggcagctacatcaccaccatcggcgtggacttcaagatcagaaccgtggagatcaacggcgagaaggtgaagctgcagatctgggacaccgccggccaggagagattcagaaccatcaccagcacctactacagaggcacccacggcgtgatcgtggtgtacgacgtgaccagcgccgagagcttcgtgaacgtgaagagatggctgcacgagatcaaccagaactgcgacgacgtgtgcagaatcctggacgtgcagctgcaccacggcgccggcccccccagcaaggagagacagcccggcaagaccgccgccgccaccaccgagagatgcggcgaggcccacgaggagcagtag

SEQ ID NO: 4963 - DNA, 696 bp, synthetic construct
  misc_feature 1..696: note = source = /note="Description of Artificial Sequence: Synthetic coding sequence"
  source 1..696: mol_type = other DNA
atgctgtacatcggcatcgccgagtacttcttcaagagcgccagcttcgcccacttcaccgccggcgtgttcaacgtgaccctgagcaccgaggagatcagcaaccacttcgtgcagaacagccagggcctgggcaacgtgctgagcagaatcgccgagatctacatcctgagccagcccttcatggtgagaatcatggccaccgagccccccatcatcaacctgcagcccggcaacttcaccctggacatccccgccagcatcatgatgctgacccagcccaagaacagcaccgtggagaccatcgtgagcatggacttcgtggccagcaccagcgtgggcctggtgatcctgggccagagactggtgtgcagcctgagcctgaacagattcagactggccctgcccgagagcaacagaagcaacatcgaggtgctgagattcgagaacatcctgagcagcatcctgcacttcggcgtgctgcccctggccaacgccaagctgcagcagggcttccccctgagcaacccccacaagttcctgttcgtgaacagcgacatcgaggtgctggagggcttcctgctgatcagcaccgacctgaagtacgagaccagcagcaagcagcagcccagcttccacgtgtgggagggcctgaacctgatcagcagacagtggagaggcaagagcgccccctag

SEQ ID NO: 4964 - DNA, 1911 bp, synthetic construct; identical to SEQ ID NO: 3895
  misc_feature 1..1911: note = source = /note="Description of Artificial Sequence: Synthetic coding sequence"
  source 1..1911: mol_type = other DNA

SEQ ID NO: 4965 - DNA, 1374 bp, synthetic construct
  misc_feature 1..1374: note = source = /note="Description of Artificial Sequence: Synthetic coding sequence"
  source 1..1374: mol_type = other DNA
atgggctgcagcctgcccctgagctgcatcatggtgagaagcgtggcctgggccggcttcatggtgctgctgatgatcccctggggcagcgccgccaagctggtgtgctacttcaccaactgggcccagtacagacagggcgaggccagattcctgcccaaggacctggaccccagcctgtgcacccacctgatctacgccttcgccggcatgaccaaccaccagctgagcaccaccgagtggaacgacgagaccctgtaccaggagttcaacggcctgaagaagatgttcaccgacatggtggccaccgccaacaacagacagaccttcgtgaacagcgccatcagattcctgagaaagtacagcttcgacggcctggacctggactgggagtaccccggcagccagggcagccccgccgtggacaaggagagattcaccaccctggtgcaggacctggccaacgccttccagcaggaggcccagaccagcggcaaggagagactgctgctgagcgccgccgtgcccgccggccagacctacgtggacgccggctacgaggtggacaagatcgcccagaacctggacttcgtgaacctgatggcctacgacttccacggcagctgggagaaggtgaccggccacaacagccccctgtacaagagacaggaggagagcggcgccgccgccagcctgaacgtggacgccgccgtgcagcagtggctgcagaagggcacccccgccagcaagctgatcctgggcatgcccacctacggcagaagcttcaccctggccagcagcagcgacaccagagtgggcgcccccgccaccggcagcggcacccccggccccttcaccaaggagggcggcatgctggcctactacgaggtgtgcagctggaagggcgccaccaagcagagaatccaggaccagaaggtgccctacatcttcagagacaaccagtgggtgggcttcgacgacgtggagagcttcaagaccaaggtgagctacctgaagcagaagggcctgggcggcgccatggtgtgggccctggacctggacgacttcgccggcttcagctgcaaccagggcagataccccctgatccagaccctgagacaggagctgagcctgccctacctgcccagcggcacccccgagctggaggtgcccaagcccggccagcccagcgagcccgagcacggccccagccccggccaggacaccttctgccagggcaaggccgacggcctgtaccccaaccccagagagagaagcagcttctacagctgcgccgccggcagactgttccagcagagctgccccaccggcctggtgttcagcaacagctgcaagtgctgcacctggaactag

SEQ ID NO: 4966 - DNA, 1125 bp, synthetic construct
  misc_feature 1..1125: note = source = /note="Description of Artificial Sequence: Synthetic coding sequence"
  source 1..1125: mol_type = other DNA
atgtacgtgagcaccagagagagatacaagtggctgagattcagcgaggactgcctgtacctgaacgtgtacgcccccgccagagcccccggcgacccccagctgcccgtgatggtgtggttccccggcggcgccttcatcgtgggcgccgccagcagctacgagggcagcgacctggccgccagagagaaggtggtgctggtgttcctgcagcacagactgggcatcttcggcttcctgagatggagaggcagaaccgacgacagccacgccagaggcaactggggcctgctggaccagatggccgccctgagatgggtgcaggagaacatcgccgccttcggcggcgaccccggcaacgtgaccctgttcggccagagcgccggcgccatgagcatcagcggcctgatgatgagccccctggccagcggcctgttccacagagccatcagccagagcggcaccgccctgttcagactgttcatcaccagcaaccccctgaaggtggccaagaaggtggcccacctggccggctgcaaccacaacagcacccagatcctggtgaactgcctgagagccctgagcggcaccaaggtgatgagagtgagcaacaagatgagattcctgcagctgaacttccagagagaccccgaggagatcatctggagcatgagccccgtggtggacggcgtggtgatccccgacgaccccctggtgctgctgacccagggcaaggtgagcagcgtgccctacctgctgggcgtgaacaacctggagttcaactggctgctgccctacatcatgaagttccccctgaacagacaggccatgagaaaggagaccatcaccaagatgctgtggagcaccagaaccctgctgaacatcaccaaggagcaggtgcccctggtggtggaggagtacctggacaacgtgaacgagcacgactggaagatgctgagaaacagaatgatggacatcgtgcaggacgccaccttcgtgtacgccaccctgcagaccgcccactaccacagagagacccccatgatgggcatctgccccgccggccacgccaccaccagaatgaagagcacctgcagctggatcctgccccaggagtgggcctag

SEQ ID NO: 4967 - DNA, 384 bp, synthetic construct
  misc_feature 1..384: note = source = /note="Description of Artificial Sequence: Synthetic coding sequence"
  source 1..384: mol_type = other DNA
atgaagaccggcctgttcttcctgtgcctgctgggcaccgccgccgccatccccaccaacgccagactgctgagcgaccacagcaagcccaccgccgagaccgtggcccccgacaacaccgccatccccagcctgagagccgaggccgaggagaacgagaaggagaccgccgtgagcaccgaggacgacagccaccacaaggccgagaagagcagcgtgctgaagagcaaggaggagagccacgagcagagcgccgagcagggcaagagcagcagccaggagctgggcctgaaggaccaggaggacagcgacggccacctgagcgtgaacctggagtacgcccccaccgagggcaccctggacatcaaggaggacatgagctag

SEQ ID NO: 4968 - DNA, 285 bp, synthetic construct; identical to SEQ ID NO: 4264
  misc_feature 1..285: note = source = /note="Description of Artificial Sequence: Synthetic coding sequence"
  source 1..285: mol_type = other DNA

SEQ ID NO: 4969 - DNA, 414 bp, synthetic construct
  misc_feature 1..414: note = source = /note="Description of Artificial Sequence: Synthetic coding sequence"
  source 1..414: mol_type = other DNA
atggccgccctgagcagagccctgggccccctgagaacccccgccccccccctgtggatcggcctgttcctggtggccaccggcagccagcagagcctggcccagcccctgcccggcaacaccaccgaggccacccccagaagcctgagagccagcggcagcctgtgcggcccccacgccaaggccccctacctgtgcgaggccacccacgagcccgccgccgccagaatcagagcccaggtgcccgacaccagatggagcagagtgggcggccagagattctacagcagagtgctgagccccctgcacagaggccccagcggccacaccgaggccagcgcccagagaagccacatgggcaagctgaaggagccccagccccaggaccacaagcccggcctgggcgccagctag

SEQ ID NO: 4970 - DNA, 228 bp, synthetic construct
  misc_feature 1..228: note = source = /note="Description of Artificial Sequence: Synthetic coding sequence"
  source 1..228: mol_type = other DNA
atgctgaaggtgcactaccccaagttcggcgtgagcgaggactgcctgtacctgaacatctacgcccccgcccacgccgacaccggcagcaagctgcccgtgctggtgtggttccccggcggcgccttcaagaccggcagcgccagcatcttcgacggcagcgccctggccgcctacgaggacgtgctggtggtggtggtgcagtacagactgggcatcttcggctag

SEQ ID NO: 4971 - DNA, 1491 bp, synthetic construct
  misc_feature 1..1491: note = source = /note="Description of Artificial Sequence: Synthetic coding sequence"
  source 1..1491: mol_type = other DNA
atggcccccgccagaaccatggccagagccagactggcccccgccgactgcctgaacagcttcaccgccggcgtgcccggcttcgtgctggacaccaacgccagcgtgagcaacggcgccaccttcctggagagccccaccgtgagaagaggctgggactgcgtgagagcctgctgcaccacccagaactgcaacctggccctggtggagctgcagcccgacagaggcgaggacgccatcgccgcctgcttcctgatcaactgcctgtacgagcagaacttcgtgtgcaagttcgcccccagagagggcttcatcaactacctgaccagagaggtgtacagaagctacagacagctgagaacccagggcttcggcggcagcggcatccccaaggcctgggccggcatcgacctgaaggtgcagccccaggagcccctggtgctgaaggacgtggagaacaccgactggagactgctgagaggcgacaccgacgtgagagtggagagaaaggaccccaaccaggtggagctgtggggcctgaaggagggcacctacctgttccagctgaccgtgaccagcagcgaccaccccgaggacaccgccaacgtgaccgtgaccgtgctgagcaccaagcagaccgaggactactgcctggccagcaacaaggtgggcagatgcagaggcagcttccccagatggtactacgaccccaccgagcagatctgcaagagcttcgtgtacggcggctgcctgggcaacaagaacaactacctgagagaggaggagtgcatcctggcctgcagaggcgtgcagggcggccccctgagaggcagcagcggcgcccaggccaccttcccccagggccccagcatggagagaagacaccccgtgtgcagcggcacctgccagcccacccagttcagatgcagcaacggctgctgcatcgacagcttcctggagtgcgacgacacccccaactgccccgacgccagcgacgaggccgcctgcgagaagtacaccagcggcttcgacgagctgcagagaatccacttccccagcgacaagggccactgcgtggacctgcccgacaccggcctgtgcaaggagagcatccccagatggtactacaaccccttcagcgagcactgcgccagattcacctacggcggctgctacggcaacaagaacaacttcgaggaggagcagcagtgcctggagagctgcagaggcatcagcaagaaggacgtgttcggcctgagaagagagatccccatccccagcaccggcagcgtggagatggccgtggccgtgttcctggtgatctgcatcgtggtggtggtggccatcctgggctactgcttcttcaagaaccagagaaaggacttccacggccaccaccaccaccccccccccacccccgccagcagcaccgtgagcaccaccgaggacaccgagcacctggtgtacaaccacaccaccagacccctgtag

SEQ ID NO: 4972 - DNA, 528 bp, synthetic construct
  misc_feature 1..528: note = source = /note="Description of Artificial Sequence: Synthetic coding sequence"
  source 1..528: mol_type = other DNA
atgccccccggcaccagagcctgcagagtgcccagacccggcagaagagcccccagacccagaagagacggcgagcccggcggccacggcgtggcccccgccagcgccgaggaggtgggcgccagacccggcctgagagccgtggccagactgctgccccagcagcacctgcaggccggctacgtgtgcgagagaaaggacctgctggtgaacggctgctgcaacgtgaacgtgcccagcaccaagcagtactgctgcgacggctgctggcccaacggctgctgcagcgcctacgagtactgcgtgagctgctgcctgcagcccaacaagcagctgctgctggagagattcctgaacagagccgccgtggccttccagaacctgttcatggccgtggaggaccacttcgagctgtgcctggccaagtgcagaaccagcagccagagcgtgcagcacgagaacacctacagagaccccatcgccaagtactgctacggcgagagcccccccgagctgttccccgcctag

SEQ ID NO: 4973 - DNA, 1881 bp, synthetic construct
  misc_feature 1..1881: note = source = /note="Description of Artificial Sequence: Synthetic coding sequence"
  source 1..1881: mol_type = other DNA
atggacctggtgctgaagagatgcctgctgcacctggccgtgatcggcgccctgctggccgtgggcgccaccaaggtgcccagaaaccaggactggctgggcgtgagcagacagctgagaaccaaggcctggaacagacagctgtaccccgagtggaccgaggcccagagactggactgctggagaggcggccaggtgagcctgaaggtgagcaacgacggccccaccctgatcggcgccaacgccagcttcagcatcgccctgaacttccccggcagccagaaggtgctgcccgacggccaggtgatctgggtgaacaacaccatcatcaacggcgaccaggtgtggggcggccagcccgtgtacccccaggagaccgacgacgcctgcatcttccccgacggcggcccctgccccagcggcagctggagccagaagagaagcttcgtgtacgtgtggaagacctggggccagtactggcaggtgctgggcggccccgtgagcggcctgagcatcggcaccggcagagccatgctgggcacccacaccatggaggtgaccgtgtaccacagaagaggcagcagaagctacgtgcccctggcccacagcagcagcgccttcaccatcaccgaccaggtgcccttcagcgtgagcgtgagccagctgagagccctggacggcggcaacaagcacttcctgagaaaccagcccctgaccttcgccctgcagctgcacgaccccagcggctacctggccgaggccgacctgagctacacctgggacttcggcgacagcagcggcaccctgatcagcagagccctggtggtgacccacacctacctggagcccggccccgtgaccgcccaggtggtgctgcaggccgccatccccctgaccagctgcggcagcagccccgtgcccggcaccaccgacggccacagacccaccgccgaggcccccaacaccaccgccggccaggtgcccaccaccgaggtggtgggcaccacccccggccaggcccccaccgccgagcccagcggcaccaccagcgtgcaggtgcccaccaccgaggtgatcagcaccgcccccgtgcagatgcccaccgccgagagcaccgccgcccaggtgaccaccaccgagtgggtggagaccaccgccagagagctgcccatccccgagcccgagggccccgacgccagcagcatcatgagcaccgagagcatcaccggcagcctgggccccctgctggacggcaccgccaccctgagactggtgaagagacaggtgcccctggactgcgtgctgtacagatacggcagcttcagcgtgaccctggacatcgtgcagggcatcgagagcgccgagatcctgcaggccgtgcccagcggcgagggcgacgccttcgagctgaccgtgagctgccagggcggcctgcccaaggaggcctgcatggagatcagcagccccggctgccagccccccgcccagagactgtgccagcccgtgctgcccagccccgcctgccagctggtgctgcaccagatcctgaagggcggcagcggcacctactgcctgaacgtgagcctggccgacaccaacagcctggccgtggtgagcacccagctgatcatgcccgtgcccggcatcctgctgaccggccaggaggccggcctgggccaggtgcccctgatcgtgggcatcctgctggtgctgatggccgtggtgctggccagcctgatctacagaagaagactgatgaagcaggacttcagcgtgccccagctgccccacagcagcagccactggctgagactgcccagaatcttctgcagctgccccatcggcgagaacagccccctgctgagcggccagcaggtgtag

SEQ ID NO: 4974 - DNA, 1611 bp, synthetic construct
  misc_feature 1..1611: note = source = /note="Description of Artificial Sequence: Synthetic coding sequence"
  source 1..1611: mol_type = other DNA
atgcccaccctgtgcagcagcttcggcctgcaggtgctgctgcccgagtacctgagagagagattcgtggccgccgccctgagctacatcacctgcagcagcgagggcgagctggtgtgcaaggagaacgactgctggtgcaagtgcagccccaccttccccgagtgcaactgccccgacgccgacatccaggccatggaggacagcctgctgcagatccaggacagctgggccacccacaacagacagttcgaggagagcgaggagttccaggccctgctgaagagactgcccgacgacagattcctgaacagcaccgccatcagccagttctgggccatggacaccagcctgcagcacagataccagcagctgggcgccggcctgaaggtgctgttcaagaagacccacagaatcctgagaagactgttcaacctgtgcaagagatgccacagacagcccagattcagactgcccaaggagagcagccccagaagcctgagctactggtggaacagaatccagagcctgctgtactgcggcgagagcaccttccccggcaccttcctggagcagagccacagctgcacctgcccctacgaccagagcagctgccagggccccatcccctgcgccctgggcgagggccccgcctgcgcccactgcgcccccgacaacagcaccagatgcggcagctgcaaccccggctacgtgctggcccagggcctgtgcagacccgaggtggccgagagcctggagaacttcctgggcctggagaccgacctgcaggacctggagctgaagtacctgctgcagaagcaggacagcagaatcgaggtgcacagcatcttcatcagcaacgacatgagactgggcagctggttcgaccccagctggagaaagagaatgctgctgaccctgaagagcaacaagtacaagcccggcctggtgcacgtgatgctggccctgagcctgcagatctgcctgaccaagaacagcaccctggagcccgtgatggccatctacgtgaaccccttcggcggcagccacagcgagagctggttcatgcccgtgaacgagggcagcttccccgactgggagagaaccaacgtggacgccgccgcccagtgccagaactggaccatcaccctgggcaacagatggaagaccttcttcgagaccgtgcacgtgtacctgagaagcagaatcaagagcctggacgacagcagcaacgagaccatctactacgagcccctggagatgaccgaccccagcaagaacctgggctacatgaagatcaacaccctgcaggtgttcggctacagcctgcccttcgaccccgacgccatcagagacctgatcctgcagctggactacccctacacccagggcagccaggacagcgccctgctgcagctgatcgagctgagagacagagtgaaccagctgagcccccccggcaaggtgagactggacctgttcagctgcctgctgagacacagactgaagctggccaacaacgaggtgggcagaatccagagcagcctgagagccttcaacagcaagctgcccaaccccgtggagtacgagaccggcaagctgtgcagctag

SEQ ID NO: 4975 - DNA, 423 bp, synthetic construct
  misc_feature 1..423: note = source = /note="Description of Artificial Sequence: Synthetic coding sequence"
  source 1..423: mol_type = other DNA
atgagccagagcatcgaggtgctgaacctgagaacccagagagacttccagtacgtgctgaagatggagacccagatgaagggcctgaaggccaagttcagacagatcgaggacgacagaaagaccctgatgaccaagcacttccaggagctgaaggagaagatggacgagctgctgcccctgatccccgtgctggagcagtacaagaccgacgccaagctgatcacccagttcaaggaggagatcagaaacctgagcgccgtgctgaccggcatccaggaggagatcggcgcctacgactacgaggagctgcaccagagagtgctgagcctggagaccagactgagagactgcatgaagaagctgatcgacctgaagaagagaaaggaggaggagaagagacagcagaagggcgaggcctag

SEQ ID NO: 4976 - DNA, 1119 bp, synthetic construct
  misc_feature 1..1119: note = source = /note="Description of Artificial Sequence: Synthetic coding sequence"
  source 1..1119: mol_type = other DNA
atggcctacatcgagcagagaagaatcagccacgagggcagccccgtgaagcccgtggccatcagagagttccagaagaccgaggacatgagaagatacctgcaccagaacagagtgcccgccgagcccagcagcctgctgagcctgagcgccagccacaaccagctgagccacaccgacctggagctgcaccagagaagagagcagctggtggagagaaccagaagagaggcccagctggccgccctgcagtacgaggaggagaagatcagaaccaagcagatccagagagacgccgtgctggacttcgtgaagcagaaggccagccagagcccccagaagcagcaccccctgctggacggcgtggacggcgagtgccccttccccagcagaagaagccagcacaccgacgacagcgccctgtgcatgagcctgagcggcctgaaccaggtgggctgcgccgccaccctgccccacagcagcgccttcacccccctgaagagcgacgacagacccaacgccctgctgagcagccccgccaccgagaccgtgcaccacagccccgcctacagcttccccgccgccatccagagaaaccagccccagagacccgagagcttcctgttcagagccggcgtgagagccgagaccaacaagggccacgccagccccctgccccccagcgccgcccccaccaccgacagcaccgacagcatcaccggccagaacagcagacagagagaggaggagctggagctgatcgaccagctgagaaagcacatcgagtacagactgaaggtgagcctgccctgcgacctgggcgccgccctgaccgacggcgtggtgctgtgccacctggccaaccacgtgagacccagaagcgtgcccagcatccacgtgcccagccccgccgtgcccaagctgaccatggccaagtgcagaagaaacgtggagaacttcctggaggcctgcagaaagatcggcgtgccccaggagcagctgtgcctgcccctgcacatcctggaggagaagggcctgagccaggtggccgtgaccgtgcaggccctgctggagctggccccccccaagcagcagcagcaccagctgagcgccgtgtag

SEQ ID NO: 4977 - DNA, 1242 bp, synthetic construct; identical to SEQ ID NO: 4070
  misc_feature 1..1242: note = source = /note="Description of Artificial Sequence: Synthetic coding sequence"
  source 1..1242: mol_type = other DNA

SEQ ID NO: 4978 - DNA, 2541 bp, synthetic construct; identical to SEQ ID NO: 4219
  misc_feature 1..2541: note = source = /note="Description of Artificial Sequence: Synthetic coding sequence"
  source 1..2541: mol_type = other DNA

SEQ ID NO: 4979 - DNA, 582 bp, synthetic construct
  misc_feature 1..582: note = source = /note="Description of Artificial Sequence: Synthetic coding sequence"
  source 1..582: mol_type = other DNA
atgctgggcgtgctggagctgctgctgctgggcgccgcctggctggccggccccgccagaggccagaacgagaccgagcccatcgtgctggagggcaagtgcctggtggtgtgcgacagcaaccccaccagcgaccccaccggcaccgccctgggcatcagcgtgagaagcggcagcgccaaggtggccttcagcgccatcagaagcaccaaccacgagcccagcgagatgagcaacagaaccatgatcatctacttcgaccaggtgctggtgaacatcggcaacaacttcgacagcgagagaagcaccttcatcgcccccagaaagggcatctacagcttcaacttccacgtggtgaaggtgtacaacagacagaccatccaggtgagcctgatgctgaacggctggcccgtgatcagcgccttcgccggcgaccaggacgtgaccagagaggccgccagcaacggcgtgctgatccagatggagaagggcgacagagcctacctgaagctggagagaggcaacctgatgggcggctggaagtacagcaccttcagcggcttcctggtgttccccctgtag

SEQ ID NO: 4980 - DNA, 813 bp, synthetic construct
  misc_feature 1..813: note = source = /note="Description of Artificial Sequence: Synthetic coding sequence"
  source 1..813: mol_type = other DNA
atgcacggcagctgcagcttcctgatgctgctgctgcccctgctgctgctgctggtggccaccaccggccccgtgggcgccctgaccgacgaggagaagagactgatggtggagctgcacaacctgtacagagcccaggtgagccccaccgccagcgacatgctgcacatgagatgggacgaggagctggccgccttcgccaaggcctacgccagacagtgcgtgtggggccacaacaaggagagaggcagaagaggcgagaacctgttcgccatcaccgacgagggcatggacgtgcccctggccatggaggagtggcaccacgagagagagcactacaacctgagcgccgccacctgcagccccggccagatgtgcggccactacacccaggtggtgtgggccaagaccgagagaatcggctgcggcagccacttctgcgagaagctgcagggcgtggaggagaccaacatcgagctgctggtgtgcaactacgagccccccggcaacgtgaagggcaagagaccctaccaggagggcaccccctgcagccagtgccccagcggctaccactgcaagaacagcctgtgcgagcccatcggcagccccgaggacgcccaggacctgccctacctggtgaccgaggcccccagcttcagagccaccgaggccagcgacagcagaaagatgggcgccgagggccccgacaagcccagcgtggtgagcggcctgaacagcggccccggccacgtgtggggccccctgctgggcctgctgctgctgccccccctggtgctggccggcatcttctag

SEQ ID NO: 4981 - DNA, 702 bp, synthetic construct
  misc_feature 1..702: note = source = /note="Description of Artificial Sequence: Synthetic coding sequence"
  source 1..702: mol_type = other DNA
atggaccaggtgttcatgatcgacagcaagtgcgagagcggcaagggcagatgcagcttcaaccccaacgtgaacaccgtgagcgtgatgatcaacgaggagctgttcagcggcatgtacatcgacttcatgggcaccgacgccgccatcttcagaagcctgaccaagagaaacgccgtgagaaccgaccagcacaacagcaagtggctgagcgagcccatgttcgtggacgcccacgtgatccccgacggcaccgaccccaacgacgccaaggtgtacttcttcttcaaggagaagctgaccgacaacaacagaagcaccaagcagatccacagcatgatcgccagaatctgccccaacgacaccggcggcctgagaagcctggtgaacaagtggaccaccttcctgaaggccagactggtgtgcagcgtgaccgacgaggacggccccgagacccacttcgacgagctggaggacgtgttcctgctggagaccgacaaccccagaaccaccctggtgtacggcatcttcaccaccagcagcagcgtgttcaagggcagcgccgtgtgcgtgtaccacctgagcgacatccagaccgtgttcaacggccccttcgcccacaaggagggccccaaccaccagctgatcagctaccagggcagaatcccctaccccagacccggcaccaacacctgcgtgtag

SEQ ID NO: 4982 - DNA, 1368 bp, synthetic construct
  misc_feature 1..1368: note = source = /note="Description of Artificial Sequence: Synthetic coding sequence"
  source 1..1368: mol_type = other DNA
atgctgcaccccgagaccagccccggcagaggccacctgctggccgtgctgctggccctgctgggcaccgcctgggccgaggtgtggcccccccagctgcaggagcaggcccccatggccggcgccctgaacagaaaggagagcttcctgctgctgagcctgcacaacagactgagaagctgggtgcagccccccgccgccgacatgagaagactggactggagcgacagcctggcccagctggcccaggccagagccgccctgtgcggcatccccacccccagcctggccagcggcctgtggagaaccctgcaggtgggctggaacatgcagctgctgcccgccggcctggccagcttcgtggaggtggtgagcctgtggttcgccgagggccagagatacagccacgccgccggcgagtgcgccagaaacgccacctgcacccactacacccagctggtgtgggccaccagcagccagctgggctgcggcagacacctgtgcagcgccggccaggccgccatcgaggccttcgtgtgcgcctacagccccagaggcaactgggaggtgaacggcaagaccatcgtgccctacaagaagggcgcctggtgcagcctgtgcaccgccagcgtgagcggctgcttcaaggcctgggaccacgccggcggcctgtgcgaggtgcccagaaacccctgcagaatgagctgccagaaccacggcagactgaacatcagcacctgccactgccactgcccccccggctacaccggcagatactgccaggtgagatgcagcctgcagtgcgtgcacggcagattcagagaggaggagtgcagctgcgtgtgcgacatcggctacggcggcgcccagtgcgccaccaaggtgcacttccccttccacacctgcgacctgagaatcgacggcgactgcttcatggtgagcagcgaggccgacacctactacagagccagaatgaagtgccagagaaagggcggcgtgctggcccagatcaagagccagaaggtgcaggacatcctggccttctacctgggcagactggagaccaccaacgaggtgatcgacagcgacttcgagaccagaaacttctggatcggcctgacctacaagaccgccaaggacagcttcagatgggccaccggcgagcaccaggccttcaccagcttcgccttcggccagcccgacaaccacggcctggtgtggctgagcgccgccatgggcttcggcaactgcgtggagctgcaggccagcgccgccttcaactggaacaaccagagatgcaagaccagaaacagatacatctgccagttcgcccaggagcacatcagcagatggggccccggcagctag

SEQ ID NO: 4983 - DNA, 462 bp, synthetic construct
  misc_feature 1..462: note = source = /note="Description of Artificial Sequence: Synthetic coding sequence"
  source 1..462: mol_type = other DNA
atggccagattctgggtgtgcgtggccggcgccggcttcttcctggccttcctggtgctgcacagcagattctgcggcagccccgtgctgagaaacttcaccttcgccgtgagctggagaaccgagaagatcctgtacagactggacgtgggctggcccaagcaccccgagtacttcaccggcaccaccttctgcgtggccgtggacagcctgaacggcctggtgtacatcggccagagaggcgacaacatccccaagatcctggtgttcaccgaggacggctacttcctgagagcctggaactacaccgtggacaccccccacggcatcttcgccgccagcaccctgtacgagcagagcgtgtggatcaccgacgtgggcagcgacttcatgatcctgtggctgcacggcgagaacggcaccggccccgccaagttcaacatcccccacagcgtgacctag

SEQ ID NO: 4984 - DNA, 375 bp, synthetic construct
  misc_feature 1..375: note = source = /note="Description of Artificial Sequence: Synthetic coding sequence"
  source 1..375: mol_type = other DNA
atgtggagatgccccctgggcctgctgctgctgctgcccctggccggccacctggccctgggcgcccagcagggcagaggcagaagagagctggcccccggcctgcacctgagaggcatcagagacgccggcggcagatactgccaggagcaggacctgtgctgcagaggcagagccgacgactgcgccctgccctacctgggcgccatctgctactgcgacctgttctgcaacagaaccgtgagcgactgctgccccgacttctgggacttctgcctgggcgtgcccccccccttcccccccatccaggcccccgccagaagaaccggcagcggcagcgtgaccaagaaccacgcctggtggatccagacctag

SEQ ID NO: 4985 - DNA, 777 bp, synthetic construct
  misc_feature 1..777: note = source = /note="Description of Artificial Sequence: Synthetic coding sequence"
  source 1..777: mol_type = other DNA
atgaagaccctgtacctggccgacaccttccccaccaacttcagagacagcgccggcgccatgaagcagatcaacgactacgtggccaagcagaccaagggcaagatcgtggacctgctgaagaacctggacagcaacgccgtggtgatcatggtgaactacatcttcttcaaggccaagtgggagaccagcttcaaccacaagggcacccaggagcaggacttctacgtgaccagcgagaccgtggtgagagtgcccatgatgagcagagaggaccagtaccactacctgctggacagaaacctgagctgcagagtggtgggcgtgccctaccagggcaacgccaccgccctgttcatcctgcccagcgagggcaagatgcagcaggtggagaacggcctgagcgagaagaccctgagaaagtggctgaagatgttcaagaagagacagctggagctgtacctgcccaagttcagcatcgagggcagctaccagctggagaaggtgctgcccagcctgggcatcagcaacgtgttcaccagccacgccgacctgagcggcatcagcaaccacagcaacatccaggtgagcgagatggtgcacaaggccgtggtggaggtggacgagagcggcaccagagccgccgccgccaccggcaccatcttcaccttcagaagcgccagactgaacagccagagactggtgttcaacagacccttcctgatgttcatcgtggacaacaacatcctgttcctgggcaaggtgaacagaccctag

SEQ ID NO: 4986 - DNA, 1731 bp, synthetic construct; identical to SEQ ID NO: 4338
  misc_feature 1..1731: note = source = /note="Description of Artificial Sequence: Synthetic coding sequence"
  source 1..1731: mol_type = other DNA

SEQ ID NO: 4987 - DNA, 1359 bp, synthetic construct
  misc_feature 1..1359: note = source = /note="Description of Artificial Sequence: Synthetic coding sequence"
  source 1..1359: mol_type = other DNA
atggccgacatgcacagaggctacgccgacagccccagcaaggccggcgccgccccctacgtgcaggccttcgacagcctgctggccggccccgtggccgagtacctgaagatcagcaaggagatcggcggcgacgtgcagaagcacgccgagatggtgcacaccggcctgaagctggagagagccctgctggtgaccgccagccagtgccagcagcccgccgagaacaagctgagcgacctgctggcccccatcagcgagcagatcaaggaggtgatcaccttcagagagaagaacagaggcagcaagctgttcaaccacctgagcgccgtgagcgagagcatccaggccctgggctgggtggccatggcccccaagcccggcccctacgtgaaggagatgaacgacgccgccatgttctacaccaacagagtgctgaaggagtacaaggacgtggacaagaagcacgtggactgggtgaaggcctacctgagcatctggaccgagctgcaggcctacatcaaggagttccacaccaccggcctggcctggagcaagaccggccccgtggccaaggagctgagcggcctgcccagcggccccagcgccggcagctgccccccccccccccccccctgccccccccccccccccgtgagcaccatcagctgcagctacgagagcgccagcagaagcagcctgttcgcccagatcaaccagggcgagagcatcacccacgccctgaagcacgtgagcgacgacatgaagacccacaagaaccccgccctgaaggcccagagcggccccgtgagaagcggccccaagcccttcagcgcccccaagccccagaccagccccagccccaagagagccaccaagaaggagcccgccgtgctggagctggagggcaagaagtggagagtggagaaccaggagaacgtgagcaacctggtgatcgaggacaccgagctgaagcaggtggcctacatctacaagtgcgtgaacaccaccctgcagatcaagggcaagatcaacagcatcaccgtggacaactgcaagaagctgggcctggtgttcgacgacgtggtgggcatcgtggagatcatcaacagcaaggacgtgaaggtgcaggtgatgggcaaggtgcccaccatcagcatcaacaagaccgacggctgccacgcctacctgagcaagaacagcctggactgcgagatcgtgagcgccaagagcagcgagatgaacgtgctgatccccaccgagggcggcgacttcaacgagttccccgtgcccgagcagttcaagaccctgtggaacggccagaagctggtgaccaccgtgaccgagatcgccggctag

SEQ ID NO: 4988 - DNA, 1533 bp, synthetic construct
  misc_feature 1..1533: note = source = /note="Description of Artificial Sequence: Synthetic coding sequence"
  source 1..1533: mol_type = other DNA
atgggcagacccacccagtggcccagcctgctgctgctgctgctgctgcccggccccccccccgtggccggcctggaggacgccgccttcccccacctgggcgagagcctgcagcccctgcccagagcctgccccctgagatgcagctgccccagagtggacaccgtggactgcgacggcctggacctgagagtgttccccgacaacatcaccagagccgcccagcacctgagcctgcagaacaaccagctgcaggagctgccctacaacgagctgagcagactgagcggcctgagaaccctgaacctgcacaacaacctgatcagcagcgagggcctgcccgacgaggccttcgagagcctgacccagctgcagcacctgtgcgtggcccacaacaagctgagcgtggccccccagttcctgcccagaagcctgagagtggccgacctggccgccaaccaggtgatggagatcttccccctgaccttcggcgagaagcccgccctgagaagcgtgtacctgcacaacaaccagctgagcaacgccggcctgccccccgacgccttcagaggcagcgaggccatcgccaccctgagcctgagcaacaaccagctgagctacctgccccccagcctgccccccagcctggagagactgcacctgcagaacaacctgatcagcaaggtgcccagaggcgccctgagcagacagacccagctgagagagctgtacctgcagcacaaccagctgaccgacagcggcctggacgccaccaccttcagcaagctgcacagcctggagtacctggacctgagccacaaccagctgaccaccgtgcccgccggcctgcccagaaccctggccatcctgcacctgggcagaaacagaatcagacaggtggaggccgccagactgcacggcgccagaggcctgagatacctgctgctgcagcacaaccagctgggcagcagcggcctgcccgccggcgccctgagacccctgagaggcctgcacaccctgcacctgtacggcaacggcctggacagagtgccccccgccctgcccagaagactgagagccctggtgctgccccacaaccacgtggccgccctgggcgccagagacctggtggccacccccggcctgaccgagctgaacctggcctacaacagactggccagcgccagagtgcaccacagagccttcagaagactgagagccctgagaagcctggacctggccggcaaccagctgaccagactgcccatgggcctgcccaccggcctgagaaccctgcagctgcagagaaaccagctgagaatgctggagcccgagcccctggccggcctggaccagctgagagagctgagcctggcccacaacagactgagagtgggcgacatcggccccggcacctggcacgagctgcaggccctgcaggtgagacacagactggtgagccacaccgtgcccagagccccccccagcccctgcctgccctgccacgtgcccaacatcctggtgagctggtag

SEQ ID NO: 4989 - DNA, 114 bp, synthetic construct
  misc_feature 1..114: note = source = /note="Description of Artificial Sequence: Synthetic coding sequence"
  source 1..114: mol_type = other DNA
atgaacagcaccctgaacttcttcatccagagctacaacaacgccagcaacgacacctacctgtacagagtgcagagactgatcagaagccagatgcagcaggtgcactgctag

SEQ ID NO: 4990 - DNA, 1266 bp, synthetic construct
  misc_feature 1..1266: note = source = /note="Description of Artificial Sequence: Synthetic coding sequence"
  source 1..1266: mol_type = other DNA
atgggcagacccacccagtggcccagcctgctgctgctgctgctgctgcccggccccccccccgtggccggcctggaggacgccgccttcccccacctgggcgagagcctgcagcccctgcccagagcctgccccctgagatgcagctgccccagagtggacaccgtggactgcgacggcctggacctgagagtgttccccgacaacatcaccagagccgcccagcacctgagcctgcagaacaaccagctgcaggagctgccctacaacgagctgagcagactgagcggcctgagaaccctgaacctgcacaacaacctgatcagcagcgagggcctgcccgacgaggccttcgagagcctgacccagctgcagcacctgtgcgtggcccacaacaagaacaacctgatcagcaaggtgcccagaggcgccctgagcagacagacccagctgagagagctgtacctgcagcacaaccagctgaccgacagcggcctggacgccaccaccttcagcaagctgcacagcctggagtacctggacctgagccacaaccagctgaccaccgtgcccgccggcctgcccagaaccctggccatcctgcacctgggcagaaacagaatcagacaggtggaggccgccagactgcacggcgccagaggcctgagatacctgctgctgcagcacaaccagctgggcagcagcggcctgcccgccggcgccctgagacccctgagaggcctgcacaccctgcacctgtacggcaacggcctggacagagtgccccccgccctgcccagaagactgagagccctggtgctgccccacaaccacgtggccgccctgggcgccagagacctggtggccacccccggcctgaccgagctgaacctggcctacaacagactggccagcgccagagtgcaccacagagccttcagaagactgagagccctgagaagcctggacctggccggcaaccagctgaccagactgcccatgggcctgcccaccggcctgagaaccctgcagctgcagagaaaccagctgagaatgctggagcccgagcccctggccggcctggaccagctgagagagctgagcctggcccacaacagactgagagtgggcgacatcggccccggcacctggcacgagctgcaggccctgcaggtgagacacagactggtgagccacaccgtgcccagagccccccccagcccctgcctgccctgccacgtgcccaacatcctggtgagctggtag

SEQ ID NO: 4991 - DNA, 993 bp, synthetic construct
  misc_feature 1..993: note = source = /note="Description of Artificial Sequence: Synthetic coding sequence"
  source 1..993: mol_type = other DNA
atgagcagctggagcagacagagacccaagagccccggcggcatccagccccacgtgagcagaaccctgttcctgctgctgctgctggccgccagcgcctggggcgtgaccctgagccccaaggactgccaggtgttcagaagcgaccacggcagcagcatcagctgccagccccccgccgagatccccggctacctgcccgccgacaccgtgcacctggccgtggagttcttcaacctgacccacctgcccgccaacctgctgcagggcgccagcaagctgcaggagctgcacctgagcagcaacggcctggagagcctgagccccgagttcctgagacccgtgccccagctgagagtgctggacctgaccagaaacgccctggtgctgaaggagaaccagctggaggtgctggaggtgagctggctgcacggcctgaaggccctgggccacctggacctgagcggcaacagactgagaaagctgccccccggcctgctggccaacttcaccctgctgagaaccctggacctgggcgagaaccagctggagaccctgccccccgacctgctgagaggccccctgcagctggagagactgcacctggagggcaacaagctgcaggtgctgggcaaggacctgctgctgccccagcccgacctgagatacctgttcctgaacggcaacaagctggccagagtggccgccggcgccttccagggcctgagacagctggacatgctggacctgagcaacaacagcctggccagcgtgcccgagggcctgtgggccagcctgggccagcccaactgggacatgagagacggcttcgacatcagcggcaacccctggatctgcgaccagaacctgagcgacctgtacagatggctgcaggcccagaaggacaagatgttcagccagaacgacaccagatgcgccggccccgaggccgtgaagggccagaccctgctggccgtggccaagagccagtag

SEQ ID NO: 4992 - DNA, 1815 bp, synthetic construct; identical to SEQ ID NO: 3505
  misc_feature 1..1815: note = source = /note="Description of Artificial Sequence: Synthetic coding sequence"
  source 1..1815: mol_type = other DNA

SEQ ID NO: 4993 - DNA, 948 bp, synthetic construct
  misc_feature 1..948: note = source = /note="Description of Artificial Sequence: Synthetic coding sequence"
  source 1..948: mol_type = other DNA
atgggccaggacagagaggagaccaacatcgagctgctggtgtgcaactacgagccccccggcaacgtgaagggcaagagaccctaccaggagggcaccccctgcagccagtgccccagcggctaccactgcaagaacagcctgtgcgagcccatcggcagccccgaggacgcccaggacctgccctacctggtgaccgaggcccccagcttcagagccaccgaggccagcgacagcagaaagatgggcacccccagcagcctggccaccggcatccccgccttcctggtgaccgaggtgagcggcagcctggccaccaaggccctgcccgccgtggagacccaggcccccaccagcctggccaccaaggacccccccagcatggccaccgaggcccccccctgcgtgaccaccgaggtgcccagcatcctggccgcccacagcctgcccagcctggacgaggagcccgtgaccttccccaagagcacccacgtgcccatccccaagagcgccgacaaggtgaccgacaagaccaaggtgcccagcagaagccccgagaacagcctggaccccaagatgagcctgaccggcgccagagagctgctgccccacgcccaggaggaggccgaggccgaggccgagctgccccccagcagcgaggtgctggccagcgtgttccccgcccaggacaagcccggcgagctgcaggccaccctggaccacaccggccacaccagcagcaagagcctgcccaacttccccaacaccagcgccaccgccaacgccaccggcggcagagccctggccctgcagagcagcctgcccggcgccgagggccccgacaagcccagcgtggtgagcggcctgaacagcggccccggccacgtgtggggccccctgctgggcctgctgctgctgccccccctggtgctggccggcatcttctag

SEQ ID NO: 4994 - DNA, 207 bp, synthetic construct
  misc_feature 1..207: note = source = /note="Description of Artificial Sequence: Synthetic coding sequence"
  source 1..207: mol_type = other DNA
atgcaggtgagcaccgccgccctggccgtgctgctgtgcaccatggccctgtgcaaccaggtgctgagcgcccccctggccgccgacacccccaccgcctgctgcttcagctacaccagcagacagatcccccagaacttcatcgccgactacttcgagaccagcagccagtgcagcaagcccagcgtgatggccgcccccggctag

SEQ ID NO: 4995 - DNA, 3369 bp, synthetic construct
  misc_feature 1..3369: note = source = /note="Description of Artificial Sequence: Synthetic coding sequence"
  source 1..3369: mol_type = other DNA
atgagcctgcaggagatgttcagattccccatgggcctgctgctgggcagcgtgctgctggtggccagcgcccccgccaccctggagccccccggctgcagcaacaaggagcagcaggtgaccgtgagccacacctacaagatcgacgtgcccaagagcgccctggtgcaggtggacgccgacccccagcccctgagcgacgacggcgccagcctgctggccctgggcgaggccagagaggagcagaacatcatcttcagacacaacatcagactgcagaccccccagaaggactgcgagctggccggcagcgtgcaggacctgctggccagagtgaagaagctggaggaggagatggtggagatgaaggagcagtgcagcgcccagagatgctgccagggcgtgaccgacctgagcagacactgcagcggccacggcaccttcagcctggagacctgcagctgccactgcgaggagggcagagagggccccgcctgcgagagactggcctgccccggcgcctgcagcggccacggcagatgcgtggacggcagatgcctgtgccacgagccctacgtgggcgccgactgcggctaccccgcctgccccgagaactgcagcggccacggcgagtgcgtgagaggcgtgtgccagtgccacgaggacttcatgagcgaggactgcagcgagaagagatgccccggcgactgcagcggccacggcttctgcgacaccggcgagtgctactgcgaggagggcttcaccggcctggactgcgcccaggtggtgaccccccagggcctgcagctgctgaagaacaccgaggacagcctgctggtgagctgggagcccagcagccaggtggaccactacctgctgagctactaccccctgggcaaggagctgagcggcaagcagatccaggtgcccaaggagcagcacagctacgagatcctgggcctgctgcccggcaccaagtacatcgtgaccctgagaaacgtgaagaacgaggtgagcagcagcccccagcacctgctggccaccaccgacctggccgtgctgggcaccgcctgggtgaccgacgagaccgagaacagcctggacgtggagtgggagaaccccagcaccgaggtggactactacaagctgagatacggccccatgaccggccaggaggtggccgaggtgaccgtgcccaagagcagcgaccccaagagcagatacgacatcaccggcctgcaccccggcaccgagtacaagatcaccgtggtgcccatgagaggcgagctggagggcaagcccatcctgctgaacggcagaaccgagatcgacagccccaccaacgtggtgaccgacagagtgaccgaggacaccgccaccgtgagctgggaccccgtgcaggccgtgatcgacaagtacgtggtgagatacaccagcgccgacggcgacaccaaggagatggccgtgcacaaggacgagagcagcaccgtgctgaccggcctgaagcccggcgaggcctacaaggtgtacgtgtgggccgagagaggcaaccagggcagcaagaaggccgacaccaacgccctgaccgagatcgacagccccgccaacctggtgaccgacagagtgaccgagaacaccgccaccatcagctgggaccccgtgcaggccaccatcgacagatacgtggtgagatacaccagcgccaaggacggcgagaccagagaggtgcccgtgggcaaggagcagagcagcaccgtgctgaccggcctgagacccggcgtggagtacaccgtgcacgtgtgggcccagaagggcgcccaggagagcaagaaggccgacaccaaggcccagaccgacatcgacagcccccagaacctggtgaccgactgggtgaccgagaacaccgccaccgtgagctgggaccccgtgcaggccaccatcgacagatacgtggtgcactacaccagcgccaacggcgagaccagagaggtgcccgtgggcaaggagcagagcagcaccgtgctgaccggcctgagacccggcatggagtacaccgtgcacgtgtgggcccagaagggcaaccaggagagcaagaaggccgacaccaaggcccagaccgagatcgacggccccaagaacctggtgaccgactgggtgaccgagaacatggccaccgtgagctgggaccccgtgcaggccaccatcgacaagtacatggtgagatacaccagcgccgacggcgagaccagagaggtgcccgtgggcaaggagcacagcagcaccgtgctgaccggcctgagacccggcatggagtacatggtgcacgtgtgggcccagaagggcgcccaggagagcaagaaggccgacaccaaggcccagaccgagctggacccccccagaaacctgagacccagcgccgtgacccagagcggcggcatcctgacctggaccccccccagcgcccagatccacggctacatcctgacctaccagttccccgacggcaccgtgaaggagatgcagctgggcagagaggaccagagattcgccctgcagggcctggagcagggcgccacctaccccgtgagcctggtggccttcaagggcggcagaagaagcagaaacgtgagcaccaccctgagcaccgtgggcgccagattcccccaccccagcgactgcagccaggtgcagcagaacagcaacgccgccagcggcctgtacaccatctacctgcacggcgacgccagcagacccctgcaggtgtactgcgacatggagaccgacggcggcggctggatcgtgttccagagaagaaacaccggccagctggacttcttcaagagatggagaagctacgtggagggcttcggcgaccccatgaaggagttctggctgggcctggacaagctgcacaacctgaccaccggcacccccgccagatacgaggtgagagtggacctgcagaccgccaacgagagcgcctacgccatctacgacttcttccaggtggccagcagcaaggagagatacaagctgaccgtgggcaagtacagaggcaccgccggcgacgccctgacctaccacaacggctggaagttcaccaccttcgacagagacaacgacatcgccctgagcaactgcgccctgacccaccacggcggctggtggtacaagaactgccacctggccaaccccaacggcagatacggcgagaccaagcacagcgagggcgtgaactgggagccctggaagggccacgagttcagcatcccctacgtggagctgaagatcagaccccacggctacagcagagagcccgtgctgggcagaaagaagagaaccctgagaggcagactgagaaccttctag

SEQ ID NO: 4996 - DNA, 897 bp, synthetic construct
  misc_feature 1..897: note = source = /note="Description of Artificial Sequence: Synthetic coding sequence"
  source 1..897: mol_type = other DNA
atgctgcaccccgagaccagccccggcagaggccacctgctggccgtgctgctggccctgctgggcaccgcctgggccgaggtgtggcccccccagctgcaggagcaggcccccatggccggcgccctgaacagaaaggagagcttcctgctgctgagcctgcacaacagactgagaagctgggtgcagccccccgccgccgacatgagaagactggactggagcgacagcctgaactggctgaagcccggccccctgtggaaccccaaccccgagcccggcgtgagacccgtggcccaccccgccagcggcctggagcacgccgcctgccccagagcctggagacccctgctgaagtggagcctgtggttcgccgagggccagagatacagccacgccgccggcgagtgcgccagaaacgccacctgcacccactacacccagctggtgtgggccaccagcagccagctgggctgcggcagacacctgtgcagcgccggccaggccgccatcgaggccttcgtgtgcgcctacagccccagaggcaactgggaggtgaacggcaagaccatcgtgccctacaagaagggcgcctggtgcagcctgtgcaccgccagcgtgagcggctgcttcaaggcctgggaccacgccggcggcctgtgcgaggtgcccagaaacccctgcagaatgagctgccagaaccacggcagactgaacatcagcacctgccactgccactgcccccccggctacaccggcagatactgccaggtgagatgcagcctgcagtgcgtgcacggcagattcagagaggaggagtgcagctgcgtgtgcgacatcggctacgagcccagcgtgccccccagatgcatcttccccagcacccccgtgacctag

SEQ ID NO: 4997 - DNA, 1728 bp, synthetic construct
  misc_feature 1..1728: note = source = /note="Description of Artificial Sequence: Synthetic coding sequence"
  source 1..1728: mol_type = other DNA
atggacctggtgctgaagagatgcctgctgcacctggccgtgatcggcgccctgctggccgtgggcgccaccaagggcagccaggtgtggggcggccagcccgtgtacccccaggagaccgacgacgcctgcatcttccccgacggcggcccctgccccagcggcagctggagccagaagagaagcttcgtgtacgtgtggaagacctggggccagtactggcaggtgctgggcggccccgtgagcggcctgagcatcggcaccggcagagccatgctgggcacccacaccatggaggtgaccgtgtaccacagaagaggcagcagaagctacgtgcccctggcccacagcagcagcgccttcaccatcaccgaccaggtgcccttcagcgtgagcgtgagccagctgagagccctggacggcggcaacaagcacttcctgagaaaccagcccctgaccttcgccctgcagctgcacgaccccagcggctacctggccgaggccgacctgagctacacctgggacttcggcgacagcagcggcaccctgatcagcagagccctggtggtgacccacacctacctggagcccggccccgtgaccgcccaggtggtgctgcaggccgccatccccctgaccagctgcggcagcagccccgtgcccggcaccaccgacggccacagacccaccgccgaggcccccaacaccaccgccggccaggtgcccaccaccgaggtggtgggcaccacccccggccaggcccccaccgccgagcccagcggcaccaccagcgtgcaggtgcccaccaccgaggtgatcagcaccgcccccgtgcagatgcccaccgccgagagcaccggcatgacccccgagaaggtgcccgtgagcgaggtgatgggcaccaccctggccgagatgagcacccccgaggccaccggcatgacccccgccgaggtgagcatcgtggtgctgagcggcaccaccgccgcccaggtgaccaccaccgagtgggtggagaccaccgccagagagctgcccatccccgagcccgagggccccgacgccagcagcatcatgagcaccgagagcatcaccggcagcctgggccccctgctggacggcaccgccaccctgagactggtgaagagacaggtgcccctggactgcgtgctgtacagatacggcagcttcagcgtgaccctggacatcgtgcagggcatcgagagcgccgagatcctgcaggccgtgcccagcggcgagggcgacgccttcgagctgaccgtgagctgccagggcggcctgcccaaggaggcctgcatggagatcagcagccccggctgccagccccccgcccagagactgtgccagcccgtgctgcccagccccgcctgccagctggtgctgcaccagatcctgaagggcggcagcggcacctactgcctgaacgtgagcctggccgacaccaacagcctggccgtggtgagcacccagctgatcatgcccggccaggaggccggcctgggccaggtgcccctgatcgtgggcatcctgctggtgctgatggccgtggtgctggccagcctgatctacagaagaagactgatgaagcaggacttcagcgtgccccagctgccccacagcagcagccactggctgagactgcccagaatcttctgcagctgccccatcggcgagaacagccccctgctgagcggccagcaggtgtag

SEQ ID NO: 4998 - DNA, 330 bp, synthetic construct
  misc_feature 1..330: note = source = /note="Description of Artificial Sequence: Synthetic coding sequence"
  source 1..330: mol_type = other DNA
tgaagcggccagagcctgaagagcctgaacgccagcagcggccacctggccctgatcctgagcagcatcttcggcctgctgctgctggtgctgttcatcctgttcctgacctggtgcagagtgcagaagcagaagcacctgcccctgagagtgagcaccagaagaagaggcagcctggaggagaacctgttccacgagatggagacctgcctgaagagagaggacccccacggcaccagaaccagcgacgacacccccaaccacggctgcgaggacgccagcgacaccagcctgctgggcgtgctgcccgccagcgaggccaccaagtag

SEQ ID NO: 4999 - DNA, 312 bp, synthetic construct; identical to SEQ ID NO: 3978
  misc_feature 1..312: note = source = /note="Description of Artificial Sequence: Synthetic coding sequence"
  source 1..312: mol_type = other DNA

SEQ ID NO: 5000 - DNA, 2889 bp, synthetic construct; identical to SEQ ID NO: 4187
  misc_feature 1..2889: note = source = /note="Description of Artificial Sequence: Synthetic coding sequence"
  source 1..2889: mol_type = other DNA

SEQ ID NO: 5001 - DNA, 912 bp, synthetic construct
  misc_feature 1..912: note = source = /note="Description of Artificial Sequence: Synthetic coding sequence"
  source 1..912: mol_type = other DNA
atgctgcaccccgagaccagccccggcagaggccacctgctggccgtgctgctggccctgctgggcaccgcctgggccgaggtgtggcccccccagctgcaggagcaggcccccatggccggcgccctgaacagaaaggagagcttcctgctgctgagcctgcacaacagactgagaagctgggtgcagccccccgccgccgacatgagaagactggactggagcgacagcctggcccagctggcccaggccagagccgccctgtgcggcacccccacccccagcctggccagcggcctgtggagaaccctgcaggtgggctggaacatgcagctgctgcccgccggcctggtgagcttcgtggaggtggtgagcctgtggttcgccgagggccagagatacagccacgccgccggcgagtgcgccagaaacgccacctgcacccactacacccagctggtgtgggccaccagcagccagctgggctgcggcagacacctgtgcagcgccggccaggccgccatcgaggccttcgtgtgcgcctacagccccagaggcaactgggaggtgaacggcaagaccatcgtgccctacaagaagggcgcctggtgcagcctgtgcaccgccagcgtgagcggctgcttcaaggcctgggaccacgccggcggcctgtgcgaggtgcccagaaacccctgcagaatgagctgccagaaccacggcagactgaacatcagcacctgccactgccactgcccccccggctacaccggcagatactgccaggtgagatgcagcctgcagtgcgtgcacggcagattcagagaggaggagtgcagctgcgtgtgcgacatcggctacggcgagcccagcgtgccccccagatgcatcttccccagcacccccgtgacctag

SEQ ID NO: 5002 - DNA, 1356 bp, synthetic construct
  misc_feature 1..1356: note = source = /note="Description of Artificial Sequence: Synthetic coding sequence"
  source 1..1356: mol_type = other DNA
atggaggccaccggcaccgacgaggtggacaagctgaagaccaagttcatcagcgcctggaacaacatgaagtacagctgggtgctgaagaccaagacctacttcagcagaaacagccccgtgctgctgctgggcaagtgctaccacttcaagtacgaggacgaggacaagaccctgcccgccgagagcggctgcaccatcgaggaccacgtgatcgccggcaacgtggaggagttcagaaaggacttcatcagcagaatctggctgacctacagagaggagttcccccagatcgagggcagcgccctgaccaccgactgcggctggggctgcaccctgagaaccggccagatgctgctggcccagggcctgatcctgcacttcctgggcagagcctggacctggcccgacgccctgaacatcgagaacagcgacagcgagagctggaccagccacaccgtgaagaagttcaccgccagcttcgaggccagcctgagcggcgagagagagttcaagacccccaccatcagcctgaaggagaccatcggcaagtacagcgacgaccacgagatgagaaacgaggtgtaccacagaaagatcatcagctggttcggcgacagccccctggccctgttcggcctgcaccagctgatcgagtacggcaagaagagcggcaagaaggccggcgactggtacggccccgccgtggtggcccacatcctgagaaaggccgtggaggaggccagacaccccgacctgcagggcatcaccatctacgtggcccaggactgcaccgtgtacaacagcgacgtgatcgacaagcagagcgccagcatgaccagcgacaacgccgacgacaaggccgtgatcatcctggtgcccgtgagactgggcggcgagagaaccaacaccgactacctggagttcgtgaagggcatcctgagcctggagtactgcgtgggcatcatcggcggcaagcccaagcagagctactacttcgccggcttccaggacgacagcctgatctacatggacccccactactgccagagcttcgtggacgtgagcatcaaggacttccccctggagaccttccactgccccagccccaagaagatgagcttcagaaagatggaccccagctgcaccatcggcttctactgcagaaacgtgcaggacttcaagagagccagcgaggagatcaccaagatgctgaagttcagcagcaaggagaagtaccccctgttcaccttcgtgaacggccacagcagagactacgacttcaccagcaccaccaccaacgaggaggacctgttcagcgaggacgagaagaagcagaagaagaagaagaagtag

SEQ ID NO: 5003 - DNA, 1557 bp, synthetic construct
  misc_feature 1..1557: note = source = /note="Description of Artificial Sequence: Synthetic coding sequence"
  source 1..1557: mol_type = other DNA
atgagaacctgggactacagatggagcctggccctggtggcccagaccggcgtgcactgctgcaacctgagcagcctgcagcccctgccccccagattcaagagattcagctgcctgagcctgagcagcggctgggactacagcaacagcggcaacatgaagccccccctgctggtgttcatcgtgtgcctgctgtggctgaaggacagccactgcgcccccacctggaaggacaagaccgccatcagcgagaacctgaagagcttcagcgaggtgggcgagatcgacgccgacgaggaggtgaagaaggccctgaccggcatcaagcagatgaagatcatgatggagagaaaggagaaggagcacaccaacctgatgagcaccctgaagaagtgcagagaggagaagcaggaggccctgaagctgctgaacgaggtgcaggagcacctggaggaggaggagagactgtgcagagagagcctggccgacagctggggcgagtgcagaagctgcctggagaacaactgcatgagaatctacaccacctgccagcccagctggagcagcgtgaagaacaagatcgagagattcttcagaaagatctaccagttcctgttccccttccacgaggacaacgagaaggacctgcccatcagcgagaagctgatcgaggaggacgcccagctgacccagatggaggacgtgttcagccagctgaccgtggacgtgaacagcctgttcaacagaagcttcaacgtgttcagacagatgcagcaggagttcgaccagaccttccagagccacttcatcagcgacaccgacctgaccgagccctacttcttccccgccttcagcaaggagcccatgaccaaggccgacctggagcagtgctgggacatccccaacttcttccagctgttctgcaacttcagcgtgagcatctacgagagcgtgagcgagaccatcaccaagatgctgaaggccatcgaggacctgcccaagcaggacaaggcccccgaccacggcggcctgatcagcaagatgctgcccggccaggacagaggcctgtgcggcgagctggaccagaacctgagcagatgcttcaagttccacgagaagtgccagaagtgccaggcccacctgagcgaggactgccccgacgtgcccgccctgcacaccgagctggacgaggccatcagactggtgaacgtgagcaaccagcagtacggccagatcctgcagatgaccagaaagcacctggaggacaccgcctacctggtggagaagatgagaggccagttcggctgggtgagcgagctggccaaccaggcccccgagaccgagatcatcttcaacagcatccaggtggtgcccagaatccacgagggcaacatcagcaagcaggacgagaccatgatgaccgacctgagcatcctgcccagcagcaacttcaccctgaagatccccctggaggagagcgccgagagcagcaacttcatcggctacgtggtggccaaggccctgcagcacttcaaggagcacttcaagacctggtag

SEQ ID NO: 5004 - DNA, 1716 bp, synthetic construct
  misc_feature 1..1716: note = source = /note="Description of Artificial Sequence: Synthetic coding sequence"
  source 1..1716: mol_type = other DNA
gtggagatgagaaagtggagcagcgagcccggccccgagcccgacaccgtggaggccgtgatcgagtacatgtacaccggcagaatcagagtgagcaccggcagcgtgcacgaggtgctggagctggccgacagattcctgctgatcagactgaaggagttctgcggcgagttcctgaagaagaagctgcacctgagcaactgcgtggccatccacagcctggcccacatgtacaccctgagccagctggccctgaaggccgccgacatgatcagaagaaacttccacaaggtgatccaggacgaggagttctacaccctgcccttccacctgatcagagactggctgagcgacctggagatcaccgtggacagcgaggaggtgctgttcgagaccgtgctgaagtgggtgcagagaaacgccgaggagagagagagatacttcgaggagctgttcaagctgctgagactgagccagatgaagcccacctacctgaccagacacgtgaagcccgagagactggtggccaacaacgaggtgtgcgtgaagctggtggccgacgccgtggagagacacgccctgagagccgagaacatccagagcggcacctgccagcaccccaccagccacgtgagcctgctgcccagatacggccagaacatggacgtgatcatggtgatcggcggcgtgagcgagggcggcgactacctgagcgagtgcgtgggctacttcgtggacgaggacagatgggtgaacctgccccacatccacaaccacctggacggccacgccgtggccgtgaccgagagctacgtgtacgtggccggcagcatggagcccggcttcgccaagaccgtggagagatacaaccccaacctgaacacctgggagcacgtgtgcagcctgatgaccagaaagcacagcttcggcctgaccgaggtgaagggcaagctgtacagcatcggcggccacggcaacttcagccccggcttcaaggacgtgaccgtgtacaaccccgagctggacaagtggcacaacctggagagcgcccccaagatcctgagagacgtgaaggccctggccatcgaggacagattcgtgtacatcgccgccagaacccccgtggacagagacaccgaggacggcctgaaggccgtgatcacctgctacgacaccgagaccagacagtggcaggacgtggagagcctgcccctgatcgacaactactgcttcttccagatgagcgtggtgaacagcaacttctaccagaccgccagctgctgccccaagagctactgcctggagaacgaggaggccgtgagaaagatcgccagccaggtgagcgacgagatcctggagagcctgccccccgaggtgctgagcatcgagggcgccgccatctgctactacaaggacgacgtgttcatcatcggcggctggaagaacagcgacgacatcgacaagcagtacagaaaggaggcctacagatactgcgccgagagaaagagatggatgctgctgccccccatgccccagcccagatgcagagccaccgcctgccacgtgagaatcccctacagatacctgcacggcacccagagataccccatgccccagaacctgatgtggcagaaggacagaatcagacagatgcaggagatccacagacacgccctgaacatgagaagagtgcccagcagccagatcgagtgctag

SEQ ID NO: 5005 - DNA, 729 bp, synthetic construct
  misc_feature 1..729: note = source = /note="Description of Artificial Sequence: Synthetic coding sequence"
  source 1..729: mol_type = other DNA
atgctgaagaagatcagcgtgggcgtggccggcgacctgaacaccgtgaccatgaagctgggctgcgtgctgatggcctgggccctgtacctgagcctgggcgtgctgtgggtggcccagatgctgctggccgccggctgccacgccgagctgttccccgcccccatcctgagagccgtgcccagcgccgagccccaggccggcagccccatgaccctgagctgccagaccaagctgcccctgcagagaagcgccgccagactgctgttcagcttctacaaggacggcagaatcgtgcagagcagaggcctgagcagcgagttccagatccccaccgccagcgaggaccacagcggcagctactggtgcgaggccgccaccgaggacaaccaggtgtggaagcagagcccccagctggagatcagagtgcagggcgccagcagcagcgccgccccccccaccctgaaccccgccccccagaagagcgccgcccccggcaccgcccccgaggaggcccccggccccctgccccccccccccacccccagcagcgaggaccccggcttcagcagccccctgggcatgcccgacccccacctgtaccaccagatgggcctgctgctgaagcacatgcaggacgtgagagtgctgctgggccacctgctgatggagctgagagagctgagcggccacagaaagcccggcaccaccaaggccaccgccgagtag

SEQ ID NO: 5006 - DNA, 1392 bp, synthetic construct
  misc_feature 1..1392: note = source = /note="Description of Artificial Sequence: Synthetic coding sequence"
  source 1..1392: mol_type = other DNA
atgtacgtgagcaccagagagagatacaagtggctgagattcagcgaggactgcctgtacctgaacgtgtacgcccccgccagagcccccggcgacccccagctgcccgtgatggtgtggttccccggcggcgccttcatcgtgggcgccgccagcagctacgagggcagcgacctggccgccagagagaaggtggtgctggtgttcctgcagcacagactgggcatcttcggcttcctgagcaccgacgacagccacgccagaggcaactggggcctgctggaccagatggccgccctgagatgggtgcaggagaacatcgccgccttcggcggcgaccccggcaacgtgaccctgttcggccagagcgccggcgccatgagcatcagcggcctgatgatgagccccctggccagcggcctgttccacagagccatcagccagagcggcaccgccctgttcagactgttcatcaccagcaaccccctgaaggtggccaagaaggtggcccacctggccggctgcaaccacaacagcacccagatcctggtgaactgcctgagagccctgagcggcaccaaggtgatgagagtgagcaacaagatgagattcctgcagctgaacttccagagagaccccgaggagatcatctggagcatgagccccgtggtggacggcgtggtgatccccgacgaccccctggtgctgctgacccagggcaaggtgagcagcgtgccctacctgctgggcgtgaacaacctggagttcaactggctgctgccctacatcatgaagttccccctgaacagacaggccatgagaaaggagaccatcaccaagatgctgtggagcaccagaaccctgctgaacatcaccaaggagcaggtgcccctggtggtggaggagtacctggacaacgtgaacgagcacgactggaagatgctgagaaacagaatgatggacatcgtgcaggacgccaccttcgtgtacgccaccctgcagaccgcccactaccacagagacgccggcctgcccgtgtacctgtacgagttcgagcaccacgccagaggcatcatcgtgaagcccagaaccgacggcgccgaccacggcgacgagatgtacttcctgttcggcggccccttcgccaccggcctgagcatgggcaaggagaaggccctgagcctgcagatgatgaagtactgggccaacttcgccagaaccggcaaccccaacgacggcaacctgccctgctggcccagatacaacaaggacgagaagtacctgcagctggacttcaccaccagagtgggcatgaagctgaaggagaagaagatggccttctggatgagcctgtaccagagccagagacccgagaagcagagacagttctag

SEQ ID NO: 5007 - DNA, 1215 bp, synthetic construct
  misc_feature 1..1215: note = source = /note="Description of Artificial Sequence: Synthetic coding sequence"
  source 1..1215: mol_type = other DNA
atgttctaccacgcctacgacagctacctggagaacgccttccccttcgacgagctgagacccctgacctgcgacggccacgacacctggggcagcttcagcctgaccctgatcgacgccctggacaccctgctgatcctgggcaacgtgagcgagttccagagagtggtggaggtgctgcaggacagcgtggacttcgacatcgacgtgaacgccagcgtgttcgagaccaacatcagagtggtgggcggcctgctgagcgcccacctgctgagcaagaaggccggcgtggaggtggaggccggctggccctgcagcggccccctgctgagaatggccgaggaggccgccagaaagctgctgcccgccttccagacccccaccggcatgccctacggcaccgtgaacctgctgcacggcgtgaaccccggcgagacccccgtgacctgcaccgccggcatcggcaccttcatcgtggagttcgccaccctgagcagcctgaccggcgaccccgtgttcgaggacgtggccagagtggccctgatgagactgtgggagagcagaagcgacatcggcctggtgggcaaccacatcgacgtgctgaccggcaagtgggtggcccaggacgccggcatcggcgccggcgtggacagctacttcgagtacctggtgaagggcgccatcctgctgcaggacaagaagctgatggccatgttcctggagtacaacaaggccatcagaaactacaccagattcgacgactggtacctgtgggtgcagatgtacaagggcaccgtgagcatgcccgtgttccagagcctggaggcctactggcccggcctgcagagcctgatcggcgacatcgacaacgccatgagaaccttcctgaactactacaccgtgtggaagcagttcggcggcctgcccgagttctacaacatcccccagggctacaccgtggagaagagagagggctaccccctgagacccgagctgatcgagagcgccatgtacctgtacagagccaccggcgaccccaccctgctggagctgggcagagacgccgtggagagcatcgagaagatcagcaaggtggagtgcggcttcgccaccgtgagcgtgtgcatggcccccagaaccggcaagagcctgcccctgctgctgaagagcctgttcaagggcagagccctgggcgtgctgacctaccagcactag

SEQ ID NO: 5008 - DNA, 1281 bp, synthetic construct
  misc_feature 1..1281: note = source = /note="Description of Artificial Sequence: Synthetic coding sequence"
  source 1..1281: mol_type = other DNA
atgggctggaccgacaccctggagagcgccgaggacatcttctggaagcaggccgacttcggctacgccagagagagactggaggagatgcacgtgctgtgccagcccaaggagaccagcgacagcagcctggtgtgcagcagatacctgcagtactgcagagccaccaacctgtacctggacctgagaaacatcaagagaaaccacgacagattcaaggaggacttcttccagagcggcgagatcggcggccactgcaagctggacatcagaaccctgaccagcgagggccagagaaagagccccctgcagagctggttcgccgagctgcagagctacacccagctgaacttcagacccatcgaggacgccaagtgcgacatcgtgatcgagaagcccacctacttcatgaagctggacgccggcgtgaacatgtaccaccacttctgcgacttcatcaacctgtacatcacccagcacgtgaacaacagcttcagcaccgacgtgtacatcgtgatgtgggacaccagcagctacggctacggcgacctgttcagcgacacctggaacgccttcaccgactacgacgtgatccacctgaagacctacgacagcaagagagtgtgcttcaaggaggccgtgttcagcctgctgcccagaatgagatacggcctgttctacaacacccccctgatcagcggctgccagaacaccggcctgttcagagccttcgcccagcacgtgctgcacagactgaacatcacccaggagggccccaaggacggcaagatcagagtgaccatcctggccagaagcaccgagtacagaaagatcctgaaccagaacgagctggtgaacgccctgaagaccgtgagcaccttcgaggtgcagatcgtggactacaagtacagagagctgggcttcctggaccagctgagaatcacccacaacaccgacatcttcatcggcatgcacggcgccggcctgacccacctgctgttcctgcccgactgggccgccgtgttcgagctgtacaactgcgaggacgagagatgctacctggacctggccagactgagaggcgtgcactacatcacctggagaagacagaacaaggtgttcccccaggacaagggccaccaccccaccctgggcgagcaccccaagttcaccaactacagcttcgacgtggaggagttcatgtacctggtgctgcaggccgccgaccacgtgctgcagcaccccaagtggcccttcaagaagaagcacgacgagctgtag

SEQ ID NO: 5009 - DNA, 1098 bp, synthetic construct
  misc_feature 1..1098: note = source = /note="Description of Artificial Sequence: Synthetic coding sequence"
  source 1..1098: mol_type = other DNA
atgaagctgggctgcgtgctgatggcctgggccctgtacctgagcctgggcgtgctgtgggtggcccagatgctgctggtggccagcagcttcagcgccgccagcttcgagaccctgcagtgcgagggccccgtgtgcaccgaggagagcagctgccacaccgaggacgacctgaccgacgccagagaggccggcttccaggtgaaggcctacaccttcagcgagcccttccacctgatcgtgagctacgactggctgatcctgcagggccccgccaagcccgtgttcgagggcgacctgctggtgctgagatgccaggcctggcaggactggcccctgacccaggtgaccttctacagagacggcagcgccctgggcccccccggccccaacagagagttcagcatcaccgtggtgcagaaggccgacagcggccactaccactgcagcggcatcttccagagccccggccccggcatccccgagaccgccagcgtggtggccatcaccgtgcaggagctgttccccgcccccatcctgagagccgtgcccagcgccgagccccaggccggcagccccatgaccctgagctgccagaccaagctgcccctgcagagaagcgccgccagactgctgttcagcttctacaaggacggcagaatcgtgcagagcagaggcctgagcagcgagttccagatccccaccgccagcgaggaccacagcggcagctactggtgcgaggccgccaccgaggacaaccaggtgtggaagcagagcccccagctggagatcagagtgcagggcgccagcagcagcgccgccccccccaccctgaaccccgccccccagaagagcgccgcccccggcaccgcccccgaggaggcccccggccccctgccccccccccccacccccagcagcgaggaccccggcttcagcagccccctgggcatgcccgacccccacctgtaccaccagatgggcctgctgctgaagcacatgcaggacgtgagagtgctgctgggccacctgctgatggagctgagagagctgagcggccacagaaagcccggcaccaccaaggccaccgccgagtag

SEQ ID NO: 5010 - DNA, 1407 bp, synthetic construct
  misc_feature 1..1407: note = source = /note="Description of Artificial Sequence: Synthetic coding sequence"
  source 1..1407: mol_type = other DNA
atgagatggatcctgtgctggagcctgaccctgtgcctgatggcccagaccgccctgggcgccctgcacaccaagagaccccaggtggtgaccaagtacggcaccctgcagggcaagcagatgcacgtgggcaagacccccatccaggtgttcctgggcgtgcccttcagcagaccccccctgggcatcctgagattcgccccccccgagccccccgagccctggaagggcatcagagacgccaccacctacccccccggctgcctgcaggagagctggggccagctggccagcatgtacgtgagcaccagagagagatacaagtggctgagattcagcgaggactgcctgtacctgaacgtgtacgcccccgccagagcccccggcgacccccagctgcccgtgatggtgtggttccccggcggcgccttcatcgtgggcgccgccagcagctacgagggcagcgacctggccgccagagagaaggtggtgctggtgttcctgcagcacagactgggcatcttcggcttcctgagcaccgacgacagccacgccagaggcaactggggcctgctggaccagatggccgccctgagatgggtgcaggagaacatcgccgccttcggcggcgaccccggcaacgtgaccctgttcggccagagcgccggcgccatgagcatcagcggcctgatgatgagccccctggccagcggcctgttccacagagccatcagccagagcggcaccgccctgttcagactgttcatcaccagcaaccccctgaaggtggccaagaaggtggcccacctggccggctgcaaccacaacagcacccagatcctggtgaactgcctgagagccctgagcggcaccaaggtgatgagagtgagcaacaagatgagattcctgcagctgaacttccagagagaccccgaggagatcatctggagcatgagccccgtggtggacggcgtggtgatccccgacgaccccctggtgctgctgacccagggcaaggtgagcagcgtgccctacctgctgggcgtgaacaacctggagttcaactggctgctgccctacatcatgaagttccccctgaacagacaggccatgagaaaggagaccatcaccaagatgctgtggagcaccagaaccctgctgaacatcaccaaggagcaggtgcccctggtggtggaggagtacctggacaacgtgaacgagcacgactggaagatgctgagaaacagaatgatggacatcgtgcaggacgccaccttcgtgtacgccaccctgcagaccgcccactaccacagagagacccccatgatgggcatctgccccgccggccacgccaccaccagaatgaagagcacctgcagctggatcctgccccaggagtgggcctag

SEQ ID NO: 5011 - DNA, 756 bp, synthetic construct
  misc_feature 1..756: note = source = /note="Description of Artificial Sequence: Synthetic coding sequence"
  source 1..756: mol_type = other DNA
atgagcagctacggctacggcgacctgttcagcgacacctggaacgccttcaccgactacgacgtgatccacctgaagacctacgacagcaagagagtgtgcttcaaggaggccgtgttcagcctgctgcccagaatgagatacggcctgttctacaacacccccctgatcagcggctgccagaacaccggcctgttcagagccttcgcccagcacgtgctgcacagactgaacatcacccaggagggccccaaggacggcaagatcagagtgaccatcctggccagaagcaccgagtacagaaagatcctgaaccagaacgagctggtgaacgccctgaagaccgtgagcaccttcgaggtgcagatcgtggactacaagtacagagagctgggcttcctggaccagctgagaatcacccacaacaccgacatcttcatcggcatgcacggcgccggcctgacccacctgctgttcctgcccgactgggccgccgtgttcgagctgtacaactgcgaggacgagagatgctacctggacctggccagactgagaggcgtgcactacatcacctggagaagacagaacaaggtgttcccccaggacaagggccaccaccccaccctgggcgagcaccccaagttcaccaactacagcttcgacgtggaggagttcatgtacctggtgctgcaggccgccgaccacgtgctgcagcaccccaagtggcccttcaagaagaagcacgacgagctgtag

SEQ ID NO: 5012 - DNA, 927 bp, synthetic construct
  misc_feature 1..927: note = source = /note="Description of Artificial Sequence: Synthetic coding sequence"
  source 1..927: mol_type = other DNA
atgatccccgtggagctgctgctgtgctacctgctgctgcaccccgtggacgccaccagctacggcaagcagaccaacgtgctgatgcacttccccctgagcctggagagccagacccccagcagcgaccccctgagctgccagttcctgcaccccaagagcctgcccggcttcagccacatggcccccctgcccaagttcctggtgagcctggccctgagaaacgccctggaggaggccggctgccaggccgacgtgtgggccctgcagctgcagctgtacagacagggcggcgtgaacgccacccaggtgctgatccagcacctgagaggcctgcagaagggcagaagcaccgagagaaacgtgagcgtggaggccctggccagcgccctgcagctgctggccagagagcagcagagcaccggcagagtgggcagaagcctgcccaccgaggactgcgagaacgagaaggagcaggccgtgcacaacgtggtgcagctgctgcccggcgtgggcaccttctacaacctgggcaccgccctgtactacgccacccagaactgcctgggcaaggccagagagagaggcagagacggcgccatcgacctgggctacgacctgctgatgaccatggccggcatgagcggcggccccatgggcctggccatcagcgccgccctgaagcccgccctgagaagcggcgtgcagcagctgatccagtactaccaggaccagaaggacgccaacatcagccagcccgagaccaccaaggagggcctgagagccatcagcgacgtgagcgacctggaggagaccaccaccctggccagcttcatcagcgaggtggtgagcagcgccccctactggggctgggccatcatcaagagctacgacctggaccccggcgccggcagcctggagatctag

SEQ ID NO: 5013 - DNA, 2862 bp, synthetic construct
  misc_feature 1..2862: note = source = /note="Description of Artificial Sequence: Synthetic coding sequence"
  source 1..2862: mol_type = other DNA
atgagagtgctggcctgcctgctggccgccctggtgggcatccaggccgtggagagactgagactggccgacggcccccacggctgcgccggcagactggaggtgtggcacggcggcagatggggcaccgtgtgcgacgacggctgggacctgagagacgccgccgtggcctgcagacagctgggctgcggcggcgccctggccgcccccggcggcgccttcttcggcgagggcgccggccccgtgtggctgagcgagctggcctgcagaggcaacgagggccagctgggcctgtgccaccacagaggctggaaggcccacatctgcagccacgaggaggacgccggcgtggtgtgcgccggccagagagtggccaacagcagagacgacagcaccagccccctggacggcgccccctggcccggcctgctgctggagctgagccccagcaccgaggagcccctggtgacccacgcccccagacccgccggcaacccccagaacgccagcagaaagaagagccccagacccaagcaggccaagagcaccagagcccccctgctgaccaccggcgcccccagacaggagagactgagactggtgagcggcccccacagatgcgccggcagactggaggtgtggcacggcggcagatggggcaccgtgtgcgacgacggctgggacctgagagacgccgccgtggcctgcagagagctgggctgcggcggcgccctggccgcccccggcggcgccagattcggccccggcgccggccccgtgtggatggacgacgtgggctgcggcggcggcgagcaggccctgagagactgccccagaagcccctggggcagaagcaactgcgaccacagcgaggacgccggcctggtgtgcaccggccccgcccccagactgagactggccgacggcccccacggctgcgccggcagactggaggtgtggcacggcggcagatggggcagcgtgtgcgacgacgcctgggacctgagagacgccgccgtggcctgcagagagctgggctgcggcggcgccctggccgcccccggcggcgccttcttcggcgagggcagcggccccatcatcctggacgacctgagatgcagaggcaacgagaccgccctgagattctgccccgccagaccctggggccagcacgactgccaccacagagaggacgccggcgccgtgtgcgacggcatgcccctgggctacgtgccccccaccgcccccaccgacagcaacaacagcacccccagagaggccgccagcagaccccccagcaccatgaccagccaggcccccggcaccgccggcgtgagccccccccccgccagccccaccgtgctgtgggagcccggccccgaggccggcagcccccagctgagactggtggccggccccagcaagtgcagcggcagactggaggtgtggcacgaccagagatggggcaccgtgtgcgacgacagctgggacatgagagacagcgccgtggtgtgcagagagctgggctgcggcggcccccagcagcccgaccccgccgccggcagattcggctggggcgccggccccatctggctggacgacgtgggctgcgtgggcaccgaggccagcctgagcgactgccccgccgccccctggggcaagcacaactgcgcccacaacgaggacgtgggcgtgacctgcaccggcccccccggcctggacagcatcagcgaccccttcagctggagctggatccccggcctgggcagagacagagacgcctggctgcccggcgagctggccaccaagcccagcgccagcgtgaccgccagcgtgctggagaagaccaccaccaaggcccccggcaagatgcccaagagcaccaagaagtgggtgaccaagaacgccaagagacccaccacccagccccccgtgatgcccaccaccaagcacagcagagcccagagcccccccgacctgaccagccagaccaccgccgccctgaccaccgaggccagcagaagacccaccagcgagttcaccagaagacccaccaccgaggccccccagagatggaccagccacaccaccgccaccctgaccccccaggcccccagagagagaaccaccaagaccatggccatgctgaccacccagggcccccaggagatgaccagcgagagcaccatcaagagcatcccccaggccagcctggagcccagcgccgagatccccgagggcagccccgagagccccaaggaccccgcccccagccccagcgtgagcaccaccggcgagagcggcctgttcagagtgagactggccgacggccccaacagatgcgccggcagactggaggtgtggcacgccggcagatggggcaccgtgtgcgacgacaactgggacctgagagacgccaccgtggcctgctgggagctgggctgcggcaaggtgagacccagagtgggcaagacccactacggccccggcaccggccccatctggctggacgacatgggctgcaagggcagcgaggccagcctgagcgactgccccagcggcgcctggggcaagcacaactgcgaccacgaggaggacgtgggcctgacctgcaccggctacaccgactacgacgactaccccccctggacctgggaccccaccagcagagaggacctggccaagggcaccaccaccgccggcgtgcccggccacaccctgccctggagaaccaccagaagacccggcagcagcagccccgccatcagaagactgcccgacaccgagcccgaggccggcctgagagaggtgatgctgctggtgcagggcctgcccggcctgcagagactgcccagcccctag

SEQ ID NO: 5014 - DNA, 474 bp, synthetic construct
  misc_feature 1..474: note = source = /note="Description of Artificial Sequence: Synthetic coding sequence"
  source 1..474: mol_type = other DNA
atgctgagaaccgagagctgcagacccagaagccccgccggccaggtggccgccgccagccccctgctgctgctgctgctgctgctggcctggtgcgccggcgcctgcagaggcgcccccatcctgccccagggcctgcagcccgagcagcagctgcagctgtggaacgagatcgacgacacctgcagcagcttcctgagcatcgacagccagccccaggccagcaacgccctggaggagctgtgcttcatgatcatgggcatgctgcccaagccccaggagcaggacgagaaggacaacaccaagagaagcagcgtggtgcaccccctgctgcagctggtgccccacctgcacgagagaagaatgaagagattcagagtggacgaggagttccagagccccttcgccagccagagcagaggctacttcctgttcagacccagaaacggcagaagaagcgccggcttcatctag

SEQ ID NO: 5015 - DNA, 1545 bp, synthetic construct
  misc_feature 1..1545: note = source = /note="Description of Artificial Sequence: Synthetic coding sequence"
  source 1..1545: mol_type = other DNA
atgcccagcaccgtgctgcccagcaccgtgctgcccagcctgctgcccaccgccggcgccggctggagcatgagatggatcctgtgctggagcctgaccctgtgcctgatggcccagaccgccctgggcgccctgcacaccaagagaccccaggtggtgaccaagtacggcaccctgcagggcaagcagatgcacgtgggcaagacccccatccaggtgttcctgggcgtgcccttcagcagaccccccctgggcatcctgagattcgccccccccgagccccccgagccctggaagggcatcagagacgccaccacctacccccccggctgcctgcaggagagctggggccagctggccagcatgtacgtgagcaccagagagagatacaagtggctgagattcagcgaggactgcctgtacctgaacgtgtacgcccccgccagagcccccggcgacccccagctgcccgtgatggtgtggttccccggcggcgccttcatcgtgggcgccgccagcagctacgagggcagcgacctggccgccagagagaaggtggtgctggtgttcctgcagcacagactgggcatcttcggcttcctgagcaccgacgacagccacgccagaggcaactggggcctgctggaccagatggccgccctgagatgggtgcaggagaacatcgccgccttcggcggcgaccccggcaacgtgaccctgttcggccagagcgccggcgccatgagcatcagcggcctgatgatgagccccctggccagcggcctgttccacagagccatcagccagagcggcaccgccctgttcagactgttcatcaccagcaaccccctgaaggtggccaagaaggtggcccacctggccggctgcaaccacaacagcacccagatcctggtgaactgcctgagagccctgagcggcaccaaggtgatgagagtgagcaacaagatgagattcctgcagctgaacttccagagagaccccgaggagatcatctggagcatgagccccgtggtggacggcgtggtgatccccgacgaccccctggtgctgctgacccagggcaaggtgagcagcgtgccctacctgctgggcgtgaacaacctggagttcaactggctgctgccctacaacatcaccaaggagcaggtgcccctggtggtggaggagtacctggacaacgtgaacgagcacgactggaagatgctgagaaacagaatgatggacatcgtgcaggacgccaccttcgtgtacgccaccctgcagaccgcccactaccacagaggcctgagcatgggcaaggagaaggccctgagcctgcagatgatgaagtactgggccaacttcgccagaaccggcaaccccaacgacggcaacctgccctgctggcccagatacaacaaggacgagaagtacctgcagctggacttcaccaccagagtgggcatgaagctgaaggagaagaagatggccttctggatgagcctgtaccagagccagagacccgagaagcagagacagttctag

SEQ ID NO: 5016 - DNA, 1062 bp, synthetic construct
  misc_feature 1..1062: note = source = /note="Description of Artificial Sequence: Synthetic coding sequence"
  source 1..1062: mol_type = other DNA
atgagcaaccccacccagaccgacgccgacagcgacctggtgggcgacgtgtgcgacaccaacgaggacagcgacggcgacggccaccaggacaccaaggacaactgcccccagctgcccaacagcagccagctggacagcgacaacgacggcctgggcgacgagtgcgacggcgacgacgacaacgacggcatccccgactacgtgccccccggccccgacaactgcagactggtgcccaaccccaaccagaaggacagcgacggcaacggcgtgggcgacgtgtgcgaggacgacttcgacaacgacgccgtggtggaccccctggacgtgtgccccgagagcgccgaggtgaccctgaccgacttcagagcctaccagaccgtggtgctggaccccgagggcgacgcccagatcgaccccaactgggtggtgctgaaccagggcatggagatcgtgcagaccatgaacagcgaccccggcctggccgtgggctacaccgccttcaacggcgtggacttcgagggcaccttccacgtgaacaccgtgaccgacgacgactacgccggcttcctgttcagctaccaggacagcggcagattctacgtggtgatgtggaagcagaccgagcagacctactggcaggccacccccttcagagccgtggcccagcccggcctgcagctgaaggccgtgaccagcgtgagcggccccggcgagcacctgagaaacgccctgtggcacaccggccacacccccgaccaggtgagactgctgtggaccgaccccagaaacgtgggctggagagacaagaccagctacagatggcagctgctgcacagaccccaggtgggctacatcagagtgaagctgtacgagggcccccagctggtggccgacagcggcgtgatcatcgacaccagcatgagaggcggcagactgggcgtgttctgcttcagccaggagaacatcatctggagcaacctgcagtacagatgcaacgacaccgtgcccgaggacttcgagcccttcagaagacagctgctgcagggcagagtgtag

SEQ ID NO: 5017 - DNA, 1074 bp, synthetic construct
  misc_feature 1..1074: note = source = /note="Description of Artificial Sequence: Synthetic coding sequence"
  source 1..1074: mol_type = other DNA
atggagatcgagcacaccctggaccagatgatcagcaaggtgggcaaccacatcgacgtgctgaccggcaagtgggtggcccaggacgccggcatcggcgccggcgtggacagctacttcgagtacctggtgaagggcgccatcctgctgcaggacaagaagctgatggccatgttcctggagtacaacaaggccatcagaaactacaccagattcgacgactggtacctgtgggtgcagatgtacaagggcaccgtgagcatgcccgtgttccagagcctggaggcctactggcccggcctgcagagcctgatcggcgacatcgacaacgccatgagaaccttcctgaactactacaccgtgtggaagcagttcggcggcctgcccgagttctacaacatcccccagggctacaccgtggagaagagagagggctaccccctgagacccgagctgatcgagagcgccatgtacctgtacagagccaccggcgaccccaccctgctggagctgggcagagacgccgtggagagcatcgagaagatcagcaaggtggagtgcggcttcgccaccatcaaggacctgagagaccacaagctggacaacagaatggagagcttcttcctggccgagaccgtgaagtacctgtacctgctgttcgaccccaccaacttcatccacaacaacggcagcaccttcgacgccgtgatcaccccctacggcgagtgcatcctgggcgccggcggctacatcttcaacaccgaggcccaccccatcgaccccgccgccctgcactgctgccagagactgaaggaggagcagtgggaggtggaggacctgatgagagagttctacagcctgaagagaagcagaagcaagttccagaagaacaccgtgagcagcggcccctgggagccccccgccagacccggcaccctgttcagccccgagaaccacgaccaggccagagagagaaagcccgccaagcagaaggtgcccctgctgagctgccccagccagcccttcaccagcaagctggccctgctgggccaggtgttcctggacagcagctag

SEQ ID NO: 5018 - DNA, 1341 bp, synthetic construct; identical to SEQ ID NO: 3757
  misc_feature 1..1341: note = source = /note="Description of Artificial Sequence: Synthetic coding sequence"
  source 1..1341: mol_type = other DNA

SEQ ID NO: 5019 - DNA, 900 bp, synthetic construct; identical to SEQ ID NO: 3786
  misc_feature 1..900: note = source = /note="Description of Artificial Sequence: Synthetic coding sequence"
  source 1..900: mol_type = other DNA

SEQ ID NO: 5020 - DNA, 1458 bp, synthetic construct
  misc_feature 1..1458: note = source = /note="Description of Artificial Sequence: Synthetic coding sequence"
  source 1..1458: mol_type = other DNA
atggacaacaacaagcactgcaagcaggacaactgcctgctgacccccaacagcggccaggaggacgccgacaacgacggcgtgggcgaccagtgcgacgacgacgccgacggcgacggcatcaagaacgtggaggacaactgcagactgttccccaacaaggaccagcagaacagcgacaccgacagcttcggcgacgcctgcgacaactgccccaacgtgcccaacaacgaccagaaggacaccgacggcaacggcgagggcgacgcctgcgacaacgacgtggacggcgacggcatccccaacggcctggacaactgccccaaggtgcccaaccccctgcagaccgacagagacgaggacggcgtgggcgacgcctgcgacagctgccccgagatgagcaaccccacccagaccgacgccgacagcgacctggtgggcgacgtgtgcgacaccaacgaggacagcgacggcgacggccaccaggacaccaaggacaactgcccccagctgcccaacagcagccagctggacagcgacaacgacggcctgggcgacgagtgcgacggcgacgacgacaacgacggcatccccgactacgtgccccccggccccgacaactgcagactggtgcccaaccccaaccagaaggacagcgacggcaacggcgtgggcgacgtgtgcgaggacgacttcgacaacgacgccgtggtggaccccctggacgtgtgccccgagagcgccgaggtgaccctgaccgacttcagagcctaccagaccgtggtgctggaccccgagggcgacgcccagatcgaccccaactgggtggtgctgaaccagggcatggagatcgtgcagaccatgaacagcgaccccggcctggccgtgggctacaccgccttcaacggcgtggacttcgagggcaccttccacgtgaacaccgtgaccgacgacgactacgccggcttcctgttcagctaccaggacagcggcagattctacgtggtgatgtggaagcagaccgagcagacctactggcaggccacccccttcagagccgtggcccagcccggcctgcagctgaaggccgtgaccagcgtgagcggccccggcgagcacctgagaaacgccctgtggcacaccggccacacccccgaccaggtgagactgctgtggaccgaccccagaaacgtgggctggagagacaagaccagctacagatggcagctgctgcacagaccccaggtgggctacatcagagtgaagctgtacgagggcccccagctggtggccgacagcggcgtgatcatcgacaccagcatgagaggcggcagactgggcgtgttctgcttcagccaggagaacatcatctggagcaacctgcagtacagatgcaacgacaccgtgcccgaggacttcgagcccttcagaagacagctgctgcagggcagagtgtag

SEQ ID NO: 5021 - DNA, 2358 bp, synthetic construct
  misc_feature 1..2358: note = source = /note="Description of Artificial Sequence: Synthetic coding sequence"
  source 1..2358: mol_type = other DNA
atgaagcacaccctggccctgctggcccccctgctgggcctgggcctgggcctggccctgagccagctggccgccggcgccaccgactgcaagttcctgggccccgccgagcacctgaccttcacccccgccgccagagccagatggctggcccccagagtgagagcccccggcctgctggacagcctgtacggcaccgtgagaagattcctgagcgtggtgcagctgaaccccttccccagcgagctggtgaaggccctgctgaacgagctggccagcgtgaaggtgaacgaggtggtgagatacgaggccggctacgtggtgtgcgccgtgatcgccggcctgtacctgctgctggtgcccaccgccggcctgtgcttctgctgctgcagatgccacagaagatgcggcggcagagtgaagaccgagcacaaggccctggcctgcgagagagccgccctgatggtgttcctgctgctgaccaccctgctgctgctgatcggcgtggtgtgcgccttcgtgaccaaccagagaacccacgagcagatgggccccagcatcgaggccatgcccgagaccctgctgagcctgtggggcctggtgagcgacgtgccccaggagctgcaggccgtggcccagcagttcagcctgccccaggagcaggtgagcgaggagctggacggcgtgggcgtgagcatcggcagcgccatccacacccagctgagaagcagcgtgtaccccctgctggccgccgtgggcagcctgggccaggtgctgcaggtgagcgtgcaccacctgcagaccctgaacgccaccgtggtggagctgcaggccggccagcaggacctggagcccgccatcagagagcacagagacagactgctggagctgctgcaggaggccagatgccagggcgactgcgccggcgccctgagctgggccagaaccctggagctgggcgccgacttcagccaggtgcccagcgtggaccacgtgctgcaccagctgaagggcgtgcccgaggccaacttcagcagcatggtgcaggaggagaacagcaccttcaacgccctgcccgccctggccgccatgcagaccagcagcgtggtgcaggagctgaagaaggccgtggcccagcagcccgagggcgtgagaaccctggccgagggcttccccggcctggaggccgccagcagatgggcccaggccctgcaggaggtggaggagagcagcagaccctacctgcaggaggtgcagagatacgagacctacagatggatcgtgggctgcgtgctgtgcagcgtggtgctgttcgtggtgctgtgcaacctgctgggcctgaacctgggcatctggggcctgagcgccagagacgaccccagccaccccgaggccaagggcgaggccggcgccagattcctgatggccggcgtgggcctgagcttcctgttcgccgcccccctgatcctgctggtgttcgccaccttcctggtgggcggcaacgtgcagaccctggtgtgccagagctgggagaacggcgagctgttcgagttcgccgacacccccggcaacctgccccccagcatgaacctgagccagctgctgggcctgagaaagaacatcagcatccaccaggcctaccagcagtgcaaggagggcgccgccctgtggaccgtgctgcagctgaacgacagctacgacctggaggagcacctggacatcaaccagatccagagacccgtggtgaagaccagcatggagcagctggcccaggagctgcagggcctggcccaggcccaggacaacagcgtgctgggccagagactgcaggaggaggcccagggcctgagaaacctgcaccaggagaaggtggtgccccagcagagcctggtggccaagctgaacctgagcgtgagagccctggagagcagcgcccccaacctgcagctggagaccagcgacgtgctggccaacgtgacctacctgaagggcgagctgcccgcctgggccgccagaatcctgagaaacgtgagcgagtgcttcctggccagagagatgggctacttcagccagtacgtggcctgggtgagagaggaggtgacccagagaatcgccacctgccagcccctgagcggcgccctggacaacagcagagtgatcctgtgcgacatgatggccgacccctggaacgccttctggttctgcctggcctggtgcaccttcttcctgatccccagcatcatcttcgccgtgaagaccagcaagtacttcagacccatcagaaagagactgagcagcaccagcagcgaggagacccagctgttccacatccccagagtgaccagcctgaagctgtag

SEQ ID NO: 5022 - DNA, 792 bp, synthetic construct
  misc_feature 1..792: note = source = /note="Description of Artificial Sequence: Synthetic coding sequence"
  source 1..792: mol_type = other DNA
atgggcagagtgctggaggaggccagattcgccgtggccttcaccgagagcatgaaggagatggcccaggcccagtggaaggccagacagatcagcctggccgtgaccagcgccgtgcccgtgcagccccacgccaagggcaaggtgtacgtgcagagccagggcatcgccaccacccccaacgccgccttcaactggaacaccttcctgcagagaagcgagatcaaccagagcgccgacaacctgcacatcttcctgctgatctgcggcctgagacaggtgaaggaccccctgtacctggtggacgccttcagcgcctggcaccaggaggagcccaacgtgcacctggtgatcgtgggccccgaggtggaccccgtgttcaccagagaggtgaaggccaaggtgaagagagccgccggcgtgagactgatcggcgagatgccccaggaggacctgcacgccgtggtgaagaactgcttcgccgtggtgaacagcagcgtgagcgagggcatgagcgccgccatcctggaggccatggacctggaggtgcccgtgctggccagaaacatccccggcaacgccgccgtggtgaagcacgaggtgaccggcctgctgttcagcaacccccaggagttcgtgcacctggccaagagactggtgagcgaccccgccctggagaaggagatcgtggtgaacggcagagagtacgtgagaatgtaccacagctggcaggtggagagagacacctaccagcagctgatcagaaagctggagggcagcaccgaggactag

SEQ ID NO: 5023 - DNA, 456 bp, synthetic construct
  misc_feature 1..456: note = source = /note="Description of Artificial Sequence: Synthetic coding sequence"
  source 1..456: mol_type = other DNA
atgaagaccgccgtgatgaaggagctgtacagcttcctgcaccaccagaacagatacggcagcgagcaggagttcgtggacgacctgaagaacatgtggttcggcctgtacagcagaggcaacgaggagggcgacagcagcggcttcgagcacgtgttcagcggcgaggtgaagaagggcaaggtgaccggcttccacaactggatcagattctacctggaggagaaggagggcctggtggactactacagccacatctacgacggccccgtgcccgtgaagcccggcagaatcagcctgagctgccccgacatctacctgggccaggtgcacctgtgggagtggcaggaggtgcacagacacagcctgcacagcgtgttccacctgatcgagctgagagccagaaagggccacgagggcagctgcgagaccgaggtgctgagcagcctggactag

SEQ ID NO: 5024 - DNA, 363 bp, synthetic construct
  misc_feature 1..363: note = source = /note="Description of Artificial Sequence: Synthetic coding sequence"
  source 1..363: mol_type = other DNA
atgctgccccagtggctgctgctgctgttcctgctgttcttcttcctgttcctgctgaccagaggcagcctgagccccaccaagtacaacctgctggagctgaaggagagctgcatcagaaaccaggactgcgagaccggctgctgccagagagcccccgacaactgcgagagccactgcgccgagaagggcagcgagggcagcctgtgccagacccaggtgttcttcggccagtacagagcctgcccctgcctgagaaacctgacctgcatctacagcaagaacgagaagtggctgagcatcgcctacggcagatgccagaagatcggcagacagaagctggccaagaagatgttcttctag

SEQ ID NO: 5025 - DNA, 951 bp, synthetic construct
  misc_feature 1..951: note = source = /note="Description of Artificial Sequence: Synthetic coding sequence"
  source 1..951: mol_type = other DNA
atggccgaggccgccctggaggccgtgagaagcgagctgagagagttccccgccgccgccagagagctgtgcgtgcccctggccgtgccctacctggacaagccccccacccccctgcacttctacagagactgggtgtgccccaacagaccctgcatcatcagaaacgccctgcagcactggcccgccctgcagaagtggagcctgccctacttcagagccaccgtgggcagcaccgaggtgagcgtggccgtgacccccgacggctacgccgacgccgtgagaggcgacagattcatgatgcccgccgagagaagactgcccctgagcttcgtgctggacgtgctggagggcagagcccagcaccccggcgtgctgtacgtgcagaagcagtgcagcaacctgcccagcgagctgccccagctgctgcccgacctggagagccacgtgccctgggccagcgaggccctgggcaagatgcccgacgccgtgaacttctggctgggcgaggccgccgccgtgaccagcctgcacaaggaccactacgagaacctgtactgcgtggtgagcggcgagaagcacttcctgttccacccccccagcgacagacccttcatcccctacgagctgtacacccccgccacctaccagctgaccgaggagggcaccttcaaggtggtggacgaggaggccatggagaaggtgccctggatccccctggaccccctggcccccgacctggccagataccccagctacagccaggcccaggccctgagatgcaccgtgagagccggcgagatgctgtacctgcccgccctgtggttccaccacgtgcagcagagccagggctgcatcgccgtgaacttctggtacgacatggagtacgacctgaagtacagctacttccagctgctggacagcctgaccaaggccagcggcctggactag

SEQ ID NO: 5026 - DNA, 657 bp, synthetic construct; identical to SEQ ID NO: 4208
  misc_feature 1..657: note = source = /note="Description of Artificial Sequence: Synthetic coding sequence"
  source 1..657: mol_type = other DNA

SEQ ID NO: 5027 - DNA, 909 bp, synthetic construct
  misc_feature 1..909: note = source = /note="Description of Artificial Sequence: Synthetic coding sequence"
  source 1..909: mol_type = other DNA
atggccatgttcctggagtacaacaaggccatcagaaactacaccagattcgacgactggtacctgtgggtgcagatgtacaagggcaccgtgagcatgcccgtgttccagagcctggaggcctactggcccggcctgcagagcctgatcggcgacatcgacaacgccatgagaaccttcctgaactactacaccgtgtggaagcagttcggcggcctgcccgagttctacaacatcccccagggctacaccgtggagaagagagagggctaccccctgagacccgagctgatcgagagcgccatgtacctgtacagagccaccggcgaccccaccctgctggagctgggcagagacgccgtggagagcatcgagaagatcagcaaggtggagtgcggcttcgccaccatcaaggacctgagagaccacaagctggacaacagaatggagagcttcttcctggccgagaccgtgaagtacctgtacctgctgttcgaccccaccaacttcatccacaacaacggcagcaccttcgacgccgtgatcaccccctacggcgagtgcatcctgggcgccggcggctacatcttcaacaccgaggcccaccccatcgaccccgccgccctgcactgctgccagagactgaaggaggagcagtgggaggtggaggacctgatgagagagttctacagcctgaagagaagcagaagcaagttccagaagaacaccgtgagcagcggcccctgggagccccccgccagacccggcaccctgttcagccccgagaaccacgaccaggccagagagagaaagcccgccaagcagaaggtgcccctgctgagctgccccagccagcccttcaccagcaagctggccctgctgggccaggtgttcctggacagcagctag

SEQ ID NO: 5028 - DNA, 459 bp, synthetic construct
  misc_feature 1..459: note = source = /note="Description of Artificial Sequence: Synthetic coding sequence"
  source 1..459: mol_type = other DNA
atgctggtggacggccccagcgagagacccgccctgtgcttcctgctgctggccgtggccatgagcttcttcggcagcgccctgagcatcgacgagaccagagcccacctgctgctgaaggagaagatgatgagactgggcggcagactggtgctgaacaccaaggaggagctggccaacgagagactgatgaccctgaagatcgccgagatgaaggaggccatgagaaccctgatcttcccccccagcatgcacttcttccaggccaagcacctgatcgagagaagccaggtgttcaacatcctgagaatgatgcccaagggcgccgccctgcacctgcacgacatcggcatcgtgaccatggactggctggtgagaaacgtgacctacagaccccactgccacatctgcttcacccccagaggcatcatgcagttcagattcgcccaccccacctag

SEQ ID NO: 5029 - DNA, 3951 bp, synthetic construct
  misc_feature 1..3951: note = source = /note="Description of Artificial Sequence: Synthetic coding sequence"
  source 1..3951: mol_type = other DNA
atggagcccagactgttctgctggaccaccctgttcctgctggccggctggtgcctgcccggcctgccctgccccagcagatgcctgtgcttcaagagcaccgtgagatgcatgcacctgatgctggaccacatcccccaggtgccccagcagaccaccgtgctggacctgagattcaacagaatcagagagatccccggcagcgccttcaagaagctgaagaacctgaacaccctgctgctgaacaacaaccacatcagaaagatcagcagaaacgccttcgagggcctggagaacctgctgtacctgtacctgtacaagaacgagatccacgccctggacaagcagaccttcaagggcctgatcagcctggagcacctgtacatccacttcaaccagctggagatgctgcagcccgagaccttcggcgacctgctgagactggagagactgttcctgcacaacaacaagctgagcaagatccccgccggcagcttcagcaacctggacagcctgaagagactgagactggacagcaacgccctggtgtgcgactgcgacctgatgtggctgggcgagctgctgcagggcttcgcccagcacggccacacccaggccgccgccacctgcgagtaccccagaagactgcacggcagagccgtggccagcgtgaccgtggaggagttcaactgccagagccccagaatcaccttcgagccccaggacgtggaggtgcccagcggcaacaccgtgtacttcacctgcagagccgagggcaaccccaagcccgagatcatctggatccacaacaaccacagcctggacctggaggacgacaccagactgaacgtgttcgacgacggcaccctgatgatcagaaacaccagagagagcgaccagggcgtgtaccagtgcatggccagaaacagcgccggcgaggccaagacccagagcgccatgctgagatacagcagcctgcccgccaagcccagcttcgtgatccagccccaggacaccgaggtgctgatcggcaccagcaccaccctggagtgcatggccaccggccacccccaccccctgatcacctggaccagagacaacggcctggagctggacggcagcagacacgtggccaccagcagcggcctgtacctgcagaacatcacccagagagaccacggcagattcacctgccacgccaacaacagccacggcaccgtgcaggccgccgccaacatcatcgtgcaggcccccccccagttcaccgtgacccccaaggaccaggtggtgctggaggagcacgccgtggagtggctgtgcgaggccgacggcaaccccccccccgtgatcgtgtggaccaagaccggcggccagctgcccgtggagggccagcacaccgtgctgagcagcggcaccctgagaatcgacagagccgcccagcacgaccagggccagtacgagtgccaggccgtgagcagcctgggcgtgaagaaggtgagcgtgcagctgaccgtgaagcccaaggccctggccgtgttcacccagctgccccaggacaccagcgtggaggtgggcaagaacatcaacatcagctgccacgcccagggcgagccccagcccatcatcacctggaacaaggagggcgtgcagatcaccgagagcggcaagttccacgtggacgacgagggcaccctgaccatctacgacgccggcttccccgaccagggcagatacgagtgcgtggccagaaacagcttcggcctggccgtgaccaacatgttcctgaccgtgaccgccatccagggcagacaggccggcgacgacttcgtggagagcagcatcctggacgccgtgcagagagtggacagcgccatcaacagcaccagaagacacctgttcagccagaagccccacaccagcagcgacctgctggcccagttccactaccccagagaccccctgatcgtggagatggccagagccggcgagatcttcgagcacaccctgcagctgatcagagagagagtgaagcagggcctgaccgtggacctggagggcaaggagttcagatacaacgacctggtgagccccagaagcctgagcctgatcgccaacctgagcggctgcaccgccagaagacccctgcccaactgcagcaacagatgcttccacgccaagtacagagcccacgacggcacctgcaacaacctgcagcagcccacctggggcgccgccctgaccgccttcgccagactgctgcagcccgcctacagagacggcatcagagcccccagaggcctgggcctgcccgtgggcagcagacagcccctgcccccccccagactggtggccaccgtgtgggccagagccgccgccgtgacccccgaccacagctacaccagaatgctgatgcactggggctggttcctggagcacgacctggaccacaccgtgcccgccctgagcaccgccagattcagcgacggcagaccctgcagcagcgtgtgcaccaacgaccccccctgcttccccatgaacaccagacacgccgaccccagaggcacccacgccccctgcatgctgttcgccagaagcagccccgcctgcgccagcggcagacccagcgccaccgtggacagcgtgtacgccagagagcagatcaaccagcagaccgcctacatcgacggcagcaacgtgtacggcagcagcgagagagagagccaggccctgagagaccccagcgtgcccagaggcctgctgaagaccggcttcccctggccccccagcggcaagcccctgctgcccttcagcaccggcccccccaccgagtgcgccagacaggagcaggagagcccctgcttcctggccggcgaccacagagccaacgagcacctggccctggccgccatgcacaccctgtggttcagagagcacaacagaatggccaccgagctgagcgccctgaacccccactgggagggcaacaccgtgtaccaggaggccagaaagatcgtgggcgccgagctgcagcacatcacctacagccactggctgcccaaggtgctgggcgaccccggcaccagaatgctgagaggctacagaggctacaaccccaacgtgaacgccggcatcatcaacagcttcgccaccgccgccttcagattcggccacaccctgatcaaccccatcctgtacagactgaacgccaccctgggcgagatcagcgagggccacctgcccttccacaaggccctgttcagccccagcagaatcatcaaggagggcggcatcgaccccgtgctgagaggcctgttcggcgtggccgccaagtggagagcccccagctacctgctgagccccgagctgacccagagactgttcagcgccgcctacagcgccgccgtggacagcgccgccaccatcatccagagaggcagagaccacggcatccccccctacgtggacttcagagtgttctgcaacctgaccagcgtgaagaacttcgaggacctgcagaacgagatcaaggacagcgagatcagacagaagctgagaaagctgtacggcagccccggcgacatcgacctgtggcccgccctgatggtggaggacctgatccccggcaccagagtgggccccaccctgatgtgcctgttcgtgacccagttccagagactgagagacggcgacagattctggtacgagaaccccggcgtgttcacccccgcccagctgacccagctgaagcaggccagcctgagcagagtgctgtgcgacaacggcgacagcatccagcaggtgcaggccgacgtgttcgtgaaggccgagtacccccaggactacctgaactgcagcgagatccccaaggtggacctgagagtgtggcaggactgctgcgccgacaagcaggccggcggcacccccgaggccggcagagtgtacagatgctag

SEQ ID NO: 5030 - DNA, 891 bp, synthetic construct
  misc_feature 1..891: note = source = /note="Description of Artificial Sequence: Synthetic coding sequence"
  source 1..891: mol_type = other DNA
atggaccccagcaagatcgcccacaccgagtaccccgtgaacaccatcatcatccacgaggacttcgacaacaacagcatgagcaacaacatcgccctgctgaagaccgacaccgccatgcacttcggcaacctggtgcagagcatctgcttcctgggcagaatgctgcacaccccccccgtgctgcagaactgctgggtgagcggctggaaccccaccagcgccaccggcaaccacatgaccatgagcgtgctgagaaagatcttcgtgaaggacctggacatgtgccccctgtacaagctgcagaagaccgagtgcggcagccacaccaaggaggagaccaagaccgcctgcctgggcgaccccggcagccccatgatgtgccagctgcagcagttcgacctgtgggtgctgagaggcgtgctgaacttcggcggcgagacctgccccggcctgttcctgtacaccaaggtggaggactacagcaagtggatcaccagcaaggccgagagagccggcccccccctgagcagcctgcaccactgggagaagctgatcagcttcagccaccacggccccaacgccaccatgacccagaagacctacagcgacagcgagctgggccacgtgggcagctacctgcagggccagagaagaaccatcacccacagcagactgggcaacagcagcagagacagcctggacgtgagagagaaggacgtgaaggagagcggcagaagccccgaggccagcgtgcagcccctgtactacgactactacggcggcgaggtgggcgagggcagaatcttcgccggccagaacagactgtaccagcccgaggagatcatcctggtgagcttcgtgctggtgttcttctgcagcagcatctag

SEQ ID NO: 5031 - DNA, 2808 bp, synthetic construct
  misc_feature 1..2808: note = source = /note="Description of Artificial Sequence: Synthetic coding sequence"
  source 1..2808: mol_type = other DNA
atgagaaagcccagaagaaagagcagacagaacgccgagggcagaagaagccccagcccctacagcctgaagtgcagccccaccagagagaccctgacctacgcccaggcccagagaatcgtggaggtggacatcgacggcagactgcacagaatcagcatctacgaccccctgaagatcatcaccgaggacgagctgaccgcccaggacatcaccgagtgcaacagcaacaaggagaacagcgagcagccccagttccccggcaagagcaagaagcccagcagcaagggcaagaagaaggagagctgcagcaagcacgccagcggcaccagcttccacctgccccagcccagcttcagaatggtggacagcggcatccagcccgaggccccccccctgcccgccgcctactacagatacatcgagaagccccccgaggacctggacgccgaggtggagtacgacatggacgaggaggacctggcctggctggacatggtgaacgagaagagaagagtggacggccacagcctggtgagcgccgacaccttcgagctgctggtggacagactggagaaggagagctacctggagagcagaagcagcggcgcccagcagagcctgatcgacgaggacgccttctgctgcgtgtgcctggacgacgagtgccacaacagcaacgtgatcctgttctgcgacatctgcaacctggccgtgcaccaggagtgctacggcgtgccctacatccccgagggccagtggctgtgcagatgctgcctgcagagccccagcagacccgtggactgcatcctgtgccccaacaagggcggcgccttcaagcagaccagcgacggccactgggcccacgtggtgtgcgccatctggatccccgaggtgtgcttcgccaacaccgtgttcctggagcccatcgagggcatcgacaacatcccccccgccagatggaagctgacctgctacatctgcaagcagaagggcctgggcgccgccatccagtgccacaaggtgaactgctacaccgccttccacgtgacctgcgcccagagagccggcctgttcatgaagatcgagcccatgagagagaccagcctgaacggcaccatcttcaccgtgagaaagaccgcctactgcgaggcccacagcccccccggcgccgccaccgccagaagaaagggcgacagccccagaagcatcagcgagaccggcgacgaggagggcctgaaggagggcgacggcgaggaggaggaggaggaggaggtggaggaggaggagcaggaggcccagggcggcgtgagcggcagcctgaagggcgtgcccaagaagagcaagatgagcctgaagcagaagatcaagaaggagcccgaggaggccggccaggacacccccagcaccctgcccatgctggccgtgccccagatccccagctacagactgaacaagatctgcagcggcctgagcttccagagaaagaaccagttcatgcagagactgcacaactactggctgctgaagagacaggccagaaacggcgtgcccctgatcagaagactgcacagccacctgcagagccagagaaacgccgagcagagagagcaggacgagaagaccagcgccgtgaaggaggagctgaagtactggcagaagctgagacacgacctggagagagccagactgctgatcgagctgatcagaaagagagagaagctgaagagagagcaggtgaaggtgcagcaggccgccatggagctggagctgatgcccttcaacgtgctgctgagaaccaccctggacctgctgcaggagaaggaccccgcccacatcttcgccgagcccgtgaacctgagcgaggtgcccgactacctggagttcatcagcaagcccatggacttcagcaccatgagaagaaagctggagagccacctgtacagaaccctggaggagttcgaggaggacttcaacctgatcgtgaccaactgcatgaagtacaacgccaaggacaccatcttccacagagccgccgtgagactgagagacctgggcggcgccatcctgagacacgccagaagacaggccgagaacatcggctacgaccccgagagaggcacccacctgcccgagagccccaagctggaggacttctacagattcagctgggaggacggcatgaccaacggcttcggcaagcacaccgagagcggcagcgacagcgagtgcagcctgggcctgagcggcggcctggccttcgaggcctgcagcggcctgaccccccccaagagaagcagaggcaagcccgccctgagcagagtgcccttcctggagggcgtgaacggcgacagcgactacaacggcagcggcagaagcctgctgctgcccttcgaggacagaggcgacctggagcccctggagctggtgtgggccaagtgcagaggctaccccagctaccccgccctgatcatcgaccccaagatgcccagagagggcctgctgcacaacggcgtgcccatccccgtgccccccctggacgtgctgaagctgggcgagcagaagcaggccgaggccggcgagaagctgttcctggtgctgttcttcgacaacaagagaacctggcagtggctgcccagagacaaggtgctgcccctgggcgtggaggacaccgtggacaagctgaagatgctggagggcagaaagaccagcatcagaaagagcgtgcaggtggcctacgacagagccatgatccacctgagcagagtgagaggcccccacagcttcgtgaccagcagctacctgtag

SEQ ID NO: 5032 - DNA, 270 bp, synthetic construct
  misc_feature 1..270: note = source = /note="Description of Artificial Sequence: Synthetic coding sequence"
  source 1..270: mol_type = other DNA
atgaagaccggcctgttcttcctgtgcctgctgggcaccgccgccgccatccccaccaacgccagactgctgagcgaccacagcaagcccaccgccgagaccgtggcccccgacaacaccgccatccccagcctgagagccgaggccgaggagaacgagaaggagaccgccgtgagcaccgaggacgacagccaccacaaggccgagaagagcagcgtgctgaagagcaaggaggagagccacgagcagagcgccgagcagggcaagtag

SEQ ID NO: 5033 - DNA, 657 bp, synthetic construct; identical to SEQ ID NO: 4208
  misc_feature 1..657: note = source = /note="Description of Artificial Sequence: Synthetic coding sequence"
  source 1..657: mol_type = other DNA

SEQ ID NO: 5034 - DNA, 540 bp, synthetic construct
  misc_feature 1..540: note = source = /note="Description of Artificial Sequence: Synthetic coding sequence"
  source 1..540: mol_type = other DNA
atgagcctgggccccgaggtgttcctgggcccccccgaggcccagagcttcctgagcagccacaccagaatccccagagccaaccactgggacctggagctgctgacccccggcaacctggagagagagtgcctggaggagagatgcagctgggaggaggccagagagtacttcgaggacaacaccctgaccgagagattctgggagagctacatctacaacggcaagggcggcagaggcagagtggacgtggccagcctggccgtgggcctgaccggcggcatcctgctgatcgtgctggccggcctgggcgccttctggtacctgagatggagacagcacagaggccagcagccctgcccccaggaggccggcctgatcagccccctgagccccctgaaccccctgggcccccccacccccctgccccccccccccccccccccccccggcctgcccacctacgagcaggccctggccgccagcggcgtgcacgacgcccccccccccccctacaccagcctgagaagaccccactag

SEQ ID NO: 5035 - DNA, 765 bp, synthetic construct
  misc_feature 1..765: note = source = /note="Description of Artificial Sequence: Synthetic coding sequence"
  source 1..765: mol_type = other DNA
atgaccctggaggacatcgtgcagagagaggtgtggggcaccgtggtggccagaggcgcccccgccccccccggccccgtgcccaccagaggcgccgccagcagaagactgagcgtgagccccgccagcaccagcgagaccagcctgtaccaggtgctgctgggcgccagacagctggtgcagcccggcccccacgccatgtacgccagagtgagacaggtggagagcaaccccctgtaccagggcaccgccagcagcgccgacgtggccctggtggagctggaggcccccgtgcccttcaccaactacatcctgcccgtgtgcctgcccgaccccagcgtgatcttcgagaccggcatgaactgctgggtgaccggctggggcagccccagcgaggaggacctgctgcccgagcccagaatcctgcagaagctggccgtgcccatcatcgacacccccaagtgcaacctgctgtacagcaaggacaccgagttcggctaccagcccaagaccatcaagaacgacatgctgtgcgccggcttcgaggagggcaagaaggacgcctgcaagggcgacagcggcggccccctggtgtgcctggtgggccagagctggctgcaggccggcgtgatcagctggggcgagggctgcgccagacagaacagacccggcgtgtacatcagagtgaccgcccaccacaactggatccacagaatcatccccaagctgcagttccagcccgccagactgggcggccagaagtag

SEQ ID NO: 5036 - DNA, 1899 bp, synthetic construct
  misc_feature 1..1899: note = source = /note="Description of Artificial Sequence: Synthetic coding sequence"
  source 1..1899: mol_type = other DNA
atgaccccccccgtgctgaccaccgccgagaccagcgtgaagcccagcgtgagcgccttcacccacagcccccccgagaacaccaccggcatcagcagcaccatcagcttccacagcagaaccctgaacctgaccgacgtgatcgaggagctggcccaggccagcacccagaccctgaagagcaccatcgccagcgagaccaccctgagcagcaagagccaccagagcaccaccaccagaaaggccatcatcagacacagcaccatcccccccttcctgagcagcagcgccaccctgatgcccgtgcccatcagcccccccttcacccagagagccgtgaccgacaacgtggccacccccatcagcggcctgatgaccaacaccgtggtgaagctgcacgagagcagcagacacaacgccaagccccagcagctggtggccgaggtggccaccagccccaaggtgcaccccaacgccaagttcaccatcggcaccacccacttcatctacagcaacctgctgcacagcacccccatgcccgccctgaccaccgtgaagagccagaacagcaagctgacccccagcccctgggccgagaaccagttctggcacaagccctacagcgagatcgccgagaagggcaagaagcccgaggtgagcatgctggccaccaccggcctgagcgaggccaccaccctggtgagcgactgggacggccagaagaacaccaagaagagcgacttcgacaagaagcccgtgcaggaggccaccaccagcaagctgctgcccttcgacagcctgagcagatacatcttcgagaagcccagaatcgtgggcggcaaggccgccagcttcaccatccccgccaacagcgacgccttcctgccctgcgaggccgtgggcaaccccctgcccaccatccactggaccagagtgcccagcggcctggacctgagcaagagaaagcagaacagcagagtgcaggtgctgcccaacggcaccctgagcatccagagagtggagatccaggacagaggccagtacctgtgcagcgccagcaacctgttcggcaccgaccacctgcacgtgaccctgagcgtggtgagctacccccccagaatcctggagagaagaaccaaggagatcaccgtgcacagcggcagcaccgtggagctgaagtgcagagccgagggcagacccagccccaccgtgacctggatcctggccaaccagaccgtggtgagcgagagcagccagggcagcagacaggccgtggtgaccgtggacggcaccctggtgctgcacaacctgagcatctacgacagaggcttctacaagtgcgtggccagcaaccccggcggccaggacagcctgctggtgaagatccaggtgatcgccgccccccccgtgatcctggagcagagaagacaggtgatcgtgggcacctggggcgagagcctgaagctgccctgcaccgccaagggcaccccccagcccagcgtgtactgggtgctgagcgacggcaccgaggtgaagcccctgcagttcaccaacagcaagctgttcctgttcagcaacggcaccctgtacatcagaaacctggccagcagcgacagaggcacctacgagtgcatcgccaccagcagcaccggcagcgagagaagagtggtgatgctgaccatggaggagagagtgaccagccccagaatcgaggccgccagccagaagagaaccgaggtgaacttcggcgacaagctgctgctgaactgcagcgccaccggcgagcccaagccccagatcatgtggagactgcccagcaaggccgtggtggaccagcagcacagagtggccgccggcagcaccagcaccctgatggacccctgcctgctggaccagtag

SEQ ID NO: 5037 - DNA, 681 bp, synthetic construct
  misc_feature 1..681: note = source = /note="Description of Artificial Sequence: Synthetic coding sequence"
  source 1..681: mol_type = other DNA
atggacatcatcgtgctgctgcccaagggccactgcaccaagatccaggagctgcagatgaccaccgtgctgaagcagaacgtgcacgtgttcggcgtggagggcaacagcgacgagctggacgagcccatcaagaccgtgttcgccgacgtggccttcgtgaagaagcacaacctgatgagcctgaacagcatcaactggagcagagtgctggtgcagatggcccaccacttcttcgcctacttccagtgcacccccagcctggacacccaccccctgcccctggtggaggtggtggtgcccaccggcgccgccggcaacctggccgccggctacatcgcccagaagatcggcctgcccatcagactggtggtggccgtgaacagaaacgacatcatccacagaaccgtgcagcagggcgacttcagcctgagcgaggccgtgaagagcaccctggccagcgccatggacatccaggtgccctacaacatggagagagtgttctggctgctgagcggcagcgacagccaggtgaccagagccctgatggagcagttcgagagaacccagagcgtgaacctgcccaaggagctgcacagcaagcacagccccgtgctgcccagaccctgcctgtgcagccaggtgcccggcagctgccccggctgctggcccgacccctag

SEQ ID NO: 5038 - DNA, 729 bp, synthetic construct
  misc_feature 1..729: note = source = /note="Description of Artificial Sequence: Synthetic coding sequence"
  source 1..729: mol_type = other DNA
atgttccagaccggcggcctgatcgtgttctacggcctgctggcccagaccctgcccctgaacgtgaaccccgccctgcccctgagccccaccggcctggccggcagcctgaccaacgccctgagcaacggcctgctgagcggcggcctgctgggcatcctggagaacctgcccctgctggacatcctgaagcccggcggcggcaccagcggcggcctgctgggcggcctgctgggcaaggtgaccagcgtgatccccggcctgaacaacatcatcgacatcaaggtgaccgacccccagctgctggagctgggcctggtgcagagccccgacggccacagactgtacgtgaccatccccctgggcatcaagctgcaggtgaacacccccctggtgggcgccagcctgctgagactggccgtgaagctggacatcaccgccgagatcctggccgtgagagacaagcaggagagaatccacctggtgctgggcgactgcacccacagccccggcagcctgcagatcagcctgctggacggcctgggccccctgcccatccagggcctgctggacagcctgaccggcatcctgaacaaggtgctgcccgagctggtgcagggcaacgtgtgccccctggtgaacgaggtgctgagaggcctggacatcaccctggtgcacgacatcgtgaacatgctgatccacggcctgcagttcgtgatcaaggtgtag

SEQ ID NO: 5039 - DNA, 1422 bp, synthetic construct
  misc_feature 1..1422: note = source = /note="Description of Artificial Sequence: Synthetic coding sequence"
  source 1..1422: mol_type = other DNA
atgagcctggaggccagcctgtgcagcctggaggagtgcgccgccttccagcccagcagccccagccccctgcagccccagggccccgtgaagagcaacaacatcgtgaccgtgaccggcatcagcctgtgcctgttcatcatcatcgccaccgtgctgatcaccctgtggagaagattcggcagacccgccaagtgcagcacccccgccagacacaacagcatccacagccccagcttcagaaagaacagcgacgaggagaacatctgcgagctgagcgagcagagaggcagcttcagcgacggcggcgacggccccaccggcagccccggcgacaccggcatccccctgacctacagaagaagcggccccgtgccccccgaggacgacgccagcggcagcgagagcttccagagcaacgcccagaagatcatcccccccctgttcagctacagactggcccagcagcagctgaaggagatgaagaagaagggcctgaccgagaccaccaaggtgtaccacgtgagccagagccccctgaccgacaccgccatcgacgccgcccccagcgcccccctggacctggagagccccgaggaggccgccgccaacaagttcagaatcaagagccccttccccgagcagcccgccgtgagcgccggcgagagaccccccagcagactggacctgaacgtgacccaggccagctgcgccatcagccccagccagaccctgatcagaaagagccaggccagacacgtgggcagcagaggcggccccagcgagagaagccacgccagaaacgcccacttcagaagaaccgccagcttccacgaggccagacaggccagacccttcagagagagaagcatgagcaccctgacccccagacaggcccccgcctacagcagcagaaccagaacctgcgagcaggccgaggacagattcagaccccagagcagaggcgcccacctgttccccgagaagctggagcacttccaggaggccagcggcaccagaggccccctgaaccccctgcccaagagctacaccctgggccagcccctgagaaagcccgacctgggcgaccaccaggccggcctggtggccggcatcgagagaaccgagccccacagagccagaagaggccccagccccagccacaagagcgtgagcagaaagcagagcagccccatcagccccaaggacaactaccagagagtgagcagcctgagccccagccagtgcagaaaggacaagtgccagagcttccccacccaccccgagttcgccttctacgacaacaccagcttcggcctgaccgaggccgagcagagaatgctggacctgcccggctacttcggcagcaacgaggaggacgagaccaccagcaccctgagcgtggagaagctggtgatctag

SEQ ID NO: 5040 - DNA, 2310 bp, synthetic construct
  misc_feature 1..2310: note = source = /note="Description of Artificial Sequence: Synthetic coding sequence"
  source 1..2310: mol_type = other DNA
atgctgagcaagaagggcatcttcccctggatcctgacctgcatcagcgaggagatggccttcagaaccatctgcgtgctggtgggcgtgttcatctgcagcatctgcgtgaagggcagcagccagccccaggccagagtgtacctgaccttcgacgagctgagagagaccaagaccagcgagtacttcagcctgagccaccaccccctggactacagaatcctgctgatggacgaggaccaggacagaatctacgtgggcagcaaggaccacatcctgagcctgaacatcaacaacatcagccaggaggccctgagcgtgttctggcccgccagcaccatcaaggtggaggagtgcaagatggccggcaaggaccccacccacggctgcggcaacttcgtgagagtgatccagaccttcaacagaacccacctgtacgtgtgcggcagcggcgccttcagccccgtgtgcacctacctgaacagaggcagaagaagcgaggaccaggtgttcatgatcgacagcaagtgcgagagcggcaagggcagatgcagcttcaaccccaacgtgaacaccgtgagcgtgatgatcaacgaggagctgttcagcggcatgtacatcgacttcatgggcaccgacgccgccatcttcagaagcctgaccaagagaaacgccgtgagaaccgaccagcacaacagcaagtggctgagcgagcccatgttcgtggacgcccacgtgatccccgacggcaccgaccccaacgacgccaaggtgtacttcttcttcaaggagaagctgaccgacaacaacagaagcaccaagcagatccacagcatgatcgccagaatctgccccaacgacaccggcggcctgagaagcctggtgaacaagtggaccaccttcctgaaggccagactggtgtgcagcgtgaccgacgaggacggccccgagacccacttcgacgagctggaggacgtgttcctgctggagaccgacaaccccagaaccaccctggtgtacggcatcttcaccaccagcagcagcgtgttcaagggcagcgccgtgtgcgtgtaccacctgagcgacatccagaccgtgttcaacggccccttcgcccacaaggagggccccaaccaccagctgatcagctaccagggcagaatcccctaccccagacccggcacctgccccggcggcgccttcacccccaacatgagaaccaccaaggagttccccgacgacgtggtgaccttcatcagaaaccaccccctgatgtacaacagcatctaccccatccacaagagacccctgatcgtgagaatcggcaccgactacaagtacaccaagatcgccgtggacagagtgaacgccgccgacggcagataccacgtgctgttcctgggcaccgacagaggcaccgtgcagaaggtggtggtgctgcccaccaacaacagcgtgagcggcgagctgatcctggaggagctggaggtgttcaagaaccacgcccccatcaccaccatgaagatcagcagcaagaagcagcagctgtacgtgagcagcaacgagggcgtgagccaggtgagcctgcacagatgccacatctacggcaccgcctgcgccgactgctgcctggccagagacccctactgcgcctgggacggccacagctgcagcagattctaccccaccggcaagagaagaagcagaagacaggacgtgagacacggcaaccccctgacccagtgcagaggcttcaacctgaaggcctacagaaacgccgccgagatcgtgcagtacggcgtgaagaacaacaccaccttcctggagtgcgcccccaagagcccccaggccagcatcaagtggctgctgcagaaggacaaggacagaagaaaggaggtgaagctgaacgagagaatcatcgccaccagccagggcctgctgatcagaagcgtgcagggcagcgaccagggcctgtaccactgcatcgccaccgagaacagcttcaagcagaccatcgccaagatcaacttcaaggtgctggacagcgagatggtggccgtggtgaccgacaagtggagcccctggacctgggccagcagcgtgagagccctgcccttccaccccaaggacatcatgggcgccttcagccacagcgagatgcagatgatcaaccagtactgcaaggacaccagacagcagcaccagcagggcgacgagagccagaagatgagaggcgactacggcaagctgaaggccctgatcaacagcagaaagagcagaaacagaagaaaccagctgcccgagagctag

SEQ ID NO: 5041 - DNA, 942 bp, synthetic construct
  misc_feature 1..942: note = source = /note="Description of Artificial Sequence: Synthetic coding sequence"
  source 1..942: mol_type = other DNA
atgcccggctggctgaccctgcccaccctgtgcagattcctgctgtgggccttcaccatcttccacaaggcccagggcgaccccgccagccaccccggcaccaccccccccagctacaaggtgagatggagcaaggtggagcccggcgagctgagagagaccctgatcctgatcaccaacggcctgcacgccagaggctacggccccctgggcggcagagccagaatgagaagaggccacagactggacgccagcctggtgatcgccggcgtgagactggaggacgagggcagatacagatgcgagctgatcaacggcatcgaggacgagagcgtggccctgaccctgagcctggagggcgtggtgttcccctaccagcccagcagaggcagataccagttcaactactacgaggccaagcaggcctgcgaggagcaggacggcagactggccacctacagccagctgtaccaggcctggaccgagggcctggactggtgcaacgccggctggctgctggagggcagcgtgagataccccgtgctgaccgccagagccccctgcggcggcagaggcagacccggcatcagaagctacggccccagagacagaatgagagacagatacgacgccttctgcttcaccagcgccctggccggccaggtgttcttcgtgcccggcagactgaccctgagcgaggcccacgccgcctgcagaagaagaggcgccgtggtggccaaggtgggccacctgtacgccgcctggaagttcagcggcctggaccagtgcgacggcggctggctggccgacggcagcgtgagattccccatcaccacccccagacccagatgcggcggcctgcccgaccccggcgtgagaagcttcggcttccccagaccccagcaggccgcctacggcacctactgctacgccgagaactag

SEQ ID NO: 5042 - DNA, 1089 bp, synthetic construct
  misc_feature 1..1089: note = source = /note="Description of Artificial Sequence: Synthetic coding sequence"
  source 1..1089: mol_type = other DNA
atggcctggaccttcgagtgcagcagaaccaccagccccgagcccctgagcaccagcccctgcagaaccaccagcagcagaaacagccccaccatgagctgccccgccagcgtggcctgcgagcccagcaccagcaccaccaccagcagcccccccaaggcctgcctgaccagacccagcagccccagccccagctgcagcaccagcgcctggcacaacaagaacaacctgatcagcaaggtgcccagaggcgccctgagcagacagacccagctgagagagctgtacctgcagcacaaccagctgaccgacagcggcctggacgccaccaccttcagcaagctgcacagcctggagtacctggacctgagccacaaccagctgaccaccgtgcccgccggcctgcccagaaccctggccatcctgcacctgggcagaaacagaatcagacaggtggaggccgccagactgcacggcgccagaggcctgagatacctgctgctgcagcacaaccagctgggcagcagcggcctgcccgccggcgccctgagacccctgagaggcctgcacaccctgcacctgtacggcaacggcctggacagagtgccccccgccctgcccagaagactgagagccctggtgctgccccacaaccacgtggccgccctgggcgccagagacctggtggccacccccggcctgaccgagctgaacctggcctacaacagactggccagcgccagagtgcaccacagagccttcagaagactgagagccctgagaagcctggacctggccggcaaccagctgaccagactgcccatgggcctgcccaccggcctgagaaccctgcagctgcagagaaaccagctgagaatgctggagcccgagcccctggccggcctggaccagctgagagagctgagcctggcccacaacagactgagagtgggcgacatcggccccggcacctggcacgagctgcaggccctgcaggtgagacacagactggtgagccacaccgtgcccagagccccccccagcccctgcctgccctgccacgtgcccaacatcctggtgagctggtag

SEQ ID NO: 5043 - DNA, 900 bp, synthetic construct
  misc_feature 1..900: note = source = /note="Description of Artificial Sequence: Synthetic coding sequence"
  source 1..900: mol_type = other DNA
atgctgcaccccgagaccagccccggcagaggccacctgctggccgtgctgctggccctgctgggcaccgcctgggccgaggtgtggcccccccagctgcaggagcaggcccccatggccggcgccctgaacagaaaggagagcttcctgctgctgagcctgcacaacagactgagaagctgggtgcagccccccgccgccgacatgagaagactggactggagcgacagcctggcccagctggcccagggcagccccctgtggaaccccaaccccgagcccggcgtgagacccgtggcccaccccgccagcggcctggagcacgccgccgcccccagagcctggtgccccctgagcaagtggagcctgtggttcgccgagggccagagatacagccacgccgccggcgagtgcgccagaaacgccacctgcacccactacacccagctggtgtgggccaccagcagccagctgggctgcggcagacacctgtgcagcgccggccaggccgccatcgaggccttcgtgtgcgcctacagccccagaggcaactgggaggtgaacggcaagaccatcgtgccctacaagaagggcgcctggtgcagcctgtgcaccgccagcgtgagcggctgcttcaaggcctgggaccacgccggcggcctgtgcgaggtgcccagaaacccctgcagaatgagctgccagaaccacggcagactgaacatcagcacctgccactgccactgcccccccggctacaccggcagatactgccaggtgagatgcagcctgcagtgcgtgcacggcagattcagagaggaggagtgcagctgcgtgtgcgacatcggctacgagcccagcgtgccccccagatgcatcttccccagcacccccgtgacctag

SEQ ID NO: 5044 - DNA, 1047 bp, synthetic construct
  misc_feature 1..1047: note = source = /note="Description of Artificial Sequence: Synthetic coding sequence"
  source 1..1047: mol_type = other DNA
atgctggacaccaacctgatcctgctgcccctgttccagttcatcgtgcccaaggagtggaacagcaagtacagacccgtgtgcatccacctggccggcaccggcgaccaccactactggagaagaagaaccctgatggccagacccatgatcaaggaggccagaatggccagcctgctgctggagaacccctactacggctgcagaaagcccaaggaccaggtgagaagcagcctgaagaacgtgagcgacctgttcgtgatgggcggcgccctggtgctggagagcgccgccctgctgcactggctggagagagagggctacggccccctgggcatgaccggcatcagcatgggcggccacatggccagcctggccgtgagcaactggcccaagcccatgcccctgatcccctgcctgagctggagcaccgccagcggcgtgttcaccaccaccgacagcttcaagatgggccaggagttcgtgaagcacttcaccagcagcgccgacaagctgaccaacctgaacctggtgagcagaaccctgaacctggacatcagcaaccaggtggtgagccagaagcccgccgactgccacaacagcagcaagaccagcgtgagcgccaccagcgagggcctgctgctgcaggacaccagcaagatgaagagattcaaccagaccctgagcaccaacaagagcggctacaccagcagaaacccccagagctaccacctgctgagcaaggagcagagcagaaacagcctgagaaaggagagcctgatcttcatgaagggcgtgatggacgagtgcacccacgtggccaacttcagcgtgcccgtggaccccagcctgatcatcgtggtgcaggccaaggaggacgcctacatccccagaaccggcgtgagaagcctgcaggagatctggcccggctgcgagatcagatacctggagggcggccacatcagcgcctacctgttcaagcagggcctgttcagacaggccatctacgacgccttcgacagattcctgcacaagtacgccaactag

SEQ ID NO: 5045 - DNA, 1044 bp, synthetic construct
  misc_feature 1..1044: note = source = /note="Description of Artificial Sequence: Synthetic coding sequence"
  source 1..1044: mol_type = other DNA
atgagagcctgcatcagcctggtgctggccgtgctgtgcggcctggcctgggccgacctgtacagcgcccccaccagctgccagggcagatgctacgaggccttcgacaagcaccaccagtgccactgcaacgccagatgccaggagttcggcaactgctgcaaggacttcgagagcctgtgcagcgaccacgaggtgagccacagcagcgacgccatcaccaaggaggagatccagagcatcagcgagaagatctacagagccgacaccaacaaggcccagaaggaggacatcgtgctgaacagccagaactgcatcagccccagcgagaccagaaaccaggtggacagatgccccaagcccctgttcacctacgtgaacgagaagctgttcagcaagcccacctacgccgccttcatcaacctgctgaacaactaccagagagccaccggccacggcgagcacttcagcgcccaggagctggccgagcaggacgccttcctgagagagatcatgaagaccgccgtgatgaaggagctgtacagcttcctgcaccaccagaacagatacggcagcgagcaggagttcgtggacgacctgaagaacatgtggttcggcctgtacagcagaggcaacgaggagggcgacagcagcggcttcgagcacgtgttcagcggcgaggtgaagaagggcaaggtgaccggcttccacaactggatcagattctacctggaggagaaggagggcctggtggactactacagccacatctacgacggcccctgggacagctaccccgacgtgctggccatgcagttcaactgggacggctactacaaggaggtgggcagcgccttcatcggcagcagccccgagttcgagttcgccctgtacagcctgtgcttcatcgccagacccggcaaggtgtgccagctgagcctgggcggctaccccctggccgtgagaacctacacctgggacaagagcacctacggcaacggcaagaagtacatcgccaccgcctacatcgtgagcagcacctag

SEQ ID NO: 5046 - DNA, 864 bp, synthetic construct
  misc_feature 1..864: note = source = /note="Description of Artificial Sequence: Synthetic coding sequence"
  source 1..864: mol_type = other DNA
atgctgaagaagatcagcgtgggcgtggccggcgacctgaacaccgtgaccatgaagctgggctgcgtgctgatggcctgggccctgtacctgagcctgggcgtgctgtgggtggcccagatgctgctggccgccagcttcgagaccctgcagtgcgagggccccgtgtgcaccgaggagagcagctgccacaccgaggacgacctgaccgacgccagagaggccggcttccaggtgaaggcctacaccttcagcgagcccttccacctgatcgtgagctacgagctgttccccgcccccatcctgagagccgtgcccagcgccgagccccaggccggcagccccatgaccctgagctgccagaccaagctgcccctgcagagaagcgccgccagactgctgttcagcttctacaaggacggcagaatcgtgcagagcagaggcctgagcagcgagttccagatccccaccgccagcgaggaccacagcggcagctactggtgcgaggccgccaccgaggacaaccaggtgtggaagcagagcccccagctggagatcagagtgcagggcgccagcagcagcgccgccccccccaccctgaaccccgccccccagaagagcgccgcccccggcaccgcccccgaggaggcccccggccccctgccccccccccccacccccagcagcgaggaccccggcttcagcagccccctgggcatgcccgacccccacctgtaccaccagatgggcctgctgctgaagcacatgcaggacgtgagagtgctgctgggccacctgctgatggagctgagagagctgagcggccacagaaagcccggcaccaccaaggccaccgccgagtag

SEQ ID NO: 5047 - DNA, 1815 bp, synthetic construct; identical to SEQ ID NO: 3505
  misc_feature 1..1815: note = source = /note="Description of Artificial Sequence: Synthetic coding sequence"
  source 1..1815: mol_type = other DNA

SEQ ID NO: 5048 - DNA, 1005 bp, synthetic construct
  misc_feature 1..1005: note = source = /note="Description of Artificial Sequence: Synthetic coding sequence"
  source 1..1005: mol_type = other DNA
atgagaagcgccggcggcagaggcgagatcaaggtgagaagagagctgcagcccagcaagcaggtgagcggcctgaccaaccacgccagaaccggccaggagaagagaaacctgcagagactggtgctggagacccccagccagaacatcttcttcagccccgtgagcgtgagcaccagcctggccatgctgagcctgggcgcccacagcgtgaccaagacccagatcctgcagggcctgggcttcaacctgacccacacccccgagagcgccatccaccagggcttccagcacctggtgcacagcctgaccgtgcccagcaaggacctgaccctgaagatgggcagcgccctgttcgtgaagaaggagctgcagctgcaggccaacttcctgggcaacgtgaagagactgtacgaggccgaggtgttcagcaccgacttcagcaaccccagcatcgcccaggccagaatcaacagccacgtgaagaagaagacccagggcaaggtggtggacatcatccagggcctggacctgctgaccgccatggtgctggtgaaccacatcttcttcaaggccaagtgggagaagcccttccaccccgagtacaccagaaagaacttccccttcctggtgggcgagcaggtgaccgtgcacgtgcccatgatgcaccagaaggagcagttcgccttcggcgtggacaccgagctgaactgcttcgtgctgcagatggactacaagggcgacgccgtggccttcttcgtgctgcccagcaagggcaagatgagacagctggagcaggccctgagcgccagaaccctgagaaagtggagccacagcctgcagaagagatggatcgaggtgttcatccccagattcagcatcagcgccagctacaacctggagaccatcctgcccaagatgggcatccagaacgtgttcgacaagaacgccgacttcagcggcatcgccaagagagacagcctgcaggtgagcaaggtgagctag

SEQ ID NO: 5049 - DNA, 1065 bp, synthetic construct
  misc_feature 1..1065: note = source = /note="Description of Artificial Sequence: Synthetic coding sequence"
  source 1..1065: mol_type = other DNA
atggcccccgccagaagacccgccggcgccagactgctgctggtgtacgccggcctgctggccgccgccgccgccggcctgggcagccccgagcccggcgcccccagcagaagcagagccagaagagagcccccccccggcaacgagctgcccagaggccccggcgagagcagagccggccccgccgccagaccccccgagcccaccgccgagagagcccacagcgtggaccccagagacgcctggatgctgttcgtgagacagagcgacaagggcgtgaacggcaagaagagaagcagaggcaaggccaagaagctgaagttcggcctgcccggcccccccggcccccccggcccccagggcccccccggccccatcatcccccccgaggccctgctgaaggagttccagctgctgctgaagggcgccgtgagacagagagagagagccgagcccgagccctgcacctgcggccccgccggccccgtggccgccagcctggcccccgtgagcgccaccgccggcgaggacgacgacgacgtggtgggcgacgtgctggccctgctggccgcccccctggcccccggccccagagcccccagagtggaggccgccttcctgtgcagactgagaagagacgccctggtggagagaagagccctgcacgagctgggcgtgtactacctgcccgacgccgagggcgccttcagaagaggccccggcctgaacctgaccagcggccagtacagagcccccgtggccggcttctacgccctggccgccaccctgcacgtggccctgggcgagccccccagaagaggcccccccagacccagagaccacctgagactgctgatctgcatccagagcagatgccagagaaacgccagcctggaggccatcatgggcctggagagcagcagcgagctgttcaccatcagcgtgaacggcgtgctgtacctgcagatgggccagtggaccagcgtgttcctggacaacgccagcggctgcagcctgaccgtgagaagcggcagccacttcagcgccgtgctgctgggcgtgtag

SEQ ID NO: 5050 - DNA, 2685 bp, synthetic construct; identical to SEQ ID NO: 4872
  misc_feature 1..2685: note = source = /note="Description of Artificial Sequence: Synthetic coding sequence"
  source 1..2685: mol_type = other DNA

SEQ ID NO: 5051 - DNA, 2685 bp, synthetic construct; identical to SEQ ID NO: 4872
  misc_feature 1..2685: note = source = /note="Description of Artificial Sequence: Synthetic coding sequence"
  source 1..2685: mol_type = other DNA

SEQ ID NO: 5052 - DNA, 2886 bp, synthetic construct; identical to SEQ ID NO: 4184
  misc_feature 1..2886: note = source = /note="Description of Artificial Sequence: Synthetic coding sequence"
  source 1..2886: mol_type = other DNA

SEQ ID NO: 5053 - DNA, 2559 bp, synthetic construct; identical to SEQ ID NO: 4152
  misc_feature 1..2559: note = source = /note="Description of Artificial Sequence: Synthetic coding sequence"
  source 1..2559: mol_type = other DNA

SEQ ID NO: 5054 - DNA, 756 bp, synthetic construct
  misc_feature 1..756: note = source = /note="Description of Artificial Sequence: Synthetic coding sequence"
  source 1..756: mol_type = other DNA
atgccccacctggccagcctgttcaccgccagcagcagatgctgcccccaccccctgagacccgagggcagcggcgccatgggccccgaggccctgagcagcctgctgctgctgctgctggtggccagcggcgacgccgacatgaagggccacttcgaccccgccaagtgcagatacgccctgggcatgcaggacagaaccatccccgacagcgacatcagcgccagcagcagctggagcgacagcaccgccgccagacacagcagactggagagcagcgacggcgacggcgcctggtgccccgccggcagcgtgttccccaaggaggaggagtacctgcaggtggacctgcagagactgcacctggtggccctggtgggcacccagggcagacacgccggcggcctgggcaaggagttcagcagaagctacagactgagatacagcagagacggcagaagatggatgggctggaaggacagatggggccaggaggtgatcagcggcaacgaggaccccgagggcgtggtgctgaaggacctgggcccccccatggtggccagactggtgagattctaccccagagccgacagagtgatgagcgtgtgcctgagagtggagctgtacggctgcctgtggagaggcgagtggctgagcttcctgggcatctgcttcctgagcagaggcctggagggcggcgagtgcggcgagtgggccagcagaatccccagccccgccggcaagctgagcctgtag

SEQ ID NO: 5055 - DNA, 726 bp, synthetic construct
  misc_feature 1..726: note = source = /note="Description of Artificial Sequence: Synthetic coding sequence"
  source 1..726: mol_type = other DNA
atgaagttcatcctgctgtgggccctgctgaacctgaccgtggccctggccttcaaccccgactacaccgtgagcagcacccccccctacctggtgtacctgaagagcgactacctgccctgcgccggcgtgctgatccaccccctgtgggtgatcaccgccgcccactgcaacctgcccaagctgagagtgatcctgggcgtgaccatccccgccgacagcaacgagaagcacctgcaggtgatcggctacgagaagatgatccaccacccccacttcagcgtgaccagcatcgaccacgacatcatgctgatcaagctgaagaccgaggccgagctgaacgactacgtgaagctggccaacctgccctaccagaccatcagcgagaacaccatgtgcagcgtgagcacctggagctacaacgtgtgcgacatctacaaggagcccgacagcctgcagaccgtgaacatcagcgtgatcagcaagccccagtgcagagacgcctacaagacctacaacatcaccgagaacatgctgtgcgtgggcatcgtgcccggcagaagacagccctgcaaggaggtgagcgccgcccccgccatctgcaacggcatgctgcagggcatcctgagcttcgccgacggctgcgtgctgagagccgacgtgggcatctacgccaagatcttctactacatcccctggatcgagaacgtgatccagaacaactag

SEQ ID NO: 5056 - DNA, 1536 bp, synthetic construct
  misc_feature 1..1536: note = source = /note="Description of Artificial Sequence: Synthetic coding sequence"
  source 1..1536: mol_type = other DNA
atggccaagggcctgagcgtgcagaacgacaagcaccccggctaccagcccgccctgctgctgagccccggcgcccccctgttcgccgacggccccgcctacgccctgctgcacctgctgctgcacgagggcaaggccgagatggccgaccaggccgccgcctggctgaccagacagggcagcttccagggcggcttcagaagcacccaggacaccgtgatcgccctggacgccctgagcgcctactggatcgccagccacaccaccgaggagagaggcctgaacgtgaccctgagcagcaccggcagaaacggcttcaagagccacgccctgcagctgaacaacagacagatcagaggcctggaggaggagctgcagttcagcctgggcagcaagatcaacgtgaaggtgggcggcaacagcaagggcaccctgaaggtgctgagaacctacaacgtgctggacatgaagaacaccacctgccaggacctgcagatcgaggtgaccgtgaagggccacgtggagtacaccatggaggccaacgaggactacgaggactacgagtacgacgagctgcccgccaaggacgaccccgacgcccccctgcagcccgtgacccccctgcagctgttcgagggcagaagaaacagaagaagaagagaggcccccaaggtggtggaggagcaggagagcagagtgcactacaccgtgtgcatctggagaaacggcaaggtgggcctgagcggcatggccatcgccgacgtgaccctgctgagcggcttccacgccctgagagccgacctggagaagctgaccagcctgagcgacagatacgtgagccacttcgagaccgagggcccccacgtgctgctgtacttcgacagcgtgcccaccagcagagagtgcgtgggcttcgaggccgtgcaggaggtgcccgtgggcctggtgcagcccgccagcgccaccctgtacgactactacaaccccgagagaagatgcagcgtgttctacggcgcccccagcaagagcagactgctggccaccctgtgcagcgccgaggtgtgccagtgcgccgagggcaagtgccccagacagagaagagccctggagagaggcctgcaggacgaggacggctacagaatgaagttcgcctgctactaccccagagtggagtacggcttccaggtgaaggtgctgagagaggacagcagagccgccttcagactgttcgagaccaagatcacccaggtgctgcacttcaccaaggacgtgaaggccgccgccaaccagatgagaaacttcctggtgagagccagctgcagactgagactggagcccggcaaggagtacctgatcatgggcctggacggcgccacctacgacctggagggccacccccagtacctgctggacagcaacagctggatcgaggagatgcccagcgagagactgtgcagaagcaccagacagagagccgcctgcgcccagctgaacgacttcctgcaggagtacggcacccagggctgccaggtgtag

SEQ ID NO: 5057 - DNA, 2067 bp, synthetic construct; identical to SEQ ID NO: 4725
  misc_feature 1..2067: note = source = /note="Description of Artificial Sequence: Synthetic coding sequence"
  source 1..2067: mol_type = other DNA

SEQ ID NO: 5058 - DNA, 2559 bp, synthetic construct; identical to SEQ ID NO: 4152
  misc_feature 1..2559: note = source = /note="Description of Artificial Sequence: Synthetic coding sequence"
  source 1..2559: mol_type = other DNA

SEQ ID NO: 5059 - DNA, 1737 bp, synthetic construct; identical to SEQ ID NO: 4179
  misc_feature 1..1737: note = source = /note="Description of Artificial Sequence: Synthetic coding sequence"
  source 1..1737: mol_type = other DNA

SEQ ID NO: 5060 - DNA, 1326 bp, synthetic construct; identical to SEQ ID NO: 4016
  misc_feature 1..1326: note = source = /note="Description of Artificial Sequence: Synthetic coding sequence"
  source 1..1326: mol_type = other DNA

SEQ ID NO: 5061 - DNA, 2685 bp, synthetic construct; identical to SEQ ID NO: 4872
  misc_feature 1..2685: note = source = /note="Description of Artificial Sequence: Synthetic coding sequence"
  source 1..2685: mol_type = other DNA

SEQ ID NO: 5062 - DNA, 216 bp, synthetic construct; identical to SEQ ID NO: 4200
  misc_feature 1..216: note = source = /note="Description of Artificial Sequence: Synthetic coding sequence"
  source 1..216: mol_type = other DNA

SEQ ID NO: 5063 - DNA, 2760 bp, synthetic construct; identical to SEQ ID NO: 4172
  misc_feature 1..2760: note = source = /note="Description of Artificial Sequence: Synthetic coding sequence"
  source 1..2760: mol_type = other DNA

SEQ ID NO: 5064 - DNA, 447 bp, synthetic construct; identical to SEQ ID NO: 4156
  misc_feature 1..447: note = source = /note="Description of Artificial Sequence: Synthetic coding sequence"
  source 1..447: mol_type = other DNA

SEQ ID NO: 5065 - DNA, 5097 bp, synthetic construct
  misc_feature 1..5097: note = source = /note="Description of Artificial Sequence: Synthetic coding sequence"
  source 1..5097: mol_type = other DNA
atgagactgctgtggggcctgatctgggccagcagcttcttcaccctgagcctgcagaagcccagactgctgctgttcagccccagcgtggtgcacctgggcgtgcccctgagcgtgggcgtgcagctgcaggacgtgcccagaggccaggtggtgaagggcagcgtgttcctgagaaaccccagcagaaacaacgtgccctgcagccccaaggtggacttcaccctgagcagcgagagagacttcgccctgctgagcctgcaggtgcccctgaaggacgccaagagctgcggcctgcaccagctgctgagaggccccgaggtgcagctggtggcccacagcccctggctgaaggacagcctgagcagaaccaccaacatccagggcatcaacctgctgttcagcagcagaagaggccacctgttcctgcagaccgaccagcccatctacaaccccggccagagagtgagatacagagtgttcgccctggaccagaagatgagacccagcaccgacaccatcaccgtgatggtggagaacagccacggcctgagagtgagaaagaaggaggtgtacatgcccagcagcatcttccaggacgacttcgtgatccccgacatcagcgagcccggcacctggaagatcagcgccagattcagcgacggcctggagagcaacagcagcacccagttcgaggtgaagaagtacgtgctgcccaacttcgaggtgaagatcacccccggcaagccctacatcctgaccgtgcccggccacctggacgagatgcagctggacatccaggccagatacatctacggcaagcccgtgcagggcgtggcctacgtgagattcggcctgctggacgaggacggcaagaagaccttcttcagaggcctggagagccagaccaagctggtgaacggccagagccacatcagcctgagcaaggccgagttccaggacgccctggagaagctgaacatgggcatcaccgacctgcagggcctgagactgtacgtggccgccgccatcatcgagtaccccggcggcgagatggaggaggccgagctgaccagctggtacttcgtgagcagccccttcagcctggacctgagcaagaccaagagacacctggtgcccggcgcccccttcctgctgcaggccctggtgagagagatgagcggcagccccgccagcggcatccccgtgaaggtgagcgccaccgtgagcagccccggcagcgtgcccgaggtgcaggacatccagcagaacaccgacggcagcggccaggtgagcatccccatcatcatcccccagaccatcagcgagctgcagctgagcgtgagcgccggcagcccccaccccgccatcgccagactgaccgtggccgccccccccagcggcggccccggcttcctgagcatcgagagacccgacagcagaccccccagagtgggcgacaccctgaacctgaacctgagagccgtgggcagcggcgccaccttcagccactactactacatgatcctgagcagaggccagatcgtgttcatgaacagagagcccaagagaaccctgaccagcgtgagcgtgttcgtggaccaccacctggcccccagcttctacttcgtggccttctactaccacggcgaccaccccgtggccaacagcctgagagtggacgtgcaggccggcgcctgcgagggcaagctggagctgagcgtggacggcgccaagcagtacagaaacggcgagagcgtgaagctgcacctggagaccgacagcctggccctggtggccctgggcgccctggacaccgccctgtacgccgccggcagcaagagccacaagcccctgaacatgggcaaggtgttcgaggccatgaacagctacgacctgggctgcggccccggcggcggcgacagcgccctgcaggtgttccaggccgccggcctggccttcagcgacggcgaccagtggaccctgagcagaaagagactgagctgccccaaggagaagaccaccagaaagaagagaaacgtgaacttccagaaggccatcaacgagaagctgggccagtacgccagccccaccgccaagagatgctgccaggacggcgtgaccagactgcccatgatgagaagctgcgagcagagagccgccagagtgcagcagcccgactgcagagagcccttcctgagctgctgccagttcgccgagagcctgagaaagaagagcagagacaagggccaggccggcctgcagagagccctggagatcctgcaggaggaggacctgatcgacgaggacgacatccccgtgagaagcttcttccccgagaactggctgtggagagtggagaccgtggacagattccagatcctgaccctgtggctgcccgacagcctgaccacctgggagatccacggcctgagcctgagcaagaccaagggcctgtgcgtggccacccccgtgcagctgagagtgttcagagagttccacctgcacctgagactgcccatgagcgtgagaagattcgagcagctggagctgagacccgtgctgtacaactacctggacaagaacctgaccgtgagcgtgcacgtgagccccgtggagggcctgtgcctggccggcggcggcggcctggcccagcaggtgctggtgcccgccggcagcgccagacccgtggccttcagcgtggtgcccaccgccgccgccgccgtgagcctgaaggtggtggccagaggcagcttcgagttccccgtgggcgacgccgtgagcaaggtgctgcagatcgagaaggagggcgccatccacagagaggagctggtgtacgagctgaaccccctggaccacagaggcagaaccctggagatccccggcaacagcgaccccaacatgatccccgacggcgacttcaacagctacgtgagagtgaccgccagcgaccccctggacaccctgggcagcgagggcgccctgagccccggcggcgtggccagcctgctgagactgcccagaggctgcggcgagcagaccatgatctacctggcccccaccctggccgccagcagatacctggacaagaccgagcagtggagcaccctgccccccgagaccaaggaccacgccgtggacctgatccagaagggctacatgagaatccagcagttcagaaaggccgacggcagctacgccgcctggctgagcagaggcagcagcacctggctgaccgccttcgtgctgaaggtgctgagcctggcccaggagcaggtgggcggcagccccgagaagctgcaggagaccagcaactggctgctgagccagcagcaggccgacggcagcttccaggacctgagccccgtgatccacagaagcatgcagggcggcctggtgggcaacgacgagaccgtggccctgaccgccttcgtgaccatcgccctgcaccacggcctggccgtgttccaggacgagggcgccgagcccctgaagcagagagtggaggccagcatcagcaaggccagcagcttcctgggcgagaaggccagcgccggcctgctgggcgcccacgccgccgccatcaccgcctacgccctgaccctgaccaaggcccccgccgacctgagaggcgtggcccacaacaacctgatggccatggcccaggagaccggcgacaacctgtactggggcagcgtgaccggcagccagagcaacgccgtgagccccacccccgcccccagaaaccccagcgaccccatgccccaggcccccgccctgtggatcgagaccaccgcctacgccctgctgcacctgctgctgcacgagggcaaggccgagatggccgaccaggccgccgcctggctgaccagacagggcagcttccagggcggcttcagaagcacccaggacaccgtgatcgccctggacgccctgagcgcctactggatcgccagccacaccaccgaggagagaggcctgaacgtgaccctgagcagcaccggcagaaacggcttcaagagccacgccctgcagctgaacaacagacagatcagaggcctggaggaggagctgcagttcagcctgggcagcaagatcaacgtgaaggtgggcggcaacagcaagggcaccctgaaggtgctgagaacctacaacgtgctggacatgaagaacaccacctgccaggacctgcagatcgaggtgaccgtgaagggccacgtggagtacaccatggaggccaacgaggactacgaggactacgagtacgacgagctgcccgccaaggacgaccccgacgcccccctgcagcccgtgacccccctgcagctgttcgagggcagaagaaacagaagaagaagagaggcccccaagctgaccagcctgagcgacagatacgtgagccacttcgagaccgagggcccccacgtgctgctgtacttcgacagcgtgcccaccagcagagagtgcgtgggcttcgaggccgtgcaggaggtgcccgtgggcctggtgcagcccgccagcgccaccctgtacgactactacaaccccgagagaagatgcagcgtgttctacggcgcccccagcaagagcagactgctggccaccctgtgcagcgccgaggtgtgccagtgcgccgagggcaagtgccccagacagagaagagccctggagagaggcctgcaggacgaggacggctacagaatgaagttcgcctgctactaccccagagtggagtacggcttccaggtgaaggtgctgagagaggacagcagagccgccttcagactgttcgagaccaagatcacccaggtgctgcacttcaccaaggacgtgaaggccgccgccaaccagatgagaaacttcctggtgagagccagctgcagactgagactggagcccggcaaggagtacctgatcatgggcctggacggcgccacctacgacctggagggccacccccagtacctgctggacagcaacagctggatcgaggagatgcccagcgagagactgtgcagaagcaccagacagagagccgcctgcgcccagctgaacgacttcctgcaggagtacggcacccagggctgccaggtgtag

SEQ ID NO: 5066 - DNA, 1986 bp, synthetic construct
  misc_feature 1..1986: note = source = /note="Description of Artificial Sequence: Synthetic coding sequence"
  source 1..1986: mol_type = other DNA
atggacctggtgctgaagagatgcctgctgcacctggccgtgatcggcgccctgctggccgtgggcgccaccaaggtgcccagaaaccaggactggctgggcgtgagcagacagctgagaaccaaggcctggaacagacagctgtaccccgagtggaccgaggcccagagactggactgctggagaggcggccaggtgagcctgaaggtgagcaacgacggccccaccctgatcggcgccaacgccagcttcagcatcgccctgaacttccccggcagccagaaggtgctgcccgacggccaggtgatctgggtgaacaacaccatcatcaacggcagccaggtgtggggcggccagcccgtgtacccccaggagaccgacgacgcctgcatcttccccgacggcggcccctgccccagcggcagctggagccagaagagaagcttcgtgtacgtgtggaagacctggggccagtactggcaggtgctgggcggccccgtgagcggcctgagcatcggcaccggcagagccatgctgggcacccacaccatggaggtgaccgtgtaccacagaagaggcagcagaagctacgtgcccctggcccacagcagcagcgccttcaccatcaccgaccaggtgcccttcagcgtgagcgtgagccagctgagagccctggacggcggcaacaagcacttcctgagaaaccagcccctgaccttcgccctgcagctgcacgaccccagcggctacctggccgaggccgacctgagctacacctgggacttcggcgacagcagcggcaccctgatcagcagagccctggtggtgacccacacctacctggagcccggccccgtgaccgcccaggtggtgctgcaggccgccatccccctgaccagctgcggcagcagccccgtgcccggcaccaccgacggccacagacccaccgccgaggcccccaacaccaccgccggccaggtgcccaccaccgaggtggtgggcaccacccccggccaggcccccaccgccgagcccagcggcaccaccagcgtgcaggtgcccaccaccgaggtgatcagcaccgcccccgtgcagatgcccaccgccgagagcaccggcatgacccccgagaaggtgcccgtgagcgaggtgatgggcaccaccctggccgagatgagcacccccgaggccaccggcatgacccccgccgaggtgagcatcgtggtgctgagcggcaccaccgccgcccaggtgaccaccaccgagtgggtggagaccaccgccagagagctgcccatccccgagcccgagggccccgacgccagcagcatcatgagcaccgagagcatcaccggcagcctgggccccctgctggacggcaccgccaccctgagactggtgaagagacaggtgcccctggactgcgtgctgtacagatacggcagcttcagcgtgaccctggacatcgtgcagggcatcgagagcgccgagatcctgcaggccgtgcccagcggcgagggcgacgccttcgagctgaccgtgagctgccagggcggcctgcccaaggaggcctgcatggagatcagcagccccggctgccagccccccgcccagagactgtgccagcccgtgctgcccagccccgcctgccagctggtgctgcaccagatcctgaagggcggcagcggcacctactgcctgaacgtgagcctggccgacaccaacagcctggccgtggtgagcacccagctgatcatgcccggccaggaggccggcctgggccaggtgcccctgatcgtgggcatcctgctggtgctgatggccgtggtgctggccagcctgatctacagaagaagactgatgaagcaggacttcagcgtgccccagctgccccacagcagcagccactggctgagactgcccagaatcttctgcagctgccccatcggcgagaacagccccctgctgagcggccagcaggtgtag

SEQ ID NO: 5067 - DNA, 516 bp, synthetic construct; identical to SEQ ID NO: 4756
  misc_feature 1..516: note = source = /note="Description of Artificial Sequence: Synthetic coding sequence"
  source 1..516: mol_type = other DNA

SEQ ID NO: 5068 - DNA, 1986 bp, synthetic construct; identical to SEQ ID NO: 5066
  misc_feature 1..1986: note = source = /note="Description of Artificial Sequence: Synthetic coding sequence"
  source 1..1986: mol_type = other DNA

SEQ ID NO: 5069 - DNA, 1737 bp, synthetic construct; identical to SEQ ID NO: 4179
  misc_feature 1..1737: note = source = /note="Description of Artificial Sequence: Synthetic coding sequence"
  source 1..1737: mol_type = other DNA

SEQ ID NO: 5070 - DNA, 1326 bp, synthetic construct; identical to SEQ ID NO: 4016
  misc_feature 1..1326: note = source = /note="Description of Artificial Sequence: Synthetic coding sequence"
  source 1..1326: mol_type = other DNA

SEQ ID NO: 5071 - DNA, 447 bp, synthetic construct; identical to SEQ ID NO: 4156
  misc_feature 1..447: note = source = /note="Description of Artificial Sequence: Synthetic coding sequence"
  source 1..447: mol_type = other DNA

SEQ ID NO: 5072 - DNA, 732 bp, synthetic construct; identical to SEQ ID NO: 4716
  misc_feature 1..732: note = source = /note="Description of Artificial Sequence: Synthetic coding sequence"
  source 1..732: mol_type = other DNA

SEQ ID NO: 5073 - DNA, 732 bp, synthetic construct; identical to SEQ ID NO: 4716
  misc_feature 1..732: note = source = /note="Description of Artificial Sequence: Synthetic coding sequence"
  source 1..732: mol_type = other DNA

SEQ ID NO: 5074 - DNA, 1224 bp, synthetic construct
  misc_feature 1..1224: note = source = /note="Description of Artificial Sequence: Synthetic coding sequence"
  source 1..1224: mol_type = other DNA
atgagactgctggcctggctgatcttcctggccaactggggcggcgccagagccgagcccggcaagttctggcacatcgccgacctgcacctggaccccgactacaaggtgagcaaggaccccttccaggtgtgccccagcgccggcagccagcccgtgcccgacgccggcccctggggcgactacctgtgcgacagcccctgggccctgatcaacagcagcatctacgccatgaaggagatcgagcccgagcccgacttcatcctgtggaccggcgacgacaccccccacgtgcccgacgagaagctgggcgaggccgccgtgctggagatcgtggagagactgaccaagctgatcagagaggtgttccccggcgccttctactgcgagaagctgcccggccccagcggcgccggcagaatcgtggtgctgaacaccaacctgtactacaccagcaacgccctgaccgccgacatggccgaccccggccagcagttccagtggctggaggacgtgctgaccgacgccagcaaggccggcgacatggtgtacatcgtgggccacgtgccccccggcttcttcgagaagacccagaacaaggcctggttcagagagggcttcaacgagaagtacctgaaggtggtgagaaagcaccacagagtgatcgccggccagttcttcggccaccaccacaccgacagcttcagaatgctgtacgacgacgccggcgtgcccatcagcgccatgttcatcacccccggcgtgaccccctggaagaccaccctgcccggcgtggtgaacggcgccaacaaccccgccatcagagtgttcgagtacgacagagccaccctgagcctgaaggacatggtgacctacttcatgaacctgagccaggccaacgcccagggcacccccagatgggagctggagtaccagctgaccgaggcctacggcgtgcccgacgccagcgcccacagcatgcacaccgtgctggacagaatcgccggcgaccagagcaccctgcagagatactacgtgtacaacagcgtgagctacagcgccggcgtgtgcgacgaggcctgcagcatgcagcacgtgtgcgccatgagacaggtggacatcgacgcctacaccacctgcctgtacgccagcggcaccacccccgtgccccagctgcccctgctgctgatggccctgctgggcctgtgcaccctggtgctgtag

SEQ ID NO: 5075 - DNA, 756 bp, synthetic construct; identical to SEQ ID NO: 5054
  misc_feature 1..756: note = source = /note="Description of Artificial Sequence: Synthetic coding sequence"
  source 1..756: mol_type = other DNA

SEQ ID NO: 5076 - DNA, 756 bp, synthetic construct; identical to SEQ ID NO: 5054
  misc_feature 1..756: note = source = /note="Description of Artificial Sequence: Synthetic coding sequence"
  source 1..756: mol_type = other DNA

SEQ ID NO: 5077 - DNA, 456 bp, synthetic construct
  misc_feature 1..456: note = source = /note="Description of Artificial Sequence: Synthetic coding sequence"
  source 1..456: mol_type = other DNA
atggacctggtgctgaagagatgcctgctgcacctggccgtgatcggcgccctgctggccgtgggcgccaccaaggtgcccagaaaccaggactggctgggcgtgagcagacagctgagaaccaaggcctggaacagacagctgtaccccgagtggaccgaggcccagagactggactgctggagaggcggccaggtgagcctgaaggtgagcaacgacggccccaccctgatcggcgccaacgccagcttcagcatcgccctgaacttccccggcagccagaaggtgctgcccgacggccaggtgatctgggtgaacaacaccatcatcaacggcagccaggtgtggggcggccagcccgtgtacccccaggagaccgacgacgcctgcatcttccccgacggcggcccctgccccagcggcagctggagccagaagagaagcttcgtgtactag

SEQ ID NO: 5078 - DNA, 216 bp, synthetic construct; identical to SEQ ID NO: 4200
  misc_feature 1..216: note = source = /note="Description of Artificial Sequence: Synthetic coding sequence"
  source 1..216: mol_type = other DNA

SEQ ID NO: 5079 - DNA, 447 bp, synthetic construct; identical to SEQ ID NO: 4156
  misc_feature 1..447: note = source = /note="Description of Artificial Sequence: Synthetic coding sequence"
  source 1..447: mol_type = other DNA

SEQ ID NO: 5080 - DNA, 447 bp, synthetic construct; identical to SEQ ID NO: 4156
  misc_feature 1..447: note = source = /note="Description of Artificial Sequence: Synthetic coding sequence"
  source 1..447: mol_type = other DNA

SEQ ID NO: 5081 - DNA, 1326 bp, synthetic construct; identical to SEQ ID NO: 4016
  misc_feature 1..1326: note = source = /note="Description of Artificial Sequence: Synthetic coding sequence"
  source 1..1326: mol_type = other DNA

SEQ ID NO: 5082 - DNA, 2067 bp, synthetic construct; identical to SEQ ID NO: 4725
  misc_feature 1..2067: note = source = /note="Description of Artificial Sequence: Synthetic coding sequence"
  source 1..2067: mol_type = other DNA

SEQ ID NO: 5083 - DNA, 1326 bp, synthetic construct
  misc_feature 1..1326: note = source = /note="Description of Artificial Sequence: Synthetic coding sequence"
  source 1..1326: mol_type = other DNA
atggagttcgagttcgacagactgagagccttccaggccatgcaggtgcactgcaacaacatgcacaccctgggcgccagactgcccggcggcgtggagtgcagattcagaagaggccccgccatggcctgggagggcgagcccatgagacacaacctgggcggcaacctgggcgaccccagagccagagccgtgagcgtgcccctgggcggcagagtggccagattcctgcagtgcagattcctgttcgccggcccctggctgctgttcagcgagatcagcttcatcagcgacgtggtgaacaacagcagccccgccctgggcggcaccttcccccccgccccctggtggccccccggccccccccccaccaacttcagcagcctggagctggagcccagaggccagcagcccgtggccaaggccgagggcagccccaccgccatcctgatcggctgcctggtggccatcatcctgctgctgctgctgatcatcgccctgatgctgtggagactgcactggagaagactgctgagcaaggtgctggagagccaccccagaaccagaagccccggcctggtgggcatcagacccaccctgctgcccgtgagccccatggccctgagatgctgcagccccatccagcccaccgccagcttctggcccctgacccccgtgcccctggaggccagagcccccccccacccccccggccccaacccccccacccccagaggcgtgaccggcggcaacacctacgccgtgcccgccctgccccccggcgccgtgggcgacggcccccccagagtggacttccccagaagcagactgagattcaaggagaagctgggcgagggccagttcggcgaggtgcacctgtgcgaggtggacagcccccaggacctggtgagcctggacttccccctgaacgtgagaaagggccaccccctgctggtggccgtgaagatcctgagacccgacgccaccaagaacgccagaaacgacttcctgaaggaggtgaagatcatgagcagactgaaggaccccaacatcatcagactgctgggcgtgtgcgtgcaggacgaccccctgtgcatgatcaccgactacatggagaacggcgacctgaaccagttcctgagcgcccaccagctggaggacaaggccgccgagggcgcccccggcgacggccaggccgcccagggccccaccatcagctaccccatgctgctgcacgtggccgcccagatcgccagcggcatgagatacctggccaccctgaacttcgtgcacttctggggcgagagacacagattcctgcactag

SEQ ID NO: 5084 - DNA, 2559 bp, synthetic construct; identical to SEQ ID NO: 4152
  misc_feature 1..2559: note = source = /note="Description of Artificial Sequence: Synthetic coding sequence"
  source 1..2559: mol_type = other DNA

SEQ ID NO: 5085 - DNA, 732 bp, synthetic construct; identical to SEQ ID NO: 4716
  misc_feature 1..732: note = source = /note="Description of Artificial Sequence: Synthetic coding sequence"
  source 1..732: mol_type = other DNA

SEQ ID NO: 5086 - DNA, 2760 bp, synthetic construct; identical to SEQ ID NO: 4172
  misc_feature 1..2760: note = source = /note="Description of Artificial Sequence: Synthetic coding sequence"
  source 1..2760: mol_type = other DNA

SEQ ID NO: 5087 - DNA, 2700 bp, synthetic construct; identical to SEQ ID NO: 4183
  misc_feature 1..2700: note = source = /note="Description of Artificial Sequence: Synthetic coding sequence"
  source 1..2700: mol_type = other DNA

SEQ ID NO: 5088 - DNA, 447 bp, synthetic construct; identical to SEQ ID NO: 4156
  misc_feature 1..447: note = source = /note="Description of Artificial Sequence: Synthetic coding sequence"
  source 1..447: mol_type = other DNA

SEQ ID NO: 5089 - DNA, 516 bp, synthetic construct; identical to SEQ ID NO: 4756
  misc_feature 1..516: note = source = /note="Description of Artificial Sequence: Synthetic coding sequence"
  source 1..516: mol_type = other DNA

SEQ ID NO: 5090 - DNA, 666 bp, synthetic construct
  misc_feature 1..666: note = source = /note="Description of Artificial Sequence: Synthetic coding sequence"
  source 1..666: mol_type = other DNA
atgaccacccagctgagagtggtgcacctgctgcccctgctgctggcctgcttcgtgcagaccagccccaagcaggagaagatgaagatggactgccacaaggacgagaagggcaccatctacgactacgaggccatcgccctgaacaagaacgagtacgtgagcttcaagcagtacgtgggcaagcacatcctgttcgtgaacgtggccacctactgcggcctgaccgcccagtaccccgagctgaacgccctgcaggaggagctgaagccctacggcctggtggtgctgggcttcccctgcaaccagttcggcaagcaggagcccggcgacaacaaggagatcctgcccggcctgaagtacgtgagacccggcggcggcttcgtgcccagcttccagctgttcgagaagggcgacgtgaacggcgagaaggagcagaaggtgttcagcttcctgaagcacagctgcccccaccccagcgagatcctgggcaccttcaagagcatcagctgggaccccgtgaaggtgcacgacatcagatggaacttcgagaagttcctggtgggccccgacggcatccccgtgatgagatggagccacagagccaccgtgagcagcgtgaagaccgacatcctggcctacctgaagcagttcaagaccaagtag

SEQ ID NO: 5091 - DNA, 447 bp, synthetic construct; identical to SEQ ID NO: 4156
  misc_feature 1..447: note = source = /note="Description of Artificial Sequence: Synthetic coding sequence"
  source 1..447: mol_type = other DNA

SEQ ID NO: 5092 - DNA, 1737 bp, synthetic construct; identical to SEQ ID NO: 4179
  misc_feature 1..1737: note = source = /note="Description of Artificial Sequence: Synthetic coding sequence"
  source 1..1737: mol_type = other DNA

SEQ ID NO: 5093 - DNA, 1737 bp, synthetic construct; identical to SEQ ID NO: 4179
  misc_feature 1..1737: note = source = /note="Description of Artificial Sequence: Synthetic coding sequence"
  source 1..1737: mol_type = other DNA

SEQ ID NO: 5094 - DNA, 756 bp, synthetic construct; identical to SEQ ID NO: 5054
  misc_feature 1..756: note = source = /note="Description of Artificial Sequence: Synthetic coding sequence"
  source 1..756: mol_type = other DNA

SEQ ID NO: 5095 - DNA, 1764 bp, synthetic construct
  misc_feature 1..1764: note = source = /note="Description of Artificial Sequence: Synthetic coding sequence"
  source 1..1764: mol_type = other DNA
atgagacccagaggcctgccccccctgctggtggtgctgctgggctgctgggccagcgtgagcgcccagaccgacgccacccccgccgtgaccaccgagggcctgaacagcaccgaggccgccctggccaccttcggcaccttccccagcaccagaccccccggcacccccagagcccccggccccagcagcggccccagacccacccccgtgaccgacgtggccgtgctgtgcgtgtgcgacctgagccccgcccagtgcgacatcaactgctgctgcgaccccgactgcagcagcgtggacttcagcgtgttcagcgcctgcagcgtgcccgtggtgaccggcgacagccagttctgcagccagaaggccgtgatctacagcctgaacttcaccgccaaccccccccagagagtgttcgagctggtggaccagatcaaccccagcatcttctgcatccacatcaccaactacaagcccgccctgagcttcatcaaccccgaggtgcccgacgagaacaacttcgacaccctgatgaagaccagcgacggcttcaccctgaacgccgagagctacgtgagcttcaccaccaagctggacatccccaccgccgccaagtacgagtacggcgtgcccctgcagaccagcgacagcttcctgagattccccagcagcctgaccagcagcctgtgcaccgacaacaaccccgccgccttcctggtgaaccaggccgtgaagtgcaccagaaagatcaacctggagcagtgcgaggagatcgaggccctgagcatggccttctacagcagccccgagatcctgagagtgcccgacagcagaaagaaggtgcccatcaccgtgcagagcatcgtgatccagagcctgaacaagaccctgaccagaagagaggacaccgacgtgctgcagcccaccctggtgaacgccggccacttcagcctgtgcgtgaacgtggtgctggaggtgaagtacagcctgacctacaccgacgccggcgaggtgaccaaggccgacctgagcttcgtgctgggcaccgtgagcagcgtggtggtgcccctgcagcagaagttcgagatccacttcctgcaggagaacacccagcccgtgcccctgagcggcaaccccggctacgtggtgggcctgcccctggccgccggcttccagccccacaagggcagcggcatcatccagaccaccaacagatacggccagctgaccatcctgcacagcaccaccgagcaggactgcctggccctggagggcgtgagaacccccgtgctgttcggctacaccatgcagagcggctgcaagctgagactgaccggcgccctgccctgccagctggtggcccagaaggtgaagagcctgctgtggggccagggcttccccgactacgtggcccccttcggcaacagccaggcccaggacatgctggactgggtgcccatccacttcatcacccagagcttcaacagaaaggacagctgccagctgcccggcgccctggtgatcgaggtgaagtggaccaagtacggcagcctgctgaacccccaggccaagatcgtgaacgtgaccgccaacctgatcagcagcagcttccccgaggccaacagcggcaacgagagaaccatcctgatcagcaccgccgtgaccttcgtggacgtgagcgcccccgccgaggccggcttcagagccccccccgccatcaacgccagactgcccttcaacttcttcttccccttcgtgtag

SEQ ID NO: 5096 - DNA, 2067 bp, synthetic construct; identical to SEQ ID NO: 4725
  misc_feature 1..2067: note = source = /note="Description of Artificial Sequence: Synthetic coding sequence"
  source 1..2067: mol_type = other DNA

SEQ ID NO: 5097 - DNA, 303 bp, synthetic construct
  misc_feature 1..303: note = source = /note="Description of Artificial Sequence: Synthetic coding sequence"
  source 1..303: mol_type = other DNA
atgaccacccagctgagagtggtgcacctgctgcccctgctgctggcctgcttcgtgcagaccagccccaagcaggagaagatgaagatggactgccacaaggacgagaagggcaccatctacgactacgaggccatcgccctgaacaagaacgagtacgtgagcttcaagcagtacgtgggcaagcacatcctgttcgtgaacgtggccacctactgcggcctgaccgcccagtaccccggcatgagcgtgcagggcgaggacctgtacctggtgagcagcttcctgagaaagggcatgtag

SEQ ID NO: 5098 - DNA, 705 bp, synthetic construct
  misc_feature 1..705: note = source = /note="Description of Artificial Sequence: Synthetic coding sequence"
  source 1..705: mol_type = other DNA
atgaagaccctggccggcctggtgctgggcctggtgatcttcgacgccgccgtgaccgcccccaccctggagagcatcaactacgacagcgagacctacgacgccaccctggaggacctggacaacctgtacaactacgagaacatccccgtggacaaggtggagatcgagatcgccaccgtgatgcccagcggcaacagagagctgctgaccccccccccccagcccgagaaggcccaggaggaggaggaggaggaggagagcacccccagactgatcgacggcagcagcccccaggagcccgagttcaccggcgtgctgggcccccacaccaacgaggacttccccacctgcctgctgtgcacctgcatcagcaccaccgtgtactgcgacgaccacgagctggacgccatcccccccctgcccaagaacaccgcctacttctacagcagattcaacagaatcaagaagatcaacaagaacgacttcgccagcctgagcgacctgaagagaatcgacctgaccagcaacctgatcagcgagatcgacgaggacgccttcagaaagctgccccagctgagagagctggtgctgagagacaacaagatcagacagctgcccgagctgcccaccaccctgaccttcatcgacatcagcaacaacagactgggcagaaagggcatcaagcaggaggccttcaagtag

SEQ ID NO: 5099 - DNA, 2559 bp, synthetic construct; identical to SEQ ID NO: 4152
  misc_feature 1..2559: note = source = /note="Description of Artificial Sequence: Synthetic coding sequence"
  source 1..2559: mol_type = other DNA

SEQ ID NO: 5100 - DNA, 2760 bp, synthetic construct; identical to SEQ ID NO: 4172
  misc_feature 1..2760: note = source = /note="Description of Artificial Sequence: Synthetic coding sequence"
  source 1..2760: mol_type = other DNA

SEQ ID NO: 5101 - DNA, 1737 bp, synthetic construct; identical to SEQ ID NO: 4179
  misc_feature 1..1737: note = source = /note="Description of Artificial Sequence: Synthetic coding sequence"
  source 1..1737: mol_type = other DNA

SEQ ID NO: 5102 - DNA, 516 bp, synthetic construct; identical to SEQ ID NO: 4756
  misc_feature 1..516: note = source = /note="Description of Artificial Sequence: Synthetic coding sequence"
  source 1..516: mol_type = other DNA

SEQ ID NO: 5103 - DNA, 2067 bp, synthetic construct; identical to SEQ ID NO: 4725
  misc_feature 1..2067: note = source = /note="Description of Artificial Sequence: Synthetic coding sequence"
  source 1..2067: mol_type = other DNA

SEQ ID NO: 5104 - DNA, 5097 bp, synthetic construct; identical to SEQ ID NO: 5065
  misc_feature 1..5097: note = source = /note="Description of Artificial Sequence: Synthetic coding sequence"
  source 1..5097: mol_type = other DNA

SEQ ID NO: 5105 - DNA, 726 bp, synthetic construct; identical to SEQ ID NO: 5055
  misc_feature 1..726: note = source = /note="Description of Artificial Sequence: Synthetic coding sequence"
  source 1..726: mol_type = other DNA

SEQ ID NO: 5106 - DNA, 732 bp, synthetic construct; identical to SEQ ID NO: 4716
  misc_feature 1..732: note = source = /note="Description of Artificial Sequence: Synthetic coding sequence"
  source 1..732: mol_type = other DNA

SEQ ID NO: 5107 - DNA, 1986 bp, synthetic construct; identical to SEQ ID NO: 5066
  misc_feature 1..1986: note = source = /note="Description of Artificial Sequence: Synthetic coding sequence"
  source 1..1986: mol_type = other DNA

SEQ ID NO: 5108 - DNA, 2760 bp, synthetic construct; identical to SEQ ID NO: 4172
  misc_feature 1..2760: note = source = /note="Description of Artificial Sequence: Synthetic coding sequence"
  source 1..2760: mol_type = other DNA

SEQ ID NO: 5109 - DNA, 216 bp, synthetic construct; identical to SEQ ID NO: 4200
  misc_feature 1..216: note = source = /note="Description of Artificial Sequence: Synthetic coding sequence"
  source 1..216: mol_type = other DNA

SEQ ID NO: 5110 - DNA, 2685 bp, synthetic construct; identical to SEQ ID NO: 4872
  misc_feature 1..2685: note = source = /note="Description of Artificial Sequence: Synthetic coding sequence"
  source 1..2685: mol_type = other DNA

SEQ ID NO: 5111 - DNA, 273 bp, synthetic construct
  misc_feature 1..273: note = source = /note="Description of Artificial Sequence: Synthetic coding sequence"
  source 1..273: mol_type = other DNA
atgcagctgttcctgctgctgtgcctggtgctgctgagcccccagggcgccagcctgcacagacaccaccccagagagatgaagaagagagtggaggacctgcacgtgggcgccaccgtggcccccagcagcagaagagacttcaccttcgacctgtacagagccctggccagcgccgcccccagccagagcatcttcttcagccccgtgagcatcagcatgagcctggccatgctgagcctgggcgccggcagcagcaccaagatgcagtag

SEQ ID NO: 5112 - DNA, 618 bp, synthetic construct; identical to SEQ ID NO: 3886
  misc_feature 1..618: note = source = /note="Description of Artificial Sequence: Synthetic coding sequence"
  source 1..618: mol_type = other DNA

SEQ ID NO: 5113 - DNA, 30 bp, synthetic construct
  misc_feature 1..30: note = source = /note="Description of Artificial Sequence: Synthetic coding sequence"
  source 1..30: mol_type = other DNA
atgagcttcagcgccaccatcctgttctag

SEQ ID NO: 5114 - DNA, 600 bp, synthetic construct
  misc_feature 1..600: note = source = /note="Description of Artificial Sequence: Synthetic coding sequence"
  source 1..600: mol_type = other DNA
atgagcttcagcgccaccatcctgttcagcccccccagcggcagcgaggccagatgctgctgctgcgcctgcaagagcgagaccaacggcggcaacaccggcagccagggcggcaaccccccccccagcacccccatcaccgtgaccggccacggcctggccgtgcagagcagcgagcagctgctgcacgtgatctaccagagagtggacaaggccgtgggcctggccgaggccgccctgggcctggccagagccaacaacgagctgctgaagagactgcaggaggaggtgggcgacctgagacagggcaaggtgagcatccccgacgaggacggcgagagcagagcccacagcagcccccccgaggagcccggccccctgaaggagagccccggcgaggccttcaaggccctgagcgccgtggaggaggagtgcgacagcgtgggcagcggcgtgcaggtggtgatcgaggagctgagacagctgggcgccgccagcgtgggccccggccccctgggcttccccgccacccagagagacatgagactgcccggctgcaccctggccgccagcgaggccgcccccctgctgaacccctag

SEQ ID NO: 5115 - DNA, 633 bp, synthetic construct; identical to SEQ ID NO: 4443
  misc_feature 1..633: note = source = /note="Description of Artificial Sequence: Synthetic coding sequence"
  source 1..633: mol_type = other DNA

SEQ ID NO: 5116 - DNA, 1221 bp, synthetic construct; identical to SEQ ID NO: 3821
  misc_feature 1..1221: note = source = /note="Description of Artificial Sequence: Synthetic coding sequence"
  source 1..1221: mol_type = other DNA

SEQ ID NO: 5117 - DNA, 600 bp, synthetic construct; identical to SEQ ID NO: 3864
  misc_feature 1..600: note = source = /note="Description of Artificial Sequence: Synthetic coding sequence"
  source 1..600: mol_type = other DNA

SEQ ID NO: 5118 - DNA, 411 bp, synthetic construct
  misc_feature 1..411: note = source = /note="Description of Artificial Sequence: Synthetic coding sequence"
  source 1..411: mol_type = other DNA
atgagcttcagcgccaccatcctgttcagcccccccagcggcagcgaggccagatgctgctgctgcgcctgcaagagcgagaccaacggcggcaacaccggcagccagggcggcaaccccccccccagcacccccatcaccgtgaccggccacggcctggccgtgcagagcagcgagcagctgctgcacgtgatctaccagagagtggacaaggccgtgggcctggccgaggccgccctgggcctggccagagccaacaacgagctgctgaagagactgcaggaggaggtgggcgacctgagacagggcaaggtgagcatccccgacgaggacggcgagagcagagcccacagcagcccccccgaggagcccggccccctgaaggagagccccggcgaggccttcaagtag

SEQ ID NO: 5119 - DNA, 252 bp, synthetic construct
  misc_feature 1..252: note = source = /note="Description of Artificial Sequence: Synthetic coding sequence"
  source 1..252: mol_type = other DNA
atgagcttcagcgccaccatcctgttcagcccccccagcggcagcgaggccagatgctgctgctgcgcctgcaagagcgagaccaacggcggcaacaccggcagccagggcggcaaccccccccccagcacccccatcaccgtgaccggccacggcctggccgtgcagagcagcgagcagctgctgcacgtgatctaccagagagtggacaaggccgtgggcctggccgaggccgccctgggcctggcctag

SEQ ID NO: 5120 - DNA, 30 bp, synthetic construct; identical to SEQ ID NO: 5113
  misc_feature 1..30: note = source = /note="Description of Artificial Sequence: Synthetic coding sequence"
  source 1..30: mol_type = other DNA

SEQ ID NO: 5121 - DNA, 519 bp, synthetic construct
  misc_feature 1..519: note = source = /note="Description of Artificial Sequence: Synthetic coding sequence"
  source 1..519: mol_type = other DNA
atgcagctgttcctgctgctgtgcctggtgctgctgagcccccagggcgccagcctgcacagacaccaccccagagagatgaagaagagagtggaggacctgcacgtgggcgccaccgtggcccccagcagcagaagagacttcaccttcgacctgtacagagccctggccagcgccgcccccagccagagcatcttcttcagccccgtgagcatcagcatgagcctggccatgctgagcctgggcgccggcagcagcaccaagatgcagatcctggagggcctgggcctgaacctgcagaagagcagcgagaaggagctgcacagaggcttccagcagctgctgcaggagctgaaccagcccagagacggcttccagctgagcctgggcaacgccctgttcaccgacctggtggtggacctgcaggacaccttcgtgagcgccatgaagaccctgtacctggccgacaccttccccaccaacttcagagacagcgccggcgccatgaagcagatctag

SEQ ID NO: 5122 - DNA, 615 bp, synthetic construct
  misc_feature 1..615: note = source = /note="Description of Artificial Sequence: Synthetic coding sequence"
  source 1..615: mol_type = other DNA
atgcccggcggcaagaaggtggccggcggcggcagcagcggcgccacccccaccagcgccgccgccaccgcccccagcggcgtgagaagactggagaccagcgagggcaccagcgcccagagagacgaggagcccgaggaggagggcgaggaggacctgagagacggcggcgtgcccttcttcgtgaacagaggcggcctgcccgtggacgaggccacctgggagagaatgtggaagcacgtggccaagatccaccccgacggcgagaaggtggcccagagaatcagaggcgccaccgacctgcccaagatccccatccccagcgtgcccaccttccagcccagcacccccgtgcccgagagactggaggccgtgcagagatacatcagagagctgcagtacaaccacaccggcacccagttcttcgagatcaagaagagcagacccctgaccggcctgatggacctggccaaggagatgaccaaggaggccctgcccatcaagtgcctggaggccgtgatcctgggcatgtaccccagcagccccgagggcgagggcagcggcctgctgtgggccagcgccagctgcagcgagagcgagggcggcgtgggctag

SEQ ID NO: 5123 - DNA, 1221 bp, synthetic construct; identical to SEQ ID NO: 3821
  misc_feature 1..1221: note = source = /note="Description of Artificial Sequence: Synthetic coding sequence"
  source 1..1221: mol_type = other DNA

SEQ ID NO: 5124 - DNA, 3837 bp, synthetic construct; identical to SEQ ID NO: 4578
  misc_feature 1..3837: note = source = /note="Description of Artificial Sequence: Synthetic coding sequence"
  source 1..3837: mol_type = other DNA

SEQ ID NO: 5125 - DNA, 261 bp, synthetic construct
  misc_feature 1..261: note = source = /note="Description of Artificial Sequence: Synthetic coding sequence"
  source 1..261: mol_type = other DNA
atgcagctgttcctgctgctgtgcctggtgctgctgagcccccagggcgccagcctgcacagacaccaccccagagagatgaagaagagagtggaggacctgcacgtgggcgccaccgtggcccccagcagcagaagagacttcaccttcgacctgtacagagccctggccagcgccgcccccagccagagcatcttcttcagccccgtgagcatcagcatgagcctggccatgctgagcctgggcgccggcagcagctag

SEQ ID NO: 5126 - DNA, 906 bp, synthetic construct
  misc_feature 1..906: note = source = /note="Description of Artificial Sequence: Synthetic coding sequence"
  source 1..906: mol_type = other DNA
atgcagctgttcctgctgctgtgcctggtgctgctgagcccccagggcgccagcctgcacagacaccaccccagagagatgaagaagagagtggaggacctgcacgtgggcgccaccgtggcccccagcagcagaagagacttcaccttcgacctgtacagagccctggccagcgccgcccccagccagagcatcttcttcagccccgtgagcatcagcatgagcctggccatgctgagcctgggcgccggcagcagcaccaagatgcagatcctggagggcctgggcctgaacctgcagaagagcagcgagaaggagctgcacagaggcttccagcagctgctgcaggagctgaaccagcccagagacggcttccagctgagcctgggcaacgccctgttcaccgacctggtggtggacctgcaggacaccttcgtgagcgccatgaagaccctgtacctggccgacaccttccccaccaacttcagagacagcgccggcgccatgaagcagatcaacgactacgtggccaagcagaccaagggcaagatcgtggacctgctgaagaacctggacagcaacgccgtggtgatcatggtgaactacatcttcttcaaggccaagtgggagaccagcttcaaccacaagggcacccaggagcaggacttctacgtgaccagcgagaccgtggtgagagtgcccatgatgagcagagaggaccagtaccactacctgctggacagaaacctgagctgcagagtggtgggcgtgccctaccagggcaacgccaccgccctgttcatcctgcccagcgagggcaagatgcagcaggtggagaacggcctgagcgagaagaccctgagaaagtggctgaagatgttcaagaagagatacttccagacctag

SEQ ID NO: 5127 - DNA, 411 bp, synthetic construct
  misc_feature 1..411: note = source = /note="Description of Artificial Sequence: Synthetic coding sequence"
  source 1..411: mol_type = other DNA
atggagaccttccccctgctgctgctgagcctgggcctggtgctggccgaggccagcgagagcaccatgaagatcatcaaggaggagttcaccgacgaggagatgcagtacgacatggccaagagcggccaggagaagcagaccatcgagatcctgatgaaccccatcctgctggtgaagaacaccagcctgagcatgagcaaggacgacatgagcagcaccctgctgaccttcagaagcctgcactacaacgaccccaagggcaacagcagcggcaacgacaaggagtgctgcaacgacatgaccgtgtggagaaaggtgagcgaggccaacggcagctgcaagtggagcaacaacttcatcagaagcagcaccgaggtgatgagaagagtgcacagagcccccagctag

SEQ ID NO: 5128 - DNA, 1221 bp, synthetic construct; identical to SEQ ID NO: 3821
  misc_feature 1..1221: note = source = /note="Description of Artificial Sequence: Synthetic coding sequence"
  source 1..1221: mol_type = other DNA

SEQ ID NO: 5129 - DNA, 618 bp, synthetic construct; identical to SEQ ID NO: 3886
  misc_feature 1..618: note = source = /note="Description of Artificial Sequence: Synthetic coding sequence"
  source 1..618: mol_type = other DNA

SEQ ID NO: 5130 - DNA, 240 bp, synthetic construct
  misc_feature 1..240: note = source = /note="Description of Artificial Sequence: Synthetic coding sequence"
  source 1..240: mol_type = other DNA
atgagcttcagcgccaccatcctgttcagcccccccagcggcagcgaggccagatgctgctgctgcgcctgcaagagcgagaccaacggcggcaacaccggcagccagggcggcaaccccccccccagcacccccatcaccgtgaccggccacggcctggccgtgcagagcagcgagcagctgctgcacgtgatctaccagagagtggacaaggccgtgggcctggccgaggccgcctag

SEQ ID NO: 5131 - DNA, 618 bp, synthetic construct; identical to SEQ ID NO: 3886
  misc_feature 1..618: note = source = /note="Description of Artificial Sequence: Synthetic coding sequence"
  source 1..618: mol_type = other DNA

SEQ ID NO: 5132 - DNA, 3789 bp, synthetic construct
  misc_feature 1..3789: note = source = /note="Description of Artificial Sequence: Synthetic coding sequence"
  source 1..3789: mol_type = other DNA
atgagactgctgctgctggtgcccctgctgctggcccccgcccccggcagcagcgcccccaaggtgagaagacagagcgacacctggggcccctggagccagtggagcccctgcagcagaacctgcggcggcggcgtgagcttcagagagagaccctgctacagccagagaagagacggcggcagcagctgcgtgggccccgccagaagccacagaagctgcagaaccgagagctgccccgacggcgccagagacttcagagccgagcagtgcgccgagttcgacggcgccgagttccagggcagaagatacagatggctgccctactacagcgcccccaacaagtgcgagctgaactgcatccccaagggcgagaacttctactacaagcacagagaggccgtggtggacggcaccccctgcgagcccggcaagagagacgtgtgcgtggacggcagctgcagagtggtgggctgcgaccacgagctggacagcagcaagcaggaggacaagtgcctgagatgcggcggcgacggcaccacctgctaccccgtggccggcaccttcgacgccaacgacctgagcagaggctacaaccagatcctgatcgtgcccatgggcgccaccagcatcctgatcgacgaggccgccgccagcagaaacttcctggccgtgaagaacgtgagaggcgagtactacctgaacggccactggaccatcgaggccgccagagccctgcccgccgccagcaccatcctgcactacgagagaggcgccgagggcgacctggcccccgagagactgcacgccagaggccccaccagcgagcccctggtgatcgagctgatcagccaggagcccaaccccggcgtgcactacgagtaccacctgcccctgagaagacccagccccggcttcagctggagccacggcagctggagcgactgcagcgccgagtgcggcggcggccaccagagcagactggtgttctgcaccatcgaccacgaggcctaccccgaccacatgtgccagagacagcccagacccgccgacagaagaagctgcaacctgcacccctgccccgagaccaagagatggaaggccggcccctgggccccctgcagcgccagctgcggcggcggcagccagagcagaagcgtgtactgcatcagcagcgacggcgccggcatccaggaggccgtggaggaggccgagtgcgccggcctgcccggcaagccccccgccatccaggcctgcaacctgcagagatgcgccgcctggagccccgagccctggggcgagtgcagcgtgagctgcggcgtgggcgtgagaaagagaagcgtgacctgcagaggcgagagaggcagcctgctgcacaccgccgcctgcagcctggaggacagaccccccctgaccgagccctgcgtgcacgaggactgccccctgctgagcgaccaggcctggcacgtgggcacctggggcctgtgcagcaagagctgcagcagcggcaccagaagaagacaggtgatctgcgccatcggcccccccagccactgcggcagcctgcagcacagcaagcccgtggacgtggagccctgcaacacccagccctgccacctgccccaggaggtgcccagcatgcaggacgtgcacacccccgccagcaacccctggatgcccctgggcccccaggagagccccgccagcgacagcagaggccagtggtgggccgcccaggagcaccccagcgccagaggcgaccacagaggcgagagaggcgaccccagaggcgaccagggcacccacctgagcgccctgggccccgcccccagcctgcagcagcccccctaccagcagcccctgagaagcggcagcggcccccacgactgcagacacagcccccacggctgctgccccgacggccacaccgccagcctgggcccccagtggcagggctgccccggcgccccctgccagcagagcagatacggctgctgccccgacagagtgagcgtggccgagggcccccaccacgccggctgcaccaagagctacggcggcgacagcaccggcggcatgcccagaagcagagccgtggccagcaccgtgcacaacacccaccagccccaggcccagcagaacgagcccagcgagtgcagaggcagccagttcggctgctgctacgacaacgtggccaccgccgccggccccctgggcgagggctgcgtgggccagcccagccacgactgggccgccagatggtacttcgtggccagcgtgggccagtgcaacagattctggtacggcggctgccacggcaacgccaacaacttcgccagcgagcaggagtgcatgagcagctgccagggcagcctgcacggccccagaagaccccagcccggcgccagcggcagaagcacccacaccgacggcggcggcagcagccccgccggcgagcaggagcccagccagcacagaaccggcgccgccgtgcagagaaagccctggcccagcggcggcctgtggagacaggaccagcagcccggccccggcgaggccccccacacccaggccttcggcgagtggccctggggccaggagctgggcagcagagcccccggcctgggcggcgacgccggcagccccgccccccccttccacagcagcagctacagaatcagcctggccggcgtggagcccagcctggtgcaggccgccctgggccagctggtgagactgagctgcagcgacgacaccgcccccgagagccaggccgcctggcagaaggacggccagcccatcagcagcgacagacacagactgcagttcgacggcagcctgatcatccaccccctgcaggccgaggacgccggcacctacagctgcggcagcaccagacccggcagagacagccagaagatccagctgagaatcatcggcggcgacatggccgtgctgagcgaggccgagctgagcagattcccccagcccagagaccccgcccaggacttcggccaggccggcgccgccggccccctgggcgccatccccagcagccacccccagcccgccaacagactgagactggaccagaaccagcccagagtggtggacgccagccccggccagagaatcagaatgacctgcagagccgagggcttccccccccccgccatcgagtggcagagagacggccagcccgtgagcagccccagacaccagctgcagcccgacggcagcctggtgatcagcagagtggccgtggaggacggcggcttctacacctgcgtggccttcaacggccaggacagagaccagagatgggtgcagctgagagtgctgggcgagctgaccatcagcggcctgccccccaccgtgaccgtgcccgagggcgacaccgccagactgctgtgcgtggtggccggcgagagcgtgaacatcagatggagcagaaacggcctgcccgtgcaggccgacggccacagagtgcaccagagccccgacggcaccctgctgatctacaacctgagagccagagacgagggcagctacacctgcagcgcctaccagggcagccaggccgtgagcagaagcaccgaggtgaaggtggtgagccccgcccccaccgcccagcccagagaccccggcagagactgcgtggaccagcccgagctggccaactgcgacctgatcctgcaggcccagctgtgcggcaacgagtactacagcagcttctgctgcgccagctgcagcagattccagccccacgcccagcccatctggcagtag

SEQ ID NO: 5133 - DNA, 321 bp, synthetic construct
  misc_feature 1..321: note = source = /note="Description of Artificial Sequence: Synthetic coding sequence"
  source 1..321: mol_type = other DNA
atgagcttcagcgccaccatcctgttcagcccccccagcggcagcgaggccagatgctgctgctgcgcctgcaagagcgagaccaacggcggcaacaccggcagccagggcggcaaccccccccccagcacccccatcaccgtgaccggccacggcctggccgtgcagagcagcgagcagctgctgcacgtgatctaccagagagtggacaaggccgtgggcctggccgaggccgccctgggcctggccagagccaacaacgagctgctgaagagactgcaggaggaggtgggcgacctgagacagggcaaggtgagctag

SEQ ID NO: 5134 - DNA, 444 bp, synthetic construct; identical to SEQ ID NO: 4387
  misc_feature 1..444: note = source = /note="Description of Artificial Sequence: Synthetic coding sequence"
  source 1..444: mol_type = other DNA

SEQ ID NO: 5135 - DNA, 435 bp, synthetic construct
  misc_feature 1..435: note = source = /note="Description of Artificial Sequence: Synthetic coding sequence"
  source 1..435: mol_type = other DNA
atgcagctgttcctgctgctgtgcctggtgctgctgagcccccagggcgccagcctgcacagacaccaccccagagagatgaagaagagagtggaggacctgcacgtgggcgccaccgtggcccccagcagcagaagagacttcaccttcgacctgtacagagccctggccagcgccgcccccagccagagcatcttcttcagccccgtgagcatcagcatgagcctggccatgctgagcctgggcgccggcagcagcaccaagatgcagatcctggagggcctgggcctgaacctgcagaagagcagcgagaaggagctgcacagaggcttccagcagctgctgcaggagctgaaccagcccagagacggcttccagctgagcctgggcaacgccctgttcaccgacctggtggtggacctgcaggacacctag

SEQ ID NO: 5136 - DNA, 540 bp, synthetic construct; identical to SEQ ID NO: 4858
  misc_feature 1..540: note = source = /note="Description of Artificial Sequence: Synthetic coding sequence"
  source 1..540: mol_type = other DNA

SEQ ID NO: 5137 - DNA, 444 bp, synthetic construct; identical to SEQ ID NO: 4387
  misc_feature 1..444: note = source = /note="Description of Artificial Sequence: Synthetic coding sequence"
  source 1..444: mol_type = other DNA

SEQ ID NO: 5138 - DNA, 600 bp, synthetic construct; identical to SEQ ID NO: 3864
  misc_feature 1..600: note = source = /note="Description of Artificial Sequence: Synthetic coding sequence"
  source 1..600: mol_type = other DNA

SEQ ID NO: 5139 - DNA, 153 bp, synthetic construct
  misc_feature 1..153: note = source = /note="Description of Artificial Sequence: Synthetic coding sequence"
  source 1..153: mol_type = other DNA
atgagcttcagcgccaccatcctgttcagcccccccagcggcagcgaggccagatgctgctgctgcgcctgcaagagcgagaccaacggcggcaacaccggcagccagggcggcaaccccccccccagcacccccatcaccgtgaccggctag

SEQ ID NO: 5140 - DNA, 75 bp, synthetic construct
  misc_feature 1..75: note = source = /note="Description of Artificial Sequence: Synthetic coding sequence"
  source 1..75: mol_type = other DNA
atgcagctgttcctgctgctgtgcctggtgctgctgagcccccagggcgccagcctgcacagacaccacccctag

SEQ ID NO: 5141 - DNA, 633 bp, synthetic construct; identical to SEQ ID NO: 4443
  misc_feature 1..633: note = source = /note="Description of Artificial Sequence: Synthetic coding sequence"
  source 1..633: mol_type = other DNA

SEQ ID NO: 5142 - DNA, 36 bp, synthetic construct
  misc_feature 1..36: note = source = /note="Description of Artificial Sequence: Synthetic coding sequence"
  source 1..36: mol_type = other DNA
atgagcttcagcgccaccatcctgttcagcccctag

SEQ ID NO: 5143 - DNA, 444 bp, synthetic construct; identical to SEQ ID NO: 4267
  misc_feature 1..444: note = source = /note="Description of Artificial Sequence: Synthetic coding sequence"
  source 1..444: mol_type = other DNA

SEQ ID NO: 5144 - DNA, 696 bp, synthetic construct
  misc_feature 1..696: note = source = /note="Description of Artificial Sequence: Synthetic coding sequence"
  source 1..696: mol_type = other DNA
atgcagctgttcctgctgctgtgcctggtgctgctgagcccccagggcgccagcctgcacagacaccaccccagagagatgaagaagagagtggaggacctgcacgtgggcgccaccgtggcccccagcagcagaagagacttcaccttcgacctgtacagagccctggccagcgccgcccccagccagagcatcttcttcagccccgtgagcatcagcatgagcctggccatgctgagcctgggcgccggcagcagcaccaagatgcagatcctggagggcctgggcctgaacctgcagaagagcagcgagaaggagctgcacagaggcttccagcagctgctgcaggagctgaaccagcccagagacggcttccagctgagcctgggcaacgccctgttcaccgacctggtggtggacctgcaggacaccttcgtgagcgccatgaagaccctgtacctggccgacaccttccccaccaacttcagagacagcgccggcgccatgaagcagatcaacgactacgtggccaagcagaccaagggcaagatcgtggacctgctgaagaacctggacagcaacgccgtggtgatcatggtgaactacatcttcttcaaggccaagtgggagaccagcttcaaccacaagggcacccaggagcaggacttctacgtgaccagcgagaccgtggtgtag

SEQ ID NO: 5145 - DNA, 1626 bp, synthetic construct
  misc_feature 1..1626: note = source = /note="Description of Artificial Sequence: Synthetic coding sequence"
  source 1..1626: mol_type = other DNA
atggccaagttcggcgtgcacagaatcctgctgctggccatcagcctgaccaagtgcctggagagcaccaagctgctggccgacctgaagaagtgcggcgacctggagtgcgaggccctgatcaacagagtgagcgccatgagagactacagaggccccgactgcagatacctgaacttcaccaagggcgaggagatcagcgtgtacgtgaagctggccggcgagagagaggacctgtgggccggcaagggcaaggagttcggctacttccccagagacgccgtgcagatcgaggaggtgttcatcagcgaggagatccagatgagcaccaaggagagcgacttcctgtgcctgctgggcgtgagctacaccttcgacaacgaggacagcgagctgaacggcgactacggcgagaacatctacccctacgaggaggacaaggacgagaagagcagcatctacgagagcgacttccagatcgagcccggcttctacgccacctacgagagcaccctgttcgaggaccaggtgcccgccctggaggcccccgaggacatcggcagcaccagcgagagcaaggactgggaggaggtggtggtggagagcatggagcaggacagaatccccgaggtgcacgtgccccccagcagcgccgtgagcggcgtgaaggagtggttcggcctgggcggcgagcaggccgaggagaaggccttcgagagcgtgatcgagcccgtgcaggagagcagcttcagaagcagaaagatcgccgtggaggacgagaacgacctggaggagctgaacaacggcgagccccagaccgagcaccagcaggagagcgagagcgagatcgacagcgtgcccaagacccagagcgagctggccagcgagagcgagcacatccccaagccccagagcaccggctggttcggcggcggcttcaccagctacctgggcttcggcgacgaggacaccggcctggagctgatcgccgaggagagcaacccccccctgcaggacttccccaacagcatcagcagcgacaaggaggccaccgtgccctgcaccgagatcctgaccgagaagaaggacaccatcaccaacgacagcctgagcctgaagcccagctggttcgacttcggcttcgccatcctgggcttcgcctacgccaaggaggacaagatcatgctggacgacagaaagaacgaggaggacggcggcgccgacgagcacgagcaccccctgaccagcgagctggaccccgagaaggagcaggagatcgagaccatcaagatcatcgagaccgaggaccagatcgacaagaagcccgtgagcgagaagaccgacgagagcgacaccatcccctacctgaagaagttcctgtacaacttcgacaacccctggaacttccagaacatccccaaggagaccgagctgcccttccccaagcagatcctggaccagaacaacgtgatcgagaacgaggagaccggcgagttcagcatcgacaactaccccaccgacaacaccaaggtgatgatcttcaagagcagctacagcctgagcggctggtacgagaacatctacatcagaatctacttcatcttcaagcacaacctgttcctgtag

SEQ ID NO: 5146 - DNA, 1245 bp, synthetic construct; identical to SEQ ID NO: 3905
  misc_feature 1..1245: note = source = /note="Description of Artificial Sequence: Synthetic coding sequence"
  source 1..1245: mol_type = other DNA

SEQ ID NO: 5147 - DNA, 618 bp, synthetic construct; identical to SEQ ID NO: 3886
  misc_feature 1..618: note = source = /note="Description of Artificial Sequence: Synthetic coding sequence"
  source 1..618: mol_type = other DNA

SEQ ID NO: 5148 - DNA, 516 bp, synthetic construct
  misc_feature 1..516: note = source = /note="Description of Artificial Sequence: Synthetic coding sequence"
  source 1..516: mol_type = other DNA
atggagaccttccccctgctgctgctgagcctgggcctggtgctggccgaggccagcgagagcaccatgaagatcatcaaggaggagttcaccgacgaggagatgcagtacgacatggccaagagcggccaggagaagcagaccatcgagatcctgatgaaccccatcctgctggtgaagaacaccagcctgagcatgagcaaggacgacatgagcagcaccctgctgaccttcagaagcctgcactacaacgaccccaagggcaacagcagcggcaacgacaaggagtgctgcaacgacatgaccgtgtggagaaaggtgagcgaggccaacggcagctgcaagtggagcaacaacttcatcagaagcagcaccgaggtgatgagaagagtgcacagagcccccagctgcaagttcgtgcagaaccccggcatcagctgctgcgagagcctggagctggagaacaccgtgtgccagttcaccaccggcaagcagttccccagatgccagtactag

SEQ ID NO: 5149 - DNA, 633 bp, synthetic construct; identical to SEQ ID NO: 4443
  misc_feature 1..633: note = source = /note="Description of Artificial Sequence: Synthetic coding sequence"
  source 1..633: mol_type = other DNA

SEQ ID NO: 5150 - DNA, 537 bp, synthetic construct; identical to SEQ ID NO: 4691
  misc_feature 1..537: note = source = /note="Description of Artificial Sequence: Synthetic coding sequence"
  source 1..537: mol_type = other DNA

SEQ ID NO: 5151 - DNA, 474 bp, synthetic construct
  misc_feature 1..474: note = source = /note="Description of Artificial Sequence: Synthetic coding sequence"
  source 1..474: mol_type = other DNA
atgcagctgttcctgctgctgtgcctggtgctgctgagcccccagggcgccagcctgcacagacaccaccccagagagatgaagaagagagtggaggacctgcacgtgggcgccaccgtggcccccagcagcagaagagacttcaccttcgacctgtacagagccctggccagcgccgcccccagccagagcatcttcttcagccccgtgagcatcagcatgagcctggccatgctgagcctgggcgccggcagcagcaccaagatgcagatcctggagggcctgggcctgaacctgcagaagagcagcgagaaggagctgcacagaggcttccagcagctgctgcaggagctgaaccagcccagagacggcttccagctgagcctgggcaacgccctgttcaccgacctggtggtggacctgcaggacaccttcgtgagcgccatgaagaccctgtacctggccgacacctag

SEQ ID NO: 5152 - DNA, 1035 bp, synthetic construct
  misc_feature 1..1035: note = source = /note="Description of Artificial Sequence: Synthetic coding sequence"
  source 1..1035: mol_type = other DNA
atgccccccagaatgctggtggcccccctgcccctgcacttcctgctggccgccgtgagcagcgagaacagaagcggcagaagacagtggcagcaggccgtggccgccggcagcggccccggcagaaacagcagcagagccatccactggagcctgcccagagccctggtgcccgccaccggcaccagagccagcggcagccagaagagacagagaccccccaagggccaggaggccctgtggagcagaccccacagcagacacagcgccgagagagccggcggcagccacagcgaccccggcagactgagcgcccccctgggcctgggcctgcccagcggcagaggcagactgaccgccatgcccggcagagcccccctgagaaccgtgcccggcgccctgggcgcctggctgctgggcggcctgtgggcctggaccctgtgcggcctgtgcagcctgggcgccgtgggcgcccccagaccctgccaggccccccagcagtgggagggcagacaggtgatgtaccagcagagcagcggcagaaacagcagagccctgctgagctacgacggcctgaaccagagagtgagagtgctggacgagagaaaggccctgatcccctgcaagagactgttcgagtacatcctgctgtacaaggacggcgtgatgttccagatcgaccaggccaccaagcagtgcagcaagatgaccctgacccagccctgggaccccctggacatcccccagaacagcaccttcgaggaccagtacagcatcggcggcccccaggagcagatcaccgtgcaggagtggagcgacagaaagagcgccagaagctacgagacctggatcggcatctacaccgtgaaggactgctaccccgtgcaggagaccttcaccatcaactacagcgtgatcctgagcaccagattcttcgacatccagctgggcatcaaggaccccagcgtgttcaccccccccagcacctgccagatggcccagctggagaagatgagcgaggactgcagctggtag

SEQ ID NO: 5153 - DNA, 321 bp, synthetic construct
  misc_feature 1..321: note = source = /note="Description of Artificial Sequence: Synthetic coding sequence"
  source 1..321: mol_type = other DNA
ggccagcccaaggccgcccccagcgtgaccctgttcccccccagcagcgaggagctgcaggccaacaaggccaccctggtgtgcctggtgagcgacttctaccccggcgccgtgaccgtggcctggaaggccgacggcagccccgtgaaggtgggcgtggagaccaccaagcccagcaagcagagcaacaacaagtacgccgccagcagctacctgagcctgacccccgagcagtggaagagccacagaagctacagctgcagagtgacccacgagggcagcaccgtggagaagaccgtggcccccgccgagtgcagctag

SEQ ID NO: 5154 - DNA, 672 bp, synthetic construct
  misc_feature 1..672: note = source = /note="Description of Artificial Sequence: Synthetic coding sequence"
  source 1..672: mol_type = other DNA
atgagactgcagagacccagacaggcccccgccggcggcagaagagcccccagaggcggcagaggcagcccctacagacccgaccccggcagaggcgccagaagactgagaagattccagaagggcggcgagggcgcccccagagccgaccccccctgggcccccctgggcaccatggccctgctggccctgctgctggtggtggccctgcccagagtgtggaccgacgccaacctgaccgccagacagagagaccccgaggacagccagagaaccgacgagggcgacaacagagtgtggtgccacgtgtgcgagagagagaacaccttcgagtgccagaaccccagaagatgcaagtggaccgagccctactgcgtgatcgccgccgtgaagatcttccccagattcttcatggtggccaagcagtgcagcgccggctgcgccgccatggagagacccaagcccgaggagaagagattcctgctggaggagcccatgcccttcttctacctgaagtgctgcaagatcagatactgcaacctggagggcccccccatcaacagcagcgtgttcaaggagtacgccggcagcatgggcgagagctgcggcggcctgtggctggccatcctgctgctgctggccagcatcgccgccggcctgagcctgagctag

SEQ ID NO: 5155 - DNA, 408 bp, synthetic construct
  misc_feature 1..408: note = source = /note="Description of Artificial Sequence: Synthetic coding sequence"
  source 1..408: mol_type = other DNA
atgacccccacccccaccgccgcctggaccccccccccccccctgagacccagcgccgccgccgccggcgcccagtgcagaagctgccccttcagaggcggctgcgcccccagcaccgccagaaccccccccgcctgcatgagacccgccggcccctgcgccccccccacctggcccgcccccagcaccaccaccagcacctgcaccagcagaagagccggctgcaccgccagcagcgccagctacagcaccctggccgccgcctgcagcctgagaagaagcggcgtgagatggccccccagcagcgcctacagcacctgggccttcgccagctgctgcgccagcagcgccagctgcagatgctgctgctgctgctgggccgccggcgcctggaccagcgcctggtag

SEQ ID NO: 5156 - DNA, 1542 bp, synthetic construct; identical to SEQ ID NO: 4607
  misc_feature 1..1542: note = source = /note="Description of Artificial Sequence: Synthetic coding sequence"
  source 1..1542: mol_type = other DNA

SEQ ID NO: 5157 - DNA, 1341 bp, synthetic construct; identical to SEQ ID NO: 3757
  misc_feature 1..1341: note = source = /note="Description of Artificial Sequence: Synthetic coding sequence"
  source 1..1341: mol_type = other DNA

SEQ ID NO: 5158 - DNA, 936 bp, synthetic construct
  misc_feature 1..936: note = source = /note="Description of Artificial Sequence: Synthetic coding sequence"
  source 1..936: mol_type = other DNA
atgggcgtgatggccatgctgatgctgcccctgctgctgctgggcatcagcggcctgctgttcatctaccaggaggtgagcagactgtggagcaagagcgccgtgcagaacaaggtggtggtgatcaccgacgccatcagcggcctgggcaaggagtgcgccagagtgttccacaccggcggcgccagactggtgctgtgcggcaagaactgggagagactggagaacctgtacgacgccctgatcagcgtggccgaccccagcaagaccttcacccccaagctggtgctgctggacctgagcgacatcagctgcgtgcccgacgtggccaaggaggtgctggactgctacggctgcgtggacatcctgatcaacaacgccagcgtgaaggtgaagggccccgcccacaagatcagcctggagctggacaagaagatcatggacgccaactacttcggccccatcaccctgaccaaggccctgctgcccaacatgatcagcagaagaaccggccagatcgtgctggtgaacaacatccagggcaagttcggcatccccttcagaaccacctacgccgccagcaagcacgccgccctgggcttcttcgactgcctgagagccgaggtggaggagtacgacgtggtgatcagcaccgtgagccccaccttcatcagaagctaccacgtgtaccccgagcagggcaactgggaggccagcatctggaagttcttcttcagaaagctgacctacggcgtgcaccccgtggaggtggccgaggaggtgatgagaaccgtgagaagaaagaagcaggaggtgttcatggccaaccccatccccaaggccgccgtgtacgtgagaaccttcttccccgagttcttcttcgccgtggtggcctgcggcgtgaaggagaagctgaacgtgcccgaggagggctag

SEQ ID NO: 5159 - DNA, 594 bp, synthetic construct; identical to SEQ ID NO: 3704
  misc_feature 1..594: note = source = /note="Description of Artificial Sequence: Synthetic coding sequence"
  source 1..594: mol_type = other DNA

SEQ ID NO: 5160 - DNA, 705 bp, synthetic construct
  misc_feature 1..705: note = source = /note="Description of Artificial Sequence: Synthetic coding sequence"
  source 1..705: mol_type = other DNA
atgaaggtgctgctgctgaccggcctgggcgccctgttcttcgcctactactgggacgacaacttcgaccccggcggcctggactacctggtgctgaaccacatcggcggcgcccccgccggcaccagagccagaagcccccaggccaccagatggctgatgcaggtgaacttcgtgagctacgtgcagctgaccagcagagccctgcccagcctgaccgacagcaagggcagcctggtggtggtgagcagcctgctgggcagagtgcccaccagcttcagcaccccctacagcgccgccaagttcgccctggacggcttcttcggcagcctgagaagagagctggacgtgcaggacgtgaacgtggccatcaccatgtgcgtgctgggcctgagagacagagccagcgccgccgaggccgtgagaagcagcaccagcagacccagacagcccgagcacagaggcgtgcccctgcagagccagaccgccatgttcctgccccccaccgtgcccggcgccagaaccctgaccgagacccccctgagaggctggccccagcccaagatgaagagcagcagacagaagagcaagaccgagaagaacgacggccacctggagcccgtgaccgcctgggaggtgcaggtgcccagagtgagaagactgtgcagaggcctggccagaccccacctgttcggccacgactag

SEQ ID NO: 5161 - DNA, 228 bp, synthetic construct
  misc_feature 1..228: note = source = /note="Description of Artificial Sequence: Synthetic coding sequence"
  source 1..228: mol_type = other DNA
atgaaggtgctgctgctgaccggcctgggcgccctgttcttcgcctactactgggacgacaacttcgaccccgccagcctgcagggcgccagagtgctgctgaccggcgccaacgccggcgtgggcgaggagctggcctaccactacgccagactgggcagccacctggtgctgaccgcccacaccgaggccctgctgcagaaggccggctggaccaccagctgctag

SEQ ID NO: 5162 - DNA, 225 bp, synthetic construct
  misc_feature 1..225: note = source = /note="Description of Artificial Sequence: Synthetic coding sequence"
  source 1..225: mol_type = other DNA
atgcagcccagcgagatggtgatgaaccccaagcaggtgttcctgagcgtgctgatcttcggcgtggccggcctgctgctgttcatgtacctgcaggtgtggatcgaggagcagcacaccggcagagtggagaagagaagagagcagaaggtgaccagcggctggggccccgtgaagtacctgagacccgtgcccagaatcaagccccaggtgagccacgcctag

SEQ ID NO: 5163 - DNA, 861 bp, synthetic construct; identical to SEQ ID NO: 3890
  misc_feature 1..861: note = source = /note="Description of Artificial Sequence: Synthetic coding sequence"
  source 1..861: mol_type = other DNA

SEQ ID NO: 5164 - DNA, 459 bp, synthetic construct
  misc_feature 1..459: note = source = /note="Description of Artificial Sequence: Synthetic coding sequence"
  source 1..459: mol_type = other DNA
atgcaggtgaacttcgtgagctacgtgcagctgaccagcagagccctgcccagcctgaccgacagcaagggcagcctggtggtggtgagcagcctgctgggcagagtgcccaccagcttcagcaccccctacagcgccgccaagttcgccctggacggcttcttcggcagcctgagaagagagctggacgtgcaggacgtgaacgtggccatcaccatgtgcgtgctgggcctgagagacagagccagcgccgccgaggccgtgagaggcgtgaccagagtgaaggccgcccccggccccaaggccgccctggccgtgatcagaggcggcgccaccagagccgccggcgtgttctacccctggagattcagactgctgtgcctgctgagaagatggctgcccagacccagagcctggttcatcagacaggagctgaacgtgaccgccgccgccgcctag

SEQ ID NO: 5165 - DNA, 2856 bp, synthetic construct
  misc_feature 1..2856: note = source = /note="Description of Artificial Sequence: Synthetic coding sequence"
  source 1..2856: mol_type = other DNA
atgagagtgctggcctgcctgctggccgccctggtgggcatccaggccgtggagagactgagactggccgacggcccccacggctgcgccggcagactggaggtgtggcacggcggcagatggggcaccgtgtgcgacgacggctgggacctgagagacgccgccgtggcctgcagacagctgggctgcggcggcgccctggccgcccccggcggcgccttcttcggcgagggcgccggccccgtgtggctgagcgagctggcctgcagaggcaacgagggccagctgggcctgtgccaccacagaggctggaaggcccacatctgcagccacgaggaggacgccggcgtggtgtgcgccggccagagagtggccaacagcagagacgacagcaccagccccctggacggcgccccctggcccggcctgctgctggagctgagccccagcaccgaggagcccctggtgacccacgcccccagacccgccggcaacccccagaacgccagcagaaagaagagccccagacccaagcaggccaagagcaccagagcccccctgctgaccaccggcgcccccagacaggagagactgagactggtgagcggcccccacagatgcgccggcagactggaggtgtggcacggcggcagatggggcaccgtgtgcgacgacggctgggacctgagagacgccgccgtggcctgcagagagctgggctgcggcggcgccctggccgcccccggcggcgccagattcggccccggcgccggccccgtgtggatggacgacgtgggctgcggcggcggcgagcaggccctgagagactgccccagaagcccctggggcagaagcaactgcgaccacagcgaggacgccggcctggtgtgcaccggccccgcccccagactgagactggccgacggcccccacggctgcgccggcagactggaggtgtggcacggcggcagatggggcagcgtgtgcgacgacgcctgggacctgagagacgccgccgtggcctgcagagagctgggctgcggcggcgccctggccgcccccggcggcgccttcttcggcgagggcagcggccccatcatcctggacgacctgagatgcagaggcaacgagaccgccctgagattctgccccgccagaccctggggccagcacgactgccaccacagagaggacgccggcgccgtgtgcgacggcatgcccctgggctacgtgccccccaccgcccccaccgacagcaacaacagcacccccagagaggccgccagcagaccccccagcaccatgaccagccaggcccccggcaccgccggcgtgagccccccccccgccagccccaccgtgctgtgggagcccggccccgaggccggcagcccccagctgagactggtggccggccccagcaagtgcagcggcagactggaggtgtggcacgaccagagatggggcaccgtgtgcgacgacagctgggacatgagagacagcgccgtggtgtgcagagagctgggctgcggcggcccccagcagcccgaccccgccgccggcagattcggctggggcgccggccccatctggctggacgacgtgggctgcgtgggcaccgaggccagcctgagcgactgccccgccgccccctggggcaagcacaactgcgcccacaacgaggacgtgggcgtgacctgcaccggcccccccggcctggacagcatcagcgaccccttcagctggagctggatccccggcctgggcagagacagagacgcctggctgcccggcgagctggccaccaagcccagcgccagcgtgaccgccagcgtgctggagaagaccaccaccaaggcccccggcaagatgcccaagagcaccaagaagtgggtgaccaagaacgccaagagacccaccacccagccccccgtgatgcccaccaccaagcacagcagagcccagagcccccccgacctgaccagccagaccaccgccgccctgaccaccgaggccagcagaagacccaccagcgagttcaccagaagacccaccaccgaggccccccagagatggaccagccacaccaccgccaccctgaccccccaggcccccagagagagaaccaccaagaccatggccatgctgaccacccagggcccccaggagatgaccagcgagagcaccatcaagagcatcccccaggccagcctggagcccagcgccgagatccccgagggcagccccgagagccccaaggaccccgcccccagccccagcgtgagcaccaccggcgagagcggcctgttcagagtgagactggccgacggccccaacagatgcgccggcagactggaggtgtggcacgccggcagatggggcaccgtgtgcgacgacaactgggacctgagagacgccaccgtggcctgctgggagctgggctgcggcaaggtgagacccagagtgggcaagacccactacggccccggcaccggccccatctggctggacgacatgggctgcaagggcagcgaggccagcctgagcgactgccccagcggcgcctggggcaagcacaactgcgaccacgaggaggacgtgggcctgacctgcaccggctacaccgactacgacgactaccccccctggacctgggaccccaccagcagagaggacctggccaagggcaccaccaccgccggcgtgcccggccacaccctgccctggagaaccaccagaagacccggcagcagcagccccgccatcagaagactgcccgacaccgagcccgaggccggcgcccccagaggcgacgcccccagaagcagaaccgccagagtggccgcccccccctag

SEQ ID NO: 5166 - DNA, 8430 bp, synthetic construct; identical to SEQ ID NO: 3614
  misc_feature 1..8430: note = source = /note="Description of Artificial Sequence: Synthetic coding sequence"
  source 1..8430: mol_type = other DNA

SEQ ID NO: 5167 - DNA, 291 bp, synthetic construct; identical to SEQ ID NO: 4220
  misc_feature 1..291: note = source = /note="Description of Artificial Sequence: Synthetic coding sequence"
  source 1..291: mol_type = other DNA

SEQ ID NO: 5168 - DNA, 1890 bp, synthetic construct
  misc_feature 1..1890: note = source = /note="Description of Artificial Sequence: Synthetic coding sequence"
  source 1..1890: mol_type = other DNA
atgcagcaggacggcctgggcgtgggcaccagaaacggcagcggcaagggcagaagcgtgcaccccagctggccctggtgcgcccccagacccctgagatacttcggcagagacgccagagccagaagagcccagaccgccgccatggccctgctggccggcggcctgagcagaggcctgggcagccaccccgccgccgccggcagagacgccgtggtgttcgtgtggctgctgctgagcacctggtgcaccgcccccgccagagccatccaggtgaccgtgagcaacccctaccacgtggtgatcctgttccagcccgtgaccctgccctgcacctaccagatgaccagcacccccacccagcccatcgtgatctggaagtacaagagcttctgcagagacagaatcgccgacgccttcagccccgccagcgtggacaaccagctgaacgcccagctggccgccggcaaccccggctacaacccctacgtggagtgccaggacagcgtgagaaccgtgagagtggtggccaccaagcagggcaacgccgtgaccctgggcgactactaccagggcagaagaatcaccatcaccggcaacgccgacctgaccttcgaccagaccgcctggggcgacagcggcgtgtactactgcagcgtggtgagcgcccaggacctgcagggcaacaacgaggcctacgccgagctgatcgtgctggactggctgttcgtggtggtggtgtgcctggccgccttcctgatcttcctgctgctgggcatctgctggtgccagtgctgcccccacacctgctgctgctacgtgagatgcccctgctgccccgacaagtgctgctgccccgaggccctgtacgccgccggcaaggccgccaccagcggcgtgcccagcatctacgcccccagcacctacgcccacctgagccccgccaagaccccccccccccccgccatgatccccatgggccccgcctacaacggctaccccggcggctaccccggcgacgtggacagaagcagcagcgccggcggccagggcagctacgtgcccctgctgagagacaccgacagcagcgtggccagcgtgagaagcggctacagaatccaggccagccagcaggacgacagcatgagagtgctgtactacatggagaaggagctggccaacttcgaccccagcagacccggcccccccagcggcagagtggagagagccatgagcgaggtgaccagcctgcacgaggacgactggagaagcagacccagcagaggccccgccctgacccccatcagagacgaggagtggggcggccacagccccagaagccccagaggctgggaccaggagcccgccagagagcaggccggcggcggctggagagccagaagacccagagccagaagcgtggacgccctggacgacctgaccccccccagcaccgccgagagcggcagcagaagccccaccagcaacggcggcagaagcagagcctacatgccccccagaagcagaagcagagacgacctgtacgaccaggacgacagcagagacttccccagaagcagagacccccactacgacgacttcagaagcagagagagaccccccgccgaccccagaagccaccaccacagaaccagagaccccagagacaacggcagcagaagcggcgacctgccctacgacggcagactgctggaggaggccgtgagaaagaagggcagcgaggagagaagaagaccccacaaggaggaggaggaggaggcctactacccccccgccccccccccctacagcgagaccgacagccaggccagcagagagagaagactgaagaagaacctggccctgagcagagagagcctggtggtgtag

SEQ ID NO: 5169 - DNA, 591 bp, synthetic construct
  misc_feature 1..591: note = source = /note="Description of Artificial Sequence: Synthetic coding sequence"
  source 1..591: mol_type = other DNA
atgagcaggagatctatgctgcttgcttgggcccttcctagtctgctaaggttgggggccgcgcaagagaccgaggaccctgcatgctgctcccctattgtgccaaggaacgaatggaaagcgctcgcctcggagtgtgcccagcatctgtctttgccactgagatatgtggtggtcagtcataccgcagggtcttcttgcaatacgcctgcgtcttgccagcaacaggcccgcaacgtccagcactaccatatgaagaccttaggttggtgtgatgtcggttacaattttttaataggcgaagatggcctggtttatgaaggcagaggctggaacttcactggcgcgcattccggacacttatggaaccctatgagtattgggatcagcttcatgggcaattacatggatagggtgcccaccccacaagcaatccgggccgcccagggcttactggcctgcggtgtggctcagggtgctctcaggagtaattatgtactgaaagggcacagggacgtccagcgaaccctgtcccctgggaaccagctatatcatctgatccagaattggcctcactacaggagtccttag

SEQ ID NO: 5170 - DNA, 1056 bp, synthetic construct
  misc_feature 1..1056: note = source = /note="Description of Artificial Sequence: Synthetic coding sequence"
  source 1..1056: mol_type = other DNA
atggaggcgtttgcacttggacccgcacgtagaggccgccgtcggacaagggcagccggttctttgctgagcagggctgccattctgttgttcatatccgcctttctggtgagggtgccttctagtgtagggcaccttgtgcggctgccaagagcctttcgattgacaaaagatagcgtaaaaatcgttggcagcacttctttccctgttaaggcgtacgtgatgttgcaccaaaagtccccccacgtgttgtgtgtgacccagcaactacgtaatgcagaactgatcgatcctagcttccagtggtacggcccgaaaggaaaggtggtgtctgtggagaatcggacggcacagattacgtccactggatccctggtgttccaaaatttcgaggagagtatgtccgggatttatacatgttttcttgagtataaacccaccgttgaggaaatagtgaaaagacttcagctgaagtacgcgatttatgcataccgagagccccactactactatcagttcacggctcgataccacgccgccccatgcaattcgatatacaacatcagcttcgagaagaaacttctccagatcctgtcaaagcttctactcgacctgtcatgcgagattagtcttctgaagtccgaatgtcatcgtgtgaagatgcaacgggcaggcctgcagaacgagctgtttttcgccttttcagtcagttcgctcgataccgaaaagggccctaagagatgcactgaccacaactgtgagccttataagcggcttttcaaggccaagaatctgatcgagaggttttttaaccaacaagtggaaatactgggacggagagccgagcaactcccccaaatatattacattgagggcacactacagatggtctggatcaatcggtgtttccccggctatggcatgaacgtgcagcaacatccaaaatgtccagaatgttgtgtcatctgttccccaggctcatacaaccccagggacggtatacattgtctgcagtgcaattctagtctcgtctacggggccaaaacatgtctttag

SEQ ID NO: 5171 - DNA, 420 bp, synthetic construct
  misc_feature 1..420: note = source = /note="Description of Artificial Sequence: Synthetic coding sequence"
  source 1..420: mol_type = other DNA
atggagaccaacgtgttccacttaatgctgtgcgtaacctcggcgagaactcacaagtcgacgtctctttgtttcggccactttaattcctacccttctttgccattgattcacgacctactccttgagatatcatttcagctgtccgccccacacgaggacgcccgactgacacccgaggagctggaacgggcatcgctgttacagatactgcctgagatgctgggagcagagagaggagacatcctcaggaaagcggactctagtacaaacatcttcaatccccgagggaacctgagaaaatttcaggatttcagcgggcaggatcccaacattctcctctcccacttactagcacgcatctggaagccttacaagaagcgggaaactcctgactgcttctggaagtattgtgtgtag

SEQ ID NO: 5172 - DNA, 606 bp, synthetic construct
  misc_feature 1..606: note = source = /note="Description of Artificial Sequence: Synthetic coding sequence"
  source 1..606: mol_type = other DNA
atggggagcggccgtcgagccctgtccgcagtccccgccgtgctcctggtgctgaccctgcccgggctgcccgtgtgggctcagaacgataccgagcctatcgtgctggaagggaagtgcctcgtagtgtgcgattcaaatcccgcaaccgattcaaaaggttcgtcttcctcacccctaggaatcagtgtcagggctgccaactccaaggtggccttctccgccgtgcgttctaccaaccatgaaccaagcgaaatgagtaataaaacgcgaatcatatatttcgaccaaatactagtaaatgtgggtaatttttttacgctggaatctgtctttgtcgcccctcgaaagggcatatactctttcagctttcatgtgatcaaagtgtaccagagccaaacaatacaggtcaatcttatgttaaatggcaagcccgtaatttccgcgttcgccggggataaggatgtaaccagggaggctgccaccaacggagtcctgctctaccttgacaaggaggacaaggtgtatctgaaacttgaaaagggcaatttggtagggggctggcagtactcaaccttttccggtttcctcgtgtttcctttgtag

SEQ ID NO: 5173 - DNA, 264 bp, synthetic construct
  misc_feature 1..264: note = source = /note="Description of Artificial Sequence: Synthetic coding sequence"
  source 1..264: mol_type = other DNA
atgaaagtcctgcgcgcatggctgttgtgcctgctcatgctgggtctggcgcttaggggggctgcatccaggacccatcgccactcgatggaaatcaggactcccgacatcaatcccgcgtggtatgcctccagaggaatccgaccagtgggccgctttggcagacgccgtgcaaccctaggcgatgtcccaaagcctggtctcagaccccgcctaacctgttttccactggagggaggtgctatgtctagtcaggacggatag

SEQ ID NO: 5174 - DNA, 1098 bp, synthetic construct
  misc_feature 1..1098: note = source = /note="Description of Artificial Sequence: Synthetic coding sequence"
  source 1..1098: mol_type = other DNA
atgccaggcgggaaaaaggtagccggcggaggatctagcggggccacacctacctcggccgcagctaccgcgcccagcggggtccgccggctcgagactagtgaggggacctccgctcagcgcgacgaggagcccgaagaggagggagaagaggacctgagagatgggggagtaccgttcttcgtcaatcgaggaggtctgccagtcgacgaggcgacgtgggagcggatgtggaaacacgttgcaaaaatccatcctgacggggagaaagttgcccagagaatccggggagctacagatctgcctaagattcctattcctagcgtgcctactttccagccatccacccctgtacctgaacggctcgaagctgtgcagcggtatatacgggaactgcaatacaatcacactggtactcagttcttcgaaatcaaaaaaagccgacctctgacgggcctcatggatctcgcgaaagaaatgacaaaagaagccttgccaatcaagtgtctagaagcagtgattctggggatttacctgacaaactcaatgccaactctggagcggtttcccatatcatttaaaacgtatttctccggtaactactttcgacatattgttctgggtgtgaacttcgccggccgctatggagcgttgggcatgtccaggcgcgaagatctgatgtacaagcccccggccttcaggactctctctgagctggtgttggattttgaggccgcctacgggagatgctggcacgtgctcaaaaaggtgaaactcggccagagcgtctctcacgaccctcattccgttgagcagattgagtggaaacactcggtacttgacgtcgagcggctgggacgtgacgacttccgcaaggagctggagcggcatgccagagacatgaggctgaagattggtaaggggacagggccaccatcacccacaaaggaccgcaaaaaggacgtgagctcacctcagagggcccaaagctctccccatcggaggaactcccggagtgagcgacgcccctccggcgataagaagaccagtgagcctaaagctatgcctgatttaaatggctaccagattcgcgtgtag

SEQ ID NO: 5175 - DNA, 1377 bp, synthetic construct
  misc_feature 1..1377: note = source = /note="Description of Artificial Sequence: Synthetic coding sequence"
  source 1..1377: mol_type = other DNA
atggcttgggcctctagattagggttacttctggcactgctcctgcccgtggtgggggcgtcaacccctggtacggtcgtccgtttgaataaagcagcattatcatatgtgtcagaaatcggaaaagcccccctgcagagggcactgcaggtgacggtcccacacttcctcgactggagcggggaagcgctgcagcctacgagaatacggatccttaatgtgcatgtgccaagactccatctcaaatttatagccgggttcggcgtgcggctgttagctgcagcgaatttcacattcaaagtgtttagagccccagagccactggaactgactttgcctgtggagctgctagcagacacacgtgtcacacagagttctatcagaacacctgtggtaagcatttccgcgtgttctctgtttagcggacacgcgaatgaattcgatgggtccaattctacctctcacgctctgctggttctagtgcagaagcacatcaaggccgtcttgagcaataaattgtgtttgagtatctctaacctagttcaaggcgttaatgttcacctgggtacccttattggactcaatccagtagggccagaatcacagattcggtactctatggtgtcagtgcctaccgttacctcagattacatttccctcgaggtcaacgccgtcctttttcttctcggcaaacctattatactcccgaccgacgccaccccctttgttttgcctcgccatgtgggcactgaagggtccatggcaacagtcggactatcacaacagctgtttgacagcgctctgcttcttctgcaaaaggccggagcattgaacctcgacattacaggtcagttacggagcgacgacaacctgctgaacacttccgcattgggacggctaatcccggaggtagcgaggcagttccccgaacctatgcccgtggtactgaaggtccggttaggggccactcctgtggctatgcttcataccaacaatgctactctgagactccagccttttgttgaagtcctcgccacagcgtctaatagcgctttccagtctctgttctccttagacgtcgtcgtaaatcttaggctgcaactgagtgtgtccaaggtcaagcttcaggggacaacttcggtgctcggcgacgtccagctgactgtggctagctccaatgtaggcttcatcgatactgatcaggtgcggacactaatgggcacagtctttgagaagcctcttctggaccatctgaatgcacttctggctatggggattgcccttcccggggtggtgaatctgcactatgtggctccagagatcttcgtctatgaaggatatgtcgtgatctcttctggtctcttctaccagtcttag

SEQ ID NO: 5176 - DNA, 1815 bp, synthetic construct
  misc_feature 1..1815: note = source = /note="Description of Artificial Sequence: Synthetic coding sequence"
  source 1..1815: mol_type = other DNA
atgatgcgagccgtgtgggaggccttggcagcattggctgccgtggcatgtttagttggtgcagttcggggaggcccagggctgtctatgtttgccggtcaagctgctcagccagacccctgtagcgacgaaaatggccacccccggcggtgcataccagactttgtgaacgctgcctttggtaaagacgtgcgggtttcaagtacatgcggcagacctcctgcacggtactgtgtcgtgagcgagcggggcgaagagcggcttcggtcatgccacttgtgcaatgctagcgacccaaagaaggcacacccacccgcttttctgaccgacctcaacaacccacacaacctgacgtgctggcagtctgagaactacttgcagttcccacataatgtgactctaacactttcattaggaaagaaatttgaggtcacctacgtctccctgcagttttgttcgcctcgtccggagtccatggcgatctacaagtcaatggactacggacgaacatgggttccatttcaattttacagtacacagtgtagaaaaatgtataatcgacctcacagagcccccatcactaagcagaacgaacaagaggccgtctgtaccgactctcacacagatatgaggcccctgtcagggggccttatcgccttttctaccctcgatggacggcccagtgcacacgatttcgacaattctccagtgctccaggattgggttacggctactgatattcgggtggcattttcacgtctgcacacattcggggacgagaacgaagacgacagtgagctggctcgagattcttatttttacgctgtgtctgacctccaggtgggaggtcggtgcaagtgtaatgggcatgccgccagatgtgtcagggaccgagacgacagccttgtgtgtgactgccggcacaacactgctgggcctgaatgcgaccggtgtaagcccttccactatgaccgaccatggcaaagagctaccgcacgcgaggcaaatgagtgtgtagcatgcaactgcaatctccacgcccgccggtgcaggtttaacatggaactgtacaaactaagtggccggaaatcaggaggggtgtgtctgaattgccggcacaatacggcagggcgccactgtcactattgtaaagaaggatattaccgggatatggggaagcctattactcatagaaaagcctgtaaggcttgcgactgtcaccctgttggtgccgcaggaaaaacgtgtaatcagactaccggacaatgtccctgtaaggatggagtaactggcataacgtgtaaccggtgtgctaaaggatatcagcagagtcgatcacccatagcaccatgcattaaaatccccgtggcccccccaactaccgcggcctcttcggtggaggagcccgaagactgcgatagctattgtaaggcatcaaaaggcaagctcaaaattaacatgaagaagtattgcaagaaagattacgctgttcagattcacattttaaaggctgataaagccggcgattggtggaagtttaccgttaatatcattagtgtgtacaaacaaggaaccagcaggatccgcaggggggatcagtctttgtggattcgtagccgagacattgcgtgtaaatgcccaaagattaagccgcttaagaagtatctcctgctcggtaacgccgaggactcgcccgatcagtcagggatcgtggccgacaaatcgtcacttgtgatacagtggcgggacacatgggctcgacgccttagaaaattccaacagcgggagaaaaagggcaaatgtaaaaaagcctag

SEQ ID NO: 5177 - DNA, 675 bp, synthetic construct
  misc_feature 1..675: note = source = /note="Description of Artificial Sequence: Synthetic coding sequence"
  source 1..675: mol_type = other DNA
atgcccggtcgggctccactgcgtacagtgccgggagccctcggggcttggctgctgggcggtttatgggcatggactttgtgcggcttgtgttccttgggagccgtgggagcgcctcggccgtgtcaagccccacagcaatgggaggggaggcaggtgatgtatcagcagagctcaggacggaacagtagggcccttcttagttacgacgggttgaaccagagagtgcgcgtgctagacgagcggaaagcactcatcccatgcaagaggctgtttgagtacatcctgctatacaaagatggcgtgatgtttcagatagatcaggccacgaagcaatgctctaagatgacccttactcagccctgggaccccttagacatcccacaaaatagtacttttgaggaccagtattccatcggcgggccacaggagcaaatcaccgtgcaggagtggtctgatagaaagtccgcccggtcatacgagacgtggattggtatatacactgttaaagactgttatccagtgcaagagacatttaccatcaactactcagttatcctcagcacccgattctttgacatccagctagggattaaggacccttctgtgtttacgcctcctagcacctgtcagatggcacaacttgagaagatgtcagaagactgtagctggtag

SEQ ID NO: 5178 - DNA, 5106 bp, synthetic construct
  misc_feature 1..5106: note = source = /note="Description of Artificial Sequence: Synthetic coding sequence"
  source 1..5106: mol_type = other DNA
atgggcttcttgcctaaattacttttgctcgctagcttctttcccgccggtcaagctagttggggagtttcaagcccccaggatgtccagggcgtaaagggttcctgcttgctcattccatgcatcttctcgtttccagcagatgtcgaggtgcctgacgggatcactgcaatatggtactacgactactcaggtcagcggcaggtcgtgtcccacagcgctgaccctaaacttgttgaagccagatttaggggacgcaccgagtttatgggcaaccctgagcacagggtgtgtaacttgctgttaaaggatttgcagcctgaagatagcggcagttataactttcggttcgaaataagtgaggtgaatagatggtctgatgtgaaggggaccttggtaaccgtgacagaggaacctcgcgtgccaacaatagcttctccagtggagctgctggaaggaacagaagtggattttaactgctcgacgccttatgtgtgcttacaggagcaagtacgtcttcagtggcagggtcaggatccagcgcgatccgtgacatttaactcacagaaattcgaacctacaggtgtcgggcatctcgaaacactgcacatggcaatgtcttggcaggatcatggaaggattttaaggtgccagttgtcagtcgctaatcatcgcgcccagtcggaaattcacctccaagtgaagtacgctccaaaaggagtcaagatactcctaagccccagcgggagaaacatcctgccaggagagctagtgaccctcacgtgtcaggtgaatagctcctatccagcagtttcaagtatcaaatggctgaaggatggagtacggctgcagaccaaaacaggtgtcctccacttgccacaagcagcctggtccgacgccggtgtgtacacttgccaagctgagaatggagttggctcccttgtgtctcccccaatttccctgcacatctttatggctgaggtgcaagtaagtccagccggccccatcctggagaaccagaccgtaaccctcgtgtgcaacacccccaacgaagccccgtcagacctacggtattcctggtacaagaaccatgtgctcttagaggacgcacactcccacaccctgcggctccacctcgctacacgagcagatacaggattttacttttgcgaggtgcagaacgtgcatggcagtgaacgaagcggacccgtatccgtggtggtgaatcacccccccctcaccccagtgctgaccgcttttctggaaacacaggccggtctggtcggtattctgcactgctcggttgtgtccgagcctttggcaactcttgtgctgagccacggcggacacattctggctagcaccagtggcgatagcgatcacagtcccaggttcagcggtacgtcaggtcctaactcactacggttggagatcagagatctggaagagacagatagcggcgagtataaatgctccgccactaactctctgggcaatgctacgtcaactcttgactttcacgcaaacgcggcccgtctactgatcagtccagccgcagaagttgtagaagggcaggctgttacactctcctgtcgttcagggctgagcccaacaccggatgcccggtttagctggtatctcaatggtgccctcctgcacgaaggccctggttcttccctgctcctgccagctgctagctcaactgacgcgggatcttaccactgtcgcgctcgggacgggcattccgccagtggccctagttctcccgccgtcctgacggtgctgtatcctccaagacagcccacatttactacgcggttggacctagacgcagcgggagccggagcaggtagaagaggcctgttgctgtgcagagttgatagtgatccaccagctcggctccagctccttcataaggatcgagttgtggctacctctctcccctccggtggtggttgctccacttgtggcggctgcagtcctcggatgaaggttactaaagctccaaacctgctcagggtagagattcataacccccttttagaggaggaaggcctctatttatgcgaagcctccaacgctctgggcaatgcgagtacgtcagctacattcaacggacaggccaccgtgttagccatagcaccaagtcacacactgcaggagggcaccgaggccaatctcacttgcaatgtgagccgagaagctgctgggagccccgctaacttttcctggttccgcaacggagtactttgggcacagggaccactggaaactgtgactcttctcccagtggccagaacagatgccgccctatatgcatgccgtatactgacagaggcaggggctcagctgagcacacccgtcttgctgagcgtcttgtatccaccagaccggcccaagttgagcgccctgctggacatggggcaaggccatatggccctctttatctgtactgttgactcaaggcctctggctctcctggcgttgttccacggcgagcacttattagctacctctctcggcccacaggtgccctcccatggccgcttccaggcaaaagccgaagccaactccttaaagctggaagttcgggaactgggattgggagatagtggcagttaccgatgtgaggctaccaatgtgctcggtagttctaataccagcctcttcttccaagttaggggcgcttgggtgcaggtgagtccatctcccgaactgcaggaaggccaggctgttgtgctcagctgccaggttcacacgggggtgccagagggcaccagctacagatggtatagagacggtcagcccctccaagaatccacctcagccacacttaggttcgcggcgataactcttactcaagccggtgcctaccactgtcaggcccaggcccccggatctgctacaacgtccctagctgcccctattagtctgcatgtttcatacgcccctaggcatgtgactctgaccactttgatggacaccggtcctggaaggctgggcctgttgctgtgtcgagtggattcagaccctccagcccagcttaggctgctccacggggatagacttgttgccagtacactacaaggagtgggaggaccagagggctccagtcctagactgcatgtggcagtggccccaaacaccctccgtcttgagatccatggggccatgttggaggatgagggagtgtatatttgtgaagccagtaacacactcggtcaggcttcagcgagcgccgatttcgatgcccaagcagtgaacgttcaggtgtggcctggtgctactgtccgtgaggggcagctggttaatctgacttgcctggtgtggaccacgcaccccgcacaactgacatacacctggtatcaggatgggcagcagagactggatgcacacagtatccccctgccgaacgttacggtcagagacgccaccagttatcggtgcggtgtgggcccaccggggagggctcctaggttatctcgacccataacgctcgacgtgctgtacgcccctagaaacctacgccttacttacctcctggaatctcatggtggtcagcttgctctcgtgttgtgcaccgtcgatagcaggccccccgctcagctggccctgtcccacgccgggcgtctgttagcttctagtaccgccgctagcgttcccaatacacttaggttagagcttagagggccccagcctagggacgaagggttttactcctgttccgctcgcagtcccctgggccaagctaacaccagcttggagctgcgccttgaaggcgtaagggtgatcctggcgccagaagcagctgtgcctgaaggggcaccgattaccgtgacctgtgctgacccagccgctcacgcacctaccctctatacgtggtatcataatggccgttggctgcaggaggggccagctgctagcttaagcttcctggtagctacacgtgcacatgcgggagcctacagttgccaggctcaggatgcacagggaactcgctcatcgaggccagctgcccttcaagtactgtacgcccctcaggatgctgtgctcagttcctttagagattcacgcgcccgatctatggctgtcattcagtgtaccgtagattctgagcctcccgccgagcttgcgttaagtcacgacgggaaggtgctcgctacgtctagcggcgtgcacagtctggcctccggcactggacatgtccaagtggccaggaacgctttgcgcctccaggtgcaagatgtgcctgccggggacgacacatacgtctgcacagcgcagaatttgctcggaagcatcagcactattggaagacttcaggtcgagggggcccgggtggtggcggaaccagggctggatgtgcccgaaggcgccgctttaaacctgtcctgtaggttactgggcggacctggcccagtggggaactcaacatttgcttggttctggaatgaccggcgtctgcacgcagagcctgtgccgacactggcttttacacatgtagcccgcgcccaggcaggcatgtaccactgtctagctgagttacccacaggtgctgcggcatccgcgccagtgatgctgcgcgttctctacccgccaaaaacacccaccatgatggtctttgtggaacccgaaggcggattgcggggaattctcgattgcagggtggacagcgaaccactcgccagtctgacactgcacctgggcagtcgactggtcgcctcatcccagccccaaggcgcaccggccgagcctcatatccacgtgctggcctctcccaatgccctccgggttgatatcgaggctctgcgcccctcggatcagggagaatacatttgcagcgccagtaacgtgttggggagtgcctcgacctccacgtacttcggggttagagccctgcataggctgcatcaatttcagcagctgctctgggtactcggcctcctggtggggctgctcttgcttctactaggcctgggagcttgttacacctggtcgtctctgatccttatgcagcctcacgtaagaccgcagcccgtgccccacccttgggcagatcagtggtgctgcctgcccagcgggggtgagtctggtcaaaacttgtag

SEQ ID NO: 5179 - DNA, 708 bp, synthetic construct
  misc_feature 1..708: note = source = /note="Description of Artificial Sequence: Synthetic coding sequence"
  source 1..708: mol_type = other DNA
atgactgtgttggcaccagcttggtcacctacaacgtacctgctactgctgctcttgctatcttctgggctatctggaacccaggattgttccttccagcattcacccatctcctctgattttgccgtgaagattagggagctatctgactacctgctgcaggactatccagtgaccgttgcctccaatctgcaggacgaagagctttgtggggggttatggagactggtgctcgcacagcgttggatggagcggttaaaaactgtcgcgggctctaagatgcaggggctgcttgagcgtgttaacacggagatacattttgtcacgaagtgcgctttccagcccccccctagctgccttcggtttgtgcagaccaacatatctagattgctgcaggaaacatctgagcagctggtcgccctcaaaccctggattaccagacagaacttttctagatgtttggagctccaatgccagcctgattctagcaccctgcctccaccttggtcaccaagacccttagaagctacagcccccacagcgccccagccccccctcctcctgctgttgctcctgcctgttgggctgctgctgctagcggccgcatggtgtctgcactggcagagaactaggaggcggacccctcgccctggagagcaggtcccccccgtcccttctccccaggacctcctcctcgtggaacattag

SEQ ID NO: 5180 - DNA, 3297 bp, synthetic construct
  misc_feature 1..3297: note = source = /note="Description of Artificial Sequence: Synthetic coding sequence"
  source 1..3297: mol_type = other DNA
atgacgctacaagagttagtgcacaaagctgccagctgctatatggatcgcgtggccgtgtgttttgacgaatgtaacaatcagctgcctgtgtactatacgtacaaaactgtggtgaatgctgctagcgagttaagcaatttcttgttgctccactgcgatttccagggcattcgggaaatcggtttatactgtcagcctggcattgatctgccctcttggatcctcggtatactccaagtgcccgcagcttatgtcccaatcgagcctgactctccccctagcctgtccacccattttatgaaaaagtgcaatctgaagtatatccttgtggaaaagaaacagatcaacaaatttaagagctttcacgagaccttactgaactacgacactttcacagtggaacacaacgaccttgtgctctttcgcctgcactggaaaaatacagaagtgaatctgatgctcaatgatgggaaggagaagtacgagaaggaaaagattaagtccatctcttccgagcatgtaaacgaggaaaaagctgaggagcacatggacctgaggctcaaacattgtctcgcgtacgtactccacactagcggtaccacaggcatcccgaagattgttcgcgtacctcacaagtgtatcgttcctaatatccagcatttccgcgttcttttcgacattacacaagaagatgtcctctttctcgcaagcccgctaacctttgacccttccgtggtggagatctttctcgccctgtcctcgggcgcaagccttctgatcgttcctacttctgttaaactgctgccctcaaaactggcctctgtgctcttctctcatcaccgcgttacagtgctgcaggcaactccaactctgctaagacggtttggatcccagctgataaaatccactgtgctctctgccactacgtccctccgagttctcgcgctgggtggcgaggccttcccctcgctcacagtgctcagatcatggaggggagagggaaataaaacccagatctttaatgtgtacggaattactgaagtgtcgagttgggcaaccatttatcgaatacccgagaagactctcaactcaactttgaaatgtgagcttccagtgcagctcggattccccctgctggggactgtcgtcgaagtgcgggacaccaatggctttactatccaggaggggagtggacaagtctttctagggggtcgaaatcgcgtgtgtttcttggacgacgaggtcactgttccccttggtacaatgcgagccacaggcgattttgtcacagtcaaagacggcgaaattttcttcctgggtaggaaagatagtcagatcaaacggcatggtaagcggctgaacatcgaactggtgcagcaggttgccgaggagctgcagcaggtcgaaagttgcgctgttacgtggtataaccaggagaagctgatcttattcatggtctccaaagacgcatccgtgaaggagtatatctttaaagagctgcagaagtacctccctagccatgccgttcccgacgaattggtgcttattgattctctgccgtttacttcgcacggcaaaattgatgtatcggaattgaacaagatctacttgaattacattaatttgaagtctgagaacaagctgtcaggtaaggaagacctttgggagaagctacagtatctatggaagtccaccctaaatctccctgaggacctgctgcgcgtgccagacgagtctctgttcctgaattccggaggagacagcctgaaatctatccgcctgctatcagagatagagaaactggtgggcactagtgtgccggggctgttagaaatcatactgagcagcagtattctggaaatctacaaccacattctgcagaccgtggtgccagacgaagatgtcacgtttaggaagagttgcgccaccaagagaaagctgtctgacattaatcaggaagaggcctcaggcacatccttgcatcagaaggcgattatgaccttcacatgccacaacgagattaacgccttcgtggtgttgtcccggggatcccagatcttgtccctcaattcaacccggtttcttacaaagctgggccactgttcttcagcctgcccgtcagactcagtgtcccagactaatatacagaatcttaaaggacttaactcgcccgtcctgatcgggaagagcaaagatcccagttgcgtggctaaggtcagcgaggaaggcaagccagcgataggtacacagaagatggagctgcacgtacgctggcgcagtgacacaggcaaatgtgtggacgcttctccattggtcgtcatccctacgttcgacaaaagttctactactgtgtacatcggaagccatagtcacaggatgaaagcggttgatttttatagcgggaaggttaaatgggagcagattttgggtgaccgcatagagtcttcagcgtgtgtctccaagtgcggaaacttcatagtcgtgggatgttataacggacttgtctacgtgctgaagtcaaattcaggcgagaaatactggatgtttactactgaagatgcagtaaaatcctcagcaacgatggaccccactacgggtctcatctacataggctcccacgatcagcacgcctatgcactcgacatctatcgaaaaaagtgtgtatggaaatcaaaatgcggcggaaccgtgttctcctccccctgccttaacctgattccccaccatttgtacttcgccaccttggggggcctgctgctggccgttaaccccgccactggcaacgtcatttggaagcacagttgtggcaagccgctgttctcttcccctcagtgttgctcccagtatatctgcatcggatgcgttgacggcaacctgctgtgtttcacacattttggcgagcaggtgtggcagttttctacgtcaggtcctatcttttccagcccgtgtacctctccctcagagcagaagatattttttggcagccatgattgctttatatactgctgcaatatgaaaggccatttacagtggaagtttgagacgactagtcgggtatacgccacccctttcgcctttcacaattacaacggaagcaacgagatgttgctcgctgctgccagtacggacggaaaggtttggatcttggagtcccaatcaggccagctgcaatctgtctacgaactccctggggaggtattctccagccccgtggtacttgagtctatgctcattataggctgcagagacaactatgtttattgcttggatctgctcggaggcaatcagaagtag

SEQ ID NO: 5181 - DNA, 774 bp, synthetic construct
  misc_feature 1..774: note = source = /note="Description of Artificial Sequence: Synthetic coding sequence"
  source 1..774: mol_type = other DNA
atggctagcaagatcggcagtaggcgatggatgcttcagctcattatgcagctaggatccgtgctgctaacacgatgtccattttggggctgttttagtcagttgatgctgtacgcggagcgcgctgaagcaaggaggaagcctgatattcccgtgccttatctgtactttgacatgggagctgctgtgctctgcgcttcttttatgtccttcggcgtgaagaggcgttggttcgcacttggcgcggcactacagctcgctattagcacttatgccgcatatattggtgggtatgtgcactacggtgattggctcaaggtaaggatgtacagtcggacagtggcgataatcggcgggttcttagtcctcgcttccggcgccggcgagctctatcgccgcaagcccaggagtcggagccttcaatcaactggtcaagtatttcttggcatctacctgatctgcgtggcgtactcccttcagcactcaaaagaagatcgcctggcctacctgaatcacctgccaggaggagagctgatgatccagctcttttttgtgttgtatggaatcttggccctagctttcctgagcggctattacgtgacgcttgctgctcagattttagccgttctgctaccacctgttatgcttcttatagatggtaatgtggcatactggcacaatacccggcgggtggaattctggaatcagatgaagctgctcggggagtccgtgggcatcttcgggacggccgtgattctggccacagacggatag

SEQ ID NO: 5182 - DNA, 2118 bp, synthetic construct
  misc_feature 1..2118: note = source = /note="Description of Artificial Sequence: Synthetic coding sequence"
  source 1..2118: mol_type = other DNA
atggagaagccaaggtctatcgaggaaacgccaagcagcgagccaatggaggaagaagaagacgacgatctcgaactgttcgggggctacgattcatttaggagttataactcttctgttggttccgaaagcagttcgtacttagaagaaagctcggaagcggaaaacgaagacagggaggccggagagctgccaacctctccgctgcacctattgtccccaggcacccccaggagcctcgatggttccggctcagagcccgcggtctgcgagatgtgtggaattgtgggtacccgcgaggccttcttttccaagaccaaacgattttgctcagtaagctgcagtcgctcctacagctcgaactcaaagaaagcctcaatccttgcccgactgcaggggaagccgccaaccaaaaaagcaaaagtgctgcacaaggctgcctggagtgcgaagattggagccttcttacattctcaggggacaggtcagctggcggacgggacacccactggtcaggacgccctagtgctggggtttgactgggggaagtttctgaaggatcattcctacaaagcagcgccagtttcatgctttaaacacgtcccactctatgatcagtgggaggatgtcatgaaaggaatgaaggtcgaggtgctgaattctgacgccgtgctgccgtcacgagtttactggattgcttcagtgattcagaccgcaggttacagagtattgctccgctatgagggcttcgaaaacgacgccagccatgatttttggtgcaacctgggcacagtagatgtgcaccctatcggatggtgcgccatcaattccaagattctggtgcctcctaggactatccacgcaaaatttaccgattggaagggctatctcatgaaacgtctggtgggcagtagaacgctgccagtggatttccatataaaaatggtggaaagcatgaaatacccttttagacagggcatgagactcgaagtggtggataagagccaggtatctagaacgcgtatggccgtggtagatacagtcatcggaggacgactgcgtctactgtacgaagacggtgacagtgacgatgacttctggtgtcacatgtggagtcccctaattcatccagtaggttggagcagaagggtaggtcatggcattaagatgagcgagaggcggagtgacatggcccatcaccccacattcaggaagatctactgcgatgccgtgccttacctatttaagaaggttcgggcggtctataccgaaggaggttggtttgaggagggaatgaagctggaggccattgacccattaaacttgggaaatatttgtgtggccactgtttgtaaggtgttgctagacggatatctgatgatatgcgttgacggggggccttctactgatggtttggactggttttgctaccatgccagcagtcacgccattttccctgccacattctgtcagaagaatgacatcgagttaacaccccccaagggctatgaggcccagaccttcaactgggagaactatcttgagaaaacaaagagtaaagccgcgccatcccggctctttaacatggactgccccaaccacggcttcaaagtgggaatgaagctggaggctgtagatctaatggaacctcgcctcatctgcgtggcgaccgtgaaaagagtggtgcatcgactgctatcaatccacttcgatggctgggattcagagtatgatcagtgggtggactgtgagtcacctgatatctaccccgtgggctggtgcgaactcaccggctaccaactgcagccaccagtcgcagccgaacccgcgacgccattgaaggcaaaagaggccaccaaaaaaaagaagaagcagtttgggaaaaaacggaaacggattccgcccacaaagacacgccccctgcggcagggcagcaagaagccgctgctggaagacgacccgcagggggcccgcaagatttcctctgagccagttcccggggaaataatagctgtacgggtcaaggaagaacatttagatgtggctagtcccgacaaggcgagttcacctgaacttccagttagcgtggagaatattaagcaggaaacagatgactag

SEQ ID NO: 5183 - DNA, 2103 bp, synthetic construct
  misc_feature 1..2103: note = source = /note="Description of Artificial Sequence: Synthetic coding sequence"
  source 1..2103: mol_type = other DNA
atgagcagaagaacccgatgcgaagatctggatgagctgcattatcaggacactgattctgatgttcctgagcagcgggacagtaagtgcaaggttaagtggactcacgaggaagatgagcagctgagggccctcgtgcgtcaattcggacagcaggactggaaattcctggcatctcactttcccaatcgtacagaccaacagtgccagtatcgctggctgagagtccttaatccagacctggtgaaagggccttggaccaaagaagaggatcagaaggtaattgagcttgttaagaagtacggaacgaaacagtggactctgattgcaaagcacctcaaagggcgcctggggaagcagtgcagggagcgctggcacaatcatctgaacccagaggttaaaaaatcctgttggacggaggaagaagaccggatcatttgtgaggcccataaggtgttgggcaatcgatgggcagagattgccaaaatgctacccggccggactgataacgccgtcaagaatcactggaattctacaatcaaaagaaaagtggataccggtggattcttaagtgagagtaaggattgtaaaccaccagtctacttgttgttggagcttgaagataaggatgggctccagtcagcccagcccacggagggccaagggtccttgctaactaactggccgtctgtccccccaactatcaaagaggaggaaaactctgaagaggagctcgccgctgccacaacctcaaaagaacaggagcccatcggcaccgatttggacgcagtccggacaccagagcctttagaggaatttcctaaacgtgaggaccaggaaggatctccccctgagacctccctgccttacaagtgggtggtggaagctgccaatttattgatccctgcagtggggagcagcctctcagaagccctggacctcatcgagtctgatcctgatgcgtggtgtgacctgtccaagttcgacctacctgaggagccttcagcagaggattctattaataactctttggtgcagctacaggctagccatcagcagcaggtcctcccccctcggcagccttcagccctggtgcctagcgtcacagagtaccgcctggacggccacactatttctgacctgtcccggtcctctcgaggcgaactgatccccatcagcccctccacggaggtcggaggttctggtatcgggaccccaccaagcgtactcaagagacaacggaagcgccgagtggctctgtccccagtcacggagaattctacatccctgtcttttctggattcctgtaactctctgacccctaagagtaccccggtgaaaacactcccttttagcccgtcccagtttcttaatttctggaataaacaggataccctggagttggagtcgccctccctgacatctacacccgtgtgctcacagaaggtcgtcgtgaccacaccgctgcatagagataagaccccactccaccaaaagcacgcagcgtttgtcactcccgaccagaaatactctatggacaatacacctcacaccccaacccccttcaagaacgctctggaaaagtatgggccgctgaaacctctgccccagactccacacctggaggaggacctgaaagaggtgttgagaagcgaagccggtatcgaactaattattgaagacgacatacgacctgaaaagcagaagcgcaagccaggcttgcgacggtcgcctataaagaaggtaagaaaatcactggccctggatattgtggatgaagacgtcaagctcatgatgtccactctgccgaagtcactgagccttccgactaccgccccaagtaactcctcttccctgactttgtctgggatcaaggaggataattctctgctaaatcagggtttccttcaggccaagcctgaaaaggctgccgtggcccaaaagcctcgctctcactttacaacccctgcccctatgtctagcgcttggaagactgtggcttgcggcgggaccagggaccagctttttatgcaagagaaagcccggcaattactcggtagactgaagccgtcccatacttctcggaccctgatcctgagttag

SEQ ID NO: 5184 - DNA, 528 bp, synthetic construct
  misc_feature 1..528: note = source = /note="Description of Artificial Sequence: Synthetic coding sequence"
  source 1..528: mol_type = other DNA
atgctgcgtaccgaggtccctcggctcccacggagcaccaccgcgatcgtatggagctgccatttaatggcgaccgccagtgcgatggctggcccttcatcagaaactacgtccgaggaacagctcattacccaggagcccaaagaggctaacagcaccaccagtcagaagcaaagcaaacagaggaagcgcggccgtcacggtcccaggaggtgtcattccaactgccggggagatagcttcgccacctacttccgtagagtccttaaacaggtccatcagggccttagtctgagcagggaagctgttagcgttatggacagccttgtgcacgacatactggaccgcattgcgaccgaagccggaaggcttgcccgcagtacaaagcgccagacgattactgcgtgggaaacgcgcatggctgtgagactgctcctgccaggccagatgggaaaactagcagaaagtgaaggcaccaaagcagtgctcagaacgagcttatacgccattcaacagcagagaaagtag

SEQ ID NO: 5185 - DNA, 624 bp, synthetic construct
  misc_feature 1..624: note = source = /note="Description of Artificial Sequence: Synthetic coding sequence"
  source 1..624: mol_type = other DNA
atggcccctttcgagccactcgcgtctggtattctgcttctgctgtggctgattgcgcctagcagggcgtgcacctgtgtgcctccacacccccagaccgctttttgtaactctgaccttgtcatcagagccaaattcgtggggactcctgaagtgaaccagacaacgctttaccaaagatatgaaattaaaatgacaaaaatgtataaggggtttcaagccctgggagacgctgccgacatcagattcgtttacactcctgccatggagtcggtttgcggctattttcaccgctcccacaatcggtccgaagagttcctcattgcgggcaaactccaggatggcctgctgcatattactacatgtagcttcgtggccccctggaattccctgtccttggcgcagagacggggttttacaaagacgtacacagtggggtgtgaggagtgtactgtttttccttgcctctctatcccctgcaagcttcaatcagggacccactgtttgtggaccgatcagctgctgcaaggttcagaaaagggcttccagagtcggcacttagcttgcctgcctcgcgaacctggcctgtgcacctggcagagtctacgaagtcagatcgcatag

SEQ ID NO: 5186 - DNA, 1686 bp, synthetic construct
  misc_feature 1..1686: note = source = /note="Description of Artificial Sequence: Synthetic coding sequence"
  source 1..1686: mol_type = other DNA
atggcagatcacaaccctgattccgacagcactccgcggactctactcaggagagtcctggacaccgccgatcctagaacgccacgacgcccgaggagtgcccgagccggagcccgccgggccctcttggaaacagcctctcctaggaaactgagcggccagacgcggaccattgcccgcggcagatcacatggggcacgctccgtcggcagatccgctcacatacaggctagtggacaccttgaggaacagacacccaggactctgctcaagaatattctccttaccgcgcctgagtcttctatcctgatgcctgagtctgtggtcaaaccggtgccagccccccaggcagtccagccatctcgtcaggagagtagttgtggttctctggagttgcagctacccgaactggagcccccaacgacactggctccggggctcctggctcctggcagaagaaaacaaaggttacgcctttctgttttccaacagggcgtggaccaggggctgtcactctctcaggagccacaggggaatgctgatgcgagctcactgacacggagtcttaacttgactttcgcgaccccacttcagccgcagagcgtccagaggcccgggctggcacgacgacccccagctcgccgggctgttgacgttggggcttttctccgtgacctacgagatacctctctcgctcctcctaacattgtgttagaggatactcagcctttttctcagcccatggtagggtcccctaatgtgtaccactctttaccctgtacccctcataccggtgccgaagacgctgagcaggcagctggccgcaagactcaaagtagcggacctgggctccagaaaaacagtcctggaaagcctgcccaattcctcgctggagaagcagaggaagtgaatgctttcgccctgggttttctctccacatcttcgggcgtcagcggagaggatgaagtcgaaccactgcacgacggcgttgaagaggccgagaagaaaatggaagaggagggggtcagcgtttcagagatggaggccactggagcccagggcccatcgagggttgaggaagcagaagggcatacagaagtcactgaagccgaagggtcacagggtaccgccgaagctgacggaccaggtgcctctagcggggatgaagatgctagcggcagggccgcttcacctgaaagtgctagctccactccagaatcactccaagcccggcgccatcatcagtttcttgaaccagctcccgcccccggggctgcagtcctgagctccgagccagcggagcctctgctcgtccgtcaccctccccggccaaggacaacaggaccacggccgagacaggatccacacaaggctggtctgtcccattatgtgaaattgtttagtttctacgccaaaatgcctatggaaaggaaggcgctggagatggttgaaaagtgcctcgacaaatattttcagcacctctgcgacgatttggaggtgtttgccgcccacgccggtaggaagactgtaaagcccgaagacctagagctgctgatgaggcggcagggcctagtaacggaccaagtttcactccacgtacttgtggagcggcacctgcccctcgaatatcggcagctgctgatcccatgcgcttacagtgggaatagcgtgtttccggcacagtag

SEQ ID NO: 5187 - DNA, 1134 bp, synthetic construct
  misc_feature 1..1134: note = source = /note="Description of Artificial Sequence: Synthetic coding sequence"
  source 1..1134: mol_type = other DNA
atgacagatgacgaatctgaatcggttctgagcgactcacatgagggaagcgaattggaactgccagtgattcagctgtgtggacttgtagaggagcttagctacgtaaactccgcactgaaaacggaaacggaaatgtttgaaaaatattacgccaaacttgagccccgagaccagcggcccccacgattgagcgagattaagatatccgccgctgactacgctcaattccgggggagacggcggtctaagtcccgcacagggatggataggggagtgggactgacagctgatcaaaagctcgagctggttcagaaggaagtggccgacatgaaggatgatctgaggcatacccgggccaacgccgaacgtgacctccagcaccacgaggctatcatcgaagaggccgaaatacgttggagcgaggtaagccgggaggttcacgaattcgagaaggacattttaaaggcaatcagtaaaaagaaaggctcaatcctggcgacccagaaggttatgaaatatatcgaggatatgaatcgcagacgcgataacatgaaagaaaaactgagacttaagaacgtgtccctcaaagtccagaggaagaaaatgctgcttcagttaagacagaaggaagaagtcagcgaggctctccacgatgttgattttcagcaactgaagattgaaaatgcccaattcttagaaactatcgaggctaggaaccaggaactgacccagctgaaactgtcttcagggaacaccctccaggtgctcaatgcatacaagtctaagctgcataaagccatggagatctacctgaatctggataaggagattctgctgaggaaagaactcttggagaagatagaaaaggagactctgcaagtggaggaggatcgggccaaggccgaggccgtgaataagagactgaggaaacagctggccgagttcagagcaccacaggttatgacttacgtcagggaaaagatcttaaatgccgatcttgagaaaagcattcgtatgtgggaacggaaagtagagattgccgagatgtcactgaagggacaccgaaaagcatggaataggatgaaaattaccaatgagcagctgcaggctgactatctggcaggcaagtag

SEQ ID NO: 5188 - DNA, 1548 bp, synthetic construct
  misc_feature 1..1548: note = source = /note="Description of Artificial Sequence: Synthetic coding sequence"
  source 1..1548: mol_type = other DNA
atggaggcacgggaacccggacgaccaacaccgacctaccatctcgttcccaacacctcgcaatcacaggtggaagaggatgtgagcagccctccacaacgtagcagtgagacaatgcagttgaagaaggagataagcttgcttaacggtgttagcctggtcgttgggaacatgattggatccggaattttcgtttcacccaagggcgtccttgtgcacactgcctcttacgggatgagcttgatcgtctgggccatcgggggcctgttctcagtggtgggggccctttgttacgctgagctcggcacaaccatcactaaaagcggcgcctcctatgcatacatcttggaagcattcggaggtttcattgcatttatacgcctttgggtttcattgttggtagtagagcctaccggtcaggctatcatcgccatcacctttgccaactatatcatccagccgagtttcccctcatgcgacccgccatatctcgcgtgcagattgttggcagccgcctgcatttgcctcctgacattcgtgaattgcgcatacgtgaagtgggggactagagtgcaagacacttttacctacgctaaggtagttgcactgatagccatcattgtcatggggctggttaagttgtgccagggacacagcgagcatttccaggacgcctttgagggaagctcctgggacatgggcaatctctccctcgctctgtacagtgccctgtttagctattcgggatgggacaccctcaacttcgtaacagaggagattaagaatcctgaaagaaacttacccctggccattgggattagcatgcctattgtaacccttatctacatcctgacaaacgtggcatattacactgtacttaatatttctgatgtgctgtcaagcgacgccgtggccgtgaccttcgcagaccagactttcggaatgtttagctggacaattccaatagcagtggctctttcatgcttcggaggcctgaacgcatccatattcgcaagttcacgtctttttttcgtaggttctcgagagggacatctaccagatctgctgtccatgatccacatcgagcgcttcacccccatccctgctttattgtttaactgtactatggcactcatttatttaatcgtcgaagatgtgtttcagctaattaactatttttctttttcgtactggttcttcgtgggcctgagcgtggtgggtcagctctatctgcgttggaaggaaccaaagaggccgcggcctcttaaacttagtgttttcttccctattgtgttttgtatctgctctgtttttctagttatcgtgcctctattcacagacactatcaattccctcataggcattggcattgctttatcaggcgtgcccttctatttcatgggcgtgtacctccccgaatctcgaaggcctcttttcattcgtaacgtgctggctgctatcacaagggggacccagcaattgtgcttttgtgtgctcacagaattggatgtagctgaagaaaaaaaggatgagagaaagaccgattag

SEQ ID NO: 5189 - DNA, 1623 bp, synthetic construct
  misc_feature 1..1623: note = source = /note="Description of Artificial Sequence: Synthetic coding sequence"
  source 1..1623: mol_type = other DNA
atgaatggggaggctatttgtagtgcacttcccacaatcccgtaccacaagctggccgatctgcggtatctctcgaggggagcgtctggcactgtctcctccgcccggcacgccgattggcgggtgcaggtggccgttaagcacctacatattcacaccccattgctggatagcgagagaaaggatgtcctgagagaagctgagatcttacataaagcaagatttagctatattctgcccatcctgggaatatgtaacgagccagaattcctcggaattgtgacggagtacatgccaaatggttcactgaacgagctgttgcaccggaaaacagagtacccggatgtcgcgtggcccctgcgcttcaggatcctgcatgagatcgccctgggcgtgaattacctccataacatgacccctcccctcctgcaccatgatctcaaaacccagaatatcttattagataacgagttccacgtcaaaatcgccgactttggcctctctaaatggcgaatgatgagtttgtcccagagcaggagcagtaaaagcgcacccgaaggtggtacaatcatctacatgccgcctgaaaactacgagccaggacaaaagtctcgcgcatcaattaagcatgacatctatagttatgccgttataacctgggaggtgctttctcggaagcagccttttgaggacgtgacgaatccgctgcagatcatgtattcagtgagccagggacaccgacctgtgatcaatgaagagagcctgccatatgatattccgcatcgcgcgcgcatgatcagcctcatcgagtcagggtgggcccaaaatcccgacgaaagaccctcattcctaaagtgtcttatcgagttagaacctgtcttgcgaacgttcgaagagatcacatttctagaggcagttattcagctaaaaaaaacaaagctacagtctgtttcgtccgccatacacctgtgtgataagaagaagatggagttaagtctgaatatacctgtaaaccacggccctcaagaggaatcctgtggtagttctcagctgcacgaaaactcaggcagtcccgagacctctaggtccctccccgcccctcaggacaacgactttctcagccggaaagcgcaggattgttactttatgaagctgcatcattgcccaggcaatcattcctgggattccacaataagtgggagtcagagggcggccttttgcgaccataaaacgactccctgctcctcagccatcatcaatccactttcaaccgcggggaatagcgagcggctgcagccaggcattgctcaacaatggattcagtctaagagggaggacattgttaatcagatgactgaagcatgtttgaatcaatcattggacgcactgctctctcgcgacttgataatgaaagaggattatgagctagtatccacaaagccgacccgtacaagcaaggtgaggcagctgttagatacaacagacattcagggcgaagaatttgcaaaagttatcgtccagaaacttaaggacaacaagcagatggggttgcagccctatcccgagatattagtagtgtccaggagcccatcactgaacctcctgcagaacaaatcaatgtag

SEQ ID NO: 5190 - DNA, 2079 bp, synthetic construct
  misc_feature 1..2079: note = source = /note="Description of Artificial Sequence: Synthetic coding sequence"
  source 1..2079: mol_type = other DNA
atgcgggcctgtgctggcagtaccagagaggccgggagtggagcccaggacttatccaccttgctgtgtctagaggaatccatggaagagcaggatgaaaaaccccctgaaccaccaaaggcttgtgcccaggatagcttcctgcctcaggagatcatcatcaaagttgaaggcgaggataccgggtctctgaccattccgtctcaggagggtgtcaacttcaaaatcgtgaccgtggattttacccgcgaggagcagggtacctggaaccccgcgcagcgcaccttggatcgcgacgtgatacttgaaaaccaccgagatctggtcagctgggatctcgctaccgctgtgggcaagaaagattctacttcgaagcagagaatatttgatgaagaacctgctaacggagtgaagatcgaacggttcactcgagacgacccttggctttcctcctgcgaagaagtggacgactgtaaagaccagcttgaaaaacagcaagaaaaacaggagatcctcctgcaggaggtcgcctttacccaaagaaaggcggtaattcatgaaagagtgtgtaaaagcgatgagacgggcgagaagtccggccttaactctagtctgtttagctcacctgtgattccaatccgtaaccacttccacaagcacgtcagccatgcaaaaaaatggcatctcaatgctgctgttaattcacatcagaagatcaatgagaatgaaacgctttacgaaaataacgagtgcggaaaaccaccccagtctatccatttgattcaattcacccgcacgcagaccaaagataaatgttacggtttttctgaccgaatccagagcttctgccacggtacaccccttcacatccatgagaagatccacggtggcggcaaaacgtttgatttcaaagagtgcgggcaggtcctgaaccccaagataagccataatgagcaacagaggattccttttgaggagagccagtacaaatgctctgagacaagtcactcctcctcgctaacacagaacatgcgaaacaacagtgaggaaaaaccattcgagtgtaaccagtgtggtaaaagtttttcctggtcttctcacttagttgcccaccagcgcacacacactggcgaaaagccttacgagtgtagcgaatgtgggaagtccttttctaggagctctcatctggttagccaccagagaacacatacaggagagaaaccttatcgctgtaaccaatgcggaaagagcttctcccaatcttacgtcttggtcgtgcaccagaggacacacacaggcgagaagccatatgaatgcaaccagtgcggtaaatcttttcgacagagttataaacttatcgcccatcaaaggacccacactggcgaaaagccctatgaatgcaaccagtgtggtaagtccttcattcaaagttataaactcatcgcacaccagcgcattcacactggggaaaaaccttatgagtgcaaccagtgtggtaagagtttttctcagagttataagcttgtcgcacatcagcgcacacataccggagagaagccgtttgagtgtaatcaatgtggtaagagtttttcctggtcctctcagctggtggcccaccagcgcacgcacactggggagaagccctacgagtgcagtgagtgcggcaagtcatttaataggagctcacacctggtaatgcatcagaggattcacacaggagaaaagccctacgagtgcaaccagtgtggtaaatcattttcccagtcatacgtccttgtagtgcatcaacgcacacatacaggggaaaaaccctatgagtgttctcagtgtggcaaatcttttcgccagagtagctgcctgacgcagcaccagagaacccacacaggtgagaaaccattcgagtgtaaccagtgtggcaagactttttctctgtcagctcggctgatcgtgcatcaacgtacccacaccggggaaaaaccctttacgtgcatccagtgtggaaaggcctttatcaattcctacaaactaatccgccatcaggccactcataccgaggagaaactgtacgagtgcaactag

SEQ ID NO: 5191 - DNA, 942 bp, synthetic construct
  misc_feature 1..942: note = source = /note="Description of Artificial Sequence: Synthetic coding sequence"
  source 1..942: mol_type = other DNA
atggataacaagaagcgtctagcctacgctatcatacagttcctccacgatcaactgcgtcatggcggactgagctcagatgcgcaggaatcgctcgaggtggcgatccaatgcctcgagaccgcatttggtgtgacggtcgaagatagtgatctcgcgctcccacaaacgcttcccgagatattcgaggcagccgctacgggcaaagaaatgccacaggacctcagatcccccgctcgaacacctccaagcgaggaagattctgcagaagcagaaaggctcaagaccgaaggaaacgagcagatgaaagtggagaacttcgaagctgccgtacacttctacgggaaagctattgagctgaaccctgccaacgctgtgtatttctgtaatagagccgcagcatacagcaagctggggaactacgctggggccgttcaggattgtgaaagagcaatttgtatcgaccccgcttacagcaaggcttatggcaggatgggccttgctctcagctcccttaacaaacacgtggaggctgtcgcatattacaaaaaagcgcttgaattagacccagataacgaaacctataagtcaaaccttaaaatagcagaactcaagctccgcgaagcaccatcacccacgggtggggtcggctccttcgatattgcaggactcttgaataaccccggattcatgagcatggcatctaatctcatgaacaacccgcagatccagcagctcatgtctgggatgatttcgggcggcaacaatcccctggggacccccgggacctccccttcccagaatgatctagcctctctgatccaggccgggcagcagtttgcacagcaaatgcaacaacagaacccggagttgatagagcagctgagaagccagattcgctcaaggactccctcagcctccaatgatgatcagcaagaatag

SEQ ID NO: 5192 - DNA, 1584 bp, synthetic construct
  misc_feature 1..1584: note = source = /note="Description of Artificial Sequence: Synthetic coding sequence"
  source 1..1584: mol_type = other DNA
atgtatcagcccgaggatgataacaacagtgatgtgacctctgacgatgatatgacgcgcaatagacgcgagtcctcacccccccactctgtgcactccttttcaggagaccgtgattgggatcgcaggggccgatccagggacatggagccccgcgatcggtggagccacactcgaaatccacgatcgagaatgcctccgagagacttaagcttacctgtggtagcaaagacctccttcgagatggatcgggaggatgacagggacagtcgcgcctatgagagtcgcagtcaggacgccgagtcttatcagaacgtagttgaccttgctgaggatagaaaaccccacaacacgatacaggataatatggagaactatcggaaactgctttccctagggttcctggctcaggatagtgtgccagccgaaaagcgaaacacagaaatgctcgacaatctgccatctgcagggagccagttccccgacttcaagcatctggggacattcctcgtgtttgaggagctcgtaacatttgaagatgttctggtggacttttcgcctgaggaattgtcaagtctcagtgcagctcaacggaacctgtaccgtgaggtgatgcttgagaactatagaaatctggtatctcttggccaccagttttcgaaaccagatatcatttcacggcttgaggaggaggaatcttatgcaatggaaacggacagcaggcataccgtcatctgtcaaggcgagtctcacgacgacccactggagccgcatcagggaaatcaagagaaattactgacccccatcaccatgaatgatcccaagacactgaccccagaacgcagttatggatccgatgagtttgaaaggtcttccaatctttccaagcagagtaaggatccactcggaaaagatcctcaggagggcacggctccaggaatctgcacaagtccccaatcagcctctcaagagaataagcataatcgatgcgaattctgtaagcggaccttcagcactcaagtcgcccttaggcgccatgaacggattcacactggcaagaaaccctatgaatgtaagcagtgcgcggaagcgttttacctgatgccacacctaaatcgacatcagaaaacccactcaggtcggaagactagcggatgcaatgaaggccgaaaaccctcggtgcagtgcgccaatctgtgcgaaagagtaaggattcactctcaggaagattatttcgaatgcttccagtgcgggaaagccttcctgcagaacgttcacctgctgcagcatttgaaagctcacgaagctgctagagttcttccccctggattgtcacattcgaaaacctacctgattagataccagagaaagcatgactacgtgggggagcgggcgtgccaatgttgcgactgcgggcgagtgttttcgcgcaactcatatctgattcaacattatcggacccatacccaggaacggccataccagtgccagttgtgtgggaagtgcttcgggcgtccttcatatctgactcaacactaccagttgcacagccaggagaagacagtggagtgtgatcattgctag

SEQ ID NO: 5193 - DNA, 444 bp, synthetic construct
  misc_feature 1..444: note = source = /note="Description of Artificial Sequence: Synthetic coding sequence"
  source 1..444: mol_type = other DNA
atggccctgaagcgaatccagaaagaactgaccgacctgcagagagacccaccagctcagtgcagcgccggcccggtgggggatgacctgtttcactggcaggcaacgataatggggcctaacgactctccatatcagggtggggtgttctttttaaccatccattttccaacagattacccgtttaaaccaccaaaggtggcgttcacaaccaaaatttaccatcccaacataaattccaacggcagcatttgcctggacatccttcgctctcagtggagtcccgcacttacggtgtccaaggtccttctcagcatctgttctctgctttgcgatcccaatcccgatgaccccctcgttccagagattgcgcacacctataaagctgacagagaaaagtataacagactggcccgagagtggactcagaagtacgctatgtag

SEQ ID NO: 5194 - DNA, 3072 bp, synthetic construct
  misc_feature 1..3072: note = source = /note="Description of Artificial Sequence: Synthetic coding sequence"
  source 1..3072: mol_type = other DNA
atgttccacctccgaacttgtgccgccaagcttaggcccctgaccgccagtcagacggtgaagacttttagccagaatcggcccgctgctgcgaggacctttcagcaaatcaggtgttacagcgcgcctgtggctgccgaaccctttctgtctggcaccagctccaattacgttgaggagatgtactgtgcctggttggagaatcctaagagcgtgcataagtcctgggatatcttttttcggaatacaaacgctggcgccccacctggcacagcctaccaatcgcctctgccattatcacggggttcgctcgcagctgtggcccatgcgcagtcgttggtcgaagcccaacctaacgtggataagctggtcgaggatcacctggcggtgcagtcattgattagggcttatcaaatcagaggccatcatgtggctcagttagaccccctgggcattctggacgccgatttggacagcagtgtacctgccgacatcatctcctcaaccgataaactcgggttctatgggctggacgagtccgaccttgataaggtcttccatcttcctactactacatttattggtggacaggagagtgccctgcctctgcgggaaatcattaggcgccttgaaatggcctactgccagcatataggagtagaatttatgtttatcaatgatttggaacagtgccagtggattcgtcagaaattcgagacaccagggatcatgcagttcaccaatgaggaaaaacggaccctgctggctcggctggtgcggtctaccaggttcgaagaatttttgcaaagaaaatggtcttcagaaaagaggtttggcctcgagggctgtgaagtcctaatccccgctcttaagaccataattgacaagagttctgagaacggggttgattacgttatcatgggtatgccccatcgcgggcggctgaacgtgctggccaacgtgatacgaaaggaattagagcagatcttttgccagttcgactcaaagctggaggctgcagacgagggttccggggacgtgaagtaccacctcggaatgtatcataggaggatcaaccgagttaccgaccgcaacattactctatcactcgtagctaacccgagccacttagaggccgccgatcccgtagttatgggtaagactaaggccgaacagttctattgtggtgacacagaagggaagaaagtaatgagcatcctcctgcatggggatgcagcttttgcagggcaggggatagtttatgagacgtttcacctgagtgacctcccatcttacaccactcacgggacagtgcacgtagtagtcaataaccagattggcttcacgacagaccctaggatggctagatccagtccctacccgacggacgttgcaagggtcgtgaacgctcccatctttcacgtgaattccgacgaccctgaggctgtgatgtacgtctgcaaagttgctgctgaatggcgttcgacctttcacaaagacgttgtagtcgacctagtgtgttaccggcggaatggacataacgaaatggatgagcctatgttcacccagcccttgatgtataagcagattcggaaacagaaacccgtcctgcaaaaatacgctgaactgttggtgagccagggggtcgtgaaccagcctgaatacgaggaagagattagtaagtatgataagatctgcgaagaggcattcgcccgctctaaagacgagaaaattcttcatataaaacactggctggattccccttggccgggcttttttacactcgacggacagccgcgcagtatgagttgcccctctactgggctgactgaagacattttgacccatattggtaacgtggcgagttcggtccccgtggagaatttcaccatccacggcggactctccaggattctgaagacccggggtgaaatggtcaaaaatcgtacggtggactgggctctcgctgaatacatggcttttggaagcctgctgaaggaaggaatccatattagactcagcgggcaagatgtggaaagaggtaccttctctcataggcaccatgtcttgcacgaccaaaatgtggacaagaggacttgtattccaatgaatcatttatggcccaaccaggccccctacaccgtttgtaactctagcctgtcggagtacggcgtgctggggtttgagctcggcttcgcaatggcatcccctaacgctctggtgttgtgggaagcgcaatttggtgattttcacaacactgctcagtgtatcattgatcaattcatctgtccgggccaggcaaagtgggtgagacaaaacggaatcgtgctcttattaccccacgggatggaagggatggggcccgaacacagttcggcgaggccagaacgctttctccagatgtgcaacgacgaccccgatgtcctgcctgatctgaaagaagcaaacttcgacatcaatcagctctacgattgtaactgggtcgtggtaaattgcagcactccaggaaacttcttccacgtgttgcgtcgccaaatacttttgcctttcagaaaaccactgattatattcaccccaaagagtctgctaaggcaccctgaggctaggtcttcttttgacgaaatgctccctggtacccactttcagcgggtaattccggaggatgggcccgcagcacagaatccagagaatgtcaagaggctgctgttttgcacaggcaaggtatattacgacttaacacgcgagcggaaggcacgcgacatggtgggacaggtcgcgattacacggattgaacaactgtctcctttccccttcgatcttctcctcaaagaggttcagaaatatccaaacgccgagctagcttggtgccaggaggaacataaaaaccagggatattacgattacgtgaagcctcggctcaggactactatttcccgggccaagccagtctggtatgcaggacgtgaccctgccgctgcacccgccactggcaacaagaagacccacctcaccgagctgcaaagacttctggataccgcctttgacctggatgtcttcaaaaatttttcctag

SEQ ID NO: 5195 - DNA, 2667 bp, synthetic construct
  misc_feature 1..2667: note = source = /note="Description of Artificial Sequence: Synthetic coding sequence"
  source 1..2667: mol_type = other DNA
atggaaggggatgattgcgagtttagatatggggatggcacaaacgaggcccaggataacgatttccccactgtggagaggtcccgcttgcaggagatgctgagtctgcttggcctggagacatatcaagttcagaaacttagccttcaggacagcttacagatatcctttgactccatgaaaaactgggccccacaggtgccaaaagaccttccctggaactttcttcgaaagctccaagctctcaatgccgatgcgaggaacactactatggtactcgatgtgctcccagacgcacggccagttgagaaggaaagccagatggaagaagaaattatctattgggatccagccgacgatctggcggcggacatttatagcttttcggagctgcccacacccgacacgccagttaacccactggacctgttgtgtgccttactgctatcttcagactcctttttgcagcaagagatagccctcaaaatggctttatgccagttcgcactgcccctcgtgctgcccgatagtgagaaccattatcatacctttttgctgtgggccatgagaggcatagttcgcacctggtggtcccagcctcctcgcggaatgggtagctttcgagaagatagtgtggtactttcaagagctcccgcattcgcattcgtgcggatggacgtttctagcaatagcaagagccaattgctgaacgccgtcctctcgcctggccaccgacagtgggactgcttctggcaccgagatttgaatttaggcacaaacgcccgggagatttcagatggcctggtcgaaattagctggttctttccctctgggagagaagacctggatatttttcctgaacccgtggccttcctaaaccttcggggagatatcggcagtcactggcttcagttcaagctgttgaccgaaatcagttctgccgtttttattctgactgataatatttccaagaaggagtacaaactactgtactcgatgaaggagagcactactaagtactatttcatactctccccataccgaggcaaaaggaacacaaacctcagatttctgaacaagctgattcccgtactcaagattgatcattcccacgtgctggtcaaagtctcatcgacagattctgacagttttgtgaagagaattcgcgcaatagtcggtaatgtgctccgcgctccgtgtcgacgtgtttctgtcgaggatatggcacacgccgcccgaaaactgggcctcaaggtagatgaggactgtgaggagtgtcagaaagccaaggatcgcatggagcggataacgcgtaaaattaaggacagcgatgcatatcgacgcgacgaactgcgtctgcagggagatccttggaggaaagcggcccaagtggagaaggaattttgccaactccagtgggctgtggaccctccagagaagcatcgtgcagagctgcggaggaggctgttagagctgaggatgcaacagaacggtcatgacccctccagcggcgtacaggagtttattagcggcataagcagcccgtctctgtctgaaaagcagtatttcctgcgatggatggagtggggactggcccgggtggcccagccgagactcaggcaaccccccgagacccttctgacccttcgtcccaagcacggtggcacaactgacgttggcgaacctctctggccagagccattgggggtagaacattttctacgagaaatgggccagttctacgaggccgaaagctgcctcgttgaagccggacgcctgccagccggccagaggcgtttcgcccactttcctggtctagccagtgagctgctccttaccggcttgcccctggagttgattgatggcagtacgcttagtatgcctgtgcgctgggtgacggggttgctgaaagagctgcatgtccgtctggagaggcgcagcagactcgtggtgcttagcaccgtaggtgtgccagggacaggcaagagcaccttgctgaataccatgtttggcctgcgttttgcaaccggtaagagctgtggaccccgcggcgcctttatgcagctgatcaccgtggccgagggattctcccaggacctgggatgtgatcacatcttagtgatcgacagcgggggactgatcggcggcgcccttaccagcgccggagatagattcgaattggaggcatccctagcgactttactgatgggactctctaacgtgaccgtgatctctctggccgagacgaaggacattccagccgctatattgcatgcctttctacggctggagaaaactggacacatgcctaattatcagtttgtctaccagaacctccatgatgtgagcgtgcccggcccacgaccacgcgataagcgccagctgctcgatccaccaggggacctttcccgtgcggctgcccagatggaaaaacagggggatggatttcgagccctcgcaggcctggctttctgcgatcctgaaaagcagcatatctggcatattccaggtctctggcatggagccccgcctatggctgccgtttctctggcgtacagcgaggccatattcgagctcaagagatgcctcctggaaaatatccgcaacggactgtccaatcagaacaaaaatatccaacagcttatcgagctggttagacgcttgtag

SEQ ID NO: 5196 - DNA, 3744 bp, synthetic construct
  misc_feature 1..3744: note = source = /note="Description of Artificial Sequence: Synthetic coding sequence"
  source 1..3744: mol_type = other DNA
atgatgcgggagtgggtgctcctcatgagcgttctgctctgcggtctcgccggcccaacccacctttttcaaccaagtctcgtgctggatatggcgaaagtgcttctcgacaactactgtttcccagagaaccttttgggcatgcaagaggccattcagcaagccattaaatctcacgagattctcagtatcagtgatccacagaccctagcgtccgtgttgaccgccggagtacaaagctcacttaatgatccccgactggtaatctcctatgagccaagcacccccgagcccccgcctcaagttccggctctgacctccctttccgaggaagaattgctggcctggctgcaacgaggactccgacatgaggtgctggaagggaacgtcggctacttgcgagttgactctgtgcccggacaagaggttctttccatgatgggagagttcctggtggcacacgtttgggggaatctgatggggaccagtgcactggtgcttgacctacgacattgcacagggggacaggtgagcgggattccatacatcatttcttatctgcaccctgggaatacaatcctgcatgtggatacaatttacaatagacctagtaatacaacaaccgagatttggacgctcccccaagtcctcggggagaggtatggtgcggataaagacgtggtggtgctcacaagctctcaaacgcggggtgtggccgaggatattgcacacatcctcaaacagatgaggcgtgcaatcgttgtaggggaacgcactggaggcggcgctctggacctgaggaagctgaggatcggtgagtccgattttttctttactgtacctgtttcaaggtcactcggccccttgggaggggggagccagacctgggaaggctccggagtcctcccttgcgtaggaacacctgctgagcaggccctggagaaggccctggccattcttacattgaggagtgcactcccaggcgtggtgcactgcctgcaagaagtgctgaaggattattacacgctggtcgacagggtccctactctactgcagcacctggcttccatggacttttccacagttgtgtctgaggaggacttggtcactaagcttaatgccggcctgcaggccgcctcggaggacccgcgattgctcgtccgagccattggacccactgagacccctagttggcctgcccctgacgcggctgcagaagattctccaggagtggctccggagctaccggaggatgaagctatcagacaggcattggtggacagtgtctttcaggtgtccgtcttgcccgggaatgtgggctacctgcgctttgacagctttgctgatgcctcagtgctcggcgtccttgctccgtacgtgcttaggcaggtgtgggaacctctgcaggacactgaacatcttattatggacttgagacacaaccctggcgggcccagttccgccgttcccctattgctctcctactttcaggggccagaagctggaccggtccatctgttcaccacttacgacaggaggacaaacattacccaggaacatttctctcacatggaactgccaggtccgcggtactccacccagaggggggtgtatctgttgacctctcatcgcaccgcaactgcggcggaggaatttgcttttctcatgcagtccctcggatgggctactctcgtcggcgaaatcaccgccgggaatctgttgcacacccggaccgtccccctgctggatactcccgaaggctctctcgctctgaccgttcccgtgctgacttttattgataaccatggagaggcttggctgggaggtggagtggtcccagatgccattgtgctcgccgaagaggccctggataaagcccaggaagtccttgagttccaccagagcctcggcgccttagtcgaagggaccgggcatttgctggaggcgcattatgccaggcccgaggtggtgggacagacgtccgccctactacgggccaagttggcgcagggcgcatacagaactgcagttgacctggaaagtctcgcctcacagctgaccgccgaccttcaggaagttagtggggatcatagattactggttttccattcgcctggtgagctcgtcgttgaagaggcccctcctcccccccccgccgtgcccagtcccgaagagctaacctatttaatcgaggccctctttaaaaccgaggtcctgcctggacagctaggctatttgcgattcgacgctatggccgagttggagactgtcaaggcggttggccctcagctcgtacgcttggtatggcagcagcttgtggatacagccgccctagtaatagacctccgatataacccaggtagctacagtaccgccatcccgctgctctgctcttatttctttgaagcagaaccacgacagcatctctatagcgtgttcgatcgcgcaacatcaaaagtcaccgaggtttggacgttgcctcaagtcgcaggccagagatatggctcccacaaggacttgtacattttgatgtcacatacatccggttcagccgctgaagcgttcgcccacaccatgcaggacctgcagcgtgctaccgtgatcggagagcccaccgccggaggagcactatcagttggcatctatcaggtaggaagcagccccctgtacgcttctatgccaacgcagatggcaatgtccgccactacgggtaaggcatgggatcttgcgggcgtggagcctgatatcacagtgccaatgagcgaagccttgtccatcgcacaagatatcgtagcccttagggcaaaagtccctactgtgctccagaccgccggaaagctagtggccgacaactacgcttctgctgagctcggcgcgaaaatggccaccaaactcagcgggctccagtcgcgttactccagggtaacatccgaggtggcgttggccgagatactgggagcagatctgcagatgctatctggtgatccccaccttaaagcagcgcacatccccgaaaacgctaaggatagaattcctggcattgttcctatgcagattccttcccccgaagttttcgaagagctgatcaagttctctttccacaccaatgtgttggaggacaatattggatacctgaggttcgatatgtttggcgacggggagcttctcacgcaggtctcaaggcttttggttgagcacatatggaagaagattatgcacaccgatgctatgatcattgacatgcgcttcaacattggcggacctacatcctccatccctatactgtgcagttacttctttgatgaggggcctccagtgctgttggataagatctattctcggccggatgattccgtaagcgagctgtggacgcatgctcaggtggtgggtgagcggtatggctccaagaagtcaatggtgatcctgacttcaagcgtcactgcaggcaccgccgaggagtttacatatatcatgaagagacttgggcgtgccctcgtaattggcgaggtgacctctggtgggtgtcagccaccccaaacctaccatgttgacgacactaacctatacctgactattccgaccgcccggtcggtgggagcgtcagacggatcaagttgggaaggggtgggcgtgaccccgcacgtggtagtccctgcagaagaagccttagccagggctaaagagatgttacagcataaccagctccgggtgaaacggtctcccggactccaagaccacctgtag

SEQ ID NO: 5197 - DNA, 885 bp, synthetic construct
  misc_feature 1..885: note = source = /note="Description of Artificial Sequence: Synthetic coding sequence"
  source 1..885: mol_type = other DNA
atgaattctgaattggattattacgagaagttcgaggaagtccacggtattttgatgtacaaggactttgttaagtattgggataatgtggaggcattccaggccagacccgacgatttagtgatcgcaacttacccaaagagcggcactacatgggtaagtgagattgtgtacatgatatacaaagagggtgatgtggagaaatgcaaagaagacgtgatcttcaaccgtattccatttctcgaatgcagaaaggagaacctgatgaacggcgtgaaacagctggatgagatgaacagcccccgtatcgttaagacccacctgcccccggagctgctccccgcgtcattctgggagaaggattgcaagatcatctacctgtgccgaaatgcaaaggacgtcgcagtttctttttactatttcttcctaatggtcgccggccaccccaatccagggtccttccccgagttcgtcgagaagtttatgcaggggcaggtcccctatggatcttggtataagcatgtcaaatcctggtgggaaaaaggcaaatccccacgcgtactattcctgttttacgaggacttaaaagaagatattcggaaggaggtaattaagctgatccattttctggagagaaagccctccgaggaactggtggatagaattatccaccacacctcttttcaggaaatgaaaaataatcccagcacgaactatacaacactcccggacgaaataatgaatcaaaagctgtcaccattcatgcgcaagggaataactggtgattggaagaatcactttactgtcgctctgaatgagaagtttgacaagcactacgaacaacagatgaaagagagtacactgaagtttcgcactgagatatag

SEQ ID NO: 5198 - DNA, 1446 bp, synthetic construct
  misc_feature 1..1446: note = source = /note="Description of Artificial Sequence: Synthetic coding sequence"
  source 1..1446: mol_type = other DNA
atggcttataacgacaccgatcggaaccagacggaaaagttgttgaagcgcgtacgggaattagagcaggaggttcagcgcctgaaaaaagagcaggcaaagaataaggaggactctaacatccgggaaaacagcgccggcgccgggaagaccaagagggcctttgacttcagcgctcacggtcgacgacacgtggccctccggatcgcgtatatggggtgggggtaccagggcttcgcttctcaagagaacacgaacaacactatagaggaaaagctgttcgaagcccttaccaaaacgagactggtggaaagccgacagactagtaattaccatcggtgcggacgaacagataaaggcgtgtccgccttcggacaggttatttcacttgaccttagatctcaattcccccgggggagagactctgaggacttcaatgtcaaagaggaagccaatgctgcagccgaggaaatacgttacacacacatattgaatcgggttctccctccagacatcaggatcctggcttgggcacccgttgaaccttcctttagcgcccgctttagctgtctcgaacgaacgtaccgctatttctttcccagagccgacctcgacattgtgacgatggactatgcggcgcagaagtatgtagggacccacgatttccgcaatttgtgcaagatggacgtcgccaatggagtgataaatttccaacgcacgatcctgagcgcacaggttcagttagtcggccagagccctggcgagggaagatggcaggagccgttccaactgtgccagtttgaggtgacaggccaggctttcctgtaccatcaagtcaggtgcatgatggccatcctatttctcatcggacaggggatggaaaagccagaaattatcgatgagctgctgaacattgaaaaaaacccgcagaaaccccagtattcgatggcagtcgagttccctctcgtcctatacgactgcaaatttgaaaacgtcaagtggatctacgatcaagaggcacaggagttcaacatcacccaccttcagcaactttgggcaaaccatgccgtcaagacccacatgttgtatagcatgctccaggggctcgatactgttccagtgccttgcggtataggcccgaaaatggacggcatgaccgaatggggcaatgttaagccatccgtgatcaagcagacgtctgcgtttgtcgaaggggtgaaaatgagaacctacaagcctctgatggacagacccaaatgtcaaggactggaaagccgcatccagcacttcgtcagaagaggcaggattgagcacccccacctgtttcacgaagaagagaccaaggcaaaaagagactgcaatgataccctagaggaggaaaatacgaatttggagacccctacaaagcgcgtgtgtgtggatactgaaatcaagtctattatctag

SEQ ID NO: 5199 - DNA, 618 bp, synthetic construct
  misc_feature 1..618: note = source = /note="Description of Artificial Sequence: Synthetic coding sequence"
  source 1..618: mol_type = other DNA
atgtctaatttcttgcacctcaaatataatgaaaagagcgtgagtgtcaccaaggcattgacggtacgcttcctgactaaacgcttcattggcgaatatgctagtaatttcgagtctatttacaagaagcacttgtgccttgagaggaagcagctgaacctcgagatctacgacccttgttcacagacacagaaagcgaagttctctctaacttccgagcttcattgggcagatggttttgtcattgtctacgatatttcggacaggtcctctttcgcattcgctaaagcactgatttacaggatccgcgagccgcagacctcccactgtaaacgagccgtggaaagtgccgtgttcttggtagggaacaagcgggatctctgtcacgtgcgagaggtgggttgggaagagggccagaagctggcgctagagaatagatgccagttttgtgaactgtctgcggctgaacagagtctggaagtcgagatgatgtttattagaattattaaggatattcttattaactttaaactaaaggagaagcgcaggcctagtggctccaaaagcatggccaaattgatcaacaacgtattcggtaagcgcagaaagtccgtatag

SEQ ID NO: 5200 - DNA, 1008 bp, synthetic construct
  misc_feature 1..1008: note = source = /note="Description of Artificial Sequence: Synthetic coding sequence"
  source 1..1008: mol_type = other DNA
atgggtaaagtgaaagtcggagtcaacggcttcggcaggattgggcgcttggtgacgcgggcagcctttaactctggcaaggtggatattgtggcaatcaacgacccatttatcgatctgaattatatggtctatatgtttcaatacgatagcactcacggtaaattccacgggaccgtcaaggccgaaaacggaaagctggtgatcaatggcaatcctattacaatcttccaagagagagatccgtccaagatcaagtggggggatgctggggcggaatacgtggtggaatccaccggagtttttactacaatggaaaaagcaggcgcccacttacagggcggggcaaagcgagtgattatttcggccccttccgccgatgcccccatgttcgtgatgggtgtgaatcacgaaaagtacgataatagtctcaagatcattagcaatgcctcatgcaccacgaattgtttggcccctctcgctaaggtgatacatgataacttcgggattgtcgaggggctgatgacgactgtgcacgcaatcactgccacgcaaaagaccgttgatggccccagcggcaagctctggagagacggtaggggggccctgcaaaacatcatcccagcctctactggcgctgcaaaagctgtgggaaaagtcatcccagagctcaacgggaaactcacgggcatggcctttcgcgttcccaccgctaatgtgagcgtagtggacttgacatgtaggctggaaaagcctgcgaagtacgatgatatcaaaaaggtggtgaaacaggccagtgaaggcccacttaagggaatcctcggttatacggaacatcaggtcgtaagcagtgatttcaacagtgatacgcactcctccacttttgacgctggggctggtattgcccttaacgatcactttgtaaagctgatttcttggtacgataatgaattcggatactccaatagggtggtcgatctgatggcccacatggctagtaaggagtag

SEQ ID NO: 5201 - DNA, 597 bp, synthetic construct
  misc_feature 1..597: note = source = /note="Description of Artificial Sequence: Synthetic coding sequence"
  source 1..597: mol_type = other DNA
atggatagcctgctgatgaataggaggaagtttctgtatcagttcaagaatgtacggtgggccaaaggtcgacgggagacatatctgtgctacgtagtcaagagacgggactcagctactagcttctctctggacttcggctacctcaggaacaagaacggatgccatgttgagctcctgttcctgaggtacatttccgactgggatctcgatccgggtcggtgctaccgggtcacttggtttaccagctggtccccgtgctatgattgtgctaggcatgttgctgacttcctgcgtggaaaccctaatctcagcctgagaatttttactgcaaggttatatttctgtgaagaccggaaagctgaacccgaaggtctgcgcagactccatcgtgcgggagtgcagattgcaatcatgacatttaaagattacttttactgttggaacacatttgtagagaatcatgagaggacatttaaggcctgggaaggcctgcacgaaaactctgtaaggctgagcagacaactgcgcagaatcctcctgcctctctacgaggtggatgacttaagagatgcctttcgcaccctaggcctttag

SEQ ID NO: 5202 - DNA, 5472 bp, synthetic construct
  misc_feature 1..5472: note = source = /note="Description of Artificial Sequence: Synthetic coding sequence"
  source 1..5472: mol_type = other DNA
atggccctatcttctgcatggagatctgtcctgcccctctggctgctctggtccgcggcctgctctcgcgccgcctcgggcgacgataacgcattcccctttgatattgaggggtccagcgctgtggggcgacaggatccacccgaaacgtctgagccaagagtagcccttgggcggctgccccccgcagcagagaaatgcaacgccggtttttttcataccctgtccggtgaatgcgtgccttgcgactgcaacggtaactccaatgagtgtcttgacgggagtggttactgcgtgcattgtcaaaggaataccacaggagagcactgcgagaaatgtctggacggctatatcggggatagcattcggggagctccacagttttgtcagccatgcccttgtcccctaccccacctcgccaattttgcggaaagctgttatagaaaaaacggcgctgtacgatgcatctgtaatgaaaattatgccggtcctaactgcgagagatgcgctcccggatactatggaaatcccctcctgattggtagtacttgtaaaaagtgtgactgtagcgggaactcagatccgaacctgatttttgaggactgcgacgaggtaaccggccagtgccgcaactgcttacggaataccaccgggttcaaatgcgagcgttgtgccccaggctattatggcgatgcaaggatcgccaagaattgcgcagtttgtaactgcggtggggggccctgtgacagtgtaactggggagtgcctagaagaaggcttcgagccccctactggcatggactgccccacaatttcatgtgataaatgtgtctgggacctgactgacgctttgcgcctcgccgccctgtcaatcgaagagggaaagtccggggtgctgagtgtaagttccggcgccgctgcccaccggcacgtgaatgaaatcaatgctaccatatatcttcttaagacaaaactctctgaacgcgaaaaccagtatgccctgcggaaaattcagatcaataacgccgagaatacaatgaaatccctgctttcagacgtcgaagaacttgtagagaaggaaaatcaggctagtcgtaagggacaactagtgcagaaagaaagcatggacactattaatcacgcctcccagcttgtagagcaagctcacgatatgcgcgataaaatacaagaaattaacaacaaaatgctgtactacggcgaggagcatgagctctcccccaaagagatctctgaaaagctcgtactggcccaaaagatgctggaagagatacggagtcggcaaccattttttactcagcgtgagctggttgacgaggaggctgatgaggcttacgaactgctgagccaggctgaatcttggcagcggctccataatgaaactcggaccctttttcctgtggtcctggagcaactggatgattacaacgccaagctgtccgaccttcaggaagctctggaccaggcgctcaactacgtcagagacgccgaggatatgaatagggctaccgctgcccggcagagagaccacgaaaagcaacaggagagagtgcgagaacaaatggaggtcgtgaacatgagcctctcaacaagcgctgacagcctgacaactcctcggctgaccctgtctgaactcgacgacatcatcaaaaacgcgagcggcatctacgctgagattgatggggcaaagtctgaactacaggtgaaactgtccaacttaagcaacctgtcccatgacttggtgcaggaggcgatcgaccatgcccaggacctgcagcaggaggccaacgaactaagcagaaagctccactcatctgatatgaacgggctagtgcagaaagccctggacgcttcgaatgtgtacgaaaacatcgtcaactacgtcagcgaggctaatgaaaccgctgagttcgctctgaacacaacagataggatttacgacgccgtgtccggcattgacacacagatcatttaccacaaggatgaatctgaaaatctactgaatcaagcaagagagctacaggcaaaagccgaatccagctcagatgaagcagtcgctgataccagtagaagagtgggcggtgctctggcccggaagtccgctcttaagactagactgagcgacgccgtgaaacagctgcaagcagcggaacgcggtgatgcccagcaaagactaggtcagagcagactgatcaccgaagaggccaatcgaaccaccatggaagtccaacaggccacagccccgatggccaacaatctgaccaattggtcacagaatcttcagcacttcgacagctctgcctacaatactgcagtcaacagtgccagagatgccgttcgcaatttgaccgaggtggtcccccagttattggatcagttgagaacagtggagcaaaagagaccggcctcaaacgtatccgcaagcattcagaggatcagggagctgatcgctcaaacccgctccgttgcctccaaaatccaagtttctatgatgtttgatggacagtctgcagtcgaagtgcattcacggacctctatggacgaccttaaggcttttacctcacttagcctgtacatgaagccgcctgttaagaggcccgagctcactgagacagcagatcaattcatcctataccttgggagtaagaatgctaagaaagaatacatggggctcgctatcaaaaacgacaatcttgtgtacgtctataatctgggaaccaaggacgtggaaataccgctggatagcaagccagtgagctcgtggcctgcctatttcagtatcgtaaagatcgagcgggtgggcaagcacggcaaggtattcctcaccgtgccttccctctcaagcaccgccgaggaaaagttcattaagaaaggcgagttctccggcgacgactctctcctggatttagacccagaagataccgtgttttatgtgggcggggtgccttctaattttaaactgcctacgagtctgaaccttcccggcttcgtaggatgcctagagctggcgaccctgaataatgatgtgatcagcctctataatttcaagcacatctacaatatggacccatctactagtgtgccatgtgcgagagataaactggccttcacccaaagtcgtgcggccagttatttcttcgacggctctggttacgcagtggtcagagatatcacccgccggggtaaatttggtcaggtgacccgctttgatattgaagtgcgtacgcccgcagacaacggcctcatcctgctaatggtcaatggctcaatgttttttcgccttgagatgcggaatgggtatttgcacgtgttttatgattttggatttagcggaggtcctgtacatctggaagacacactgaagaaggcccaaatcaacgacgctaaatatcatgaaatctctatcatatatcacaacgataaaaaaatgattctggtggtagacaggcggcatgtgaagtccatggacaacgaaaagatgaaaatcccttttacggatatctacatcggaggcgccccccctgaaatactccaaagtagagccctccgggcgcacctaccactcgatattaatttccggggctgtatgaagggcttccagttccagaaaaaggatttcaatcttttagaacaaactgagaccctcggcgtcgggtatggctgcccagaggactccctgatctcacgccgcgcttactttaacggacagagttttatcgccagcattcaaaagatcagcttttttgacggttttgagggcgggtttaatttcagaactcttcaacctaacggcctcctgttttactatgcatctggctctgatgtctttagcattagtttggataatggaaccgtgatcatggatgtcaaaggcatcaaagtccagtccgtagacaaacagtacaacgacggtctctcccactttgtgatttcctctgtgagtcctaccaggtacgagctcattgtggacaagagtcgagtgggcagtaaaaacccaaccaaggggaagatcgagcagacgcaagcttcagagaaaaagttctatttcggcggttccccaatctcagcccagtatgccaacttcacgggttgtatctcgaatgcctatttcacaagagtagatcgcgacgtcgaggtggaggactttcagcggtatactgagaaggtacacacatcactgtatgagtgccctatcgagtccagtcctttgtttctgcttcacaaaaaaggtaagaacttatcgaagccaaaggccagtcagaataaaaagggaggcaaatccaaggacgccccatcttgggatccagtggctctcaaactcccggagcgcaacacaccacgaaattcacactgccacctatcgaactccccacgtgctatcgaacatgcctaccaatacgggggcacagcaaactcacggcaggagtttgaacacctgaagggggactttggcgcgaaaagccagttctccatccggttgagaactaggagcagtcacggcatgatcttctacgtttctgatcaggaagagaatgatttcatgacacttttcctagctcacggccggctagtgtacatgtttaatgtcggccacaagaagctgaagattcgctcgcaggagaagtataatgatggcctgtggcatgacgtcatctttatccgggagcgctcaagcggaagacttgtgatcgacggcctgagagttctggaggaatctctgccacctaccgaggccacatggaagataaaggggcccatttatctcgggggcgttgccccaggcaaggcagtcaagaatgtccagatcaactccatatatagcttctctggctgcctgagtaacctccagctgaatggcgcctcaatcacatctgcaagccagaccttctcagtaactccttgcttcgagggcccaatggagacaggcacgtatttttccaccgagggagggtatgtggttctagatgagtccttcaatattggactgaagtttgaaattgcctttgaggtcagaccccggtcttcaagcggaacccttgtgcatggccatagcgttaacggggaatacctcaatgtgcatatgaagaatggtcaagttatcgtgaaagtgaacaatgggattagggactttagtacctcagtgactcccaagcagtccttatgtgacgggcgctggcatcgaattacggttataagggactcaaatgtggttcaactggatgtggactccgaagtgaatcacgtggtggggccacttaatcctaaaccaatcgaccaccgggagcctgttttcgtcgggggcgtccccgaaagtctcctaacccctaggctggcaccatccaaaccttttactggctgtattcggcacttcgtgatagatggtcatcctgtttccttttctaaggctgcactggtgtcgggtgctgtctctatcaatagttgccctgccgcgtag

SEQ ID NO: 5203 - DNA, 1434 bp, synthetic construct
  misc_feature 1..1434: note = source = /note="Description of Artificial Sequence: Synthetic coding sequence"
  source 1..1434: mol_type = other DNA
atgaccagcaagtttctgctggtgagcttcattctggcggccttaagtctatctactacattttcgctgcaaccagatcagcagaaggtgctacttgtctcttttgacggttttcgctgggattacctgtataaggttcctacacctcactttcattacatcatgaagtacggcgtgcacgtgaagcaggtgaccaacgtctttattactaagacctacccgaatcattacaccctggtcaccggcctctttgccgaaaatcatgggattgttgctaacgatatgttcgaccccatcagaaataagtcgttttcgctcgatcacatgaatatttacgacagcaagttctgggaggaagctacgccaatctggataaccaaccagcgcgccgggcacacttctggcgccgctatgtggcccggtaccgacgtaaagatccacaaacggtttcccacacattacatgccctacaacgaatccgtgtcatttgaagatcgtgttgccaagataatagagtggttcacaagtaaggagcccatcaacctcggtctgctgtactgggaggatccagacgatatggggcaccacctcggccccgatagcccattgatgggacccgtgatttccgacattgacaaaaagctcggttacttaatccagatgcttaaaaaggccaaactttggaacactctgaatttaatcatcaccagcgaccacggcatgacacagtgcagtgaagaaaggttaatagagctcgatcagtacctcgacaaggatcactacaccctaatcgatcaaagccctgtcgctgccatcctgcccaaggaagggaaatttgacgaagtgtatgaagccttgactcatgcccacccaaacctgaccgtgtacaagaaagaggatgtacccgaacgctggcattacaagtacaacagtaggatccagcccattatcgccgttgccgacgagggatggcacatactccagaacaagagcgatgactttctacttggtaatcatgggtatgataacgccttggccgacatgcatccaatttttctagcacacggccccgcgttccgtaagaacttctcaaaagaggctatgaactccacagatttgtacccactcctgtgccacctgttgaacattaccgctatgccacacaacgggtccttctggaacgttcaagatttactcaactcggctatgccccgcgtagtgccatatacccagtcaactattttgcttcccggttccgtcaaacctgcagaatatgatcaggaagggtcttacccatattttataggggtcagcctgggtagcataattgtcatcgtgttttttgtcatcttcataaagcatcttattcactctcaaattcctgctcttcaggacatgcacgctgagattgctcagcctcttctgcaagcatag

SEQ ID NO: 5204 - DNA, 1254 bp, synthetic construct
  misc_feature 1..1254: note = source = /note="Description of Artificial Sequence: Synthetic coding sequence"
  source 1..1254: mol_type = other DNA
atgaggttcgcctggaccgtactgctgttggggcctctgcagttatgtgctctggtgcattgcgctccaccagccgcaggacagcagcagcctccgagggagccacccgcagcccccggggcctggcgtcagcagatccaatgggaaaataatggccaggtgttctccctcctgtctctaggctctcagtaccagccccagaggcgtcgcgatcctggtgccgctgtccctggcgccgccaatgcttcagctcagcagccccgcacacctatcctgctcatacgtgacaaccgcactgccgcagccaggacacggacagctggaagttcaggtgtaaccgccggaagacctcgacccactgcccggcattggttccaggcgggatattcaacctcaagagcgcgagaggcgggcgccagtagggcagagaatcagacagcccccggggaagtccccgcgctcagcaatctgagaccccctagccgggtcgacggcatggtgggtgatgatccttacaacccctataaatatagtgacgacaacccgtattacaactactacgacacatatgagaggccgcgcccgggggggagatatagaccgggatatggcacagggtatttccagtacggcctaccggatctggtggccgacccttactacatccaggcttctacttatgtgcagaagatgtccatgtataacctgaggtgcgccgccgaagagaattgtctggcatccactgcgtaccgcgccgatgtgcgcgattatgatcatcgcgtgttgctccgcttccctcagagggtaaaaaatcagggaacctcagactttctcccatcccgacctcggtattcatgggaatggcacagttgccaccagcattaccatagtatggacgagttttcccactacgacctactggacgccaatacccaacggagggtagctgagggacataaagcctcattctgcttagaggatacttcatgcgactacggctatcataggcgatttgcttgcacagcccatacccaaggcctgtcacctggatgttatgacacctacggggctgatatagattgccagtggattgacattactgacgttaaacccggtaactatattctgaaagtgtcagtgaacccgagttacctagtgcctgaatccgactataccaataacgtcgttagatgtgacatccgatataccgggcaccatgcttatgcctccggctgtacaatttcgccatactag

SEQ ID NO: 5205 - DNA, 879 bp, synthetic construct
  misc_feature 1..879: note = source = /note="Description of Artificial Sequence: Synthetic coding sequence"
  source 1..879: mol_type = other DNA
atgggcgagaagagcgaaaactgcggagtcccggaggacctcctgaacggacttaaggttacagatacgcaggaagccgagtgtgccggcccacctgtccccgaccctaaaaaccaacattcccagagtaaactgctgagagacgacgaggctcatctccaggaggatcagggcgaagaagaatgcttccatgattgcagcgctagctttgaggaagagccaggggccgataaggtcgaaaataagtcaaatgaagatgttaactctagcgagctggacgaggagtacctaattgaacttgagaaaaatatgtctgatgaggagaagcaaaaacgcagagaagagagtactagactgaaggaggaaggcaacgaacaatttaaaaaaggtgactacatagaagctgagtcctcttattctcgagccctggagatgtgtccctcctgtttccagaaggagcgtagtattctgttctctaacagagctgcagcacgcatgaagcaggataaaaaggagatggccataaacgactgtagcaaggctatacagctgaatccgtcctacattagagcaattctgagaagggcagaattgtacgagaaaaccgataagttggacgaggctctggaggattataagagcattctcgaaaaggacccctccatccaccaggcccgcgaagcctgcatgaggttgcctaaacagatcgaggagaggaatgagaggctgaaagaggagatgttgggtaagcttaaggaccttggaaatctggtcctgcgccccttcggcctttcaacagaaaacttccagataaaacaggactcgagtactgggagctactcaatcaattttgtgcagaaccccaacaacaatcggtag

SEQ ID NO: 5206 - DNA, 2316 bp, synthetic construct
  misc_feature 1..2316: note = source = /note="Description of Artificial Sequence: Synthetic coding sequence"
  source 1..2316: mol_type = other DNA
atgagcggattcttcacttcattagaccccagaagagttcaatggggagctgcgtggtatgctatgcactcacgcattctcagaacaaaaccagttgagagcatgcttgagggcaccgggacaaccacagctcacggcacgaagctcgcccaggtcttgactactgtggatctgatcagccttggagtggggtcttgcgtaggcactggaatgtatgtggtgtcaggcctcgtcgctaaagaaatggccgggcctggagtgatagtcagctttattattgctgctgttgcaagcattttaagcggagtgtgttacgctgagttcggagtccgggtacccaaaacaactggaagcgcatacacgtattcatatgttactgtcggcgagtttgtggcattttttattggctggaacttgatactggaatacctaattggaactgctgctggcgcaagcgctttgtcaagcatgtttgattcactagctaatcatactatctccaggtggatggctgacagcgtgggcactctcaatgggctgggaaagggggaagaaagttatccagatctgcttgctttgttgatcgctgttatagtgactatcattgtggccctgggggtcaaaaatagcatcggcttcaacaacgtcctcaatgtcttaaacctggctgtctgggtattcatcatgatcgcggggcttttcttcataaatggcaaatactgggcggaggggcagtttctgccccacgggtggagtggagtcttgcagggggccgcaacgtgtttctatgcttttatcggatttgatatcatcgccacaactggggaggaagctaaaaacccaaacacttccattccctacgcaataacagcgagcctcgtgatatgcctcactgcgtacgtgtcggtgagcgtcatattgaccctgatggttccctactacactattgacaccgaatctccactgatggaaatgtttgtggctcacggattttatgcagcgaagttcgtggttgccataggaagtgtcgctgggctgaccgtgtctttacttggaagtctcttccccatgccaagggtgatttacgccatggccggcgatgggttactgttcagatttctggctcacgtctctagctacaccgagacacctgtagtggcgtgcatcgttagcggcttcttggcagcgctgctggccctgctagtctcactgcgggacctcatagagatgatgtcaatcgggacacttctggcttacacgttggtttcagtctgcgtactgcttcttaggtatcagcctgagagcgacattgacggtttcgtgaagttccttagcgaagagcacaccaagaagaaggaaggtattctggctgattgcgagaaagaggcatgttccccggtgtccgagggcgacgagttctctgggccagccacaaacacctgcggggctaaaaacctgccatctctcggggataacgaaatgcttattggcaagtcagacaagagcacatataatgtcaatcacccaaactatgggaccgtggatatgactacaggaatcgaagccgacgaatccgagaacatatacttgatcaagttgaaaaaattgattggaccccactactacacaatgagaattcgcctggggctgcccggcaagatggatcgccccactgctgccactgggcatacggtgacaatctgtgttctcctattgtttatccttatgtttattttctgcagcttcataatctttgggagcgattacatatcagagcagtcctggtgggcaattcttctcgtggtcctcatggtgttactcattagcaccctggtatttgtgatcctccagcagccagagaatccaaaaaagctgccatatatggccccatgcttgccatttgtgcctgcctttgccatgctggtgaatatctacctcatgctgaaactcagtacaatcacctggatccgctttgccgtgtggtgcttcgtcggcctgctgatttacttcggctatgggatctggaatagcaccctggagatctcagcccgtgaggaggcacttcatcagtcaacataccagcgctacgacgttgacgatcccttttccgtcgaagaagggttttcatacgccacagaaggggagtcccaggaggactggggtgggcctactgaggacaaaggtttttattaccagcagatgtctgacgccaaggctaatggtaggacctccagtaaagccaaaagcaaatcaaagcataaacaaaattcagaggcactgatcgccaatgatgagttggactactcaccagagtag

SEQ ID NO: 5207 - DNA, 513 bp, synthetic construct
  misc_feature 1..513: note = source = /note="Description of Artificial Sequence: Synthetic coding sequence"
  source 1..513: mol_type = other DNA
atgggtaatgaagcctcctatcccctggagatgtgctcacacttcgacgccgatgaaatcaagcgcctgggtaagcggtttaagaagctggacctcgataattctgggtctctctcggtggaggaatttatgtcccttccggagttacagcagaacccactggttcagagagtgatcgatatatttgacactgacggaaacggagaggtggacttcaaggaattcatcgaaggcgtaagccagttctccgtgaagggcgacaaggagcagaagttacgcttcgcttttcgcatttatgatatggataaagatggatatattagtaacggcgaactgtttcaagttctgaagatgatggtcgggaataatctgaaggacactcaactacaacagatcgttgacaagactattatcaacgctgataaagacggagacggcagaatctcctttgaagagttctgtgcagtggttggtgggcttgacatacataagaagatggtggtcgatgtgtag

SEQ ID NO: 5208 - DNA, 1218 bp, synthetic construct
  misc_feature 1..1218: note = source = /note="Description of Artificial Sequence: Synthetic coding sequence"
  source 1..1218: mol_type = other DNA
atgtcgtcatcagtgaaaaccccggctctggaagagctggtcccgggaagcgaagagaagcccaaaggacgctctccactgagttgggggagtctcttcggtcacagaagtgaaaagatagtgtttgccaaatctgatggagggactgatgaaaacgtgctgacagttaccatcaccgaaaccaccgtcattgaaagtgaccttggagtatggtcttcacgggccctgctctacctcacgctctggttttttttctcgttttgcactttgttcctgaataaatatatattatcgctcctgggtggcgagccatctatgttgggcgcggtacaaatgctgagtaccacagttatcgggtgcgtcaaaacactggtgccgtgctgtctgtaccaacataaggcaaggcttagctacccccctaacttcttaatgaccatgctctttgtcggtctgatgaggttcgccaccgtcgtgctggggcttgtgagccttaagaacgtcgctgtgtctttcgcggagactgtgaagtcaagtgctccaatattcacagttatcatgtctagaatgatcctgggagagtacaccggcctgctggttaatctttccctgatccccgtgatgggaggattggccctttgcactgctactgaaattagcttcaacgtcctcgggtttagtgccgccctaagcacgaacatcatggactgtttgcagaatgtgttctcgaagaaactcctttccggggataaatatcggttttccgcaccagaactgcagttttatacctctgccgctgccgttgcaatgctcgtgcccgctcgggtgttttttaccgatgtgccggtcatcggacggagcggaaaatcattctcctacaatcaggatgtagtcctcttgctgctgaccgacggagtgttgttccaccttcagagcgtaacagcctatgcactgatgggaaaaatctccccagtcacttttagcgttgctagtacggtgaaacacgccctgtccatttggctgagcgtgatcgttttcggaaacaaaatcacatctctaagtgctgtcggcactgccttagtcacagttggtgtcctgttgtacaataaggcccggcagcaccagcaggaggccttgcaaagcttggcagcagccaccggacgggctcctgacgacactgtggagcccctcctgcctcaggaccctcggcaacatccgtag

SEQ ID NO: 5209 - DNA, 1131 bp, synthetic construct
  misc_feature 1..1131: note = source = /note="Description of Artificial Sequence: Synthetic coding sequence"
  source 1..1131: mol_type = other DNA
atgcttaaaaaaatctctgtgggcgtggccggcgatctcaacaccgtcacgatgaaactgggctgtgtgttaatggcttgggctctatatctgtctctgggcgttctttgggtggcacagatgctgctggcagcgtccttcgagacccttcagtgcgagggacctgtgtgtacagaggaaagttcatgccatactgaggacgatctgacggatgctcgcgaagcaggatttcaggtgaaggcatatacattttccgagcccttccacctgatcgtgtcctatgactggttgatcttacagggtccggcaaaaccagtgttcgagggagatttactggtgcttaggtgtcaagcctggcaagattggcccttaacgcaagtcaccttttatcgtgatggatctgcactgggtccgcctggacccaatcgcgaattctcgattaccgtcgtgcagaaggctgacagtggtcactatcactgctcggggatctttcagtcgcccggacctggaatcccggaaaccgcttccgtggtcgccatcaccgttcaggaacttttccccgctccaatcttgagagcagttccaagtgccgagcctcaagctgggagtccaatgacccttagttgccaaactaaactgccactgcagcgttccgccgctcggctgctgttctccttttataaagacggacgtatcgtgcaaagtagggggcttagcagcgaatttcaaatccctaccgctagcgaggatcattccggctcttattggtgtgaggcagctactgaagacaaccaggtatggaagcagtcccctcagctggagataagggtccagggcgcctcgtcgagcgcagctccgcccacattaaatcctgccccccagaagtcagcagcgcctggaacagcccccgaggaggccccgggacctctcccacccccaccaacgccaagcagcgaggatccaggcttttcatccccacttggaatgcctgacccccacctgtatcaccagatggggctgctgttgaaacacatgcaagatgtccgagttctcctaggccatctgctcatggaactgagagaattgtctggacacagaaaacctggtacaaccaaagccactgcggagtag

SEQ ID NO: 5210 - DNA, 1572 bp, synthetic construct
  misc_feature 1..1572: note = source = /note="Description of Artificial Sequence: Synthetic coding sequence"
  source 1..1572: mol_type = other DNA
atggcgcgaaaggcgctaaaactggcttcctggacctcaatggccctagctgctagtgggatttatttctattcaaataagtacctggaccccaacgatttcggggcagtgcgcgttggccgagctgtggccactaccgccgttataagctacgactacttgacctccctgaaaagcgtcccatatggttccgaggagtaccttcagttgaggtcaaaagtacatctaagaagtgctcgcaggctgtgcgagctatgttgcgcaaacagagggacctttatcaaggtaggccaacacctgggcgcacttgattacctgctaccggaagagtacacttccaccctgaaggtgttacatagccaagcgcctcagtccagcatgcaggagatccgacaggtcatccgggaggacctcgggaaggagatccacgatctgttccagtcatttgatgatactcctcttgggactgctagcttggctcaagtacacaaggccgttctgcatgatgggaggaccgtcgccgtgaaagtgcagcaccccaaagtacgagctcaatcctccaaagacatacttctgatggaagtgctggttctcgcagttaaacagctgtttccagagttcgagtttatgtggcttgttgatgaggctaaaaaaaacctgcctctggaactcgacttccttaacgagggacggaatgcagagaaagtctcacaaatgctgcggcattttgacttcctgaaagttcctcgcattcattgggacctttccacggagagggttttactgatggagttcgttgacggtggccaggttaatgaccgcgactacatggagcgcaataagatcgacgtgaacgagatttcaaggcacttgggaaaaatgtatagtgaaatgatttttgtgaacggattcgtacactgtgatccgcaccctggtaatgtgttagtgcgcaaacaccctggcaccggtaaagctgaaatcgtcctgttagatcatggcttgtaccaaatgctgacagaggagtttagactcaactactgtcacctatggcagtctctcatctggacagacatgaagcgagtgaaagaatactcacagaggctgggcgccggggatctctacccgctctttgcctgcatgttaaccgcaaggtcttgggactctgttaatcgtgggattagtcaggcacccgtcactgccaccgaagatcttgagatcaggaataatgcggccaattacttaccccaaattagtcacctgctgaatcacgttccacggcagatgctgctgattctgaagacaaatgatctactgcggggcattgaggctgctctggggacccgagcctccgcttcgagttttctgaacatgtctcggtgttgtattagggcccttgctgagcataagaaaaaaaacacttgtagttttttccgacgcacccagatctcattttccgaggcgttcaatctatggcagataaacctgcatgagttgatcctccgcgtgaaggggcttaagctcgccgatcgcgtactcgcccttatctgttggctctttcccgccccattatag

SEQ ID NO: 5211 - DNA, 1197 bp, synthetic construct
  misc_feature 1..1197: note = source = /note="Description of Artificial Sequence: Synthetic coding sequence"
  source 1..1197: mol_type = other DNA
atgtggcttctcctgactatggcaagcctgatatcggtcttgggtactactcacggtctctttgggaaactacatcccggatccccggaggtcacaatgaacatcagccagatgatcacctactggggttaccctaatgaagaatacgaagtcgtcacggaggatggatacattcttgaggtaaatcggattccctacggcaagaaaaactccggcaacaccggccagcgacccgtagtcttcctgcaacatggcctgttggcttctgcaacgaattggatttccaacctccccaacaacagcctagcatttatactggcagacgctgggtatgacgtgtggctggggaactcgcggggtaatacatgggcaagacggaatttatactacagtcctgatagtgtcgagttctgggccttttcttttgacgagatggccaagtacgatcttcccgccacgatagactttatcgttaaaaagactgggcagaagcagctacactatgtgggccatagtcagggaactaccatcggttttatcgccttctccacaaatcctagtctcgctaagagaatcaaaaccttctacgcccttgcaccagtggctacggtgaagtataccaagagtctcatcaataagcttcggttcgtccctcagtccctcttcaaatttatatttggagataagatcttctatccccataatttcttcgaccagttcttagctaccgaggtctgctccagagagatgctgaaccttctgtgttctaacgccctgtttattatatgcggcttcgactccaaaaactttaatacatctaggctggatgtctacctcagccacaatcccgccggcacgtcagttcaaaacatgtttcactggactcaggcagtaaagagcggtaaattccaggcttacgattggggatcccccgtccagaatcgtatgcattacgaccagagccagcctccctactacaatgtgaccgccatgaacgttcctatagctgtgtggaatggaggcaaagacctgctggcagatcctcaggatgtaggcctgctgttacctaagctgccgaacctcatttaccacaaagagatacctttctataatcatctcgacttcatttgggccatggatgcaccccaagaggtttacaatgatatcgtaagtatgataagcgaggataagaagtag

SEQ ID NO: 5212 - DNA, 555 bp, synthetic construct
  misc_feature 1..555: note = source = /note="Description of Artificial Sequence: Synthetic coding sequence"
  source 1..555: mol_type = other DNA
atgaggggacagggccgcaaagagtctctgtcagactcccgagacctcgatgggtcttacgaccaactgacggacagcgtggacgacgagtttgagctcagcacggtttgccatcgtccagaaggcctggaacagcttcaggaacagaccaagttcactcgcaaggagctgcaagtgctttaccgaggttttaagaatgaatgtccgtctggcatagtgaacgaagagaactttaaacagatttactcacagttctttcctcagggggacagttccacatacgccacgttcctcttcaacgctttcgacacaaaccacgatggatccgtgtcctttgaggagatgctggacatcatgaaaagcatttacgatatgatggggaagtacacttaccccgcgctgagggaggaagcccccagagagcacgttgagtcctttttccagaaaatggaccgaaacaaggatggcgtcgtgactattgaggagttcattgagtcatgccagaaggtccagcttccagctctctatataactctgacttggacacaggcgtag

SEQ ID NO: 5213 - DNA, 3900 bp, synthetic construct
  misc_feature 1..3900: note = source = /note="Description of Artificial Sequence: Synthetic coding sequence"
  source 1..3900: mol_type = other DNA
atgtctttacaggagatgtttcggtttcccatggggctgttgttaggaagtgttctgctcgtggcctcggctcctgccacactggagccccccgggtgttctaataaggagcaacaagttaccgtcagccatacgtataagatagatgttccaaaatctgccctggtgcaggtggatgcggacccacaaccgctgtccgacgatggggcttcactgctggcactgggagaagctcgggaagaacagaatattatcttccgccacaacattaggctgcaaaccccgcagaaggattgtgagctcgccggaagcgtccaagacctcctggctcgggtgaagaagctggaagaagaaatggtagagatgaaggagcagtgttccgcacaacgctgttgccagggcgtcaccgacctgagtcggcattgctctggccatgggacgttctctctcgaaacatgttcctgtcactgtgaggaaggaagggaaggcccagcctgcgagaggctcgcatgtcctggggcatgctctggtcatggcaggtgtgtggatggtaggtgtctgtgccacgagccctatgtgggagccgactgcgggtatcccgcttgtcccgagaactgctctggccacggtgagtgtgtacgcggagtctgccagtgccacgaggacttcatgtctgaggattgtagtgagaaaaggtgccccggggactgtagtggccacggcttctgtgataccggagagtgctattgcgaagaaggcttcacggggctggactgcgcccaggtggtgactccacagggcctccaactgttaaagaacaccgaggacagcctcctcgtctcatgggaaccaagttcacaagtcgatcattatctcctctcttactaccccctgggaaaggaactgtccggaaagcaaattcaggttcctaaggagcagcatagctatgagattttgggactgttgcctggaacgaagtatatcgtcacactgagaaacgtgaaaaatgaagtctcaagcagcccgcagcacttattggccactaccgaccttgccgtattaggaaccgcctgggtcaccgatgagactgagaatagccttgatgttgagtgggaaaacccctctaccgaggtggactactacaagttacggtacgggccaatgacagggcaggaggtggcagaggttacagtgcccaaatcctctgatcccaagtctcgatacgatattactgggcttcaccctgggacagaatataagatcactgtggtgccaatgcgcggggagttagagggcaaacctattctcctgaacggccgtacagaaattgactccccgacaaatgtggtgactgaccgtgtgacagaggatacagcgacggtttcctgggatccagtgcaggctgtcattgataaatacgtggtgcgctatacctctgctgatggcgacaccaaggagatggccgttcacaaagatgaaagttccacggtattgaccggactaaaacccggtgaggcgtacaaagtttacgtgtgggctgaacgaggcaatcagggctcaaagaaggccgacaccaacgctctgactgagattgattcccctgcaaatctagtcaccgatcgcgtgacagaaaataccgccacaatttcatgggacccagtgcaagctactatcgataagtacgtggtgaggtacactagtgccgatgaccaggaaactcgcgaggtcctcgttggcaaagaacagtctagcaccgtgcttactgggctgaggcctggggtagaatatactgttcatgtctgggcacaaaaaggcgatagggaaagtaaaaaagctgacaccaatgcccctaccgacatcgactcacctaaaaatctggtgaccgacagggtgaccgaaaacatggccaccgtatcctgggatcccgtccaggcagcaattgataaatacgtagttagatatacatcagccggcggcgaaacccgcgaagtgccagtgggcaaggagcaatcttccaccgttttaactgggctgcgccccggaatggaatacatggttcacgtttgggctcaaaagggggatcaggagtcaaagaaagcagacactaaagctcagaccgacattgattcaccgcagaacctcgtgacagacagagtgactgagaacatggccacagtgtcttgggacccagttcgggctacaattgaccgttatgtagtgaggtacacatcagctaaggatggggaaacacgagaggtgccagtgggaaaagaacagtcctcaaccgtgctgacaggcctcaggcccggcgtggaatacaccgttcatgtttgggcacaaaaaggggcccaggagagcaagaaagcagacactaaagctcaaaccgatatcgacagtccccagaacctggtgacagactgggtaaccgagaacaccgcaaccgtgagctgggaccctgtgcaagccaccatcgatcgatacgttgtgcactatacttccgcgaacggtgagaccagagaggttccagtcggaaaagagcaaagcagcacagttctgacaggacttagacccggaatggagtacaccgttcatgtgtgggcccaaaagggaaaccaagaatctaagaaagccgatacgaaagcacagacagagattgatggaccaaaaaacctggtgaccgactgggttactgagaatatggccactgtatcctgggatcccgtgcaggctactatcgataagtacatggtgaggtacacatccgccgacggcgagacacgagaggtacccgtgggaaaggaacacagcagcacagtacttaccggtctccgcccaggcatggaatatatggtgcatgtttgggctcagaagggtgctcaggagagcaaaaaggccgacaccaaggcccagaccgaattggacccccctagaaacctgcggcccagtgctgtcacccagagtggcggaattctaacgtggacgccaccatccgctcagatccacggctacatcctgacctaccaatttccagacggaaccgtcaaagaaatgcaattaggacgggaagatcaaagatttgcactgcagggcttggaacagggagccacttacccggtgtccctggtggccttcaaaggtggccggagatcccgaaacgtttcaaccacattgtcgacggtgggagcaagattccctcacccctcggattgctcccaagtgcaacagaactcaaatgccgcaagtgggctgtacacaatctatctgcatggcgacgctagtcggccactccaggtttactgtgacatggagacggatgggggaggttggatcgtttttcagcgcagaaacacaggacagttagatttctttaagaggtggcgctcctatgtcgaaggattcggcgatcctatgaaagagttctggttgggcttggacaagctgcataacctgactactggcacccctgccagatatgaggtcagggtcgatcttcagactgccaatgagtccgcctatgccatatacgacttcttccaggtcgcgtcaagtaaggagcgctacaagctgaccgtgggtaaatatcggggcacagcaggtgatgccctgacgtatcacaatggctggaaatttactacgttcgacagggataacgacatcgctctgagcaattgtgccctgacgcatcacggagggtggtggtataagaactgccatttagcaaacccgaacgggcgctatggtgagaccaaacacagcgagggggtcaactgggagccctggaagggccatgagttcagcattccctatgttgagttgaaaattaggcctcacgggtattcaagagagccggtgctaggccggaaaaagcgtaccctgcgcggcaggctgagaaccttctag

SEQ ID NO: 5214 - DNA, 1662 bp, synthetic construct
  misc_feature 1..1662: note = source = /note="Description of Artificial Sequence: Synthetic coding sequence"
  source 1..1662: mol_type = other DNA
atgactaggggcggacctggtggaagacctggcctgccccaaccaccacctcttctcctcctgctgctgctcctccctcttctgctggtgacggctgagcccccaaagccagctggcgtgtactacgctacagcctactggatgccagctgagaagacagtgcaggtgaagaacgtgatggataagaatggggatgcatacgggttctacaataacagcgtgaaaaccacaggctggggcatactcgagattcgtgctggctacggttcccaaactcttagcaatgagatcatcatgtttgttgcgggatttctggaagggtacctcactgccccccacatgaatgaccactatacaaatctctatccccagctgattactaagccatccatcatggacaaggtacaggatttcatggagaaacaggataagtggactcgtaaaaacattaaggaatacaagacggatagcttctggcgccacactggttatgtcatggcacagatcgatggactgtacgtgggggcaaagaaacgtgctatactagaggggacaaagcctatgacattgtttcaaatccagtttttaaacagcgtgggcgacttgctggacctgatccctagcttgtcccccaccaagaacggttccttgaaagtgttcaaaagatgggatatggggcattgcagcgcacttatcaaagtgcttcctggcttcgagaatatccttttcgctcattcatcatggtacacctacgctgcgatgttgagaatatataagcactgggacttcaacgtaattgacaaggatacctcctcatcaaggctgtcctttagctcataccccgggtttctagaaagcctggatgatttctacatcctaagctctgggctcattctacttcagactacgaacagtgtattcaataaaacactcctcaaacaggtgatcccagagacactcctgtcctggcagagggttcgagtcgccaatatgatggcagattcagggaaacggtgggccgacatcttctctaagtacaactctggcacgtacaataatcaatatatggtactagaccttaagaaggtcaagctcaaccactctctggataaaggcaccctctacatcgtcgaacagataccaacatatgtggagtacagcgagcagaccgatgtgcttaggaagggctactggcccagctacaatgtgcctttccacgagaagatctacaattggtccggatacccgctgctggtgcagaagctcgggctcgattattcctatgatctggcacctagagccaagattttcagacgcgaccaaggcaaggtcactgatactgcaagcatgaagtatatcatgcgctacaataactacaaaaaggacccatacagtaggggtgacccttgcaacactatctgctgcagggaggatctgaatagtcccaatccatctccaggaggctgttacgacacaaaggtggcagacatttacttagctagccagtatacaagttacgctattagcggtcccacagtgcaggggggactccccgtattccgatgggacagattcaataaaaccctgcatcaggggatgccggaagtgtataatttcgactttattaccatgaaaccgattttgaagctggatattaaatag

SEQ ID NO: 5215 - DNA, 2271 bp, synthetic construct
  misc_feature 1..2271: note = source = /note="Description of Artificial Sequence: Synthetic coding sequence"
  source 1..2271: mol_type = other DNA
atgtctcgccctggaacagccacccctgccctggctcttgtactcttagccgtaactttggctggtgtaggcgctcagggggctgcgctcgaagaccctgactattacggacaggagatttggtctcgggagccttattatgcccgaccggagccagaattggagacattttcgccgcctctccccgccggccccggggaagaatgggagaggcgcccccaagaacctcggcctccaaagcgcgccactaagccaaagaaagcccccaagcgggagaagagcgcccccgaaccgccacccccggggaagcacagcaacaagaaagtgatgaggactaagagttctgaaaaggcagcaaacgacgatcatagcgtgcgggtggcacgggaggacgtcagagaatcttgcccacctctgggcctggaaactctcaaaatcaccgactttcaattgcacgcgtctacagtaaaaaggtacgggctgggggcgcaccggggccgattgaacatccaggccggtatcaatgagaacgatttttacgacggcgcctggtgcgcagggcgaaatgacctgcagcagtggatcgaagtggatgccaggagacttacacgctttaccggagtaattactcaggggcgaaacagcttatggctttctgattgggtgaccagttacaaagtcatggtgtcaaacgatagccatacttgggttactgtgaagaacggcagtggggatatgattttcgagggtaattccgaaaaggagattcctgtgctgaacgaactgccggtgccgatggtcgcacggtatatccgtattaacccccaatcgtggtttgacaatgggagcatttgtatgagaatggagatcctgggctgtcctctgccagaccctaacaattattaccacaggagaaatgagatgaccaccactgatgatctggacttcaagcaccataactataaggagatgagacaactgatgaaggtcgtgaacgagatgtgtcccaatatcacccggatatacaatatcggtaaatctcatcagggactcaaattatacgctgttgagattagtgaccaccctggcgaacatgaggttggggagcccgaattccattatatcgcaggtgcacatggaaatgaggtgctgggccgggagctcctgctgctgctggtccagtttgtctgccaggagtaccttgcacgcaacgccagaattgtacatcttgttgaagagacccgaattcatgttctgccatccctgaaccccgatggttacgagaaggcctatgaaggcggatccgaactcggcgggtggtcactcggcaggtggacacacgatggcattgacatcaataataatttcccagatttgaacactttgctgtgggaagctgaagacaggcagaatgtaccaaggaaagtgccaaaccattatattgccatccctgagtggtttttgagcgaaaacgccacagtggctgccgagaccagagccgtcattgcttggatggagaagattcccttcgtgctgggcggaaacttacaaggaggtgagctggtcgtggcttatccgtacgatcttgtgaggtctccgtggaagacccaggagcacacacccactcctgatgaccacgtattccggtggctggcttacagctatgcttcaacgcaccggctaatgacagatgcaaggcgccgagtttgtcatactgaagatttccaaaaagaggaaggcaccgtcaatggggcgagctggcacacagtggccggctcattaaacgatttctcttatctccataccaactgctttgaactgagtatttacgtgggatgcgacaaatatccgcacgagagccagcttcccgaggagtgggagaacaaccgggaaagccttatagtcttcatggaacaagtgcatcggggcatcaaggggctggtgcgggacagccatgggaagggcattcccaacgccattatatccgtagagggcattaatcatgatattcggacggctaatgacggagactactggcggctgctaaacccgggggaatacgtggtgacagccaaggccgaaggctttacagcctcaacgaagaactgtatggtaggatacgacatgggggcaacgcgctgtgacttcactcttagtaagacaaacatggccagaattagggaaattatggaaaaattcggcaaacagcccgtgtccctgccagctcgtcggctgaaactgagaggccagaagcggaggcaacggggttag

SEQ ID NO: 5216 - DNA, 702 bp, synthetic construct
  misc_feature 1..702: note = source = /note="Description of Artificial Sequence: Synthetic coding sequence"
  source 1..702: mol_type = other DNA
atggccacacctccattcaggctgatcagaaaaatgtttagcttcaaggtgtctcgttggatgggcctggcttgctttagaagtctggctgccagtagccctagtatcaggcagaagaagttaatgcacaagttgcaagaggagaaggccttccgagaggaaatgaagatttttcgggagaagatcgaagacttccgtgaggagatgtggacttttagaggcaagatccacgcctttaggggacagattctaggcttttgggaggaggagaggcccttctgggaggaggaaaaaacattctggaaggaggagaagtcattctgggaaatggagaagtccttccgcgaggaggaaaagaccttctggaaaaaatacaggacgttctggaaagaagataaggcgttctggaaggaggacaacgccctgtgggaaagggaccgcaatctgctccaagaggataaggccctttgggaggaagaaaaagccctgtgggtggaggaacgggctctcctggaaggggagaaggctctctgggaggacaagacctctctttgggaggaagaaaacgctctgtgggaagaagagcgcgctttttggatggagaacaacggtcacatcgctggagagcagatgctggaggacggaccacataacgccaaccgtggacagcggctgctggctttctccaggggacgcgcatag

SEQ ID NO: 5217 - DNA, 696 bp, synthetic construct
  misc_feature 1..696: note = source = /note="Description of Artificial Sequence: Synthetic coding sequence"
  source 1..696: mol_type = other DNA
atgatgctgagctgtctgttcctgctgaaggccctgctggctctcgggagcctggaaagctggatcacggctggggaacacgccaaggaaggtgaatgccccccacacaagaatccttgtaaagagctgtgccaaggagacgaactctgtccagccgagcagaaatgctgcaccactgggtgtggaaggatttgccgggatattcccaagggccgcaaaagggactgcccacgggtgatccggaagcagagttgcctgaagcggtgcattaccgatgaaacttgccccggcgtgaagaaatgttgtacactgggctgtaataagtcttgtgtcgtccccatatcaaaacaaaagctggctgaatttggtggcgaatgtcctgccgatcccctgccgtgtgaagaactttgcgacggggatgcctcttgtccccagggccacaaatgctgcagtaccggttgtggtaggacatgtttaggagacattgagggcggcagagggggagactgccccaaggtgctggttggcctgtgcatcgttggctgtgtaatggatgagaactgccaagccggggagaagtgctgtaaatcaggctgtgggaggttctgcgttccaccagttctgccaccaaagctgactatgaaccctaactggactgtgcggtcggacagcgagttggaaatcccggttccgtag

SEQ ID NO: 5218 - DNA, 1050 bp, synthetic construct
  misc_feature 1..1050: note = source = /note="Description of Artificial Sequence: Synthetic coding sequence"
  source 1..1050: mol_type = other DNA
atgggccctatctctgccccctcttgtcgttggagaataccctggcaaggacttctgctgacagcttccttgtttacgttttggaacccaccaactaccgcccagctgactatcgaagccgtgcccagtaatgccgccgagggcaaggaggtgttattgttagtgcacaatctgccgcaggatccccgtggctataactggtacaagggcgagacggtggatgccaatcggcggatcattgggtatgtgatctcaaatcagcagattacacccggccctgcctactctaaccgtgaaactatttaccccaatgcttccctgttgatgagaaacgtcacaagaaacgatacagggtcctatacacttcaggtcattaaattgaatctcatgagtgaagaggtgaccggccagtttagcgtgcaccctgaaacccctaagccttccatcagttcaaataactctaaccctgtggaagataaggacgccgtcgcgtttacatgcgaaccagagacacagaacactacatacttgtggtgggttaacggccaatctctgccagtgtcacccaggctgcaactgtctaatggcaacaggactttgacattgctgtctgttactcgcaatgacgtgggcccgtacgaatgcgaaatccagaatcctgcttccgccaacttttccgacccagtgactctaaacgtgctgtacggacccgacgctcctaccatctctccgtccgatacttactatcacgcaggggttaatctgaatctatcatgccacgcggcttctaacccaccatcccagtactcgtggtcggtgaacggcacattccaacaatatactcaaaagttattcatacccaacatcacaactaagaatagtgggagctacgcgtgccataccactaattctgcgacaggacggaaccgcactactgtgcgaatgatcacagtctctgacgctctcgttcaaggctcttctcccggcctctcagcccgcgccacagtttctattatgatcggcgttcttgcgagagtggcattaatttag

SEQ ID NO: 5219 - DNA, 510 bp, synthetic construct
  misc_feature 1..510: note = source = /note="Description of Artificial Sequence: Synthetic coding sequence"
  source 1..510: mol_type = other DNA
atgaccgctggtcgcaggatggagatgctctgcgcggggcgcgttcccgcactgctcctgtgcttgggctttcatctgcttcaggcggtgctgagtacaacagtgatcccctcttgcataccgggcgagagttcggacaactgtaccgcactggtgcaaacagaggataacccaagggtggctcaggtctccataacgaagtgctcttccgacatgaatgggtactgtctccatggtcaatgcatatacttggtggacatgtcacagaattattgtcgttgtgaggtcgggtacacaggggtaagatgtgaacatttttttttaactgtgcaccagccattatcaaaagaatacgtggccctgaccgtcattttgataattctgtttctgattactgtggtcggctctacatattatttttgccggtggtaccgcaatcgtaaatcaaaggaacctaagaaagaatatgagcgggtgactagtggtgaccccgagctcccacaggtatag

SEQ ID NO: 5220 - DNA, 273 bp, synthetic construct
  misc_feature 1..273: note = source = /note="Description of Artificial Sequence: Synthetic coding sequence"
  source 1..273: mol_type = other DNA
atgaaactatctgtctgtctattacttgtaactctggccctgtgttgctaccaggctaacgcagagttctgccctgcactcgtctctgagctcctcgatttcttttttatttccgagcccctctttaagctctcactggctaaattcgacgcaccgcccgaggcagttgcagctaaactgggcgttaagaggtgtaccgaccaaatgagcctgcagaagcgctctctaatcgctgaagttctggtcaaaatcctgaagaaatgctcagtttag

SEQ ID NO: 5221 - DNA, 429 bp, synthetic construct
  misc_feature 1..429: note = source = /note="Description of Artificial Sequence: Synthetic coding sequence"
  source 1..429: mol_type = other DNA
atgccccgctgtagatggctttcactcatactcctcacaattcccctcgcactagtggcacgcaaggatcctaaaaaaaacgaaactggtgtcttgagaaaactaaaacccgtaaatgcctcaaacgctaacgttaaacaatgtctgtggttcgcaatgcaagagtataataaggagtcagaggataagtacgttttcctggttgtcaaaacactgcaagcgcagcttcaggtcacaaacttgttggaatacctgattgatgttgagatcgcccgaagcgattgtaggaaacctttgtccaccaatgaaatttgtgccattcaggagaattccaagttgaagagaaaactgtcatgctcatttttggtcggcgccctaccttggaacggagagttcaccgtgatggagaagaaatgcgaggatgcatag

SEQ ID NO: 5222 - DNA, 438 bp, synthetic construct
  misc_feature 1..438: note = source = /note="Description of Artificial Sequence: Synthetic coding sequence"
  source 1..438: mol_type = other DNA
atgggaataggatgttggcggaacccgctgctactgctgattgccctggtcctgtctgccaagttgggccattttcagcgctgggagggcttccaacaaaaacttatgagtaagaagaacatgaactccacattaaacttctttatccagtcgtacaacaacgcaagcaacgatacatacctctaccgcgtccagaggttgataagaagccagatgcaactcaccactggagtggaatacattgttacagtgaaaatagggtggacaaagtgcaagagaaacgacacatccaattcttcctgtcccctgcaatcaaagaagttgaggaagtccctgatttgtgagtctttaatctacaccatgccatggataaactattttcagctgtggaacaattcctgtctcgaagccgaacatgtcggcaggaacctgagatag

SEQ ID NO: 5223 - DNA, 552 bp, synthetic construct
  misc_feature 1..552: note = source = /note="Description of Artificial Sequence: Synthetic coding sequence"
  source 1..552: mol_type = other DNA
atgaaattactgtttccgattttcgcttcactgatgcttcaataccaagtcaacaccgagtttattggcttgaggcggtgccttatggggttgggtcggtgccgggaccactgtaacgtcgacgagaaggaaatccagaaatgtaagatgaaaaagtgctgcgtaggccccaaggtggtgaaactgatcaaaaattacttgcagtatggtacaccaaatgtgctaaatgaagacgttcaggaaatgctcaagcccgctaaaaacagcagcgccgttatccagcgcaaacacatcctgtcagtcttgccacaaattaaatccacctcatttttcgcaaatacaaatttcgttataattcccaacgccacccctatgaacagtgctaccatctcaacaatgacacctgggcagataacctataccgctacaagcacaaaatccaacaccaaagaatcaagagatagtgctacggcctcaccaccgccggccccacctccgcctaatatcctacctaccccgagcctggagttggaggaggccgaggagcagtag

SEQ ID NO: 5224 - DNA, 609 bp, synthetic construct
  misc_feature 1..609: note = source = /note="Description of Artificial Sequence: Synthetic coding sequence"
  source 1..609: mol_type = other DNA
atgagaggacacccgtcgctactgctgctctacatggcgctcactacttgtttggatacctccccatcagaggagacagaccaggaagtgtttttaggtcctcctgaggcacaaagtttcctgtcctcccatactagaatcccccgcgccaaccactgggaccttgagctcctgactccaggcaacctggagcgagaatgcttggaagaacgctgtagctgggaggaagcaagggagtacttcgaggacaacacattaacagagaggttttgggagtcatatatatacaacggcaagggcgggcgaggtagggtcgacgtggcatccttggcagttggtcttactggaggcattctcctgattgtgctggctggtttgggggcattctggtacctgcggtggaggcaacaccgcggacagcaaccgtgcccgcaggaggcagggcttatatctcccctgtccccattaaatccactcgggcccccaacgcctttgccacctccgccccccccaccaccagggttaccaacttatgagcaggccttggctgccagcggcgttcatgacgccccacctcccccttacacgagcctccgcaggcctcactag

SEQ ID NO: 5225 - DNA, 558 bp, synthetic construct
  misc_feature 1..558: note = source = /note="Description of Artificial Sequence: Synthetic coding sequence"
  source 1..558: mol_type = other DNA
atgcgcttattaattctcacatgcctggtcgccgttgccctcgcacgcccgaaacttcctctgaggtaccctgagcggttgcagaatccctctgagtcatctgaacccataccattagaatcccgcgaggagtacatgaatggcatgaacagacagagaaatatactgagagaaaaacagactgatgaaatcaaagataccagaaacgaatccactcaaaactgcgtcgtggccgagccagagaaaatggaatcgagtatatcctcttcttctgaagaaatgagtctcagtaagtgcgccgagcaattttgtaggctcaacgagtataatcagctccagctgcaggccgcgcatgcacaggagcaaattcggcgcatgaacgagaatagtcatgtccaggtcccctttcagcagctgaaccaactcgctgcatatccttatgctgtatggtactatccgcagatcatgcagtacgtccccttccccccctttagcgacatctctaatcctactgcacacgagaactatgagaaaaacaacgttatgctgcagtggtag

SEQ ID NO: 5226 - DNA, 1410 bp, synthetic construct
  misc_feature 1..1410: note = source = /note="Description of Artificial Sequence: Synthetic coding sequence"
  source 1..1410: mol_type = other DNA
atgatcaccgagggcgcacaagcacccaggctcctgctgccccctctgctcctgctgctcaccctgcccgccacaggctctgatcccgtattgtgtttcacacaatacgaggagagcagtggaaaatgtaaggggcttctggggggtggcgtcagcgtggaagattgttgtctcaacacggcctttgcataccagaaaagatccggcggtttgtgtcagccctgtcggtcccctcgatggtccttgtggtcaacatgggccccatgctcagtgacatgctcagagggatctcagttgaggtaccgcagatgcgtgggctggaacggccagtgttccggaaaggttgctccaggaaccttggaatggcagctccaggcttgcgaggaccagcagtgctgccctgaaatgggagggtggtctggctggggcccctgggaaccatgctcagtaacgtgttccaagggaacgaggactcgacggcgggcctgcaatcaccctgctcccaaatgcgggggtcattgtcctgggcaagcccaggagtcagaggcttgcgacacccagcaggtttgtcccacacatggggcttgggccacatgggggccctggaccccctgcagtgcatcatgtcacggggggcctcatgagcctaaggaaacccgatcacggaagtgctccgcaccagagccaagccagaagccgcccggaaagccttgtcccggtcttgcctatgaacaacggcggtgcacgggcctgcctccatgcccagtggccggaggttggggaccttggggaccggtatccccctgtcctgtcacgtgtggacttggacaaacaatggagcagcggacatgcaaccaccccgtgccacagcatgggggaccattctgtgcaggcgacgccacccgcacacatatctgtaacacagccgtcccctgcccagtcgatggggagtgggattcctggggagagtggtctccctgtatccgtaggaatatgaaaagcatatcgtgccaagagattcctggtcaacagtcccggggacgcacctgtaggggacggaagttcgatgggcacagatgtgcaggtcaacaacaggatatccggcattgttatagcatccagcattgccccctaaaaggctcatggtccgaatggagcacatggggactgtgtatgccgccctgtggccccaacccaacgagagcaagacagagactctgcacacctctcctgcctaagtatcctcctacagtcagcatggtagagggccagggcgagaaaaacgtaacattctgggggcgacctctcccccggtgtgaagagctgcagggacagaaactggtcgtggaggaaaagagaccatgcctccacgtaccggcttgcaaggaccctgaagaagaagagctgtag

SEQ ID NO: 5227 - DNA, 453 bp, synthetic construct
  misc_feature 1..453: note = source = /note="Description of Artificial Sequence: Synthetic coding sequence"
  source 1..453: mol_type = other DNA
atgctgatcgccacctctttctttcttttcttctcctcagtggtggctgctccaactcattcgagcttctggcagtttcagagaagagtcaagcatattaccggacggtcagccttcttttcctattacgggtacgggtgctattgtgggctgggcgataagggaatccccgtggatgacactgacagcccctctagtccttctccctatgagaagctgaaggaattctcgtgtcagcccgtcctgaattcttaccagttccatatcgtaaatggagctgtcgtctgcggctgtactctgggaccgggtgcctcctgccattgtcgcctgaaggcttgtgaatgtgataagcagtccgtgcattgtttcaaggaaagcctgccaacttacgaaaagaacttcaagcagttcagcagccagcctcgctgtggtagacataagccctggtgctag

SEQ ID NO: 5228 - DNA, 1347 bp, synthetic construct
  misc_feature 1..1347: note = source = /note="Description of Artificial Sequence: Synthetic coding sequence"
  source 1..1347: mol_type = other DNA
atgagagagtgcatcagtgtgcacgtggggcaggcgggcgtgcaaatgggcaacgcctgttgggagctttactgcctggagcacggcatccagccggacgggcagatgccctccgacaagactatcggggggggtgacgactccttcaccaccttcttttgcgagactggggcagggaaacatgtgccgcgagccgtgttcgtcgaccttgagcccacagtcatcgacgagatacggaacggcccgtaccggcagctgttccatcctgaacagttgatcacagggaaagaggatgcagcaaacaactacgcccgaggacattatacaatcggcaaggaaatcatcgatccggtcctcgaccgcattcgaaagctctcggaccaatgtacagggctgcaggggtttctcgtctttcacagctttggagggggtaccggtagcggattcacatctcttttgatggaacgcctgagcgtcgactacggaaaaaagtccaagctggaattctccatttatccagctccccaagtgagtacagccgtagtcgaaccctataattcaatacttactactcacactactctggaacattccgattgtgccttcatggttgataacgaggccatctatgacatatgccggaggaatctggacattgagcgccccacttacacgaacttaaacaggctaattagccagattgtgagcagcattacagctagcctacggttcgacggggccctgaacgttgacctcaccgagtttcagacaaatctagttccctatccccgtatccacttccctttggccacttacgcccctgtgattagtgcggagaaagcatatcatgaacagctgtcagtcgcagaaattacaaatgcttgcttcgaaccggccaaccagatggtgaaatgtgatcctaggcatggtaagtatatggcgtgttgtctcctgtacagaggcgacgtagtcccaaaagatgttaacgcagcaatagcggcaattaaaacaaagcggtcgatccagtttgtggactggtgtccaactggattcaaagttggaatcaactatcagcctcctactgtggttccaggaggagacctggctaaagtgcaacgggcagtctgtatgctcagtaataccaccgctatcgcagaagcctgggcaagactcgaccacaagtttgatctgatgtacgccaaacgcgctttcgtccactggtacgtgggggaaggcatggaggagggagaattttctgaagcacgtgaggatatggctgctctggaaaaagattacgaggaagtcggtatcgactcctacgaagatgaggacgagggcgaagagtag

SEQ ID NO: 5229 - DNA, 942 bp, synthetic construct
  misc_feature 1..942: note = source = /note="Description of Artificial Sequence: Synthetic coding sequence"
  source 1..942: mol_type = other DNA
atgcgcgtggtcaccatcgtcatccttctatgcttttgcaaggctgctgaactcagaaaggcaagtcccggctccgttcgctccagggttaatcacggaagggctgggggcgggagaagaggtagcaatcccgtgaagagatatgctcctggactcccttgcgatgtgtatacgtacttacatgaaaagtacctcgactgccaggaacggaaactggtgtacgtcctgccaggatggccccaggacctgctgcacatgctgctcgcaaggaataaaatacggacattaaagaacaatatgtttagcaagttcaagaagcttaagtcactggacttgcaacaaaatgaaataagcaagattgaatcagaggccttcttcggcttaaataaactaacgaccttgctgttacaacataaccagattaaggtattgacagaggaggtgttcatctacaccccgctcctgagttatctaaggctctacgataacccgtggcattgtacatgcgagattgagacattaattagcatgctgcagatccctcggaacaggaatctcgggaattatgcaaagtgtgagtcgccacaagagcagaagaacaagaaattacgacagatcaagtctgagcaactgtgcaatgaggaggagaaggaacagctcgacccaaaaccccaagtgagcggccgtcctccagtgataaagcccgaggtggactctaccttctgccacaattacgtattccctattcagacattagactgcaagcggaaggagctaaagaaggtccctaacaacattccaccagacattgtcaaactggacctcagttataacaaaattaaccaactcagacctaaagagtttgaagatgttcacgagctgaagaagttgaatctgagctcgaacggtattgagttcatcgacccaggttctttaagatag

SEQ ID NO: 5230 - DNA, 972 bp, synthetic construct
  misc_feature 1..972: note = source = /note="Description of Artificial Sequence: Synthetic coding sequence"
  source 1..972: mol_type = other DNA
atgcaggctgcttggcttctgggcgcactcgtcgtaccacagctcttaggcttcggacatggcgctagaggggcggaacgcgagtgggagggcggatggggtggggcccaggaagaagagcgggagcgcgaagccttgatgctcaagcatctgcaggaagctttagggctgccagctgggcggggcgatgagaacccagccggaaccgtcgagggtaaagaagactgggaaatggaggaggatcaaggagaagaagaagaggaggaggcgacccccacacctagcagcgggccaagcccctccccaactcctgaggatattgtgacctacatcctgggacgcctggccggcttggacgccgggcttcaccagctgcatgttagactccatgcgctggacactcgtgttgtggaactgacacagggtttaaggcagttgaggaacgccgccggagacaccagagatgccgtgcaggcactgcaggaagctcaggggagggctgaaagagaacacggaagactcgaggggtgcctgaagggcctccggctggggcacaagtgtttcctgctcagccgagattttgaggcccaggctgcagcccaggccaggtgtacagccaggggggggtcactggcacagcctgctgacaggcagcagatggaggccctcacaagatacctccgagcagcgctcgccccctacaactggcctgtgtggctgggcgtccacgatagaagggcggaagggttgtatttgttcgagaatggtcaaagggtatccttcttcgcttggcatcggtcgccaaggcctgagctgggagctcagcctagcgcctctccacatccattgtccccagaccagcctaacggtggcacacttgagaattgtgtggctcaggcctcagatgatggtagttggtgggaccacgactgtcagaggagactgtactacgtttgtgagtttccattttag

SEQ ID NO: 5231 - DNA, 1086 bp, synthetic construct
  misc_feature 1..1086: note = source = /note="Description of Artificial Sequence: Synthetic coding sequence"
  source 1..1086: mol_type = other DNA
atgaacgggctgagcctgtcggagctgtgttgtttattttgctgccccccatgtcctggaaggatagccgccaagttggcttttttgcccccagaggccacgtactcactggtccccgagcctgagccgggtccaggaggcgccggtgctgcacccctagggacccttagggcaagttctggcgctcctggcaggtggaagttgcacttgactgagagagccgacttccaatactcacagagagagctggacaccattgaggtgttcccgaccaagtctgcgcggggcaatcgggtctcttgcatgtacgtgcggtgcgtaccaggtgcacgccagggtcaccaagcccaagggggtcaccctcagttggcgtgggtcggacggctgggcgattccaataacccagctccgggaggctgtctgttgggcaagtcctgggggaccggtgcagccctcgcatgtgggtacattcatctgcttgctagatacactgtgttattttcccatggaaatgccgtcgacctgggccagatgagctccttctacattggcctgggctcgcgcctgcactgcaatatcttctcttacgactactccggatacggggcgtccagtggcagacctagtgagcgtaatctctacgccgatatcgacgctgcgtggcaagccctccgaaccaggtacgggataagcccggactcaattattctatacggacaaagtatcggtacagtgcctacagtggatttggcaagtcgatatgaatgtgcggccgtggttctccactccccactcacttctggaatgcgcgtagcatttcccgacacaaaaaaaacatactgttttgacgccttccctaacattgagaaggtgtcaaaaataaccagccccgtgctaatcattcacggaactgaagacgaagtaattgatttcagccacggactagcactgtatgagcggtgtccaaaggctgtggagcctctttgggtagaaggtgcagggcacaatgacattgaactgtacagccagtacctagaacgtctgaggagatttataagccaggagctgccctcacagcgggcctag

SEQ ID NO: 5232 - DNA, 1404 bp, synthetic construct
  misc_feature 1..1404: note = source = /note="Description of Artificial Sequence: Synthetic coding sequence"
  source 1..1404: mol_type = other DNA
atgaggactgctccatcgctgaggcgctgcgtttgtctactgctggccgctatcctggatctcgcacgcgggtatcttaccgtgaatattgagcccctccctcccgtcgtggccggagatgcagtcactttgaagtgtaacttcaaaactgatggaaggatgcgcgagatagtctggtatcgagtgactgacggtggtaccatcaaacagaagatttttactttcgatgccatgttctcgacaaactattctcatatggagaattacaggaagcgggaggatctagtctaccagagtacagtccggctgcccgaagtgcggatcagcgacaacggcccttatgagtgtcatgtcgggatttatgaccgagcaaccagggagaaagtggttctggcctctggcaatatctttttgaacgtgatggccccccctactagcatcgaggttgtggcagccgacacacccgctccattctcgagataccaggcccaaaactttacacttgtgtgtattgtttcagggggcaaaccagcccccatggtgtacttcaagcgggacggagaacccattgatgcagttcctctgagtgaacctccagctgcatcttccggccccctccaggacagccgcccttttagatctctcctacaccgggatctcgacgacactaagatgcagaagtcgcttagcttgctggacgctgaaaacaggggcggaagaccatacaccgaacgcccttctaggggtctcactccagatcccaatatcctgctccaacccacaaccgagaatatacccgagaccgtggtgtctcgtgagtttccacgatgggttcactcagctgagcctacatattttctacgacatagccggaccccatcctcagacgggactgtggaagtacgggctctcctgacttggacactaaaccctcagatcgataacgaggccctgttctcctgcgaagttaagcacccagccttatccatgccgatgcaggctgaagtgacgttggtagcccctaagggtcccaaaatcgtgatgacccccagccgcgctagggtcggagatactgtgcggatactggtgcacggcttccagaatgaggtcttcccagaacctatgttcacctggacccgcgtgggatctcggctactggacggcagcgctgaatttgacggcaaggagctggtactggaacgcgtacctgccgagctcaatggtagtatgtatagatgcaccgcccagaaccccttaggatccaccgatactcacaccagactgattgtatttgaaaacccaaatatcccacgcggcactgaggattccaacgggtccatcggtcccaccggtgctaggcttacactggtcctagccctcacagtcattctggagctgacttag

SEQ ID NO: 5233 - DNA, 783 bp, synthetic construct
  misc_feature 1..783: note = source = /note="Description of Artificial Sequence: Synthetic coding sequence"
  source 1..783: mol_type = other DNA
atggcacgccctggtatggaacgctggcgcgaccgcctggctttggtgaccggcgcgtctggaggcattggggccgcagtcgcccgtgctctagttcagcaaggcctaaaggtggtcgggtgcgctcggaccgttggaaacatcgaggaattggccgccgaatgcaaatccgccggctatccgggcactttgatcccctataggtgcgacctgagtaacgaagaagacatactgtctatgttctccgccattcgatcgcagcattctggagtcgatatctgcattaataacgccggcctcgctcggccagatacgctactcagtgggtcaacctctggctggaaagatatgttcaatgtgaatgtattagcactttcaatttgtacccgggaggcctaccagagcatgaaagaacggaacgtggacgatggacatatcatcaacatcaattcaatgtcgggccaccgggtactgcccctgagcgttacccacttctacagtgccaccaagtacgccgtcactgcccttactgaaggcctcaggcaagagcttcgggaggcccagacacatatcagggctacgtgcatttctcccggcgtagttgagacccagttcgctttcaaactgcacgataaagatccggaaaaggctgctgctacctacgagcaaatgaaatgtcttaaaccagaggacgtcgccgaggccgtcatctatgtgctgtcaactccagcacacatacagattggtgatatacaaatgagacctactgagcaggtaacctag

SEQ ID NO: 5234 - DNA, 1218 bp, synthetic construct
  misc_feature 1..1218: note = source = /note="Description of Artificial Sequence: Synthetic coding sequence"
  source 1..1218: mol_type = other DNA
atgtctagccccgccctgactgcaggagctagcggcaaggtgatggacttcaataatggaacttatctggtgtccttcacattgttctgggaaggacaggtttctctgagccttctcctaattcacccttcagagggcgcttcagctctgtggagagcccggaaccagggatacgataaaatcattttcaagggaaagttcgtgaacgggacctcacatgtatttactgagtgtggcctgacgctaaatagcaatgctgaactgtgtgagtacctagacgaccgtgatcaggaggccttctattgcatgaagcctcaacacatgccctgtgaagccctcacgtacatgactacacgtaatcgggaggtgtcgtacttgactgataaggagaattctctcttccataggtctaaggttggggttgagatgatgaaggacagaaagcatattgatgttactaattgcaataaacgcgaaaagatcgaagagacatgtcaggtcggaatgaagcccccagtacctggggggtatacactccagggcaaatggataacaaccttttgcaatcaggtccagctcgacactattaagatcaatggctgtctcaaaggcaaactgatttatctcctcggcgactctacccttagacagtggatttactacttcccgaaagttgttaagactctgaaattttttgatttgcatgagacaggtatctttaagaagcacctgctgctggacgctgagagacatacacagatccagtggaaaaaacactcttaccctttcgtaaccttccagttgtatagtcttattgaccatgattacattcctagggagatagaccgactgagcggcgacaaaaacacagcaatagtgataacgttcgggcagcattttcgaccattcccaatagatatcttcattcgccgcgccattggcgtgcagaaagccattgaaagactattcttgagatcacccgccacaaaagtaattattaaaaccgaaaacatcagagagatgcatatcgagacggagcggttcggcgactttcatgggtatattcactatctgataatgaaagacatcttcaaggacctgaatgtaggaatcattgacgcttgggatatgacaattgcctatggcactgacacaatccatcccccagatcatgtcattggcaatcaaatcaacatgtttctgaattacatctgttag

SEQ ID NO: 5235 - DNA, 597 bp, synthetic construct
  misc_feature 1..597: note = source = /note="Description of Artificial Sequence: Synthetic coding sequence"
  source 1..597: mol_type = other DNA
atgcccgtgccagctctgtgtctactgtgggccctcgcaatggtaaccagaccggctagcgccgccccaatgggcggacccgagcttgcccagcacgaggaactaactctcttgttccacggcacactgcagttaggacaggcactgaatggagtgtatcgtactacagagggaaggttgactaaagctcggaactctctgggactttatggacggactattgaactgctgggccaagaggtcagcagagggagagatgctgctcaggagctgcgcgcatccctgctggagactcagatggaagaggatatcctgcagcttcaggcagaagcaacagccgaggtattgggcgaggtcgcccaggcacaaaaagtcttacgggactcagtgcagagactagaggttcaacttcgcagcgcatggctgggccctgcctatcgagagtttgaggtcttaaaagctcacgctgataagcagagccatatactgtgggcgctgacaggccacgtgcagagacagcgccgggagatggtggctcagcagcaccggctgaggcagatccaggagcgattacacaccgcagctctccctgcttag

SEQ ID NO: 5236 - DNA, 1455 bp, synthetic construct
  misc_feature 1..1455: note = source = /note="Description of Artificial Sequence: Synthetic coding sequence"
  source 1..1455: mol_type = other DNA
atggcaggcccctggaccttcactctgctgtgcggtctcttagccgccacgctgattcaagcgactctcagccctaccgcggtattgatcctgggccctaaagtgatcaaggaaaagctaacacaggaacttaaagatcacaatgccacctctattctacagcagttgcctttactcagcgccatgcgcgaaaagcctgcgggaggaatcccggtgctgggaagtctcgtgaacacggtgcttaaacacattatctggctcaaggtgattacagccaatatcttacagctgcaggtgaaaccaagtgccaacgatcaggagctgcttgtgaagatccctctagacatggtcgcgggcttcaatacacctctggtgaagactattgtggagttccacatgacaacggaggcccaggctaccattcgtatggacacaagcgcctctgggcccacgcggctggttctttccgactgtgcgacatcccatggttcgctccgtattcagttactacacaagctgagcttcctggtaaatgccttagcaaagcaagttatgaacctgttggtaccaagcctccccaatctggtgaagaatcagctgtgccccgtcatcgaggccagttttaacggaatgtatgccgatttgctgcagctcgtcaaggtccctatcagcctttctatagaccgccttgaattcgatctcctataccccgcaatcaagggcgacactatccaattatacctcggagctaagttactagactcgcaagggaaggtgactaaatggttcaacaactccgccgcatccctgactatgcccaccctagataatattccctttagtttgatcgtgtcccaagatgttgtcaaggcggcagtggccgctgtactcagtccggaagaattcatggtcctcctggattcagtgttgcccgagagcgcccaccgccttaaaagctccatagggctgatcaacgagaaagccgctgacaagctggggagcacccagatcgttaaaatactgacacaggataccccagagttctttattgaccagggacacgcaaaggtagcccagctaattgtcctggaggtgttcccgagcagcgaggctctcaggcccctcttcacactcggaattgaagcctcttccgaggcgcagttctacacaaagggcgatcagctgatactgaatcttaataacatctcaagcgatcgtatccaactgatgaattctggtataggctggttccaacccgatgtgctcaagaacatcattacggaaatcatccacagtatcttgttgcctaaccagaatgggaagctgcgatccggtgttccagtgagccttgttaaagccttgggattcgaggcagcagaatcaagcctgacaaaagatgctctggttctgaccccagctagcctgtggaaaccgagctctccggtgtctcagtag

SEQ ID NO: 5237 - DNA, 750 bp, synthetic construct
  misc_feature 1..750: note = source = /note="Description of Artificial Sequence: Synthetic coding sequence"
  source 1..750: mol_type = other DNA
atgctgcagctatggaaactggtcctgctctgtggcgttcttacaggcacaagcgaatccctacttgacaatctcggtaacgatctgtctaacgttgtggacaaactggaaccagttctccacgaaggcctcgaaacggttgataatactctgaaaggcattcttgaaaagctcaaagtcgatttaggggtcctccagaagagttctgcatggcagctcgctaaacaaaaagcgcaggaagcagagaagcttctcaataatgtgatttctaaactcttgccaacgaacacagatatctttggcctgaagatctccaatagcttgattctcgacgtgaaggccgaacctatcgatgacggcaaagggctgaacttgtcttttcctgtcactgcaaatgtaaccgtcgctggaccaattatcggacagatcatcaatcttaaggcatccctagatttgctaaccgcagttaccattgaaaccgatccccagactcatcagcccgtggctgtcctcggagagtgcgcctccgatcctacatctatctcattgtccttgctagacaagcacagccagattattaacaaattcgtcaattctgtgattaataccctgaaaagtactgtgtcctctctgctccagaaggaaatctgtccactgattcgcatcttcatccacagccttgatgttaatgtgatacagcaggtggtggataatccacagcacaagactcagttacagactcttatatag

SEQ ID NO: 5238 - DNA, 1959 bp, synthetic construct
  misc_feature 1..1959: note = source = /note="Description of Artificial Sequence: Synthetic coding sequence"
  source 1..1959: mol_type = other DNA
atgcagggccccctccttctccccggattatgctttttacttagcctgtttggggcggtgactcagaagaccaaaacgagctgtgccaagtgccctcctaatgcaagttgtgtgaacaatacacactgcacctgcaatcatggctacactagcggttccgggcagaaactctttacctttcccctggagacatgtaacgatatcaacgaatgcactcctccatactccgtctattgtggttttaatgccgtgtgttataacgttgagggctccttttactgtcagtgcgtgcctggctacagacttcatagtggcaatgagcaattttccaacagcaacgaaaacacatgtcaggatacaactagtagcaagaccacagagggtcgcaaggaacttcagaagatcgttgataaattcgagtctttgttaacaaaccagaccctttggcgcaccgaaggacgacaggaaatcagctcaactgctacgacaatcttgcgagacgtggaaagtaaggtcctcgaaactgccctgaaggatccagaacagaaggttctaaaaatccagaatgacagcgtggctatcgagacccaggccataacagacaattgttctgaagagcggaagacctttaatctgaacgtccagatgaacagtatggatatcagatgcagcgacatcatacagggcgatactcaaggacccagtgctatcgctttcattagttacagcagtctgggcaatatcataaatgctaccttcttcgaggaaatggataagaaggatcaagtctaccttaactcccaagtagtgagtgcagcaatcggaccaaaacgcaacgtgtccctgagcaaatctgtgacgttgacgttccagcacgtaaagatgacccctagcacgaagaaagtgttttgcgtgtactggaaatctacagggcagggctcacaatggagcagagacgggtgcttcctgatccatgtgaacaagagccacaccatgtgtaactgtagccatctttcctcctttgctgttctgatggccctgacctctcaggaggaagatccagtgctgacagtcattacttatgtcgggctgtcagtatcactactctgtttactcctggccgccctgacgttcctgctgtgcaaggcaattcggaatacaagcacctcattacatttgcagttgagcctttgtctatttctcgcgcacctgctcttcctcgtggggatagaccggaccgagccaaaagtactctgcagcattatagccggtgcccttcattatctgtatctggccgccttcacctggatgcttctcgagggagtgcatctttttttaacagcacgcaacttaaccgtcgtgaactatagcagcattaaccgactgatgaagtggatcatgttccctgtcggatatggtgtccccgcagtgacagtagcaatctcggccgcctcctggccacacctgtacggtacggccgatcggtgctggctccatctagatcaggggtttatgtggtctttcctcgggccggtgtgtgccatcttttctgcgaatctggtcctctttatccttgtgttttggatcctgaaaagaaagctgtccagtttgaactcggaagttagcactatacaaaacacaaggatgctggcttttaaggccaccgcccaactgtttatactgggctgtacatggtgcctggggttattacaggttggcccagcagctcaggttatggcctatttgttcaccattatcaactccctccaaggatttttcatctttttggtctactgtctcctgagccagcaggtacaaaagcagtatcagaaatggttccgcgagatcgtgaagtctaagagcgaatcagagacatatacactatcatctaaaatgggcccagactctaaacccagtgaaggcgacgtgttcccagggcaggttaagcgtaagtactag

SEQ ID NO: 5239 - DNA, 1263 bp, synthetic construct
  misc_feature 1..1263: note = source = /note="Description of Artificial Sequence: Synthetic coding sequence"
  source 1..1263: mol_type = other DNA
atgagtccaccccccctgctgcaacctcttctcctcctcctgcctctgctgaacgtcgagcccagcggtgccacactaatccgcatcccgttacatagggtgcagccaggcagacgtatattaaatcttcttaggggctggcgtgagccagcagaactgccaaagctgggagctcccagccctggggacaagccaatctttgtgcctctttcaaattacagggatgtgcagtacttcggagaaattggtctggggacaccacctcagaactttaccgtagctttcgacactggttcctcgaatctgtgggttccctctagacgttgtcacttttttagtgttccatgttggctgcatcacaggtttgatcccaaggccagctcctcttttcaagctaatgggaccaagttcgccatccagtatgggacaggacgtgttgacggtatcctcagtgaggacaaattaactatcggtggaatcaaaggcgcatctgtaattttcggcgaagccctctgggagccaagtttagttttcgctttcgcccacttcgatggcatcctggggctcggattccccatactgtccgtcgagggggtcaggccaccgatggatgtgctggtagagcagggtctgctggacaagcccgtattcagcttctatctcaacagggaccctgaggaacccgatggcggggagctggtcctgggcggctccgaccctgcgcactacattccccccctgacgtttgtacccgtgactgtgccagcgtactggcagattcacatggaaagggtgaaggtgggacccggcttgaccttgtgtgcgaagggctgtgccgccatactcgataccggcactagcctgattacgggtccaacagaggagatcagggccctacatgccgcaatcggtgggattcctttgctggcgggagagtatataatcctctgttctgaaattccaaaactgccagccgtctccttccttctcggaggcgtctggtttaaccttacggcccacgactatgtgattcagacaacgagaaatggggtacggctgtgtctgagtggcttccaagccctcgacgtcccgccacccgctggtccattttggattctcggggacgtgttcctgggcacttatgtggctgtgtttgaccggggtgacatgaagagttcggcgcgagtgggcctggcaagggccaggacccggggtgctgacttaggatggggcgagacagcacaggcacagtttcctggctag

SEQ ID NO: 5240 - DNA, 1293 bp, synthetic construct
  misc_feature 1..1293: note = source = /note="Description of Artificial Sequence: Synthetic coding sequence"
  source 1..1293: mol_type = other DNA
atggcctggaccttcgagtgttctcgcacaacctcccccgaaccactatccacaagtccctgtcggaccacatcttctaggaactcccctacaatgtcctgccctgcaagtgtagcctgtgagccgtctacaagcaccactacctcctctccacccaaactttcagtggcacctcagtttttgccacggagccttcgcgtggctgacctggccgcgaaccaagtgatggaaatctttccactgacattcggagaaaaacccgctctgagatccgtgtatctgcataacaaccagctgagtaacgccgggctgcccccggacgccttccgagggtctgaggcaatcgctacactcagcttatcgaataaccagctgtcctatctgcccccttctttgcctccttccctggaaagattacacctacaaaacaaccttatcagcaaagttcccagaggagctttaagtcgccagacgcaactccgggaactctatttgcagcacaaccagctcactgattccggcctcgacgcaactactttctccaaacttcattccctagaatacttagatttgagccataaccaactgacgacggttccagcagggctccctcgaaccctggccatactgcacttgggccgcaatcgcattcgacaggttgaggctgctcggctccatggcgctagagggctccgttacctgctgcttcagcataaccagctgggctcttccgggcttccagcaggcgctctccggcccttaagagggctgcacactctgcacttgtatggaaacggcctcgatagagtccccccagccctgcctcgccggttacgagcactggtgcttccacataatcacgtggctgccctcggagccagagaccttgtggcaacccccggactgacggagcttaacctggcttataatagactggcctccgcaagggtacaccaccgggcttttaggcgattaagagccctgcgttcactcgatcttgcaggtaatcagctcacgaggctcccaatgggattaccaacggggctccggaccctgcaattacagcgcaatcaactaaggatgttggaaccggagcccctggcaggcttggaccaactgagagagctttctctagcacataacaggttacgggttggggacattggccccgggacctggcacgaattacaagctttgcaggtgcggcaccggttggtgagccacaccgtccctagggccccgccctccccatgtctgccctgccatgtccctaacatactcgtgagctggtag

SEQ ID NO: 5241 - DNA, 3162 bp, synthetic construct
  misc_feature 1..3162: note = source = /note="Description of Artificial Sequence: Synthetic coding sequence"
  source 1..3162: mol_type = other DNA
atgtggcaacctcggcgcccctggccaagagttccctggcgttgggccctcgccctgctcgccctcgtgggagccgggctttgtcacgcaggcccacagcctggctaccccgcgcggccctccgctcgcaacaagaattggtgcgcctacatagttaacaaaaacgtctcttgctctgtgctcgaaggatccgaaagttttattcaggcccagtataattgcgcctggaaccagatgccatgtccatcagctttggtttaccgggttaacttcaggccacgctacgtgacaaggtataagaccgttacacagctggagtggagatgctgccccggcttcagaggtggcgattgtcaggagggcccaaaggaccctgtcaagacactgcggcccacaccagctcggccacgcaattcactgaagaaggccactgacaacgagccatcacagttttccgagccacggaaaactttgtcccctactggaactgcccagcccagctggggggtggatccaaaggagggtcctcaagagctgcaggagaaaaaaatccaggtcttggaggaaaaggtgctacgtcttactagaactgtactcgatctgcagagctcacttgcaggtgtatctgaaaacctaaaacacgcaacacaagatgatgcttccagaaccagggccccagggctgagctcacagcacccaaaacctgacacaacagtcagtggagacacggaaacaggccaatcccccggagtgttcaatacaaaggaaagcggaatgaaagatataaaatcggaactcgccgaggtcaaagacaccctgaaaaataagagcgacaagctggaagagcttgacggcaaggttaaaggctacgaaggccagctccggcagctgcaagaagcggcgcagggccctactgtgacaatgacaaccaacgagctgtaccaggcttacgttgattctaaaattgatgcccttcgtgaggaactgatggagggcatggatagaaagctggccgacctgaaaaacagctgcgagtataaactcactggactccaacagcagtgcgacgattatggctcatcgtaccttggcgttatcgagcttattggggagaaggagacttccctacgcaaggaaatcaacaatctgagggctcgcctgcaggagccgtccgcacaggcaaactgttgtgacagcgaaaagaatggcgatattggccagcaaattaaaaccctggaccagaagattgagagggtagcagaggcaacacggatgttaaatggccgtctggacaacgaattcgatcgtttgattgtgccagagccagacgtggacttcgacgccaagtggaatgaattagatgcccggatcaatgtaacagagaagaacgccgaagaacattgcttctacatagaggagaccttgcgcggcgccattaacggcgaagtgggcgatctcaagcagctggtcgaccagaaaatccagtccctcgaggacagattgggatcggtcttgctccaaatgaccaacaacactggggctgagttatcacccccaggggctgccgccctccctggagtgagtggctccggggacgagagagttatgatggagctgaaccacttgaaagataaagttcaggttgtcgaagatatctgtctattgaacatccagggcaaacctcacgggatggagggtgcactgcccaaccgggaagacagagctgttcgggattctttacacctgcttaagagtctgaacgacaccatgcaccgcaagttccaagagacagagcagacgattcagaaactgcagcaggacttttcctttctgtactcccaattgaatcacactgagaatgacgttactcacctgcagaaggagatgtccaattgtcgcgccggagagaacgctgggatgggtcgctttactaaagtaggggagcaggagaggacggtagacaccctcccatcgccacaacatcccgtggcccactgctgttcacagctggaagagcgctggcaacgactgcaatcacaggtcatctccgagcttgatgcctgcaaggagtgtacccagggcgtgcaaagggaggtgtctatggtggaaggccgagtctcacacatggaaaagacatgctctaagctagactctatcagtgggaacctacagcgtatcaaagaagggctcaataagcatgtctcttcactctggaactgcgtacggcaaatgaatgggactttgcggagccactctcgggatatttccgggctgaagaatagcgtgcagcagttttattctcatgtgttccaaattagcacagacctgcaggacctagtgaaattccagccaagcgcaaaggctccctctcctccgcctcccgccgaggctccaaaggagcctctccaacccgagcctgctccccctaggcccagtggaccggccacagcagaggatcccggcaggaggcccgtcctgccacagcggccacccgaagaacgacccccccaaccccctggaagcactggcgtaattgctgagaccgggcaggctggcccacctgccggcgccggtgtaagcggaagaggtctcccgcggggggtagatggtcagaccggatcaggaacagtgcccggcgccgaagggttcgctggggccccaggataccccaaaagtccccccgtggcgagccctggtgctccagtcccatcactcgtatctttctcagccggcctgacccagaaaccctttccaagcgatggcggcgttgtcctgtttaacaaggtcttagttaatgacggggacgtctataacccatccaccggagtatttaccgctccatacgatgggcgatatttgatcactgccactctgacccctgaaagagatgcatatgtggaagccgttctgtctgtatcaaacgcaagtgtggcgcagctacacactgcgggatatcggagggaattcctggagtatcacagaccaccgggcgccctccatacatgtggaggacccggagccttccaccttattgtccacctgaaagcgggtgatgctgtcaacgtggtcgttaccggcggaaaacttgcccacaccgacttcgacgaaatgtattccactttctccggggtattcctttaccctttccttagtcatctgtag

SEQ ID NO: 5242 - DNA, 1548 bp, synthetic construct
  misc_feature 1..1548: note = source = /note="Description of Artificial Sequence: Synthetic coding sequence"
  source 1..1548: mol_type = other DNA
atggcccagttatttctgcctctactcgccgcgctggtccttgctcaggcaccagctgcacttgcagacgttctggagggggactcttctgaggatagagcctttcgagttaggatcgctggtgatgccccgctacagggcgttcttggaggagccctgaccataccctgtcacgtgcactatttgaggccccccccctctcgcagagctgtcttaggaagtccccgggtcaagtggacgttcctcagtagagggcgggaggccgaggtactagttgccaggggggtgagagtgaaagttaacgaagcgtacaggttccgcgtggcattacccgcctatcccgcatctctcacagacgtctccctggcactttctgagctgcgccctaacgatagcgggatttacagatgtgaagttcagcatggcatcgacgattcatccgacgctgtggaagacagtcaactataccctatccagactccaagggaagcttgttatggggacatggatggctttcccggagtgaggaactacggggtggtggatccggacgacctgtatgatgtgtattgctacgctgaggatcttaatggggagttgttcctcggagatccgcccgaaaaactgaccctggaggaggcccgtgcttactgtcaagagcgtggtgccgaaatcgctaccactgggcagctctacgccgcgtgggacggcggcctggaccactgctcacctgggtggctggcagacggatctgtaaggtaccctatagtgaccccaagccagcggtgcggcggcggcctgccaggggtgaaaaccctgtttctgtttccaaatcagaccggtttccccaataagcacagccgtttcaacgtttactgcttccgcgggtcaacctgcttactgccctcactgcgccccccaacgcaaccacctacacaggacggcttggaggccatagttaccgttacagaaaccctggaagagctccaactgccgcaagaagccacagaatccgaatcacggggggccatatactccatcccaatcatggaagacggaggagggggaagctccacacctgaagatcccgccgaggcacccagaacgctcttggaatttgagactcaatccatggtcccacccaccgggttcagtgaggaagaaggcaaggccttggaagaagaggagaagtacgaggacgaagaggagaaagaagaggaggaggaagaggaggaggtcgaggacgaagccctgtgggcatggccttcagagctctcctcacctggtcctgaggcctctctgcccaccgaaccagcagctcaggaagagagcctctcacaagcgccagcgagagcggtgcttcaacctggagccagccccctgcctgacggcgagtccgaggcttcacgtccaccccgcgtacacgggcctcccactgagaccctccctacgccaagggaacgaaacctcgccagtccttcaccctctacactcgtggaggcaagggaagtgggcgaagcgacgggcggtcctgaactttcaggatag

SEQ ID NO: 5243 - DNA, 1023 bp, synthetic construct
  misc_feature 1..1023: note = source = /note="Description of Artificial Sequence: Synthetic coding sequence"
  source 1..1023: mol_type = other DNA
atgcccggatggctcaccttgccaaccctgtgtagattcctcctctgggctttcaccatctttcataaggcccagggcgaccccgcttcgcatcctggcccgcactatctgctgcctccgatccatgaggtgattcattcacacagaggagctaccgctaccctgccatgcgtccttggtaccaccccaccatcctacaaagtccggtggtcaaaggtggagcctggtgagcttcgggaaacactgatactgataacaaacggtctgcatgcacggggttacggtcctctcggagggcgcgcccgaatgcgtagaggccatagacttgacgcatccctggtgattgcgggagtgcgcctggaggacgaaggtcgttaccggtgcgaactgattaacggcattgaggacgagtccgtggctctgaccctgagcttagaaggagttgtgttcccctatcaaccaagtaggggcagataccaatttaactattatgaggcgaagcaggcctgtgaggaacaggacggacgcttggcgacttacagccagctctaccaggcctggaccgaaggcctggactggtgtaacgctggttggctgctggagggcagcgtcaggtacccagtgttgacagcccgggccccttgcggaggcagagggcgccccggcatcagatcctacggcccccgggatcggatgcgcgaccgatacgacgcattttgtttcacctccgccttggcgggacaggtgttttttgtccccgggcgactgacactgtccgaggcacacgctgcatgcagacggaggggcgctgtcgtggccaaagtagggcatttatacgctgcatggaagttctctgggctcgatcagtgcgacggtgggtggctcgcggacggttccgtgcgctttccaatcaccacgccccgcccccgatgtgggggattacctgaccccggcgtcagaagtttcggcttcccccggcctcaacaggccgcctacgggacatactgttacgccgagaactag

SEQ ID NO: 5244 - DNA, 690 bp, synthetic construct
  misc_feature 1..690: note = source = /note="Description of Artificial Sequence: Synthetic coding sequence"
  source 1..690: mol_type = other DNA
atggacctcctccaattccttgcttttctgtttgtgctgttgctctcggggatgggggccaccggtacgctgagaaccagtctagacccctcactggagatttacaaaaagatgtttgaagtaaagagacgggagcagttacttgctctcaaaaatctggcccagctcaatgatatccaccaacaatataaaattcttgacgtcatgctgaaggggctctttaaggtgctagaagattcaaggacagtcctgacagcggccgacgtgttacccgatggaccttttccacaagatgagaagttgaaggatgctttctcacatgttgtggagaataccgctttcttcggtgatgtcgtgcttcgattcccacgtattgttcactactactttgaccacaattcgaattggaatctgttgatcagatggggaattagtttttgcaatcagaccggggtgttcaaccagggtcctcatagtcccatactgagcctcatggctcaggaactggggattagcgagaaggattcaaatttccagaatccctttaagattgaccgaacagagtttatccctagtaccgaccccttccagaaagccctgagggaagaggagaagaggcgtaaaaaagaggagaagcgaaaggagatacggaagggtccaagaatctctcggtctcagtccgagctgtag

SEQ ID NO: 5245 - DNA, 465 bp, synthetic construct
  misc_feature 1..465: note = source = /note="Description of Artificial Sequence: Synthetic coding sequence"
  source 1..465: mol_type = other DNA
atgtccgtgggaaccagtttggagcaagctcagatgtcaactctgacatgccccctttttatccctacagtagggcgcaagactgcattgcacagcggtgaggacttccaaactcttcttttcgagcgcgtattcgtgaacctagatgggtgctttgacatggcaacaggccagttcgctgcaccactcagaggcatttatttttttagcctcaacgttcattcctggaactacaaggaaacctatgtgcatataatgcacaaccagaaggaggccgtcatcctctatgcacagccctctgaaaggagcataatgcagtcgcaatccgtcatgctggatttagcatacggagatcgtgtttgggtgaggcttttcaagagacaacgcgagaacgccatctacagtaacgattttgatacatatataacgttttccggccatctcatcaaagcagaagatgattag

SEQ ID NO: 5246 - DNA, 900 bp, synthetic construct
  misc_feature 1..900: note = source = /note="Description of Artificial Sequence: Synthetic coding sequence"
  source 1..900: mol_type = other DNA
atgagaagtgtgggggaaggagcaagagaatggatccgcgagtgccagcatcagtttcggcatcatcgctggaactgcacaactttggatagggaccatacggtttttggtcgggtgatgctccggtcttctcgcgaagccgcctttgtgtacgccatttcatctgccggggtggtacacgccatcaccagggcttgctcacaaggggagctgtcggtgtgctcttgtgatccatacacacgaggccgacatcacgaccaaagaggcgattttgactggggtggatgctctgacaatatacactatggcgtccggtttgctaaggcttttgtcgacgccaaagagaagcgcctgaaggatgcgagagctctgatgaatctgcacaataacagatgcggtcgaaccgccgtccggcgcttcctaaagctggaatgcaaatgtcatggcgtgagtggcagctgcacgctgaggacctgttggcgtgccctgagcgattttaggaggacaggggactacctgcggagaaggtatgatggggcggttcaggttatggccacccaggacggtgccaactttacggccgccaggcagggataccggagggctacccgcacagacttggtttactttgataattcccccgattactgcgtgctagacaaagcagctggttccctagggactgcggggagagtctgctcaaaaaccagcaaaggtacagatggatgtgagatcatgtgttgtgggcggggatacgataccaccagagttaccagggtgactcaatgcgagtgtaaatttcactggtgttgcgccgtgcgctgcaaggagtgcaggaacacagtggacgtccatacctgtaaggctcctaagaaggccgaatggttagatcagacctag

SEQ ID NO: 5247 - DNA, 1710 bp, synthetic construct
  misc_feature 1..1710: note = source = /note="Description of Artificial Sequence: Synthetic coding sequence"
  source 1..1710: mol_type = other DNA
atgctgcttctcttttcagtgattctgattagctgggtgagcaccgttggtggtgaaggcacgttgtgcgattttcccaagattcaccatggatttctctacgacgaagaggactacaacccattttcccaggtaccgaccggcgaggttttctattacagttgcgaatacaattttgtttctccatccaagtccttctggacaaggatcacgtgcaccgaggagggatggtcaccaacacccaagtgtttgcgcatgtgttctttcccttttgtcaagaacggtcatagcgaatctagcggactgatccacctcgagggggataccgtgcaaatcatttgcaataccgggtactccctccagaataacgagaaaaacattagctgcgttgagcgtgggtggagtaccccacctatttgttcattcaccaaaggagaatgccacgtacctatccttgaggcgaacgtcgatgcacagcccaagaaggagtcatacaaggtgggggacgtcctgaaattctcttgcaggaagaacttgattcgggttggtagcgattcagtacaatgctaccagttcggctggagtcccaacttccctacctgtaaaggacaggtacggtcctgcggcccccctccgcagctgtcaaatggagaggtgaaggagattaggaaggaagagtacgggcataacgaggtggtagagtatgattgtaaccccaacttcataatcaatggtcccaagaagattcaatgcgtcgatggggaatggacgacgcttcctacatgtgtggaacaggtcaaaacctgcggctatatccccgagttggagtatgggtatgtgcaaccctccgtccctccgtaccagcacggagtgagcgttgaggtgaattgcagaaatgaatatgccatgattgggaataatatgataacctgtatcaatgggatttggacggagctccccatgtgtgtggccacgcatcagctcaaaagatgcaaaattgcaggtgtcaatatcaagactttactgaaactgtctggaaaggagttcaaccataattccaggatcagataccggtgttccgacatttttcgctatcgccactcagtgtgcattaacggaaagtggaaccccgaagtggactgcacagagaaaagagaacagttctgtccaccccccccacagattcccaatgctcagaacatgacaactacagtgaattatcaagacggggagaaggtcgcagtgctgtgtaaagagaactacctgttacctgaagccaaggagatcgtttgcaaagatgggcgctggcagtcactccctcgctgtgtggaatccacagcttactgcggcccccctccttctattaataatggtgataccacctcgttcccactgtcggtctatcctccgggcagcactgtgacatataggtgccagtctttctataaactgcaggggtctgttactgtgacctgtcggaacaagcaatggtcagagcccccaaggtgcttagatccctgcgtcgtttccgaggagaatatgaataaaaataatattcaactgaagtggagaaacgacggcaagttgtacgctaaaacgggcgacgcggtagaattccagtgcaaatttccacataaagccatgatctccagtcctcctttccgagccatttgccaggaaggaaagttcgaatatccgatctgtgagtag

SEQ ID NO: 5248 - DNA, 351 bp, synthetic construct
  misc_feature 1..351: note = source = /note="Description of Artificial Sequence: Synthetic coding sequence"
  source 1..351: mol_type = other DNA
atgaaaggtctgaggtccttagcagccaccacgttagccctctttctcgtgttcgtgtttcttggcaattcttcatgtgcaccccagcggcttctggaacgaaggaattggacgccacaggctatgctttacctgaaaggcgcacagggcagaagatttatctccgaccagagcaggcgcaaagatctgagcgaccggccattgcctgaaagacggtcacctaacccccaactgctgacgattccagaggcggccacaattttgctggcctctcttcagaaaagccctgaagacgaggaaaagaattttgaccagacccggtttctggaggacagtttactgaactggtag

SEQ ID NO: 5249 - DNA, 192 bp, synthetic construct
  misc_feature 1..192: note = source = /note="Description of Artificial Sequence: Synthetic coding sequence"
  source 1..192: mol_type = other DNA
atgaagcatgtcctgaacctgtacttactgggggttgtgctcaccctcctctcaatcttcgttagggtaatggaatcgctggagggcctcctggaatctccatcacctggtacttcttggaccacacgcagtcaacttgctaatactgagcccactaaggggctgccagaccacccgagccgaagtatgtag

SEQ ID NO: 5250 - DNA, 567 bp, synthetic construct
  misc_feature 1..567: note = source = /note="Description of Artificial Sequence: Synthetic coding sequence"
  source 1..567: mol_type = other DNA
atggtccccggcgctgccgggtggtgttgtttagttctttggctgcctgcctgtgttgccgcacacggtttccggattcacgactacctttattttcaggtcctgtcccctggcgatatccggtacatctttacagcaaccccagccaaagacttcggcggaatcttccacactaggtacgagcagatccatcttgtaccggcggaaccacccgaggcctgcggtgagctgagcaacggatttttcatccaggaccagatcgctttggtcgagaggggcggctgcagctttctgagcaagactcgggtggtgcaggaacacggggggcgcgccgtgataatctcggacaacgctgtggataacgacagcttttacgtagagatgatacaggacagcactcaacgcaccgctgatatccctgcactgttcttattgggcagagacggttatatgattcgacggagcctcgagcagcacggccttccctgggccattatttccattcctgtgaacgtaactagcattccaactttcgaactgctccagccgccatggacattttggtag

SEQ ID NO: 5251 - DNA, 2559 bp, synthetic construct
  misc_feature 1..2559: note = source = /note="Description of Artificial Sequence: Synthetic coding sequence"
  source 1..2559: mol_type = other DNA
atgaaaccaatgttaaaggatttttccaatctactgctggtggtactatgtgactatgtcctcggcgaagccgaatatctgcttctgcgtgaaccaggccatgtggctctctcaaacgatactgtatacgtggactttcagtacttcgacggtgccaacggcaccctgaggaatgtgtccgttctcctgttggaagctaataccaaccagaccgtcactacaaagtacctgttgacaaatcagagccaagggactttaaagtttgaatgtttctactttaaagaggcaggggattactggttcacaatgacacctgaggccacagacaactcaacgcccttcccctggtgggagaaatcagctttcctaaaggtggagtggcctgtattccatgtggatctgaacagaagtgctaaagctgcagagggtaccttccaggtgggactgttcacatctcagccattatgcccgtttccagttgacaaaccaaacattgtcgtggacgtcatatttaccaactcactgcccgaagcacggcgtaacagcaggcaaccactggagatccggactagtaaacggactgagctggcacagggccagtgggtggaatttggctgtgcaccactgggcccagaggcttacgtgactgtcgtgttgaagctgctgggacgagactcagtgattacttccacaggccctatcgatctggcacagaagtttggctataaattggtcatggtgcctgaactgacttgcgagtccggtgtcgaggttactgtactgccacccccatgcacgttcgtgcagggagtggtgacagttttcaaagaagccccaagatacccgggaaagcggacaattcacttggccgaaaactctttgcccctgggggagcgacgcactatttttaattgcacattatttgacatgggcaaaaataagtattgctttgatttcggaatctcttctcggtcacatttttctgccaaggaggagtgcatgctgatccagagaaacaccgaaacctggggcctatggcagccatggtcccagtgttctgcgacatgcggcgatggcgtgagggagcggcgaagagtttgtcttacttcattcccgtcctcccctgtttgccctgggatgtctcttgaagcatcgctgtgttccctagaagagtgcgccgccttccagccatcatcacccagccctctccagccacagggtcctgtgaaaagtaacaatattgtaacggtgactgggatcagcttgtgccttttcattattatagcgactgtcctgataacactgtggcggaggtttggcagaccagccaagtgcagtacccccgcaagacataattccatacactcgccctccttccgaaagaatagcgacgaggagaacatctgcgagttgagcgaacagaggggctctttcagtgatgggggagatgggcctacagggtccccaggcgataccggaatccccctcacatatcgaaggtccgggccagtgccgccggaagatgacgcatcgggctctgaaagtttccaaagcaacgcgcagaagatcatacctcctctcttcagttacaggctggctcagcagcaactcaaggagatgaagaaaaaaggtctcacagagaccacaaaagtctaccacgtttctcagtcgccactgacagatactgctatagacgccgctcctagcgcccccctcgacctggagtcccctgaagaggcagccgcaaacaagttcagaattaaatcacctttccccgagcagcctgctgtgagcgctggagagcggcccccttcacgcctcgacctgaatgtcacccaagccagctgcgccatttcgccctcacagaccttaatccgaaagtctcaggccagacacgtgggatcccgcggaggcccatctgagagatcgcacgcccggaacgcacacttccgtaggactgcctcctttcatgaggctcggcaggcccggcctttccgggaacggtccatgagtaccctgactcccagacaggctcctgcctactcatctcgaactcggacctgtgaacaagcggaagatcggtttcgaccccagtccaggggtgcacacctgttccccgaaaaactcgaacatttccaagaggcctccggtacccggggaccattgaaccccctcccaaaatcatacactctcgggcaacccctgcggaagcccgacctaggggatcaccaggcaggcttagttgcgggcattgagcgaactgagccccatcgcgccaggcgcggcccaagcccaagtcataaaagcgtttctcggaaacagtcatcaccaatcagcccaaaagacaattatcagcgcgtatcatcactgtctccttcacaatgtagaaaggataaatgtcaatcttttcccacgcaccccgagttcgcattctatgacaacactagctttgggctgacagaggctgaacagaggatgttggacctgccgggctactttggatccaatgaagaggatgagaccacatccactctttctgttgagaagctggtaatctag

SEQ ID NO: 5252 - DNA, 369 bp, synthetic construct
  misc_feature 1..369: note = source = /note="Description of Artificial Sequence: Synthetic coding sequence"
  source 1..369: mol_type = other DNA
atgggatttcacttttgtatctggattatattcctgctcccacccccgtgcaagaaatgcctgtctcccccaactatgaatctcaggccacccaaatcttgcggaaacgtgttctattgggtgctcgtgctgaatagcggactgctgtacaagttctgccagacaatcaagtgcagggcaaattggaggccggctcgagcgccacgagggtggaacgaggcaacagagcgccaccaggagcgaagaacacagatggaaaccgaaatgggggggatttctaccacttactggcaccgcctgtgtacatgtactgatcgacgggcggaaaaattagtgatggatgggaacaactgttggtttcataaatag

SEQ ID NO: 5253 - DNA, 978 bp, synthetic construct
  misc_feature 1..978: note = source = /note="Description of Artificial Sequence: Synthetic coding sequence"
  source 1..978: mol_type = other DNA
atgcagggtcgcgtcgccggcagctgtgctcctctagggctgcttttagtgtgtctacacctaccaggtctgtttgcccgcagtatcggagtcgtcgaagagaaggtgtcgcagaatcttggcacaaaccttccacagttaggtcagcccagcagcaccggcccaagcaatagcgaacacccgcaacctgcactggacccacgaagtaacgatttggcgagagtgcccctgaaactttccgtgcctgcttccgacggctttccccctgcaggtggttctgccgtgcagcggtggcctccatcttggggcctgccagctatggattcatggcctccagaggatccctggcagatgatggccgctgctgctgaagaccgcttgggcgaggctctaccagaagagttgtcctatctgtcctcagccgccgcactcgcccctggctctgggcccctgcctggcgagagcagccctgatgcaacaggcctttcaccaaaagcaagtcttctgcatcaggacagcgaatcacggcgcttgccaaggtccaatagcttaggtgcgggtggcaagattttgagtcaacgccctccttggtcattaattcaccgagtcttgcccgaccatccctggggcaccttgaatcccagtgtttcatggggagggggaggccctggcacgggatggggaacacgtcctatgcctcacccggaagggatctggggaatcaacaaccaaccacccggcacatcttggggaaatatcaatcggtatcccggcggctcttggggaaacattaaccgttaccctggaggctcttggggcaatataaatcggtatcctggtggttcctggggtaacatccacctataccctggaattaataacccgtttccacccggcgttcttcgacctcccggatcctcgtggaatatacccgctgggttccccaaccctccaagtccccggctgcagtggggatag

SEQ ID NO: 5254 - DNA, 2631 bp, synthetic construct
  misc_feature 1..2631: note = source = /note="Description of Artificial Sequence: Synthetic coding sequence"
  source 1..2631: mol_type = other DNA
atgggacctgaggcgctctcctctctgcttcttctgctgttggttgcttccggcgatgcagatatgaagggccacttcgacccagctaagtgtaggtatgccttaggaatgcaggaccgtacaatcccggattccgacatttcagccagctccagctggagtgatagtacagctgcacgacactctagactagaatcctccgatggggatggggcgtggtgcccagccggcagtgtgttccctaaagaagaagaatacctgcaggtcgatcttcagcgacttcatctggtcgcacttgtgggaacacaggggaggcacgctggcggactggggaaagagttctccagatcatataggctgcgttatagcagggacgggagacggtggatgggttggaaggaccgatggggccaggaggtgatcagcgggaacgaggatcctgaaggagtagtgcttaaggatctgggccctccgatggtggccagactggttagattttatccacgtgccgacagggtgatgtcagtttgtctcagagtggagctgtatggatgtttatggagggatggcctactgagctatacagctcctgtgggccagaccatgtatctatctgaagccgtttatctgaacgacagcacttatgatggtcacacagtagggggcctacagtacggtggcttaggacagttggctgatggtgtggtgggcctcgatgacttcaggaagtcccaggagctgagggtgtggccgggatacgattatgtggggtggagtaatcacagtttctcttcaggctatgtggagatggagtttgagtttgatcggcttcgcgcctttcaggccatgcaggttcactgtaacaacatgcatactctcggcgccagattacccggaggcgtcgaatgccgatttagaaggggacctgccatggcttgggagggagaacctatgaggcacaatttggggggcaacctgggagacccaagagccagagccgtcagcgtgccactaggtggacgagtcgcaagatttctgcagtgtcggttccttttcgccgggccttggttattgttctccgagatatcttttatatctgatgtcgtaaacaactcatccccagccctgggcggcaccttcccccccgccccatggtggccacctggtccacctcccaccaactttagcagtttagagctcgaaccgcgggggcaacagccagtggccaaggcggaggggagccccacagccatcttgatcggatgccttgtggcgatcatactgctcctccttcttatcattgctttgatgctgtggcgcctccattggcgccggttgctgagtaaagccgaaagacgcgtgctggaggaagaactcaccgtgcacctgtccgtccccggagacacgatactgattaacaatagaccagggcctcgcgaaccgcccccatatcaggaaccccgcccccggggtaatcctccccattctgcaccgtgtgtgcctaatggctctgcttactccggagactacatggaacccgagaaacccggtgccccgttactgccaccccccccacaaaactcagtgcctcattatgccgaggcagatattgtgactttacaaggcgtcacaggcggcaatacctacgcggtccctgcccttcctcccggcgccgtgggagatggaccccccagggttgacttccccaggtcaagactcaggttcaaagaaaagctgggagagggccagtttggcgaggtgcacttgtgtgaggtagacagtccccaggacctggttagtctcgatttccccctgaacgttcgaaagggccatcctttgctggtggctgtaaagatccttcggccggacgcaacgaaaaacgcccggaacgatttcctgaaagaggtgaaaataatgagtcgcttaaaggatcccaacattatccgcctgctgggcgtctgcgtgcaggatgaccccttatgcatgataactgattacatggaaaacggggatctcaatcagtttctctctgcccatcagcttgaggataaggccgcagagggagccccaggcgatggacaggctgcacaaggaccgactattagctacccaatgttgttgcatgtagcggcgcaaatcgcctctggaatgaggtatctggccacactgaactttgtacatcgcgatttagccacaagaaactgcctagtcggggaaaatttcacaattaagattgcagattttgggatgagtcggaatttatacgccggagactattatcgagtacaaggccgcgcagtgctccctatccgctggatggcctgggagtgtattcttatgggcaaattcactaccgcctccgatgtctgggcgttcggtgtgacgctctgggaggtgctcatgttgtgcagggcacaaccatttggacagctaactgatgagcaggtcatcgaaaatgccggtgaattctttagggaccaaggaagacaggtgtacctgtctcgccctccagcatgcccccaaggactgtacgagctgatgctaagatgttggagtcgggagtccgaacagaggccaccattctcacagttacaccggttcctcgccgaggatgctctgaacacagtgtag

SEQ ID NO: 5255 - DNA, 672 bp, synthetic construct
  misc_feature 1..672: note = source = /note="Description of Artificial Sequence: Synthetic coding sequence"
  source 1..672: mol_type = other DNA
atgaagtttgtcccatgcctgttactggtcactctgtcttgcttgggaacacttgggcaggcaccccggcagaagcagggcagtactggcgaggagttccacttccagaccggcggccgggatagttgtacaatgcggccgtcatcgctgggacagggcgccggggaggtgtggttgagggtggattgccggaacacagaccagacatattggtgcgaatatagggggcaaccctcgatgtgccaggcctttgctgctgacccaaagccttactggaatcaggccctgcaggaactccgacgtttacaccacgcatgccaaggggccccagtcctgaggccttcagtgtgtagggaggctggcccacaggcccatatgcagcaggttactagtagtctgaaaggctctccagagccaaaccagcagcccgaggccggcacccccagtctgcgcccaaaggctactgtcaagttaaccgaagcaacacagctcggtaaggatagcatggaggagctaggaaaggccaaaccaactacgcggccgaccgccaagcctacacaacccggcccccggcccggtggcaacgaggaggcgaagaagaaggcctgggaacactgttggaagccattccaggctctgtgcgcctttctcatctcttttttccgcgggtag

SEQ ID NO: 5256 - DNA, 585 bp, synthetic construct
  misc_feature 1..585: note = source = /note="Description of Artificial Sequence: Synthetic coding sequence"
  source 1..585: mol_type = other DNA
atgacgatgcgacacaattggacaccagatctctctccactctgggtgttactactctgcgcccacgtggtgacccttcttgtgagggccacccccgtttcacagacaactaccgccgctactgcgtccgtgcggagtaccaaagacccctgccctagtcagcctcccgttttcccggcagcaaagcagtgcccagcactggaagtgacctggccagaagtcgaagtgcccctgaatgggactctgtccctcagttgcgtggcttgttcccggtttcccaatttcagcatcttgtactggcttggtaacggatcatttatcgagcatcttccaggacggttgtgggaaggatcaacaagccgagaacgtggctcaaccgggacccaactgtgtaaggctttggtgctggagcagcttactccagctttgcactctacaaacttctcttgcgtactggttgatccagagcaagtcgttcagagacacgttgtgctggcgcagttatgggcagggctcagagcaactctgccccccactcaggaggccctcccctcttcccactcgtcacctcagcagcagggttag

SEQ ID NO: 5257 - DNA, 777 bp, synthetic construct
  misc_feature 1..777: note = source = /note="Description of Artificial Sequence: Synthetic coding sequence"
  source 1..777: mol_type = other DNA
atgattgccatctccgctgtaagtagcgccttgctgttttctcttctctgcgaagcttccaccgtggtgctcctgaattccacagattctagcccccccacaaataatttcaccgacatagaagccgccctgaaggcacagctcgattccgccgatatcccgaaagctcgtaggaaacgatatatatcccagaacgatatgattgcaattttagactatcacaaccaggtgcggggcaaggtgttccctccagcggcgaacatggaatacatggtgtgggatgaaaacctggccaagagcgctgaggcttgggcagccacatgtatatgggaccacggacctagctacctgctgagattcctcggccagaatctcagtgtaagaacaggcaggtaccgcagtattttacaacttgttaagccatggtatgatgaagtgaaggactacgcttttccttaccctcaagattgcaaccccagatgccccatgcggtgcttcggcccgatgtgtactcattatacacagatggtgtgggcaacctctaatcggatcggctgcgctatccacacttgtcaaaatatgaatgtgtggggatctgtatggcgtcgtgctgtttatttagtttgtaattatgctcctaagggcaactggattggcgaagcaccctataaggttggagtcccatgcagtagctgtcccccttcctacggagggtcatgtactgataatctttgctttccgggagtgacatcaaactacttgtactggttcaagtag

SEQ ID NO: 5258 - DNA, 906 bp, synthetic construct
  misc_feature 1..906: note = source = /note="Description of Artificial Sequence: Synthetic coding sequence"
  source 1..906: mol_type = other DNA
atgctgcccttgacgatgaccgtactgatactgttactgttgccgactgggcaagcagcaccgaaagacggcgtgacacggccagactctgaggtgcaacatcagctgcttccgaaccctttccagcccggccaggaacagttgggactgttgcaaagctatctcaaggggttgggccgaacagaggtccaactggaacacctctccagagagcaggtccttctctacctattcgccctgcacgactacgatcagagtggccaattggatggcttggaactcttatcaatgctgacagccgccctggctcctggagctgcaaacagtcctacaacaaatcctgtaattcttattgttgacaaggtgttagaaacccaggacctaaatggagatggtcttatgaccccagctgaattgatcaatttcccaggggtcgccctgcggcacgttgagcccggagagcccttggctccctcaccccaggagccccaggccgtgggccgccagagtctcttagccaagagcccactccgccaagagacacaagaggctcctgggcctagagaggaagccaaaggacaggttgaggccagaagagagtctttagatcccgtgcaggaaccaggtgggcaagctgaagcggatggtgacgtaccaggtccccggggtgaagctgaggggcaagccgaggccaaaggtgacgcaccggggccaagaggggaagccggaggccaggctgaagcagaaggagatgctcctggcccacggggggaggctggcgggcaggccgaagcacgagagaatggcgaggaggccaaggaactccccggcgagactctcgagagtaagaacactcagaatgattttgaggtgcatatcgtacaagtggagaatgatgaaatttag

SEQ ID NO: 5259 - DNA, 969 bp, synthetic construct
  misc_feature 1..969: note = source = /note="Description of Artificial Sequence: Synthetic coding sequence"
  source 1..969: mol_type = other DNA
atgaaaacactggctggattagtcctgggactcgtcatctttgatgccgcagttacagcacccactctggagtctattaactatgactcagagacttacgatgcgacccttgaggacctggacaacttgtacaactacgagaatattcccgttgataaagtagaaatcgagatcgccaccgtgatgcccagtggtaatcgagaactgctcacacctccgccgcagcccgagaaagcgcaggaagaggaggaggaagaggaatccaccccacggctgattgatggctctagtcctcaggagcctgagtttacaggggttctggggccacacaccaatgaggatttccccacttgcctactatgcacctgcatcagcactacagtgtattgtgacgaccacgaactggacgccattcctcccttacccaaaaataccgcttatttttactcacgatttaacagaatcaagaagattaataaaaatgacttcgcctcattgagcgatctgaaaagaatagacctaacctccaatttgatttccgagattgacgaggacgcattcaggaaacttccacagctgcgcgagctggttctgagggataataaaatacgacagctgccagagcttcccaccacattgacattcatcgatatcagtaacaatcgcctgggacgaaagggcatcaagcaggaggcattcaaagatatgtacgacttgcatcacctttacctgacagacaacaatctcgatcacatccccttgcctcttcctgagaatctccgggccctgcacctacagaataataacatcctggagatgcatgaggacactttctgcaacgtgaaaaacctgacttacatcagaaaggccctggaggatatccgtctggatggcaacccgatcaatctttcgaagacacctcaggcttacatgtgtttgcctcggttacctgtgggaagcctggtgtag

SEQ ID NO: 5260 - DNA, 618 bp, synthetic construct
  misc_feature 1..618: note = source = /note="Description of Artificial Sequence: Synthetic coding sequence"
  source 1..618: mol_type = other DNA
atggtgaacctggctgccatggtctggcgacgcttgttacggaagagatgggtgctggcccttgtcttcggtctgagtctggtttattttctgtccagcacttttaaacaggaggagagagcggtgagggacaggaatctcttgcaagtgcacgaccacaaccagcctatcccctggaaggtgcaatttaatctggggaatagctcccggcccagtaaccagtgccggaatagtattcagggaaagcatttgattactgacgaactgggatacgtgtgcgagagaaaggacctactagtcaacggatgttgtaacgttaacgtgcccagcacaaaacagtactgctgcgatgggtgctggcccaacgggtgctgttctgcctatgaatattgcgtcagctgttgtctgcagccgaacaagcaacttctactggagaggtttctgaatcgggcggctgtggcattccagaacctgtttatggccgtcgaggaccatttcgagctgtgcttagccaagtgcaggacaagttctcagtccgtgcagcacgagaacacataccgagatcccatcgccaaatattgttacggcgaatccccccctgaacttttcccagcttag

SEQ ID NO: 5261 - DNA, 3057 bp, synthetic construct
  misc_feature 1..3057: note = source = /note="Description of Artificial Sequence: Synthetic coding sequence"
  source 1..3057: mol_type = other DNA
atggtttcccactttatgggctcgctgagtgttctgtgctttctgctgctgctgggatttcaattcgtttgcccacagccatccacacagcatagaaaagttccacagaggatggcagcggagggcgcccctgaggatgacgggggcgggggggcgcctggggtgtggggtgcatggggcccctggtccgcttgctccaggtcatgtagcgggggtgtgatggagcagacccggccctgtctgcctaggagctatcgcctgaggggcgggcagcgaccaggcgctcctgcgagggccttcgctgaccacgttgtgtcagccgtcaggacctccgtgccgctccataggtcccgagacgagacacccgccttggctggaaccgacgcctctagacagggccccactgttctgcgtggctcccggcacccccagccgcaggggcttgaggtcaccggtgatagacgaagtaggacccgagggacaatcggtccagggaagtatggatatggcaaagcaccttacattctcccattgcaaacagataccgctcatacgccacagcgcttgaggcggcagaagctgtcatcacggcacagtagaagtcagggcgcgtcctcggcgagacacgggtactcctcccccgctcatcaagtgccccagcacggccctctttaccagtccgacagcggccctcggtctggtctgcaggcagcggaagcgccgatctatcagctgcctcttactcatgaccagggctatcctgccgcctcaagcctctttcactcccctgagaccagcaacaatcatggcgtagggacccacggtgccactcaatctttctctcagcccgccagatcaactgcgatttcttgcatcggcgcctataggcagtataaactgtgcaacactaacgtatgtccagagtcttctcgttccatcagagaggtacagtgcgcaagctataacaataagcctttcatgggtaggttctatgaatgggaaccttttgctgaggtgaaaggaaaccggaagtgcgagcttaattgtcaggccatggggtacaggttctacgttaggcaggccgagaaggtcattgacggcactccctgtgatcagaacggcaccgcaatttgcgtctcaggacagtgtaaatctatagggtgcgacgactacctgggatcagacaaggtggtagacaaatgcggcgtctgcgggggcgacaacaccggctgccaagttgtgtcgggggtcttcaaacatgcattgaccagcctggggtatcatcgcgttgtcgaaatccctgagggagccacaaagatcaacatcaccgaaatgtacaagagtaataactacctggcgctccggagcagatccggcagatcaatcatcaatgggaattgggcaatcgacaggcctgggaaatacgagggcggcggtaccatgttcacctacaagcgaccaaatgagattagttccacggcaggtgagagcttcctggctgaggggcctaccaatgaaattttggacgtttatatgatccaccagcaaccaaaccctggcgtacactacgagtacgtgatcatgggaactaatgccatttccccccaggtgccgccgcaccggagaccaggagaaccatttaatggacagatggtgaccgagggtcgcagtcaggaggaaggcgaacaaaaaggacgcaacgaggagaaagaggatttgcgcggcgaggccccagagatgtttacgagtgagtcggctcagacctttcccgtgcgacatcccgataggttcagccctcaccggcctgacaatctcgtgccaccagcacctcagccacctcggagatcccgtgatcataactggaaacagctcggaacaactgagtgttcaacgacatgcggcaaggggtcccaataccccattttccgctgcgtccatcgcagcacccatgaggaggcccctgagtcgtactgtgattcatccatgaagccaacaccagaggaagagccatgtaacatctttccgtgccctgcattctgggacatcggggagtggagcgaatgctctaaaacctgcgggttgggaatgcaacaccgccaggtactctgccggcaggtttatgccaatcgctctttaacagtccaaccttatcggtgccagcatctcgaaaagccggaaactactagtacttgtcagttaaagatctgtagtgagtggcagattcgcaccgattggacaagttgctcagtgccatgcggggttggccagcggacccgagacgttaaatgtgtgagtaatataggagacgtcgtggatgacgaggagtgcaatatgaagctgcggcctaatgacattgagaattgtgatatgggaccatgcgccaagagctggttcctcactgagtggtcagagcgttgttctgctgaatgcggagccggagtccgaacgaggagcgtggtttgcatgaccaaccatgtgtcgagcctcccactggaaggctgtgggaataacaggccagcggaggccactccttgcgacaacggcccatgtaccgggaaagtggagtggtttgccgggagttggagccagtgtagcatcgagtgcgggagcggaacacagcaaagagaagtgatctgtgtccgcaaaaatgccgataccttcgaggtgcttgacccatccgagtgcagcttcttagaaaaacccccttctcagcagtcatgtcatctaaaaccatgcggtgccaaatggttttccaccgagtggtctatgtgcagtaaaagctgtcagggaggatttcgagtaagggaggtgcgttgtttatcagatgatatgaccctgagtaacttatgtgatccacagcttaaacctgaggagcgcgagagctgtaatcctcaggattgcgtccccgaggtggacgaaaattgcaaagacaagtattataactgcaatgtggtcgtgcaagctaggttgtgtgtctacaattactacaagaccgcttgctgcgccagctgtacccgggttgccaatcgacagacagggttccttgggtcacggtag

SEQ ID NO: 5262 - DNA, 1503 bp, synthetic construct
  misc_feature 1..1503: note = source = /note="Description of Artificial Sequence: Synthetic coding sequence"
  source 1..1503: mol_type = other DNA
atgaaatgcacagcacgagagtggctccgtgtaaccacggtgttattcatggcccgtgcgattcctgcaatggtcgtgcctaatgccaccctcctagagaagcttctggagaagtacatggatgaagacggtgaatggtggattgccaagcagagggggaaacgcgccattacagacaatgatatgcagtccatcctcgacctgcacaataagctgcgatcacaggtgtaccccacagcctccaatatggagtacatgacctgggacgtggaattggagcggtccgctgaaagttgggctgagtcttgcctgtgggagcacggtcccgcatcattgttaccctctatcggccagaacctgggggcccactggggacggtacaggccgcctaccttccacgtgcagtcatggtatgatgaagtgaaggacttctcttacccgtacgagcacgagtgcaatccttactgccccttccgctgtagcgggcctgtctgcacacattacacgcaggttgtgtgggctacatccaacagaatcgggtgtgctatcaatctctgtcacaatatgaacatctgggggcaaatttggccaaaagctgtctatctggtatgcaactatagccccaaaggcaactggtgggggcacgcgccgtataaacacggtagaccttgcagtgcttgtccaccttctttcggcggcggttgccgcgagaatctttgctataaagaggggtcggaccgttactacccaccacgtgaagaagagactaatgaaatcgagcggcagcagtcacaggtgcatgatacccacgtcagaaccagatcagatgattcttcgcggaatgaagtgattagtgcacaacagatgtcccagatcgtgtcgtgcgaagttagactgagagatcagtgcaaggggacaacttgtaaccggtatgagtgtcccgcaggctgtctcgattcgaaagccaaggtcatcggatctgttcattatgagatgcagtcctccatttgcagggctgctatccattacggaataattgataatgacggcggatgggtcgacatcaccagacagggccggaagcattacttcatcaaaagtaatcggaacggaatccagacgatcgggaagtaccagagtgctaactcattcactgtaagtaaggttactgtacaggccgttacatgtgaaaccaccgtggaacagctgtgccccttccataagcctgcttctcactgtcctagggtgtattgtccaagaaactgtatgcaagcgaatcctcattatgctcgcgtaattggaacccgcgtgtatagcgacctgagcagtatctgccgggccgcggttcacgcaggggtggtgagaaaccacggggggtatgtcgacgttatgcccgttgacaaacggaagacatacatcgccagcttccagaacggcatttttagtgaatccctacagaaccctcccggcgggaaggcttttagggtttttgcagtagtgtag

SEQ ID NO: 5263 - DNA, 2070 bp, synthetic construct
  misc_feature 1..2070: note = source = /note="Description of Artificial Sequence: Synthetic coding sequence"
  source 1..2070: mol_type = other DNA
atgaagttcggggcggtgaccagaatcggaggccctccattagggaatcagagcccatcatcttgcagcctgcttcatgagaaagaccccccgaccacaagcggaccacagaccgaccaacctaaaaagcatcttaccaattttaagtctgccactcgtagagttgctcgaacacaatggctgacagccgatcgccagacatgggcgtctatctcgtctgtcccttgggctcagacgatcagcgaaaagaaacctggcggaagcctgtgggagacccgatcatctccacctacaacagccgggactgaagaggctatgaatacaactagcctacttgctcccgctgcggaaataatggccacaccggggtccccaagccaggcctctcctacactcggtgcctttacccacgggacccaaaccccaagccccactaaggccacagctccaaggtaccctcaaacaggcgatctctctgccgagtggcctttcaccgctggcgaagagccagtgctcgtgccacgccctcaccaggtctcacgggtcaggagctcttgttgcctaagccccattctgtgctccccagccatgatagctttcctactaacctctgtattgatgataccacatgctggcgggcatccactggatactccccacctcccccaggagctgccacctggactgcccaacaatatcaacattacctttttttcagggatgttcaagaatgtcgaatctgtggcagaaatcttcgactgtctcggcccacatttcacctggctgcaggccgtgtttacaaatttcccagtgctgatacagttcgttaacggaatgaaatgtgtggccgggctttgtccacgggatttcgaggactatggctgtacatgccgatttgagatggagggactcccagtggacgagagcgactcatgttgtttccagcacaggcggtgctacgaagaggctgccgagatggactgcctccaagatcccgccaagctgagcacagaagtaaattgtgtatctaaaaaaatcatatgcgagtcaaaagacaattgtgaacacctcctctgcacttgtgataaagcagctatcgagtgtctggcacggagtagcttaaatagcagcctgaatttgttggacacgtccttttgtctggctcagacccccgaaactacaatcaaggaagacctgacaactctgttaccccgcgtcgtacccgtggagcccactgacacatccttgaccgctctgtcaggggaagtggccgctgagacggaggccgataggcttattactctgtcaaagaagaaagcaggccatgaccaagagggcgtgggggcagccagagccacatccccccctggctcagccgaaatcgtggcaaccagggtgactgccaagatagtcacattggtgccggccggaatcaagtccctgggactggccgtgagctccgtggaaaacgaccccgaggaaacgactgagaaggcctgcgacaggttcacttttctacatctgggctctggggacaatatgcaggtaatgccacagctgggcgaaatgctgttctgcctcacatctaggtgtcctgaggaattcgagtcttatgggtgttattgtggacaggagggcaggggtgagcctcgcgacgatttagaccgatgctgtctgtcacatcactgttgtctagaacaggtgcgccggctcgggtgtctgctggagcggctgccttggagccccgtggtatgtgttgaccacacccccaagtgtggcggccaatcattatgcgagaagctcctctgcgcatgcgatcagacagccgctgagtgtatgacttccgcatcttttaatcagtcactcaagagtccatctcgccttggctgtcctggccagcctgccgcctgtgaggatagcctccacccagtaccagcggctcctaccctcggctctagcagtgaggaagattccgaagaggaccctcctcaggaggaccttggcagggccaagcggttcctgaggaaaagcctgggaccactcggaatcggccctcttcacggtaggtag

SEQ ID NO: 5264 - DNA, 1359 bp, synthetic construct
  misc_feature 1..1359: note = source = /note="Description of Artificial Sequence: Synthetic coding sequence"
  source 1..1359: mol_type = other DNA
atggagctggcgctgcgaagatcacctgtgccacggtggttactgcttctgcctctcctgcttggactgaatgcaggcgctgtgatagactggcctacagaggaaggaaaagaggtttgggactacgtgacagtcagaaaagacgcctacatgttctggtggctatactacgcaaccaactcttgtaagaactttagcgaactacctctggtgatgtggttgcaggggggacccggcggctcatcaaccggattcggaaattttgaggagattggacccctcgattctgatctgaagcccaggaagacaacttggctgcaggccgcctcactcttgtttgtcgacaaccccgtggggaccggattctcatatgttaacggcagcggggcttacgccaaagacttagctatggtggcatcagatatgatggtcttactgaagacattcttctcctgtcacaaggaatttcaaaccgtgcctttttacatcttctccgagagttacgggggtaaaatggctgctggaatcggacttgaattatacaaagcaatacagagaggcacaattaagtgtaatttcgccggagtcgccctgggtgactcatggatctccccagtggactcagttctgtcttggggcccatacctgtactccatgtccctgctggaagacaaagggctggccgaggtgagtaaagtggcagagcaagttctgaacgccgtgaataaagggctgtatagggaggcaacagagctgtggggcaaagcggagatgatcatagagcagaacacagacggcgtgaatttctacaatattctgaccaagtctacccctacatccactatggagtcttccttggagttcacccaatcccacctggtatgtctgtgtcagagacacgtgcgacatctgcaaagggacgccctgtctcagttaatgaacggaccaattagaaagaaactgaagattattcctgaggaccagagctggggggggcaggcgaccaatgtcttcgtgaatatggaggaagatttcatgaagccagtcatatcaattgtagacgaactactcgaggcaggaatcaatgtgactgtctataatggtcaactggacctcattgtggataccatgggccaagaagcttgggtgcgaaaactcaagtggccagagctgcctaaattctcacaactgaagtggaaggccctgtatagcgacccaaaaagtctcgaaacttcagcgtttgtgaagtcctataaaaacttagccttttattggatcttgaaggcaggtcatatggtaccctctgatcaaggtgacatggcactgaaaatgatgcggcttgtgacacagcaggagtag

SEQ ID NO: 5265 - DNA, 1395 bp, synthetic construct
  misc_feature 1..1395: note = source = /note="Description of Artificial Sequence: Synthetic coding sequence"
  source 1..1395: mol_type = other DNA
atggtgaggcttgcagcagagctgctcctgcttctgggacttctgctgttaacactccacatcactgtgttgcgtgggtcaggtgccgcagacggtcctgacgccgccgccggaaatgctagccaggcccagctgcagaataacctgaacgtcgggtccgacacgaccagtgaaactagcttctccctcagcaaggaggctcctcgggagcatctggaccaccaggcagctcatcaacccttcccaagaccgaggttcaggcaggaaacaggtcatccctctctgcagcgcgactttcccaggtcgttccttctggatcttcctaattttcctgatctcagcaaggctgacattaacggacagaacccaaacatacaggtgacaattgaggttgtggacggacctgacagtgaggccgacaaagatcagcatcccgagaacaaaccgagctggtctgtgccctctcctgattggagagcatggtggcagcgcagcctgtctctggcgagagcaaactccggcgatcaggactacaaatacgatagcacgtccgatgactcaaacttcctcaatccccccagagggtgggatcacaccgccccaggccaccggaccttcgaaaccaaggaccagcccgaatacgacagtactgacggggagggcgactggtctctctggtcagtctgcagtgtgacgtgtgggaacggaaaccaaaaacggactaggtcctgtggatacgcatgcaccgctactgaaagcaggacatgtgacagacccaattgcccagggattgaggatacttttagaactgccgccacagaagtgagcttgctagccggctcagaggagtttaacgccacaaaattgttcgaagtggatacagacagttgtgaaaggtggatgtcttgcaaatctgagtttcttaagaaatacatgcacaaggttatgaacgaccttccgtcatgtccatgctcttacccaacggaagtagcatacagcaccgcagacatcttcgatcgaatcaaacgcaaggatttccgttggaaggatgcatctgggcccaaggagaagttggaaatctataagcccacggcaaggtactgcattaggagtatgctctccttggagtcaacaacccttgccgcccagcactgctgttatggtgacaacatgcagctgataacccgcggaaaaggggccgggactcctaacctcatctctactgagttctcagctgagctccactataaagtggacgttcttccttggattatttgcaagggtgactggtctcgatacaatgaggctaggccacccaataacggtcagaagtgcaccgagtcaccttccgatgaggactacatcaagcagttccaggaggctagggaatactag

SEQ ID NO: 5266 - DNA, 1536 bp, synthetic construct
  misc_feature 1..1536: note = source = /note="Description of Artificial Sequence: Synthetic coding sequence"
  source 1..1536: mol_type = other DNA
atgctggtcgatggtccgtctgagagaccagccctgtgctttctactgctcgccgtcgccatgagcttcttcggcagtgccctatctatagacgaaacccgagctcatcttcttttgaaggagaagatgatgagattaggagggcgtctggtgcttaacacaaaggaggaattagctaatgagcgcctgatgaccctcaagatcgccgagatgaaagaggcgatgagaaccctgatcttccccccctctatgcacttttttcaggcaaagcacctgatcgagcgatctcaagtttttaatatcctaagaatgatgccgaaaggagcagccttgcatctgcatgacatcggcatcgtgaccatggattggctggtcagaaatgtgacttatcggccacactgccacatttgttttacgccccgagggattatgcagtttagattcgcccaccctactccccgcccatcagagaagtgtagcaaatggattctccttgaagactaccgaaagcgagttcagaatgtaaccgaattcgatgactcgttactgcgcaattttactcttgttactcagcatcccgaagtcatctacaccaatcaaaacgttgtgtggtctaagttcgaaaccatcttctttacgatttctggcctcatccactacgcccctgtcttcagggactatgtgttcaggagcatgcaggaattttatgaggacaacgtactttacatggagatccgggccagattactgcctgtatatgagctgtccggtgagcaccacgacgaggagtggagcgttaaaacataccaggaggtagcccagaagttcgttgaaacacacccagagtttattggcatcaaaatcatctattcggatcacagaagcaaggatgtagctgtgatcgccgagtctattagaatggctatgggcttgcgcataaaatttcccacagtggtggccgggttcgacctggtgggacatgaagacaccgggcatagccttcatgattacaaggaagccctcatgatacccgccaaggacggcgtcaagctgccctatttcttccacgcaggcgaaaccgattggcaaggcacctctattgaccgaaatattctggatgccctcatgctcaatacaactcggatcggacacggattcgcgctgtctaagcaccccgctgtgagaacatatagttggaagaaggacatcccaatcgaggtgtgtcctatcagcaaccaggtgctcaaactggtttctgacctgagaaatcatcccgtggcgaccctcatggccacaggccaccccatggtcatttctagcgatgaccctgccatgtttggagccaagggcctgtcctacgacttctatgaggtgttcatgggcattggaggaatgaaggccgacctacgaacacttaaacagttagctatgaacagtattaagtactctacactgctggaaagcgagaaaaacacatttatggagatctggaaaaagcgttgggacaaatttattgccgacgtggccacaaaatag

SEQ ID NO: 5267 - DNA, 777 bp, synthetic construct
  misc_feature 1..777: note = source = /note="Description of Artificial Sequence: Synthetic coding sequence"
  source 1..777: mol_type = other DNA
atgaaacaaattctgcaccccgctttggagacgacggccatgacactcttcccggtgctccttttcctggttgcgggattgcttcctagtttccccgcaaatgaagacaaagaccctgcattcactgccctcttgactacccaaactcaggtccagagagagatcgtcaacaagcataacgagttacgtcgagcagtgtcccccccggctaggaatatgctcaaaatggaatggaataaggaagcggcagccaatgcccagaagtgggccaaccagtgtaattaccgacacagtaaccccaaggatcgcatgacgtcacttaaatgcggggagaatctgtacatgtcatcagcatcatcatcctggtcacaggcaatccagagttggtttgacgaatataatgatttcgacttcggggtcggccctaagacaccgaacgccgttgtgggccactatactcaggttgtgtggtactcctcttacctggtgggatgcggaaacgcctactgccctaaccagaaagtgcttaagtattactacgtgtgtcagtactgtcccgcagggaactgggccaatcgactgtatgtgccatatgaacaaggagctccatgtgctagttgccctgataactgtgatgatggtctgtgcacaaacggctgtaagtacgaagatttgtattcaaattgcaagagtctcaaacttacactgacttgcaagcatcagctggtgcgagattcttgcaaggctagctgtaactgctccaactccatttactag

SEQ ID NO: 5268 - DNA, 714 bp, synthetic construct
  misc_feature 1..714: note = source = /note="Description of Artificial Sequence: Synthetic coding sequence"
  source 1..714: mol_type = other DNA
atggtcactccaccaccccctcccgtctttagcttactaaagatctcacaaaggatcgtgtgtctggtactcgacaaatcgggcagtatgggaggcaaggatagactaaatagaatgaaccaagcagccaagcacttcttgctacagactgtagaaaacggtagctgggtcggaatggttcactttgactcgactgcgacaatcgtcaacaagctgattcagatcaaaagctccgacgaaagaaacactttgatggctggactaccaacatatccccttggaggaacttcaatctgtagtggaatcaagtatgcttttcaggtgattggtgaactgcatagccagttggatggcagtgaggtgctcctgttgacagacggtgaggataatactgccagctcatgtatagatgaggtaaagcagagtggcgccattgttcatttcattgctctaggaagagccgccgatgaggccgtgatcgaaatgtccaaaatcacgggcggaagtcacttctacgtgtctgacgaagcccaaaataacgggctaatcgacgcctttggtgcccttacttcaggaaatactgacctctcccagaagtcattgcaagtgcgggtcttaattccttgggttttcatgtttacattcgctaccaggaagaaccatcttgtggtcatcagcttcgaattccatatatttctgaaagtgaatttttag

SEQ ID NO: 5269 - DNA, 459 bp, synthetic construct
  misc_feature 1..459: note = source = /note="Description of Artificial Sequence: Synthetic coding sequence"
  source 1..459: mol_type = other DNA
atggataatgtacagcccaagatcaagcatagaccattttgcttttccgtcaagggacacgtgaaaatgttgcgcctggcgctgactgtaacaagcatgacattctttatcatcgcccaagcaccggagccttacatcgtcatcactggattcgaggtgaccgttattttgttcttcatactcctctatgtcctgcgcttagatcggctgatgaaatggcttttttggcctctcttggacatcatcaacagcttagtcactacggttttcatgttaatcgtgtcggtcctcgcacttattcccgaaaccactacacttacggttggcggaggagtgtttgctctcgtgactgccgtttgctgcctggcagatggcgccctgatttataggaaattgctctttaacccctctgggccctaccagaagaaaccggtacatgagaagaaagaggtgttgtag

SEQ ID NO: 5270 - DNA, 3744 bp, synthetic construct
  misc_feature 1..3744: note = source = /note="Description of Artificial Sequence: Synthetic coding sequence"
  source 1..3744: mol_type = other DNA
atgttggcctccagtagccgcattagggcagcttggacccgagctttattactgcccctgctgctcgccgggccagtgggctgcctgtcccgtcaggagttgtttccctttggcccagggcagggcgacctcgaactcgaggatggagatgactttgtctcacctgccttagagctcagcggtgccttgcgtttctatgaccggtcagatatcgacgctgtctacgtgacaaccaacggcattatcgccacaagcgaaccaccagcgaaggagtctcaccccggcctctttccccccacattcggtgcggttgccccttttctggcagatcttgatacaaccgatggactgggaaaggtttattacagagaggacctgtctccctccattactcagagagctgcggaatgcgttcacagaggattccctgaaatttcatttcaaccgtcaagtgcagtggtggttacatgggagtcagtggccccataccagggtccctcaagagaccctgaccaaaaagggaaacgcaatacattccaggctgtgcttgcatcatcagattctagctcctacgccatcttcctttatccagaagatggcctgcagtttcatacaaccttctctaaaaaggagaacaaccaagtgccggcggtggtcgcttttagtcagggcagcgtgggtttcttatggaagtctaacggggcgtacaacatctttgccaacgacagagaaagcgttgagaacctcgcaaagtcaagtaacagcggtcaacagggcgtctgggtcttcgagataggatccccggcaacaaccaatggcgtggtgcccgccgatgtgattctgggtacagaggatggggcagagtacgacgacgaggatgaggattacgacctggccaccaccagactgggcttggaggatgtagggactacaccattttcatataaagccctccggcggggtggtgccgatacatactctgttcctagcgtcctgtcaccgcgcagagcggcgacagagcgcccgcttgggccacctactgaacgcaccagatcctttcagctcgcggttgagacttttcaccagcagcaccctcaggtgattgacgtggacgaagtggaggaaactggggttgtatttagctataatactgactcccgccagacttgcgctaataaccgccatcagtgctccgtgcacgccgaatgccgtgattatgccaccggtttctgttgcagttgcgtcgccggctacaccggaaatggccgtcagtgcgtggccgaaggctccccgcaacgcgttaatggcaaggttaaagggcgcatctttgttggcagcagccaagtaccaatcgttttcgaaaacactgaccttcattcctatgttgtcatgaatcatggccgaagctatactgccatctctactatcccggagaccgtgggctatagcttactcccactagccccagtgggggggataattgggtggatgttcgctgtggaacaagacggattcaagaatggcttctctatcacgggaggcgagttcaccaggcaggctgaggtaacatttgtggggcatcccggaaacttggtgatcaagcagaggtttagcggcatagacgagcacgggcatctcacaatcgatactgaactggagggtcgcgtcccccagattccgttcgggagcagcgtgcatatcgagccatacactgaattataccactattctaccagcgtgatcacaagttctagcaccagggagtacacagtaactgagccagaaagggacggggcgtcacccagcagaatttatacctaccagtggagacagacaataacctttcaagagtgcgtacatgatgactcccgcccagccctgcctagcacacagcagctttctgttgactccgtgttcgtgctgtacaaccaagaggaaaagatacttcgatatgctctctctaattccattggacccgtccgcgagggatcccccgatgccctccagaacccctgttacatcggtacccacggatgtgatacaaacgctgcatgtaggcccggcccccgcacgcagttcacttgtgaatgcagcatcgggttcagaggtgacgggaggacttgttatgatatcgacgagtgcagcgagcagccctcagtgtgtggctcacataccatttgtaataaccatcctggtactttccgatgcgaatgcgtcgaaggttatcaattttctgacgagggaacctgcgttgcggtggttgatcagcgccctattaactattgcgagaccggcttacataattgtgatattccgcagcgcgcacagtgcatatacacaggcggcagcagttatacatgtagctgcctgcccgggttcagcggagacggccaggcctgccaggacgtagacgagtgccaaccaagtagatgccatcccgatgccttttgctacaacactccagggagtttcacctgtcagtgcaaacctgggtatcagggagacggtttccggtgtgtcccaggcgaagttgaaaaaacacgttgccaacacgagagagaacatattcttggcgccgccggtgccacagatccccaacggcctatccctccgggcttatttgtgccagaatgcgatgcacatggacactacgctccaacacaatgccacggaagcacaggctactgctggtgcgtagatagagatgggcgggaggtggagggaacacggactagacccggaatgacacctccatgtctgtccaccgttgccccgcccatccaccaaggcccagcagtgccaactgccgtgatccccctgccccctggcactcatctgctcttcgcacagactggcaagatagaacgcctgccattggagggtaatacaatgcgcaaaacagaagccaaggctttccttcacgtcccagctaaggtgataatcgggctcgccttcgattgcgtagacaaaatggtttattggaccgatatcactgaaccgtctataggccgggctagtctacacgggggcgaaccgacaaccattatcagacaagacctgggaagcccagaggggatcgctgtcgaccacttaggtcgcaacatcttctggaccgactctaatctggatagaatcgaggtcgcaaagctcgatggtacccaacggcgggtcttgtttgagacagacctcgtgaacccccggggtatcgtaactgatagtgtgcgcggcaacttatattggactgactggaatcgtgacaaccctaagattgaaaccagttacatggacggcactaatcgacggattcttgtgcaggatgatctgggccttccaaacggcctgactttcgatgcctttagtagccagctgtgttgggtggatgccggaaccaacagggctgagtgtctgaaccctagccagccatcacggcgcaaggccctggagggcctacagtatccgttcgccgtcacctcttacgggaagaatctctattttacagattggaaaatgaactccgtggtagccctggacttagccattagcaaagagacggatgcttttcagccccacaaacagacgcgattgtacggaatcacaaccgccttgagccagtgcccacaaggacacaactattgttcggttaacaacggcggatgcacacatctgtgtctggccacgcctggttcacgcacatgtcggtgccctgataatactcttggcgtggactgcatcgagcagaaatag

SEQ ID NO: 5271 - DNA, 525 bp, synthetic construct
  misc_feature 1..525: note = source = /note="Description of Artificial Sequence: Synthetic coding sequence"
  source 1..525: mol_type = other DNA
atgctgcggactgaatcatgccgacccaggtcccctgccggccaggtcgcggccgcaagcccgcttctcctgctgctgctgctgttagcatggtgcgccggagcctgcaggggggctcccatcctgcctcagggactccaacctgagcaacagcttcagctatggaatgaaattgatgatacctgctcgtcatttctctctatcgactcacagccccaggcctcaaacgctcttgaggaactctgttttatgattatgggtatgttgcccaagccacaggagcaagatgaaaaagataatacaaagaggtttcttttccactacagtaagactcagaagctgggtaagtccaacgtagtctcgagtgtggtgcacccactgcttcaactggtgcctcacctgcacgagcgacgaatgaaaagattcagagtagatgaagaattccagtctcctttcgccagccagagccgaggctattttcttttcaggccaagaaacgggcggagaagtgccggctttatctag

SEQ ID NO: 5272 - DNA, 1218 bp, synthetic construct
  misc_feature 1..1218: note = source = /note="Description of Artificial Sequence: Synthetic coding sequence"
  source 1..1218: mol_type = other DNA
atggacaccatttttttatggtcactcctgctcctcttctttgggtctcaggcttcacgttgtagcgcacagaagaatactgaatttgctgttgatctgtaccaagaggtctccctgtctcacaaggataacattattttttctcctttgggtataacactggtgctggagatggtgcagttgggagcaaaaggtaaagcacaacagcagataaggcaaaccttgaagcagcaggagacatccgcaggcgaggagttttttgttttaaaatcatttttctccgccatttccgagaagaaacaagaatttactttcaatctggctaatgctctgtatctccaagaagggttcactgtgaaggagcagtatttgcacgggaacaaggagtttttccaaagcgctattaagcttgttgacttccaggacgccaaggcgtgcgccgagatgatttcaacctgggttgagaggaaaaccgatggaaaaattaaggacatgtttagcggggaggagtttggacctctgactcgcctggtcttggtgaatgctatctattttaagggcgactggaagcagaaatttcggaaggaggatacgcagctcataaatttcaccaaaaagaacggaagtaccgttaaaatcccgatgatgaaagcactgctgcggaccaagtatggttacttttcggagtcatctctgaattaccaggtgttagagttgtcttacaaaggtgatgagttctctctcataattatcctccctgccgagggaatggatatcgaagaggttgagaaactcatcaccgctcagcagatcctgaagtggttgagcgaaatgcaagaagaagaagtggagatcagtctcccaagatttaaagtagagcagaaagtggattttaaagatgtcctgtacagcttaaacatcactgagattttcagcggaggctgcgatttatcaggaatcaccgattcttctgaagtctacgtatcccaggtgacacagaaggttttttttgagataaatgaggacggctcggaagcggctacaagtactggtattcacatacctgtgataatgagtctagcgcagtcccagttcatcgccaaccatccctttctatttattatgaagcacaacccgacagagagtatcctgttcatgggcagggtaacgaatcctgatactcaggagattaaggggagagacctggacagcctgtag

SEQ ID NO: 5273 - DNA, 3687 bp, synthetic construct
  misc_feature 1..3687: note = source = /note="Description of Artificial Sequence: Synthetic coding sequence"
  source 1..3687: mol_type = other DNA
atgaagggcgctcgactgttcgttctccttagcagcctgtggtccgggggtatcggcctcaataatagcaagcactcttggaccattcctgaggacggcaacagccagaaaactatgcctagtgctagcgtgccacccaacaaaatacagagcttacagatccttccaactacgagagttatgagcgctgagatcgccacaacacctgaagcgcgcacgagcgaagactccttgcttaaatctaccctccctccgagcgaaaccagtgcacctgccgagggtgtgagaaaccaaaccctgacatccaccgagaaagccgaaggtgtggtcaagcttcaaaatcttacccttcccactaacgcttctatcaagttcaatcccggcgccgaatcagtggtattatccaattctacgttgaaatttctgcaatctttcgcccgcaagtctaatgagcaggctaccagtctgaacactgtaggcggaaccggagggattggtggggtgggcggcactggcggcgtcggaaacagggcccctcgggaaacctatttgagccgaggcgactccagtagttcgcaacgcacagattatcagaaaagcaacttcgaaaccacccgtgggaaaaattggtgtgcttacgtgcatacaagactctcacctaccgttattttagataatcaggtgacctacgtacccggaggcaaagggccatgcggatggactggagggtcttgccctcaaaggagccagaagatctctaacccagtctataggatgcaacataagatagttacatcccttgactggaggtgttgtccgggatactcaggacctaaatgtcagttgcgagcgcaggaacagcagtccctgatccataccaaccaagccgagtcccacactgcggtggggaggggggtcgccgagcagcagcagcagcagggatgtggagacccggaagtgatgcagaaaatgacggaccaggtgaactaccaagccatgaagctgactctcctgcagaaaaaaatcgataatatctccctcaccgttaatgacgtgcggaacacctacagttctttggaggggaaggtttccgaagataagtcaagagaattccagtcactgctgaagggcctcaagtcaaagtccattaacgtgctgataagagacatcgttagagaacaatttaagatcttccagaacgacatgcaggagactgttgctcaactttttaagacagtgtcctctttatccgaagatttggaatcaacgcggcagatcatccagaaagtcaatgaaagcgttgtcagcattgccgcccagcaaaagtttgtacttgtgcaggagaacaggcccacattgactgatattgtagagttgagaaatcacattgttaacgttcggcaggagatgactctaacttgcgaaaagcccataaaggagctggaagtcaagcaaacccacttagagggcgccctcgagcaagaacattcacgttctatcttatactacgaaagtctaaacaaaactttatcaaaactaaaggaggtgcatgaacagcttctaagcactgaacaggtgagtgaccaaaagaatgccccggccgctgaaagcgtgagtaataacgttacggagtacatgagcactttgcatgagaatattaagaaacaaagtctgatgatgctgcaaatgttcgaggaccttcatatccaggaatccaaaatcaataacctgacggtgagccttgaaatggagaaggagtcactgagaggagaatgtgaggacatgctctctaaatgtcggaatgattttaagtttcagctgaaggacaccgaagaaaaccttcatgtgctcaaccaaacattagcggaggttctgttccctatggataataaaatggacaagatgtcagagcagttaaatgacctcacttatgacatggaaatactgcaacctctgttggagcaaggtgcttccttgagacaaactatgacatatgaacagcccaaagaggcaattgtaattagaaaaaaaatcgaaaatctgacgagcgccgtgaactccctcaacttcattatcaaggagctcaccaagaggcataacttgttgcgcaatgaagttcagggacgagacgatgctctagagcgacggatcaacgagtacgccctggaaatggaagatggcctcaacaaaaccatgactattatcaacaatgccatcgacttcatccaggataactatgctctcaaggagactctgtccaccataaaagacaactctgaaattcatcacaagtgcacctctgacatggagactattctcactttcattcctcagttccatcgtcttaacgacagcatacaaacattagtgaacgacaaccagcgctataatttcgtgctccaggtagcgaagacacttgctgggattcctcgagacgagaagctcaatcagtctaattttcaaaaaatgtatcagatgttcaatgaaacgacatcccaggtacgcaagtatcagcagaatatgtcccatttagaagaaaagcttctcttaacaactaagatttctaagaacttcgagacacggctgcaggacatagagtccaaagtaacccagactttgatcccctactatatcagcgtgaagaaggggagcgtggtcactaacgagagggaccaggccctgcaattacaggtgctgaatagtcgatttaaggctctggaggcaaaatcaatccacctctctatcaacttcttctccttgaacaagactctgcacgaggtgctgactatgtgtcataacgcgagcacatcagtcagcgagcttaacgccacaatccccaaatggatcaaacattctctacctgatatccagctgttgcagaaagggctgaccgagttcgtcgaaccgatcatacagattaaaactcaggccgcccttagtaatcttacctgctgtattgacagatcccttcccgggagcctggcgaacgtggtcaaatcacagaagcaggtgaagagccttcccaagaagattaacgccttgaagaagccaacagtgaatttgaccaccgttcttataggcaggacccaacgaaatacagacaatattatatatcctgaagagtactctagttgttctaggcatccatgccagaatggcggcacctgcataaacggcagaacaagctttacatgcgcctgtagacatccttttactggggataactgcacaatcaagctcgtcgaggagaatgcgcttgccccggacttctcaaaagggtcttatcgatacgcccccatggttgcgtttttcgccagccatacctatggtatgactattccaggaccaatcctgtttaataaccttgatgtgaattacggagctagctacaccccacggactggcaaattcaggatcccttatctgggcgtctatgtgtttaaatataccatcgaatctttctcggcgcacatctctgggtttttagtcgtcgacggaatcgacaaattggcctttgagtcagaaaacatcaacagcgagatccattgtgatcgggtacttaccggagatgctcttttagagctgaattacggccaggaggtgtggctgagactcgcgaaaggaactatccctgctaaattcccaccggtgactacatttagtggatatcttctatatcgcacatag

SEQ ID NO: 5274 - DNA, 1365 bp, synthetic construct
  misc_feature 1..1365: note = source = /note="Description of Artificial Sequence: Synthetic coding sequence"
  source 1..1365: mol_type = other DNA
atgtggcctctgaccgttcccccccccttattactcttgctgtgtagtggtttggctggccaaacactgtttcaaaaccctgaggagggttggcaactctacacctccgcacaggctccagacggtaagtgtatctgtaccgcagtgatcccagcccagagcacttgctctcgggacggacgtagtcgcgaactgaggcagctaatggaaaaggtgcagaacgtgtctcagtctatggaagtcctcgagctgagaacatacagggatctgcaatacgtgcgcgggatggaaacgcttatgcgatcactcgatgctcgacttagagctgccgacggaagcctgagtgctaagtcctttcaagaactgaaggaccggatgacggagctgttgcccctgagtagtgtcctggagcagtataaggcggataccagaaccattgtgcgattgagagaagaagtgcgcaacttgagtggttccctggccgctattcaggaggaaatgggcgcttacgggtatgaggatttacaacagagggtgatggcactcgaggcaaggctgcacgcatgcgcacagaaactgggatgtgggaaactgaccggcgtgagcaaccctattacggttcgggcaatgggctcaaggtttgggtcctggatgacggacaccatggcaccctccgccgactcaagggtttggtatatggatggttactataaagggcgtcgcgtgctggagttccgcacgctgggagacttcattaagggtcagaattttatacaacatcttcttccccaaccatgggcgggcacaggacacgttgtctacaatggtagtcttttctacaacaagtatcagagtaacgtggtggtgaagtaccacttccgctcgcgaagcgtgctcgttcagaggtctttgccgggtgctggatacaacaacacattcccctactcttggggcgggttcagtgacatggattttatggtggacgaatctggcttatgggccgtgtacactaccaaccaaaatgctggaaatattgtggtgagtaggctagacccacatacactggaggtgatgcgctcatgggatacaggctaccctaagcgctccgccggagaggcattcatgatatgtggagtgctgtacgtcacaaatagtcacctggccggggcaaaagtgtactttgcctacttcaccaataccagctcatacgagtacactgacgttccctttcataatcagtactcacatataagcatgctcgattacaacccgagggagcgggcattatatacttggaataacggacaccaggtgttgtacaatgtcacactgtttcatgtgatctcaacaagtggagatccatag

SEQ ID NO: 5275 - DNA, 909 bp, synthetic construct
  misc_feature 1..909: note = source = /note="Description of Artificial Sequence: Synthetic coding sequence"
  source 1..909: mol_type = other DNA
atgtgcgcagaacgcctcgggcagttcatgactctggcactcgtgctcgcaaccttcgacccagcaaggggaaccgatgcaactaatccccccgagggcccgcaggataggagcagccagcagaaaggcagattgtccttgcaaaatacagcagagatccagcattgcctggtgaatgctggagacgtcggatgtggcgtgtttgaatgtttcgagaataacagctgtgagattcgcggtttacacggaatctgtatgacttttctgcacaacgccggcaaatttgacgctcagggcaagtccttcattaaagatgctttgaaatgcaaagcccatgccctgcggcaccgcttcggctgcatttcacgaaagtgtcccgctatccgggagatggtgagtcagctccagagggagtgttacctgaaacatgacctgtgcgcagccgcccaggagaacacccgggtgattgttgaaatgattcattttaaggacttattgcttcatgaaccctatgtagacctggttaacctgctcttaacctgcggagaagaggtgaaggaggcaatcacccacagcgtgcaagtccagtgcgaacagaactgggggagtctgtgctcgatactgtctttctgtacatccgccattcagaagcctccaacggcgcccccggaacggcaacctcaagtcgaccggactaaactcagtagggcacatcacggggaggccgggcaccaccttcccgaaccatcttcaagggagaccggacgtggcgcaaaaggcgagcgaggttccaagagtcacccaaatgctcacgcgcgcggccgcgttgggggtttgggcgcacagggtccctccggaagtagtgagtgggaagatgagcagtccgaatactctgatattcgcagatag

SEQ ID NO: 5276 - DNA, 2529 bp, synthetic construct
  misc_feature 1..2529: note = source = /note="Description of Artificial Sequence: Synthetic coding sequence"
  source 1..2529: mol_type = other DNA
atgaaaccaggaggattctggttgcatctcacccttctgggggcatctctgcctgccgcactcggatggatggatcctgggacgtcccggggtcctgatgtcggggtcggggaaagccaggccgaagaaccacgcagcttcgaggtgacaaggcgagaggggctgtcatcacacaacgagttgctggcctcgtgtggcaagaagttctgtagcaggggatctcgctgcgtgctgagccggaagaccggggaaccagaatgccagtgcctggaagcatgcagaccttcttacgttccggtgtgcgggtctgatggcagattttacgaaaaccactgtaaactgcaccgcgctgcctgccttctgggcaagcgcatcaccgtgattcactcaaaggattgcttcttgaaaggggacacatgtaccatggccggctacgcaaggttaaaaaacgtgctgctggcgctgcaaacccgactgcagcctcttcaggagggggattcccgccaagaccccgccagtcagaaacgtctgctggtcgaatcactgtttagagatttggatgctgatggtaatggacacctctcatcttctgagctggcacaacacgttctcaagaagcaggatctggacgaagatctcctggggtgttctcctggggacttgctccgctttgatgattataactctgattccagtttgaccctgagggagttctatatggctttccaggttgttcagctgagtctcgcgcctgaagatcgggtcagtgtgactactgtgaccgtgggcctgtcgactgtattaacttgtgccgtgcatggggacctgaggccgcctattatctggaaacgaaatggcctaacactcaatttccttgatctcgaggatataaacgattttggagaagatgacagcctctatatcactaaggttacaacgatacatatgggaaactacacatgccacgcgtccggacatgaacagttatttcagacccatgtcctgcaggtcaacgtgccaccggtgatcagagtatatcctgagtcacaggcacaggaaccaggagtcgctgcttctctgaggtgccacgctgagggtattcctatgccgagaattacctggctgaagaatggagtggacgtctccacccagatgagtaagcaactgtctctcctggcgaatggctccgagctccacatcagctcagtacgctacgaagataccggggcttatacatgtattgccaaaaatgaggtaggagtagatgaggacattagcagcctgttcatcgaggattcagcccgcaagaccctagcaaatattctgtggcgcgaggagggcctttcagtgggcaatatgttctacgtgttttccgatgatggcattattgtcatccatcccgtcgattgtgaaattcagaggcatctgaagccaacagagaagatatttatgagctacgaggagatctgcccgcagcgggagaaaaatgctacacaaccctgtcagtgggtgagcgccgtcaatgtgcgcaatcgatacatatatgtggctcaaccagcactctcacgcgtgctcgtggtggacatccaagcccagaaggtattgcaaagtattggggtggatcctctcccagcaaaactgtcctacgataaaagccacgaccaggtttgggtactatcttggggagatgtacacaaatctcggccgtcacttcaggtgatcaccgaggcttccactgggcagagccaacacctcatacgaacccctttcgcaggggtcgacgattttttcatcccccctacaaacttgattataaaccacatacggttcggattcatctttaataaatccgatcccgcggtgcacaaagtagacttagagaccatgatgcccctaaagacaatagggctacatcaccacggctgcgtgccgcaagctatggctcatacacatctgggtgggtatttcttcattcaatgccgccaggatagcccggcttctgcagcaagacaactgctcgtggattcagtgactgattcagtgctgggccccaatggggatgttacgggtacgcctcatacatccccagacggaaggtttattgtgagcgctgctgcagatagtccttggctgcacgtgcaggagatcacggtaagaggcgaaatccagacgctgtatgacttgcagattaactcgggaatatctgatttggccttccaacgcagttttacggagagcaatcagtacaacatatatgccgcactgcataccgagccagacctcctgtttctggagttgtcgacaggaaaggtcggaatgctcaaaaatctcaaagaacctccagctggaccagctcaaccctggggcgggacccatcggatcatgcgagacagcggactcttcgggcagtatctgttgacaccggcacgggagagtctctttctcatcaacggcagacagaatactctgagatgcgaagtaagcgggatcaaaggtggcaccacagtggtatgggtgggagaagtatag

SEQ ID NO: 5277 - DNA, 2256 bp, synthetic construct
  misc_feature 1..2256: note = source = /note="Description of Artificial Sequence: Synthetic coding sequence"
  source 1..2256: mol_type = other DNA
atggcctttcgtaccatctgcgtcctggtcggcgtgttcatttgctctatttgtgttaaaggctctagccagccccaggcccgggtctacttaactttcgacgaactgcgggagacgaaaacttctgagtattttagtctgtcccatcacccactggattaccggatcctgttgatggacgaagaccaggatagaatttatgttggctctaaagaccacatactgtcattgaatatcaataatattagccaggaggccctttcagtattttggccagcttcaaccatcaaagtggaggagtgtaagatggccggcaaggacccaactcacggctgtggcaatttcgtcagggtcatacagacctttaaccggactcacctctatgtgtgcggttctggtgctttcagccccgtctgtacatatctgaatcgcggtagaagatctgaagatcaggtctttatgatcgacagtaagtgtgagagcggcaaaggcagatgtagtttcaacccaaacgtgaataccgtaagcgtgatgattaacgaggaactattttctgggatgtatatcgatttcatgggcaccgatgccgccatctttcgttcacttacaaagagaaacgcagtgcgcactgaccagcacaactccaaatggctaagcgagccaatgtttgttgacgcccacgtcataccggatggtaccgatcccaatgacgcaaaggtgtattttttctttaaagaaaaactaaccgacaacaaccgcagcaccaagcagatccacagcatgattgcacgtatctgtcccaacgatacaggtggcctccggtcactggttaataaatggacgaccttcctgaaggcccggttggtgtgtagtgtcaccgacgaggatggaccagaaactcacttcgatgagctggaagatgtgttcctgctagaaaccgataacccacgaacaacattggtatacgggatctttaccacttcgtccagcgtgttcaaaggaagtgcggtatgcgtgtaccacctgtccgacatccagaccgtattcaatggaccatttgcacacaaggagggtcctaaccaccagctgatctcttaccagggacggatcccttacccccgacctgggacgtgccctggcggggcgtttactcccaatatgcgaacgacaaaagaatttcccgatgatgtggtgacgtttatccgtaatcatccactgatgtacaacagcatctatccaattcacaagagacctttgattgtaagaattgggacggattacaaatatacaaagatcgccgtggaccgcgtgaacgcggcagacggccgatatcacgtgctgttcttaggaaccgatcgtgggaccgtgcagaaggtcgtggttctccccacaaacaattccgtgagtggtgagcttatactggaagagctggaggtgtttaagaaccatgctccgatcacaaccatgaaaataagttccaaaaaacaacagctctatgtgtctagcaacgagggcgtctcacaggtttccttgcacaggtgtcatatctacggaaccgcctgtgcagattgttgcttagcccgcgacccctactgtgcttgggacgggcattcatgttcaaggttctaccctacaggcaagcggcgctcaaggcggcaggatgtgaggcatggtaatcctctaacacagtgtcgcggttttaatttgaaagcatatcggaatgcagccgagatcgtacagtacggcgtaaagaacaataccactttcctcgaatgcgcccccaagtccccgcaggctagcataaagtggctgttgcaaaaggacaaagatagaaggaaggaagttaagcttaacgagcggataatcgccacaagccaaggcctgcttatcagaagcgttcaagggtccgatcaaggactgtaccactgtatagctaccgagaacagttttaagcagaccatcgcgaagattaactttaaagtgcttgactctgagatggtcgctgtcgtcaccgacaaatggagcccttggacctgggctagcagtgtgagagctctgccttttcaccccaaggacatcatgggggcattctctcactccgaaatgcagatgatcaatcagtattgcaaggatacaagacagcagcaccagcagggcgacgagtcacagaaaatgaggggggattacggtaagcttaaagcgttgataaatagcagaaaatcacgaaataggcggaaccagttgcccgagtcgtag

SEQ ID NO: 5278 - DNA, 2316 bp, synthetic construct
  misc_feature 1..2316: note = source = /note="Description of Artificial Sequence: Synthetic coding sequence"
  source 1..2316: mol_type = other DNA
atgggctggctcacgagaatcgtttgcttgttctggggtgtgttgctcacggcccgtgctaattaccagaacggaaaaaataatgtacccaggttgaagctctcctataaggagatgctcgagtctaataacgtgatcaccttcaacggattggcgaattctagttcttaccacactttcctcctcgatgaggaaaggtccagactatacgtgggagcaaaagatcacattttctcatttgatctcgtgaatatcaaggactttcaaaagatcgtgtggcccgtcagctatactaggagggacgagtgcaagtgggcaggcaaggatatcctaaaagaatgtgccaactttatcaaggtcttgaaggcctacaaccagacccacctgtacgcctgtggtaccggcgctttccacccgatttgcacctacatcgagatcggacaccaccctgaagacaatatttttaaactcgagaactcccactttgaaaatggcagggggaaaagcccgtatgaccccaagcttcttacagcctctcttctgatagatggagaactgtacagtggaacagccgctgacttcatgggccgcgactttgctatcttccgcacactcgggcaccatcatccaatccggactgaacagcacgattctagatggctgaacgatcccaagttcattagtgcgcatctcatttccgaatccgataatcctgaggacgataaagtctattttttcttccgagagaacgcaatcgacggggagcacagcggcaaagctacccacgctagaataggtcagatatgcaagaacgactttggtggacatcgatccttggttaacaaatggaccaccttcttgaaggcaaggctcatctgttctgtgcccggacctaacggtatcgacactcacttcgatgaactgcaggacgtgtttctaatgaacttcaaagaccccaaaaaccccgttgtttatggcgttttcactacatccagcaatatattcaaaggttccgccgtctgtatgtactcaatgtcagatgtgcgccgcgtttttttgggcccttacgcccaccgagatggacctaactatcagtgggtcccataccaaggccgcgtaccttaccctaggccagggacgtgtccctcgaaaacttttgggggctttgacagcacaaaggatctgcctgatgatgtgatcaccttcgcccggagccaccctgcaatgtacaatcctgtcttcccaatgaacaaccgtcccatcgtgattaaaacggacgtgaactaccaattcacccagattgttgtcgatcgcgtagacgcagaggatgggcagtacgacgtaatgtttatcgggaccgacgttggcactgtgctcaaggtggtatccatcccaaaggaaacttggtatgatttagaggaggtactgttggaagagatgactgtgtttcgcgaacctacagccatttcggccatggagctttcaaccaagcagcagcaactctacataggctcgacagctggcgttgcacagctgcctcttcaccggtgcgatatctacggaaaggcgtgtgccgagtgctgcctcgccagggatccgtactgtgcgtgggacggatctgcatgctcacggtatttccccacagccaagcgccgcaccagacggcaagacattcgaaacggcgatcccctgacccattgtagcgacctccaccacgacaatcatcatgggcattcgcctgaggaaaggattatctacggcgtcgagaattcgagtacttttctcgaatgttctcctaaaagccaacgcgcacttgtgtactggcagtttcagcggcgcaatgaagagcgcaaagaggagattcgcgtggacgaccacatcatccgcacagaccagggactcctcctgcggtccctccagcaaaaggacagcggcaattacctgtgccacgctgttgagcacggatttattcagactctcctcaaggtgacccttgaggtcatagacaccgaacatctcgaggagctattgcacaaggacgacgatggtgatggcagtaagacaaaagagatgagcaacagcatgacacctagccagaaggtgtggtacagggacttcatgcagctgatcaatcatcctaatctcaacaccatggatgaattttgcgaacaagtttggaaacgggacagaaagcagcgcagacagagaccaggacatacaccggggaattccaataagtggaagcacctgcaagagaataaaaagggtagaaaccgcaggacccatgagttcgagcgagctccaagatccgtgtag

SEQ ID NO: 5279 - DNA, 4605 bp, synthetic construct
  misc_feature 1..4605: note = source = /note="Description of Artificial Sequence: Synthetic coding sequence"
  source 1..4605: mol_type = other DNA
atggctctaacacccgggtgggggtcttcagcgggtcccgttcggcccgagctgtggctgcttttatgggctgcagcttggcggctgggggcctccgcctgtcctgccttgtgtacctgcaccggaacgacagtcgactgtcatgggacaggacttcaggccattcccaagaacatcccgcggaatacggagagactagagctaaacggtaataacataaccagaattcacaaaaatgactttgctggtctaaagcagttgagggtgctgcagctgatggaaaatcaaatcggcgcagtcgagaggggggcttttgatgacatgaaggagctcgagcggctgcgcctgaaccgcaatcagctccacatgctccccgagctcctgttccaaaacaaccaagccttatcgcgattagatctcagtgagaacgcaatccaggctatccctcgaaaagccttccgtggggctaccgatcttaagaatcttcagctagacaaaaatcagatttcctgtatcgaggagggtgcctttcgagctctcagggggttggaagtgttaactctcaacaataataacatcacgaccatcccagtgtctagctttaaccatatgcccaaactgcgaaccttcaggctgcattccaatcacttattttgtgactgtcacctggcctggctgtctcagtggttacggcagagacctaccataggattgttcacccagtgttctggtccggcgagtctgcgcggcctgaatgtcgcagaggtccagaaatcagagttttcttgtagcggtcagggagaggccggacgagtgcctacatgtacactgagctctggatcctgtccggcaatgtgtacctgtagtaacggaattgttgactgtcgtggtaaagggcttaccgcaattccagcaaacctcccagagacaatgactgaaatcaggcttgagctgaatggtataaagagcatcccccccggagcgtttagcccttaccgtaagcttcgtcggatcgacctgagtaataaccagatcgccgagatcgcgcctgatgccttccagggacttcgcagtctgaacagtttggtcctgtatgggaacaaaatcaccgatctccccaggggtgtgttcggaggactgtataccttgcagctgttgctcctcaacgctaataagattaattgcatacgacctgacgcttttcaagatcttcaaaatctgtccctcctctctctgtatgacaacaaaatccagtccctcgctaaagggacctttacctcgttacgggctattcagactctgcacctcgcgcagaacccattcatttgtgactgtaacctgaagtggctggcagattttttgcgtacaaacccaatagagacaagcggcgcccgctgcgcatccccaaggcgcctggctaataagagaattggccaaattaaaagtaagaaatttcgttgcagtgccaaggagcagtatttcataccgggaacagaggactaccaactaaatagcgagtgtaatagcgatgtggtctgtccccataaatgccggtgcgaagccaacgtggtagaatgctctagtctgaagctgactaaaatcccggagcggattccacagtctaccgctgagctgaggctgaacaataatgagatcagcatcctagaagcgaccgggatgttcaagaagctgacgcacctgaagaaaataaatctctctaataataaagtgtcagagattgaggacggggcttttgagggcgccgcatctgtttcggagctccacctgacagcaaatcagctagagagcatacgcagcggcatgttcaggggcctcgatggtcttagaacgctgatgcttcgtaataacaggataagttgtatccacaatgatagtttcaccgggttgagaaatgtaaggctcctctccctctacgacaatcagatcaccactgtttcaccaggtgcgtttgataccctgcagtctttgtctacactgaacttgttggcaaaccccttcaattgtaactgccagttggcctggcttgggggatggctgcgtaagcgcaaaatcgtcacgggtaaccctagatgccaaaatcccgactttctgcgtcagatccccttgcaagatgttgcatttccagactttcgttgcgaagagggacaagaagaaggcggttgccttccccggccacagtgccctcaggaatgcgcatgcctggatactgtggtgcgttgcagcaataaacacctgagggccttgcccaaaggaatccctaagaatgtgaccgagctgtacctcgatggaaatcagttcactcttgtgcccggacagctgtcaacgttcaaataccttcaactggtagatctatccaacaacaaaatctcgtccttgtcgaatagttcattcacaaacatgtcccagttaactaccctaattctgtcttataacgccttacagtgcatccccccactggccttccaaggcctgcggagtctcaggctcctctcactgcacgggaatgacatttcaacactgcaagaaggaattttcgctgatgtgacaagcctttctcacttggcaatcggggccaaccctctgtattgtgactgccatctgcgctggctgagttcttgggtgaaaactggctacaaggagcctggtatagctaggtgtgccggtcctcaagatatggagggcaagcttctcctcacgacccccgccaagaagttcgagtgccagggacctcctacactcgccgtgcaggccaagtgcgatctatgtctttcatccccatgtcaaaatcagggcacatgtcacaacgacccactggaagtctatagatgcgcttgtccttcaggttataagggacgcgactgcgaggtaagtcttgacagttgctcttccgggccctgcgagaatggcgggacttgtcatgcacaagagggggaggatgcccccttcacctgttcttgccctacaggcttcgagggcccaacctgtggtgtcaataccgatgactgtgtagaccacgcctgtgccaatggtggtgtgtgtgttgatggagtgggtaattacacttgccagtgcccccttcagtacgaaggaaaggcttgtgaacagttggtggatctttgcagcccagatctcaatccctgtcagcacgaggcgcaatgtgtgggtactcccgacgggcctcggtgcgaatgtatgcctggttacgccggcgacaattgctcagagaatcaggatgactgtagagatcatcggtgccaaaatggtgctcagtgcatggacgaagtcaacagctactcatgtctctgcgctgagggttactccgggcaactgtgtgaaattcccccgcacctgcccgcacccaagagcccctgcgaggggacagaatgccagaatggcgctaattgcgttgaccaaggaaacagacccgtgtgccagtgtctgccgggattcggcggccctgagtgtgaaaaactgctttctgtcaactttgtagatcgagacacatatctacagttcaccgatctgcagaactggccacgcgccaacattaccctgcaggtgtccacggctgaagataatgggatactgctttacaacggtgataatgatcatattgcagttgaactgtatcaaggccatgtgcgcgtctcctacgaccccggctcatacccctccagcgccatttatagcgccgagactatcaatgatggtcagtttcatacagtggaactggttgcttttgaccagatggtgaatttatccatcgatggaggatcaccaatgacaatggacaatttcggaaaacactacacccttaatagcgaagcaccgctctatgtggggggaatgcctgtagacgtgaattcagccgcttttcgtctctggcagattctgaacgggacggggttccatggctgcataaggaacttgtatataaacaacgaactccaagacttcaccaagacacagatgaagcctggggtggtccctggttgtgaaccatgtcggaagctttattgcctgcatggaatctgtcagcccaacgctaccccaggacccatgtgccattgcgaggccggctgggtaggactgcattgcgaccagcccgctgacgggccttgtcacggtcataagtgcgtgcacggacagtgtgtgccgctcgacgccctgagctactcatgccagtgtcaggacggatattctggcgctctctgtaaccaggcaggcgccctggcagagccttgtcgggggctgcagtgcttacatggacattgtcaggcctcaggcactaagggggcgcactgtgtgtgtgacccaggtttctcaggagaactctgtgagcaggaatctgagtgccgcggtgaccctgtgagggacttccatcaagttcagagggggtacgctatttgtcagacgacacgccctctcagttgggttgaatgcaggggtagctgccccgggcagggctgctgccagggccttcggcttaagcggagaaagttcacattcgagtgctccgacggcacctcatttgctgaggaagtggagaaacccaccaaatgcggttgcgcattgtgcgcttag

SEQ ID NO: 5280 - DNA, 342 bp, synthetic construct
  misc_feature 1..342: note = source = /note="Description of Artificial Sequence: Synthetic coding sequence"
  source 1..342: mol_type = other DNA
atggacagcaggcaggcagctgctctgttggtgctgttgttactgatcgacggcggatgcgcggagggcccaggtgggcagcaagaagaccagctctctgccgaggaagactccgaaccgcttccaccccaggacgctcagacctctgggtccctgctacactatctgctccaagcaatggagcgcccgggaaggtcacaggccttcctctttcagccgcagagatttggtcgaaacactcagggctcttggcgcaatgagtggctctcgcccagggcaggggagggactcaattctcagttctggagtttggcggccccccagcgcttcggtaagaaatag

SEQ ID NO: 5281 - DNA, 2568 bp, synthetic construct
  misc_feature 1..2568: note = source = /note="Description of Artificial Sequence: Synthetic coding sequence"
  source 1..2568: mol_type = other DNA
atggctagacatctcctgctcccattggtaatgttagtcataagccctattcccggtgcattccaggactctgctctgtccccaacccaggaggaaccagaggatttggactgcggacggcccgagccatctgcaagaatcgtaggtggctccaatgcccagcctggtacatggccctggcaggtatctcttcatcacgggggaggtcatatctgtggtgggtcattaatcgctcctagttgggttttgtcagctgctcattgtttcatgaccaacggcaccctcgagccggcggcggagtggtccgtgttgctcggtgtacatagccaggacggacctctggacggagcacatacacgcgccgtggcagccatagtcgttcctgcaaattactctcaggtcgaactgggcgctgacttggccctgctacggctggcttctcccgcctccctgggccccgccgtgtggcccgtgtgcttacctcgggctagccaccgcttcgtgcacggtactgcgtgctgggcaaccgggtggggcgatgtccaggaggccgatcctctcccacttccctgggtgttgcaggaagtggaattaagactgctcggcgaggccacctgccagtgtctgtatagccaacctggcccattcaatcttacattacagatccttcctggaatgctgtgcgctggctacccggaaggccgacgggacacctgccaaggagatagtggggggcccctggtctgcgaagagggtggaagatggtttcaggccggaatcacaagctttggattcggttgtggcagacgcaataggccaggggtgtttacagctgtcgctacgtacgaggcatggattcgtgaacaggtgatgggctccgagcccggtcccgccttccctacacagccgcaaaaaacccagagtgacccgcaggagccacgcgaggaaaactgcactattgctctcccagagtgcggaaaagcaccacggcccggagcatggccctgggaagcccaggtgatggttccaggatctagaccctgtcacggcgcgctggtgtccgagagctgggtcctagctccagcctcatgcttccttgatcctaactcatctgactcgccaccccgggatttggacgcctggagagtgctgctgcccagtagacctcgggctgaaagagtggctagattagtgcagcacgagaacgcaagttgggataatgcttccgacctagccttactgcaactacggacccctgtaaatctctccgcggccagcagacctgtatgccttccccatcccgaacactacttcctccccgggtcacgttgccgcctggcccgctgggggcgcggcgagccggctctggggccaggtgctttgcttgaggccgaattattggggggctggtggtgccattgtttatacggacgtcagggtgctgcagtgcccctgcccggtgaccctcctcatgcactctgcccagcatatcaggaaaaggaagaagtaggaagctgttggaatgactcacgctggtcacttctgtgtcaggaggaagggacctggttcctcgccggcatccgcgactttccgagtggttgcctgcggccaagagccttttttcccttacagacccatggcccttggatttctcatgtaacaaggggtgcatacttagaggatcaactggcgtgggactgggggcccgatggcgaggagaccgagactcaaacctgtccgccacatacggagcacggtgcatgcggacttagactagaagcggctcctgttggggttctgtggccgtggcttgctgaggtgcatgtggcaggcgatcgcgtctgcaccggcatcctgcttgcccccggctgggtactcgcagctacgcactgcgtcttacggcctggaagcactaccgtgccttatatcgaagtatacctcggacgggccggagcctctagcctgcctcaggggcatcaagtgtcacgtctcgtgatttccatccggctgcctcagcatttggggttgaggcccccactggccctcctcgagttatcgtctcgagtggagcccagccccagtgctcttcctatctgtttacaccccgccggcatcccacccggcgcttcatgttgggtgctgggatggaaagaaccacaggacagagttccggtggcggctgctgtgtccattctgacccaaagaatatgcgactgcctgtatcaggggatcctcccaccgggtactctgtgcgttctttatgctgaaggccaggagaatcggtgtgaaatgacgagtgctccccctctgctttgtcagatgactgagggcagctggatcctggtgggcatggccgtacagggtagcagagaactgtttgctgctatcggccccgaagaggcgtggattagccagactgttggcgaagcaaactttctgccaccttccggctcaccccattggccaacaggaggttccaacctgtgcccgccagaactggccaaggcaagtggtagtccccatgctgtgtacttcttactgctcctgacccttttgatccaatcttag

SEQ ID NO: 5282 - DNA, 912 bp, synthetic construct
  misc_feature 1..912: note = source = /note="Description of Artificial Sequence: Synthetic coding sequence"
  source 1..912: mol_type = other DNA
atgttacatcctgagacctcacccggacgaggacatctcctggctgtgctgctcgcgcttctgggaactacgtgggctgaggtctggccgccccagctacaggaacaggctccaatggccggtgcacttaaccgcaaggagagcttcctcctgttgagcctccacaacagactgcgatcctgggtgcagccacctgctgccgacatgcggaggctggactggtcagatagcctggcccagcttgctcaggcaagggctgccctatgtggcatcccaacaccttcccttgcatccggtctgtggcgcaccctacaagtcggctggaatatgcagctattacctgcaggactcgccagctttgtcgaggtggtgagtctatggttcgctgagggacagcgatatagccatgccgcaggtgagtgcgcacggaacgctacatgcacccattatacacagctggtttgggccacctcttctcagctgggatgtggaaggcatctgtgcagcgccggacaaacggccatagaggctttcgtgtgtgcctactctcctagaggaaactgggaggtcaacgggaaaaccattattccctacaaaaaaggtgcatggtgcagcttgtgtaccgcctctgtaagtggttgctttaaagcttgggatcacgcaggaggactgtgcgaggttccgcggaatccctgtagaatgtcctgtcagaaccacggtaggctgaatatcagcacgtgtcactgtcattgtccccctggctacaccggccggtattgccaagtcaggtgcagccttcagtgcgtccatgggagattcagagaggaagagtgctcgtgtgtgtgtgatatcggatacggcgagccctccgtgcctcctagatgtatctttccctctacccccgtgacctag

SEQ ID NO: 5283 - DNA, 1158 bp, synthetic construct
  misc_feature 1..1158: note = source = /note="Description of Artificial Sequence: Synthetic coding sequence"
  source 1..1158: mol_type = other DNA
atgaagatgcttcctggagttggtgtgttcggaacaggatcctctgcccgggtgctggtacctctgctgagagccgagggcttcacggtagaggccctgtggggtaagacggaagaagaagccaaacaactggccgaagagatgaatatcgctttttacacatctcggacggacgacatcttactgcaccaggatgtggacctggtgtgtatatctatcccccctcccctcacgaggcagatctctgtaaaggcactggggattggcaaaaacgtggtttgtgagaaggcagccacctccgttgacgcttttcgcatggtgacagcttcaaggtactaccctcaattgatgtctctggtgggcaacgtgttgagatttctaccagctttcgtgaggatgaagcaattgatttctgaacactatgtaggtgccgtgatgatttgcgatgcacgtatttattccggaagtcttttgagcccctcctacggctggatttgcgacgagctaatgggaggcggcggactccatacgatgggcacctacatagtggatcttctgactcacctgactggcaggcgcgccgagaaggtgcacggcctgttaaagacatttgttcgccaaaacgcggctattcgtgggatccgccacgttacatcagacgacttttgttttttccagatgcttatgggcggcggggtgtgtagcaccgttaccctgaatttcaatatgcccggcgcattcgtgcatgaggttatggtcgttggaagcgctgggcggctggtggcccggggcgcggacctctacgggcagaaaaactccgctacccaggaggagctcctgctgcgtgacagcctcgcggtgggcgcagggttgcccgagcagggccctcaggacgtccccctcttatatctgaagggaatggtgtacatggtccaggccctgagacagtctttccaaggacagggagatcggagaacttgggacagaacccctgtgtcgatggcggcctcttttgaggacggactgtacatgcagtccgttgtggacgcaataaagcgttcgtctagaagcggggagtgggaggccgtggaagttctgactgaggagccagatacaaatcaaaatctgtgtgaagccctccagaggaacaacctgtag

SEQ ID NO: 5284 - DNA, 1470 bp, synthetic construct
  misc_feature 1..1470: note = source = /note="Description of Artificial Sequence: Synthetic coding sequence"
  source 1..1470: mol_type = other DNA
atgccagtgactttcgccctgctgttgctactaggccaggccacagctgatccgtgctatgacccgcagggacgacctcagttttgcctcccgcctgtcacccagctagcggcggtcgctgcatcctgtcctcaagcctgcgctctgtctccgggaaatcacttgggcgctcgggaaacgtgcaacgggagcttgacactggcgctaggaggcccatttctgttaacgagtgtgtccttgaggttctgcacccctgggcctcctgccttaatactatccgcagcatgggcttccgggggcccctggaggctgctctggcaccgccccgcatggccgggggccctgggcggacccgagagggtcacttttcactctacccccggcccgaaggccactgttgctgcgtctcacttgcgtgtggagttcggcggacaggcgggacttgctgctgctggactgcgaggaaggtgtcaatgccacggacatgcagctagatgtgctgctagagcaaggcctcctcggtgccactgccggcatcatactacgggtcctggttgcgaaagttgccggccgagtcatagggactggccatggaggcccgccactcccaggcacccacacccatgcctgccctgcagttgtaaccagcacgcccgccggtgtcgttttaactcagagctgttccgcctgagcggggggagatcaggcggggtgtgtgaacgttgcagacatcatacggcgggccgacactgtcactattgccagccaggcttctggagagacccttctcagcctattttttcccgccgggcctgccgagcttgccagtgtcatcctatcggggctactggggggacttgtaaccagacttcaggccagtgtacatgtaaattgggcgttacaggcctcacctgcaaccggtgtggtcccgggtatcagcagtcaaggtctcctaggatgccttgtcagcggattcctgaagcaaccactaccctggcaacaacgccaggtgcctactccagcgatccccagtgccaaaattattgtaatatgtctgataccagagtgcacatgtccctgaggcggtattgccagcaggaccacgtgctcagggcacaggtactggcttcagaagcggcgggaccggcttggcagagactagccgtgcgcgtgctggccgtctataagcagcgggctcagccagtgaggcgtggcgatcaggacgcatgggtgcctcgcgcagacctgacatgtggatgtttgcggttgcagcctgggacagattacctgttgttaggcagcgccgtcggggatcccgacccaaccagactaatccttgatcgccacgggcttgctttgccctggcggccccgttgggcgcgccccctgaaacggctgcagcaagaagaacgcgccggcggatgccgaggcgtgcgagcacctacaccctccccacgacccgaacactag

SEQ ID NO: 5285 - DNA, 8430 bp, synthetic construct
  misc_feature 1..8430: note = source = /note="Description of Artificial Sequence: Synthetic coding sequence"
  source 1..8430: mol_type = other DNA
atgacacttgaaggtctgtacctcgctcggggaccactggctagactcttgcttgcatggagtgctctattgtgcatggccgggggacaggggcgatgggatggtgcactggaggctgccgggcccggcagagtacggcgccgcggaagcccagggatcctccagggccctaacgtgtgcgggagcagattccacgcatattgttgtcctgggtggagaacattccctggacgttcacagtgcgtagtgcctatatgccgcagagcttgcggagaaggcttttgttcgcaacctaatttatgcacctgcgctgatggaaccctggcaccttcatgtggagtatccagaggctcaggttgttccgtctcctgcatgaacggcggtacatgtcgtggagcctcctgtctctgccagaaaggctatactggaaccgtttgcggccaaccaatatgcgacagaggttgccacaatggcggaagatgcattgggccaaatagatgtgcatgcgtgtacggatttatgggaccccagtgtgagagggattaccgcaccgggccttgctttgggcaagtcggaccagagggctgtcaacaccagctcaccggactggtttgcacaaaggctctctgttgtgccactgttggccgggcctggggactgccatgcgaactgtgcccagctcagccccacccatgtagacgcggcttcatcccgaatattcacaccggggcctgtcaagacgtggacgaatgtcaggccgttccggggctctgtcaaggaggtagctgtgtgaatatggtgggatccttccactgtcggtgtccagtcgggcacaggttatctgactcaagtgcagcgtgtgaagactaccgggcaggggcatgttttagcgtgcttttcggaggccgctgcgccggggatcttgctggccattacacgcgtcgccaatgctgttgtgaccggggtcgatgctgggctgcaggaccagtcccagagctttgcccccctaggggctccaacgagtttcagcaactgtgtgcccaacgcctcccactcctgcctgggcaccctggactcttcccaggtcttctgggattcggaagcaatggaatgggccctcccctagggcctgcgcgcctcaatcctcacggctccgacgcccgggggatcccctccctggggcccggcaatagcaacattggtaccgcgaccttgaatcagacaatcgacatttgtcggcattttactaacctgtgtcttaacggccgctgcctccctacgccctcttcctacagatgtgaatgcaatgttggctacactcaggacgtcagaggcgagtgtatcgacgtggacgaatgcacatcctccccatgccaccatggagattgcgtgaacatacctggaacttatcattgccggtgttatcctggatttcaagcgacgccgacccggcaggcttgcgttgacgtggatgagtgtatcgtgtccggcggactgtgtcacctcgggagatgcgtcaataccgagggctccttccagtgcgtttgcaacgccggcttcgaactctcacctgatggaaaaaactgcgtggatcacaatgaatgtgcaaccagcacgatgtgcgttaacggtgtttgcctaaatgaagacgggtcgttcagctgtctatgtaagcctgggttcctcctcgcccctggcggacattattgtatggacatcgacgaatgccagacacccgggatctgtgtcaatggccattgcacgaacactgagggatccttcagatgccagtgcttagggggcttagccgtgggaacagatgggagagtatgtgtggatacacacgtaaggtccacatgttacggtgcgatcgagaaagggagctgtgcccgtcccttccccggtactgtcactaaatccgagtgttgctgtgcaaatcccgatcacgggtttggggaaccatgtcaactttgtccagcgaaggattcagccgaattccaggctctgtgctcatctggcctgggcattacgaccgatggcagggacataaacgaatgcgccctagaccctgaggtatgtgcgaacggcgtgtgtgaaaaccttcgggggtcctatcggtgcgtgtgtaatctgggatatgaggcaggagcaagcggaaaagactgtacggacgttgatgagtgcgctctgaactcgttactctgcgacaacggctggtgccaaaattcgcctggttcttactcctgcagctgtcctcccggcttccacttctggcaggatacagagatatgtaaggatgtcgatgaatgtttgagcagtccctgtgtaagcggggtgtgccgcaacctggccggatcttatacttgtaaatgtgggcctggaagtagactagacccgagcgggactttctgcctggatagcaccaaaggtacctgctggctgaaaattcaggagtccaggtgcgaggtgaacctccagggcgcctctctgcgttccgaatgctgcgctacccttggagcagcctggggaagcccttgtgagcggtgtgaaatcgaccccgcatgtgctcgtggcttcgccaggatgacaggagttacctgtgacgacgtgaacgaatgcgagtcctttccaggcgtgtgtccaaacggacggtgtgtgaatactgccggatcattccgctgtgaatgccccgagggccttatgctggatgcttcaggacggttgtgcgtagatgttcgcctagaaccctgcttcttacggtgggacgaggatgagtgtggagtcacgcttcccgggaaatatcgcatggatgtttgctgttgctcaattggtgccgtgtggggggtcgagtgcgaagcgtgcccagaccccgaatctctggagtttgcaagtttgtgtccgcgcgggctgggattcgcttcccgagattttttgtccggcagaccgttttataaagatgtgaatgagtgcaaagtgttcccaggactgtgcacccacggcacgtgccggaatacggtgggatcttttcactgcgcctgtgccggagggtttgccctggatgcacaagagcggaactgtaccgacatagatgaatgtaggatctctcccgatctgtgtggacaaggtacttgtgtgaatactcccgggagttttgagtgcgagtgcttccctgggtatgaatcaggattcatgctgatgaaaaattgtatggacgtggacgaatgcgcacgcgatcctcttctatgccgtggaggcacctgtacaaacacggacggctcctacaaatgtcagtgtcctcccggccacgaacttacagcaaagggcactgcctgtgaggacatcgatgaatgttcacttagtgatggcctgtgcccacatgggcagtgcgttaatgtcattggagctttccagtgtagctgccacgcaggtttccaaagcaccccagacaggcaggggtgtgtcgacatcaatgagtgtcgggtgcagaatggaggatgcgacgttcactgtattaacaccgaagggagttacagatgctcatgcggacagggttattcactaatgccagacgggcgtgcctgcgctgacgtcgacgagtgtgaggagaacccaagagtctgtgatcagggacactgtacaaacatgccaggggggcacagatgcttatgttacgatggtttcatggccacccccgatatgcgtacatgcgtggacgtggacgagtgtgacctcaatccccacatatgcctgcacggcgactgtgagaacacaaagggatcttttgtttgtcattgccaacttggctatatggtccggaaaggagcaacaggctgttctgacgttgatgaatgtgaggttggcggtcataattgcgatagccatgcttcatgcctgaatattcctggctctttttcttgccggtgtttacctgggtgggtgggggacggtttcgagtgtcacgatttggatgagtgcgtcagccaagagcatcgatgctctccgaggggtgactgtctaaacgtacccgggtcctataggtgtacatgccggcagggctttgccggagacggcttcttctgcgaggatcgggatgagtgcgccgagaatgtggatctgtgcgataacgggcaatgtttgaacgccccaggaggctacagatgcgagtgcgaaatgggctttgacccgacagaagatcaccgagcatgccaggatgtagacgagtgtgcacagggtaatttatgtgctttcggttcttgtgagaacttgcctggtatgtttagatgtatttgcaacggaggctacgagttagataggggcggcggcaactgcacagacataaatgaatgtgcggaccctgtgaattgtatcaatggcgtttgtattaacacaccaggatcttatctgtgcagttgcccccaggatttcgagctgaaccccagcggcgtaggctgcgttgatacccgcgcgggcaattgctttctggaaactcatgaccggggtgacagcggcattagctgctctgctgaaataggggtgggcgtgacaagggcaagctgctgctgctcactcgggagggcttggggcaatccctgtgagctctgcccgatggccaatacaaccgaataccgcaccttgtgtccaggaggagaaggatttcagcctaaccgaattacggtgattttggaggatattgacgaatgtcaggagctgcctggcttgtgccagggcggtgactgtgtcaatacttttggtagctttcagtgcgagtgcccacccggatatcatttgtccgagcacacacgcatctgtgaagatatcgatgaatgctctactcacagtggaatctgtggtccaggaacatgctataatacacttgggaactatacttgtgtctgtcccgccgagtatctgcaggtcaatggagggaacaactgtatggatatgcggaagtccgtgtgttttcgccattacaacgggacatgccagaacgaactggccttcaacgttacacgcaaaatgtgctgctgcagctacaacattgggcaagcctggaatcgcccttgcgaggcctgcccgacccccatctcacccgactaccagatactgtgcggaaatcaagcccccggctttctcactgatatccatacaggaaagcctttggacatcgatgagtgtggcgaaatcccggctatttgcgccaacggtatttgtataaaccaaattggcagctttagatgtgagtgccccgctggcttcaactataacagcatattgcttgcctgcgaagatgtggacgagtgtggtagtagggagagcccatgccagcagaatgccgactgtatcaatatcccaggttcctacaggtgtaagtgcacccgggggtacaaactgtctcccgggggtgcctgtgtgggcaggaacgaatgtcgcgagatccctaacgtctgttctcatggggattgcatggataccgagggcagttatatgtgtctctgccatcgtggtttccaggcgtctgcagaccagacactctgtatggacatcgacgaatgcgacagacagccatgcggaaacggtacgtgtaaaaacatcattggatcatacaattgcctatgttttcccggatttgtagtgacccacaacggggattgcgtcgatttcgacgagtgcaccacactggtgggacaggtctgtaggttcggccattgcctcaatacagctggatcttttcactgcttatgccaggatgggttcgagctgacagctgacggtaagaattgtgtcgacacaaacgagtgcctgagtctggctggtacatgtctccccggaacctgccagaacttagagggttcctttagatgcatttgccccccaggcttccaggtacagtctgatcactgcatagacattgacgagtgttctgaggagcccaatctgtgcctgttcggtacctgtactaactcccccggatctttccagtgcttatgccccccgggatttgttttatcagataatggccatcggtgctttgacactcggcaatccttctgtttcaccagattcgaagctggcaagtgctcagtgccgaaagcatttaacaccaccaagacccgatgctgttgctctaagaggcctggagagggttggggcgatccctgcgagctctgccctcaggaaggtagtgccgcatttcaggagctttgcccattcggccacggcgccgtgccaggtccagacgacagtagagaagatgtcaatgaatgcgcggaaaatccgggagtctgcacaaatggagtgtgtgtcaataccgatggatcgtttagatgcgaatgcccattcggatattcactggacttcaccggaattaattgcgtcgatacggatgagtgctccgtcggtcatccctgtggccagggcacctgcacaaatgtgattggggggttcgagtgcgcatgcgcggatgggtttgagcctggcttaatgatgacttgcgaggatatcgatgaatgcagcctgaaccctctcctctgtgcattccggtgtcacaatactgaggggtcttacttgtgcacatgccctgctggatacaccctcagggaagatggggccatgtgtagagacgtggacgaatgtgcggacggccagcaggactgtcacgccagaggaatggaatgcaagaatttgatcggtaccttcgcttgtgtgtgcccccctgggatgaggcctctgcccgggtccggggaaggctgcactgacgacaatgagtgccatgcgcaacctgatctgtgcgttaacggtcggtgcgtgaatacagcaggttctttccgctgcgattgcgatgaaggatttcagccttcccctacacttactgagtgtcatgatatcaggcaaggcccatgttttgctgaagtgctacagacaatgtgcagatcgttatctagctcgtcagaggcagtgaccagggcggaatgttgctgcgggggtggcagagggtgggggccaagatgtgaactctgcccactgccaggtacatctgcctaccggaagctgtgccctcatggatccggatataccgctgagggccgggacgtggatgagtgtagaatgctcgcccatctatgtgcacatggagaatgcattaactcactggggagctttaggtgtcactgccaggcagggtacacacctgatgccaccgcgaccacctgtctggacatggatgaatgcagccaggttcctaagccctgtactttcctgtgcaagaacactaaggggtcattcctgtgttcctgcccgagggggtatttgctggaagaggacgggaggacatgcaaggacctggatgagtgtacttccagacaacacaactgccagtttctgtgtgtaaacactgtgggagcttttacgtgtcgatgccccccaggcttcacacagcaccaccaagcctgctttgacaacgacgagtgctccgctcaacctggtccttgtggagcccatggacactgtcataatacgccaggctccttccgctgcgagtgtcaccagggtttcacactggtgtcatctggacatggctgtgaggacgtgaacgagtgcgacggcccccataggtgtcagcacggttgtcaaaatcagctcgggggttaccggtgtagttgtccccaagggttcacacagcacagtcagtgggcccagtgcgtagatgagaacgagtgtgccctgtcacctccaacctgcggctctgcctcttgtaggaatactctgggcgggttccggtgcgtctgcccatcaggctttgacttcgaccaagccctaggcggctgtcaggaggttgacgaatgcgccggacgccggggcccctgtagttacagttgcgcaaatacccctggaggattcctgtgcgggtgtccccaagggtattttcgtgcgggacaaggtcactgtgtttctggattagggttctcccctggtccacaggacacacctgataaagaagagcttctcagtagcgaagcctgctacgaatgtaaaatcaacgggctgagccctcgggaccgcccacggcgttctgctcaccgtgaccatcaggtgaacctggccactctcgactcagaagcgcttctaacactagggctgaacctgtcgcatctcggcagagcagaacgcatccttgaactgagacctgcactcgaggggctcgaaggacggatacggtatgtgatcgtaagaggcaacgaacaaggcttctttagaatgcatcaccttagaggcgtgtcgtccttacagctgggacgcaggcgacctggtcccggaacttacaggttagaagtcgtgagccacatggccggcccctggggagtccagcccgaagggcagccagggccctggggacaagcacttagattgaaagtgcagttgcagctactctag

SEQ ID NO: 5286 - DNA, 303 bp, synthetic construct
  misc_feature 1..303: note = source = /note="Description of Artificial Sequence: Synthetic coding sequence"
  source 1..303: mol_type = other DNA
atggagaccagacaggtttctcgctcccctcgagttcggctgctgctgctgctcctcctcctcctggtggtgccctggggggtgagaacagcgagcggggtcgccctcccccctgttggagtgctctccttaaggccacccggaagagcctgggcggatcctgcaacgccgagacctaggcgatccctcgcactcgccgacgacgctgcctttagagaaagggcccgtctgctcgccgcattagagagaaggcactggttgaacagttacatgcataagcttctggtcctagatgctccgtag

SEQ ID NO: 5287 - DNA, 1404 bp, synthetic construct
  misc_feature 1..1404: note = source = /note="Description of Artificial Sequence: Synthetic coding sequence"
  source 1..1404: mol_type = other DNA
atgtggcgttgccctctgggtctgctgctacttctcccattggctggtcatttggccttgggcgcccagcaaggcagaggacggcgagaactggcccctggtctccacctgcggggcatcagggatgccggaggccgttactgccaggagcaggatctttgctgtcgaggcagagcagacgattgtgccctcccatatttaggggcaatttgctattgtgatctattttgcaaccgtactgtctccgactgttgccccgacttttgggatttctgcctgggcgtgccaccaccgttcccacctatccagggctgtatgcatggaggccgcatctaccctgtactgggcacctactgggataactgtaacaggtgcacctgccaggagaaccgtcagtggcaatgcgaccaggaaccgtgcttggttgaccccgacatgatcaaggccattaaccagggtaactacggatggcaggccggcaaccatagcgcgttttgggggatgactttggatgaaggcattcgataccgcctcggaactatccggcctagctcatcggtcatgaacatgcacgagatttatacggttctcaacccgggcgaagtgctcccgaccgcattcgaagcgtcggaaaagtggcctaacttgatccacgagcccctcgatcagggtaactgcgctgggtcctgggcatttagcacagcagcggtagctagcgaccgggtgtccatccatagtcttggacatatgacaccggtgctttctccccagaatttactgagttgcgacactcaccagcaacagggttgtcgcggcgggcggttggatggcgcttggtggtttctccggaggcggggagtggtctccgaccactgttatcccttctctgggagagaacgcgatgaggccggccccgcacctccctgtatgatgcactccagggcgatggggcgcgggaagcgccaggcaacagctcactgtcctaatagttacgtaaacaataatgatatttatcaggtgactcccgtgtaccgactggggtctaatgataaagaaatcatgaaagaactcatggagaacggccccgtacaagcgctcatggaggttcatgaggatttcttcctatacaaaggaggaatctatagccacacgcccgtgagcctcggaaggccagagcgatacaggcgtcacggcacccattcagttaagatcacaggttggggggaggaaactctgcccgacggcagaactcttaagtattggaccgctgcgaattcctgggggcctgcatggggggagcgcgggcactttcgtatagtgagaggggtgaatgagtgtgatatcgagagcttcgtccttggagtgtggggtagagtcggtatggaggatatggggcatcattag

SEQ ID NO: 5288 - DNA, 2205 bp, synthetic construct
  misc_feature 1..2205: note = source = /note="Description of Artificial Sequence: Synthetic coding sequence"
  source 1..2205: mol_type = other DNA
atgttttacgtctgtagctcttgcgtgttcctgtgtgggtccaacttccctaatttcccttttcaggttgcctctgcgaaatcagcacccgagatccccacgattgatcaagcatatagcaagctgagcaactccatcacggtggagtgggctactgtccccggagccacatcttacctgctcaccgcggaggacggagatacagtaatagagacaacagttgcaaactcccccggcacagtcacaggcctgaaggctgcaacttggtatgagatcactattagatcaataagtgcagcgggaagatcacaggcctccccaccaaaacaggctaagaccgtgctggcagcaccaatcttggaggttagttccccatcctccgacagtatcctcgttcagtgggaggctgtctacatggcgatcgccttctccgtatccatcatgcgagcaaacggcttaggaagcatttggaaggaaaataccaccaatacttcgctcacctttacttccctcgaagccggcaccctttatacaattaaagcctacgcttggaatgctaacaggattcccggcgacgatagcacttgtaatcagcgtacatcccccagagcccccgctaacattcaggtgtcctttgactcaggtgccctcaaggcgtcattttcttgggcgagagctgagggggcattcaattataccgtgatggctctctccgacagttcggagcttacctgcagcacaactttcagctcctgcacgatctcctctctgcagtgtggcacggagtaccttatcagcgtgctcgcatccaacgatgctggaagttccaagtcttcctcagccatgaccctgaaaactgttgcctgcgctcctggcagggttacgattcaggaagaccctcccgggcatttgtctgtcgcgtggagctcggtcgacctgggagactattatgtggtgttcgtcaagtctgacgacggcttggaagtgcattgcaacacctcactgacccagtgtaatttcctgtccgaatgcggtttcacatacttcatctcagtgttcgtatacaataaggcagggcagtcccccctgggcgacatatttaactacactaccgcaccttgttgcccctccgatattaaccccgtcctcgtttcctccgatcgcgttgagattgtttggtccccagtgaggggtgctgagctttacgagacgaaagccgtagacgggtacaacatggtcgagtgcaacgatactacccccgcgtgtacgctttcagctctagagtgcgacaccaaatacaatatcaccgtatattcttttaacgaagtgaggggaagcaacatgtcttgtaccccacagtttattaccaccgcgccatgtagtccggagattaagaatgtgtccagagatgccttctccatgatcaacgtgcattggagaagcacgaatgatgatgctacatataccgtcaccgctcaaggtgaaaaaggcttgtatcaatgctcctcgaccggggaatcttgcacgatgcgcgggctcccttgcggatctgttttttctgttaccgccgtagcagaaactcaggcaggccgttcactgccctcctattccgtcccattggaaaccgtgccatgttgccccactggcttgaccgtcacgcaaataacacagtccgtgattaatgtgtcttggacaatcggacgcgttgcccagacacacgtggcagtgttggaatcccatacgggccagagcaaatgccatacacaccagaaccattgtctcctcggatgtattacatgtggcatcaattacaccgtgacccttaaagctatcagtgccaccggtctgaccgccgattgttcatatcagtcctacttcagtggcgcttgctgcccgctgggggtgaagctataccgcctggggcccaatgggattcgcatctactggcaggcaagccgcgggtccgctaactattcgacagatttatacggttctaaagggatctttacctgcactccaagcgcaggtctgagcttctgtgatgttactgagatcccttgcggtgacgtctacactgtcatggtgtctccggtggccaaaaccggactgaaattaacattttgccccaaaaaaatttattcagtgacctgtagtggttctactcttggcatggtgatttaccggggcaagagaaatgaggagtag

SEQ ID NO: 5289 - DNA, 1098 bp, synthetic construct
  misc_feature 1..1098: note = source = /note="Description of Artificial Sequence: Synthetic coding sequence"
  source 1..1098: mol_type = other DNA
atgctggatggttcacctctagcacggtggttggcagccgcgtttggcttaacgctgctgctggcagcgcttcggccttctgcggcctacttcggactgactggaagcgagcccctcaccattttgccactgaccctggagcctgaggcagccgctcaggcacactacaaggcttgcgatcgcctcaaattggagcgtaagcagagaaggatgtgccgcagagaccccggtgtggcggagactctagtggaggccgtgtccatgtctgcattggagtgccagttccagttccgcttcgaacggtggaattgcactctcgagggcaggtatagggcctcactgttgaagcgcggattcaaagagactgccttcctctacgcgatcagcagcgcggggctgactcacgcgctggctaaggcctgttcagcaggccggatggagagatgtacctgtgacgaagcccctgatctagaaaaccgggaggcatggcagtggggcggttgtggagacaatctgaaatactcatcaaagtttgtgaaagagtttttgggaaggagaagcagcaaggatctccgggcccgggtcgatttccataacaacctggtgggcgtgaaagtcattaaggcgggtgtcgaaacaacatgcaagtgccacggagtgagtgggagctgtacggtccgcacctgttggcgtcagcttgcaccctttcatgaggtgggaaagcatctgaagcacaagtacgagaccgccctcaaggtgggatcaactaccaacgaagctgcaggggaggctggcgccatttcacctccacgcggcagagccagcggcgccggcggcagcgatccacttccaagaaccccggagctcgtccatttggatgattcaccaagcttttgcctcgccggcaggttctctcccggaaccgcagggagacgctgtcacagagagaagaattgcgaatccatttgttgtggacgaggacacaacactcagagtagagtagttacccgcccctgtcagtgccaggtgaggtggtgttgttacgtcgagtgcaggcaatgcacgcagagggaggaggtgtacacgtgcaaaggatag

SEQ ID NO: 5290 - DNA, 795 bp, synthetic construct
  misc_feature 1..795: note = source = /note="Description of Artificial Sequence: Synthetic coding sequence"
  source 1..795: mol_type = other DNA
atgcgcctgaggcctttacctctggtggttgtgccaggtctgctgcaactgctgttctgcgatagtaaggaagtggttcatgccaccgaaggcctggattgggaggataaggacgcacctggaaccctggtaggaaacgtggttcatagcagaatcatctcccctctccgtttgtttgtaaaacagtcacccgtaccaaagccaggtcccatggcttatgcagatagtatggaaaacttctgggactggctggcgaatattactgagattcaagagcctctggcccgtactaagaggagaccaattgtgaagaccggcaaattcaagaaaatgttcggatggggggactttcatagcaacattaagactgtcaagctgaatctcctgatcacagggaaaattgtggaccatgggaacgggaccttcagtgtgtactttcgacataatagtactgggctgggcaacgtgtccgtctctctggttccccctagtaaggtcgtagaatttgaggtcagtccacagagcacgttagagacaaaggagtccaagtcttttaactgccgcatcgagtatgagaagacggaccgcgctaagaagacggctctgtgcaatttcgatccttccaaaatttgctatcaggaacagactcagtcccacgtgtcgtggctgtgctctaagccctttaaggtcatatgcatctatatcgcattttatagcgtcgattacaagctggttcagaaggtttgtcctgactataactaccatagcgagactccgtacctgagcagcggctag

SEQ ID NO: 5291 - DNA, 1125 bp, synthetic construct
  misc_feature 1..1125: note = source = /note="Description of Artificial Sequence: Synthetic coding sequence"
  source 1..1125: mol_type = other DNA
atgaagcctctactggagacgttgtatctgctggggatgttggttcctggaggattgggctacgaccgctccctggctcaacacagacaggaaattgtcgacaagtccgtttccccatggtccttggagacatatagctacaatatctaccacccaatgggagaaatctatgaatggatgagagagatctctgagaagtataaagaagtagtgacacagcactttttgggggtcacttatgaaacacatccgatgtactacctgaagatctcccaacccagtggtaatcccaagaaaataatctggatggattgcggcatccatgcacgggagtggatcgcgccggccttttgtcagtggtttgtgaaggaaatactacaaaaccacaaggacaacagctcaatccgaaaactcctgcgaaacttagatttctacgtattgccggtccttaatattgacggttacatttacacgtggacaactgaccgactctggaggaagagcagatcccctcataataatggtacttgtttcggcacagatttgaaccggaattttaatgcaagttggtgctcaataggtgcctcccgtaactgtcaagatcaaaccttctgcggcacagggccagtctccgagcccgagaccaaggcagtagcctcctttatcgaatcaaagaaggacgacatcctgtgcttcctgactatgcatagttatggccaattaatactgacgccctacggttatacaaagaataagtccagcaatcaccctgagatgatccaggtgggtcagaaagcagctaatgccctgaaggccaagtatggtaccaactatagagttgggagtagcgccgatatattgtatgctagcagcggaagtagtcgggactgggccagggatatcggaattcctttcagctatactttcgagttaagagatagcgggacttacggtttcgtgcttcccgaggcacaaatccagcctacctgcgaagagaccatggaggctgtgctgagtgtactggacgatgtgtacgccaagcactggcactcagactccgcaggccgcgtcacctctgccaccatgcttctcggtctccttgtgtcctgcatgagtctgctttag

SEQ ID NO: 5292 - DNA, 1728 bp, synthetic construct
  misc_feature 1..1728: note = source = /note="Description of Artificial Sequence: Synthetic coding sequence"
  source 1..1728: mol_type = other DNA
atggcttcttggctcagaagaaaactgagggggaagagacggcctgtgattgccttttgtttgctgatgatcctgtctgctatggcagtgacacgatttcctcctcagcgcccgtctgccgggcctgatcccgggcccatggaacctcagggagtgactggggctcctgctactcacattagacaggccctgtcgtccagtcggcgccaacgcgcgcgtaacatgggattttggagatcacgagcattgcccagaaacagcatccttgtgtgtgctgaggaacagggtcatcgggcgagggtcgatcgttcacgcgagtctccgggaggagacctgcgccatccgggtagagtgaggcgagacattacgctgagcggtcaccccagattgagcacacagcacgtcgttctgctccgtgaagatgaagtgggggatcctgggaccaaggatctgggccaccctcaacacggatcacccattcaagagactcagtcagaagtggtgactcttgtttccccactgccgggatccgacatggccgccctacccgcatggagagccacatcaggcctgacactatggcctcacactgctgagggccgcgatctcctgggtgcagagaaccgggcgctcactggaggtcaacaggcagaggaccccactctagccagtggggcccaccagtggcccggcagtgtggaaaaactgcaaggtagtgtgtggtgtgacgcagaaacactgcttagctcttcgcggaccggcggtcaggcccctccctggctgacggaccatgatgttcaaatgctgaggctcttggcacaaggagaggttgttgacaaagctcgtgttcctgcgcatggccaggttcttcaagtgggcttcagtaccgaggccgccctccaggacctctcctcccctcgcctgagtcagctgtgtagccaggggctgtgtggtttgattaaacgaccgggcgatctgcccgaagtcctgtcgttccatgtagaccgggttcttggtttgcggaggagccttcctgccgtcgccaggaggtttcactcacctcttttgccctaccgttatacagatggcggggctcgcccagtgatttggtgggcccctgacgtgcagcatctgtccgacccagatgaggaccaaaacagcctggctctgggatggctacagtaccaggctctactggctcacagctgtaattggccagggcaggcaccctgtccagggattcatcatacggagtgggccagactcgctctctttgattttctgctgcaggtccacgaccgactcgatagatattgctgtggatttgagccagagcccagcgacccatgtgtcgaagaacgtctgcgggaaaagtgtcagaaccccgctgaactccgtttggtgcatatcctggtgcgatcctccgatccatcccacttggtttacattgacaacgccgggaacttgcagcacccggaagacaagcttaatttccggctcctggaaggaattgatgggttccctgagtctgccgtaaaggtgctggcgtccggctgtctccagaacatgctgctgaaaagcctccagatggatcccgtcttctgggagtcacagggtggggctcaaggtttaaagcaagtgctgcagaccttagaacagcgcggccaggtgcttcttgggcacatccagaaacacaacctcacactgttccgggacgaggacccctag

SEQ ID NO: 5293 - DNA, 1680 bp, synthetic construct
  misc_feature 1..1680: note = source = /note="Description of Artificial Sequence: Synthetic coding sequence"
  source 1..1680: mol_type = other DNA
atgtggacaaattttttcaagctgcggctcttctgctgcctgctggccgtcctaatggtggtagtgctcgtgattaatgtaactcaggtggaatatctggatcacgaaaccgtgtcagccacatttatcgatagcagcggccagtttgtcagttcgcaggtcacgggcatctcccggaacccttattgcggttacgaccagcaaactcttagcagccaggagagaatggaggaggactccctcctggctgcgctgcaccgccaggtgcccgacgtgggccctgtgcctttcgtgaagagtaccgacccttcctcctcctatttcgtcatactgaatagcgcggctttctttaaagtgggttcccagcttgaggtgctggttcacgtccaggatttccagcgaaagccaaagaagtatgggggagattacctacaggcaagaattcactcactgaagctgcaggcaggtgccgttggccgggtggtggactaccagaacggcttctacaaggtctttttcaccttattatggcccggaaaagttaaagtctcagtcagcttggtgcaccccagtgaggggataagggtacttcagcgactgcaagaggataagccagaccgagtgtacttcaaaagcctgtttaggagtggtaggataagcgagactaccgagtgtaatgtttgccttcccggaaatctccctctctgcaatttcacagacctgtataccggggagccttggttctgttttaagccaaaaaagctgccatgcagcagccgtattacccattttaaggggggctatttgaaggggttgctgactgctgcagaaagcgcattttttcagtccggcgtgaacataaaaatgcctgttaatagctccgggcccgactgggtaactgttatccccagacgaattaaggaaactaatagtcttgaattgagtcaggggtccggaacatttccatcaggctattactacaaggaccagtggaggcccagaaagttcaagatgcggcagttcaatgatcctgataatattaccgaatgtctacaacgcaaggtggtgcatctattcggggacagtactatcaggcagtggtttgaatatctcaccacgtttgtgcctgacctggtggaatttaaccttggatctccgaagaacgtggggccctttcttgctgtggaccagaagcacaatatattactgaaatatcgatgtcacggcccccccattcggtttaccaccgtgtttagcaacgagctacattatgtcgctaacgagcttaatggaatagtgggagggaagaatacggtcgtcgccatagccgtctggagccacttctcgactttccctctggaagtctatatcaggaggctcagaaatatccggagggccgttgttaggctgttggacaggtcgcctaagaccgtggtagtgatacggacagccaacgcacaagagctgggccccgaagtttcattgttcaattcagactggtataactttcaactcgataccatactgagaagaatgttcagtggggtgggcgtctatcttgtcgacgcatgggagatgaccttagcccactacctgccacataagttgcatccagacgaagtgatcgtgaagaaccagctcgacatgttcctcagctttgtttgtcccctggaaacttag

SEQ ID NO: 5294 - DNA, 3624 bp, synthetic construct
  misc_feature 1..3624: note = source = /note="Description of Artificial Sequence: Synthetic coding sequence"
  source 1..3624: mol_type = other DNA
atgcggctgacgcacatttgttgctgttgtttgttataccagctggggttccttagtaacggtattgtgtcagagctgcaatttgccccagaccgcgaagaatgggaagtggtgtttcctgcgctctggcggcgggagccggtggaccctgcaggcggaagcggcggaagcgctgaccccggctgggtgaggggagtggggggtggcggcagtgccagagctcaagctgccgggagttctagggaagtgcggagcgtggcccccgtgccccttgaggaaccggttgagggtcgctctgaaagccggctgcggcctccccctccctcagaaggggaggaggatgaagaactggaatcccaggagctaccacgcggctcaagcggcgccgcagcgctatctccgggagctccagcctcctggcagcccccacccccaccccagccacctccctcaccacctccagcccagcacgctgaacccgacggggatgaagttctgctccggatacctgcctttagcagagacctgtacctcctactgaggcgggacggacgcttccttgctccaaggtttgcagtggaacagcgcccgaatcccggtccaggtcctactggggccgcctcagcacctcagccacctgcccccccggatgccggttgtttctataccggcgcggtgctgaggcacccaggctcactagcctcatttagcacttgcggaggcggactgatggggtttattcagctgaatgaggatttcatttttatagaacccttaaatgatacaatggccatcactggccacccacaccgcgtatataggcagaaacggtcaatggaagaaaaggtgacggagaaaagcgcacttcatagccattactgtggaattatttcggacaaaggccgaccaagaagccgtaagattgcagaaagcggcaggggaaagagatattcttacaagcttccccaagagtataatattgagactgtggtcgtggctgaccccgcaatggtctcctaccacggcgcggatgcagctcgcaggttcatcctcactatcctcaatatggtctttaatctgttccagcacaaatccttgagcgttcaggtgaacctgagagtaataaaactcatcttacttcacgaaaccccacctgaactatatatcggacatcatggcgagaaaatgcttgagtcattctgtaaatggcagcatgaggaatttggaaaaaaaaatgatatacacctggagatgagtacaaattggggcgaggacatgacctccgttgacgccgcgatattgatcacccgcaaagacttttgcgttcacaaagacgagccatgtgacacagttggtatcgcctacctgagtggcatgtgttctgaaaagcggaaatgcatcatcgctgaagacaatggcctcaacctggccttcacaattgctcacgaaatgggacacaatatggggatcaaccatgataacgaccatccctcatgcgccgacggtctgcatattatgagtggcgagtggatcaagggacagaacctgggagacgtgtcttggagccgctgttcaaaagaggacctggagcgattcctgcgaagcaaggcttctaattgtctgctccagaccaatcctcagagcgtgaacagcgttatggtcccttcgaagcttcccggcatgacctacactgcggacgagcagtgccagatcctcttcgggcccctcgcgtcgttctgccaggagatgcagcatgtcatttgcaccggactctggtgcaaagtagagggcgagaaagaatgtcggacaaagctggacccgccaatggatggcactgactgtgatctcggaaagtggtgcaaggcaggagagtgcacttcccgcacatctgctccagaacacttagcaggggaatggtccctgtggtctccatgctccagaacgtgtagcgccggaattagtagtagagaacggaagtgccctggattggattccgaggcaagagattgtaatgggcctcgcaagcagtataggatctgcgagaaccctccttgccccgctggcttgcctggctttcgggattggcagtgtcaagcttactcagtgcgcacctcttctcctaagcacatactccagtggcaggccgtgctggacgaggagaagccctgtgctctgttctgcagccccgttggtaaggagcaaccaattttgctctctgagaaagtgatggacgggacgtcctgcgggtaccagggcttggacatttgtgctaacgggcgctgtcagaaggttggctgcgatggcctcctcggctcactggccagggaagatcactgtggagtgtgtaacggcaatggcaaatcctgtaaaatcataaaaggggactttaaccacacacggggagctggctacgtcgaagtgttggttattccagccggtgccaggcggataaaggttgttgaagagaaacccgcccactcctatttagcactgcgcgacgctggcaagcaatctattaacagtgattggaaaattgagcacagtggggcctttaatttggctggcaccaccgtccattacgtaaggcggggcctttgggaaaaaatctcagccaaggggcctactacagctcctctccatctacttgtgttgctgttccaggaccagaattatggcttgcactacgagtacacaattccctccgatcctttgcctgagaatcagtcatccaaggcacctgaaccactgttcatgtggactcatacctcatgggaagactgtgacgctacctgcggtgggggcgaaagaaagactaccgtttcttgtactaaaattatgtcaaagaacattagcatagtggacaacgaaaaatgcaagtatctgactaagcccgagccacagatccgcaagtgtaatgagcagccatgtcaaaccagatggatgatgacagaatggacgccttgctccagaacctgtggtaaggggatgcagagccgacaagtggcttgcacgcagcaactgtcgaacggcaccctcattagagctcgggaacgcgactgcattgggcccaagcccgcctcagcacaacgctgtgagggacaggattgcatgactgtttgggaggcaggggtgtggagcgagtgtagcgttaagtgtggtaaggggatccggcatcgcacagtgcggtgcacaaatccacgcaagaaatgtgtcttgagcacacgcccccgggaggctgaagactgcgaggactattctaaatgctacgtctggcgaatgggcgattggtcaaagtgctctatcacatgtggcaaaggaatgcagagtcgggtgattcagtgcatgcacaagatcacaggccgacacggaaacgaatgtttctcctccgagaagcctgcagcctacagaccatgtcacctgcaaccttgtaatgagaagataaatgtcaataccattacatcacctaggttagccgcactcaccttcaaatgtctgggggaccaatggccagtgtactgtcgggtcataagggagaaaaatctttgccaggacatgcgctggtatcagcgctgctgcgaaacatgtcgcgacttttacgcccaaaagttgcagcagaaatcatag

SEQ ID NO: 5295 - DNA, 258 bp, synthetic construct
  misc_feature 1..258: note = source = /note="Description of Artificial Sequence: Synthetic coding sequence"
  source 1..258: mol_type = other DNA
atgaaaattactggcggactcttattgttgtgcacggtggtgtatttctgtagctccagtgaagcggcgtcgctttccccaaaaaaggtagactgcagtatctacaagaagtacccagtagtcgccatcccttgtccaattacctaccttccagtatgtgggagcgactatattacgtacggaaacgaatgtcacctttgcacggagtcacttaaatcaaatggccgcgtgcagttcctccatgacggctcgtgctag

SEQ ID NO: 5296 - DNA, 2982 bp, synthetic construct
  misc_feature 1..2982: note = source = /note="Description of Artificial Sequence: Synthetic coding sequence"
  source 1..2982: mol_type = other DNA
atgggaagtggccgggtgccaggcttgtgcctgctggtgttgctagtccacgcccgagccgctcagtattccaaggccgcccaagatgtcgatgaatgtgtggagggcaccgataactgtcatattgacgctatctgccagaatacacccaggtcatataaatgtatttgcaaatcaggctacaccggggatggcaagcactgtaaggatgtggacgagtgcgagcgcgaggacaacgctggatgtgtgcatgactgcgtcaatattccgggtaactataggtgcacatgctacgatgggttccatttggcccacgatggtcataactgcttagacgtggacgaatgcgctgaaggaaacggcggatgtcaacagtcttgcgtgaacatgatgggctcttatgagtgtcattgtcgcgaggggtttttcttaagcgacaatcagcatacctgtatccaaaggcctgaagagggtatgaattgtatgaacaaaaatcatggatgtgctcatatctgccgcgagacgcctaaaggcggcatagcatgcgaatgccgacccggttttgagctcactaagaaccagagggactgtaagttgacttgtaactacggtaatgggggatgccagcacacctgcgacgacacagaacagggccctcgatgtgggtgtcacattaaatttgtcctgcacacagatggcaagacatgcatcgaaacttgtgccgttaacaatggtggttgtgactccaagtgtcatgacgcagctaccggagtgcattgcacctgtccggtgggattcatgctgcaacccgatcggaagacgtgtaaggacattgatgaatgtaggctcaacaatggcggctgcgatcacatttgccgcaacacggtggggtctttcgaatgttcctgcaagaaaggatacaaactcttgattaatgagcggaattgccaagacatcgacgagtgctcctttgaccgaacttgcgatcacatctgcgtgaacacacccggctcgtttcaatgtctgtgccatcggggatacctgctttatggaattactcattgcggcgatgtggacgaatgctcaattaatcgtggcggttgccgctttggctgcatcaatacaccaggcagctaccagtgcacatgtccggccggacaaggtagactacattggaatggaaaagattgcaccgagccactcaaatgccagggcagcccaggggccagcaaggcaatgctgtcatgcaaccgctccggcaagaaagacacctgtgccctgacatgcccatcccgcgcaagatttctcccagaatcagagaacgggtttactgtgagttgcggcactccctcccctcgcgccgcgccagcaagggccggtcacaatggcaacagcactaattctaaccattgccacgaggcagccgtgttgagcattaaacagcgggcctccttcaagattaaagatgccaagtgtcgattacacttgcgcaacaagggcaagactgaagaagcgggtagaattaccggccctgggggagctccgtgctcagagtgccaggttactttcatccatcttaagtgcgactcctccagaaagggaaaggggcgccgcgcccgcacccccccagggaaagaagtgacccgtctgactttggaattggaagctgaagtccgagccgaagagactacagcatcctgcgggctcccatgtctccggcagaggatggagcgacgcctgaagggctctctgaaaatgctgcggaagtcaatcaatcaagatcgttttctccttcgcctggctggactcgactacgagttggcccataaaccaggattagttgccggggagcgagccgagccaatggagagttgcaggccgggacagcacagagccggcacaaaatgtgtctcttgtccgcagggcacttattatcacggtcagaccgagcagtgcgtgccatgcccggccggaacattccaggagcgtgaggggcaactcagctgtgatctatgccctgggagcgatgcacacggtccccttggagctacgaacgttaccacatgcgccggtcagtgcccaccaggacagcacagcgtggacggctttaagccgtgccagccgtgtcctcgaggaacctaccagcctgaggccggacgcaccttgtgctttccctgcggcggaggactgaccacgaagcacgagggggccatttcttttcaggactgcgacacaaaggtgcagtgcagcccagggcactattacaatacctcaattcacaggtgtatccggtgcgccatgggcagctatcaaccagattttagacagaacttctgttctcgatgtcctggtaacacatccaccgatttcgacggtagtacctcggttgcccaatgcaaaaaccgacagtgtggtggcgaactgggtgaatttacaggatacatcgaatcacccaattatccggggaattatcctgcaggcgtggagtgcatttggaacatcaatcccccacccaaacggaagatccttatcgtggtccctgaaatcttcctgccctctgaggatgagtgtggcgatgtgcttgtcatgcgaaagaatagttcccctagttccatcaccacctatgagacctgtcagacatacgagaggccaattgctttcaccgcgcgcagtaggaagctgtggatcaactttaagacatctgaagcaaactccgccagaggattccagatcccttacgtgacatacgacgaagattatgaacagctggtcgaggacatcgtgagggatgggagactgtacgcttctgaaaatcatcaggaaatacttaaagacaagaagctcatcaaggcctttttcgaagttctggctcatcctcaaaactactttaaatatacagaaaagcacaaggagatgctgccaaagagcttcatcaagctgcttaggtcaaaagtgtctagcttcttaagaccctacaagtag

SEQ ID NO: 5297 - DNA, 4773 bp, synthetic construct
  misc_feature 1..4773: note = source = /note="Description of Artificial Sequence: Synthetic coding sequence"
  source 1..4773: mol_type = other DNA
atgcctgggggcgcttgcgtgctggtgattgccttgatgttccttgcgtggggggaggctcaggaatgctctcctggcggccatcagtttctccgctctccctacaggagcgtaaggttcgactcttggcacctgcagcagtccgccgtacaggatttaatttgcgaccattccctgagcccaggatggtatcgcttcctaatcctggaccggcccgcagaaatgcctaccaaatgcgttgagatgaatcactgcggcacacaggcgccgatctggctgtccttgcgcgattccgagacactcccttccccaggtgagataaagcagcttactgcctgtgccacatggcagttcttgttctctaccaccaaggattgctgtctattccaaatccctgtgagcgtgcgtaattgtgggaacttctcagtgtacctgcttcaaccaacacagggctgcatggggtattgtgccgaggcaatctcagacgctagactccacccctgtggcagcgatgaaacagagacgggcggagactgcgtgagacagctggctgcatctctgcccccccctccagcaggaagaccggaagttcttgtggaattaattgaatcccggctattctgtcggtgttcctttgatgtgccagccacaaagaactctgtggggttccacatcgcctggagtagactgtcttctcaggaggtcaaggaggagctgacacaggagacaaccgtccaggccttctcactcctggaattggacggtataaatctccgcctgggggatagaattttctgcagcgctagcgtgttcttcctcgaaaacccgcacgttcagtccgtcgccattgagtctcaggaattcttcgcaggttttaaactccaaccagaactgtcgacaatctcagaggacgggaaagagtactacctgagaattgagtcaacagtgcctattatttgcagcgagttctctgagttagaccaagagtgtaagatttctctaaaactaaagacaataggccagggccgcgaacacttggggctgaacttggctctgtcgtcctgccacgtcgacctgttacagacctcctcttgcgctaacgggacttgttcccatacattcgtttactataccgccgtgaccgacttttcaagagatggggatagggttagcaacattgttgtgcagcctatagtgaacgaagatttcctgtggaataattatatcccagattcgatccagatcaaggtcaaggacgtgcctactgcgtactgctacaccttcaccgacccccacattattacattcgacggacgtgtctacgataactttaaaacaggcaccttcgtcctgtacaagtctatgtcccgcgattttgaagtccatgtacgtcagtgggactgccgatccctgcactatccagtatcctgcaactgcggttttgttgcccaagaagggggcgacatcgtgacattcgatatgtgtaatggacagcttcgggaaagtcaaccttacttatttataaaatcacaagacgttactaggaacataaagatttccgagagctatctgggtcgtaaggtcactatatggttcagttccggcgcatttatccgagccgacctgggggaatggggtatgtctctcaccataagggctcctagcgtggactataggaatacactcggactgtgtggaactttcgacgaaaaccccgagaatgatttccatgataagaacgggatgcaaatcgaccaaaactttaacaactatgtggcctttatcaacgagtggagaatcctccccggcaagagcatgagcgacacgttacctgtctccatgacatcaccaggcaagcctagctattgtagttgcagcctggacacagccgcgtacccctcatccgaagacctggattccgtctccagatcagaaattgcattgggatgcaaggatctcaatcacgtaagcctcagctccttaattcccgaactcgacgtcacttctgagtacatcaattctgacacgttagtgagagaaatcaataagcacacctccccagaggagtacaatcttaacctcttcttacaagagaaaaaacacattaacctgacaaaattgggcctgaatgtgcagaagcaccccggaaatgagaaggaggactccttgcagtaccttgctaataaaaagtatacccaggggcgcgggtcacactctcaggagatgcggtacaatcgccagaataggtggaagaggcagaatttccatgaattccccccactgttcgcttttccttcgttgagtcaaacggatctggaggaattgacctatttcttccccgaagatcacgccgaagatgtacagcaggaatttttcccttcctggccaacaccaagcggacttactgaatactccactctgaccctctgtcaggagactttggctaacagttctattggtagactgtgtttggcttttctcggtaagagactggactctgtcatagagatgtgtgtcaaagatgttctactcaaagatgacctatcatgggctgaggcgggtgtggctctactcgaaaacgagtgtgagaaaaggatcgtggaggaaggaaagtacaacaccgaggagtacggtactagcatcgaagacattttgtctgttctcaaatgtcccaatttatgttcaggcaacggtcagtgtatggagtggggatgcgcatgtagcccttcgttctcctcgtatgattgttcagactcctatgataaggctcccgaaatcaccgaactggggaacgctggcttttgcgacgttcagaaatacaattgtatgatggtgcgcgtcttcggcaaggggtttaaggagctgccaagtattaaatgcgaggtgacgaaactccagtacaacagttccgagtggatgccaggcgagcctatctacactcagacagtgtttcacaattcaagagcggtcgactgtcaactgcctacagatgtgcagcagttcgataccatggacctagtgggcggaaagcctacagggaaatggcaactcaaagtgagtaacgacggctacaaattctcaaatccaaaaattaccgtcatctacgatggggcatgccaggtctgtggcctctacaaaaatgactcctgtaccattaaagaaaacgtgtgcattatcgatggcttgtgttatgtcgagggcgacaagaacccaacgtccccctgtctgatctgtcgccccaagatttccagatttacttggtcttttctcgagaacaatcagccgcctgttatccaagccctgcaagataaactgcagactttctatggcgagaacttcgaataccagttcgtggccttcgaccctgagggctccgatatacacttcacattagatagcggacctgagggcgcatctgtgagttcagctggactattcatgtggaagacggatctgctgactacgcaacagatcaccgttaggctcaacgatgattgcgacgcggagactcgagtgacgatcgaagtgactgttaagtcatgtgactgtcttaatggaggaagttgtgtgagcgacagaaacttttctccaggttcaggggtgtacctgtgtgtgtgtctacccggctttcacggctccttgtgtgaggtcgacatctccgggtgtcagtccaacccctgcggactaggctcgtacatcagcgggtttcattcatactcctgtgactgtcccccagagctgaaggtggagactcagttcgttaatcagttcacaactcagacagtcgttctgacaaggtctgacaaaagcgtcaacaaggaggaggacgacaaaaatgcccagggacgcaagagacatgttaaacctactagtggcaatgcatttacaatttgcaaatacccatgcggtaaaagtagggaatgtgtggcccctaacatctgtaaatgcaaacctggatatataggcagcaactgccagacggccttgtgcgatcccgattgcaagaaccatgggaagtgtatcaagcccaacatttgtcagtgcctcccgggccacggcggcgcgacctgcgacgaggaacactgtaacccaccttgccaacacgggggtacttgccttgctggcaatctatgcacctgcccgtacgggttcgtgggaccgaggtgtgagactatggtgtgtaatcggcactgtgagaacggaggtcagtgtttgacaccagatatatgtcaatgcaaaccagggtggtatggacctacatgttcaactgcactttgcgacccagtgtgtctgaacgggggctcctgtaataagccaaatacgtgtctgtgtccaaacggcttttttggagaacactgtcagaacgccttttgccatcctccctgtaagaacgggggccattgtatgcgcaacaacgtctgcgtgtgtcgcgagggctacactggtcggcggtttcagaaaagcatttgcgatcccacctgcatgaacggtggaaagtgtgtgggaccctcaacctgctcttgtccgtcaggctggtcgggcaaaaggtgcaatacacccatttgtctgcagaagtgcaagaatggcggggaatgtatcgctccaagcatctgtcactgtccaagttcatgggaaggtgtcagatgtcagattccaatatgcaacccaaagtgtctgtacggaggccggtgcatcttccctaacgtgtgctcgtgtagaaccgagtattctggcgtaaaatgcgaaaaaaagattcagattcggagacactag

SEQ ID NO: 5298 - DNA, 624 bp, synthetic construct
  misc_feature 1..624: note = source = /note="Description of Artificial Sequence: Synthetic coding sequence"
  source 1..624: mol_type = other DNA
atgtccacaaaacccgatatgatacagaagtgcctctggctggaaatcctgatgggtatttttatagcaggcacactctcgctggactgcaacctgctcaatgttcatttaagacgggtaacttggcagaacttacgtcatttgagctctatgagcaattcctttcctgtggaatgcctgagggaaaatatcgccttcgagctgccccaggaattcctgcagtacactcagcctatgaagcgagacatcaaaaaggctttttacgaaatgagcctgcaggcatttaacatcttctcacaacacacctttaagtactggaaagagagacatctgaagcagatccagattggcctagaccagcaggccgagtacttaaatcaatgccttgaagaggataagaacgagaatgaggacatgaaagaaatgaaggagaacgaaatgaaaccctcagaagcccgggtaccccagctatcatctctggagctgcggagatacttccaccggattgacaactttttaaaagaaaaaaagtattccgattgcgcatgggaaatcgtgcgcgtcgaaataaggaggtgtctttactacttttataaattcacagcactgtttagacgtaagtag

SEQ ID NO: 5299 - DNA, 939 bp, synthetic construct
  misc_feature 1..939: note = source = /note="Description of Artificial Sequence: Synthetic coding sequence"
  source 1..939: mol_type = other DNA
atggagtctgccctacccgcggccggctttttgtactgggtgggcgccggcacagtcgcatatctcgccctccgaatctcctactccctttttaccgcactccgggtttggggagtgggcaatgaagctggagttggccctggactcggtgagtgggccgtcgtgaccggcagtaccgacggcattggtaagtcttacgctgaagagctggccaaacatggtatgaaggtggtcctgatttctcggagcaaagacaagctagaccaggtgagctcggagatcaaagaaaaatttaaagttgagacgcgaactatagcagtggactttgcctcagaagatatctacgacaaaataaagaccggactcgctggacttgagatcggtattctagtgaacaatgtggggatgagctacgagtaccctgagtacttcctcgacgtcccagacctagataatgtaatcaagaaaatgatcaacatcaatatactctcagtgtgtaaaatgacccagctcgtcctgccagggatggtggagcgctctaagggcgccatcctgaacatatcaagcgggtctggcatgttgccagtcccgctgcttactatttatagcgcaacaaagactttcgtggactttttctcccagtgcctccacgaggaataccggagtaaaggcgtgttcgtgcagagtgttctaccctatttcgttgcaactaaactggccaagatacgtaagcccaccctggacaagccgagtcctgagacctttgtcaaatcagccatcaagaccgttgggcttcaaagtcggactaatggataccttattcacgccctaatggggtctattatctcaaacctaccatcctggatctacctgaaaattgttatgaatatgaacaagtcaactagggcccactatctcaagaagacaaaaaagaactag

SEQ ID NO: 5300 - DNA, 2214 bp, synthetic construct
  misc_feature 1..2214: note = source = /note="Description of Artificial Sequence: Synthetic coding sequence"
  source 1..2214: mol_type = other DNA
atggaactgggatgctggactcaactgggcttaacgtttctacagctgttgcttatcagttccctgccacgagagtataccgtgataaacgaggcctgtcccggtgcagaatggaacattatgtgtagagagtgctgcgaatacgatcagattgagtgtgtgtgcccgggcaaaagggaggtggtgggctataccattccttgttgccgtaatgaggagaacgagtgtgatagctgcctcatccacccaggctgcacaattttcgaaaattgcaagagttgtcgcaacgggtcttggggtgggaccctcgacgacttttacgttaagggtttctactgtgctgaatgtcgcgccggctggtatggcggggattgcatgcgctgcgggcaggtgttgagggcacccaagggtcagatcctgttggagagctacccactcaatgctcattgcgaatggactatacacgccaagcctggtttcgttatccagctgaggttcgtaatgttgtctctggaatttgattatatgtgccagtacgattatgtggaggtcagagacggggataacagggacggccaaatcattaagagggtttgtggtaatgaaagacccgcgccaattcaaagtattggcagcagcctccatgtgctgttccactccgatggatctaagaacttcgacgggttccatgcaatctatgaggaaatcaccgcctgcagctcttcaccttgtttccacgacggcacttgcgtactagataaggcaggcagctacaaatgcgcttgcctggctggttataccggacagcgatgtgagaatctccttgaagcaggaaagagtaaaattaaggctagtgaggattccctgagcgtcttggaggagcgaaattgctccgatccaggggggcctgtaaatggctaccagaagattacgggagggcccggtcttatcaacgggcgtcatgcaaagatcggaactgtagtgagcttcttctgcaataatagctatgtactctcgggaaacgaaaagagaacttgccagcagaacggggagtggtctggcaagcagcctatttgtatcaaggcttgccgtgaacctaaaatctcggatctcgtgcggaggcgggtgctccccatgcaggtccagtcaagggagacgccactgcaccagctctacagcgctgcttttagtaaacaaaaactacagagcgcaccaactaaaaagccagcccttcctttcggcgatctgcccatgggctaccaacatctccacacgcagctacagtacgagtgcatatctccattctatcgaagactggggtccagtcgccgaacatgtcttcggactggtaagtggagcgggagagcacccagctgtatacctatctgcggtaaaattgaaaatattaccgcgccaaagactcaaggtctgcgatggccctggcaagccgctatctaccggaggacctctggcgtccacgatggctcactgcataaaggcgcatggtttttagtgtgcagtggcgcactggtcaacgagaggaccgtggttgtggccgcccattgcgtgaccgacctcggcaaagttacaatgataaaaacagctgacttaaaagttgtgcttggtaagttctatagagatgacgacagggatgaaaaaaccatccagtccctccagatatccgccattattctccatcccaattatgaccccatcctgttggacgccgatatcgctatattgaagctgctggataaagctcgcatcagcacccgcgtccaaccgatatgtttagccgctagtagagatctcagtacatctttccaagagagccacatcaccgttgccggttggaatgtcctcgctgacgtaagaagccccggcttcaagaacgacaccttgcgatcaggtgtagtgagcgtcgtagactctcttctgtgcgaggaacaacacgaggatcacgggatcccagtgtctgtcactgacaacatgttttgtgctagttgggagcctactgctccgtctgacatttgcacagccgagactggcggtattgccgctgtgagctttcccggacgcgctagcccagaaccaagatggcatctgatggggctagttagttggagttacgacaagacttgctctcaccgcctcagcacggcatttactaaggtgctccctttcaaagactggatagaaagaaacatgaaatag

SEQ ID NO: 5301 - DNA, 1503 bp, synthetic construct
  misc_feature 1..1503: note = source = /note="Description of Artificial Sequence: Synthetic coding sequence"
  source 1..1503: mol_type = other DNA
atgggcactgccaggtggctggctctcggttccctgtttgccctggcaggtctgcttgagggccggctggtcggggaagaagaagccgggttcggggagtgcgataagttcttctatgctggaacgcccccagccggactagcagccgactcacacgtgaagatttgtcaacgagctgagggagcggagagatttgcgaccctctactctacgcgagacagaatccccgtctactcagctttccgcgcgccgcgccccgctcctggaggagctgagcagcgttggctggtagagccacagatagatgaccctaatagtaacctcgaagaggcgattaacgaagccgaagcgatcacaagtgtaaattcgctgggctccaaacaggcactaaacacagattacctggattcagattaccagcgaggtcagttataccccttctctttaagcagcgacgtccaagttgccaccttcaccctgactaactctgcgcccatgacacagtcatttcaggaaaggtggtatgtaaacctacattctctcatggaccgggcactgactccacagtgtggatccggggaggatctctacattctgacagggactgtgccatcggactaccgcgtaaaagacaaggtggctgttccggaattcgtctggctggcagcttgttgcgctgttcctggtgggggatgggccatgggcttcgtcaagcacactagggacagcgacataatcgaagacgtgatggtaaaggatctccagaagctgctcccatttaatcctcaactgtttcaaaataactgcggggagaccgagcaggacactgagaagatgaagaagatactggaagtcgtgaatcagatccaagacgaggagagaatggttcagagtcagaagtctagcagtccactctcaagtacccgatccaagagaagtactttactgccccccgaggcgtccgaggggtcttcctcattcctgggcaaacttatgggtttcattgctactccctttatcaagttgtttcaattaatttattatcttgtggtcgctattttgaaaaatatcgtgtattttctgtggtgcgtcaccaaacaggtcattaatggtatagagagctgcttgtacagattgggctctgccactataagctattttatggcaatcggggaagaactagtcagtataccttggaaggtgttgaaagtggtcgcaaaagtcatcagggccctgctgagaatactatgttgcttgctgaaggctatttgccgtgttttgtcaatccctgtgagagtgcttgtggatgtggctacattcccagtttacaccatgggagcaattcctatcgtttgtaaggatatagccttgggcctcggcggcaccgtttccctgctgtttgataccgcgttcggcaccttgggaggcctgtttcaggtggtgttctcagtgtgcaagcgcattggatacaaggtgaccttcgacaattccggggagctctag

SEQ ID NO: 5302 - DNA, 300 bp, synthetic construct
  misc_feature 1..300: note = source = /note="Description of Artificial Sequence: Synthetic coding sequence"
  source 1..300: mol_type = other DNA
atgaagagcgccaaattgggttttttgttacgattttttattttctgcagcctgaataccctcttactgggtggagtcaacaaaattgcagagaagatttgtggggacctgaaagatccttgcaagttagacatgaacttcggttcttgttatgaggtgcactttcggtacttttacaatcgcacttccaaacggtgtgaaacattcgtgttttcaggatgtaacggaaatctgaacaacttcaaactgaagatcgaaagggaagtggcatgtgtggctaagtataaacctccgcgctag

SEQ ID NO: 5303 - DNA, 390 bp, synthetic construct
  misc_feature 1..390: note = source = /note="Description of Artificial Sequence: Synthetic coding sequence"
  source 1..390: mol_type = other DNA
atgcccatggccagcccacagactctggtcctgtatttactggtgctggccgtgaccgaagcatggggccaggaggcagtgatacctggctgtcacctccacccctttaacgtgacagtccggtctgacagacagggcacctgccagggtagccacgtggctcaagcctgtgtgggccactgcgagtcgtctgcctttccatctaggtactctgttctagtggcaagcggctataggcacaatattaccagtgtcagtcagtgttgtacaatctcgggccttaagaaagtcaaggtgcagctgcaatgtgtggggagtaggagggaggaactcgaaatcttcacggcccgagcgtgtcaatgtgacatgtgccgtttatctaggtactag

SEQ ID NO: 5304 - DNA, 1965 bp, synthetic construct
  misc_feature 1..1965: note = source = /note="Description of Artificial Sequence: Synthetic coding sequence"
  source 1..1965: mol_type = other DNA
atggcaaagttcggggtgcatagaattctattgctggcaattagcctcactaagtgtttagaatctactaaacttctagctgatctgaagaaatgcggcgatctcgagtgtgaggcactgataaacagggtcagcgctatgagagattatcgtggccccgactgccgatacctcaatttcacaaagggggaggagatctccgtgtacgtaaagctggccggcgagcgcgaggacttgtgggccggaagcaaggggaaggaattcggctatttcccgagggatgccgtccaaatcgaagaggtgtttatatcagaagagatccagatgagcactaaggagtcggacttcttatgcctcctcggcgtgtcttacacgtttgataatgaggattcagagctgaacggagactacggggaaaacatctatccgtacgaggaggacaaggatgagaaatctagtatctatgaaagtgattttcaaatcgagcccggattctatgcaacatatgaatccaccctctttgaagatcaggtgccggctctggaggcgcccgaggatatcgggagtacctcggagtctaaggactgggaagaggtagtggtcgaaagtatggaacaagaccgcatacccgaagtacacgtgcctcctagctctgcagtcagcggtgtgaaagaatggtttggactgggaggggagcaagccgaggagaaagctttcgaaagcgtcattgaacctgtccaagagagcagcttccggtcccgaaaaatcgccgtggaggacgagaacgacctcgaggagctaaataatggcgagccccagactgaacatcagcaggagtcggagtctgagatcgactctgtacccaagacccagtccgagctcgcatccgaatcagagcacatcccaaagccccaaagcactggttggttcgggggtggctttacctcctatttaggctttggcgatgaggatacaggactagagctgattgccgaggagtcgaatccaccactgcaggactttcccaactcaatttctagtgataaggaagccactgtaccatgcacagaaatactcaccgaaaagaaggatacaataacaaatgattcgctgtctctgaaacctagttggttcgatttcgggttcgccatcctggggtttgcttatgccaaggaggataagataatgctagacgaccggaagaatgaagaagacgggggtgctgatgagcatgagcacccactaacctccgagttagaccccgagaaagagcaggagatcgagaccataaaaattatcgagacggaggaccagatagacaaaaaacctgtcagtgagaagacagatgagtcagacacaatcccctatcttaaaaagttcctgtacaacttcgataacccttggaacttccagaatatccctaaggagacagaacttccgtttcccaaacagatcttggatcagaataacgtgattgaaaatgaagagacaggagagttttcgatcgacaattatcccactgacaacacgaaagtgatgatttttaaaagttcgtactcactgtccgacatggtgtcaaacattgagctgccgacaaggatccacgaggaagtgtattttgagccctcaagcagcaaagatagtgatgagaatagcaaaccctcagtggacacggaaggacccgccctggttgagatagaccggtctgtcgaaaatacactcctgaattcccaaatggtgtccacagataactccttgtcttctcagaattatattagtcaaaaggaagatgccagtgaattccaaatcttaaaatacttgtttcagatagacgtctacgacttcatgaattctgccttcagccctatagttatcctgaccgaacgagtttcgctgccttttaaaccttttgcaatcatcctgccaatcctgcttaacatccgggtggctacaaagtacgtttag

SEQ ID NO: 5305 - DNA, 1152 bp, synthetic construct
  misc_feature 1..1152: note = source = /note="Description of Artificial Sequence: Synthetic coding sequence"
  source 1..1152: mol_type = other DNA
atggccggcattccagggctgctgttcttgcttttttttctgctttgcgctgtagggcaggtgagcccatattcagcgccctggaagcccacatggccggcctaccgcttgccagtggtcctgccccagagcactcttaacctcgccaagcccgatttcggggctgaggctaagttagaagtgagcagcagctgcggaccgcagtgtcacaaggggaccccacttccaacgtacgaggaggcgaagcagtacctgtcatacgagaccctgtatgccaacgggtcacgaactgagacacaagtaggcatttacattctgtcctcaagcggtgatggcgcacagcatcgagatagcgggtcctcaggcaaaagtcggagaaagagacaaatttacggctatgatagccggtttagcatcttcggcaaagacttcctactgaactacccattttctacatctgtcaagttatcgacgggttgtaccggcactctcgttgccgagaaacatgtattaaccgctgcccactgcatacatgacggcaaaacttacgtgaagggaacccaaaagctgcgcgtcggattcctcaagccgaagtttaaggatggcggcaggggggcgaacgattccacctcagctatgccagagcagatgaagttccagtggatcagagtgaagaggacccacgtccccaagggatggatcaaaggtaacgctaacgatatagggatggattacgattatgcactcctcgagctaaaaaaacctcacaaacggaaatttatgaagattggcgtctctccaccagcaaagcagctgcctggcggtagaatccacttcagtggctacgataatgacaggcccggaaacctcgtgtaccgcttttgtgatgttaaagacgagacctacgatctgttatatcagcaatgcgacgcccagccgggcgccagcggctctggggtgtatgtccggatgtggaagagacagcagcagaagtgggagaggaagattatcggcatattttcgggtcaccaatgggtggacatgaacggtagcccccaggatttcaacgtggcagtgcgcatcacaccactaaaatacgcccagatctgctattggatcaagggcaattatcttgattgtcgggaggggtag

SEQ ID NO: 5306 - DNA, 1662 bp, synthetic construct
  misc_feature 1..1662: note = source = /note="Description of Artificial Sequence: Synthetic coding sequence"
  source 1..1662: mol_type = other DNA
atgaagtggtgttggggtccggttcttcttattgcaggcgccacagtactgatggagggcttgcaggcagcccagagagcctgtggacagaggggacccggaccccctaaaccccaagaaggcaatacagttcctggcgaatggccttggcaggcctcagtacggcgccagggggctcacatctgcagtggtagtctggtcgcagacacctgggtattaacagctgcccactgttttgagaaggcagctgccacggagctaaactcctggtctgttgtgcttggatctctccaaagagagggactgagcccgggggctgaagaagtgggggtggctgccctgcagcttccaagagcctacaatcattactcccaaggatctgatcttgctctgcttcagttagcccacccaaccacccacacaccgctctgcttaccacagcctgctcacaggtttccgttcggggcctcttgctgggcaaccggctgggaccaggatacctccgacgcaccaggaaccttgcggaatctcaggttgaggctgatcagcagaccaacctgcaactgtatctataatcagctgcatcaacggcaccttagtaatcccgctaggcctgggatgctttgcggtggtccacaacccggagtccaaggaccctgtcaaggcgatagtggcggaccggtgctgtgcctcgaaccagatgggcactgggtgcaggccggcattatcagcttcgccagtagttgtgcccaggaggatgcgccagttttgctcacaaatacagctgcgcattcgtcttggttgcaagccagagtccagggcgccgcattcctggcacagtcccctgagactcccgaaatgtccgatgaggatagctgtgtagcgtgtggcagcctgagaactgctgggccgcaggcaggagccccaagcccctggccctgggaggcgaggctgatgcaccagggacagctcgcctgtgggggggccttggtctcagaggaggccgtactgactgcagcacactgtttcattggtcgtcaggcaccagaagaatggtccgtcgggctgggaacccggccggaagagtggggcttgaagcagttaatcttgcatggggcctacacccacccagagggtgggtatgatatggcgcttctgctattggctcagcctgttacactaggcgcatctttaaggcccctttgccttccgtatcctgatcatcacctgcctgatggcgagagaggttgggttctgggaagagcacggccaggcgcaggtatctccagcctgcaaacagtccctgtgacactgctgggtcccagagcctgctcaaggctgcacgctgcccccggaggggacggctctcccatcctgcccgggatggtgtgcaccagtgcagtgggcgagctgccgtcttgtgaaggcctgagcggcgccccattggtgcacgaagttcggggaacttggttcctagcaggcttgcattcttttggcgatgcttgccagggcccggcacgtccagcagtgtttacagccctgcctgcctacgaagactgggtctcctctctcgattggcaggtgtacttcgccgaggaacccgaacccgaagccgagcccggatcgtgcttagcaaatatcagccagcccacctcatgttag

SEQ ID NO: 5307 - DNA, 936 bp, synthetic construct
  misc_feature 1..936: note = source = /note="Description of Artificial Sequence: Synthetic coding sequence"
  source 1..936: mol_type = other DNA
atgggaattatccaaagcatcctcgcaaccagcagagattgctattcctttaagaagaaacccattccgaagaaacctactatgctggcacttgcaaagattctactgatttctacgctgttttattctctgctctccggtagccatggcaaagaaaatcaggatattaacaccacacagaatatcgctgaagtattcaagacaatggaaaacaagccaattagtctggagtctgaagctaacctgaactcggacaaggagaacattaccacaagtaacttgaaggcctcacacagcccgcctctaaacctaccaaacaatagccatggaatcacggattttagctccaattcttcggccgaacactcgctgggcagcctgaaacccacgtctaccatttcaaccagcccgcctttgattcactcctttgtgagtaaggtgccctggaatgcaccaattgccgacgaggacctgctgccgattagcgctcatcctaacgcgactcctgcactgtcctctgagaatttcacttggagtctggtcaatgacactgtgaaaacacctgataattcctctataaccgtttcaatactgtcaagtgagcctactagcccttccgtaactcccctgatcgttgagcccagcggctggctcaccacaaattctgatagcttcaccgggttcaccccttaccaggaaaaaaccaccttgcaaccaactctcaaattcacaaacaattctaagctgtttcccaacactagcgaccctcagaaagtcttacgactagataatgctcctgagccatatgacgtgagcttcggtaattcatcttactacaacccaaccttaaatgattcagctatgcctgaaagtgaggagaatgccagagacggtatccccatggatgacatacctccacttcgcacttctgtgtag

SEQ ID NO: 5308 - DNA, 3120 bp, synthetic construct
  misc_feature 1..3120: note = source = /note="Description of Artificial Sequence: Synthetic coding sequence"
  source 1..3120: mol_type = other DNA
atgcagtccagactgctacttctgggggcccctggcgggcacggagggccggccagcagaagaatgaggctgctgctgcggcaggtcgtgcaacggcgccctggtggggataggcagaggccagaagtgcgactcctacacgcagggagtggcgctgacaccggggacactgtgaacataggggacgtctcatacaagctgaagatccccaaaaatcccgagctggttcctcagaactacatatcagactctttggcccagtccgttgtgcagcatctgaggtggatcatgcagaaagatctgcttggacaggatgtttttctgatcggtccaccggggcccctccgcagaagcatcgcgatgcagtatctagagttgaccaagcgggaagttgagtacattgcgctgagcagagatactacggagaccgatctcaaacagaggagggaaatacgagctggaacagcgttctacattgaccagtgtgccgttcgggcagctactgaaggaaggactcttattctcgagggtctggaaaaggctgaacggaacgtgctcccggtgttgaataatctgctggagaatcgtgaaatgcagctggaagatgggagattcctaatgtccgcggaacggtatgacaagttactgagggaccacaccaagaaagagttggattcatggaagatagtgagggtgtcagagaacttcagggtcattgcgctaggcttgccagtccctagatatagcggcaatccactcgatcctcctttgcgttctcggtttcaggcacgcgatatctattaccttcccttcaaagaccagctcaagttactctactctattggggccaatgttagcgcagaaaaagtgagccagcttctctcttttgccaccactctctgctcacaggagtccagcacccttggcttgccagacttccccctcgattccttggcagccgctgtccaaattctcgattcttttcctatgatgcctatcaagcatgccattcagtggctgtacccctatagcattttattgggacacgaggggaagatggccgtggagggcgtgcttaagagatttgaactgcaggactctggcagctctctgctgcctaaagaaatagtcaaggtggaaaagatgatggagaatcacgtttctcaggcttccgttaccattaggatcgccgataaggaagtgactataaaagtgcccgctggcaccaggctcctctcacaaccttgcgccagcgatcggttcatccagaccctgtcccacaaacagctgcaagcagagatgatgcagagtcatatggtgaaggatatctgcctgatcggaggtaagggctgtgggaaaaccgtgattgcgaagaactttgccgatacccttggctacaacattgagcctattatgctataccaggacatgaccgcgagggatctccttcagcaacgctacacactgcccaatggagatacagcctggcgctcatccccgctggtcaacgccgcactcgagggtaaactggtccttctggatggaatccatagagtgaatgccggcacactcgctgtactgcagcgtctgatccacgatcgggagttgagtctctacgacggcagtaggctgctgagagaagaccgatacatgcgtcttaaagaggaactgcagttgagcgacgagcagctgcagaagagatcaatttttcccattcatcccagcttccgtatcattgccctggccgaacctccagtgatcggaagcaccgcccaccagtggctgggccccgagttcctgactatgtttttctttcactacatgaagccactggttaaatctgaagagatccaagtgatcaaggagaaggtcccgaatgtgcctcaggaggccttggataaactgctatcatttacccataaattgcgggagacccaggatcccacagcccagtccctggcagccagcctgtcaaccaggcagctgcttcgcatctccagacgcttgagccagtatcccaacgagaatctccattccgccgtcactaaagcttgcttgtctcgctttctcccaagcctggcccgctcagcactggagaagaatctggcagacgcgactattgagattaacaccgacgataacctggagcctgagttaaaggactacaagtgtgaagtgactagcggtaccctccgcattggagccgtctcggcaccaatttacaacgctcacgaaaagatgaaggtccccgatgttttgttttatgacaatattcaacatgtaatagttatggaagacatgctcaaggacttcctcctgggggagcacctgcttctcgtcggtaaccagggagtaggaaaaaataaaatcgtcgacaggtttctgcaccttcttaaccggcctagggagtatattcagctccatagagatactaccgtccagaccctgactctccaaccttccgtgaaagatggattgatcgtgtacgaggatagtcctttagtcaaggcagtgaagctgggacacatcctcgtcgtggacgaagctgacaaggcccctaccaacgtgacctgtatactgaagacgctggttgagaatggcgagatgatactggccgatggccgcagaatagtcgcgaacagcgcaaatgttaatggtagagaaaacgtggttgttatacatcctgattttcgaatgattgtgctggcgaaccgccctggcttcccctttctgggaaatgacttcttcggcacccttggtgacatattttcctgccatgccgtggataacccaaaaccccattccgaactcgaaatgttgcgccaatatggtcctaatgtgccagagcccattctccaaaagctagtggccgcattcggcgaactccgctcattggccgatcagggcatcattaactacccttacagcacaagggaggtagtcaacatcgttaagcacctgcaaaagttcccaacagaaggacttagcagcgtggtccggaatgtatttgattttgactcctacaataacgacatgagggaaattctcattaacacccttcataaatatggcattcccatcggcgctaagcctaccagcgttcagctggctaaagagtag

SEQ ID NO: 5309 - DNA, 801 bp, synthetic construct
  misc_feature 1..801: note = source = /note="Description of Artificial Sequence: Synthetic coding sequence"
  source 1..801: mol_type = other DNA
atgcgtctgctttttctggcagtcctgcgaccccatactggtaatgccgtgacagcacagagagtgcgggcccatctcgaggcagccgggcatgtttgcgtgttaaaggatgcatttgatttcgaaagccgatccgaaatagcgaacttaattttggcagaaaattgcgaggccgccctggccctccacctgtacagaggtgggcggttattacaagggcatagaatcccctttggcgtgatatttggaggtaccgacgtcaatgaggatgcaaaccaagctgaaaagaacacggttatgggtagagtgctcgaagaagcgcgcttcgccgtggcctttaccgaatcaatgaaagagatggcccaggcgcagtgggtagatcccgtttttacacgggaggtcaaggccaaagtgaagcgagctgccggcgtgaggttaatcggcgagatgccccaagaagacctccacgctgtcgttaaaaactgtttcgcagtcgttaactctagcgttagcgaaggtatgtctgcggcaattttagaggcaatggacctcgaggtaccagttctcgcacggaacattcctggcaacgcagccgttgtgaagcatgaggtgactggccttctcttctccaacccacaggagttcgttcatcttgcaaagcgcctggttagtgatcccgccttggagaaggagattgtagtgaatggaagggagtacgttagaatgtatcacagctggcaagtcgagagagatacataccagcagttgatacgcaaactcgagggctcaaccgaggactag

SEQ ID NO: 5310 - DNA, 2478 bp, synthetic construct
  misc_feature 1..2478: note = source = /note="Description of Artificial Sequence: Synthetic coding sequence"
  source 1..2478: mol_type = other DNA
atgtttagcggtttcaacgtctttagggtgggcataagctttgtcatcatgtgtatcttttacatgccaacagtcaattctttgccagagctgtcaccgcagaaatacttcagcaccctccagcccggcaaagcatcactcgcatacttctgccaggcagactcaccacgcactagcgtcttcctcgaggagcttaacgaagcagtgcggcctctgcaggactatggtatatctgttgctaaagtcaattgtgtcaaagaggagatatcccgatactgcggaaaagagaaagatctgatgaaagcttacctgttcaaaggtaatattctgttgcgggagttcccaacagacaccctgtttgacgttaatgctattgtcgcacacgtgttgtttgctctgctttttagcgaagtcaagtacatcacaaatctggaagacctgcagaacatagagaacgccctgaaggggaaggccaatatcatcttctcgtacgtgcgggctatcggcattcctgagcatcgcgcggtgatggaggctgctttcgtgtacggaaccacgtatcaatttgtactgaccaccgaaatcgcactcctggagagtatcggaagtgaggacgtggagtacgcgcacctgtacttttttcattgtaaactcgttctggacctgacccaacagtgtcgccgtacattaatggaacagcccttgaccactctcaacatccacctcttcataaaaacaatgaaagctccccttctcactgaagtcgccgaagacccccagcaggtaagcactgtgcacctccagttaggactgccgctcgttttcatcgtgagccagcaagctacgtacgaggctgaccgccgaacagccgaatgggttgcctggaggctgctcggtaaagctggggtgctgttactgttgcgcgattcccttgaggtgaatatcccacaggatgcaaacgttgtctttaaacgggcagaggaaggcgttccagtagaatttttagtcctccacgacgtggatttaatcatctcccatgttgaaaacaatatgcacatcgaggaaatccaggaggatgaggataacgatatggaaggacctgacatagacgtccaggatgatgaagtggcagagacggtctttagggacagaaagcgaaagcttcctctcgagcttacagtggagctcacagaggaaacttttaacgccaccgtgatggcctctgatagcattgtgcttttctacgccggttggcaggctgtaagtatggcgtttctgcagtcatacatcgacgtggctgtgaaactgaaaggcacatcaaccatgttactgactcgtatcaactgtgcagactggtctgacgtgtgcacaaaacagaatgtgacggaattccctataattaagatgtacaagaagggggaaaatcctgtctcatacgcaggtatgcttggcacagaggacctgcttaagtttatccagttaaatcggatttcatacccagtgaacataacatctatccaggaggctgaggagtacctcagtggagagctgtacaaggatcttatcttgtattcttcagtgtcggtgctcggactcttctctcctaccatgaagactgcaaaagaggatttttccgaggccgggaactacctgaaaggttatgtcatcaccggcatttacagtgaagaggacgtgctgttactgtctacaaagtacgctgctagcctgccagccttgctactcgcgagacacaccgagggcaaaatcgagtcgattcccttagcttccacgcacgcccaggatatcgtgcagataatcacagatgctctgttggagatgtttcccgagatcaccgtggaaaatctgcccagttacttccgtttgcagaagccgcttctgattctgttttcggatggtacggtgaatcctcagtataagaaggctatcctcactctcgtaaagcagaagtacctagatagcttcaccccgtgctggttgaacttgaaaaacacacccgtggggcgcggaatcctgcgcgcctacttcgatcccctaccccccctgcctctgctcgtcctggttaacctgcactctggagggcaggtttttgcctttccctccgaccaggccatcatcgaggaaaatctcgtactgtggctaaaaaagcttgaggccggcctggagaaccacatcacaatcctcccagcccaggaatggaagccgcctcttccggcgtacgatttcctttctatgatcgatgccgctaccagccaacgcggcacccgtaaagtaccaaaatgtatgaaagagactgacgtgcaggagaatgacaaagagcaacatgaggacaaatctgccgtacggaaggagcctatcgagacactcagaataaagcattggaaccgtagcaactggttcaaggaggctgagaagtcattcaggcgtgacaaggagctagggtgttccaaggtgaactag

SEQ ID NO: 5311 - DNA, 672 bp, synthetic construct
  misc_feature 1..672: note = source = /note="Description of Artificial Sequence: Synthetic coding sequence"
  source 1..672: mol_type = other DNA
atgacctggagacatcatgtgaggttactgttcactgtctccttggccctgcagattataaatctggggaacagttatcagagagagaagcataacggtggcagagaggaggtcaccaaagttgcgacgcaaaagcaccgccaatctccgctcaactggactagttcacattttggagaggtgacaggatcagccgagggatggggccccgaggagccacttccgtatagttgggcatttggggagggcgcctcggccagaccacggtgttgcagaaatggcggcacctgcgtcctgggctctttttgcgtatgtcccgctcattttacaggaagatattgtgagcacgaccagcgcaggtctgaatgcggcgcgctcgaacatggcgcctggaccctaagagcctgtcacctgtgccgctgcatatttggcgctctccattgtctgcccctacagacccctgaccgttgtgacccaaaggacttcctggccagccatgctcatggcccatcagctggtggcgctccttccctcctgttactcttgccctgcgcactgcttcaccggttgctaaggccggacgccccagcccacccacgctcgctggtgcccagtgtcctgcagcgggagcggcgcccttgcggaagacccggattgggacatcgactctag

SEQ ID NO: 5312 - DNA, 1320 bp, synthetic construct
  misc_feature 1..1320: note = source = /note="Description of Artificial Sequence: Synthetic coding sequence"
  source 1..1320: mol_type = other DNA
atgccagctattgcggtcctggccgctgcggccgcagcctggtgttttctccaagttgaatctcggcatctcgatgctctcgctggaggggccggcccaaatcacggaaattttctcgacaacgaccagtggctgtccaccgtttctcaatatgatcgcgacaagtactggaatcgctttcgagatgatgactatttccgaaattggaaccccaacaagcccttcgaccaggctttggatccatctaaagacccctgcttgaaagttaagtgctccccccacaaggtgtgtgtaacgcaagattaccaaaccgccttatgtgtgagcaggaagcacctgctgccgcggcaaaagaagggaaacgtcgcccagaagcattgggttggaccttccaatctggtcaagtgcaaaccttgtccggtggcccagagtgccatggtgtgtggctccgacgggcactcctacactagcaaatgcaagctcgagttccacgcctgctccaccgggaagagcctcgccaccctgtgcgatggcccctgcccgtgcctgccagaacccgaacctcccaaacataaggcagagcgctcggcatgtactgacaaagagctgcgaaaccttgcctcgcgcttgaaagattggttcggagccctgcatgaggacgcaaaccgtgtcatcaagccaacatcttctaacaccgctcagggccggtttgataccagcattctgcccatttgcaaagatagtctgggatggatgttcaataagctagacatgaattatgacttacttcttgatcctagtgagattaacgccatctatcttgataaatacgagccctgtataaagccgctgtttaactcttgcgattctttcaaagacggaaagctgtcgaacaatgagtggtgttattgcttccagaagcctggcgggctcccatgccagaacgaaatgaacagaatccagaagctctccaaagggaaatcactgctcggagcttttataccaaggtgcaacgaggaaggatattacaaggcaacacagtgccatggatccacgggacagtgttggtgtgttgacaaatacggcaatgaactcgcaggaagccggaagcagggagcagtaagctgtgaagaagaacaggagacatccggagacttcggtagcgggggttcagtcgttttgttggacgaccttgaatatgagcgcgaattaggcccgaaggataaggaaggcaaactccgcgtgcatacacgagcagtgaccgaggatgacgaggacgaggatgacgataaagaggatgaggtaggttacatctggtag

SEQ ID NO: 5313 - DNA, 7872 bp, synthetic construct
  misc_feature 1..7872: note = source = /note="Description of Artificial Sequence: Synthetic coding sequence"
  source 1..7872: mol_type = other DNA
atgaaagtcaaaggaagaggcatcacgtgtctgctcgtgagcttcgctgtgatttgccttgtggcaacacccggcggaaaagcgtgcccgcgccgatgcgcctgctacatgccaacagaagtccactgtacgtttagatacttgacctctatccctgatagcatcccgccgaacgtggagcgaattaaccttgggtataattcattagtgcgcctgatggaaactgatttctctgggttaaccaagctcgagcttctgatgttacattccaacggaatccacacaattcctgacaaaacattttccgacttgcaggctttgcaggtgctaaagatgagctacaataaggtcaggaagctgcagaaggataccttctatggcttacgctctctaacacgtctccacatggatcacaataatatagaatttatcaaccccgaagtgttctatggcctgaactttcttagactggtccacctggagggaaaccaactaacaaagctgcaccctgacacatttgtctccctgagctatctgcagatttttaagatatctttcattaagtttctgtatctgtccgataatttcctgacttcactgccacaggagatggtgtcctatatgcctgacctggacagtttgtatcttcatggtaatccgtggacctgtgactgtcacctgaaatggctctccgactggatacaagaaaagcctgatgttatcaagtgcaaaaaggaccgatcgccctcttctgcacaacagtgtccactctgtatgaatccccgcaccagcaagggcaagccattggcaatggtgagtgcagccgccttccaatgtgccaaaccaaccatagattccagtctaaagagcaagtccctgaccatactcgaagacagctcaagtgccttcatcagcccacagggatttatggctcctttcggaagcctcaccttgaacatgacagaccagtcgggtaacgaggccaacatggtctgttccattcaaaagccaagcaggaccagccccatcgcctttactgaggagaacgattacatcgtgctaaatacctccttttctactttcctagtctgtaacattgactatgggcatattcaacccgtctggcaaatcctggcgctttactctgatagccccctgatcttggagagatcccatctgctgtccgaaacccctcaattgtattacaagtacaaacaggtagctccgaaacccgaggacatcttcactaacatcgaagccgacttgagagccgaccccagctggcttatgcaggatcagataagtctccaactgaatcgtaccgctacaacattctccaccctgcagattcaatacagttccgacgcccaaatcacactcccacgggcagagatgcggcccgttaagcataaatggaccatgatctcgagagataacaatacgaaattagaacatactgtgctggtgggggggaccgtgggactcaactgtccaggacagggcgaccctacaccccatgtagactggctgctggcagacgggagcaaagttcgagctccatatgtttctgaggacgggcggattttgatagataaaagcggcaagctggagctccaaatggcagatagtttcgatactggcgtgtaccattgtatctcatctaattatgacgacgccgacatactgacttaccggattaccgtcgtagaacctctggtagaagcttaccaggagaatggcatccaccacacggtgttcattggagagacccttgatctgccttgtcactccacaggtattcccgacgcttctattagctgggtcattcccggcaataacgtgctgtaccagtcatccagagataagaaagtcctcaataacgggacacttcgtatactgcaggtcacgccgaaagatcagggttattatagatgcgttgctgccaaccctagtggggtggacttcctgatcttccaggtatccgtgaaaatgaaaggccagagaccactggagcatgatggcgagacagaaggttctgggctggatgagagcaaccccattgctcacttgaaggaaccaccaggggcgcaactaaggacatccgccctgatggaggctgaggtggggaagcatacgtcctccacttctaagaggcacaactacagagaactaacacttcagagacggggcgactcaacacaccggcggttccgcgaaaatcgaagacactttcccccctccgctagacggatcgatccgcaacattgggcagctctcctcgaaaaggccaagaaaaacgctatgcctgataagcgcgagaacactaccgtttcacctcctcctgttgtgacacagctccctaacattccgggggaggaagatgatagttctggaatgcttgccctccatgaagagtttatggtacctgctactaaggctctaaatttgcctgcccgcaccgttaccgcagactcgagaaccatcagtgattccccaatgacaaacattaattacggaactgagttctctcctgtcgttaactcccagatcctgccgccagaggaaccaacagactttaagcttagcacggccataaagactacagccatgagtaagaatattaaccccacaatgtcaagtcaaatccagggtaccactaaccaacactcctccaccgtattccctctgcttctgggcgctaccgagttccaggactccgatcagatgggccgaggtagggaacatttccagtcacgccccccaataaccgttcgaactatgattaaggatgtgaatgtcaagatgctgtcgtctaccaccaataaactgttgcttgaatcagtaaacacaaccaattcccatcaaacaagtgtccgcgaggtaagtgagccccggcacaaccatttctacagccacacaacgcagattctgtccacgtccacattcccgtctgatccccataccgccgcccacagccagttcccaataccaaggaacagcacagtgaatattcctctgttcaggcgctttgggaggcagaggaaaatcggtggccgcggacgaattatcagcccctatagaactcccgtcctgcggcgccacagatattcgatattccgaagtactactagggggtccagcgagaagagcaccactgctttcagcgctactgttctgaatgtcacgtgcctgtcctgcctcccacgcgagcgcctaaccactgccactgcagctctaagtttccctagtgcagcccctattacatttcccaaagctgatatcgcgagggtgccaagcgaggagagcaccaccctggtacagaacccactgctcctgctcgaaaacaagcctagtgtggaaaagactacacccacgatcaaatacttcaggaccgagatttcccaggtcactccaaccggcgccgtgatgacatacgcacccacaagcatcccaatggaaaaaactcacaaagtgaacgcaagctatccaagagtctcgagcaccaatgaagctaaaagggattctgtgatcacaagcagcttatctggcgcaataacgaaaccaccaatgacgatcatagctatcacacgtttcagtaggcgaaagattccttggcaacaaaacttcgttaataaccataacccaaagggccgcttgagaaaccagcataaggtttcactgcagaaaagtacagcagtcatgttacctaagaccagtccggctctaccaagagacaaggtatcaccctttcatttcacaactctgagcaccagtgtcatgcaaattccttccaacactctcaccaccgctcaccacactactaccaagacccataatccaggaagtcttcctactaagaaagaacttcccttccctcctttaaaccccatgctgcccagtattatctcaaaagacagtagcactaaaagtatcatttccacacagactgctattcctgccactactccgacctttccagcatctgtgattacctatgaaacacagactgagaggtctcgcgctcagacaattcagagagagcaggaaccgcaaaagaagaatcgtactgacccgaacatctccccggaccagtcctccggatttacaacgcccacagcgatgactccccccgtgctgactaccgctgaaacaagtgtaaagccatctgtgtccgcgtttacgcattccccccccgaaaataccaccggcatcagcagcacaatatcatttcacagccgaactctcaatcttaccgacgtgatcgaagaattggcccaggcatcaactcagaccttgaagtctactatcgcatcggaaacaacactgagcagcaaaagccatcagtctacgacaacacgcaaagcaataattagacattcaactatcccaccattcctgagttcttccgcaactttgatgccggtccccatcagccctccttttacccagcgggccgtgaccgataatgtagccacaccaatcagtggactgatgaccaacacagtggtgaagctgcacgagtcttcacggcataacgctaaaccccaacagctggtggcagaagtggccactagccccaaggtacacccaaacgctaagtttacaataggcacaacccatttcatctattcaaatctgcttcactcaaccccgatgccggcccttacaacggtgaagagtcagaattccaagctcacacccagtccttgggccgagaaccagttttggcataagccctacagcgagattgctgagaagggaaagaagccggaagtgtccatgctcgccactaccggactgagcgaagccactaccctggtctcggattgggatgggcagaaaaacactaaaaagtcagacttcgacaagaagcccgttcaggaggcgaccacttcaaagctcctgccctttgattcactttcaaggtacattttcgagaagccaaggatagtcggcggcaaggccgcgtcattcacaatacctgccaatagcgacgccttcctaccctgcgaggctgtaggaaatccactgcccaccattcattggacgcgagtgccttcgggactcgacttgtctaaacgcaagcagaacagcagagttcaagtcctgccaaatggtactctgtctatccagagggtggagatccaggatcgtggccagtacctctgctccgcttcaaacctgttcggcaccgatcatctgcatgttacactgagcgtggtcagctatcctccccgtatcttggaaagacggactaaggagatcacggtgcatagcgggtccacagtcgagctgaagtgccgggccgagggccgcccatcccctaccgtgacatggatcttggcgaatcagactgtggtctctgagtcttcccagggttcacggcaggccgtggtgacagtggacgggactttggtgttacataacctcagcatctatgacagagggttctacaagtgtgtggcctctaaccccggtggacaagattcactgttggtgaagatccaggtcattgcagctcctccagtgattttggaacagaggaggcaagtgatcgtcggtacgtggggcgaatcactgaagctaccttgtacggctaaggggacccctcagccatccgtgtattgggttttatcggacggcactgaagttaaaccactgcagtttaccaacagtaagctttttctgttttccaacggtactctatacattcggaacctggccagcagtgaccgcggcacatatgaatgcattgctaccagctctacaggatcagaacggcgggtagtaatgttgactatggaggagagagtcacctccccgcggatcgaggctgcgtcccagaagcgaaccgaagtcaactttggagacaaactgctcctgaactgctctgccacgggagaacctaagccccaaatcatgtggagattgcctagtaaggctgtggtcgatcagcaacatcgagtcggatcgtggatccacgtgtaccctaacgggtctctgtttattggatctgttactgagaaggattccggcgtttacctttgtgtcgcaaggaataagatgggtgatgacttgatcctcatgcatgtctcactcaggcttaaaccagctaaaattgatcacaagcagtatttcaggaagcaggtgctccacgggaaggattttcaggtagactgtaaggcttcagggagtcctgtgccagaaatctcttggtcgctgccggacggtactatgataaacaacgcaatgcaggctgacgactcagggcaccgaacgagaagatacacactgttcaataatgggaccctgtattttaacaaagtgggtgttgctgaggagggggactatacatgttacgcacagaatactctgggtaaagatgagatgaaggtgcacctgaccgtgatcacagccgctccccgcatccgccaatctaataagaccaacaagcggattaaagcaggagataccgcagtgctggattgcgaggtgacgggcgacccaaaaccaaagatcttttggctgttgccatcgaacgacatgatttctttttcaattgaccgatatacgtttcatgccaacgggagtttgaccataaataaggtcaaactgctggatagcggcgaatacgtgtgtgtcgccagaaatccatccggcgacgatactaaaatgtataagctagatgtggtatctaaacctccgctgataaacggcttatatacaaacagaaccgtcattaaagccaccgcagtccgacatagcaagaagcacttcgactgccgggccgagggaacaccttcccccgaagttatgtggattatgccagacaatatcttcctcacagccccctactacgggtcgcggattacagttcacaaaaatgggactcttgaaattagaaatgtaagattgtctgacagcgctgacttcatctgcgtcgcgcgtaacgaaggcggagaaagcgttctagtggtccagttagaggtcctggaaatgttacggcgcccaaccttccgcaatcctttcaatgagaagatcgtggcccagctcggaaaaagcactgcattaaactgttctgtggacgggaatcctccacctgaaatcatttggatacttccaaatggtacaaggttctcaaatggcccccagtcctaccagtacctaattgcaagcaacggttccttcatcatcagcaagaccactcgagaagacgccggcaaataccgatgcgccgcaaggaataaagtaggctatattgagaagctggtgatcctggaaatcggccagaaacccgtgatcctgacttacgctccgggaacagttaagggtatcagtggcgagagcttgtcactccactgcgtttccgatggcatccctaagcccaacatcaaatggaccatgccctccggctatgtggtagaccgtccgcagatcaatggcaagtacattctgcacgataatgggaccttggtcataaaggaggcgactgcctacgatcgcgggaactatatttgcaaagcacagaattcagtgggacacacccttataactgtaccagtgatgatcgtcgcttatccacccagaatcactaacagaccaccaagaagcatcgtaacaaggacaggggctgcgtttcagctgcattgtgtggctttgggcgtcccaaaacccgagatcacgtgggaaatgcctgaccactctttactgtccacggcctccaaggaacgcacacatgggtcggagcagcttcacctgcaaggtaccctggtgatccagaatccccagacaagtgattctggaatttataaatgtaccgccaagaaccctttaggctcagattacgctgcgacttacatccaagtcatctag

SEQ ID NO: 5314 - DNA, 1995 bp, synthetic construct
  misc_feature 1..1995: note = source = /note="Description of Artificial Sequence: Synthetic coding sequence"
  source 1..1995: mol_type = other DNA
atgaagacgggcctctttttcctgtgcctactgggcactgctgcggccatcccgacaaatgctcgactgctatccgatcacagcaaacccaccgctgagaccgtcgctcccgataacaccgctattccaagtctgcgagcagaggcggaagaaaatgaaaaggagaccgctgtgagtactgaggacgacagtcatcacaaagccgagaaaagtagtgtgctgaaaagtaaggaggaaagccatgaacagtctgccgagcagggcaaaagctcaagtcaggaattggggctgaaagaccaagaggattcagatgggcatctcagtgtgaatttagagtacgcacctacagaggggaccctggatatcaaagaagatatgagcgagccccaggaaaagaagctgtcagagaacactgacttcctggcccctggtgttagctccttcaccgactccaaccagcaggagtccataaccaaacgggaggagaaccaggagcagcccagaaactactctcatcaccagctgaacagatcttcaaaacatagccagggcctccgcgatcagggtaaccaggagcaggaccctaacatatctaatggtgaagaggaagaagagaaggagcctggcgaagtgggaactcataacgacaatcaggaaaggaagacagaactgccacgagaacacgccaactctaaacaggaagaagacaatacacaaagtgatgatatccttgaagaaagtgaccagcctacccaggtgtctaaaatgcaagaggatgaatttgaccagggtaatcaagagcaggaggacaattctaatgcagagatggaggaggaaaatgcaagcaatgtgaataagcacatccaggaaaccgagtggcagagtcaggagggaaaaactggactagaggcgatcagcaatcacaaggagaccgaagagaagaccgtgtccgaagctctcctcatggaaccaacagatgatggcaacactacacccagaaatcacggtgtggacgatgatggagatgacgacggcgatgacggaggcaccgatgggccccggcattctgcatccgacgattacttcataccatcccaagcctttttagaggctgagagagcccagagtatcgcataccacttgaagattgaagagcaacgagagaaagtacatgagaacgagaatatcggtaccaccgaacccggagagcaccaagaggctaagaaagctgaaaatagctctaacgaggaggagacctcctctgagggcaacatgcgggtccatgcagtagacagttgcatgtcttttcagtgtaagagggggcatatctgtaaagcagatcagcaaggtaagccgcattgcgtgtgccaggacccagtgacctgcccgcctaccaaacccttagaccaagtgtgcggaaccgataaccagacctacgcctcctcttgtcacttgttcgcgactaagtgtcggctggaggggactaagaagggacatcaattacagctggactacttcggggcctgtaaatcgattccgacgtgtacagacttcgaagttattcagtttccactccggatgagggactggctgaagaatatactgatgcaattgtatgaagccaattctgaacatgctggttaccttaatgagaaacagagaaataaagtgaaaaaaatatatctcgatgagaagcgcctgcttgctggcgatcacccaatcgatcttttgctgagggacttcaagaagaattaccatatgtacgtgtatcctgtccattggcagttttctgaattggaccagcacccaatggaccgagtgctcacacactccgagttggcccctctgcgtgcaagcctcgtgccgatggaacactgtattacaagattcttcgaagagtgtgaccccaacaaagataagcatattaccctgaaagaatggggccactgtttcggaataaaagaagaagacatcgatgagaatctccttttttag

SEQ ID NO: 5315 - DNA, 1254 bp, synthetic construct
  misc_feature 1..1254: note = source = /note="Description of Artificial Sequence: Synthetic coding sequence"
  source 1..1254: mol_type = other DNA
atgctggctttgctcgtcctggttacggttgcccttgccagtgcgcaccatgggggtgaacacttcgagggcgagaaagtgttccgggtgaatgtggaagacgaaaaccatataaacatcatccgcgagctggctagcacaacccaaattgatttttggaagcctgacagcgtaacccaaatcaagccacactcaactgttgatttccgtgtgaaggccgaggataccgtcactgtcgagaacgtgctcaaacagaacgagctccagtataaagtccttatctccaatctcagaaacgtggtcgaggcccagtttgacagtcgggtgagggctactggccatagctacgagaagtacaataagtgggagaccattgaggcttggacccagcaggtggccaccgagaaccctgctcttatcagtcggagcgtcatagggacaacgttcgagggacgggccatttacctcttgaaagtggggaaagcagggcagaacaaacctgccattttcatggactgtgggttccacgcacgggaatggatcagccctgccttctgtcagtggtttgttagggaagccgtccgcacctatgggcgggagattcaggtcacagagcttctggacaagctggacttttacgtcctgccagttctcaatatagacggatatatctatacatggactaagtcaagattttggcgaaagacccggagtacccacacaggatcctcatgtatcggcactgacccaaacagaaattttgacgcaggctggtgtgagatcggagcctcacggaacccgtgtgacgagacatactgtggcccggcagcggagtcagaaaaggaaaccaaggctctggccgactttatccggaacaaattgagtagcatcaaggcttacttgacgatccatagttattcccagatgatgatctacccttactcttatgcttacaagctgggggaaaataacgctgagctcaacgctcttgctaaggcgacggtgaaagagctggctagccttcatgggaccaagtacacctacggaccaggcgctacgacaatctacccggcagctggaggttccgatgattgggcttatgatcaaggcataagatatagcttcacatttgagcttcgcgacactggcagatatggcttccttctccctgaatctcagatcagagctacatgtgaggagaccttcctcgccatcaagtacgttgctagttatgttcttgagcacctctactag

SEQ ID NO: 5316 - DNA, 588 bp, synthetic construct
  misc_feature 1..588: note = source = /note="Description of Artificial Sequence: Synthetic coding sequence"
  source 1..588: mol_type = other DNA
atggctgtgagccaaggggacgggaccctgtgctttgtactattgctgtgttgctggcaagaaacagagttgcggcccaggaccgtgataccgggttccccaactgaaatccctttctccagcaagcaggaggacatgagcgaactcctggatgagatactagttcaggagatactcgacctaaacaaaacgaccccatctgaaatgcccagcacggcatcaaccctttcaacacctctacatgcaggcatcgatgaaaactaccaggcaggggggagcgagaattaccacgagttattggagaatctacaattttcccctggcatagaggtgaagatcagtaacgacgaggcaaacgcaaacgctaaccttcatggtgatccgagcgaaaattacagaggccctcaggtgtcgcccggtagcgagaaatctgtctctagtaaagaaaaaaacagcaagaacactcaatatgaaaacctgtccattctggaccagattctgcagaatattggaaggtcatccggcaatatctttcacaaggagcagcagaggacgtcagcgcagagaaggtctcagggatcccagtag

SEQ ID NO: 5317 - DNA, 2334 bp, synthetic construct
  misc_feature 1..2334: note = source = /note="Description of Artificial Sequence: Synthetic coding sequence"
  source 1..2334: mol_type = other DNA
atgaacgcaaacaaggacgaacgactgaaggcccgaagccaagactttcacttatttccggccctgatgatgctttctatgaccatgctctttttaccagtgaccggtactctaaagcaaaacataccgaggctgaaactaacctacaaagacttgctgttgtccaactcctgcatcccattcctgggcagttcagaggggctggattttcaaacactgctgttagacgaggagcgaggccggttattactgggcgccaaggatcacattttccttctgtcattggtcgacctgaacaagaactttaaaaaaatctattggcccgctgccaaggaacgagtggaattgtgtaagcttgcgggcaaagacgccaacactgagtgtgcaaactttatcagagtgcttcagccttataataagacccacatttacgtatgtggaaccggcgcatttcacccaatctgtgggtatatcgacctgggggtctacaaagaggatattatcttcaagttagacacgcacaacctggaatccggacgtttgaaatgtccattcgacccacaacagcctttcgcttcggtcatgactgatgagtatttatattctggaaccgcttctgacttccttggtaaggacacagccttcacaagatccctgggcccaactcacgaccatcattatattaggacggatatcagcgagcactattggctgaatggagccaagttcattggaactttctttataccagacacctacaatcccgatgatgataagatttatttcttctttcgggagagttctcaggagggcagcactagtgataagactattttgtcccgggtgggccgtgtgtgcaaaaatgatgttggggggcagcggagtctgatcaacaagtggaccacattcttgaaggcacggctgatctgttccattcctggcagcgatggcgccgacacctacttcgacgagcttcaggacatctatctccttcctacccgagacgaacgcaatcctgtcgtgtacggcgtgtttaccaccaccagcagtatctttaaagggagcgccgtgtgcgtttactcaatggccgatatccgggctgttttcaatgggccctacgcacataaggaaagtgcagatcaccgatgggtacagtacgatggtcgaatcccttacccaagacctggtacatgccctagcaagacctacgaccccctcataaagtctacccgcgactttccagacgacgtgatctcctttatcaaacgtcactctgttatgtataaatcagtctaccctgtggctggaggacccacctttaagagaatcaatgttgactataggctcacacagatcgtggtggatcacgtcatagcagaggatgggcagtacgatgtgatgtttctgggaacggatattggaaccgtgcttaaggtcgtgagcatctctaaagagaaatggaatatggaagaagtcgttttagaagagctccagattttcaaacacagctcaattattctgaatatggagttgtcattaaagcaacagcagctctacattggctctagagatggcctggtgcagttgagcctccacagatgtgatacctatgggaaggcgtgcgcggattgctgcttggcgcgcgatccttactgtgcttgggacggcaatgcctgcagccgttatgcacccacaagcaagaggagagctagacgccaggacgtgaagtacggggaccccattactcagtgttgggacattgaggattcaatcagtcacgaaaccgccgacgaaaaagtcatctttggcattgagttcaactctacctttctggagtgtatacctaaatctcagcaagctactatcaagtggtacatccagcggagcggggatgaacacagagaggaactgaagccagacgagagaattataaaaacagaatatggcctgctcatccggtctctccagaagaaggactctggtatgtattattgcaaggcacaggaacataccttcattcacaccatcgttaagcttacactgaatgtcattgaaaacgagcagatggagaacacacagcgggccgaacacgaagaaggaaaggtcaaagacctgctcgcagagagtcgtctacgctataaggattatattcagatcctcagtagcccaaacttttctctggatcagtattgcgagcagatgtggcatcgcgaaaagcggcgccagcgaaacaagggcggaccaaagtggaagcatatgcaagagatgaaaaagaagaggaaccggagacatcacagggatctagacgagttacctcgggcagtggcgacgtag

SEQ ID NO: 5318 - DNA, 1332 bp, synthetic construct
  misc_feature 1..1332: note = source = /note="Description of Artificial Sequence: Synthetic coding sequence"
  source 1..1332: mol_type = other DNA
atgcaaccttcagaaatggtgatgaatccaaaacaggtctttctctcagtgctcatttttggcgtcgctgggctgcttctttttatgtatctccaggtttggattgaggaacagcataccggacgagttgaaaaaaggagggaacaaaaagtgacgagcggctggggacctgttaagtatctgcggcctgtgcccaggattatgtcaactgaaaaaattcaggaacatatcactaaccagaacccaaagtttcacatgccagaagacgttcgtgagaagaaagaaaatttgttactgaacagcgaaaggagtacccggctgctgacgaagacctcacacagtcaaggtggagaccaagctctgagtaaatcgacgggtagcccgaccgagaaactgatcgagaaacgccagggcgccaagacagtattcaacaagttcagtaatatgaactggcctgtggacatccacccactcaacaagagcctagttaaggacaataagtggaaaaaaaccgaggagacgcaggagaagaggaggagcttcttgcaggagttctgcaagaagtacggtggggtttcccaccaccaatcacacctattccacacagtatcaaggatttacgtagaagacaagcacaagatactctactgtgaggtacccaaggccggatgttcaaattggaaaaggatcttgatggttctcaatggattggccagcagcgcatataatatcagccataacgccgtgcactacgggaagcacctgaaaaagctggattcatttgatctgaaaggcatatacactagacttaatacctacacaaaagcagtattcgttagggaccctatggagcgccttgtcagcgcatttagggataagtttgagcacccaaattcctattaccaccccgtgtttgggaaggcgatcatcaagaagtacaggccaaacgcgtgcgaggaggccctgataaatggctcaggtgtcaagtttaaagaatttatccactacctcctagattctcaccggccggtaggaatggatattcattgggaaaaggtatcaaagctgtgctacccgtgcctgattaattatgacttcgtgggaaagttcgagacgttggaggaggatgcaaattactttttacagatgataggcgctccaaaggagcttaagtttcctaactttaaagacagacacagttcagacgagcgaaccaacgctcaagtggtacggcaatatctcaaagacctaacccgcacggagcgccagctgatctacgatttctactatctggactacctgatgtttaattacacaacccccttcttatag

SEQ ID NO: 5319 - DNA, 3228 bp, synthetic construct
  misc_feature 1..3228: note = source = /note="Description of Artificial Sequence: Synthetic coding sequence"
  source 1..3228: mol_type = other DNA
atgagaggcgggaaatgtaacatgctgtcgtccctgggatgtctgctgctgtgtggctctatcaccctcgcgcttgggaacgcacaaaaattacctaagggcaagagacctaacctcaaagttcatattaatacaacatccgattccatcctgctgaaatttctgagacccagccctaacgtgaagctggaaggtctgctgctgggatacgggagtaatgtatcaccaaaccagtactttcctttgcccgccgaggggaaatttactgaggccatcgtggatgccgagcccaagtatctgattgttgtgcgcccagcccctccaccctctcagaaaaagtcatgctccggaaagacccggagccggaagcccctccaactggtcgttggaacactcacaccttctagtgtgtttttgtcctgggggttcctgatcaacccgcaccacgactggacactgcccagtcactgccccaacgacagattttacacaattcgttaccgagaaaaggacaaggagaaaaagtggatttttcagatttgcccagcaacagaaactatcgttgagaacctcaagccgaatacggtatatgagtttggagtgaaagacaacgtggagggaggcatttggtcaaagatattcaatcacaagaccgtcgtcggcagcaagaaagtgaacggcaaaatccagagcacttatgatcaggaccacactgtcccagcctacgttccaaggaagctgatccctataaccattatcaaacaagtgattcagaacgtgacacataaggatagcgcgaaatccccagaaaaggcacccctcgggggcgtgattctcgttcatctgatcatacctggcctaaatgagactactgttaaacttcccgcgtctcttatgttcgaaataagtgacgcattgaaaacgcagctggcaaagaacgagaccctggcactcccagcagaaagcaaaacacctgaagtggagaaaataagcgctcggccaacaactgtgaccccggagactgtacctcgatctactaagccaacaacatccagcgctctagatgtgagcgagacaactctggcatcatctgagaaaccttggatagtgccaacagcaaaaatctcagaggacagcaaagtgctccagccccagactgctacttatgacgtgttttcgagcccaacgacatcagacgagcccgagatctctgattcgtacaccgcaactagtgataggatccttgactctatccctcccaagacctcacgaacacttgaacagccgcgcgcaacacttgctccctcagagaccccattcgtccctcaaaagttggaaatatttaccagcccagaaatgcaaccgaccactcccgccccccaacagactacatcaatccccagcaccccaaaaagacgaccgcggcctaagccacctaggactaagcccgaacggacaacctcagccgggaccattacacctaagatttcaaaaagtccagagcccacctggaccacaccagcaccagggaagacgcagttcatttccttaaagcctaagatacctctgagtccggaggtgacacacaccaaacctgcccccaaacaaactccacgcgctccccccaaaccaaaaaccagcccgagaccgagaattccccaaacccagccagtccccaaggtgccccagcgggtgactgctaagcctaagacttctccttcccccgaggtgtcttacaccacacccgcccccaaagacgtgctcctgccccataagccctatcccgaggtcagtcagagcgaacccgcacctctcgagacccgtgggataccctttatcccaatgatctcaccttctccaagtcaggaggaactccaaacaacgctagaggagacggatcagtcaacgcaggagcccttcacaactaaaattcctaggactaccgagctcgctaagacaacccaggcccctcaccgtttctatacaacggttcgtccgaggacgtctgacaagccacacatccgcccaggtgtcaagcaggctccgcggccctccggtgctgatcggaacgtttctgtggactcgacccacccaaccaagaagcctggcacacgcaggcccccgctcccccctagacccacacacccccggaggaagccgctgccccctaataatgtgacaggaaaaccagggtcagcaggcatcatatctagcggccctattaccactccacccctgcggagcactccaaggccaaccggtacccccctagagcggatcgagacggatataaagcagcccacagtgccagcttcgggggaggaattggaaaatataaccgactttagttcctcccctaccagagagaccgaccctctcgggaaacccaggtttaagggtcctcacgtgaggtacatacagaagcccgataattctccttgttccatcactgactctgtgaagaggttcccaaaggaggaggccacagagggaaatgccacgagtcctccccagaacccaccaacaaatctgaccgtggtcactgttgagggctgtccatctttcgtgatactcgattgggaaaagccactgaacgacacagtgacggagtacgaggtcattagccgggaaaacggtagcttttctgggaaaaataagagcatccagatgaccaaccagacttttagcacggtagaaaatctgaaacccaataccagctatgaatttcaggtgaagccaaaaaatcccctcggggagggccccgtctccaatactgttgcattcagtactgagagcgccgacccaagagtgagcgagcctgtgtctgccgggagagatgcgatctggaccgaacggccgtttaacagtgattcttattcagaatgcaaaggcaagcaatacgtcaagaggacctggtataagaaatttgtgggagtacagctctgcaatagtctgcgctataaaatctacctgtctgatagtcttaccggaaagttttataacatcggcgatcagcgcggccacggcgaagaccactgtcagttcgtggatagcttcttggatggacgcaccgggcagcaattgacaagcgaccaactgcccattaaggaagggtatttcagggccgtgaggcaagagccagtgcagttcggcgaaatcggtgggcacacccagatcaactatgtgcagtggtatgagtgcggtacaaccatccctggtaagtggtag

SEQ ID NO: 5320 - DNA, 483 bp, synthetic construct
  misc_feature 1..483: note = source = /note="Description of Artificial Sequence: Synthetic coding sequence"
  source 1..483: mol_type = other DNA
atgttaccctttctcttcttctcaactctcttcagctccattttcacggaagctcagaagcagtattgggtatgcaacagcagtgacgcatcaattagctacacatattgtgacaagatgcaataccctatcagcatcaatgtgaacccctgtattgaactaaaacggtccaagggcctactgcacatattctatatcccgaggagggacctgaaacagttgtatttcaacctgtacattactgttaataccatgaacctcccaaagaggaaagaggtgatatgccgggggtccgatgatgattacagtttctgcagggcccttaagggggaaacagttaatactacaatctcatttagctttaaaggaataaaattctctaaagggaaatacaagtgtgtggtggaagctatctctggttcacccgaggaaatgctcttctgtctcgagttcgtcatcctccaccagcctaacagtaactag

SEQ ID NO: 5321 - DNA, 780 bp, synthetic construct
  misc_feature 1..780: note = source = /note="Description of Artificial Sequence: Synthetic coding sequence"
  source 1..780: mol_type = other DNA
atggccgccttaatgaggagcaaggactccagctgttgcttgctgctcctggccgcagttctgatggtggagagttctcagattggcagctcgcgcgccaagctcaactcgatcaaatcaagtctaggcggtgaaaccccaggtcaggctgcgaatagaagcgctggaatgtatcaaggtcttgcattcggcgggtctaaaaagggtaagaatcttggtcaggcatacccctgcagtagcgataaggaatgtgaggtgggcagatactgccatagccctcaccagggtagctcagcctgcatggtgtgtaggcgcaagaagaagcgctgccacagggacggcatgtgctgtcccagcacgagatgcaacaatggtatctgcatacctgtgaccgagagcattctgaccccacatattcccgcgctagacgggacgaggcacagggaccgaaaccatggacattactccaaccatgatctggggtggcagaacctgggaaggccacacaccaagatgtctcacattaaggggcacgagggtgatccctgcttgcggagctcagactgtatagaaggattctgttgcgctaggcatttctggaccaagatctgcaaaccagtgctgcatcaaggcgaggtgtgcacaaagcagcggaaaaagggatcacacggattagaaatttttcagagatgcgactgcgccaaagggttatcatgtaaggtgtggaaggatgctacctattcctccaaggctagactccacgtttgtcagaagatctag

SEQ ID NO: 5322 - DNA, 3030 bp, synthetic construct
  misc_feature 1..3030: note = source = /note="Description of Artificial Sequence: Synthetic coding sequence"
  source 1..3030: mol_type = other DNA
atgggacagttgtgttggctccctttactggcccctttgcttcttctccggcctccaggggtccagagcgccggcccgatccgagcttttgtggtccctcattcacacatggatgtgggatgggtgtatacagtgcaagagagtatgagagcgtacgccgccaacgtatacacaagtgtagttgaagagttggctcggggacagcagcggaggtttatcgccgtcgaacaggaattctttcgtttatggtgggatggagtggcaagcgatcaacagaaataccaggtgcgacagttactcgaagaaggcaggctcgaattcgttattggcggccaagtgatgcacgatgaagccgttactcacctcgacgaccagattctgcaactgacagagggccatggcttcctatacgagacctttggtattagaccccagttcagttggcacgttgatcccttcggggcttcagctaccacaccgacgttatttgcacttgcgggattcaacgcacacctcggttcacggatagattatgacctaaaggctgccatgcaggaggcgcgagggctgcagttcgtgtggcgtggatcaccgtccctcagtgaacgccaggagattttcactcacataatggaccagtacagctactgtacacccagtcacattccattttcaaatcgctctggattctattggaacggggtggcagtgttccctaagcctcctcaggacggcgtctacccaaacatgtccgaacctgtaacaccagctaacataaacctttacgctgaagccttagtggccaacgtgaaacagagggccgcctggtttcgaaccccccatgttttatggccttggggttgcgataaacagttctttaacgcgagcgtgcagtttgccaacatggaccccttgttggaccacattaattcgcacgctgccgagctgggcgtgtcagtgcagtatgcaacactaggtgattactttcgagccctgcacgccctcaacgttacatggagagttagggatcaccacgatttcttgccctattccacagagccctttcaagcctggacaggcttttataccagcaggtccagcctcaagggattagcccgccgcgctagtgctttgctgtacgctggggagtctatgtttactcgatacttatggccagctcctaggggccacctcgaccctacatgggccctgcagcaacttcagcaacttcgttgggcagtttctgaagtccagcaccacgatgcaatcacaggcacagaatccccaaaagttagggatatgtacgcaactcatctcgcctctggtatgctgggaatgcggaagttgatggcatcgatcgtgctggatgagctgcaaccacaagctcccatggcagcctcatccgatgccggcccggcgggccatttcgcttcagtgtataatccactcgcttggacggtgaccactattgtgacattgacggtgggtttcccaggcgtgcgtgtgactgatgaagcgggacatcccgtacccagccaaatacagaattctaccgagacccccagtgcatacgatttgctgattttaaccacaatccctggcttgtcctacagacactataacataaggcccaccgccggtgctcaagagggcactcaggagccggcagctactgtcgcaagtacacttcagtttgggcggagactgcggcgtaggacaagccacgctggcaggtatttggtcccagtggcgaacgactgctacatcgtgctactcgatcaggataccaacctgatgcactccatctgggagcggcagtctaatagaacagttcgggtgacccaggagttcctggaatatcatgtaaatggtgacgtcaagcaagggcccatcagtgacaactacctattcacacccgggaaggccgccgttcctgcttgggaggctgtggagatggaaattgtggccggacagttggtcactgagatcagacaatacttctatagaaatatgaccgctcagaattacacctacgcaattcggtcccgcctgacacacgtgccccagggccatgatggtgagctactctgccaccgtatagagcaagagtaccaggctgggcctctcgaattaaacagggaagccgtgctgaggaccagcacaaacctgaacagccagcaggtcatctattcggataacaacggctatcagatgcaacgccgaccttatgtgtcttacgtgaacaattctattgcccgaaactactaccccatggtacagtcagctttcatggaggacggaaaatctagacttgtcctcctttctgaaagggcacatggcatcagctctcaggggaacggtcaagttgaagttatgttgcatcgtcggttatggaacaatttcgattgggatcttggctataatctgacactgaatgatacttctgtggttcaccccgtcctgtggctcctgctgggtagctggagcctgacaaccgccttacgccagcgatccgccctcgccttacagcatagacccgtagtcctttttggggacctcgccggcaccgccccgaagctgccaggcccacagcagcaggaggcggtgacactccctccaaacttgcacctacagatactgtcaattcccggatggaggtacagctccaaccacacggagcactcccagaacctgcgcaagggccaccggggagaggcccaggcagacttgcgacgggtcttgcttaggctgtaccatttatatgaagttggtgaagatcctgtgttaagccagccggtcacagtgaacctggaagcagtgttgcaggccctggggagcgtggtcgctgtcgaagagcggagtctgactggtacttgggacctgtcgatgctgcaccgctggtcttggagaactggtcctgggagacatcgcggtgataccacaagcccaagtaggccccccgggggacctataatcaccgtgcatccaaaagagattaggactttcttcatacattttcaacagcagtag

SEQ ID NO: 5323 - DNA, 1443 bp, synthetic construct
  misc_feature 1..1443: note = source = /note="Description of Artificial Sequence: Synthetic coding sequence"
  source 1..1443: mol_type = other DNA
atgctttttagaaatcgcttccttctcttactcgccttagcggccttgctggcctttgtatcccttagcttgcagtttttccatttaatcccggttagcactccaaagaacggcatgtccagtaagtcaaggaagaggattatgccggatcctgttacggaaccccctgtaaccgatcccgtttatgaggcgctgctgtactgtaacatacctagcgtagccgagcgaagcatggagggacacgcccctcaccacttcaagttggtgagtgtacatgtgtttattcgtcatggggaccgataccctctctacgtaatcccaaagacaaagcgtccagagattgattgcacactagtcgcaaacaggaagccttatcatcctaagctcgaggcctttatctctcatatgtctaagggcagtggggcttcattcgagagccctttaaactctctgccactctaccctaatcatccactgtgcgaaatgggtgagctgacacagaccggagttgtacaacatttgcaaaatggtcagctgctgagggacatctatctcaagaaacacaaattgctgcctaacgactggtctgcagatcagttatacctagagaccactggcaagtccagaacactgcagtcggggctggccctgctctacggctttcttcctgattttgattggaaaaagatttacttccgtcaccagcccagtgcattgttttgtagcggatcatgttattgccccgtccgcaatcagtacctggaaaaggaacagcgacgtcagtacctcctgcggttaaagaattctcaactcgaaaagacatacggggaaatggcaaagatcgttgatgtacctacaaaacagctgagggccgccaatcccatcgactctatgctgtgccacttttgccataacgtgtcattcccttgcactcgaaacggatgtgtggacatggaacattttaaagtgattaaaacccaccagatagaggacgaaagggagcgaagggaaaagaagctgtacttcggctacagtttgttaggcgcgcaccctatcctcaatcagacaatcggtaggatgcagcgggccacagagggtcgcaaagaagagctgtttgcactgtattctgcacatgacgtaactctcagcccagtgctctccgccctggggctgagcgaagcgcggtttccacggttcgctgccaggctgatctttgagctgtggcaagatagagaaaaaccaagtgagcactcagtgcgaatcctgtataacggcgtagacgtgaccttccacacaagcttctgtcaagatcatcacaagcgctctccaaagcccatgtgtcccttagagaatctggtgaggtttgtaaagcgagatatgtttgtggcactcggcgggagcggaacgaactactacgatgcctgccatcgggaggggttttag

SEQ ID NO: 5324 - DNA, 1341 bp, synthetic construct
  misc_feature 1..1341: note = source = /note="Description of Artificial Sequence: Synthetic coding sequence"
  source 1..1341: mol_type = other DNA
atgttacatccagaaacctcccctgggcgcggccatcttcttgctgttctgctcgccctgttgggcactgcctgggcagaagtgtggcctccccagctgcaggagcaggcaccaatggcgggcgccctgaatcgtaaggagtctttcctattgctcagcctacacaatcgactcagaagttgggttcagccaccggcggccgatatgcgtaggttggactggagtgacagtctggcccagctagctcaagcccgcgcggccttatgtgggacaccaaccccctcactggcctcgggcctatggcgtacattgcaggttggctggaatatgcagctgctccctgccggcctggtgagcttcgtcgaggtcgtgagcttgtggtttgcggaggggcagcgctatagccacgccgctggcgaatgtgcacggaacgccacatgcacgcactacacacaactcgtatgggccacaagctcacagctgggatgtggccggcatctttgctctgcaggacaagctgccatcgaagctttcgtatgcgcatacagtcctcgaggcaattgggaagtcaacggtaagaccatagtaccatataaaaaaggggcctggtgttccctctgcactgcttccgtgagcggatgttttaaagcttgggatcacgccgggggcctttgcgaggtgcccagaaacccctgccgcatgtcttgccaaaaccatggtcggttgaacatatccacatgtcactgtcactgcccccctggctacactggacgatactgtcaagtgaggtgtagcctacagtgcgttcacggaagatttagggaggaggaatgtagctgcgtttgtgacataggctatggcggagcgcagtgcgccacaaaagttcactttcctttccatacctgcgatttacgcatcgatggcgactgtttcatggtatcctctgaggccgacacctactatcgagccagaatgaaatgccaacgcaaaggcggtgttctcgcgcaaataaagagccaaaaggtccaagacatattggccttctacctgggtcgcttggagacaacaaacgaggtaattgactcagactttgagaccaggaacttttggattggattaacctacaagacagctaaagactccttccgctgggcaacgggcgaacaccaggcgtttacctcattcgctttcgggcaacccgataaccatggctttggcaactgtgtagagctgcaggctagcgccgcttttaattggaatgatcaacggtgtaagacaagaaatcgctacatttgccagttcgctcaggagcatatctctcgctggggcccagggagttag

SEQ ID NO: 5325 - DNA, 2313 bp, synthetic construct
  misc_feature 1..2313: note = source = /note="Description of Artificial Sequence: Synthetic coding sequence"
  source 1..2313: mol_type = other DNA
atggtggaaagtgccggacgagccggccagaagcgcccagggttcctcgaaggtggtttgctcttactgctgttgctcgttactgccgcactagtcgccctaggggtgctctacgccgaccgacgtggtaaacagttacccagactagctagccggctatgttttctccaggaggagagaacctttgttaagaggaagccgcgaggcatccctgaagctcaggaggtgagtgaagtctgtaccacgccgggttgcgtgatagcggcagccaggatcctgcagaatatggatcccacaacagaaccttgcgatgacttctatcaatttgcctgtggtggctggctgcgccgccatgtcatacccgaaaccaattcgcggtactccatattcgacgtgctgcgggatgaattggaggtgattcttaaagctgtgctggaaaactccaccgccaaggaccgcccggccgtggaaaaggcacgaaccctctataggtcatgcatgaaccagtcagttatcgagaagcgcggcagtcagccgttattagatatcttggaggtcgttggcggctggccagtcgctatggataggtggaacgagaccgtaggcctcgagtgggagctagaacgtcagttggctttgatgaactcccagttcaatcgtcgcgtactgatagacctgttcatatggaatgacgaccaaaatagtagtcgccacatcatctacattgatcagcccaccctgggcatgcccagccgcgaatactactttaatggcggttccaaccgtaaggtgagggaggcatacctccagtttatggtatcggtcgccactttattaagagaagatgctaatctgccgagagatagttgtctcgtccaagaggatatggtccaggtattggaattggaaacccaactggcaaaggccacagttccacaggaggagaggcatgatgttattgccctgtaccaccgcatgggtttggaagagttacagagtcaattcgggctgaaagggttcaactggacactatttatccaaaccgtgctgtcctccgtcaagattaagctcctgcctgacgaggaggtagtggtttatggcattccgtacttgcagaatctcgaaaatatcatagacacctatagcgcccggacgatacagaactacctggtgtggcggctggtcctggaccgcattggaagtttaagtcaacggttcaaggacacaagagtgaattaccggaaggccctctttggtactatggtggaagaagtgaggtggcgtgagtgcgttggctacgttaattcaaacatggaaaacgccgtgggcagcctctatgtcagggaggcattccccggcgattcaaaaagcatggttcgggaactgatagacaaagtacggactgtctttgtggaaacactggatgagctcggctggatggacgaggagtccaagaagaaagcgcaggagaaagccatgagcatacgggaacagattggtcatcctgactacatcttagaagaaatgaaccgcaggcttgacgaggagtactccaacttgaacttctccgaagacttatacttcgagaactcgctacaaaacttaaaggtgggggcgcagaggagcctccgcaaactgcgggagaaggtggatcccaacctgtggataattggagccgcggtcgttaatgcattctacagcccgaaccgaaaccagattgtgtttccggcaggtattctccagccaccattcttttcaaaagagcagccccaggccttgaacttcggggggattggaatggtgattggccacgaaattacccacgggttcgatgacaacggacgcaacttcgataagaatggcaacatgatggactggtggtcaaacttttccacacaacatttccgcgagcagagcgagtgcatgatttatcagtacggcaattattcatgggacttggctgatgaacaaaacgtgaacggcttcaacacactaggggagaacattgccgataatggcggcgtgcgccaagcatacaaggcatacctcaagtggatggctgaaggcggaaaggaccaacagttacccggtctagacttgacacatgagcaactgttcttcataaattatgcccaggtctggtgcggctcttatagaccagaattcgccatccagtcaataaaaacggacgtgcacagccccttgaagtatcgcgtcctcggcagtctccaaaatctggccgctttcgctgacaccttccactgtgcccggggcactcccatgcacccgaaagaacgctgtcgtgtgtggtag

SEQ ID NO: 5326 - DNA, 1317 bp, synthetic construct
  misc_feature 1..1317: note = source = /note="Description of Artificial Sequence: Synthetic coding sequence"
  source 1..1317: mol_type = other DNA
atgtcaaagcgagataaggctggcaaagatacagcacgcggcaaaggcaaggatatcagtaagtatggctctgtccagaagtcattcgcagaccggggacttcccaaacctccgaaggaaaaattactgcaggtggagaagcttcgcaaggaatctggaaagggatctttcctccagcctactgcaaaacctcgggcattagcgcagcagcaagccgttataagggggtttacatactataaagccgggaagcaagaagttacagaggcagtggccgacaacactcttcagggaacatcctggctggagcagctgcctcccaaagtggagggccgctcaaactcagccgagccgaacagcgccgagcaagacgaagctgagcctagatcctcggagcgggtggatcttgcaagcggcactcctacgagcattcctgctactaccacaacagcgacaacaacgccaacccccacaacgtctctgctacctaccgagccaccctctggcccagaggtgagctcccagggaagggaagcatcatgcgaaggaacgcttagagctgttgacccccccgtccgtcaccatagctatggcaggcacgagggggcctggatgaaggatccggcagctcgggacgatcgcatctatgtcactaattattactacggcaactcactggtggagtttcggaacctcgaaaactttaagcagggcagatggtctaacatgtataagttgccctacaattggatcgggactgggcacgttgtgtaccagggagccttttattacaatcgcgcattcactaaaaatataatcaaatacgatctccgccagaggttcgtagctagctgggctctgctgcccgacgttgtctacgaagatactacaccatggaaatggcgaggtcactccgacattgattttgccgtggatgaaagtggcttgtgggtgatctaccctgccgtcgatgacagagacgaggcgcagcccgaagtgatcgtgctgagccggctggaccccggggacttgtccgtccaccgagaaaccacttggaaaacccgtctgagacgtaattcgtacggcaactgtttcctggtatgtggcatactgtacgcggttgatacttacaaccagcaggagggtcaagtagcctacgcttttgacacccatactggtacagatgcgcggcctcagctccctttccttaacgaacatgcttacaccactcagattgattacaaccccaaagaacgagtgctatacgcctgggataacggacaccagctgacctatactctgcattttgtggtgtag

SEQ ID NO: 5327 - DNA, 3570 bp, synthetic construct
  misc_feature 1..3570: note = source = /note="Description of Artificial Sequence: Synthetic coding sequence"
  source 1..3570: mol_type = other DNA
atgccgggattgctcaattggataaccggagccgctttacccctcacagctagtgatgtcacctcctgtgtgtctgggtatgccttaggattaacagcctccctgacatatgggaatctagaggcccagccgttccaggggctttttgtgtatccgcttgatgagtgtacaaccgtgataggcttcgaagccgtaatcgctgatagagtggttactgttcagattaaagataaggcaaagctggaatccggacattttgacgcttcgcatgtgaggtcccccacagttactggtaacattctgcaggacggtgtttcaattgccccacactcatgtacccctggtaaagtgacccttgacgaagatctagagcgtattctgtttgtcgctaatctagggaccatagcgcctatggaaaatgtcaccatctttatctctaccagtagtgaactgcctactctaccttccggtgccgtccgtgtgttgttacccgccgtatgcgcccccaccgttcctcagttttgcacgaaaagtaccggaactagcaatcagcaggctcagggtaaggaccgacactgcttcggcgcatgggcccctggatcgtggaacaagctttgcctagccacactactcaataccgaggtgagtaatccaatggagtacgagttcaactttcagctcgaaattaggggaccctgcctgctggctggtgtcgaatctccaacacacgagatccgcgcagacgctgcaccttccgctcgaagcgcaaaaagtatcattatcacgctcgctaataagcacacattcgacagacctgtagaaatcttgatccacccatctgagcctcatatgccacacgtgctaattgagaagggcgacatgacattgggtgaattcgatcaacatcttaaggggcgaactgattttattaagggaatgaagaagaagagtagggcggagcgcaaaaccgagattattaggaagcgactacacaaagacatacctcaccactccgtgataatgttgaacttctgccccgatttgcagtccgtgcagccatgtctccgcaaagcccacggggagttcatctttcttattgaccggtcctcatccatgtccggcatcagcatgcaccgcgtgaaggacgcaatgctagttgcactcaagagcctgatgccagcctgcctctttaatataatcggttttggaagcacatttaagtcactgttcccctccagccagacgtactccgaggactccttggcgatggcctgtgacgacatccagcggatgaaagccgatatgggtggcacaaacatcctcagccctctgaaatgggtgatcagacagcccgtgcaccggggacatcctcgcctcttgttcgtgattaccgacggcgcggtcaacaatacgggtaaggtgttggaacttgtgcggaaccatgcattctcaactcggtgttactcatttggaattgggccgaatgtgtgccaccgccttgtgaaggggctcgccagtgtgagtgagggctcagcggaacttctcatggagggcgagaggctgcagccaaaaatggtcaagtcgctcaagaaagcaatggctccagttctgtcagacgttacagtggaatggattttccctgagacaacagaggtgctggtatccccagtttctgccagttcattgttcccaggggaaagactcgtcgggtacggaatagtgtgtgacgccagtcttcacatcagcaatcctcgctccgataaaaggagacgctacagcatgttgcatagtcaggagagtgggagctccgtcttctatcattcacaagacgatgggccagggttagagggtggggactgtgcgaagaactctggggctccattcatcctaggtcaggcgaaaaatgcccggcttgcatcaggggacagtactactaagcacgatctgaatctgtcacagaggcgccgagcttactccaccaaccagataactaatcataagccactgccccgtgctaccatggcgtccgacccgatgccagccgctaagcggtaccccttgcgcaaagccaggttgcaggatctgaccaatcaaactagcctggacgtgcagaggtggcaaatcgacctacagcccctgctcaacagcgggcaggacctgaaccaagggccaaagctgcgcggaccgggtgcccgacgtccatccctgttgccccaaggatgccagcctttccttccctggggtcaggagacccaggcttggtcccctgtgagagagcgtacatcagattctagatccccaggggaccttgaacctagccatcatccttcagccttcgagacggagacaagctctgattgggatccgccagccgaaagtcaggaaagggcttcacccagtcgccccgctactccagctccagttctgggaaaggcactagtaaaaggactccatgattcacaaagactgcagtgggaggtgtctttcgagttaggaacaccagggccagaacgtgggggagcacaggacgctgatctgtggagcgaaacattccaccatttggccgcaagggccattatcagggacttcgaacaactcgccgagagggagggcgaaatcgagcagggatctaacaggcgataccaggtctccgctttgcatacctcaaaagcctgtaacatcatctctaaatatacggccttcgttcccgttgacgtgtcaaagagcaggtacctgcccacagttgtggagtatcccaatagtgcggctcttcgaatgctgggtagccgtgccttggctcagcagtggaggggcacctcgtccggttttgggcgaccgcagaccatgctcggggaggactctgcccctggcaacggcccccagaggagtctggctacaaacaccttgtcttccatgaaggcttcagagaatttattcggatcatggttaaaccttaacaaaagtcgcctacttacaagggccgccaagggattcctgtccaaacccctgattaaggccgtagagagtacaagtggtaatcagtctttcgattatataccccttgtctcattgcaactggccagcggggcttttctgcttaatgaggctttctgcgaagccacacatatccctatggaaaaactgaaatggactagtcccttcacctgtcatagggtatctctcaccacgaggccttcggagtcaaaaacccctagtcctcagctctgcaccagtagccccccgcggcatccgtcttgtgacagcttcagcctcgaacctctcgcgaaagggaagttaggactggagccaagggcggtcgtggagcacacgggcaagctgtgggctaccgtggtgggacttgcgtggctcgagcactctagcgcttcctatttcacagagtgggagcttgtcgccgccaaagcgaattcctggctggagcaacaagaggttccagagggacgcacccaggggaccttaaaagctgccgcaagacagttattcgtgctgttacgccattgggatgagaacctggaatttaatatgctctgttacaatcctaattacgtttag

SEQ ID NO: 5328 - DNA, 1344 bp, synthetic construct
  misc_feature 1..1344: note = source = /note="Description of Artificial Sequence: Synthetic coding sequence"
  source 1..1344: mol_type = other DNA
atgccccacgttctgattgagaaaggggatatgacccttggcgagtttgaccaacatctgaagggcagaacggactttattaaaggtatgaagaagaaaagtcgagccgaaagaaagactgagatcatacggaaaagactgcacaaagatatcccgcaccactctgtcatcatgctgaatttttgtcctgatctgcagagtgtgcagccttgccttcgcaaggcccatggggaattcatctttttgatagatcgctcaagctcaatgtccggcatctccatgcacagagtgaaggacgcaatgctggtggcgcttaaatcgctaatgcccgcctgcttatttaatattatcggattcggctcgacctttaagtccctgttcccatcatctcagacttatagtgaagattctctagccatggcctgtgacgatattcaacggatgaaagccgacatgggcggaacaaacattctgagccccctgaagtgggtgattcgacagccagttcaccgcggtcacccccgactgctgttcgttatcaccgatggtgctgttaacaacaccggcaaggtgctcgaactcgtgcgaaatcacgcctttagcacccgttgctactctttcggcataggaccaaacgtttgccacagactggtgaagggtctagctagtgtgtcggaggggagtgccgagctcctgatggagggtgagaggctacagcctaaaatggtaaagagtctgaaaaaggcaatggcaccagtcctctcagacgttacggtggagtggatatttcccgaaactacggaagtgctggtttctcctgtgagtgcctcgtccctatttcccggagagcggctggtgggctatggtatcgtatgtgatgcgtccctgcatatttcaaatccacgtagcgataagaggagacgatatagcatgctgcacagccaggagagcggcagttctgtgttctatcactcccaggatgacggaccgggtctggaaggcggagattgcgctaagaacagcggcgctccgttcatactgggccaagcaaaaaacgctagacttgcaagtggggactctacaaccaagcacgatctgaacttatctcaaaggcggagagcgtacagtactaatcaaatcaccaaccataagcctctccctagagcgactatggcaagtgatccaatgcctgccgctaagaggtatccgctcagaaaagcccgacttcaggatctaacaaatcagacctcattggatgttcaaagatggcagatcgacctgcaggccttcatctgcctcacatctgaggacacctttcaaatcagaacacctaccggccagtag

SEQ ID NO: 5329 - DNA, 726 bp, synthetic construct
  misc_feature 1..726: note = source = /note="Description of Artificial Sequence: Synthetic coding sequence"
  source 1..726: mol_type = other DNA
atgtggaccgtgagaacagaagggggccacttccctctgcactctcccacttttagctggagaaatgttgccttccttctgctcttaagcctcgccctcgaatggacctctgccatgctgaccaagaagataaagcataaacccggtctgtgtccaaaggaacggcttacttgtactactgaactcccagattcgtgtaacactgacttcgattgtaaagaatatcagaagtgttgctttttcgcatgtcaaaagaaatgcatggatccattccaggagccgtgtatgcttcccgtcaggcatgggaactgcaatcacgaagcccagcgatggcatttcgattttaaaaactatcgttgtaccccttttaaatatcgggggtgtgagggtaacgcaaacaattttctcaatgaggatgcttgccggaccgcttgcatgttgattgtcaaagatggccagtgccccctgttcccgtttactgaaaggaaggagtgccccccatcatgccattctgacatcgattgccctcagacagacaagtgttgtgagtcccgctgtggctttgtgtgcgcacgcgcatggactgtgaagaaaggcttttgccctcgtaaacctctgctgtgcaccaagattgacaagcccaaatgcctgcaggacgaggaatgccctctcgtggaaaaatgctgttcgcattgtggcctaaaatgcatggaccctagacgatag

SEQ ID NO: 5330 - DNA, 1074 bp, synthetic construct
  misc_feature 1..1074: note = source = /note="Description of Artificial Sequence: Synthetic coding sequence"
  source 1..1074: mol_type = other DNA
atgcgccctcctcctgccttggctcttgccgggctctgcctgctcgcactgcccgctgccgcagctagttacttcgggctcaccgggcgcgaagttctgactccctttccaggcctcgggacagcagcagcaccagctcagggaggcgctcacctcaagcaatgtgatttactaaaactctctcggaggcaaaaacagttgtgcagaagagagcccggtcttgccgagactctgagggatgccgctcatctgggattacttgaatgccagttccagtttcgccacgagaggtggaactgcagtctggagggaagaatgggcctgctgaaaaggggattcaaggaaactgcattcttgtacgcagttagctccgccgccctgacacatactctggctcgagcatgtagcgccgggaggatggaaagatgcacttgtgacgactctcctggattggaatcgaggcaggcatggcaatggggcgtctgtggcgacaacctgaaatacagcaccaagtttctaagtaactttctcggatccaaaaggggcaataaggaccttcgcgcaagagcggatgcccacaacactcatgtaggaataaaagcagtcaagtcagggctgcggacaacctgtaagtgccatggggtcagcggctcctgtgccgtgcgtacatgctggaagcagctgtccccttttagagagactgggcaggtactaaaattgcggtatgatagcgctgtgaaagtttcatccgccaccaatgaagcacttggccggttagagctctgggcccccgcccggcaagggtccttaaccaagggattggctcctaggtccggcgacctggtttatatggaagacagcccatccttttgccgccccagtaaatacagtccagggacggcgggacgagtctgctctagggaagccagttgctcctccctgtgctgcggtcgagggtacgatacacagtctcgattggtagcatttagctgtcactgtcaggttcagtggtgctgctacgtagaatgccagcagtgcgtccaagaagaactcgtgtacacatgtaagcattag

SEQ ID NO: 5331 - DNA, 810 bp, synthetic construct
  misc_feature 1..810: note = source = /note="Description of Artificial Sequence: Synthetic coding sequence"
  source 1..810: mol_type = other DNA
atggtcaggtgtctgggcccagccttattgcttcttttacttctgggttccgctagcagtgttggaggcaaccgatgcgtcgacgctgcagaggcttgtaccgccgatgcccgttgtcagagactgcgctcagagtatgtcgcacagtgcctcggcagagccgcccaaggtgggtgtcccagagccaggtgcaggcgagcactgaggcgcttcttcgcacggggcccgcccgctcttactcacgcgctccttttctgcccttgcgcaggacccgcatgtgctgaaagacgcaggcagactttcgtcccatcttgcgccttttccgggcccggccccgcccctcctagctgtctggaacctctcaacttttgtgaacggtccagggtgtgtagaccaaggcttcttgcctttcaagtgagctgtactccagcacctagcgcgcctgacggatgcctccttgatcagggcgcacggtgcttacgggcatatgcaggcctggtggggacagctgtgactcccaattatgtggataatgtgtcggctcgcgtggctccgtggtgtgattgtggggcttctgggaatcgcagggaggattgcgaagcatttagagggctgtttactcgaaacagatgtctagatggagctatccaggcgtttgcatcaggttggcctcccgtgttattagatcaactgaatccgcaaggcgatcccgaacattccctgctgcaggtctctagtaccggcagagcactcgaacggagatcattgttgtcgatactccctgttctggccttgccagctctattatag

SEQ ID NO: 5332 - DNA, 1728 bp, synthetic construct
  misc_feature 1..1728: note = source = /note="Description of Artificial Sequence: Synthetic coding sequence"
  source 1..1728: mol_type = other DNA
atgtccggtaactgggtgcacccaggccagatactgatatgggcaatttgggtcctcgcagctccgacaaaaggcccaagtgccgagggtccccagaggaatacgagactaggctggattcagggaaaacaggtgaccgttcttggctccccggtacccgttaacgtcttccttggtgtgcctttcgcagccccccctctgggctctttgcggttcaccaatcctcagccagcctcaccttgggacaacctacgtgaagccacatcttaccccaacctgtgcctccagaattccgaatggctgctcctggatcaacatatgctcaaggtgcattaccctaaatttggcgtgtctgaggactgtctgtatctcaacatatacgcacctgcacacgccgacacaggcagcaagctgccagtgcttgtgtggtttcccggtggagcgttcaagaccggatcggcctccatcttcgatgggtctgccttagccgcatatgaggacgtcctcgtagtggtggtgcaatacaggctggggattttcgggttcttcacgacatgggaccagcacgctccaggaaattgggctttcaaagaccaggtagccgcactctcctgggttcagaagaacatcgaatttttcggaggagacccctcctccgtcaccatctttggtgaaagcgccggcgcgatttcagtgtcgagcctgatcctgagccctatggcaaaggggctgtttcataaggccattatggaatcaggcgtcgctattatcccatatctggaggctcacgactacgagaaatctgaggatcttcaggtggtggcccacttttgtggcaacaacgcctcagattcagaagccctgttgaggtgtctgcgtaccaaaccttccaaggaacttttaacactcagccagaagacaaaatcttttacgcgggtggtggatggagccttcttcccaaacgaacctttggacctgctcagccagaaagccttcaaggctataccatccatcattggggtcaataatcatgagtgcggctttctactcccaatgaaggaggcccctgagatacttagcgggtctaacaaaagcttggcactgcaccttatccagaatattctgcacattccaccacagtatctgcacctggtggccaatgagtacttccatgataagcattctctgacagagattcgcgactcgctgctcgacctcctgggggacgtcttctttgtcgttccggccttgataacggcccgctaccaccgcgatgccggcgctcccgtttacttctacgaatttagacaccgaccccagtgctttgaagatactaagccagcgtttgtcaaggctgaccacgccgatgaggtcagatttgtatttgggggcgcttttctgaagggagacatcgtgatgtttgagggggctacagaggaagagaagctgctgtcacggaagatgatgaagtactgggcaacctttgccagaaccggaaacccgaacggcaacgacctgtccctgtggcccgcctacaatctgactgaacaatacctccagctggacctgaatatgagtctcggtcaacggctgaaagaaccccgtgtggacttctggactagcacaatcccccttatactaagtgcttcggacatgctccattctcccctgtctagtctcacttttttgtcattgctgcagccatttttctttttttgcgccccttag

SEQ ID NO: 5333 - DNA, 1026 bp, synthetic construct
  misc_feature 1..1026: note = source = /note="Description of Artificial Sequence: Synthetic coding sequence"
  source 1..1026: mol_type = other DNA
atgggaaccctcccttggttgcttgctttctttattctcggacttcaggcctgggatactcctaccatcgtttcgcgtaaggaatggggagccaggccactcgcttgtcgggccctgcttacactacccgtcgcttacataatcaccgatcaattgccaggcatgcagtgtcagcagcagagcgtatgttctcaaatgctgcgcggcctccagtctcattccgtgtacaccatcggttggtgtgacgtggcatacaacttccttgtgggcgatgatggcagggtttatgaaggagttggatggaacatacagggactgcatacacaagggtacaataatatctctctgggaatagcattcttcggcaataaaattggttcgtccccctcccccgccgccttgtcggcggcagagggtctgatctcctacgcaatacagaagggccatctctcccctcggtacattcaaccgctgcttctgaaagaagagacctgcctcgacccccagcaccccgtcatgcccagaaaagtgtgcccaaacatcattaaacgatctgcatgggaggccagagagacacattgcccaaagatgaacttacctgccaagtatgtaattattattcacacggcaggaacttcttgtactgtctcaactgattgtcagaccgtagtgcgtaatatacagagctttcatatggatacccgcaacttctgcgacataggctaccattttctggtgggtcaagatggaggcgtttacgagggggtggggtggcacattcaaggctcccacacttacgggttcaacgatattgcactgggcattgcatttattggctattttgtagaaaagcctcccaacgcagccgcactggaggccgctcaggacttaatacaatgtgcggtggtcgaaggctacctcacacctaactatctcctaatgggacattctgacgtggtcaatattctctcgcccggacaggctctatataatatcataagcacctggcctcactttaaacattag

SEQ ID NO: 5334 - DNA, 897 bp, synthetic construct
  misc_feature 1..897: note = source = /note="Description of Artificial Sequence: Synthetic coding sequence"
  source 1..897: mol_type = other DNA
atggggatcgtgtgtgctcagtgtagtttcatactcctgctgtccatcattagggcgagaccaccccccttccttttctgtcccctgtcttcacaacgaactgaaagcccgtataagcctgtgcacctaggacttggcccgaccgacaaggttgctgctatcgccatggctcgcatcatcgaccttgtaccatgggatgatggctccactcacgtatatgcttccccagctatactgctcccaatggagagacagcggaatcagttagcaggggtgaaacaacaactgtaccatccggcgttgcccacccttaggcacatggacagggataccgtcaaggcctgcctaccagatgagcactgccagagcaccacatattgtcgtaaggatgagttcgacaatgcacatttcaccctcctcggcgtcccaaacaaaccccttcagtgcctcgatatcacagccactggacagaagctgagaaaccgataccatgagggcaagcttgccccaatcgcgcctggcatcaaccgggtggattggccctgttttacgagagctattgaggattggtcccattttgtgagttccgctggcgagttcaagttaccatgtctgaggaagcgcgctgaggggctgagtggttatgctgtcagatatctaaaacccgatgtgacgcagacttggaggcaggaagcgctatgtggggcgtgggccggccgcccctgctcacccgactctccaagaccttacccctgttgccccccccaatattgtctttcacaaaatccttcgctggaccggtacggccagaagcctttgccgtttgacagtctgaacactttccgcagcttcggaagctcttatagtagagtaaactacctgactccgtggcattag

SEQ ID NO: 5335 - DNA, 5799 bp, synthetic construct
  misc_feature 1..5799: note = source = /note="Description of Artificial Sequence: Synthetic coding sequence"
  source 1..5799: mol_type = other DNA
atggctcctggcgcattacggggcggctgtgagcagagggccccgggcgggggtgcccgcactgccgccctaggtccttggccctggccatcacccggtccagccccaagcccaggcgctgctccacccaggtcaagaaaaatgtcgggtgcgcttctatggcctctgctgccgctgctccttctgcttttgtcagctagagatggagtccgggctgcccaaccccaggccccagggtacctcatcgccgctccaagtgtgttcagggcaggcgtggaggaagtaattagcgttactatcttcaatagccccagagaagtcacggttcaggcacagcttgtggctcagggtgaacctgtagtacagtcccagggggctattcttgataagggcacaataaagctgaaggtgcctaccggactcagaggtcaagccctgctgaaagtgtggggaagagggtggcaagccgaggaggggccactgttccataatcagacatctgtgacggttgacgggaggggagccagcgtttttattcagacggataaacccgtctacaggccacagcatcgcgtgctgatctccatctttacagtgtcccctaacctccggcctgtgaacgagaagctcgaggcctacatcctagaccctcgtgggtccagaatgattgagtggagacatctcaaacccttttgttgcggcatcacgaatatgtcctttccactgagtgatcagccggttctgggcgagtggtttatctttgtggagatgcagggccatgcatataacaagtcatttgaggtacagaagtatgtcctgcccaagttcgagctgctaatagatcctccacgctatatccaggatctggacgcatgcgaaacaggaactgtccgcgccagatacacatttggaaaacccgtagcaggggcacttatgatcaacatgactgtcaatggcgtaggctattacagccatgaagtgggtcggcccgtactccggaccaccaagatcctgggaagccgcgattttgacatctgtgtgagagacatgattccagcagacgtacctgagcatttccgggggcgggtctccatttgggcgatggtgacttccgttgacgggtctcagcaggtggccttcgatgattcaacccccgtgcagcggcagctcgttgatatacgttactctaaggatacccgaaaacagtttaagccaggactggcctatgtaggtaaggtcgagctatcttaccccgacgggtcccccgccgaaggcgtgaccgtgcaaatcaaagcagagttgaccccgaaagataatatctacacatctgaggtcgtgtcacagcgcgggctggtgggtttcgaaatcccctccatcccaacatccgctcagcatgtctggctcgagaccaaggtaatggcactcaacggaaagccagtgggcgctcaatacctcccgtcatatctgtcactgggtagctggtacagtccttcccagtgctacctccagctccagcctccatcacatcctttgcaagtgggcgaggaggcatacttctctgtgaaaagcacttgcccttgtaatttcaccttgtactacgaggtggccgcccgcggcaatattgtactctcagggcagcaacctgcccacacaacccagcagcgttccaagcgtgcagctcctgccctcgaaaaacccataaggctgacacacctgtctgaaaccgaaccaccacccgccccagaagccgaggttgatgtctgtgttacttccttacacctggccgtgactccatccatggtccctcttggcagactgctggttttttatgtgcgagaaaacggagagggcgttgctgatagtctgcagttcgctgtcgagactttcttcgagaaccaagtatctgtgacctattctgccaacgagacacaacctggcgaagtggtggatctgcgtatccgcgcggcccgtggcagttgcgtgtgtgtggctgcggtcgacaaatccgtatacctcctgagaagtgggttcaggttgacgcctgcccaagtgtttcaagagctcgaggactacgatgtatctgacagctttggagtcagcagagaggacgggcctttctggtgggcgggactcactgcacaacgcagaaggagatcatcagtgttcccatggccctggggcatcactaaagactctggcttcgcattcacggaaactgggctcgtcgttatgacagaccgggtgagccttaatcaccgtcaagacggaggcctgtacacggatgaggcagtgcctgctttccagccccacactggaagtctggttgctgtcgcaccctctaggcacccgccgaggaccgagaaacggaagcgaacatttttcccagagacctggatctggcattgcctgaacataagcgacccttcaggagaggggaccctgtctgtgaaggtcccggactcaatcacttcctgggtgggtgaggcagttgcattatctacttcacagggtctaggcatcgctgagcccagtctcttgaagaccttcaaaccctttttcgtcgatttcatgctcccagctttaataattcgcggagaacaggtgaaaatccctctgtcagtgtacaactatatgggtacctgtgccgaggtgtacatgaagttgtcagtgccgaagggaatacagttcgtcggtcaccccggcaaacggcacgttactaagaagatgtgtgtggcacccggcgaggcggaacctatttgggtcgtactctccttttctgacctggggcttaacaacattaccgccaaagccttagcatacggcgatacaaattgttgtagggatggtcggagcagcaagcatcccgaggaaaaccatgctgataggcgggtgccaatcggagttgaccatgttcgacgatccgtgatggttgaggcagagggggtccctcgcgcctatacatacagcgccttcttttgtcctagcgagagagtccatatttcaacccccaataaatacgagttccagtacgtccagaggccgctgaggttgactagatttgacgtggccgtgagggcccacaacgacgctcgggtggccttaagtagtggcccacaggatacagcagggatgatcgagatagtgctgggggggcatcagaatacacgttcatggatttcaacgtccaaaatgggggaacccgtagcctccgcccacacagccaaaatactcagctgggatgagtttcggaccttttggatttcctggagaggaggcctgattcaggtgggccacgggcccgaaccgagcaacgaatctgtgattgtagcatggaccctgcctagaccccccgaggtgcaatttattggcttctctacagggtgggggagtatgggagagtttaggatttggcggaagatggaagtggacgaatcctatagcgaagcgtttacattgggcgtgccccacggggcaatacctgggagcgaaagagctactgcctccatcattggtgacgtgatgggcccaacactcaatcatttgaacaatttgctgcgactgcctttcgggtgcggagaacagaacatgattcattttgcccctaacgtgttcgtcctgaagtacctgcagaagactcagcagttatctccagaagtggagcgagagactacagactacttggtgcagggctaccagagacagttgacgtacaagcggcaggacggatcatatagcgccttcggtgagcgggatgccagcggcagcatgtggctgactgcttttgtgctcaagtctttcgcccaagcgcgctcgttcatctttgtggacccaagggaattggcggcagctaaatcctggataattcagcagcagcaggctgatggtagctttctggccgtaggccgcgtgctgaacaaggacatccagggcggaatccacgggacagtgccccttaccgcatacgtggtggttgcactgcttgagacaggaacagcttccgaagaagaacgcggctccacggacaaagctaggcactttcttgaaagtgccgcgcctctggcaatggatccttactcctgcgccctgactacctacgctctgaccttacttcggagcccagctgcacctgaggcattgcgcaagctgcgcagtctggcgataatgagggatggtgtcactcactggtctttgtctaactcatgggacgtggacaaggggaccttcctgtctttttccgaccgggtgagccagagtgtggtgtccgcagaagtggaaatgactgcatatgcacttctcacatacaccctgcttggcgatgtcgccgcggccctacccgtggtaaaatggctcagccaacagagaaatgcccttggcgggttttcaagcacacaggatacctgtgtcgctctgcaagccctcgccgaatacgcgatcctcagttatgctggtgggatcaatctcacagtgagcttggcgagcacgaatcttgattaccaagagacatttgaactccaccggacaaaccagaaggtcctccagaccgccgctattccatccctgcctactgggctgtttgtgagcgcaaaaggcgacgggtgttgcttgatgcaaattgacgtgacttataatgtgcctgacccagtcgcgaagcctgcctttcaactgcttgtgtcactccaggagccagaggcccagggaaggccacctccgatgccagcctccgccgcagaaggatctagaggtgactggcccccggccgacgacgacgaccccgccgccgaccagcaccaccaggagtacaaggttatgctggaagtctgcaccaggtggcttcatgcgggatcctccaacatggccgtcctcgaagtgccattgctgtccggcttcagggccgatatcgaatctctggaacaattgctgctggataagcacatgggcatgaaaagatacgaagttgctggaaggcgcgtgctgttttactttgacgaaatcccctctcgttgtctgacttgcgttagatttcgggctttgagggagtgcgtagtgggccggacatctgcactccctgtgtccgtatacgactactacgagcctgctttcgaggccaccagattttacaatgtatctacgcactccccattagccagggagctctgtgcaggacctgcctgtaacgaagtagagcgagcaccagctcgcggtccaggctggttcccaggtgagagtggaccagccgtggcccctgaggaaggtgccgctattgctagatgtggctgcgatcatgactgcggtgcacaggggaacccggtgtgtggatctgacggggtggtctatgccagtgcctgtcggttacgagaggctgcctgccgccaagcggcaccgctagaacctgcaccaccgtcttgttgtgccctggaacagcgactccctgccagtagttcatctacatacggcgatgacctcgcctcggtggccccaggaccccttcagcaggatgttaagcttaacggtgctggcctagaggtggaggattccgatcctgagcctgagggcgaggccgaggacagagttacggcagggcctagaccccccgtatccagcgggaacctggaatcatcaacgcagagcgcttcgccttttcacagatggggccagacacccgccccacaacggcactccggcagagtagtgggggctcaccgccctggactgctgagccccgtgttcgtctactcacccgcctttcagagcggtggtgaggagggcctttggatgtccaatacgtgtactttgcgctag

SEQ ID NO: 5336 - DNA, 1209 bp, synthetic construct
  misc_feature 1..1209: note = source = /note="Description of Artificial Sequence: Synthetic coding sequence"
  source 1..1209: mol_type = other DNA
atggtatgtgcaagggccgcattgggccccggtgcactgtgggcagccgcctggggggtcctgctgttgactgcaccagccggagcccaacgtggccgtaaaaaagtggtccacgtgctggaaggggagagcgggtctgtggtcgttcagaccgcccccggacaggtcgtctcacatcgcgggggcacaattgtgctgccttgtcgataccattacgaggccgcagctcacgggcacgatggcgtgcgtcttaagtggaccaaagtggtggaccctctggcctttacagacgttttcgttgcgctgggaccccagcaccgagcgtttggtagttaccgcggccgcgctgaactacagggagatggacctggggatgcctcactggtgctgcggaacgtcaccttacaggactatggacgatatgagtgtgaggtcacaaacgagctggaggatgatgcagggatggtgaaacttgacctggaaggcgtggtttttccctaccaccctcgaggtggcagatacaaactgacttttgctgaagcccaaagagcctgtgccgaacaagacggaatccttgcgtctgctgagcagttgcacgcagcgtggcgagatggcctggattggtgtaacgcaggctggctgcgagatggaagtgttcagtaccctgtcaatcggcccagagagccttgcggtggtttggggggaacaggctctgccggaggcggcggcgacgctaacggcggcctgcgaaattatgggtatcggcacaacgctgaggagaggtatgatgcattttgctttacatcaaaccttccggggagagtcttcttcctgaaacccctgaggcctgtgccgtttagtggagcagcaagggcttgtgcggcccgcggagccgctgtcgctaaagtgggtcagctcttcgcagcttggaaacttcagttgctggatcggtgcaccgcgggatggttggccgacggctccgcccgctatcccatcgtgaatccccgggcccgctgcggcggaagacgccctggagttaggtccttgggatttcctgacgctacgagaagactttttggagtgtactgttaccgagccccaggagcgcctgacccagctcccgggggctggggatgggggtgggccggcggtggaggctgggccggcggcgccagagaccccgcagcgtggacaccgctgcacgtgtag

SEQ ID NO: 5337 - DNA, 1740 bp, synthetic construct
  misc_feature 1..1740: note = source = /note="Description of Artificial Sequence: Synthetic coding sequence"
  source 1..1740: mol_type = other DNA
atgtctgcattgagacctctcctgcttctcctcctccctctttgtcctggccctgggccaggtccaggctcagaggcaaaagtcactaggagttgcgccgagacacgacaggttctgggcgcacgagggtacagcctgaatctgataccgccggccctgattagtggagaacatctccgcgtttgtccgcaagagtacacttgctgttcttctgagactgaacagagactgataagggagaccgaggccacctttcgggggctcgtggaggatagtgggtcttttttagttcatactctcgctgctaggcaccggaagttcgacgaattttttctagaaatgctctccgtcgcccaacacagtctgacccagctgttctctcattcctacgggcgactgtacgcacagcacgcgcttattttcaatggtcttttttcacgattacgcgatttctatggcgagagtggtgaaggattggatgacacgttggcggatttctgggcacagctgttggaacgcgtgtttccgcttttacacccccagtactcctttccacccgattacttactgtgtctctctcggctcgcctccagcaccgacggttccttgcagccctttggagacagtccccgccgcctgagactgcagatcacaagaaccctggttgctgctagggccttcgttcagggactcgaaaccggccgtaacgtggtttcggaagccctcaaagtgccagtgagtgagggttgttcacaggccctgatgcgccttattggttgccctctgtgtcggggagttccgagccttatgccatgccagggcttctgtttgaacgttgtccgcggctgtttgagcagccgtggattggagcctgactgggggaactacttggacggccttctgattctcgcagacaaactccaggggccattcagtttcgaattgactgctgagagtatcggggttaaaatctctgaggggctgatgtacctgcaagagaatagcgctaaagtttccgcccaggtgtttcaggagtgtgggccacccgatcccgtgcctgccaggaatcgcagggccccacccccgagggaggaggcggggagactgtggtcaatggtgaccgaagaggaacggccaaccacagccgccggaactaacctccatcgcctggtgtgggagctgcgggagcgactggcccggatgagaggcttttgggctaggctcagtctaaccgtgtgtggcgactctcggatggccgccgatgcgtcactggaagccgccccttgctggactggcgccggacggggcaggtacttaccacctgtggtaggtggctcacctgcagaacaggtgaacaacccagagctgaaagtggacgcctcaggtccagacgtgcctacccgccggcgcaggctccagcttcgcgctgctactgccaggatgaaaacagccgcattgggtcacgacctggacggtcaggacgctgacgaagacgcgtccggatccgggggtggacagcagtacgcagacgattggatggccggggcagtggcgcccccagcccgaccccctaggcccccttacccaccacgacgcgatggtagcggaggcaagggcggaggtggatctgcacggtataaccaggggcgttctcgaagcggcggagcctccataggatttcacacacagacaatcttgattctcagtctatccgcgctggctctacttggaccacgttag

SEQ ID NO: 5338 - DNA, 498 bp, synthetic construct
  misc_feature 1..498: note = source = /note="Description of Artificial Sequence: Synthetic coding sequence"
  source 1..498: mol_type = other DNA
atggctttgctcgcgctgctactcgtcgtggcgctgccaagggtgtggaccgatgccaacctgacagcaagacagagagacccagaagattcccagcgcacagatgaaggtgataatcgcgtgtggtgtcatgtctgcgaaagggagaatacattcgaatgtcagaatcccagaagatgtaagtggaccgagccctactgtgtcatcgccgcagtgaaaatcttcccccggttttttatggtggccaaacagtgctcggccggatgcgctgctatggagagaccaaaacctgaggagaagaggtttttgctggaggaacccatgccctttttttatctcaaatgttgcaaaattcgttattgtaaccttgagggccctccaattaactctagcgtcttcaaggagtatgctggtagtatgggagaaagttgcggaggcctgtggttggctatcttgctcctgcttgccagcattgctgctggtctgagcctttcatag

SEQ ID NO: 5339 - DNA, 933 bp, synthetic construct
  misc_feature 1..933: note = source = /note="Description of Artificial Sequence: Synthetic coding sequence"
  source 1..933: mol_type = other DNA
atgaacgggctgagtttgtcggaactgtgctgcctcttctgctgcccaccatgcccaggtcgtatcgccgccaagcttgcgtttctgccacctgaggcaacttatagcttggttcctgagccagagcccggtcccggcggagccggcgccgcacctctgggcacactccgagcaagttcaggggcccctgggcggtggaagctccacctaactgagagggccgacttccaatactcacagagggagcttgataccattgaggtgttccccaccaaaagcgcacgcggaaacagggtcagctgcatgtatgtcaggtgtgtgcccggggcgcgctacactgtgttgttttcccatggcaacgctgtagatttaggtcaaatgagctctttctacataggcttgggctccaggttgcattgcaatatctttagctacgactatagcggttacggagctagtagcggaagaccctccgagaggaacttgtacgccgatatagatgccgcctggcaagctctcaggacccgctatggcatatccccggattccattattctctatggccagagtattggcacagtccctacggtcgacctggccagtcggtacgaatgtgcggcggtagtgctccatagccccttgaccagcggcatgagagtggcctttccagacaccaaaaaaacatactgctttgacgcgtttcctaacattgagaaggtatccaaaatcacatcacccgtccttattatacacggcacagaagatgaggtgattgattttagccatggtctggcactgtacgagaggtgccctaaagcagtggaacctttgtgggttgaaggtgcagggcacaatgacatagaactttacagccagtatttagagaggctcagacggtttatctctcaggagcttcccagtcagcgggcctag

SEQ ID NO: 5340 - DNA, 1905 bp, synthetic construct
  misc_feature 1..1905: note = source = /note="Description of Artificial Sequence: Synthetic coding sequence"
  source 1..1905: mol_type = other DNA
atggcgcagggtgtcctgtggattctgctgggcctgctgttgtggtcagatccgggcaccgcctccctccctcttctgatggattccgtgatccaggctctcgccgagctggaacagaaggtgccggccgccaaaactcgacatacagcctccgcttggctaatgagtgctcccaactccggaccacataataggctgtaccatttcttacttggagcatggagtctgaacgctaccgaactggatccctgtcctctgtcgcccgaattgttaggactgacaaaggaagtggcgcgtcacgacgtgcgagagggaaaggagtacggtgtggtgcttgccccagatggttccacagttgccgtggaaccgctgcttgctgggctggaggcggggctgcagggccgtcgtgtgattaatctgcctctggacagtatggctgccccctgggagactggagataccttcccagacgtggtggccatcgcaccagatgtgcgtgcgactagttcaccgggcttgcgcgatggatctcctgatgtaacgactgccgacataggggccaatactccagatgcaacgaaaggatgccctgacgtccaagccagcttgcccgacgccaaagctaagtctccccctacaatggttgactccctgctggccgtaacattagcagggaacctggggttaactttcctgcggggcagccagacccagagccacccagacttgggcaccgaaggttgctgggaccagctgtcggctccaagaacgtttaccttactcgatcccaaggccagcctcctgacaatggcatttttgaacggcgccctggacggtgtaatcttgggagactatttgagccgcacgccagagccaagaccctcactgtcacatctgctcagccagtactacggagccggtgtcgcccgggaccctggctttcgatcaaattttcgtaggcagaatggggcagccttgacctctgcgtctatcttagcccagcaggtctggggcactctggtgctcctgcagcggttagaaccagtgcacctccaactccagtgtatgtctcaggaacagcttgctcaggtggctgccaatgctactaaggaattcacggaggccttcctcggttgccccgcgattcatcccagatgtcggtggggggcggcaccgtatagagggcgacccaagttgctgcagcttcccctcggctttctctatgtccatcacacctatgtgcctgctcctccgtgcacagactttacgcggtgcgccgcaaacatgcgctcgatgcaacggtaccaccaggacacccaaggctggggagatattggctactcctttgtagtcggatctgatggatatgtgtacgaaggccgcggctggcattgggtaggagctcatactctggggcataactcccgagggttcggggtggcaattgtcggaaattataccgccgctctgccaaccgaggccgcactcagaaccgtgcgcgatactctccctagttgcgccgtcagggctggcctcctacgcccagactacgcgttgctaggccacagacagctggtccgtactgattgtcctggagatgcactttttgaccttctacgcacgtggccacatttcactgctgtgtccctcaggtcgttgcactacaccgctcgaaggccaagtgtgtacacctccagcacgcgccccctgccacctgcctgcaattcttgtgctcgcacagcttctgcccggcctcccacatcccggcgacacgtttatagcggaaacctggggcctgcttttgcagggcactcggctgggaatattcccgaccccgtgacctcagcctatgccgcttctgcacagccacagacacagccagcctgtcccttcccctctagttag

SEQ ID NO: 5341 - DNA, 777 bp, synthetic construct
  misc_feature 1..777: note = source = /note="Description of Artificial Sequence: Synthetic coding sequence"
  source 1..777: mol_type = other DNA
atgcttgtgctttacggccactccacacaggatctgccagagacgaatgcccgtgtagtgggtggaacagaggctgggcgaaacagttggccttcacagatttctttgcagtatcggagtggcggctccagataccatacttgtggcggaactttgatccgccagaactgggtgatgactgccgcccattgcgtggattaccaaaagacctttcgtgtagtcgccggagatcacaacctgtcccagaatgatgggacagaacagtatgtgagtgtacagaagattgtcgtccatccttactggaacagcgacaatgtcgccgcaggctacgacatagcactcctgagactagcgcagagtgttacacttaactcatacgtccagttgggcgtcctgcctcaagagggtgccattcttgcaaataattcaccatgttacataactgggtggggcaagaccaagaccaacggtcagctcgcccaaaccctgcagcaggcatatttaccctctgtcgactacgctatctgtagcagcagctcttactgggggtccaccgtgaaaaacactatggtgtgcgctggcggcgacggggtgaggtcagggtgccagggagacagtggaggccccctgcactgtctggtgaacggcaagtattccgtgcacggtgtcacttctttcgtgagctcacgagggtgtaacgtttcgcggaaacctactgtgttcactcaggtgtctgcctatatcagctggatcaataatgtcatcgccagcaactag

SEQ ID NO: 5342 - DNA, 993 bp, synthetic construct
  misc_feature 1..993: note = source = /note="Description of Artificial Sequence: Synthetic coding sequence"
  source 1..993: mol_type = other DNA
atggctgccagaaggtcccagaggaggagaggcaggagaggggaacccggaaccgccctgctggtgcctctggctctaggactgggcctggccttggcatgcttgggattacttttggcggttgtttcgctggggagccgggctagtcttagcgcccaggagccagcccaggaagaacttgtggccgaggaagaccaagatccgagtgaattgaaccctcagactgaggagtcacaggatcctgcaccattcctgaaccgccttgtccggccaagaaggagcgccccaaaaggccgtaagactagagcacgccgagccatcgcagcgcattacgaggttcaccccaggccgggccaggacggagctcaggccggtgtggatgggaccgtgtccggttgggaggaagcccgcatcaatagctcatctccactcaggtacaaccggcagatcggtgagttcatcgtcacacgggctggactctattacctgtattgccagtccagcgatgctcttgaggcgtgggaaaatggggagcgctctcggaagcgacgcgcagtgttgactcaaaaacaaaaaaagcagcactcagttctgcatctggtgcctatcaatgccactagcaaagacgactccgacgtgacggaggtaatgtggcagccggctcttcggagaggtcgtggccttcaagcccaggggtatggtgtgcgcatccaggacgccggcgtttatctattatattcccaagtgctttttcaggacgtcacgttcacgatgggccaagtagtctcaagagagggacagggacgccaggagactttgtttcgttgcattagaagtatgccctctcatccggacagggcatacaattcctgctactccgcgggagtgttccatcttcatcagggcgatatcctgagtgtcattattccccgtgcccgggccaagctgaacctttcaccacacggcacctttctggggtttgtcaaactgtag

SEQ ID NO: 5343 - DNA, 2253 bp, synthetic construct
  misc_feature 1..2253: note = source = /note="Description of Artificial Sequence: Synthetic coding sequence"
  source 1..2253: mol_type = other DNA
atggcgaagccacgactcctggtgctctattttgctttgatagtggttcctgcctgggttagttccattgtgcttactggaactagcgaacctcctgatgcacagacagtggctccagccgaggacgaaactctacagaatgaggccgataatcaagaaaacgtactgagccaactcttgggagattatgacaaagtcaaggcgatgtcggagggcagcgactgtcaatgtaagtgtgtggttagaccattaggacgggacgcttgtcagagaataaatgctggagcatcacggaaagaagatttttatacagtggagaccatcacaagtggcagctcctgtaaatgtgcttgcgtggccccccccagtgcactgaacccctgtgaaggtgattttcgattacaaaagctacgtgaagcagatagccaggacttgaaactctcgacaataatagacatgcttgagggagccttctatggccttgacctcctgaagcttcactccgtcactacaaagctggttggccgggtcgataaattggaggaggaagtgtctaagaacctgacaaaggaaaacgagcagatcaaggaggacatggaagagattcggacagaaatgaacaaaagaggtaaggaaaactgctcagaaaatatccttgattcaatgcctgacataaggtccgccctccagcgcgacgccgcagctgcctatgcccatccagagtacgaggaacgattcttgcaggaggagaccgtgtcccaacagattaattctatagagctccttcagacacgaccattggcattacctgaggtggttaaatcacaaagaccactgcaaaggcaggttcatctcagggggaggcccgctagccaacctacagtgatccgcggtatcacctattacaaggcaaaggtatccgaagaggaaaatgatatcgaagaacaacaagatgaattcttttcaggcgacaatggtgtggatcttctgatcgaggatcagctgcttcggcacaatggccttatgacatctgtgacgcgtcgaccagcagcaacgcggcagggccattcaacggccgttacttccgacctcaacgccagaaccgccccttggagcagcgcactgccacaaccttcaaccagcgatcccagtatcgcgaatcatgcatccgtgggcccgacgctgcagacaacgtctgtgtctcccgaccctacccgcgaatcagtactgcagccttcaccacaggtcccggcgacaactgtagcccatacggcgacccaacaaccagctgcacccgccccccccgccgtttccccaagggaggctctgatggaagcaatgcataccgtgcccgtaccccccaccacggtaagaaccgatagccttggtaaagacgcccctgccgggtggggaacaactcccgcctccccaactctgtcccccgaggaagaggatgacatcaggaatgtgattggccgctgcaaagacacactgagtaccatcaccggacccaccacacagaatacatacggtcgcaacgaaggcgcctggatgaaggaccccctcgccaaggatgagagaatttatgtaacaaattattattacgggaacacactcgtggagtttcggaatctggaaaactttaagcagggtcgatggtccaatagctacaagttgccgtactcatggattggcacgggccatgtggtgtataatggagctttttattataatcgggcgtttacaaggaacattatcaaatatgacctgaaacagagatacgtcgctgcctgggcaatgttgcatgatgtggcttacgaagaggccacaccctggcgatggcaaggccatagcgacgtcgactttgctgtggatgaaaatggcctttggcttatttatcccgcccttgacgacgagggtttttcccaggaggtgatcgtcctatcaaaactgaacgctgcagacttgtccacccagaaggagacgacgtggaggaccgggcttcggaggaacttctatggcaattgttttgtgatttgtggagtgttgtatgcggtcgacagctataaccagagaaacgctaatatcagctacgccttcgacacacataccaatactcagatcgtacctcggctgctgtttgaaaatgaatactcttatacgactcaaattgactacaaccccaaggatcgcctgctgtacgcttgggataatggccatcaggtcacataccatgtcatctttgcatactag

SEQ ID NO: 5344 - DNA, 678 bp, synthetic construct
  misc_feature 1..678: note = source = /note="Description of Artificial Sequence: Synthetic coding sequence"
  source 1..678: mol_type = other DNA
atgaaacttggctgcgtgctcatggcttgggccttgtatctttctctgggggtgctgtgggtggcccagatgcttctggccgcaggctgtcatgccgagctgttcccagccccgatacttcgggcggtgcctagtgccgaacctcaggcaggatcacctatgaccttgagttgccagaccaagctgccgctacagcgatcagcagctcgacttcttttttctttctataaggacgggagaatcgtgcagtcgcgcggcctctcgtcagagttccagatcccgaccgctagcgaggaccactctggttcttactggtgtgaagctgccacagaggataatcaggtgtggaaacagtcaccacagctggagatacgcgtgcaaggtgcttctagctccgcagccccaccaaccctgaaccccgccccccagaagtctgcagcaccgggcacagccccggaggaggccccaggtcccctgccgcctccccccaccccctcttccgaggaccccgggttttcctcccccctgggaatgcccgaccctcatctttatcaccagatggggctcttattaaagcatatgcaggatgtcagggtgctgttagggcacctgctgatggagctgagggaactgtcaggtcaccggaaacctgggaccacaaaggccacagccgagtag

SEQ ID NO: 5345 - DNA, 891 bp, synthetic construct
  misc_feature 1..891: note = source = /note="Description of Artificial Sequence: Synthetic coding sequence"
  source 1..891: mol_type = other DNA
atgtccagacaggagcctaagatgttcgtcctgctgtatgtgacaagtttcgctatatgtgctagtggacagcctagggggaaccagttaaagggcgagaactactccccgcgctatatctgctcaatcccaggactgcccggccctcctgggccgccaggggctaacggatcacctggaccccacggccgaatcgggttgccaggcagagacggacgtgatgggagaaagggcgagaaaggggagaaggggaccgccgggcttcgaggaaaaaccggtcccctcggcctggccggagaaaaaggagaccagggtgagactggcaaaaaaggccctatcggaccggagggcgagaaaggagaggtcggacctatcgggccacccggtcccaagggggatcgcggcgaacagggggacccagggctacctggtgtgtgtcgatgcggaagcatcgtcctaaagagcgcgttttccgtcggcataaccacctcttaccccgaggagagacttccaatcatttttaataaagtcctgttcaatgaaggtgaacactacaacccagccactgggaaattcatttgtgcctttccaggaatctattacttctcctacgacataaccttagctaacaagcacctagccatcggcctcgtgcacaatggccaataccgtattaaaacttttgacgccaataccggtaatcatgacgtggcctctggatctactgtaatatatctgcagccagaggatgaggtatggctggagatctttttcaccgatcaaaatggcctatttagcgaccctggttgggcagactcattgttcagtggttttcttttgtatgtggatactgactatctcgacagcatctctgaggatgacgaattgtag

SEQ ID NO: 5346 - DNA, 1275 bp, synthetic construct
  misc_feature 1..1275: note = source = /note="Description of Artificial Sequence: Synthetic coding sequence"
  source 1..1275: mol_type = other DNA
atggggtcccttgttctcaccctctgtgcactgttctgcctggccgcttaccttgtctcgggctcccctattatgaatctcgagcaatctcctctagaggaggatatgtctctgtttggcgacgtcttctccgaacaggatggagtggattttaataccttgctgcagtctatgaaggacgagttccttaaaacactcaatttatctgacatcccaacacaggactccgcaaaagtggaccccccggaatacatgttagaactgtataataaatttgctactgacagaacctccatgcctagcgccaatattattcggtccttcaagaacgaggacttgttctcccagccagtttccttcaatggcttacgtaagtacccactgctattcaatgtatccatacctcaccatgaagaagtgatcatggccgagttacgcctgtatactctggtgcaacgtgatcgcatgatctacgacggcgtcgataggaagattaccatatttgaagtcttggagtccaagggggataatgagggcgaacggaatatgctggtgctggtatcaggggaaatttacggaactaattcagagtgggagaccttcgacgtcacggatgcaattcgcagatggcaaaagtcaggtagctccacgcaccagttggaggtccacattgaaagtaaacacgacgaggccgaggacgcgagctctgggagactggaaatcgacacatccgcccagaacaagcacaaccccctgctgattgtcttctcagatgatcagtcctcagacaaagaacgcaaagaggagttgaacgagatgatttctcacgagcagctccctgagctggacaacctggggttagatagtttttcttcaggaccaggcgaggaagcgctcttgcagatgaggtcgaatatcatatacgacagtacagcaaggataaggagaaatgctaaaggcaactattgcaagcgtacccccctttacattgacttcaaagagataggttgggatagctggattatcgcccctccggggtacgaggcgtacgaatgccggggggtatgcaattaccccctggctgagcacctcacccccacaaaacacgcgatcatacaggccctcgttcacttgaagaacagtcaaaaagctagtaaagcgtgctgcgtccctacaaagctcgaacccatttcaattctatatctcgacaaaggagttgtcacctacaagtttaagtatgaggggatggcagtgtctgaatgcgggtgtcgatag

SEQ ID NO: 5347 - DNA, 381 bp, synthetic construct
  misc_feature 1..381: note = source = /note="Description of Artificial Sequence: Synthetic coding sequence"
  source 1..381: mol_type = other DNA
atgcacttgtctcagctcctagcctgtgcccttctgctgaccctcttgtcactgcgacccagtgaggctaagcctggcgccccaccaaaggtccctcgtaccccacctgcggaggagctagccgagcctcaggccgccggcggtggacagaagaagggagataaggccccaggaggcggtggagcaaacttgaagggcgatcgctctcggctattgagagatctgagggtggatacaaagtcccgggcggcttgggcacgcctgctccaagagcaccccaatgccaggaagtacaagggtgcaaacaagaagggcctcagcaaggggtgctttgggctcaagctggataggattgggagcatgtccggtctgggttgttag

SEQ ID NO: 5348 - DNA, 423 bp, synthetic construct
  misc_feature 1..423: note = source = /note="Description of Artificial Sequence: Synthetic coding sequence"
  source 1..423: mol_type = other DNA
atgcgatcacctcgtatgagagtgtgcgctaagtcagttttactgtctcactggctcttcctggcctacgttctgatggtgtgttgtaaactgatgtcagcaagcagtcagcatctgcggggacatgccggccaccatcagatcaaacaggggacctgcgaagttgtggctgtccatcggtgctgcaacaagaatcgtatcgaggaaagatcccagactgtgaagtgttcatgcttccccggccaggtggccggcacgacgcgggctcagccaagttgcgtggaggctagcatcgttatccaaaagtggtggtgtcacatgaatccatgtctggagggcgaggactgtaaggttttgcctgattactccggctggtcctgcagtagcggcaacaaagtaaagactacaaaggttactaggtag

SEQ ID NO: 5349 - DNA, 1332 bp, synthetic construct
  misc_feature 1..1332: note = source = /note="Description of Artificial Sequence: Synthetic coding sequence"
  source 1..1332: mol_type = other DNA
atgctcatgctgtttgtttttggcgttctgctccatgaagtaagcttgtctggccagaatgaggcacctccaaacacgcacagcatccccggggagccactctacaattatgcctccatcagactacctgaggagcatatccccttcttcttacataacaacaggcatatcgctactgtgtgcagaaaggactccctatgtccatataaaaagcacctggagaagctgaaatactgctgggggtatgaaaagtcttgtaaaccagaatttaggtttgggtatccagtatgttcgtacgtggacatgggctggactgacactcttgaatccgcagaggacatcttctggaagcaggctgatttcggctacgcaagggaacgcctggaggagatgcatgtgctgtgccagcctaaggagacatccgacagctctctggtttgcagcaggtatctgcaatattgccgcgccaccaacctttatctcgacctgcgcaacatcaagaggaatcacgaccgcttcaaagaagactttttccagtcaggtgagatcgggggacattgtaaattggatatcagaactttgacttctgaaggccaacggaagtctccacttcagtcttggttcgctgagctgcagtcatatacacagcttaacttccggcctattgaggatgcaaagtgcgacattgttattgagaagcctacctacttcatgaagctagacgccggagttaacatgtaccaccatttttgtgacttcattaacctgtacattacccagcatgtcaataatagtttttccactgatgtttacattgtgatgtgggacaccgacgggaagataagagtgacgatcctggccaggagcactgaataccggaagattctgaaccaaaatgagctggtcaacgcgctcaaaacagtcagcacgtttgaggtacagatcgttgactacaaataccgagaactaggcttcctggaccagctgcggattacgcataacaccgatatcttcatcggcatgcacggagccggtctcacacatctcctgttcctgcctgattgggccgccgtcttcgagctatacaattgcgaggacgaaaggtgctatctggatctggccagactaaggggtgtccactacataacctggcgcaggcaaaataaggtgttccctcaggataaagggcaccacccaactctcggcgagcacccaaaatttaccaattattcctttgacgtggaggagttcatgtatctggtgttacaggcagcagatcatgtgcttcagcaccccaagtggcctttcaagaagaaacatgatgagttatag

SEQ ID NO: 5350 - DNA, 336 bp, synthetic construct
  misc_feature 1..336: note = source = /note="Description of Artificial Sequence: Synthetic coding sequence"
  source 1..336: mol_type = other DNA
atgggtccctcctcctgcctgctgctaatactgatccccctgctccagctgataaatcccgggtctacccagtgcagcctggattctgttatggacaaaaagatcaaagacgtgcttaactcacttgagtactcacccagcccaataagcaagaagttgagttgcgcatctgtcaagagccagggtcggccttcgtcctgtccagcaggaatggctgttaccgggtgcgcctgtgggtacgggtgcggcagctgggacgtccaactagaaactacgtgccactgtcagtgctcagtggttgactggacaaccgcgaggtgctgtcacctaacctag

SEQ ID NO: 5351 - DNA, 1965 bp, synthetic construct
  misc_feature 1..1965: note = source = /note="Description of Artificial Sequence: Synthetic coding sequence"
  source 1..1965: mol_type = other DNA
atggcacccaaaaaactgtcctgcttgagatccctgctgttacctctgagccttaccctgctcctgccacaggcagacacacggtcattcgtcgtggatcgcggccacgatcgattcttgcttgacggagctccctttagatatgtctcaggtagcctgcattacttccgcgtgcctcgtgtgctatgggcggaccggctgcttaagatgcggtggagcggactgaacgcaattcagttttatgtcccttggaattaccatgagcctcagccaggcgtttacaactttaatggcagtagagatctgatcgcctttctcaacgaagcggccctggccaatttacttgtgatacttaggcccggaccctatatctgtgctgaatgggagatggggggtctcccaagttggctgctcagaaaaccggagatccatctgcggacctccgaccctgatttcctggcggctgtcgatagttggtttaaagtcctgctcccgaaaatttacccttggctctaccacaacggcgggaacattattagcatccaggtggaaaatgagtatggctcgtacagggcttgtgattttagttacatgcggcacctggccggcctcttccgagctctgttaggagaaaaaatccttttatttactaccgacggaccagagggcctcaaatgcggatcgcttcggggactctacaccaccgttgacttcgggcctgccgacaatatgacaaaaatctttacattgcttaggaagtacgagccacacggccccctcgtgaactcagaatattatacgggctggttggattattggggccagaaccacagcacccgttccgtctccgcggtaaccaaggggcttgagaatatgctgaaacttggagcatctgttaatatgtacatgttccacggcggcacgaacttcgggtactggaatggcgctgacaagaaagggcgattcctgcctatcaccacgagctacgactacgacgctccaattagcgaggccggagacccgacccccaaactgtttgctttacgggatgtcatctctaaattccaggaagtaccactaggccctcttcctccaccttcccccaagatgatgctgggaccggtgactctccacctggtgggacatctcctggcgttccttgatctgttgtgccccagggggccaatccatagtatcttgccgatgacattcgaggcagtcaagcaggaccacggattcatgctttaccgaacctacatgacacacaccattttcgagccaactcccttctgggtccccaataacggcgtccacgatcgggcttatgtgatggttgacggcgtttttcagggggtggtggagaggaatatgcgagataaactttttctgacgggcaaactgggcagtaagttagatattctggttgagaacatgggccggttgtcgttcggaagtaacagttctgacttcaaaggacttctgaaacccccaattctgggtcaaacaatcctgacacagtggatgatgtttcccctcaaaatagataacttggtaaagtggtggttccctctacaactccctaagtggccctatccacaggccccctctggtcctactttttatagcaaaacctttccgatactcggtagcgttggggatacatttctatatcttcccggatggactaagggccaggtatggataaacggcttcaacttaggcagatactggaccaaacaggggccacagcagactttgtatgtgccgaggttcctactgttcccacgtggggcactgaataaaattacactgctggaactcgaggacgttcctttgcagcctcaggtccagttcttagacaagccaatcttgaatagcacttccactctgcatagaacccacatcaactcactgtcggcagacactcttagcgctagtgagcctatggaacttagcggacactag

SEQ ID NO: 5352 - DNA, 2502 bp, synthetic construct
  misc_feature 1..2502: note = source = /note="Description of Artificial Sequence: Synthetic coding sequence"
  source 1..2502: mol_type = other DNA
atgaacatggaaattgggcacccccatgagggaaaggacgatcttggcgacaagcgcgtaattatggggactaagttcccaatggagcttggcattagagtcgggctgggaaaggaggactcacggtgtggcgaatcaccagtggtttcgaataaatgtgagggccggatggctcctcctgagacaaaattcccactgagcaagggactggagatgggacttgaacggcaaaatatttcaaggacagtgatgcagcgcgggagtctcggtgtggactctgtgagtgcgtctcagggcaccaagccatcgctactgccaggtaggatgggccttgagaatgaatcgctgctggccggatacactcacgaacgtataattcagcctccactcgggcgagtatgtgggtcgtcacaggctgctggttcccgcagggcaccgctagcgtcagggcctgagggggttgaggagctggttggtaagcccgcctttgtcatggaacccagacaggagatggagaaggaatccacatgtgtgctgatgaagcccaacacagagatcaaactgcctgtagaggtggatattgggctgacacaggctgagggaccagatgaaactaaaaacactgaaccgcaaatgggattggtcatagagccccctcagtgccagtttgcccagcagcatgagcagagaaaggaagcaggaaatatcgagtccggagtcgagcctccagataggattagacctatttatagtggtaaattctttgacaggacgccatgctggccttccgcgggaaaagtgattccagtcgggtatcgagtggcaacgtgcctgacagagaagctacccagacttattactccccccgaagcaaaaaaatattttaattttaggtatcctcccgccggggttgagcgcgtgttctatggacgtgcgaacgacccgcagattgccccctaccttacccacggcatccgttccaaaatcagtgtgctggctaatactctgatcaatccacagccaattaccacatttcaacagaagattaaagataagaaggaatcaatctacctctcgaatcggagagctcctttgggtaaatcccacgatcaggctccaggcctgcctaaagggatggacacgaccaatacaacatttggcaccgcggttatcaaggagtacagcgccaaggacgtagtaaatccccctaagagctatgaggaagtgtttaaagaaggaaacgagggacacgatctgtacgtagtctcacacaacgactactacgccggcgaggctaaaaaccgtaagtacaaccctagcagcttccacaggtgttccgtgtacggtgtgcctaccccgcacttcaacgacggccgagccatggccaagtccctctattggttacatgagctgcagatgaaaagaggagccaagtttgtgagtaaacgcgctgacgacttcaaggaaaagttccagcacaagctgggtagggtactggaccccatagcagagaccatgaacgttcccccagattgcacatttggggcttgtctgcggccagaagagtacggagtgggagatctgatccacaatagactgcctgacgagtatctgcggggcaaagataggcaaagagccctcattgctgctgtgcgccatcatctgaagaaagtgaattaccaaaagtttgacactctgttagcagcgttcagacactacgacaagaaaggcgatgggatgatcgataaagacgagttgcaggaagcttgtgaccaggcgaacttgagtctggatgacaaactgctcgaccaactgtttgactactgcgacgtagacaacgatgggtttatcaattatcttgaatttgctaactttcttaactggaaggataagatgctcctgaaggagtacgaggagagagttattattaagggaagaaagcccgactgcgtcaacccgaccgaagcaaacgtcgaagaacctgaacagacactgctgattaaacctgaggacattgtcttgaaggaagcaggcagtactgagaagactctgcgaactctgctcagacctagcgataaagtgagcaattactataagacaaccagctccgagattaatgcaatcgtgggggcaatacctagcacctgttatcctatatgcggggtgccaacaatccggagtgacatcccagcgccgagaattaggcgaataagtgatagaaccaactacggcgaggaaggaagtgcctacagccttttgtaccctaccatctttgctcggaaaggcgtattcgaacgagattttttcaagacacggtctaaagaggagatcgccgagatcctgtgtaacattggagtcaagctaagcgatgaggagttcgaaaacgtgtggaatctggcatctaagaaacatcatagaggcgaggtgtgcgtagagaatatccgcaatgtgctggatgagctgaggcatgccgatagaatcaaatgcaaaacgctgatgtag

SEQ ID NO: 5353 - DNA, 2004 bp, synthetic construct
  misc_feature 1..2004: note = source = /note="Description of Artificial Sequence: Synthetic coding sequence"
  source 1..2004: mol_type = other DNA
atgggcagctctcggctcgccgccttgcttctgcctctgctcctaatcgtgatcgacctttctgacagcgccggaatcgggttccggcatttgccccattggaatacacgttgccctcttgcttctcacaccgatgattccttcaccggttcctccgcatacattccttgcaggacatggtgggcactcttcagcaccaagccttggtgcgtgagggtttggcattgcagtcggtgcctctgccagcacctgctctccgggggctcgggcctacagagagggttgtttcatctgcttgtccagaaatctaagaagtcatcgacattcaaattttaccgaagacacaaaatgccggcgcccgcccagcggaagttattacccaggaggcacctgtccgagaaatcccaccatatttctatccccagcccggatatctcacacaagggactcagaagcaagaggacacagccatcagaccccgaaacttgggagtccctgccccgactggattctcagcgccacgggggccctgagttctcttttgatctccttcctgaggctcgcgctattcgggtgacaatatcctctgggcctgaggtgtccgtgcggctgtgtcatcaatgggcgctggaatgtgaggagctgtctagcccctatgacgttcaaaagatcgtgagcggcggacacactgttgagcttccatatgaatttttactgccatgtctatgcatcgaggcctcttacctccaggaagataccgttaggcgaaaaaaatgcccctttcagagctggcccgaggcttatgggtccgatttttggaagagtgtacactttaccgattactcacagcatactcagatggttatggcgctcaccctccgttgcccactcaagctggaggcggctctctgtcagaggcacgattggcatactttgtgtaaagacctgcctaacgctactgctcgcgagagcgacgggtggtacgtcctcgagaaagtcgacctgcatcctcagctgtgcttcaagttctcattcggtaactccagtcacgtcgaatgcccacatcaaacaggctcactgactagttggaacgtgtcaatggacacccaagctcagcagttgatcttacatttctcaagtagaatgcacgcgactttctcagcggcgtggagcctgccgggcctgggccaggataccttggttccgcccgtctacaccgtttcccaggctagaggcagctcaccagtgtccctagacctgattatcccatttctgcgccctgggtgctgtgtcctagtatggcgttctgatgtgcagttcgcctggaagcacctgttatgccctgacgtgagttaccggcacttggggctactgattctggccctcctggcattattgacactgctcggtgtcgtgcttgctcttacatgcaggaggccccaaagcggaccgggccccgcaagacctgtactgctcctccacgccgccgattccgaagcacagcggcgactggtgggggcattggccgagcttctgcgcgcagcgcttgggggtggccgagatgttatcgtggatctctgggagggccgacacgtggcgcgggtaggacccctaccctggctgtgggcagctaggaccagggttgccagggagcagggtacagtgcttctgctgtggtctggagccgacctcaggcccgtgtcaggccccgatccacgcgccgcacctctgttagctctcctccacgcggccccaagaccgctgctgctcctggcctatttttcgagactttgtgctaagggtgatatcccaccgccgctgcgagcgttaccgcgctacaggttactccgcgatctgcccaggctgctccgggccctagatgcccgaccattcgctgaagccaccagttgggggagattaggcgcacggcagcgccgccagagtagattggaactatgctctagactagagagggaggcggccagactcgccgacctcggctag

SEQ ID NO: 5354 - DNA, 609 bp, synthetic construct
  misc_feature 1..609: note = source = /note="Description of Artificial Sequence: Synthetic coding sequence"
  source 1..609: mol_type = other DNA
atggagctgtggggagcgtacctgctgctttgcctgttttctctcttgacacaggtgacgacggagcccccaacacagaagcccaaaaaaatcgtcaatgctaaaaaggacgtagtgaacacaaaaatgtttgaggagttgaaatcaagacttgatacactggcccaggaagtggccttactcaaagagcaacaggctctgcaaaccgtctgtctcaaaggcaccaaggtgcacatgaaatgctttctggcttttacccagaccaagacgtttcatgaggcctcagaagattgtatctcaaggggaggaacgctgggcacccctcagacaggaagtgagaacgacgctctttatgagtatctgcggcagtccgtcggaaacgaggctgagatctggcttggattgaatgacatggccgcagagggcacctgggtcgacatgactggcgctcgcatcgcctacaaaaattgggagactgaaataaccgcacagccagacggagggaaaaccgaaaattgcgccgtcctgtctggagcggcgaacgggaaatggtttgacaagagatgtcgagaccagttaccctatatttgtcagtttggaatcgtgtag

SEQ ID NO: 5355 - DNA, 1839 bp, synthetic construct
  misc_feature 1..1839: note = source = /note="Description of Artificial Sequence: Synthetic coding sequence"
  source 1..1839: mol_type = other DNA
atgctggaaggcttgggctcgccagcttctcctcgtgccgcagcgagtgcttctgtggccggttcttccggaccagccgcatgctccccgcccagttcctccgccccaagatccccggagtcacctgccccaaggagaggtggcgtacgagcctccgttccacagaagttggctgaaatgttgtcatctcagtacggcctcatcgttttcgtggcaggcttacttttgctcctggcttgggcagtacacgctgctggagtgagcaagagtgatcttctctgcttcttaacagctctcatgctgctccaactcctctggatgctgtggtatgtgggcagaagctcggcgcacagacggttgtttcggcttaaggacactcatgccggagccgggtggcttcggggatccatcactttgttcgctgtcataaccgtcatccttggctgtctgaaaatcggctatttcatcggattcagtgagtgtctctcggcaacagagggggtcttccctgtgacacattccgtacacacactgctccaggtttactttctgtgggggcacgccaaggatataatccaaagctttaaaactttagaaagattcggagttatccacagtgtgttcactaatctcctattgtgggcgaacggagtgttaaacgaatccaaacaccagcttaacgagcacaaggagaggctgataaccctgggtttcggtaacatcaccactgtgttagacgatcacacgccgcagtgtaattgtactccacctactttgtgcacagccattagccatggcatctactacttgtatcccttcaatattgaataccagatcctcgcttccacaatgttgtacgtcctatggaagaatattggccggaaggttgacagtcaccaacatcagaagatgcagttcaagtccgacggtgtcatggtcggagccgtgctgggactgactgtcctggccgctacaattgccgtggtagttgtctacctcatccacatcgggcggagtaaaactaagagcgagagtgcactgataatgttctacctgtatgccatcactctcctcatgcttatgggagccgccgggctggccggaataagaatctaccgcatcgacgaaaaatccctagatgagagcaagaacccggcccgtaaactcgattctgatctcctggtcggcacagcgtctggcagttggctgatctcatggggctctatccttgcaatcctctgcgcagaaggccacccacgctatacatggtataacctcccttattccatccttgcgattgtcgaaaaatacattcagaacctgttcatttttgagtctattcatcgagaaccagaaaagctttccgaggacatccagacgctgcgcgttgtcaccgtttgtaacggcaatacaatgccgcttgcatcaagttgtccgaagtctggaggagttgcccgtgacgtcgctccacaggggaaagacatgcctcccgccgccaatggaaacgtatgtatgcgtgagtctcacgacaaggaagaagagaaacaggaagaaagctcttggggtggatctccatcacccgtacgtttaccaagatttctacagggaaatgccaagcggaaggtgctacggaacatcgccgctttcctctttctgtgtaacatctctttatggatcccacctgccttcggctgtagacccgagtatgataacggccttgaagaaattgtcttcggcttcgaaccttggataatcgtcgttaacctggctatgccattcagtattttttaccgcatgcacgcagccgcatcgcttttcgaggtgtactgcaagatctag

SEQ ID NO: 5356 - DNA, 786 bp, synthetic construct
  misc_feature 1..786: note = source = /note="Description of Artificial Sequence: Synthetic coding sequence"
  source 1..786: mol_type = other DNA
atggaacttctgcaggtgactatcctgtttctgttgccatccatttgttcctctaatagcacaggtgtgctggaagccgcaaataattccctcgtggttacgactaccaaaccctctattacaactcccaacaccgagtccttgcaaaagaacgttgtgactcccactacgggaacaactccaaagggaacaattaccaatgagctgcttaagatgtctttgatgagcacggctaccttcttgacaagcaaggatgagggtctgaaggccactacgacagatgtgagaaaaaacgactctatcatttccaacgtcaccgttacatccgtgactttgcccaacgccgtcagtactctgcaaagttctaagccaaagacggaaactcagagttccattaagacaaccgaaatcccagggagcgtcctgcagcctgacgcgtcgccctccaagacggggacgttgaccagcatcccagtgactattcctgagaatacgtcacagtctcaagtcattgggacagaggggggtaaaaatgcttctaccagtgcgaccagtcgtagctactcctctatcatcctgcctgtggtcatcgcgttgatcgttataacacttagtgtgttcgtgcttgtgggactctataggatgtgttggaaggccgaccccggtacacctgaaaacggaaatgaccagccccagtcagacaaggaatccgtgaagcttctgacagtcaaaactatatcacacgaaagtggggagcactcggcccagggaaagaccaaaaattag

SEQ ID NO: 5357 - DNA, 6408 bp, synthetic construct
  misc_feature 1..6408: note = source = /note="Description of Artificial Sequence: Synthetic coding sequence"
  source 1..6408: mol_type = other DNA
atgcctgctctgggacctgctctcctccaggcattgtgggccggctgggtcttgacgctccagccccttccaccaaccgccttcactccaaatggaacctacctgcaacatttggctcgcgaccctactagtgggacattgtatctcggagccacaaattttctgtttcagctaagccccggcttacaactggaagcaaccgtgtcaacagggcccgtattggatagccgtgactgtctgcctcccgtcatgccagacgagtgtcctcaggctcaacctaccaacaatccaaaccagctcttactcgtctctcccggagctttggtggtttgtggaagcgtgcatcaaggggtgtgcgaacagagaagactgggccagctggagcaactcctgctgcgaccggagcggcctggcgatacccagtatgtggccgctaatgatcccgctgtcagcactgtgggattggttgcccaaggattggccggcgaaccactgcttttcgtcggccgagggtacaccagtagaggggtgggagggggcatccccccaattacgactagggcactgtggccccctgacccacaggctgcatttagctacgaggaaacggccaagctggcagtcggacgactgtcagagtatagccaccatttcgtcagcgcattcgctcggggcgcctccgcctatttcttgttcttgagacgggacttgcaggcccaatcccgggctttccgagcttatgtgtccagggtttgccttagagaccaacactactattcctacgtggaactgccccttgcctgcgagggcggcaggtacggcctgattcaggcagctgctgtagccacttcccgcgaggtggcgcatggagaggtgctctttgccgctttttcgtccgccgccccccccaccgtgggtcgcccaccaagcgccgcagctggggcctctggggccagcgcgttatgcgctttcccactggatgaggtcgataggcttgcaaataggactagagacgcatgttatacccgagaagggcgtgctgaagatggtactgaagttgcttacatcgaatatgatgtaaatagcgattgtgcccagttgcccgtggataccctggatgcttacccatgcggctcagaccatacaccctcacctatggcctcccgagttccgctagaagccacacccattctcgaatggccgggtattcagctgactgctgtcgccgtaactatggaagacggacacacgatagccttcttaggcgactcacaggggcagttgcatcgggtttacctcggaccaggtagcgacggccacccctactccacccagagtattcagcaagggagtgccgtgtctcgggacctcacttttgatggcaccttcgagcacctgtacgtcatgactcaatccaccctgctgaaggtgcccgtagcctcttgtgcccagcacttggattgtgcctcctgtttggcccatagggatccttattgtggctggtgtgtcttgctcggtaggtgctcgagacgatccgaatgctcacgaggacaaggaccagagcagtggttatggagttttcaacctgagctgggatgcctgcaggttgctgcaatgagcccagccaacatcagccgcgaggagacaagagaagtgtttctcagcgtgcccgatcttccccctctgtggccaggcgaaagctatagttgtcactttggcgaacatcagagcccggcattactgaccgggtccggggtgatgtgccccagtccagatccatccgaagcccccgtcctcccaaggggcgctgactacgtttctgtatccgtagaactccggtttggcgctgtggtgattgcgaagacgagtctttcattctatgattgcgtcgctgtgactgagcttcgccctagtgcacagtgtcaggcctgtgtgagtagcaggtggggatgtaactggtgtgtctggcagcacttgtgcacccacaaagcaagctgcgatgcagggcccatggttgctagccaccagtctcccttggtgtcacccgatccccctgctcggggcggaccctcccctagcccacccacagcccctaaggcactggccacacccgctcccgataccctccctgttgagccaggagcgccttccactgccaccgcttccgatatctcaccaggcgccagcccctctctcttgtcgccatggggcccctgggcggggagtggcagtatatccagcccaggatccacaggctcacccctgcatgaggaaccgagcccgcctagtcctcagaatggccctggcaccgctgttcccgctccaaccgactttcgcccgtctgctacccccgaggacctccttgcttctccattgtctccttctgaggtcgccgctgtgccacccgcggaccccggcccggaggctctgcatcctactgtgcccttagatctgccaccagccacagttccagcaacgactttccctggggcaatgggctcagtgaagccagcacttgactggctgacccgcgaggggggggaattgcctgaggcggatgagtggaccggcggggacgcccccgccttttccaccagtacactgctatctggcgatggtgacagcgcagaactcgaaggcccccccgcccctctgatcctgccctctagccttgactaccagtatgatacgccaggcctgtgggaattagaggaagctactctaggcgcttcctcctgcccttgcgttgagtcagtgcaggggagcactcttatgccagtgcacgttgagcgggaaattcgattgctcggccggaacctgcacctgttccaggacggtcctggtgataatgagtgcgtaatggaactcgagggcctggaagtcgtcgtagaggctcgagtggagtgtgaacccccacccgacacccagtgccacgtaacatgtcagcaacaccaattgagctacgaggcactgcagccagaactaagggtcgggctctttttgcgtcgcgctgggcgattgagggtggattccgcagagggtctgcacgtggttttatatgattgctctgtgggacatggagattgtagcaggtgccagacagctatgcctcaatacggatgcgtgtggtgcgagggcgaaaggccccgttgtgtcactcgagaagcgtgtggagaagccgaagctgtagccactcagtgtcccgccccactgatccactccgtagagccattaaccggccccgtggacgggggaactcgcgttacaatacgaggcagcaacctgggacagcatgtgcaggacgtcttaggcatggttacggtcgccggcgtgccctgtgccgtcgacgctcaggagtacgaggtgtcatcttctctcgtttgtattacaggcgctagtggcgaggaagtggccggtgccacagccgtggaggtgcccggcagaggcagaggtgtgtccgaacatgacttcgcctaccaggaccctaaggtgcatagcatttttccggctcgagggccaagagccggaggtacacgactgacactgaatgggagtaagttgcttacaggacgtctcgaagatatccgcgtggtcgtgggggatcaaccttgccatcttctccctgaacagcagtccgaacagctgagatgcgagacgtcccctcgtccaaccccagccacactgccagtcgccgtgtggttcggcgcgactgagaggagactgcagcgaggccagttcaagtatacactcgatccgaacattaccagtgcgggacctaccaaatcatttctcagtggcgggcgtgaaatttgtgttcgcggacagaacctcgacgtggtccagacgccacgaattcgagttaccgtggtgtcacggatgttgcaaccctcacaaggcctcggccggcgtcgtagggttgtacctgaaacagcgtgctccctaggacccagctgctctagtcagcaattcgaagaaccctgtcacgtgaattcaagccagctgattacgtgccgcacccccgccttgccgggcctgccagaggatccttgggtgcgggtagaattcatcctcgataaccttgtattcgatttcgccactctgaatcccacccccttctcatatgaggctgatccgacactccaaccactgaatccggaggaccctacgatgcctttccgccacaagcccggctcggtgttctctgtcgaaggagagaacctcgacttagccatgtccaaggaagaggttgtggctatgattggtgatgggccctgtgtcgtgaaaacgctcacacgccatcatctatattgcgaaccccccgtcgagcaaccattacctagacatcatgccctgagggaggctccagattcccttcccgaattcaccgttcagatgggaaatttacggttcagcctgggacacgttcaatatgatggggagagccctggagctttcccagtggccgcccaggttgggctcggggtaggcactagcctcctggcactcggtgtgatcattatcgtgctcatgtaccgcaggaagtctaagcaggctctgcgcgactataagaaagtgcagattcagctcgagaacctcgaaagctctgttagggatcgctgtaaaaaagaatttactgatttaatgaccgagatgaccgatctgacgtccgatcttctcggtagcggcattccgttcctagattataaagtgtatgcagagaggatcttctttcccgggcaccgtgagagcccattacatcgggatttgggggtacctgagagtagacggcccactgtcgaacaaggactgggacagttaagcaacttattgaattctaagctcttcctgactaagtttatacacactctggagtcccagagaacatttagcgcaagagacagggcctatgtggcttccctactgacggtcgctttacatggaaagctggaatattttaccgacattctgcgaacgttactgtccgatttagtggctcagtatgtggccaagaaccccaaattgatgctccgacgcaccgagactgtggtcgagaaactgctgacgaattggatgagtatttgcctgtacaccttcgtgcgcgacagtgtcggagagcccctgtatatgctattcagaggaatcaaacaccaagtggataagggcccagttgactctgtgaccggtaaagccaaatacactctgaatgataaccgtctgctcagagaagacgtagaataccgaccactgaccctcaatgccttgttagctgtggggccaggggccggtgaggcccagggagtgcctgtgaaggtccttgactgtgacaccatttctcaggctaaggagaaaatgctagaccagctgtataagggcgtgcccctgactcagcgaccagacccccggacattggacgtggagtggagatcaggagttgcagggcatctcattctgtccgacgaggacgtgacgtccgaagtccagggtctctggcggaggctaaacacactccagcactataaagtccccgacggagcgacagtggcgctggtcccgtgtctgaccaagcacgtgttgcgcgagaaccaagattacgttccaggtgagagaaccccaatgctggaggatgtagatgaggggggaatcaggccatggcacttggtgaagccttccgacgaacctgaaccccctaggcctagaagaggctcgctgcggggaggagagagagaacgagctaaagccattccagagatctatctcacgagactgttgtctatgaagggtaccctgcaaaagttcgtcgacgacctctttcaggtaattctgtccacctccagacctgttccccttgctgtgaagtattttttcgatctgcttgatgagcaggcacaacagcacggcatatctgaccaggacacgattcatatttggaaaactaatagcctgcctctgaggttttggatcaacatcatcaaaaatccccagtttgtattcgacgtacagacatctgataacatggacgccgtcctgctcgtgatcgcacagaccttcatggatgcatgtactctggccgaccacaaactcggccgagattccccaataaacaaacttctgtacgctagagatattccacgatacaaacgcatggtcgaacggtattacgccgacattcggcaaactgtgcccgcttccgaccaggagatgaattctgtccttgccgagctcagctggaattatagcggcgacctgggcgcccgggtagctctgcatgaactttacaaatatataaataaatattacgaccagattattacagccctagaggaagatgggaccgcccaaaaaatgcagctgggctaccgcttacagcagattgccgccgctgtggaaaacaaagtaactgacctctag

SEQ ID NO: 5358 - DNA, 297 bp, synthetic construct
  misc_feature 1..297: note = source = /note="Description of Artificial Sequence: Synthetic coding sequence"
  source 1..297: mol_type = other DNA
atgaagctaatggtgctggttttcaccattgggctgactttgcttctgggggtccaggccatgcccgccaaccggctatcttgctatcggaagatccttaaagatcacaattgccacaacttaccagagggggtagctgacctcacccagatagatgtgaatgtccaagaccacttttgggatggaaaggggtgtgagatgatctgctactgcaatttctcggagctgctctgttgccccaaagatgtgttcttcgggccaaaaatcagctttgtgatcccctgcaacaatcaatag

SEQ ID NO: 5359 - DNA, 1443 bp, synthetic construct
  misc_feature 1..1443: note = source = /note="Description of Artificial Sequence: Synthetic coding sequence"
  source 1..1443: mol_type = other DNA
atgaagcgcagcgttgctgtttggttgcttgtcggcctgagcctcggcgtgcctcagtttggcaagggagatatatgtgatccgaacccatgcgaaaacggtgggatatgtttgccaggccttgccgacggaagtttttcctgtgagtgcccagacggctttacagaccctaactgttcctccgtagttgaggtggcctcagatgaggaggagccgacctctgccggcccttgcactccgaacccatgtcacaacgggggtacatgtgagatttctgaggcctatcggggagacacctttattgggtacgtctgcaagtgccccagaggctttaacgggattcactgtcagcataatattaacgaatgcgaggtggaaccctgtaagaatggcgggatctgtaccgaccttgtggctaattacagttgtgagtgccccggcgagttcatgggtaggaattgccagtataaatgttccggtcctttgggtatcgagggaggcatcattagtaaccaacagataacagcctccagtacacacagggcactatttgggctccagaaatggtacccgtactacgccaggctgaacaaaaagggtttgatcaacgcttggaccgctgccgagaatgaccggtggccatggatccagataaatttgcagaggaaaatgagggtcacaggcgttattacccaaggcgcgaaacggatcgggagccccgaatacatcaagtcatataagattgcgtactccaacgacgggaaaacctgggcaatgtataaggttaagggtacaaacgaggatatggtgtttagaggcaatattgataacaacaccccctatgcaaatagtttcaccccacctatcaaggcacaatatgtcagattatatccacaggtttgcaggcgccactgcaccctgcggatggagctcttgggatgcgaattatccggctgttcagaacctctggggatgaaatcgggccatatccaggattaccagatcacagctagcagtatttttagaactttgaacatggatatgtttacctgggaacctcggaaagcccggctggacaagcagggcaaagtcaatgcctggacatctggccacaatgaccaatctcagtggctacaagtggacctcctcgtccctaccaaggtgaccggaattatcactcaaggcgccaaggattttggccacgtccagtttgtcgggagttataaactagcctattcgaacgatggtgagcactggacagtataccaggatgagaagcagcgaaaggacaaagtctttcaaggcaacttcgacaatgatacccatcgcaagaacgtcatcgatccacccatttatgcacgtcatatccggatcttgccttggtcatggtatgggcgaatcacccttcggtcggaacttctgggatgtacagaagaagagtag

SEQ ID NO: 5360 - DNA, 1323 bp, synthetic construct
  misc_feature 1..1323: note = source = /note="Description of Artificial Sequence: Synthetic coding sequence"
  source 1..1323: mol_type = other DNA
atggcagtgaagcttggcacactcctgctggctctggccctgggtctggctcagccagcctcagcaagacggaagcttctagtgtttctgctggacggattccgcagcgactacatcagtgatgaggcactggagtccctccccgggttcaaggaaattgtttccaggggcgtcaaggtcgattacctcacaccagatttcccctcactctcttatccaaactactatacactgatgacagggcgacactgtgaagtccatcagatgattggcaactacatgtgggacccaactaccaacaaaagtttcgatattggtgtaaataaggacagcctgatgcccttgtggtggaatggcagcgagcccctttgggtcaccctcactaaagctaagcgaaaggtctatatgtactattggccgggttgtgaagtcgagatcctgggtgttagaccaacatactgtctcgaatacaaaaacgttcccaccgacattaatttcgcaaacgccgtctccgatgccctggatagctttaagtctggacgggctgatctcgctgccatatatcatgaacgtatcgacgtggagggccatcactatggcccagcatcacctcagcggaaggatgcactgaaggccgtggacaccgtgctaaaatacatgaccaagtggatccaggaacgcggtttgcaagaccgactcaatgttatcatcttttctgatcacggtatgaccgatatcttctggatggacaaggtaattgagctcaataaatatatatcgctgaacgaccttcaacaggtgaaggaccgaggcccggtcgtgtctctgtggcccgcccccggtaagcacagtgagatctacaacaaattaagcactgttgaacatatgacggtatatgagaaggaagcgattccatccaggttttattacaagaagggaaagttcgtctccccactgaccctggtggctgacgagggttggtttatcaccgagaaccgtgaaatgctcccattctggatgaatagcactggacgtagagagggttggcagcggggatggcacgggtacgacaatgaattaatggatatgaggggcatattcctggctttcggccccgatttcaagagtaactttcgcgctgcgccaatccggagcgtcgatgtctacaacgtgatgtgtaacgtggtcggaataacccccctgcccaataacggatcttggtcgcgcgtcatgtgcatgttgaaaggccgagccagcacagctcctccagtctggcccagccattgcgcgttggccctgattttgctgttcctgctggcatag

SEQ ID NO: 5361 - DNA, 351 bp, synthetic construct
  misc_feature 1..351: note = source = /note="Description of Artificial Sequence: Synthetic coding sequence"
  source 1..351: mol_type = other DNA
atggagtctagccgggtgaggctgctacctctcctgggagcagccctgctgctcatgctcccgcttctgggaacacgggctcaggaggacgctgagttacaaccccgggccttagacatttattccgcagtggatgacgcttcacatgagaaagagttaatcgaggctttgcaggaggtgctgaagaagctgaagtcaaaaagggtccccatctatgagaaaaagtacggtcaggtgcccatgtgcgacgcgggtgagcagtgtgctgtacgaaaaggggcacgcataggtaaactgtgcgactgcccacgcggtacttcttgtaatagctttttgctcaaatgtttatag

SEQ ID NO: 5362 - DNA, 1365 bp, synthetic construct
  misc_feature 1..1365: note = source = /note="Description of Artificial Sequence: Synthetic coding sequence"
  source 1..1365: mol_type = other DNA
atggccaggcctaataaatttttgctctggttttgctgctttgcctggctgtgctttcctattagtttgggctcacaggccagtggaggcgaagcacagattgctgcctcagccgagctggaatcaggcgccatgccctggagtctgcttcagcacattgatgagagagacagagcgggattgttacccgcactttttaaagtgcttagtgttggccgcggggggtcccctagactgcagcccgatagtcgcgccctccactacatgaaaaagctgtataagacctacgctaccaaggagggtattccaaagtcaaacaggtcacatctgtacaacacggtgcgcctcttcaccccgtgcacacgccataaacaggcacccggggaccaggtgaccggaatattgccctcagtggaactgttgtttaacctggatcgaatcactactgtggaacacctattaaaatctgttttgctatataatattaataactccgttagctttagtagtgctgtgaagtgcgtatgcaatctgatgattaaggagcctaagtccagctcacggacactgggacgcgcgccgtattctttcacgttcaatagccaatttgaattcggcaagaagcacaagtggattcagatcgacgtcacctcactgctgcagccccttgtcgcttcaaacaagcgatctattcatatgagtattaattttacttgcatgaaggaccagctggagcacccctcagcccagaatgggctgttcaatatgactcttgtgtctccttccctaatcctttacctgaatgacactagcgcccaggcttaccactcttggtatagtctgcattataagcggcgtccttcacaggggcccgaccaggaaaggtccctatcagcctaccctgttggggaggaagcggctgaggatggtaggtcatcacaccacagacaccggcgaggccaggaaacggtctctagcgagctgaaaaaaccacttggtcctgccagcttcaatctgagtgagtactttaggcagtttctgttgccacagaatgaatgcgaacttcacgattttaggttgagcttctcccagctgaagtgggacaattggatagttgctccccaccgatacaacccccggtattgcaagggagattgtccccgggccgtgggacatcggtatgggagcccagtgcacacaatggtccagaacattatctatgagaaactcgactccagcgtgcctcggccttcgtgcgtacctgctaagtactcaccgctgtctgtcctgactatcgaacctgatggatcgatcgcctacaaagagtatgaggatatgatcgcaactaagtgtacttgtaggtag

SEQ ID NO: 5363 - DNA, 234 bp, synthetic construct
  misc_feature 1..234: note = source = /note="Description of Artificial Sequence: Synthetic coding sequence"
  source 1..234: mol_type = other DNA
atgtggcacctgaagctttgtgctgttctgatgatcttccttctgctgttgggtcagatcgacggatcgccaattcctgaagtgagtagtgctaagcgcagacccaggaggatgacccctttttggcgaggggttagcttacgccccatcggtgcatcttgcagagacgactcagaatgcattacccgcctgtgcagaaaaaggaggtgtagtctgtctgtcgcccaggagtag

SEQ ID NO: 5364 - DNA, 912 bp, synthetic construct
  misc_feature 1..912: note = source = /note="Description of Artificial Sequence: Synthetic coding sequence"
  source 1..912: mol_type = other DNA
atgagcgagccccagccagatctcgagccaccccagcacggcctgtatatgctctttcttttggttctggtattctttctaatgggtctggtgggatttatgatatgccatgtgctcaaaaaaaaagggtaccgttgcagaacttccagaggttccgagcctgacgacgcccaactccagcctcccgaagacgatgacatgaatgaagacacagtcgaacggatcgtgagatgcattattcagaatgaggcaaatgccgaggccctgaaggaaatgctgggagatagtgaaggggaagggacggtgcaactcagcagcgttgatgccacttcgtccctgcaggatggcgcccctagccatcaccatacggttcacctcggctcagcggccccctgccttcactgtagtagaagcaagagaccacctctggtcaggcaggggcgtagcaaagaaggtaagagcaggcctagaacaggggagactacagtgttttcagtgggccggtttcgcgtaacccatatagagaaacgatatggactgcacgagcacagggacggctccccaacagatagatcttggggatctggcggtggccaagatccgggtggtgggcaaggcagtggtggagggcagcccaaggctggaatgccagccatggagcgcctccccccagagcgtccccaacctcaggtactggctagtcccccagtccaaaatggtgggctgcgcgacagctccctcaccccacgtgctctggaaggaaatccccgggcttctgccgagcccaccctgcgggccggcgggcgcggcccgagccctggcctgcctacacaggaggccaatggccagccgtccaaacctgatacttccgaccatcaggtgtccttgccacagggagcaggctctatgtag

SEQ ID NO: 5365 - DNA, 795 bp, synthetic construct
  misc_feature 1..795: note = source = /note="Description of Artificial Sequence: Synthetic coding sequence"
  source 1..795: mol_type = other DNA
atgaggacattgtggatggctctctgcgccttgtctcgactgtggcctggcgctcaggcgggctgtgccgaggccgggcgatgctgtcccggcagggatccagcatgcttcgctagggggtggcgacttgatagagtatacggcacatgcttctgcgaccaggcgtgcagatttactggagactgctgctttgactacgacagagcgtgcccagcccgcccatgtttcgtcggtgaatggtcgccttggagtggttgcgcggatcagtgcaagcctacaactcgagttcggaggaggtccgtgcagcaggagcctcagaatggaggtgccccatgtcctccactggaagagagagcaggatgtcttgagtactccaccccccagggccaggattgcgggcacacctacgtgcctgcctttattaccacaagtgcatttaataaggagcggactcgccaggccacgtcaccacattggtcaacccacaccgaggatgcggggtattgcatggagtttaagacggaatccctgaccccacactgcgctctggaaaactggcctcttactaggtggatgcagtacctcagggaggggtataccgtgtgcgtggactgtcagcccccagctatgaacagcgtgtccctcagatgctccggcgacggccttgactccgacggcaaccagactcttcattggcaagcgattggcaaccctaggtgtcaaggcacctggaagaaggttagacgtgtagatcagtgtagctgtccggccgtacatagcttcatcttcatctag

SEQ ID NO: 5366 - DNA, 312 bp, synthetic construct
  misc_feature 1..312: note = source = /note="Description of Artificial Sequence: Synthetic coding sequence"
  source 1..312: mol_type = other DNA
atgcgccagaggttactgccaagcgtcacgtccttacttctggtcgcgctgttgtttcccggaagcagtcaagcgcggcacgtgaatcattccgcaaccgaggccctcggagaactaagggagcgtgcacccgggcagggtaccaatggcttccagttgctccgccatgccgtgaagcgagaccttctgccgccccgcacacctccctatcaagtgcacatttcgcaccgtgaagcacgcggccccagctttagaatctgcgtggacttcttgggaccccgctgggcgagaggctgcagtacagggaactag

SEQ ID NO: 5367 - DNA, 3867 bp, synthetic construct
  misc_feature 1..3867: note = source = /note="Description of Artificial Sequence: Synthetic coding sequence"
  source 1..3867: mol_type = other DNA
atggcgtccgtcgcatgggccgttctgaaggtgcttctgttattgcccacccagacttggagcccagtcggagctggcaacccacctgattgcgatgcccctctcgcatctgctcttcctagaagttcgttctcaagctcctctgaactgtctagctcccacggacctggatttagccgtctgaacaggagagatggagcgggtgggtggaccccactggtatcaaacaaataccaatggctccaaattgatttaggagagcgaatggaggtgacagctgtagctacccaaggtggttatgggagttccgattgggtgaccagctacttgttaatgttcagcgatggggggcggaactggaaacagtatagaagggaagagagtatttggggtttccctggcaacaccaacgctgactccgtcgttcattacagacttcagcctcccttcgaggcccgtttcctacggttcctgccactcgcatggaacccgcggggtagaattgggatgcgaatcgaggtgtacgggtgcgcgtataagtcggaggtcgtctattttgacggacagtcagcgctgctctatagactcgataaaaaaccattgaagcccataagagatgtgatttcactaaaatttaaagccatgcagtctaatgggatattacttcatagggagggccagcatggaaaccatatcaccttagaactgatcaaaggcaaactcgtcttctttttaaatagcgggaacgccaaacttccaagtaccattgcccccgttacacttaccctcggttcattactagatgaccagcattggcacagcgtgttgattgaactgctggacactcaggtgaatttcacagtagacaagcacacccaccatttccaggctaagggggatagttcctacctggaccttaactttgaaattagctttggcggcattcccacacctggcagatcccgtgccttccgccgaaagtcattccatggttgtctggaaaacttatactacaacggcgtcgatgtgacagaactggccaagaaacacaagccacagatcctgatgatgggtaacgtgagctttagttgcccgcagcctcagaccgttcccgtgacgtttttgtccagccgatcatatctagctctgcctggcaatagcggggaggacaaagtgtctgtgacatttcagttcaggacttggaatagagcggggcacctcctgttcggtgaactgcgcagaggtagtgggagttttgtgctcttcctgaaagacggtaaactcaagctttcactgtttcagccagggcagagcccaaggaacgtgacagccggcgctggtctgaacgatggtcagtggcacagcgtgtcgttctctgctaagtggagccatatgaacgtggtggtagatgacgatactgcagtgcaacccctggtcgccgtgctgatcgattctggggacacttactacttcgggggctgtctggataactcttcaggcagtgggtgcaagagtcccctgggagggtttcagggttgcctcaggctcattacgatcggggacaaagctgtcgatccgattctggtgcagcagggggccctcggcagtttccgtgatctgcaaatcgacagttgcggtattacggacaggtgcttgccgtcctactgcgaacatggtggtgaatgcagccagtcatgggatacattcagttgcgattgtctgggaacgggctatacaggtgagacttgccattcatcactgtacgagcaatcatgcgaagctcataaacaccgagggaaccctagcggattgtattacattgacgccgacggctctggccctctaggcccgtttttagtatactgtaatatgactgctgatgccgcatggaccgtggtccagcacggaggtcccgacgccgtcacattacgaggagcaccttctgggcacccacggtctgctgtgtcatttgcctatgctgctggagcaggacagcttcgtagtgccgtcaacctggccgaacggtgtgagcagagactggctctgcgttgcggcactgccaggcggcccgattccagagatggaaccccgctttcctggtgggtggggcgaactaatgagactcacacatcatggggtggaagtttacctgacgctcagaaatgcacgtgtggactcgaaggaaattgcatcgatagccagtactactgcaactgcgatgccggccgcaacgagtggacttctgacactattgttctgtcacaaaaggaacacctgcccgttacccagatcgtgatgacggacgcgggtagaccacactctgaggctgcttataccctcggtcccttgctgtgtagaggcgaccagagcttctggaactcagcctcctttaacaccgaaactagctacctccacttccctgcttttcacggggaacttactgcggatgtgtgtttcttttttaaaaccaccgtgtcgtccggtgtgtttatggagaatctgggcatcaccgatttcataagaatcgaactgagagccccaacagaggtgaccttctcattcgacgtgggaaatggcccctgtgaggtgacagtgcagagtccgactcccttcaacgacaatcagtggcatcatgtccgggccgaacggaatgtgaagggcgcaagcctccaggtagatcaactgcctcagaaaatgcagcccgcccctgcggacgggcatgtgaggttacagctcaacagccagctgttcataggcggaacagccacacgccagcggggtttcctagggtgcataaggagcctgcagttgaacggagtggcgctggacttagaggaaagagccacagtcacacccggcgtcgagcccgggtgcgcaggccattgtagtacctacggacacttatgccgcaatggaggtcggtgtcgcgagaagcggcgcggagtgacttgtgactgcgcattcagcgcatatgatggacctttctgctcaaatgaaattagcgcgtactttgcgactgggtcttccatgacttaccacttccaggagcattatactctctccgaaaactccagcagccttgtaagcagtttgcacagggacgtcacgctgaccagagagatgattactctgtcattccgaactacgcggacacctagcctcctactttacgtgtcttctttctacgaggagtatctgtccgttattctcgctaacaacggctcgctgcagattcgctataagctggaccgtcatcaaaaccccgatgcttttacgttcgatttcaagaatatggctgacggacagctgcaccaggtaaaaatcaacagagaggaggccgtggtcatggtagaggttaatcaaagcacaaagaagcaggtcattctctcctccggaacagaatttaacgctgtcaaatccctcattctggggaaggttcttgaagctgctggggccgaccccgacactagacgggctgccacatccggtttcactgggtgtcttagcgccgtcagatttggaagggccgcacctctcaaggccgccctgcgtcccagcggcccctcaagagtaacagttagaggccatgtggcacctatggctagatgcgcagcgggcgccgccagcggaagccccgcaagggagttagcccctcggctggcaggcggggccgggcggagcggccccgctgacgagggcgagcctctcgtgaatgccgacagacgtgactcagcggtgattggcggggtgatcgccgtggttatttttattcttctatgtattacggcgattgctattagaatctatcagcaacgcaaactgagaaaagagaacgagtctaaagtgagcaagaaagaagagtgctag

SEQ ID NO: 5368 - DNA, 369 bp, synthetic construct
  misc_feature 1..369: note = source = /note="Description of Artificial Sequence: Synthetic coding sequence"
  source 1..369: mol_type = other DNA
atggtgccaggcccccctgagtccgtcgtacggttctttctgtggttctgttttctgctaccacctaccaggaaggcctcatgtgaccctagagacctcaaaagctgtaacaggccctgcgtgtggagcagacttctcaagcctaatagcagtttgtctaatcttgagaccgcatatttcccccagatactacgatttctccgaccctggtatttttctcgaagccatcttaactatcatcaaaaggccccagctcgctgggagtggctttactccatttataggaagggaacgaaggcacaaaggcgtaatgttcttagatctccttgtgctcctccgcagccttcctggccttgttccgtgatttag

SEQ ID NO: 5369 - DNA, 1887 bp, synthetic construct
  misc_feature 1..1887: note = source = /note="Description of Artificial Sequence: Synthetic coding sequence"
  source 1..1887: mol_type = other DNA
atggctcccagcgccgatcctggaatgagtcgaatgctaccctttttgcttctcctgtggttcctgcctattaccgagggtagccaacgagccgaacccatgttcactgctgtcaccaattccgttttgccaccagattacgactccaacccaacccagttaaattatggagtggcagttactgatgtggaccatgacggggactttgagattgtggtagcagggtacaacggacccaatctggtgttgaaatacgatagggcccagaaacggctagtcaatattgctgtggatgagcgcagctcaccatactatgctttaagggatcggcaagggaatgcgataggtgtcacagcttgtgatatcgatggcgatggcagagaagaaatctattttcttaacacgaataacgcattttccggtgtagccacttatactgacaaactattcaaattccggaacaacaggtgggaggacatcctctctgatgaagttaacgtggccaggggcgtggcaagcctatttgcaggacggtccgtggcttgcgtagaccgaaaaggaagcgggaggtacagtatctatatcgctaattacgcttatggtaatgtggggccagatgccctcattgaaatggaccctgaagcctctgatttaagtaggggcattctcgctttgcgtgatgtggctgccgaagctggagtaagtaagtatacagggggtaggggggtgtcggtggggcctatcttatcctcctcagccagtgacattttctgtgacaatgagaacggaccaaattttctgttccacaatagaggtgacggcaccttcgtggatgccgcagcgtccgctggggtggatgatccacaccagcacgggagaggagtagcgctcgccgacttcaatcgggatggaaaggtggacatcgtctacgggaattggaatggcccgcacagactgtacctgcagatgagcactcacgggaaggtgaggttccgtgacatcgccagccctaaattttcgatgccatctccggtgagaaccgtgattacggctgactttgataatgaccaagagctcgaaatattttttaacaacatcgcatacagaagttccagcgctaatcggctttttcgggtgattcgcagagagcacggggatccccttattgaggagttgaaccctggagatgcgctggaaccagaaggacgcggtactgggggagtagtgacagacttcgatggggatggcatgctcgatttgatactgtctcatggtgagagcatggctcaaccgctgtctgtgtttcgagggaatcagggatttaacaataactggcttagagtagttccaaggaccaggtttggtgcatttgcccgtggggcaaaggtagttctctacacaaaaaagagcggcgcccacctccgaataatagatgggggttcaggatatctgtgcgaaatggaaccagttgcacacttcggacttggcaaggacgaagctagtagcgtcgaggttacatggcctgatggaaaaatggtcagtcgcaacgtcgcctctggggaaatgaacagcgtgctagagatcctgtacccgagggatgaagacacattgcaagatcccgcccctttggagacgcccatgaatgccagcagctcacacagttgtgcccttgaaacatcgccttacgtctccacccccatggaagcgaccggagcgggccccaccaggtcagccgttggggcgaccagccccactcggatggcccagccagcatggggtctttctgcttcacatcgcgccccagctccaccacccccgcccctgctgctgcccctccctctgcttctgccccttctggagctgcccctgcttcacagatcaagctag

SEQ ID NO: 5370 - DNA, 1008 bp, synthetic construct
  misc_feature 1..1008: note = source = /note="Description of Artificial Sequence: Synthetic coding sequence"
  source 1..1008: mol_type = other DNA
atgcaaggtcaaggccggcggaggggcacctgcaaagacattttctgttctaaaatggcatcatacctgtatggagtgctgttcgctgtaggcctgtgcgccccaatctattgtgtgtcgccagccaacgctcctagcgcctacccgcgtccttctagcaccaaaagcacccctgcctcacaagtttacagcctgaatacagacttcgcgttccggctttatcgcagattagtcctggagactccttctcagaacatatttttttcccccgctagaattaacagccacgtcaagaaaaagacccagggcaaggtagtcgacattatccagggtctggatctgctcaccgcaatggtactggtcaatcatattttcttcaaggccaaatgggaaaagccctttcatccggagtatacacggaagaacttccctttcctcgtgggcgagcaggtgaccgtgcatgtgccaatgatgcaccaaaaggagcagttcgcattcggtgttgatactgagctcaattgtttcgtcctgcaaatggactataaaggggacgcggttgctttctttgtgttgccatcaaaggggaagatgcgccagttggagcaggccctgagtgcgcgcacactgcgcaagtggtcacacagtctgcagaaacggtggattgaggtattcatcccgcgcttcagcattagcgcttcttacaacctggagaccattctgcctaaaatggggatacagaatgtcttcgataaaaacgcagatttttctggaattgccaaacgagattcgttacaagttagtaaagccacccacaaggcggtgcttgacgtgtctgaagaaggtacagaagccacagccgccactacaacaaaatttatcgtccgctccaaggacgggcccagctatttcacagtcagctttaatcgtactttccttatgatgatcacgaataaagcaacagacgggatcttattcctgggaaaagtggagaatccgaccaagtcatag

SEQ ID NO: 5371 - DNA, 768 bp, synthetic construct
  misc_feature 1..768: note = source = /note="Description of Artificial Sequence: Synthetic coding sequence"
  source 1..768: mol_type = other DNA
atggtgctgctgctagtaatccttattccagtactcgtgtcgtccgccggaacatcagcccactacgagatgctgggtacatgccgcatggtgtgtgacccctacggggggaccaaggccccaagcaccgcagctacacctgatagagggctgatgcagagtttgcccacgttcatccagggccctaaaggcgaagctggccggcccggaaaggcagggccaagaggacctccgggcgagcccggccctcccgggcccatggggccaccaggtgaaaagggcgagccaggtcgtcaaggcctgcctggccctccaggcgcccctggactcaacgcagccggcgcaatctcagctgccacctactccaccgtgcctaagatcgccttctatgctggtctcaaaagacagcatgaagggtacgaagtgctgaaattcgatgatgttgttaccaacttgggcaaccattacgatcctacgacaggcaaatttacatgctcaatccccggaatttatttctttacataccatgtcctgatgcgggggggcgatggaacgagtatgtgggccgatctttgcaagaacaaccaagttagagcatccgcaatcgcgcaggatgccgaccagaattacgactacgcctccaattcagtggtgcttcatcttgagccaggcgacgaggtgtatattaaacttgatggaggtaaggctcatgggggcaataacaataaatacagcaccttcagcggttttataatttatgcagactag

SEQ ID NO: 5372 - DNA, 1617 bp, synthetic construct
  misc_feature 1..1617: note = source = /note="Description of Artificial Sequence: Synthetic coding sequence"
  source 1..1617: mol_type = other DNA
atgtctttttcagccaccattctcttcagtcctcctagcgggtctgaggcccgttgctgctgttgtgcatgtaaatccgagaccaacggaggaaatactgggtcgcagggcggcaaccccccacccagcacaccaattaccgttacaggacacggtctggccgtccagtcttcagaacagctcttacacgtcatttaccaaagggtcgacaaggccgttgggttggccgaggctgcattggggttggctagagctaacaatgaattactgaaaagacttcaagaggaggtgggcgacctgcgtcaaggtaaggtgagcatccccgacgaagacggagaatctagagcacacagctcaccccctgaggaacccggacccctgaaggaaagccctggtgaagcattcaaggctctcagcgcagtcgaggaggagtgcgactcagttggatcgggcgtccaggtcgttattgaagagttaaggcaactgggtgctgcatcagtcggtcccggtccactcggcttccccgccacccagcgcgacatgcgactgccaggttgcaccttggctgccagtgaagccgcccctcttctgaacccccttgtggacgattatgttgcgtccgagggcgcagtgcagagagtcttggtgcccgcttacgcgaagcaactgagccctgccactcaattagccatccagagagctacacccgagactgggcccgagaacggcacgaagctccccccccctcgacctgaggatatgctgaatgcagccgcggccctggatagtgctctggaggagagtggtcctggcagtactggcgaactccgccactcgttggggctgacggtatcaccctgccgtaccaggggaagtggacaaaagaacagcaggcgaaaacgcgatttagtccttagcaagcttgtgcacaacgtgcataaccacatcaccaacgacaaacgcttcaatggatctgagtctattaagagctcttggaacatcagcgttgttaagttccttcttgagaaactgaagcaggagctggtgactagtccccacaactacacagacaaggagttgaagggggcatgtgtggcctacttcttgactaagcgccgggagtaccgcaattctctcaatccttttaagggtctgaaagagaaagaggaaaaaaaattacggagccgccggtatcgactgttcgcaaataggtctagtattatgcgccactttgggcccgaagaccagaggctgtggaatgacgtgactgaggagttgatgtcagatgaggaggatagccttaatgagcccggggtctgggtcgcccggcctcctagatttcgggcgcaaagacttacagagttgtgctatcatctggatgcaaactccaagcacggcactaaagcaaaccgagtgtacggcccaccatctgatcggcttccctctgctgaggcgcagcttctgccacctgagctatataatcctaacttccaagaagaagaggatgagggcggcgacgaaaacgcgcctggatctccgtcctttgatcagcctcacaagacatgttgcccggacctcaactcatttatcgagattaaagttgaaaaggatgaatag

SEQ ID NO: 5373 - DNA, 2853 bp, synthetic construct
  misc_feature 1..2853: note = source = /note="Description of Artificial Sequence: Synthetic coding sequence"
  source 1..2853: mol_type = other DNA
atgctccttctcgggatactgaccctggcattcgcaggccggaccgccggaggctccgagccggaaagagaggtggttgtcccaatccggctggatccagacataaatggaagacggtactattggcgaggaccagaggactcaggggatcagggccttatttttcagatcacggctttccaggaggacttctacctccacttaacccccgacgcccagttcctcgctcctgcattcagcacagaacacttgggggtaccacttcaaggtctgaccggggggagttccgacttacgaagatgcttctactcaggcgatgtaaatgcagagcctgactcatttgcagcggtcagcctctgcgggggactccgaggtgcgtttgggtaccggggagcggaatacgtaatcagtccactccccaatgccagcgccccagccgcacaacgcaacagtcaaggcgcccacctgcttcaacgtcgtggagtaccaggaggcccatctggagaccctacaagtagatgcggcgtggcctcaggttggaatcccgcaatactgagggccctggatccttacaaaccccgccgcgctgggtttggcgagtcccgtagccgacgccggtctggaagagcaaaacgctttgtgtctatcccccgttatgtggagacactggttgtcgcagacgagtcaatggttaagttccatggtgcggacctggaacactatttactgacactccttgccactgcggcaagactgtatcggcatccctctatcctgaaccccatcaatatcgtggttgtgaaagtgctgctcctccgagacagggactcagggcccaaggtcacgggtaacgccgcgctgacgctgaggaatttttgtgcctggcagaaaaaacttaataaggtatctgacaaacatccagaatattgggatacggcaattctgtttacccgccaggatctatgtggggccaccacgtgcgacaccctgggcatggccgatgtgggaaccatgtgcgatcctaaaaggagttgtagcgttatcgaagatgacggtttgccgagtgccttcacaaccgcacacgaactcggccacgtgttcaatatgccacatgataacgtgaaagtgtgcgaggaggtgttcggcaaacttcgtgctaaccacatgatgtcacccacactaattcagatcgacagagccaatccttggtctgcttgctccgcagccataatcactgactttctggacagtggacacggcgattgcctcctcgaccagccaagcaaacctatttctctgcctgaggatttgcccggcgcctcctatacactatcccagcagtgcgagttagctttcggggtcggaagcaagccatgtccgtatatgcagtattgcacgaaactttggtgtacagggaaggccaaggggcagatggtgtgtcagacacggcatttcccctgggccgatgggacctcgtgcggagaaggaaagctttgtctaaagggcgcctgtgtggagcggcacaatttgaacaaacaccgggttgatgggtcatgggctaaatgggacccttacgggccgtgttctcgcacctgtgggggaggggtgcagctggcacggcgtcagtgcactaatcccacaccagccaatggcggtaagtattgtgaaggtgttagagtcaaataccgatcatgtaacctggagccatgtccatcttccgcgagcggcaaatcattccgggaggagcagtgcgaagcctttaacggatataatcacagtacaaaccgcctaacccttgccgtggcttgggtgccaaaatattcgggggtgtctccaagagataaatgtaagcttatctgtagggccaatggcaccgggtacttttacgttctcgcccctaaggtggtggatggaacactgtgttctcccgattctacatctgtttgcgtacagggcaagtgcattaaggcaggctgtgacgggaatttaggcagcaagaaacgcttcgacaaatgcggcgtgtgtggcggggacaacaagtcttgcaaaaaggtgaccggactctttacgaaacccatgcacggatataactttgtcgtcgctattcctgcaggtgcatcctcaattgacatccggcagcggggatataagggcctcataggcgacgataattacctcgccctgaagaatagtcagggaaagtacctcttgaatggccatttcgtcgtgagcgcagttgagagagacttagtggtcaaggggagcctgttgaggtatagcggaacaggcaccgctgttgaatccctacaggcctccagaccgattcttgaacccttgacagtggaagtattaagcgtgggtaaaatgaccccacctcgggtcaggtatagtttctaccttccaaaggagcctcgagaagataagtcctctcacccaaaggacccgaggggtccttctgtcctgcacaactctgtgctgagccttagcaatcaggttgagcagccagatgatcgcccccccgcacgctgggttgctgggtcttggggcccatgttctgccagttgcggctctggtttacagaaaagggctgtggactgtcgtggctctgccgggcagaggactgttcccgcatgcgatgccgcgcatcggcccgtggaaacccaggcatgtggcgagccctgtcccacctgggaactttccgcctggtctccctgcagcaagtcatgtggtcgcgggttccagaggagaagcctgaagtgcgtggggcacggcggcaggctcctagccagagaccagtgcaaccttcaccggaaaccccaggagttggacttttgtgttctaaggccctgttag

SEQ ID NO: 5374 - DNA, 1521 bp, synthetic construct
  misc_feature 1..1521: note = source = /note="Description of Artificial Sequence: Synthetic coding sequence"
  source 1..1521: mol_type = other DNA
atgacgtctaagcctcactccgactggatcccttactctgtcctagacgacgaaggccgcaatctgcggcagcaaaaactggatcgtcagcgcgctcttctcgaacaaaagcagaagaagaaacgtcaggagccacttatggtgcaggccaatgctgatggtcggccgagatctcggcgcgcaaggcagagcgaagagcaagctccattggtggaatcctacttgtcctcttctggatcaacatcataccaagtacaggaggccgactcattggcgagcgtgcagctgggcgccacccggcctaccgcacccgcatctgcgaaaaggacaaaggccgccgcaacagcaggagggcagggtggcgctgctcgcaaggagaagaaaggcaaacacaaaggcacgtccggcccagcagcactggccgaagacaagagcgaggcccagggacccgtgcagattctcacagtaggacagtcagaccacgcgcaagacgctggcgaaacagctgccggcggcggcgagcgacccagcggccaggacttacgagccaccatgcagaggaaggggattagctcatccatgtcttttgatgaggacgaagaagatgaggaggagaactccagctcatcatcgcagctcaatagtaatacacgcccttcgagtgccacctctcgaaagtccgtgcgcgaagctgcatccgctccaagtcccacggccccggaacagccggttgacgtggaggtccaggacttggaggaatttgctctgagaccagcacctcagggcatcacaattaaatgtagaatcactcgtgataagaagggcatggatagaggcatgtaccccacatacttcctgcacctcgatcgggaggatgggaagaaagtgtttttgctagctggaagaaagcgaaaaaagagcaagacaagcaactatctgatctcagttgaccccacagacctaagcaggggcggcgatagttacatcgggaagctgaggagcaatctaatgggaacgaaattcacagtctacgataatggagtaaatccacagaaggcgagttcttccacccttgaaagcggcaccctaagacaggagttggcagctgtgtgttacgagaccaacgtgctcgggtttaagggcccaaggaagatgagtgttatcgttccagggatgaacatggtgcatgagagagtgtctatcaggcctcggaatgagcacgagacactcttggccaggtggcaaaacaagaacactgagtctataatcgagttgcagaataagacccccgtctggaacgacgatacacagtcctacgtattaaacttccacggcagggtcactcaagcttccgtcaaaaatttccagatcatacacgggaatgaccccgattatatcgttatgcagtttggccgtgtggccgaggacgtgttcaccatggattacaattatccgttgtgcgccttgcaggcatttgctatcgcgctgagtagcttcgactctaagctcgcctgcgagtag

SEQ ID NO: 5375 - DNA, 594 bp, synthetic construct
  misc_feature 1..594: note = source = /note="Description of Artificial Sequence: Synthetic coding sequence"
  source 1..594: mol_type = other DNA
atggctaaaaatggtctggtgatctgtattttggtgattaccctgctcctggatcagacaacatcacacacctctcggctcaaagcccggaagcacagcaaaagaagagttcgggataaggacggcgacctgaagacgcaaatcgagaaactgtggaccgaagttaacgccttgaaggagatacaggctctacaaacagtgtgcctgcggggaaccaaggtgcacaaaaagtgctatctcgcctcggaaggcttgaagcacttccatgaggcgaatgaagattgcattagcaagggcggtatactggtgattccccggaactctgatgagattaatgcactgcaggattatgggaagaggtcgctccctggtgtgaacgacttttggcttggaattaatgacatggtcaccgaagggaagtttgtggacgttaatggaatcgccatctcgttcctaaattgggaccgagcgcagccaaatggaggcaaaagagagaattgtgtattattttcacagtcagctcaaggcaagtggagtgacgaggcttgtcggtcttcgaagcgatacatttgtgagttcaccattccacaatag

SEQ ID NO: 5376 - DNA, 2424 bp, synthetic construct
  misc_feature 1..2424: note = source = /note="Description of Artificial Sequence: Synthetic coding sequence"
  source 1..2424: mol_type = other DNA
aagaagaaacgcaaaatctccctcttaccaaagccacctaagcacgatgcccctctaacaattgagtttccaaacctagacaagacatccgccgagtggttaaaggtgaacgggctcaaagctaagaagctttccctctaccaggttctggccccaaacgctttcagccccgtcgaggaattcgtgcccatcctacagaaaacagtgagcagcacaattcatgagaaggccatgatccagttcgaatggcatgacggaaccgttaagaatatccacgtggacccaccctttctctacaagtatcagcaacagcttagtcgtgccatgcgaatgtacgaacggaggatcgagtggctaagcttggcttcaaggaggatctggggtacagtctgcgaaaagagggttgttgttcttctggatatctccgccacaaacagcatgtatatcatccatattcaacattctctccgcttgctgttggaagaacagctaagcaataaagactgcttcaatctaatcgccttcgggagcactattgagagctggaggccggagatggtacctgtcagccacaacaacctccagagtgcgtggcgctgggcactaaatctacggtgccgcggaagcagaaacgttctttccgcgctgcgaaaggccgtagaggtagacttcaaggacaaagacaaacatcagtctcagggcatctacctgtttaccggcggtatacccgaccaggatatgcccacactgtcagcctacatggccgaggcatgcggcgggtgtgacctccagctcaacgtgtgcctattctatgtgggcgagcccaaaatggacaccacacctcctgctaggtacgcctcacataccgacaccgccgcagcttacaaagaggttacacgggccgctggcggtagattccattggtttggcgacaccggcatctacgagagcgatgacattaactctataatgtccgagatggaaaaggcgctgaattactctcagaagtgcgccttcctcatggcatccctgaaaaaccactccggtaaggtgctgggctcaagcgccctgcccaaggagaaacctaagacactccagctgagaagccaacccaagaagctgtgtccaccccgacccaccgtgcctctgggggctagaatgagtattaaagacgaccccgatcgtgagaagagcccacccctgaagtcactgaagtggagaccactgtcttcgagagtcggcatctctcctgcagccgctcagccgaccaaggagggaatgatggagctccgccggaagacaaagtctcgcgaagccgagacaagcctgctgctattctatacagaaaagggtaatgacgtgggctcagtctacaagaagtacccccaaggccggggcttacggagaacaagttcgagtattgatctgcctcgcaaggacacggtgtgtagcagccaggaatgggtcgcaaaatacgggcttaagaagctgaagctcgagattagccgatgcatgggcccgaactgcacccaccagaaaagtggtcaacggagcgcctcagcaaaacattgtagcatcttccccagtgtcgagatccacggggttgtgaggcatatccaatggacaccacgcgaaatggaggtgtatatcaggcatctggaaaaagtcctccgtcggtacgtgcagcggctgcagtggttattgtctggaagcaggcggctcttcggcactgtgctcgaaagtaaagtatgcatattgttagacactagtgggagtatgggaccatacctccagcaggtgaagacggaactggtgctgttgatctgggagcaactgcgaaagtgttgcgattcttttaatctgctgagtttcgctgaatcttttcagtcatggcaggacactttggtggaaacaacagatgctgcctgtcacgaggctatgcaatgggtgactcatctccaggcccagggtagtaccagcatccttcaggcgttgctaaaagcatttagcttccacgatctcgaaggactgtatctgttgactgatggcaagcccgacacatcctgcagtctagtcttaaacgaggtgcagaaactgcgggagaaacgagatgttaaggtgcacaccatatctttgaactgttctgatcgcgccgccgtagaattcctccgcaagctggcctcattcacaggcggtcggtaccactgcccagttggcgaggacactttgtcaaaaatccacagcttgcttaccaaaggattcattaatgagaaggaccctacactgcccccattcgagggagacgacttgaggatcctcgcccaggaaatcacaaaggcacgttccttcctctggcaagcacagagctttaggtcccagctgcagaagaaaaatgatgctgaacctaaggtcacgctgtcttag

SEQ ID NO: 5377 - DNA, 639 bp, synthetic construct
  misc_feature 1..639: note = source = /note="Description of Artificial Sequence: Synthetic coding sequence"
  source 1..639: mol_type = other DNA
atggtgtctcgcatggtgtcgaccatgctctccggattgctgttctggctggcttcaggatggacacctgctttcgcgtattcccctcggaccccagaccgggttagcgaagccgatatacagagacttctgcatggtgtaatggagcagctgggtatagcacgccctagggtcgaatatcctgcccaccaagccatgaatctagttggaccacagtccattgaaggcggcgctcacgagggtcttcaacatcttggccccttcggaaatattccaaatatagtagccgagctgactggtgacaatattcccaaagatttcagcgaggatcaggggtatcctgatcccccaaacccttgccccgttggtaagactgccgacgacggttgtttagagaatacgcctgataccgccgagttctctagagagtttcagctgcatcaacatctgttcgatccagagcacgattatcccggcctggggaaatggaacaagaaactcctctacgagaaaatgaaggggggcgagaggaggaaacggagatccgttaatccctatctgcagggtcagagattggacaatgtcgtggcgaagaagtctgtcccacacttcagcgacgaagacaaggacccagagtag

SEQ ID NO: 5378 - DNA, 1524 bp, synthetic construct
  misc_feature 1..1524: note = source = /note="Description of Artificial Sequence: Synthetic coding sequence"
  source 1..1524: mol_type = other DNA
atgtgtactaaaacgattcctgtgttgtgggggtgcttcctgttatggaacttgtatgtgtcttcgagtcagactatctatcccgggattaaagcgcgaatcacacagagggcacttgattatggtgtgcaggctgggatgaaaatgattgaacagatgctgaaggaaaaaaaactgccagatctatccgggtcagagagcttagaattcctcaaagtagactatgtaaattacaactttagtaacattaaaatcagtgcgttttcattcccaaatacatcgctggccttcgtgccaggggtcggtataaaagcactgacaaatcatggtactgccaacatttcgacagattggggctttgagtcacctctgtttcaggatacaggaggggctgacctttttctctcgggtgtgtatttcaccggaatcattatattgacgcggaatgacttcggacacccaacgttgaagcttcaggactgttacgcgcagctgtcacatgctcatgtgagtttctctggagagctgtctgtgctgtataatagtttcgcagagcccatggagaagcccatcctgaagaatttgaatgagatgctgtgtccaattatcgcatctgaagttaaagcactcaatgctaacctttccactctcgaggtgcttaccaaaatagacaattacactctgctcgattacagcctgattagcagccccgagattactgaaaattatctggatctgaacctgaaaggagtcttctaccccctagagaatttgactgatccgcctttctccccagtgccctttgtgttacctgagaggtcgaactctatgttgtacattggtattgcagagtacttctttaagtccgcctcattcgctcatttcacagccggtgtattcaacgtcactttatcaaccgaggagatatcgaatcacttcgtgcaaaatagtcagggccttgggaacgtactgtctcgcattgccgagatctatatcctttcccagccgttcatggtgagaatcatggccacagaaccccctattataaacttacagcctggcaattttactttggatattcctgcctcaatcatgatgctcactcaacccaagaactctacagtggagaccattgtctctatggattttgtggccagtacaagcgtgggtttggtcattttgggccagaggttggtttgctctctcagcctgaatcggtttcgactagccctccccgaatctaaccgcagcaacatcgaagtgctgcgtttcgaaaatatcctgtcgtcaattttgcacttcggagtcctgcctctggcaaatgcaaagctgcaacaaggtttccccctatctaatccccacaagttcttattcgtcaactcagatatcgaggtcctggaggggtttctactaatcagcactgatcttaagtatgaaacttctagcaagcaacagcctagctttcacgtgtgggaagggttgaacttgatcagtcgacagtggcggggtaagagcgccccttag

SEQ ID NO: 5379 - DNA, 474 bp, synthetic construct
  misc_feature 1..474: note = source = /note="Description of Artificial Sequence: Synthetic coding sequence"
  source 1..474: mol_type = other DNA
atgcacccctggttagggtcagccctcggattcccgaaatgcaggggaattcatctgtgtgcatgcggcaacggttggacccctggcgagacgctttcccaaaacaaaacggaaattaccaagaataaggtcacttgctggaggcctcatgggtgcgaacccaataccggtctcggatatcaaggcagtcatactagtaaatacacactcttaccctggaacttgctcaagaccaaaccactcccccccagccacggcaaggaaggtggcaaggaggccaaggtgccctcaggcgacaactcgggccgcggagaggtccccagggcgcaggagggacaggctgcttgtgggcgcgccgccagcggagattcacaggagggaatgcgccggggctacgaggaaagagcaacagcacagcgtcctgccgtgcggagtgctgagacaacagcccatggcacctggatatacccctag

SEQ ID NO: 5380 - DNA, 213 bp, synthetic construct
  misc_feature 1..213: note = source = /note="Description of Artificial Sequence: Synthetic coding sequence"
  source 1..213: mol_type = other DNA
atgtccaataatatggcaaagatcgctgaagcccgaaaaaccgtggaacagcttaaactggaagtgaacattgataggatgaaggtcagtcaggctgcagctgagctcctggccttttgtgagactcacgccaaggatgatccgctggtcacccctgtgccagccgctgaaaaccccttcagggacaagaggctgttctgtgtcctcctgtag

SEQ ID NO: 5381 - DNA, 645 bp, synthetic construct
  misc_feature 1..645: note = source = /note="Description of Artificial Sequence: Synthetic coding sequence"
  source 1..645: mol_type = other DNA
atggccttgctgctctgtttagtgtgtctgaccgctgcgctggctcacgggtgtttgcattgtcacagcaacttttcaaagaagtttagcttctatcgccatcacgtcaactttaagagttggtgggtcggagacatccccgtctcgggagcattgctaaccgattggtccgatgacacaatgaaggagctgcacctcgccattccagccaaaattacgcgtgaaaagttagatcaggtggccaccgctgtataccagatgatggaccagctgtatcagggcaagatgtatttcccagggtactttccaaacgaactgcgaaacatcttcagggagcaggtccatctcattcagaacgccattatagagtcacgcattgattgccagcacagatgcgggatttttcaatacgagacaatttcttgtaataattgcaccgacagtcacgtggcatgtttcggctataactgcgagtcaagcgcacaatggaagtctgccgttcagggtctgctgaattacataaataactggcacaagcaggatacctccatgtcactggtgagcccagcactgagatgtcttgaacctccacatttggctaacctgacactggaggatgccgcagagtgtctgaaacagcactag

SEQ ID NO: 5382 - DNA, 459 bp, synthetic construct
  misc_feature 1..459: note = source = /note="Description of Artificial Sequence: Synthetic coding sequence"
  source 1..459: mol_type = other DNA
atgtcccctcatctcactgcattgcttggcctggtgctgtgccttgcccagactattcacacccaggagggagccttgccccgcccatccattagcgctgagcctggtacagttatctctccaggatcacacgtgaccttcatgtgtcgcggccccgtgggggtgcaaaccttcagactcgagagggaggacagagccaaatacaaggattcctacaatgtgtttcgactcggtccttcggaatcagaggcacggtttcatatcgatagcgtctctgaaggtaatgctggcttgtatcgctgcctttactataagccaccagggtggtctgaacacagcgactttctcgagctgcttgttaaggaatccagcggcggtcctgattcacccgatacagagcccggatctagcgcaggcaccgtcccaggcaccgaggcctctgggttcgacgctccttag

SEQ ID NO: 5383 - DNA, 900 bp, synthetic construct
  misc_feature 1..900: note = source = /note="Description of Artificial Sequence: Synthetic coding sequence"
  source 1..900: mol_type = other DNA
atggcgccatggagtcacccaagcgcccagttacagccagtcggaggggacgcagtgagcccggctttgatggtgctgctgtgcctcggactctctttgggacctcgtacgcacgtccaggcagggaacctgagtaaggccactctctgggccgagcctgggtctgtcattagtcgaggcaatagcgtgacaattaggtgccaaggcactctcgaggcgcaagagtacagactggtgaaggaaggatctccagaaccctgggacacccaaaacccactcgagcccaaaaataaggcccgcttcagtattcccagcatgaccgagcaccatgccggtcgttatcgctgttattactacagccccgccggctggtccgagccaagtgatccacttgagctggttgtgactggcttttacaacaaacctacacttagcgctctcccttctcccgtcgtaactagcggcgaaaatgtgaccttacagtgtggttccaggctgagatttgataggtttatactcacagaagaaggcgaccataagctcagttggacactggattcccagttaaccccatctggtcaattccaggcactgttccctgtgggaccagtaacgccctcgcacaggtggatgctcaggtgctacggctcccgtcgccatatactgcaggtctggagtgaaccatcggatctgctggaaataccagtatctggggcagcagataacctatccccaagtcagaacaagagcgacagcggcacagcaagccacttacaggactacgccgtggagaatctgattagaatgggcatggctggcttgattttggtggtgttgggcattttaattttccaagattggcatagccagcgcagccctcaggctgcagctggaaggtag

SEQ ID NO: 5384 - DNA, 618 bp, synthetic construct
  misc_feature 1..618: note = source = /note="Description of Artificial Sequence: Synthetic coding sequence"
  source 1..618: mol_type = other DNA
atgaaggtccttttactgaccggactaggagcactgtttttcgcctattattgggacgacaacttcgacccgggagggctggactatctcgtgttaaatcatatcgggggggcccccgccggtacgagggcaaggagtccccaggcaacaaggtggcttatgcaggtgaattttgtgagctacgtgcagctcacctccagggccctcccaagcctgacggactccaaagggtcattagttgtggtgtcttccctgctggggcgagttccaaccagttttagcaccccctacagcgcggccaagtttgcactcgatgggttctttggatctttacggagagagctagacgttcaggatgtgaacgtggcaatcacaatgtgcgtgctggggcttcgcgatcgcgccagtgcagccgaagcagtgagaggggtgactagagtgaaagccgctccaggtcccaaagccgccctcgccgtcattcgggggggggccacccgggccgccggcgttttttatccctggcgatttcgcctcctctgtttactccgaaggtggctgcctcgcccccgtgcgtggttcatacggcaggaattgaacgtcactgctgccgcggcctag

SEQ ID NO: 5385 - DNA, 795 bp, synthetic construct
  misc_feature 1..795: note = source = /note="Description of Artificial Sequence: Synthetic coding sequence"
  source 1..795: mol_type = other DNA
atgctgcggtgcgggggtcgcggcttacttctgggcctcgccgtggccgctgcagctgtgatggcggcgcgactgatgggatggtggggacctcgagcagggtttcggctgtttatcccagaagagctaagcagatatcgcggcggtcctggcgatccggggctctaccttgccctgttggggcgcgtctatgatgtgtccagcggcagacgccactacgagcccggaagtcactactctggcttcgctgggcgggatgcgtcccgggcctttgtgaccggggattgttccgaggccgggctggttgacgacgtcagtgacctcagcgcggctgaaatgttaacactgcacaattggttatcattttatgagaagaactatgtttgtgtgggccgcgtgactggaagattttacggagaggatgggctacccacacccgctctgactcaggtcgaggcagctatcacacggggacttgaagctaacaagctccaactacaagagaaacagacgttccccccatgtaacgcagaatggtcgagtgctaggggttctcgcctgtggtgctcccagaaatccggcggcgtatctagggattggataggcgtgcccaggaagctgtataaacccggggccaaggaaccaagatgtgtttgcgtgagaacgacagggcccccttctggccagatgccagataatccgccgcaccggaatcgaggagatctcgaccatccgaatctggcagagtacactggctgtccgcctctggctattacgtgtagtttcccattgtag

SEQ ID NO: 5386 - DNA, 468 bp, synthetic construct
  misc_feature 1..468: note = source = /note="Description of Artificial Sequence: Synthetic coding sequence"
  source 1..468: mol_type = other DNA
atgagtaaacggctcctcctcctgctcctcctcagcatggggggcacatgggcctccaaagagccactgaggccacgctgccgccctatcaacgcaacactcgctgttgaaaaggaaggctgcccagtgtgcatcacagtcaataccaccatatgcgcaggctactgtccaactatgacacgagtgctgcaaggcgtgctccctgccctgccacaagttgtatgtaattacagagacgtcagatttgagagcatcaggttaccaggctgcccccggggcgttaatcccgtcgtgtcctatgcagttgccctttcttgccagtgtgctctgtgtaggcgttcaacaaccgattgcggtggtcccaaagaccatcccctcacttgcgatgaccctcggttccaggattcgtcatcctccaaggccccaccaccaagtttgcccagtcccagccgcctcccgggaccctag

SEQ ID NO: 5387 - DNA, 498 bp, synthetic construct
  misc_feature 1..498: note = source = /note="Description of Artificial Sequence: Synthetic coding sequence"
  source 1..498: mol_type = other DNA
atggagatgttccagggtctgcttctgctcttactgttatcgatgggtgggacttgggcctctaaagagcctctccgccctaggtgtcggcccattaacgccaccctggctgttgagaaagaaggatgcccagtgtgtattactgtgaatactaccatctgtgcgggttactgtcctacaatgaccagggttttgcagggtgttctgccagccctgccccaggtggtgtgcaactacagggatgtgcgatttgagtccattaggctccctggctgtcctcggggcgttaacccagtcgtgagctatgctgtggccctgtcctgtcagtgcgctctttgtaggaggtctaccaccgattgtggcggccctaaagaccaccctctaacttgtgatgatcctaggtttcaggactcaagtagttcaaaagctcctcctccctctctaccatctccaagcaggttgcctgggcctagtgatacgcccatccttccccagtag

SEQ ID NO: 5388 - DNA, 990 bp, synthetic construct
  misc_feature 1..990: note = source = /note="Description of Artificial Sequence: Synthetic coding sequence"
  source 1..990: mol_type = other DNA
atgctgcccttgctattgggcttactgggcccagccgcctgttgggccctgggccctactcccggacctggcagctccgagctgcgcagtgccttctctgccgcccgaaccactcctttggagggtacctccgagatggccgtcacttttgataaggtatatgtcaacattggcggtgactttgatgtggccactgggcagttccgctgccgggtgcccggtgcctacttctttagcttcactgctgggaaagcgccccacaagtctcttagcgtgatgttagtgcggaaccgcgacgaggtgcaagcactggccttcgatgagcagcgtcgaccaggggccagacgcgccgcaagccagtccgcgatgcttcagctggattacggggacacggtttggttgcgattacatggagcaccacagtatgccttaggcgcccccggtgctactttctctgggtacttggtatatgcagatgccgacgcggatgcacccgcccgggggcctccagccccacctgaaccgcggagtgcatttagtgccgcgcgcactagaagcctcgtgggctcggacgctggtccaggacctcgacaccagccactggcattcgatacagaattcgtgaacatcggaggcgatttcgacgccgccgcaggggtcttccgctgcagactgcctggcgcgtacttcttcagctttactttgggaaagctgccccggaaaaccctatccgtaaagttgatgaagaatagggacgaggtgcaagccatgatctacgacgatggcgcctctcggcgtcgagaaatgcagtcacagtctgtgatgctggccttgaggcgtggcgatgctgtgtggttactgagtcatgaccacgatggctatggtgcctactctaatcacgggaagtatattacgttttctgggtttctggtctaccccgatctggccccggctgcaccacctggtctcggagcatcagaattgttgtag

SEQ ID NO: 5389 - DNA, 873 bp, synthetic construct
  misc_feature 1..873: note = source = /note="Description of Artificial Sequence: Synthetic coding sequence"
  source 1..873: mol_type = other DNA
atgcggcgccccgccgctgtgcctctcctgctgctgctgtgctttggctctcagcgcgcaaaggctgccacagcatgcggccggcccagaatgctgaaccgcatggtgggcggccaagacacccaggagggcgagtggccctggcaggtgagcatccagcgcaacggctcccacttttgtgggggctcgttgatcgctgagcagtgggttctgaccgcagcccactgctttcggaataccagcgaaacttctttatatcaagtgctgctgggcgcacgacagcttgtgcagcccggtccccacgccatgtacgctcgcgtcagacaggtcgaatcgaatcctctgtatcaggggactgctagtagcgctgatgtggccttggtggagctggaagcccctgttccctttacgaattatattctgccggtatgtctaccagatcccagtgtgatcttcgagactggcatgaattgctgggttaccgggtggggctcacctagcgaggaggacctgttgcctgaaccgcgtatactgcagaagctcgcagtgcccattatcgataccccaaaatgtaatctgctttacagtaaggacaccgaatttggttaccaacccaagactataaagaacgatatgctgtgcgccgggtttgaggagggcaagaaggatgcttgtaagggtgactctggagggcccctggtgtgcctcgtgggacagtcttggctgcaggccggcgtgataagttggggcgagggatgcgcgcggcagaataggccgggcgtgtatatacgggtgacagctcatcacaactggattcatcggataattccaaagctgcagttccagcccgccaggctggggggtcagaaatag

SEQ ID NO: 5390 - DNA, 792 bp, synthetic construct
  misc_feature 1..792: note = source = /note="Description of Artificial Sequence: Synthetic coding sequence"
  source 1..792: mol_type = other DNA
atggcattcctgtggctgttgagctgctgggccctgctgggtacaaccttcggatgtggtgtgccagctatccatcccgtgctgagcggcctgtcccgaattgtgaatggagaggacgccgtccctgggtcatggccatggcaggtttcgctgcaggataaaacaggattccatttttgcggagggagtcttatttctgaagactgggtcgtgactgcagcgcactgcggcgtccgaacctctgacgtggttgtcgctggggagtttgaccagggctctgatgaggagaatatacaagttctgaaaattgcgaaggttttcaaaaatcccaagtttagcatcctgaccgttaacaatgatattacactgctgaaactcgctactccagcgagatttagccaaactgtgagtgcagtctgcctgccatcagccgacgacgactttccagccgggacactctgcgcaacgaccgggtgggggaagacgaaatacaatgctaataaaaccccggacaaactgcagcaggccgctcttccccttttgtctaacgcagagtgcaaaaagagttggggaagacggataacagacgtgatgatctgcgccggagccagcggggtgtcctcttgcatgggtgactctggtgggccactcgtgtgccagaaggatggagcttggacgctggtggggattgtatcttggggttctaggacgtgcagtacaactacaccagcggtgtacgcacgggtggcgaagttaattccctgggttcagaagattctcgcagccaactag

SEQ ID NO: 5391 - DNA, 228 bp, synthetic construct
  misc_feature 1..228: note = source = /note="Description of Artificial Sequence: Synthetic coding sequence"
  source 1..228: mol_type = other DNA
atgggcgccgcaatttcacaaggtgccctgattgccatcgtgtgcaacggcctcgtgggctttttgctgcttctgttgtgggtcatcctgtgctgggcgtgtcatagcagatctgccgacgtagatagcctgtcagagtcgcggacccaggagtcggcttgcctcgaactggatcctgctgcccaaagcttggctagcctcgcccccattggggcccagtggccatag

SEQ ID NO: 5392 - DNA, 762 bp, synthetic construct
  misc_feature 1..762: note = source = /note="Description of Artificial Sequence: Synthetic coding sequence"
  source 1..762: mol_type = other DNA
atggctcggtctctgctgctgcccctccagatactgctgctgtctctcgctctagagacggccggcgaggaagcccaaggcgacaagattatagatggagctccctgcgcgcgcgggtcccatccatggcaggtcgcacttcttagtggcaatcagctgcactgcggcggagtgctggtcaatgagcgctgggttctaacagctgcacactgcaagatgaatgaatatactgttcatttgggctctgacacgctcggggaccggcgggcgcagcgaatcaaagccagcaagtcctttagacaccccggctattctacccaaacccatgttaacgacctcatgctcgtgaagctgaacagccaggctcggctcagctctatggtcaagaaggtccggctcccatcaagatgcgaacctccagggactacctgcacggtgagcggctgggggactacaacatccccagatgttacgttcccatcggatcttatgtgtgtggacgtcaaactgatctcccctcaggactgcacaaaggtttacaaggatttgctcgaaaacagcatgttatgcgccggcatccccgacagcaagaaaaacgcctgtaatggagattccggaggtccccttgtatgccggggcactttgcaggggcttgtcagttgggggacttttccatgtggacagccaaatgatcccggcgtgtatacccaggtatgtaaattcacaaaatggattaatgacaccatgaaaaaacatcgctag

SEQ ID NO: 5393 - DNA, 480 bp, synthetic construct
  misc_feature 1..480: note = source = /note="Description of Artificial Sequence: Synthetic coding sequence"
  source 1..480: mol_type = other DNA
atgaaagcatggggaaccgtggttgtcaccctggcgactcttatggtggtgactgtcgatgcaaaaatatacgagcgctgcgagctggcagctagactcgagagagcggggctaaatgggtacaaggggtatggagtaggcgactggctgtgcatggcccactatgagagtggattcgacaccgcatttgtcgaccataaccccgatggaagcagcgagtacgggatttttcagctgaactccgcatggtggtgtgacaatgggattacccctaccaagaatctctgccacatggactgccatgatctccttaatcgacacattctggacgacatccggtgtgcgaaacaaatcgtgagtagccaaaacgggctctcggcttggacctcctggcggttacactgtagcggacatgacttgtctgagtggctcaaagggtgcgacatgcacgtcaagattgaccctaagatacacccttag

SEQ ID NO: 5394 - DNA, 501 bp, synthetic construct
  misc_feature 1..501: note = source = /note="Description of Artificial Sequence: Synthetic coding sequence"
  source 1..501: mol_type = other DNA
atggctcagacgaatagcttcttcatgctgatttcttcccttatgttcctctccctaagtcagggtcaggaatcacaaaccgagcttcccaatccccgcatatcgtgtcccgagggaactaatgcatatcggagttattgttattatttcaatgaagatcctgagacttgggtcgacgcggatctttactgccagaacatgaactccggaaatcttgtgagtgtccttacacaggctgaaggggccttcgtcgcgtccctgattaaagaatcttcaaccgatgattccaacgtgtggattggcctgcatgaccctaagaagaaccgtcggtggcactggagtagcgggtccctcgtgtcttacaaatcttgggacaccggaagtcctagttctgctaacgcaggctactgcgccagtctcacaagctgtagcggtttcaaaaagtggaaggacgaaagctgcgaaaaaaagttttcctttgtatgcaagttcaagaactag

SEQ ID NO: 5395 - DNA, 528 bp, synthetic construct
  misc_feature 1..528: note = source = /note="Description of Artificial Sequence: Synthetic coding sequence"
  source 1..528: mol_type = other DNA
atgcttcctcccatggctctgccttcagtctcttggatgctcctgtcttgtctcatgctcctgagccaggtgcagggcgaagaaccacaaagggaattaccaagcgctcggatacgttgtcctaagggctccaaggcatacggatctcactgctacgcgttattcttaagcccaaaatcatggacagacgccgatttagcttgtcaaaagcgacccagcgggaatctcgtgtccgtgctatctggagccgagggcagctttgtcagctcacttgtgaaaagtattggaaactcttatagttatgtttggatagggctgcacgacccaacacaaggcactgagcccaacggggagggttgggaatggtcatcatctgacgtgatgaattatttcgcgtgggagcgcaaccctagtacaatctcctcgcccggtcattgtgccagcctcagcaggtctaccgcattcttgagatggaaggactacaactgcaatgtcagattgccttacgtgtgcaagttcacagactag

SEQ ID NO: 5396 - DNA, 1686 bp, synthetic construct
  misc_feature 1..1686: note = source = /note="Description of Artificial Sequence: Synthetic coding sequence"
  source 1..1686: mol_type = other DNA
atgggggcaaggacccctctgccatccttttgggtgtcgttctttgccgagacagggattctgttcccaggcggaactccatggcctatgggaagccaacattcgaagcagcacaggaaaccaggccctcttaagaggggtcatcggcgtgaccggaggacgacgcgtcgcaaatattggaaagaggggagagaaatcgctcgagtgctggatgacgaagggagaaatctgaggcagcagaagctcgaccggcaacgggccttgttggaacagaagcagaagaagaagaggcaggaacctctgatggtgcaggcaaacgccgacggccgcccgcggtctagacgggctcgacaatctgaggaacaggcgcccctcgtggagtcttacctctcttcttcaggctccacctcctaccaggtacaagaagctgacagccttgcgagcgtgcagttgggtgcaactagaccaacagccccagctagcgctaagagaacaaaagcagcggccaccgccggcggacaaggaggagctgccaggaaagagaagaaaggcaaacacaaggggaccagtggcccggccgctctcgctgaagacaaaagcgaggcccagggcccagttcagatcttgacggtgggccagtctgaccatgcccaagacgcgggcgagactgccgctggtggtggagagaggcccagtggccaggatttgcgcgccacaatgcagcgcaagggtattagttcttccatgtcatttgatgaagatgaggaagacgaggaagaaaacagctctagttccagtcagctgaacagcaacacgcggcccagctccgctacatctcgaaaaagcgtgcgagaagccgcctccgcacctagtcccacagcccctgagcagcctgtagatgttgaggtccaggacctcgaggagttcgcacttcgccccgcaccacagggaatcacaatcaagtgtcgcatcaccagggacaagaagggcatggaccgcgggatgtaccccacatacttcctgcatctggacagagaggatggaaagaaggttttcttgcttgctggcaggaagcgtaaaaagtctaagacatccaactacttaatcagcgtcgatcctacagacttaagccgcgggggtgatagctacatcggtaagttgcgaagcaatctcatgggaaccaaatttacagtatacgacaatggggtcaaccctcagaaggcatcatcctctacgctggagtcgggcaccctgcggcaggagctggccgcggtgtgctacgaaaccaacgtcctcggatttaaagggcccaggaagatgagcgtcattgtgccgggcatgaatatggtacacgagcgggtatctatcagaccacgcaatgaacacgagacactgcttgctaggtggcagaataaaaataccgaaagcatcattgagcttcagaacaaaacccctgtatggaacgatgacactcagtcatatgtcctgaatttccacgggcgggtaacccaagcaagtgtgaaaaattttcagataattcacggaaacgatcccgactacattgtgatgcagttcggacgcgtcgcagaagatgtttttacaatggactacaactatccactgtgcgccttgcaagcgtttgccatcgcactgagttcattcgattcgaagctggcttgcgagtag

SEQ ID NO: 5397 - DNA, 1272 bp, synthetic construct
  misc_feature 1..1272: note = source = /note="Description of Artificial Sequence: Synthetic coding sequence"
  source 1..1272: mol_type = other DNA
atgatgtatcgaccggatgtggtgcgagctaggaagcgtgtctgttgggagccctgggtgattggactcgttatttttatctcgctaatcgtcctggccgtttgtatcgggcttacagtgcactacgtgcgttataaccagaaaaagacctataactactatagtacactgtccttcactactgataaactgtacgccgaattcggtcgtgaggccagcaacaacttcacggagatgtctcaacgcctggaatcaatggtcaaaaatgctttttacaagagccccctaagggaggagtttgttaagtctcaggtcattaagttcagtcaacagaagcacggtgttctggctcacatgctgctgatatgccggtttcattccacggaggaccctgaaaccgtcgataagattgtgcaactggtgctgcatgagaaactgcaggacgccgtaggccctcccaaggtggacccccactccgttaaaataaaaaaaattaataagacagaaacagactcctacttgaatcattgctgcggaactcgccgtagtaagacactaggacagagccttcgcatcgtgggtggcaccgaggtggaagaaggcgaatggccttggcaggccagcctacagtgggacggcagccacagatgtggcgccaccctaatcaatgccacatggctcgtcagcgccgcacactgcttcactacttacaagaaccctgctaggtggaccgccagctttggcgtgaccataaagccatctaagatgaaacgtggcctgagaagaatcattgtgcacgagaaatacaagcacccctcacatgattatgacatttcactggcggagttatctagtccagtgccatatacaaatgccgtgcatcgagtttgcttacctgacgcatcctacgagttccagcccggcgatgtgatgttcgtgacgggtttcggcgcattgaagaatgacggctatagccagaatcacttgagacaggctcaagttacactgatagacgctactacgtgtaatgagcctcaagcctataatgatgccattacacctaggatgctgtgcgcaggctcactggagggtaaaactgacgcctgtcagggggacagcggcggccctctggtttcctccgacgcaagggacatatggtacctggccggcatcgtcagttggggcgacgagtgtgccaagcctaataagcccggagtatacacacgggttacagcccttcgggactggatcacgagcaagacgggcatctag

SEQ ID NO: 5398 - DNA, 282 bp, synthetic construct
  misc_feature 1..282: note = source = /note="Description of Artificial Sequence: Synthetic coding sequence"
  source 1..282: mol_type = other DNA
atgaagccggtgctccctctgcagttcctagttgtgttctgcttagctctgcagctcgttcccggttctcctaagcaacgggtactcaagtacatactggagccccctccttgcattagcgcacctgaaaattgcacccatctctgcacaatgcaggaagactgtgaaaaaggcttccagtgctgtagctctttttgtgggatcgtctgttcaagcgaaaccttccagaaaagaaatcggataaagcacaaaggctcagaggtgatcatgccagcaaactag

SEQ ID NO: 5399 - DNA, 1530 bp, synthetic construct
  misc_feature 1..1530: note = source = /note="Description of Artificial Sequence: Synthetic coding sequence"
  source 1..1530: mol_type = other DNA
atggactttctgctggccttggtgctggtgagttccctgtatttacaggcagccgcagagttcgacggtcgctggccgaggcagatcgtaagctcaatcggcctctgtagatacggaggacggatcgattgctgctggggatgggcccgccagtcttggggccagtgccagccagtctgtcagcccaggtgcaagcatggagagtgtatcggacctaataaatgtaaatgccatcctggatacgcaggtaaaacttgcaatcaggacctaaacgaatgcggactcaagccaagaccctgcaagcacaggtgtatgaacacctatggcagctacaagtgttactgcctgaatggttacatgctgatgccggacggatcctgcagctctgcactcacatgcagtatggctaactgccagtacggatgtgatgtggttaaaggtcaaatacggtgccaatgccccagtcccggtctccagctggcaccggatggcagaacctgcgtggatgttgatgagtgcgccaccggaagggcttcctgccctcggttcaggcagtgcgtaaatacatttggctcctacatctgcaagtgccataaaggattcgacttaatgtacattgggggtaagtaccagtgccatgatatagacgagtgctctttgggacagtatcagtgtagttcctttgccagatgttacaatattaggggttcctataagtgcaagtgcaaggaaggctaccagggggatggtttgacatgtgtgtatattcctaaggtgatgattgagccgtccggtccaattcacgtacccaagggaaacggtaccatcctcaaaggagacactggaaacaacaactggatccccgatgttggatctacatggtggcccccgaaaaccccttatatacccccaatcattacaaaccgtcctacatcaaagccgaccacacgccctactccgaaacctaccccgatcccaactcccccaccccctccccctttgcccacagaacttaggacacctctgccccctacaacacccgagaggccaacaacaggcctgaccaccatcgcccccgccgcaagcacacctcccggaggtataactgtggacaatcgcgtgcagacagatccacagaagccacgcggcgacgtgttctcggtactagtgcacagttgtaatttcgaccatgggttgtgtgggtggattcgggaaaaagacaacgacctgcactgggagcccattagggatcctgctggagggcaatacttgaccgtttccgctgcaaaggccccaggggggaaagctgcccggctggttctgccactgggaagactcatgcattccggtgatctgtgtttgtcgttcaggcacaaagttacaggactccacagcggcacactccaagttttcgtgaggaaacatggtgctcacggtgctgccttgtgggggcgtaacggaggccacgggtggcgacagacacagattactcttcggggcgccgatataaaatcagaaagtcagcggtag

SEQ ID NO: 5400 - DNA, 381 bp, synthetic construct
  misc_feature 1..381: note = source = /note="Description of Artificial Sequence: Synthetic coding sequence"
  source 1..381: mol_type = other DNA
atggacaagtccttgctcttagagttacccatcctgctctgctgctttagggcgctgtcaggctccctttccatgcgaaacgatgcagtcaatgagatcgtggccgtgaaaaacaacttcccagtcatagaaatcgtacagtgccgcatgtgccatctccaatttcccggtgagaagtgctctcggggcagggggatatgtaccgcaacaactgaggaggcttgtatggtagggcgaatgtttaagcgtgacggaaacccttggttgacatttatggggtgcctcaaaaattgtgcagacgtgaagggcataaggtggtccgtgtatcttgtaaacttccggtgctgccggagccatgatctctgtaacgaggatctgtag

SEQ ID NO: 5401 - DNA, 537 bp, synthetic construct
  misc_feature 1..537: note = source = /note="Description of Artificial Sequence: Synthetic coding sequence"
  source 1..537: mol_type = other DNA
atggagcttctgcaggtaactattctcttcctattgccttctatctgctcatccaattcgaccggagtgctggaggccgccaacaactcccttgtggtgactactactaagccgagtattacgacacccaatactgaaagcctgcagaaaaatgtagtgactcctactacaggcaccactccaaagggcaccatcaccaatgaacttctgaagatgagtttaatgagcactgccacctttttaaccagcaaagacgagggcctcaaggctacgacaactgatgttcgcaagaacgactccatcattagcaatgtgacggtgacttctgtgacactccccaatgctgtatccacactccagagctctaaaccgaagacagagacccagtcatcgatcaaaaccacagagataccgggaacgcctgagaatgggaatgaccaaccacagtctgacaaggaaagtgtcaaactgctcactgtgaagaccatttctcatgagtctggcgagcactcagcacaggggaaaaccaaaaactag

SEQ ID NO: 5402 - DNA, 2544 bp, synthetic construct
  misc_feature 1..2544: note = source = /note="Description of Artificial Sequence: Synthetic coding sequence"
  source 1..2544: mol_type = other DNA
atgtttaagtgctggtctgtggtcctggttttgggatttatctttctggaaagtgagggtcgcccaacaaaggaggggggatacggtttgaaatcgtaccagcccttgatgcggctgcgacataaacaggagaagaatcaagagagctcaagggtcaaggggttcatgatacaggatggcccttttgggtcttgtgagaacaagtattgtgggctggggaggcactgtgtcacttcccgggagacgggacaagcggagtgtgcctgtatggacctgtgcaagaggcactataaacctgtctgtgggagcgacggggaattttatgagaatcactgcgaggtgcatcgagccgcttgtctgaagaaacagaagatcaccatcgtgcataacgaagactgtttctttaaaggggataaatgcaagactacggagtactcaaagatgaagaacatgctcctcgaccttcagaatcagaagtacattatgcaggaaaatgaaaatcccaacggggatgatatcagcaggaagaagctcctggtcgaccagatgttcaagtacttcgatgcagacagcaatggcctggttgacatcaatgagctaacacaggtcattaagcaggaggaactcggtaaagacctgtttgactgcaccttatatgttcttctcaaatacgacgattttaacgctgataaacacctggctctcgaggagttctatcgggccttccaggtgattcaactcagcctgcctgaggaccaaaagctgtccattactgctgccaccgttgggcaatccgcagtgctaagttgtgccatacagggaactctcaggccgccaattatttggaaacggaacaacattatcttgaacaaccttgatctagaggatatcaatgacttcggagatgatggtagcctatacatcacaaaagttacgaccacgcacgttggcaactacacctgctatgccgatggctatgaacaggtgtaccagactcacattttccaagtgaacgttccgcccgtaatacgagtgtacccagaatcccaagctcgagagccaggcgtgacagccagtctgcgttgccatgcagagggtatcccgaagcctcagctcggctggctaaagaatggcatcgatatcactcctaaactcagtaaacagctgacccttcaggcaaacggcagtgaagttcatatctcgaatgtccgatatgaagacaccggggcctatacatgcattgctaagaatgaggctggtgtggatgaggacatttcttcactgtttgtggaagactcagcccgtaagacactggcaaatatcctgtggagggaagagggactgggcatcggcaatatgttttacgtgttctatgaagacggtattaaagtgattcaaccaattgaatgcgagtttcaacggcacatcaaacctagtgaaaagctgcttggttttcaggatgaagtgtgcccgaaagcggaaggggacgaggtgcaaagatgtgtctgggcaagcgccgtaaacgtgaaggacaagttcatctacgtggcacagcctaccttggatcgcgtgctgattgtcgacgtccagagccaaaaggttgtacaggccgtgtcaactgaccctgttccggtcaaacttcattacgataagtcacatgaccaggtctgggtgctgagctggggcactctagagaagacatcccccactctgcaagttattacattggcctcaggcaatgtgccccatcacacaatccatacccagcccgtggggaagcagtttgaccgcgttgatgatttttttatcccgacaacaacattgatcatcacacacatgagattcgggtttatcctccataaagacgaggcagccctgcagaagatcgatcttgagaccatgtcttatatcaaaacaatcaacttgaaagactacaagtgcgtcccacagtctctggcttacactcatctggggggctactattttattggctgcaagccagatagcacgggcgccgtgagcccccaggtcatggtggacggcgtcaccgactctgtgataggcttcaattccgacgtgactggcacaccgtatgtgtcccctgacggtcattaccttgtgagcatcaatgatgtgaaaggcctcgtcagggtgcagtacataacaatacgcggtgagatacaggaggcctttgacatctataccaatctccacatctccgacctcgctttccaacccagctttactgaagctcaccagtacaacatctatggctccagcagtacgcagacagatgtgctgttcgttgaactgtcttcagggaaggtcaagatgatcaaaagcctgaaggagccactaaaggccgaagagtggccttggaatcgaaagaacaggcagattcaagacagcgggctgttcggccaatatttgatgacaccgtcaaaagattcgctattcatattagacggaaggctcaacaaactcaattgtgagatcacggaggtggagaaaggaaatacagtcatctgggttggggatgcatag

SEQ ID NO: 5403 - DNA, 273 bp, synthetic construct
  misc_feature 1..273: note = source = /note="Description of Artificial Sequence: Synthetic coding sequence"
  source 1..273: mol_type = other DNA
atgaggctatctgtgtgcctcttgctgctcacactggcactgtgctgctatagggccaacgcagttgtatgccaggcccttgggtccgaaatcactgggtttctgttagctgggaagcccgtttttaaattccaactggcaaaatttaaggcaccactggaagctgtggccgcaaagatggaggttaaaaagtgcgtcgacactatggcgtacgagaaacgagttctcattactaaaacccttgggaagatcgccgaaaaatgtgatcgttag

SEQ ID NO: 5404 - DNA, 1044 bp, synthetic construct
  misc_feature 1..1044: note = source = /note="Description of Artificial Sequence: Synthetic coding sequence"
  source 1..1044: mol_type = other DNA
atgagtagttggtccaggcagaggccaaaatctcctggcggaatacagccccatgtgagtagaacccttttcctgctgctgctcctcgccgcctccgcctggggcgtcactttatctccaaaggactgccaggtatttaggtcagatcacggaagctctatttcctgccagccccccgccgaaatacctgggtatttgccagctgacacagtgcatttggcggttgagttctttaaccttacacacttgcccgcaaatttgttgcagggagcgtccaaacttcaggagctgcacctatccagcaacggattagaaagcctaagtccagagtttctgcggcctgttccccagttaagagtattggacttaactaggaatgctctgaccgggttaccaccggggttatttcaagccagtgcgacacttgacaccctggtcctgaaggagaatcagttggaggtgctggaggtgagttggcttcatggtctgaaagcattggggcatcttgacttaagcggcaaccggcttcgaaagttgccacccggactcctcgctaattttacattgctgcgcaccttagacctgggtgaaaaccagctggaaacacttccacccgacttgctccggggccccctacagctggagcgactgcacctcgagggcaataaactgcaggtattaggaaaagacctcctgctccctcagccggacttacggtacttattccttaacgggaacaaacttgcccgtgtggcggctggcgcgtttcagggcttgcggcagctcgatatgctggatctgtctaacaattctttggcctctgttcccgaggggctttgggcctccctgggacagccaaactgggacatgagggacgggttcgacatatctggtaacccttggatctgtgaccagaatctaagtgacctctacaggtggctgcaggcacagaaggacaaaatgtttagccagaacgacacccgttgtgccggccccgaggcagtgaaaggtcagacgctcctggccgtggcgaagtctcaatag

SEQ ID NO: 5405 - DNA, 1407 bp, synthetic construct
  misc_feature 1..1407: note = source = /note="Description of Artificial Sequence: Synthetic coding sequence"
  source 1..1407: mol_type = other DNA
atgcccccttggggagccgcactggcacttattctggcggtgctggccctgctggggctgttgggacctcgcctccgcggaccatggggaagagctgttggggagcgaaccctgcccggcgcacaggaccgtgacgacggagaggaagcagatggaggaggtccggctgaccaattcagtgacggcagggaaccactccccggaggctgcagtttggtgtgcaagccaagcgcccttgctcaatgtcttctgagggcactgcgaagaagcgaagccctcgaagccggaccaagatcttggttttccggcccacatttgcagacgctatgccacttcgttctgcctgttgctcccgggccagagttagctcgggagtacctgcagctggccgacgacggcctcgttgccctcgattgggtggttgggccatgtgtacgcggcaggagaatcactagcgcagggggactccccgcggtgctcttggtgatccctaacgcctgggggaggctaacccgcaatgtgcttggcctgtgcttacttgcccttgaaagaggatattacccagtgatctttcatcggagaggacaccacggctgtcccctggtttcacctcgcctgcaaccattcggggacccatccgacctgaaagaggctgtcacctatatccggtttagacaccctgccgcccctcttttcgcagtttccgaaggtagcggttccgccctgctcctgagctacctgggtgaatgcgggtcttcttcttacgtcaccggtgcagcctgcatcagtcccgttcttagatgccgtgaatggtttgaggcgggtttgccctggccatacgagcgcggcttcctcttacaccaaaaaatcgcgctgtcccgatatgccactgccctggaagataccgttgatacgtcccggctgttcagatccagatcattgcgagagtttgaagaggcactcttctgccacactaagtccttccctatctcttgggacacgtactgggaccgtaatgacccattgagggatgtcgacgaggccgctgtgcccgtgctgtgtatttgttctgccgacgatcccgtatgcggaccacccgatcacacgttaactactgaactgttccattctaatccctatttcttccttctcctgtcgaggcacggaggacattgcggttttctgaggcaggagccacttcccgcttggtcacacgaagtgatcctcgaaagctttagggctttgacggagttctttaggactgaggaacgtatcaagggccttagccgccatcgtgcttcctttctgggcggccgacgcagaggaggtgcattacagaggcgggaggtatcttccagctccaatctcgaggaaatatttaattggaaacgttcctatactcggtag

SEQ ID NO: 5406 - DNA, 423 bp, synthetic construct
  misc_feature 1..423: note = source = /note="Description of Artificial Sequence: Synthetic coding sequence"
  source 1..423: mol_type = other DNA
atgtttttcaccatcagtaggaaaaatatgagtcagaaactctcactgctgttgctcgtcttcgggttgatctgggggctaatgctgctccactatacctttcaacaacctcgccaccagtcttctgtgaagctgcgagagcagattttggatttaagtaaaaggtatgtcaaggctctcgcagaagagaacaaaaataccgtcgacgttgaaaacggggccagtatggccggatatgctgacttaaagcggaccattgctgtgttgctcgatgacatactacagagacttgttaagttggaaaacaaggtggactatatcgtcgtgaatggaagtgcagccaacaccactaacggcaccagcggaaacctggtccctgtcactaccaacaaaaggaccaacgtgtcaggttccattaggtag

SEQ ID NO: 5407 - DNA, 993 bp, synthetic construct
  misc_feature 1..993: note = source = /note="Description of Artificial Sequence: Synthetic coding sequence"
  source 1..993: mol_type = other DNA
agaggcgcactagtgggagcacctaggtccgctagggcctcttgcctgcgcggcagacgtccaggccgtcgccagccgtgcggccgttgtcccgaccccccaaggtccggccccggccaggctgggcgagccagatgtgcgagagacgttgccgcgcagaccgccctcgccccaagggctcttgccctcggagccggtgccgctggaccaggctggcggggggccgtccccaggcgaccggcagcccgcgtgtccagagcagcccagcggcaggaacaggaacttgtgaggttacaccgtgaacaagagtgcgagctccaaccagagcctgccccaccccgacccagcggtccagccacagccgaggaccctggtcggcgccccgtactgcctcaacgacccccagaggagcgacctcctcagcccccgggctccacaggagtgatcgccgaaacgggacaggcggggcctccggccggagctggcgtgtcggggtaccccaagtccccgcctgtagccagccccggggcacccgtgccctccttagtttctttttccgctggtctcactcagaagccatttccttcagacggcggcgtggtactatttaataaggtgttggtcaatgacggcgatgtgtacaatcccagtacaggcgtgtttacggccccatatgacggaaggtatctaatcaccgctacgctaactccagagagagacgcttatgtcgaagcagtgctgtcagtcagcaatgccagcgtggcccagctgcacaccgcgggttatcgccgcgagtttctggaataccatcgacctccaggagccctccatacctgtggaggccccggcgctttccacctgatcgtccatctgaaagctggcgacgcagtgaacgtggtggtgacgggcggcaagctggcccataccgacttcgacgaaatgtattctactttttctggggtatttctctatccgtttttgagccatctctag

SEQ ID NO: 5408 - DNA, 585 bp, synthetic construct
  misc_feature 1..585: note = source = /note="Description of Artificial Sequence: Synthetic coding sequence"
  source 1..585: mol_type = other DNA
atgtcggcattgtggctcttattgggccttttggccctcatggatctgagcgaaagttccaactggggctgttacgggaatattcagagcctcgatactcccggcgcctcatgtggaataggcaggaggcacgggctaaactattgtggcgttagagccagcgagagactggccgaaatcgatatgccatacctgcttaagtatcagcccatgatgcaaacgattgggcagaagtactgcatggacccggcagtgattgccggtgtccttagcaggaaatctcctggcgataaaatcctggtcaatatgggggatcgtacctcgatggtgcaagaccccggcagccaggcacctacctcttggatcagtgagtctcaggttagccaaaccacagaggtcctaacgacaagaattaaggaaatacagcggcgcttcccaacatggactccggatcagtatctccgaggcggcctttgtgcctatagtgggggcgcggggtacgtgaggtcttcccaggatctgtcatgcgacttttgtaatgatgtgttagctagggcaaaatatctgaagcgtcatgggttttag

SEQ ID NO: 5409 - DNA, 273 bp, synthetic construct
  misc_feature 1..273: note = source = /note="Description of Artificial Sequence: Synthetic coding sequence"
  source 1..273: mol_type = other DNA
atgaaatttttagctgtgctcgttctcctaggagtatccatttttctggtttctgcacagaacccaaccacagccgccccagccgatacatatccggcaaccggacccgctgacgatgaggcgcctgacgcggagactacagcagccgcgacaacagcaaccaccgcagcccctacgactgctacgaccgcagcaagtacgaccgcacgaaaagatatccccgtcctacctaaatgggtgggcgaccttcctaacgggcgagtctgtccatag

SEQ ID NO: 5410 - DNA, 1914 bp, synthetic construct
  misc_feature 1..1914: note = source = /note="Description of Artificial Sequence: Synthetic coding sequence"
  source 1..1914: mol_type = other DNA
atgagccgaatgttgcctttcctgctcttattgtggtttctgccgattacggaaggcagtcaaagagcggagccaatgtttacagcggttaccaattctgtcctgccccctgattacgatagcaacccaacacagctcaattacggtgtcgctgttacggatgtggatcatgatggcgattttgagattgtggtggcaggttacaatgggcccaatctggtgctcaaatacgatcgagcccagaagcgtctcgttaacatcgccgttgacgagagaagttcaccttattacgcattaagggatcggcaggggaacgccatcggggtaaccgcctgcgacattgacggagatggcagagaggagatctatttcctgaatacaaataacgccttttccggtgtcgccacgtacaccgacaagctgttcaaattccgaaacaatcgatgggaggatattctgtcagacgaggtgaatgtggcaaggggggtggcaagcctgtttgccggtagatcagtggcctgcgtcgacagaaagggcagcggccgctatagtatttacatcgcgaactacgcttatggcaatgtcgggccggacgccctcatagagatggacccagaggcctctgatctatcccgcggtatcttggctctacgggacgttgccgccgaagccggagtctcgaaatacacgggcgggcgcggcgtttctgtgggccctatcttatcatcatccgcttctgacatattttgcgacaacgagaatggtccgaactttttgttccataaccggggtgacgggacattcgtcgacgccgctgcctctgcaggtgtggacgatccacatcagcacggtcgcggtgtggccctggctgactttaacagagacgggaaggtggatattgtgtacggaaactggaatggcccccacaggctttatctgcagatgagcacgcatgggaaggttagattcagggatatcgcttctcccaagttcagcatgccttcccccgtacgcaccgtaatcacagccgacttcgataacgaccaggaactggaaattttctttaacaatatcgcatatcgatcttcctcagccaacaggctgtttcgcgtgataaggagagaacacggtgatccccttatagaggagctcaaccccggcgatgcgttggaacccgaggggcggggtacaggtggagtagtgacagatttcgacggtgacggaatgttagatctgatcctctctcatggtgaaagcatggcccaaccactctcggtgttcaggggaaatcaggggttcaacaacaattggctgagagtggtaccaaggacgcggttcggggccttcgcccgcggcgcgaaagtggtcctgtacacaaagaagagcggggcacatctgaggatcatcgacggtggtagcgggtatttatgcgagatggagcctgtcgcccatttcggactgggcaaagatgaggcctcatctgtggaggtgacatggcccgacggaaaaatggtgtctcgcaatgtggcctctggcgaaatgaactcagtgctcgagatcctctaccccagggacgaagatacacttcaggacccagcaccgcttgagtgtggccaaggcttttcacagcaagagaacggacattgcatggatacgaatgaatgtatccagttcccctttgtgtgtccccgcgataaaccggtatgtgtgaacacctatggctcataccgctgcagaacaaacaaaaaatgttcaaggggatatgaacctaatgaggatggaacagcctgtgtcgcccaagtcgcctttctcggcggttattcctcggcagcctctcgtattagcgagccactcagtcgggcaagctacttatccttggggttgggtctatgcctccagctgtacgctctctag

SEQ ID NO: 5411 - DNA, 600 bp, synthetic construct
  misc_feature 1..600: note = source = /note="Description of Artificial Sequence: Synthetic coding sequence"
  source 1..600: mol_type = other DNA
atggccctgaatggcgccgaagtggatgacttctcatgggaacctcctaccgaggctgagaccaaagtgctgcaggctcgccgagagcgccaggatcgcatttctaggctcatgggggactacctgttgagagggtatcgtatgttaggagagacatgcgccgattgcggtactatattgctacaggacaaacagaggaagatctactgtgtcgcctgccaggagctggactctgacgtggataaagataatccagccttaaatgctcaggccgcactgtcacaggcacgggaacatcaactcgcgtccgccagcgaactgcctttgggctcaagacccgctccgcagcccccggtgccaagacctgaacactgcgagggtgcagctgcaggattgaaggcagcccaggggccgcccgcccccgcggttccaccaaataccgacgtgatggcgtgcacgcagacggccctcctgcagaaactcacctgggcatccgccgaactggggagctcaacaagcctggagacatctattcaattgtgtgggctcatccgggcctgtgcagaggctctgcgtagcttgcagcagctgcagcattag

SEQ ID NO: 5412 - DNA, 813 bp, synthetic construct
  misc_feature 1..813: note = source = /note="Description of Artificial Sequence: Synthetic coding sequence"
  source 1..813: mol_type = other DNA
atgaagttaggttgcgttctcatggcttgggccctttacctgtcgctcggcgttctgtgggttgcacagatgctgttagcagccagtttcgagacacttcagtgcgaggggcccgtctgcacggaggagtcaagctgtcatactgaggacgatctaacagacgcacgcgaggctggcttccaagtaaaggcttataccttcagcgaaccctttcaccttattgtatcttacgagctgtttcccgcgccaattttaagggcagtcccaagtgccgaacctcaggctggctcaccgatgacccttagttgtcagacgaagctgcccctccagaggtccgctgcccgtctcctgttcagcttttacaaagatgggcgcattgtgcagagtaggggactgagctccgagttccagatacctacagcctctgaggatcactctggctcatactggtgtgaagcggccacagaggataaccaagtgtggaaacagtcacctcaactggagataagagtacagggtgccagcagctctgctgccccacctactctgaaccccgccccccagaaaagcgccgcccccggaacagccccagaagaggctcccggacctctgccacccccacccactccctctagtgaggatccagggttcagctctccacttggcatgcctgatccacacctgtaccatcagatgggactgctgctgaaacatatgcaggacgtgagagtgctcctcgggcacctactgatggaacttagagagctttcaggccaccgtaagcctggcactaccaaagccaccgctgagtag

SEQ ID NO: 5413 - DNA, 2421 bp, synthetic construct
  misc_feature 1..2421: note = source = /note="Description of Artificial Sequence: Synthetic coding sequence"
  source 1..2421: mol_type = other DNA
atgcgcctgtcccccgcacctcttaaactctcacgcacaccagcgcttctcgcactggccctccctttggcagccgcgttagccttctcagatgagactctggataaggtgccaaagtctgagggttactgttcaaggatcctgcgggcccagggtacccggcgtgagggatacacagagtttagcttacgagttgaaggcgacccagatttttacaagccaggtacctcgtatagggtgaccctgtccgctgccccaccttcctatttcagggggtttacgctcatagcacttcgcgaaaaccgtgagggtgataaagaagaagatcacgccggaaccttccagatcatagacgaggaggagacgcagttcatgagcaattgtccggtggctgtgacagagagtacccctcggcgacgcacccgaattcaggtgttctggatcgcaccacctgctgggactggctgcgtcatcctgaaggcttcaattgtgcagaaacgtataatatattttcaggacgagggaagcctcaccaagaaactctgcgaacaggactccacatttgacggcgtgaccgacaagccaatcctggattgctgctgcggcaccgctaaataccgattaaccttttatggaaactggagcgagaagacacaccccaaagactatccccgacgggctaatcattggtccgctatcattggcggatctcatagcaagaactatgtactatgggagtatggcgggtacgcatccgagggggtcaagcaggtggctgagctcggttcaccagtcaagatggaagaagaaattcgtcagcagtccgatgaagtgctcaccgtcatcaaagctaaggcccagtggccggcatggcaaccgctcaacgtcagagccgccccatcagccgagttctccgtcgacagaacgcgacacctgatgagctttctcactatgatgggtccctcgcccgattggaacgtgggcctcagcgcagaggacctatgcacgaaagagtgcggatgggtccaaaaggtggtgcaggacttgatcccctgggacgcaggtaccgacagtggagttacttacgagtctccgaacaagcctaccattccccaggagaaaatccgaccattgacatcgctagaccatccccagtcgcccttctacgaccccgaaggtggctccatcacccaggtagctcgagttgtcatcgaacggatcgctaggaagggagagcagtgcaacattgttcccgacaacgtggacgacatagttgccgaccttgcccctgaggaaaaggacgaagatgacacacccgagacctgcatctatagtaactggtcaccttggagcgcatgcagctctagtacctgtgacaagggaaagcgcatgaggcagaggatgttgaaggctcaactggatctctctgtcccctgccccgacacgcaagacttccagccctgtatggggccaggctgctctgatgaggatgggtcaacttgtacgatgagcgagtggataacctggagtccatgtagtataagctgcggcatgggtatgaggagtcgagaacggtacgtgaaacagtttccagaagatggctccgtgtgtacactgcccaccgaagagaccgagaaatgcactgttaacgaggagtgttcgccttcctcttgtcttatgaccgaatggggagagtgggacgagtgcagcgccacctgtggcatggggatgaagaagcggcatagaatgattaaaatgaacccggcggacggttctatgtgtaaggctgaaacctcccaggctgagaaatgcatgatgccagagtgtcatactatcccctgcctcctttctccatggagtgaatggagcgattgttctgttacatgtggcaaagggatgaggaccaggcagaggatgctgaaaagcctggccgagctgggcgattgcaacgaagatttggagcaggttgagaaatgcatgcttccggagtgtcccatcgattgtgagttgactgaatggtcccagtggtcagagtgcaacaaatcctgcggtaagggtcacgtcatccgtacccgtatgattcagatggaaccacagtttgggggggccccctgccccgagaccgtccaacgcaaaaaatgcaggattcgcaagtgcttgaggaacccatctatccagaagctcagatggagagaagcaagagaatctaggagatctgagcagttgaaggaagaatccgagggagagcaatttcccggttgccgcatgagaccgtggacagcatggtctgagtgtacaaagctgtgcggcggcggcatccaggagagatacatgacagtcaagaaaaggtttaagagctcacagtttacctcttgcaaagataagaaggagatacgggcttgcaatgttcacccttgctag

SEQ ID NO: 5414 - DNA, 4242 bp, synthetic construct
  misc_feature 1..4242: note = source = /note="Description of Artificial Sequence: Synthetic coding sequence"
  source 1..4242: mol_type = other DNA
atgagacatggggtggcatgggctctgctagtggctgcagccctgggactcggggccaggggcgtgagaggggccgttgccctagcagatttctacccatttggcgccgagcggggagacgccgtgacacccaaacaggacgatggcggtagcggcctcaggccgttatcagtgccattccccttcttcggagccgagcacagcgggttgtatgttaacaacaacggcatcatctctttccttaaagaagtttctcagtttactcccgtggctttcccaattgccaaagatcggtgtgttgtcgcagcattttgggcagacgtggacaatcggagagctggcgatgtgtactacagggaagcaactgatcccgccatgttaaggagagcaacagaggatgtcaggcactactttccagagttactggatttcaacgctacctgggtcttcgtggcgacgtggtacagggtgactttttttggcgggtctagtagtagtcccgtgaatacattccagacagtgttaatcactgacggaaagttatcatttacaatcttcaactacgagtccattgtctggaccacaggtacacatgcgtcatcgggaggaaatgctaccgggttgggcggcatcgcagcccaggcagggttcaatgccggagacggtcagcggtattttagcatcccaggctcacgcacagctgacatggcggaggtcgagactacaaccaacgtgggcgttcccggaaggtgggcatttaggattgatgatgcccaagtaagagtcggaggatgcggtcacaccaccagcgtgtgtcttgccctgcgcccttgcctaaatgggggtaagtgcattgacgattgtgttactggaaacccgagctacacctgctcgtgcctgtccggctttacaggacggcggtgccacctcgacgtaaatgaatgtgcctctcagccttgtcagaacggaggcacgtgcacccatgggatcaactcctttcgatgccaatgtccagcaggcttcggaggaccaacatgtgaaacagctcagtcaccttgcgacacgaaggaatgccagcacggcggccagtgccaggtcgagaatgggagcgcagtgtgcgtgtgtcaagccggttacacgggcgcagcatgcgaaatggacgtggatgattgtagccctgatccctgcctcaatggaggatcgtgcgttgacttggtgggaaattatacctgcctatgcgccgagcctttcaagggcctaaggtgtgaaaccggagaccatccggtcccggatgcgtgcctctccgccccctgtcataacggaggtacctgcgtggacgccgatcagggttatgtgtgtgaatgtccagaagggtttatgggactggactgcagagaacgtgtccctgacgattgcgagtgcaggaatggtggtcggtgtttaggggcaaacacaacgctgtgccaatgtccccttggcttctttgggcttctgtgcgagtttgaaatcacagctatgccgtgtaatatgaacactcagtgtccggacggaggatattgcatggagcatggaggctcatacctgtgtgtgtgtcatactgaccacaacgccagtcactccctcccttcgccctgcgattccgatccctgctttaacggcggctcctgtgacgcccacgacgacagttacacttgtgaatgcccacggggcttccatggcaagcactgtgaaaaggcccggcctcacctgtgcagctcagggccatgtcggaacggcggcacttgcaaggaggccggcggggagtatcactgttcttgtccttaccggttcaccggaaggcactgcgaaatcgggaagcctgactcatgcgccagcggaccatgtcacaacgggggcacttgctttcactacatcggtaaatataagtgcgactgtcctcctggcttttccggccgccactgtgaaatcgctcccagcccctgcttccgaagtccctgtgtgaatggagggacctgcgaggacagggataccgatttcttttgccattgccaggctggctacatgggtaggagatgccaggcagaagtggattgtggacctcccgaggaggtaaagcacgcgactctccgcttcaacggtacccggcttggggctgtggccctctatgcttgcgacaggggatactctctcagcgctcccagtagaatccgcgtttgtcaaccccatggagtttggtccgaacctccgcagtgcttagagatcgatgagtgtcggtcacagccatgcctgcacggagggtcttgtcaggatcgagttgctggctacctatgtctgtgctctacagggtacgaaggagctcactgtgaacttgaaagggatgagtgtcgggctcatccatgccgcaatggtggttcctgccgcaatctgccaggcgcttatgtttgccgctgcccagcggggttcgtgggggtgcattgtgagacggaggtggatgcgtgtgacagcagcccttgccaacacggcgggcgatgcgaatctggcgggggcgcgtacctctgcgtttgtccggaatctttctttgggtaccactgcgagactgtgagcgacccatgcttctcctccccttgtggggggcgcggatattgcctcgcgagtaacggaagccacagttgcacatgtaaggtggggtacactggtgaggattgtgcaaaggagctcttcccccccacagctttaaaaatggagagggtggaagaatctggtgttagcatctcctggaatccaccaaatggtcccgctgcacgtcagatgctggacgggtacgctgtcacctacgtgagttccgacggctcgtaccggagaaccgacttcgtggacaggactcgaagcagtcatcagctccaggccctcgctgctggccgggcctataacatatcagtgttcagcgtgaagcggaactcaaataataagaatgatatatcccgacctgccgtgctcctggcgcgaacgcgcccaaggccagttgagggatttgaggtgaccaacgtcacagcctccactatctctgttcaatgggcgttgcaccggatcaggcacgccaccgtttctggggtccgtgtgtcaattagacatcccgaagccctgagggaccaggctacggatgtcgataggagcgtcgaccgctttactttccgtgccttgctccccggcaagaggtacactatccagttgacaacactttcagggttgcgtggggaagagcatccgaccgaaagtctggccacagcccccacacatgtttggacaagaccattaccccctgcaaatctcacggccgcgagggtgaccgctacaagcgcgcatgtggtgtgggatgcaccgactccaggaagcctcctggaggcgtatgtaataaatgtaaccacatctcagagcaccaagtcccgctatgttccaaacggaaagctcgcatcatacaccgtgcgggacttgttgcctgggcgaagatatcagctttcagtgattgccgttcaatctaccgagctgggtcctcagcactcggagccagcacacctttatatcataacctctcctcgcgacggggcagaccgccggtggcaccaaggggggcaccatcccagagtgctgaaaaacagacctcctcctgccagactaccagagctgcgtctcttgaacgatcattcggcccctgagacacccacccagcccccacgatttagtgagctcgtggatggccgcgggcgggtctccgctaggtttggtgggtcgccgtccaaggccgccactgtgagatctcagcctactgcatcagcacagttagaaaatatggaagaggctcctaagagggtgtccctagctctccagctcccagagcatggcagcaaggacattgggaacgttccaggcaactgcagcgaaaacccttgccagaatggagggacctgcgtccccggtgcagatgcccatagctgcgattgcgggcctggcttcaaagggcgcagatgcgaactcgcttgcattaaagtctcccgcccgtgcaccaggcttttttccgagaccaaggcttttcccgtatgggagggaggcgtgtgccaccacgtttacaaaagggtgtatagggtgcatcaggacatctgttttaaagaatcttgtgaaagtaccagtctgaaaaaaactcccaaccgtaaacagtccaagtcccagacactcgaaaagagctag

SEQ ID NO: 5415 - DNA, 1008 bp, synthetic construct
  misc_feature 1..1008: note = source = /note="Description of Artificial Sequence: Synthetic coding sequence"
  source 1..1008: mol_type = other DNA
atgttcctagccaccctcagtttcctcctgccttttgcacacccattcggaaccgtttcctgtgagtacatgctaggaagtccccttagtagtctcgcacaagtgaacctatcaccattttctcaccccaaggtccacatggatcccaattattgccaccctagcaccagcctacacctctgttccctcgcatggagtttcacccggctcctccaccccccactgagccctggtataagccaggtggtgaaggaccacgtcactaaaccaaccgcaatggcacaggggcgagtggctcacttgattgagtggaaggggtggtccaaaccatctgattcacccgccgctctggagagcgctttctcctcgtacagcgatctgtcagagggagaacaggaggcgagatttgctgctggtgtcgcggagcaatttgctattgccgaggccaagctccgggcctggtcaagcgtggacggcgaggactcaacagacgattcttacgacgaggattttgccggcggcatggacaccgacatggctgggcagctgcccctagggcctcacctccaggatctttttacgggacatagattttctaggccagtgaggcaggggagcgtagagcccgaatctgactgtagccaaaccgtctccccggatacactctgctcatccctctgctcccttgaggatggtctcttgggctccccggctagactggcctcacaacttctaggggatgagctactgctggcaaaactgcctcctagtcgagaatctgctttccggagcctcggcccactggaggcccaggacagcttatataactctccactaacagaatcttgtctcagtccagcagaagaggagcccgccccttgcaaagattgtcagccactttgccccccactcaccgggtcctgggagaggcagcgacaggccagcgacttagcatctagcggggtggtttcactggacgaagacgaggctgagcctgaagagcagtag

SEQ ID NO: 5416 - DNA, 828 bp, synthetic construct
  misc_feature 1..828: note = source = /note="Description of Artificial Sequence: Synthetic coding sequence"
  source 1..828: mol_type = other DNA
atgcagccaccaggcccaagagaccccctcatccgactgtgttttttcagagaggaaggcactaatgtggttcagaaaatctgcttttcaacccaaatcattagacatttcgaatctaaactatctgatacgatcgaggtgtaccaagagcggattcagtggctgactgagaacagcaagaaggcttttggcctcataaaaggtgctagagtgtccattttaattgatgtgtccgccataagtagtgggcctcagaaggaagaattccaaaaggacctgatgagtcttatcgacgagcagttgtcccacaaggagaagctatttgtactgagcttcgggacaaacgctggctccctctggcccgatccgatggaagtctccgcatccactcttcaggagctcaaactgtgggtgaagacactgcaacctgacggcggatcaaatctgctgcaagctctcaagaaaatattcacattaaagggattagactcactggtcgcaattatgaggagttgtcctgaccaaccttccgagatcctgtccgactatatccagcaaagtactatgggtcgggacctgataattcactttataacctacaggtgtgatgaccaaatgccaccagctgtgctgaaaaacctggctgaagctgtcagggggtactatcattgttattcccctaagatggaacactacacttcccgggacatggacgagctgctcgccgagatacagaaagcccagtccctgttgagccacgtacaggcacttcagcacagcagcccctgtgaggcactgacctgcacaatggaggaaccacgtaattag

SEQ ID NO: 5417 - DNA, 438 bp, synthetic construct
  misc_feature 1..438: note = source = /note="Description of Artificial Sequence: Synthetic coding sequence"
  source 1..438: mol_type = other DNA
atgctgacgcgtttagtactatctgctcacctgtcatcaacaacatcgccaccttggactcacgctgcaatttcctgggagctagataatgtgctcatgccaagtccccgcatctggccacaagtgaccccaacaggaaggtctgcaagcgtgagatctgaggggaacacatcaagtctatggaattttagtgcaggccaagacgtgcatgccattgtgacacgaacttgtgaatccgtactgtctagcgctgtgtatacccatggctgcggctgcgtgcgctctgccacaaacatcacatgtcagtcaagtggacagcagcgtcaggctgctaggcaggaagaggagaattcaatctgtaaagctcatgatagccgggagggcagacttggataccctctctcagcgcaccaaccaggatccggggggccgaattag

SEQ ID NO: 5418 - DNA, 777 bp, synthetic construct
  misc_feature 1..777: note = source = /note="Description of Artificial Sequence: Synthetic coding sequence"
  source 1..777: mol_type = other DNA
atgactcctccaaagctccgcgccagcctctcgccttcccttctgcttctcctttcgggttgcttactggctgccgctcggcgcgagaaaggcgcagcatctaacgtggcggagccagtaccaggacccactggcgggtccagcggtagatttctctctccagagcagcacgcctgttcctggcagttgctgctgcccgcccctgaagcagcggccggtagtgagttggctcttcgttgccagagccccgatggagctagacaccaatgtgcctaccgtggccacccagagcgatgcgcggcctacgccgcccgtagagcgcacttttggaaacaggtcctgggcggcctgaggaagaagcgtcgcccatgtcacgacccagccccactacaggctcgactgtgtgcaggtaagaaggggcatggagcggagctccgactggtcccccgcgcctctccccctgcaaggccaactgttgcagggttcgctggtgagtcgaaacctagggcccggaatcgtgggcggactagagagcgcgcgtccggacctgccgcgggcaccccgccaccacagtcggcccctcccaaggagaatccatccgagcgcaaaacaaacgaggggaaaaggaaagctgcacttgttccaaatgaagaacgtccaatgggaactggcccagatccggatggcctggatggaaacgccgagctgactgagacctattgcgcggaaaagtggcattcactgtgcaacttcttcgtgaatttttggaacggctag

SEQ ID NO: 5419 - DNA, 393 bp, synthetic construct
  misc_feature 1..393: note = source = /note="Description of Artificial Sequence: Synthetic coding sequence"
  source 1..393: mol_type = other DNA
atggctcgcagacactgtttcagctactggctcctggtttgctggctggtcgttacagtggccgagggccaggaggaggtgttcacaccccctggtgatagccagaacaatgccgatgcaaccgactgccaaatcttcacactgaccccccccccagctccaaggtcacctgtcacacgagcgcagccaataaccaaaaccccacggtgtcccttccatttctttcctaggaggcctcgaatccattttcgatttccaaatagacctttcgtcccctcccgctgcaaccaccggttcccttttcagccattttattggccccatcgatatctgacttatcgatatttcccaaggcgtcggttgcagaggggcagctcgtccgaagagtcgtag

SEQ ID NO: 5420 - DNA, 600 bp, synthetic construct
  misc_feature 1..600: note = source = /note="Description of Artificial Sequence: Synthetic coding sequence"
  source 1..600: mol_type = other DNA
atgtaccctgcaacagccgtccctcaaataaatatcaccatcctgaaaggcgagaagggagataggggcgatcggggactccagggtaaatatggcaagacgggctcagcaggtgctcgcggccacaccggcccaaaaggacaaaagggaagcatgggggcacccggcgaacgctgcaagtctcattacgcagctttttcagtggggaggaaaaaacccatgcacagcaatcactattaccaaacagtaatctttgataccgaatttgttaatttatatgatcattttaatatgtttacgggcaagttctattgctacgtgccggggctgtacttctttagccttaacgtccatacatggaatcagaaagaaacatacttacacatcatgaaaaacgaagaagaagtggtgattctcttcgctcaagttggcgataggagcatcatgcagtctcagtccttgatgcttgagcttagagagcaggatcaggtgtgggttaggctgtacaagggtgagcgcgaaaatgctatcttctcagaagagctggatacatacatcaccttttctggatacctcgtgaagcatgccactgaaccatag

SEQ ID NO: 5421 - DNA, 702 bp, synthetic construct
  misc_feature 1..702: note = source = /note="Description of Artificial Sequence: Synthetic coding sequence"
  source 1..702: mol_type = other DNA
atggcgctgaaaaacaaattttcctgcctatggatcctgggcctttgcctggtcgctacaacgtccagcaagattccatcgataaccgaccctcatttcatagataattgcattgaggcccataatgaatggaggggaaaggtgaatcccccagctgccgacatgaaatatatgatttgggataaggggctggcaaagatggcaaaggcatgggccaatcagtgcaaatttgagcacaacgactgccttgacaagtcgtacaagtgttacgccgcgtttgagtacgtgggggagaatatatggttgggggggattaagtcatttactcccagacacgctataactgcctggtataacgagacccagttctatgatttcgattctctgagctgcagccgggtatgcgggcactacacccaattggtgtgggcgaactcattctacgttggttgtgccgtggcaatgtgcccgaacctcggcggagcaagcactgctatcttcgtttgcaattacggccccgccggcaattttgccaacatgccaccttatgttcggggagaaagttgtagtttgtgctcaaaggaggaaaagtgcgtaaaaaacttgtgcaaaaacccgttccttaagcccactggcagggccccgcagcaaaccgcttttaatccgtttagcctcgggtttctgctgctccgcattttttag

SEQ ID NO: 5422 - DNA, 669 bp, synthetic construct
  misc_feature 1..669: note = source = /note="Description of Artificial Sequence: Synthetic coding sequence"
  source 1..669: mol_type = other DNA
atggcactccatatacacgaagcatgtattctcctgttagtcatacctggtctggtgacatccgcagccatctcccatgaggactaccctgccgatgagggagatcagatcagcagcaatgataatcttattttcgatgactatcgcgggaaaggatgcgtggatgacagcgggtttgtatacaagttgggggagcgcttcttcccagggcacagtaattgtccctgcgtatgcgcccttgatggccctgtgtgtgaccagccagagtgccctaaaatccacccaaagtgcactaaagtcgaacataatggctgctgtccagagtgtaaggaggtgaaaaatttctgtgagtaccatggcaaaaattataagatcctggaggaatttaagccaagcccgtgtgagtggtgtcgctgcgagcccagtaatgaggtgcactgtgtggtcgccgattgcgctgttccagagtgcgtgaatcctgtgtacgaacccgaacagtgctgtccagtgtgtaagaatggtccaaattgctttgcaggaactaccattatcccagccgggatcgaggtcaaggtggatgagtgtaacatatgccattgtcacaatggcgattggtggaaacctgcccaatgttctaaacgcgagtgccaggggaagcagacagtgtag

SEQ ID NO: 5423 - DNA, 957 bp, synthetic construct
  misc_feature 1..957: note = source = /note="Description of Artificial Sequence: Synthetic coding sequence"
  source 1..957: mol_type = other DNA
atgctgcccctgactatgactgtactcatcctcctactcttgcccaccgggcaggcagcccctaaagacggcgtgacgcgtcctgattcagaagttcagcatcagctgttgcccaatccattccagcccggccaggagcagctggggctgctccaaagctatcttaaaggacttggcaggactgaagtccagctcgaacatctatcgcgagagcaggtcttactctatctttttgcccttcacgattacgaccagagcggtcagctggatggcctcgaactgctctcgatgttaaccgctgcgttggctccgggcgccgctaatagccccactaccaacccagtgatccttatcgtcgacaaggtgctcgaaacacaggacctgaatggagatgggctcatgacccccgcagaactcatcaacttcccaggggtggcactgcgacatgttgagccaggggagcccctcgctcctagtccccaagagccacaggccgttggtcgacagagcttgctcgctaagagccctttaaggcaggagacgcaagaagctccaggccctagggaggaggctaagggtcaggtcgaggccagacgcgagtccctcgatcccgtgcaagaacctggcgggcaggccgaggcggacggcgatgttccgggaccaaggggtgaagccgagggccaagcggaggccaaaggggatgcacccggccctaggggcgaagctggtggccaagctgaggccgagggagacgcaccgggcccaaggggcgaagccggaggccaggccgaagctgagggggatgcccccgggccacggggagaggccggcggtcaggccgaggcccgcgaaaatggtgaggaggcaaaagaactgccaggtgagactttggaaagcaagaacacccaaaatgatttcgaagtgcacatagtgcaggtcgaaaatgacgagatttag

SEQ ID NO: 5424 - DNA, 393 bp, synthetic construct
  misc_feature 1..393: note = source = /note="Description of Artificial Sequence: Synthetic coding sequence"
  source 1..393: mol_type = other DNA
atgctggcaccactgtttctgtgttgtctccggaacctcttcagaaaactcatctcctttcaaccccctcaactgggccgtaccaatatgcactatagcaagctcccccgaacggctatcgagaccgaattcaagcaaaacgtcggaccgccaccgaaggatttaacggccgaggtttacttcccttcaattaaatccaggtcacaccttccggcagtcttctacaaccagtacttcaagcacccaaaatgcgtcggcgagtatggtcccaagaatggtgcggagcggcagattgaggaacgcaaggtcctacctaccactatgatgtttagcatgctggcggattgtgtcttgaagagcacacccattcccatactgggtgtggccatgtag

SEQ ID NO: 5425 - DNA, 4362 bp, synthetic construct
  misc_feature 1..4362: note = source = /note="Description of Artificial Sequence: Synthetic coding sequence"
  source 1..4362: mol_type = other DNA
atgatgcttccgcagaattcctggcacatcgacttcggccgttgctgttgccatcaaaacctgtttagcgcggtggtgacttgcattctgcttctaaattcctgttttctcatctcctcattcaacggtactgacttggaactcagactggtgaatggggatggcccctgctcaggaaccgtagaggttaagttccagggccaatggggtaccgtttgtgacgatggctggaataccaccgcaagcaccgtggtatgtaagcagctcggttgcccattcagctttgccatgttccgctttggccaggccgtcacgaggcacggcaaaatctggctggatgatgtgtcttgctacggaaatgagtctgccctgtgggagtgccagcatagggaatggggttcacataactgttaccacggagaagacgttggggtgaactgttatggcgaggctaatctcggactgcgcctcgtggatggaaataatagctgttctggacgggttgaggttaaattccaggagaggtggggcaccatctgtgacgatggctggaatcttaacaccgcagccgtggtctgcagacagctcggttgccctagtagcttcatcagttccggcgtcgtcaatagcccagctgtcctgaggccaatttggttagatgacatcttgtgccagggaaatgaactcgccctgtggaattgtcggcaccgggggtggggaaaccacgattgttctcataacgaggatgtcactcttacttgctacgattccagcgacctggagctaaggctggttggggggaccaaccgctgtatgggcagagtggagctcaaaattcaggggcggtggggaacagtgtgccatcacaagtggaataacgcagccgccgatgtggtgtgcaagcaattgggttgcggaactgcgctgcattttgcagggctcccacacctgcagtctggctccgatgtggtgtggctcgatggtgtgtcttgctcaggaaatgagtctttcctttgggattgtcgccactctggcacggtcaactttgactgtttgcaccaaaacgacgtctcagttatctgtagcgacggtgctgatctcgaattaaggttagctgacggtagcaacaactgctccggacgggttgaggtcagaatccatgaacaatggtggacaatttgtgatcagaattggaaaaacgaacaagccttggttgtgtgtaaacaactcggatgtccgttcagtgtctttggctctcgccgggccaagccaagtaacgaagctagagacatatggatcaacagtatttcttgcaccggtaatgagtctgctctgtgggattgtacctacgacgggaaggccaaaagaacctgtttcagaagatctgacgccggggttatatgttctgataaagcggacctggaccttcgacttgtgggcgcccactccccttgctacggccgcctggaagtcaagtatcagggagaatggggcactgtctgtcacgaccgctggagcaccaggaacgccgcagtggtgtgcaagcagctgggctgcggtaagcccctacacgtgtttggaatgacctacttcaaagaggccagcggtcctatctggctggatgacgtctcttgtataggaaatgagagcaatatctgggactgtgagcacagtgggtggggtaagcacaattgcgtccatagagaagacgtcattgtgacatgttctggagacgcgacctgggggttgagattagtgggcggctcaaaccgctgtagcggcaggcttgaagtctactttcagggccgatggggaacagtctgtgacgatggctggaacagcaaagccgcagccgtggtgtgctctcaactggattgtccaagtagcattataggcatgggactcggaaacgcttcaaccggatacgggaaaatctggttggacgatgttagttgcgatggtgatgaatctgacctgtggtcatgcaggaattctggctggggcaacaacgactgctcccatagtgaggatgtgggagtaatttgcagcgacgcctccgatatggagcttaggctcgtcgggggttccagtcgttgtgccgggaaagttgaagtgaatgtgcagggagccgtgggcattctctgtgccaacggatgggggatgaacatagccgaagtcgtgtgccgccagcttgagtgcgggtctgcgataagagtcagccgcgagccacatttcaccgagaggacgttgcacatcctcatgagtaactccgggtgtaccggcggcgaagccagtctctgggactgtatacgatgggagtggaagcagacagcttgtcatctgaacatggaagccagccttatatgtagtgcgcatcggcagccgcgtcttgtcggggctgatatgccgtgttccggacgcgtcgaggtgaagcacgctgatacttggcggagcgtgtgcgacagcgacttttccctacatgccgccaacgtgctctgcagggagttaaactgtggagatgccatctcactgagcgtcggcgaccactttggcaagggcaacggcttgacgtgggctgagaagttccaatgtgagggctctgagactcacctggctctgtgccctatcgtacagcaccctgaagacacgtgtatccactcacgtgaagtgggcgtagtttgcagccgctacacagacgttcgattggtgaatgggaagtcccaatgcgacgggcaggtcgagataaacgtactcggacattggggttccctctgcgacactcactgggatcctgaggacgcccgtgtgttgtgtcgccagctctcctgcgggactgccctgagtacaacggggggcaagtacatcggggagcgcagtgtaagggtgtggggacacagattccactgccttggaaacgagtcgctcctcgataattgtcagatgactgtgcttggagctccaccttgtatacacggcaacacagtttctgttatctgtaccggcagcttgacacagccgctttttccctgcctggctaacgtgagcgatccgtacctgagcgccgtacctgaaggcagtgctctaatctgcctggaagacaagcgactgagactcgtggacggcgatagtaggtgtgctggccgggtggaaatctaccatgacggcttttgggggacgatttgtgatgatggttgggacctgagcgacgcccacgtcgtctgtcagaagttaggatgcggagtggcctttaacgctacagtcagcgcacacttcggagaaggctccggacccatttggctggacgatcttaattgtacgggaatggagtctcatctgtggcagtgtccctctagaggatggggacagcatgattgtaggcacaaagaggatgctggggtgatttgttctgagtttaccgctcttcgcctgtactcagaaacggaaaccgagagttgcgccggccgattagaggtcttctataacgggacctgggggagtgtgggaagacgcaatattacgacagctattgccggtatagtttgtaggcagctcggctgtggggagaatggggtagttagccttgcccccctcagcaagactggaagtggcttcatgtgggttgacgatatccagtgccctaaaacccatatcagcatctggcagtgtctgtcagccccctgggagcggagaatctccagtcctgcggaagagacctggatcacatgcgaggataggatcagagtgaggggtggtgataccgagtgttctggcagagtggaaatctggcatgcaggaagctgggggaccgtgtgcgacgatagctgggacctggctgaagctgaggttgtctgccagcagcttggctgtggtagtgcccttgcagcactgagggatgcatccttcggccaaggaactgggaccatctggttggacgatatgcggtgtaagggaaatgaatcttttctgtgggactgccacgccaagccatggggccaaagcgattgcggacataaggaggatgccggcgttcggtgtagtgggcagagtcttaagtctcttaacgcctcatctgggcacctggccttgatcttgagctccattttcggcctcctcctgctcgtgctgttcatcctctttctgacctggtgcagagtgcagaagcagaagcatctacccttgcgggtctccacccgcaggagaggcagtttggaagaaaacttgttccatgagatggagacctgcctgaagcgggaggacccacatgggacccgcaccagtgacgataccccaaaccatgggtgtgaggacgccagtgatactagcctgcttggagtactgcccgcgagtgaggccactaagtag

SEQ ID NO: 5426 - DNA, 759 bp, synthetic construct
  misc_feature 1..759: note = source = /note="Description of Artificial Sequence: Synthetic coding sequence"
  source 1..759: mol_type = other DNA
atgctgcctccgccgaggccggccgccgcgctggccctccctgttctgttactgctcttagtggttctgacacccccccctacaggtgcccgcccaagtcccggcccagattatttgaggcgaggatggatgagacttctggcagaaggcgaaggctgtgcaccatgtcgccctgaagagtgcgctgctcctagagggtgcctagccggcagggttcgggacgcttgtggctgctgttgggaatgcgccaacctcgagggccagctgtgcgacctggatccgtccgcccacttctacggccattgtggggagcaactggaatgccggcttgataccggaggcgatctgtctcgcggagaagttcctgagcccctttgcgcctgtaggtcgcagtcacccttatgcggttcagacggccatacctacagccagatttgtagattgcaggaagctgcacgcgctagacctgacgcaaatctgaccgtggcacaccccgggccctgtgagagcggaccccagatcgtcagccacccatacgacacttggcgcggcccacggctgcagaccctgggaaccgaagatactctaaccacattggtgggcgctggaggaatggcgcgggctgtggcttgtggcgaagctcccggcgagcacctggccctccaggttctgtgcctgagcggaaagagacggcacttatggcaggtcgggtctactggtagctccgagggagtgccctccggaggctctttttggtag

SEQ ID NO: 5427 - DNA, 1323 bp, synthetic construct
  misc_feature 1..1323: note = source = /note="Description of Artificial Sequence: Synthetic coding sequence"
  source 1..1323: mol_type = other DNA
atgaaactcgccttgctgctgccatgggcctgctgttgtctctgtgggagcgccttggccactgggttcctgtaccccttttctgccgctgccctgcagcagcacgggtaccccgaacctggagctggatcaccggggtctggttatgctagtagacgacactggtgccatcacactgtcactagaactgtgtcttgtcaggttcagaatgggtccgagaccgtagtgcagcgcgtgtatcagagctgccggtggccgggaccctgcgccaatcttgtgtcttaccggaccctgattagacctacatacagggttagttatcgcaccgtcactgtcctcgaatggcggtgctgccctggatttactgggagcaattgtgacgaggagtgcatgaactgtacacgactgtcagacatgagtgagcggctgaccaccctggaagctaaggtccttctgcttgaggccgcagagcgcccctcctctcccgacaatgacttacctgctccagaatctacgccaccaacgtggaacgaagatttcctgccagatgcaattcccctagctcatcccgtgccacgtcagcgcagaccaacaggaccggccgggccccccgggcagaccggacctccagggccagctggacccccaggatccaagggagaccgaggccagacaggggagaagggcccagcgggccctcctggtctgctgggaccacccgggccgcggggcctgccaggggaaatgggccgcccaggtccccccggaccgcctgggcctgccgggaatcctggccccagccccaacagccctcagggggcactctactccctacaaccacctactgataaggataacggggatagtaggcttgcctctgccattgtggacaccgtcctggctggggttcccggcccccgaggaccacctggccctccagggccgcctggtccccgcggcccgcctggtccacccggcacccctgggtcccagggcctcgctggcgagcgcggtaccgtcggccctagcggcgagcccggggtaaagggggaagaaggggagaaggccgcaacagccgagggcgaaggggtgcagcagctgagagaggcactaaagatcctggcagagcgagttttgattctggaacacatgatcgggatacatgatcccttggcttctcctgaaggctccggccaggacgcagccctcagagctaacctcaagatgaagcggggcggcgctcagccagacggcgtactggccgccctactgggaccagatcccgggcaaaaaagtgtggaccaggccagttccagaaagtag

SEQ ID NO: 5428 - DNA, 1341 bp, synthetic construct
  misc_feature 1..1341: note = source = /note="Description of Artificial Sequence: Synthetic coding sequence"
  source 1..1341: mol_type = other DNA
atgcttcatccggaaacatccccaggccgagggcacttgctagctgttttgctggctctgttgggcacagcatgggcagaagtttggccccctcagcttcaggagcaagcacccatggctggagcccttaaccgcaaagagagctttctcctgctttctttgcacaatcgcctgcgttcctgggtccagcctccagctgcagacatgcgccggcttgactggtccgattccctggcccagttggcccaggcacgggcggctctgtgtgggattcctaccccctcactagcctctggcctgtggaggactctgcaggttgggtggaacatgcagttgctacctgccgggctcgcctctttcgtagaagtggtctcattgtggttcgctgagggccaacggtatagtcacgccgctggggagtgcgcacggaacgcaacttgcacacactatactcagctggtgtgggctacgagctcgcaactcggctgcggccggcacctatgtagcgctggacaggctgccatcgaagcatttgtgtgcgcttacagcccacgaggtaactgggaagtgaatgggaagaccatcgtgccttataagaaaggggcatggtgctccctgtgtacggcctccgttagcgggtgcttcaaagcctgggatcacgcgggcggtttgtgcgaggtgcccaggaacccatgccgaatgtcatgtcagaaccacggacgcctgaacatctcaacttgtcactgccactgtccgcctggctatactggccgctattgtcaagttcgatgcagtctccagtgcgtgcacggcagattcagggaggaggagtgttcctgtgtgtgcgatataggctatgggggagcccaatgtgctacaaaggtgcattttccatttcatacctgtgatctgcgcatcgatggagactgcttcatggtcagctcagaagctgatacctattatcgggcccgtatgaagtgtcagcggaaaggtggggtcctagcccagattaaatcacaaaaggttcaggatattctcgctttctacctcggcaggctggagacaaccaatgaagtgatcgactctgacttcgagaccagaaacttctggatcgggctcacatataaaaccgctaaggacagcttccggtgggctaccggtgagcatcaggctttcacctcattcgcctttgggcaacccgacaatcacggctttggcaactgtgtggaacttcaggccagtgcagcattcaactggaataatcaacgatgcaaaactaggaataggtatatttgtcagttcgctcaggagcatatttcacgttggggccccggctcatag

SEQ ID NO: 5429 - DNA, 219 bp, synthetic construct
  misc_feature 1..219: note = source = /note="Description of Artificial Sequence: Synthetic coding sequence"
  source 1..219: mol_type = other DNA
atgcaacgcctggtgctgttgctcgcaatttctctgcttttatatcaggatctgcccgtccgaagtgagtttgagctagataggatttgtggttatggcacagcgcgatgtagaaaaaagtgtcggagtcaagaatacaggatcggaaggtgccccaacacctacgcctgctgcctgcgaaagtgggatgagtctctgttaaaccggacaaagccttag

SEQ ID NO: 5430 - DNA, 2349 bp, synthetic construct
  misc_feature 1..2349: note = source = /note="Description of Artificial Sequence: Synthetic coding sequence"
  source 1..2349: mol_type = other DNA
ctttggttgttactgtgggccgccgcatggcggctgggcgcgagcgcctgtcctgcactttgcacctgcactggaacgactgtggattgccatgggacagggctccaggccatccctaagaatatcccaagaaatacagagcggctggagcttaacggaaacaacataacccggatccacaaaaacgatttcgccggactcaaacagctccgggtgttgcagctgatggaaaatcagatcggcgcagttgagcggggggcattcgacgacatgaaagaacttgagcgcctacgactcaataggaatcaactccacatgctgccggaacttttgttccagaataaccaagccctttcacgccttgacctgagcgagaacgcaatccaggcgatcccacgcaaggcatttagaggcgccaccgatttgaagaacctacaactagacaagaatcagattagttgcattgaggaaggggctttcagagccctcaggggactggaggtactcaccctgaataataataacatcacgacaatacctgtaagttctttcaaccacatgcccaaattgagaacttttaggctccactctaaccaccttttctgtgactgtcacctggcatggctgagtcaatggctccgacagaggccaaccatcgggcttttcacacagtgcagcggccctgcgagcctcagaggcctgaacgtagctgaggtacaaaaatcagaattcagctgtagtggccagggagaggcaggaagagtgccgacttgtaccctgagctctggaagttgtccagctatgtgcacctgctcaaacggcatagtcgactgccgcgggaagggcctaacagcaatccctgccaatttgcccgagacaatgactgaaatacgcctggaactgaatggtatcaagtccattcctcctggagccttttccccttaccgcaagttacggcgtatctgtccactttcattctgttcgccctgcagagatctctccaataaccagatcgcagaaattgccccggatgcattccagggactgcgcagccttaactcactcgtgctgtacggcaataaaataaccgacctgccgcgcggagtgtttggtggtctgtacaccctgcaactgctcttgcttaacgccaacaaaatcaactgtatccgcccagatgctttccaggacctccaaaatctctcgctgctgagcctgtacgataacaagatccagtcgctggccaagggtacctttacaagcctcagagctattcagacccttcatctggctcaaaacccttttatctgcgactgtaacctaaagtggctggcagacttcttgaggacaaacccgatagaaacctcaggagcaaggtgcgcgagcccaaggagactggcaaacaaacgtatcggccagattaagtcgaaaaaattcagatgctccgccaaagaacaatacttcattcctggaacagaggactaccaactgaactccgagtgtaactctgatgtggtgtgcccacacaagtgccggtgtgaagcaaacgttgtcgaatgttcgtccctgaagctgacaaagatccctgaacggataccgcaatcgaccgctgagttgcggctgaacaacaatgagattagcatattggaagctaccggaatgtttaagaagctgacccacctgaagaaaataaacctatcaaacaacaaggtcagtgagattgaagacggtgccttcgagggcgccgctagcgtttccgagcttcacctaactgccaatcaactggaatctatcaggtccggaatgtttagaggcctggacgggctccgcactttgatgctgagaaataatcgtatcagctgtatccacaatgactcgtttactgggctaaggaatgtgagactgctgtctctctatgacaaccagattacaacagtttcccctggcgcttttgacacactgcagtcactctccaccctaaatcttctggccaacccgtttaattgcaactgtcaactggcttggcttggaggctggctccgcaagcgaaaaatcgttaccggcaaccccagatgtcaaaacccagattttctacgtcagatcccacttcaggacgtggcctttccagattttcgttgtgaggaaggacaggaagaaggaggctgcttgcctcgccctcagtgtcctcaggagtgtgcctgtctcgacactgtagtgcggtgctctaacaaacaccttcgtgcactgccaaaggggattcctaagaacgtcacagagttatatctggacggcaatcagtttacactcgtgccgggacaactatctaccttcaaatacctccagctggtctag

SEQ ID NO: 5431 - DNA, 411 bp, synthetic construct
  misc_feature 1..411: note = source = /note="Description of Artificial Sequence: Synthetic coding sequence"
  source 1..411: mol_type = other DNA
atgagcaatgttccccataaaagctcactgccagagggaatcaggcccggaactgtattgcgcatccgaggccttgtcccacccaatgcatcacgctttcacgtaaacctcctgtgcggtgaggagcaggggtccgatgctgcactgcactttaatcccaggttggataccagcgaagtcgtattcaattccaaggagcagggcagctgggggcgcgaagagcggggccccggcgtgcccttccagcgtggacagccattcgaggtactcatcattgcatccgacgacggatttaaggccgtagtaggggacgcccagtaccatcactttaggcatcggctgcccctcgcacgagtgagactggttgaggttggtggtgatgtccagctcgactctgtgagaattttctag

SEQ ID NO: 5432 - DNA, 1926 bp, synthetic construct
  misc_feature 1..1926: note = source = /note="Description of Artificial Sequence: Synthetic coding sequence"
  source 1..1926: mol_type = other DNA
atgcctcctccactgcctctgctgctcttaactgtgttagtggtggccgccgccagacctgggtgtgaattcgaacgtaaccctgccgcaacatgtgtggatctgcagttgcggacctgctcagacgctgcttacaaccacacaacattcccaaacctcttacaacacaggtcctgggaggttgtcgaggctagttctgaatatatcttactctctgttcttcatcagcttctggaaggacagtgcaatcccgatttgcgactactaggatgcgcagttcttgcccccagatgcgaaggcggatgggttcgaaggccatgtcgccacatttgtgagggcctgcgtgaagtgtgccagcctgcgttcgacgcgatcgatatggcttggccgtatttcctggattgtcatagatactttacacgagaggacgaagggtgctacgaccctctagagaaactcaggggcggtctggaggcggatgaggctcttcctagtggactgccgccaacttttatacgcttttcacaccatagttacgcgcagatggtccgcgtgttgaggcggaccgcctcgcggtgcgcccacgtggccaggacctactctatcggccgaagttttgatggcagagagctgctcgtcattgaattctcatcacgccctgggcagcatgagctgatggaaccagaagttaaattgataggaaacatccacggcaacgaggtggccggacgtgagatgctgatctatctagcccaatatttgtgctcggagtatctgcttggtaatccccgcatccagcgcttactaaacaccacacgaattcatcttctgccgtctatgaaccccgatggatacgaggtcgcggcagccgagggcgctggatataacggctggacctcgggcagacagaacgcccagaacctggatttaaataggaactttcctgacctgacatcagaatactaccgcctagctgagactcgaggagccagatcagaccacatccctatcccacagcattattggtgggggaaggtagcacccgagactaaggctatcatgaagtggatgcagactattcccttcgtcctttcagcctctctgcacggcggagacctcgtggtgtcctaccctttcgatttctctaagcacccccaagaggagaagatgtttagcccaactcctgatgaaaagatgttcaaattgctgtctagagcttatgccgatgtgcatcccatgatgatggatcgcagtgaaaatcgctgtggaggcaatttcctaaagcgggggtcaataattaatggtgctgactggtactccttcacaggcggcatgtctgatttcaattacctgcacacaaattgtttcgagatcaccgttgagctaggatgcgtaaagttccccccagaagaagccctgtacattctgtggcaacacaacaaagaatccctgctgaacttcgtggaaactgtgcatagaggaattaaaggtgtcgtgactgataaattcgggaaaccagtaaagaacgcccggatcagcgtgaagggcatcagacacgatatcacaacggccccagatggggattactggagactgctgccgcccggcattcatatcgttattgcacaggcacccggctatgccaaggtaatcaaaaaagttatcattcccgcacgaatgaagcgtgccggtagggttgattttattctgcagcctctagggatgggccccaagaatttcattcacgggctgaggcgaacagggcctcacgaccccctgggtggggccagtagtttaggcgaggccacagaacccgatcctctgagggcccgtagacaaccaagcgctgatgggtcgaaaccatggtggtggtcctactttacctctcttagtacccatcggccaagatggctactgaagtactag

SEQ ID NO: 5433 - DNA, 1305 bp, synthetic construct
  misc_feature 1..1305: note = source = /note="Description of Artificial Sequence: Synthetic coding sequence"
  source 1..1305: mol_type = other DNA
atggcctctcttggactacttctgctgctgctgctgacagccctgccccccctctggagctcctcattacctgggcttgatactgctgaatccaaggccacgatcgctgacctcatacttagcgcactagagcgcgccactgtatttttggaacaaagactgccagaaattaacctggacggcatggtgggagtgagagttcttgaggagcagctcaagtcagttcgcgaaaaatgggcccaggaaccactgttgcagcccctcagtttgcgggtcgggatgctaggggaaaaactggaagccgccatccagagaagtctgcactatctgaagctatccgatcccaagtaccttcgcgagtttcagctcaccctacagccggggttctggaagctgccgcatgcttggatccacaccgacgccagcctggtctatcccacctttgggcctcaagacagcttttccgaggagaggagtgatgtatgcctagtccagctgctcgggaccggcactgacagctcggaaccctgtggcttaagcgacctctgtcgcagtctcatgaccaaacccggttgtagcggatattgcctgagccatcaactgctgttctttctatgggcccgcatgcgggggtgtacacaaggccccttacagcagtcccaagattatattaatctgttctgtgccaacatgatggatttgaacagacgggccgaggccataggctacgcctatcccacacgggacattttcatggagaataatgtgaccgggcatcccgtgttttacctacccttgtgcgattcgtttcttccccccaaagctgcccctgtgaccgagttgtacaccgatgggcccgtaatgttttgtgggatgggcggattctctgacttctacaaacttcgatggctcgaagcaatactatcctggcagaaacagcaggaaggatgcttcggcgaacccgacgcagaagacgaggaacttagcaaggcaattcagtaccagcagcacttctctcggcgggtaaagagaagagagaagcagttccccgattctcggagtgtggcccaggcaggagtgcagtggcggaacctcggaagtctccagccactgcctcctggatttaaacagtttagttgcttgatcctgccctcctcgtgggactataggagtgtcccgccctatttagccaatttttacatcttcttggtggagacaggcttccatcatgttgctcatgctggactagaactcctgatctcaagagatccacctaccagcggctcccaatccgtgggtctgtag

SEQ ID NO: 5434 - DNA, 555 bp, synthetic construct
  misc_feature 1..555: note = source = /note="Description of Artificial Sequence: Synthetic coding sequence"
  source 1..555: mol_type = other DNA
atgatgtcatttctgcttggcgctattctgactctgttatgggcgcctacagcccaggccgaagttctcctgcaacccgatttcaacgccgagaagtttagcgggttatggtatgtggtgtccatggcatctgactgccgggtgtttctcgggaaaaaggaccatttaagcatgagcactcgagccattcgtccgacagaggaaggcggcctgcacgtacatatggaatttccgggcgctgatggatgtaaccaggtggatgccgagtatctgaaagtgggaagcgagggccacttccgcgtcccggcactggggtacctggatgtccggatcgtagataccgactactcctctttcgctgtcttatatatatataaagagttggagggcgcccttagcactatggtgcagctgtactcacgcacgcaggacgtatcacctcaggctcttaagagcttccaggacttctaccctacactgggcttgccaaaggatatgatggtgatgctgccccagagcgacgcttgtaaccccgaatccaaggaggctccttag

SEQ ID NO: 5435 - DNA, 219 bp, synthetic construct
  misc_feature 1..219: note = source = /note="Description of Artificial Sequence: Synthetic coding sequence"
  source 1..219: mol_type = other DNA
atgcagcgcctcgtcctgctgctcgcaatcagcctgctgctgtatcaagatctgcctgttagatctgagttcgaactagacagaatatgtggctatgggacagcacggtgccgaaaaaaatgccggtcacaagagtaccggattggtaggtgtccaaatacctatgcttgctgcctcaggaaatgggacgagtctcttttgaatcgaacaaaaccctag

SEQ ID NO: 5436 - DNA, 2247 bp, synthetic construct
  misc_feature 1..2247: note = source = /note="Description of Artificial Sequence: Synthetic coding sequence"
  source 1..2247: mol_type = other DNA
atgggacgagccggcgccgccgccgtgataccagggctggcgctgctatgggccgtgggccttgggtctgctgccccacctcccagactgcgcctctctttccaagaattgcaagcctggcacggactacagaccttctccctggaacgcacctgctgctatcaagctcttttagtggatgaggaacgaggtcggctgttcgttggggccgagaatcacgttgcttccttgaacctggacaacatctcaaaaagggccaaaaagttggcatggcccgctccggtggagtggagggaggaatgcaactgggcaggcaaggacattgggacggaatgcatgaatttcgtgaagctgctccacgcgtataacagaacccatctgttggcttgcggtactggtgccttccacccaacctgcgcctttgtcgaagtgggtcatcgcgctgaggagcctgtattgcgtctggaccccggaagaatcgaggacggaaaaggaaagagtccgtatgacccacgccaccgggcagcctccgtgctggtaggggaagaactctattctggcgttgcagctgacctcatgggacgagattttactatcttccgatccctaggccagcggcctagtctgcgaacggaacctcacgactcccgctggttaaatgagcctaaattcgtgaaggttttttggatacctgaatcagagaatccagacgatgataagatttacttcttttttagggagaccgccgttgaagcggcccctgctctcggcaggcttagcgtgtctcgggtggggcaaatttgcagaaacgacgtgggcggacagagatcccttgttaacaagtggaccacatttctgaaagccagattggtctgttccgtgcctggagttgaaggtgacacacattttgaccaactccaagatgttttcctcctttcctccagggaccaccgaactcccctgctgtatgccgtgttttcaacctccagtagtatttttcaaggcagcgccgtgtgcgtctactccatgaatgacgttcgacgtgcctttttggggccattcgcccacaaggagggtccaatgcaccagtgggtgtcttaccaggggcgtgtaccctatccccgacccgggatgtgcccgtctaaaactttcgggacattctctagcacaaaggattttcccgacgacgtgatccagtttgcccggaaccaccccttgatgtacaacagtgtgctgcccactggcgggagacccctcttcctgcaggtgggagctaactacaccttcacccagatcgccgctgaccgtgtcgctgccgcggacgggcactatgatgtgctctttatcgggacggacgtgggtacagttctgaaggtaatttccgtcccaaaaggcagccgccctagcgccgaaggcctgctcttagaggagcttcacgtgtttgaggactctgctgcggttactagtatgcaaatctcatctaagcgtcatcagctttacgtggcctcccggtccgcagtggcacagatcgccctccatcgttgtgccgcgcacggccgagtgtgtaccgagtgttgcctggcacgggacccgtactgcgcctgggatggtgttgcatgcactaggttccaaccttctgcaaaacgaagatttcgacggcaggatgtccgcaatggtgatccgagtacactgtgctccggcgacagcagtagacctgctttattagaacacaaagtttttggagtagaaggttcatcggcctttctggaatgtgagcctcgctctctgcaggcccgcgtggagtggacatttcagagagccggcgtgaccgctcacactcaggtcctggcagaggagaggactgagcgaaccgctcgcggcttacttcttcgacgactgcgcaggcgtgattctggtgtctacctttgcgctgcggtggaacagggctttacacagccactgagacgactatccttacacgtcttatcagctacacaggccgaacggctagcccgcgccgaggaagcagccccagccgcccctccagggccaaagctctggtatagagacttcctccagctggtggaacctggtggcggcggctccgccaactccctaaggatgtgccgcccccagcccgcactgcaatccttgccacttgagagtcgaaggaaaggtagaaatcggcgcacccacgctcccgagcccagggccgagagaggaccgcgctcggccactcactggtag

SEQ ID NO: 5437 - DNA, 369 bp, synthetic construct
  misc_feature 1..369: note = source = /note="Description of Artificial Sequence: Synthetic coding sequence"
  source 1..369: mol_type = other DNA
atggtgctgctgtgcttgtttcttgcctctctggctgcgaccccgcgcgcgggtgtgacgggagcctggccaacgagcggtctgtccattctggcacagctgcaaccatcctgcgaactgcgatggactcagctgtctcggtcttcctggcgggatcttgtgatgactacatccttgtggagccttgcctactttcagcacttctcacaggagacaacgacacaggaacaactggacgagatggaggagattccccgggagagccaatgtggaagacaagactttcatgccctatcgtgccctacagccagccctcgagatcgcgtgctgctgtgctgcccaggttggcgggccatggtgccgtcctag

SEQ ID NO: 5438 - DNA, 570 bp, synthetic construct
  misc_feature 1..570: note = source = /note="Description of Artificial Sequence: Synthetic coding sequence"
  source 1..570: mol_type = other DNA
atgctgctgggacagctgtctaccctcctttgcttactgagtggcgccctccccactggctccggacgacccgagccgcagagtcctcggccccaaagctgggccgcagctaaccagacctgggcgttgggccctggagctttgcctccccttgtgcctgctagtgccctgggatcttggaaagcgtttctcggtctccaaaaagccagacagctcgggatggggcggctgcagcgggggcaggatgaggtggccgctgttacattaccactgaatccgcaggaggtcattcaggggatgtgcaaggctgtgccattcgttcaggttttctcccgtccgggttgctctgcaatccggctaagaaaccatctctgtttcgggcattgctcaagtctttacatacccgggtccgatcctacacccctcgtgttatgcaattcctgcatgcctgccaggaagcggtgggcacctgtggtgttgtggtgcttgactgggtcctccgcttcccgacgccgtgtcaagatctccactatgctcatcgaaggctgccactgctcaccaaaggcctag

SEQ ID NO: 5439 - DNA, 2505 bp, synthetic construct
  misc_feature 1..2505: note = source = /note="Description of Artificial Sequence: Synthetic coding sequence"
  source 1..2505: mol_type = other DNA
atgaagcacacattagccctcctggcccctcttttgggactgggcctgggcctggccttatcacagctggcagctggcgccaccgactgtaagttcctgggaccagctgagcaccttacttttacaccagcggcacgtgctcgatggttggccccaagagtacgcgctcccgggctgttagattcactttacggcaccgtccgtagattcctgagtgtggtgcaactgaatcccttcccttccgaactcgtcaaggcactgctgaacgagcttgctagcgtcaaagtgaatgaggtggtccgatacgaggctggctatgttgtgtgcgctgtgatcgctggcctgtacctgctgttagtgcctacggctggcctgtgcttctgctgttgtagatgccacaggcgctgtggagggagggtcaagacagagcacaaggccctggcgtgcgagcgggcagccttaatggtatttctactgctgacaaccctgttgctgctgatcggcgtggtatgcgcttttgtgacaaatcagaggacccacgaacaaatgggaccttccattgaagccatgcctgagaccctcctgtcactgtgggggttagtcagtgacgtgccacaggagctccaagccgtggcccagcaattctctttgccccaggaacaggtaagtgaggaacttgacggagtcggcgtgtcaattggaagtgctattcacacacagttgcgctcatctgtttaccctctgttggccgccgtggggagcctggggcaggtgctgcaagttagcgtacaccatctgcagactttaaatgcaaccgtagtcgagttgcaggcggggcagcaggatttggaaccagccatacgagagcatcgggatcggctgcttgagctactccaggaagcccgttgtcagggggactgtgctggggccctaagttgggctcgaactttggagctaggggccgacttctcacaggtcccctccgtcgatcatgtgctgcaccagctcaagggggtgccagaggctaacttcagcagcatggtgcaagaggagaactccacattcaacgctctacccgctctagccgccatgcagacaagcagcgtcgtgcaggagttgaaaaaagccgtggcccaacaacctgaaggagtgcgtactctggcagagggattccctggcctggaagccgcctcgcggtgggcacaggctctgcaagaagtggaagaatcttcacgtccctacttacaagaggtgcagcggtacgaaacatatcgctggatcgtaggctgtgtcctttgtagtgttgtcctgttcgtagtcctgtgcaacttgttaggcctgaacctcggtatctggggcctctccgcacgcgatgatcctagccatccagaagcaaagggagaggcaggcgcgaggtttcttatggctggcgtgggcctgtcttttctgttcgccgcacccctcatcttgctagttttcgctacgttccttgttggtggaaacgttcagacactggtgtgtcaaagttgggaaaacggggagttatttgaattcgcggacacacccggcaatctgccacctagcatgaacctctcccagcttcttggccttcggaaaaacatcagcatccaccaggcgtaccagcagtgcaaagagggggcggccctgtggactgtgctccagctcaatgattcatatgatcttgaggaacacctggatatcaatcaatacacaaacaagcttcgtcaggagttacagagcctgaaggttgacactcagagtctcgacctcctgtcctctgccgcccgccgtgacctcgaggcccttcaatcgagtgggctgcagagaatccattacccagatttcctcgtccagattcagcgacccgtcgtcaagacgtctatggagcagctggctcaggagctacaaggactcgctcaggcccaggataactccgtgctcggacaacggctgcaagaagaggcgcagggcctccggaacctgcaccaggaaaaagttgtcccgcagcagagcctggtagcaaaacttaatctatctgtccgcgcactagaatcctccgctccaaatttgcagctggaaacttctgacgtgctggccaatgtcacctacctgaaaggggaactccctgcatgggctgcacgcattctaagaaacgtttccgaatgctttctcgctcgggagatgggctacttcagtcagtacgtggcgtgggtgcgggaagaggtcacccagagaattgctacctgtcagcctctcagcggcgccttagacaacagcagagttatcctgtgcgacatgatggcggatccatggaatgccttttggttctgcctggcttggtgcaccttttttttaatccctagcataatcttcgctgtcaagacctcaaagtattttcggcccattcgcaaaaggctgtcaagtacttccagtgaggagacccagctgtttcacattccccgagttactagccttaagttgtag

SEQ ID NO: 5440 - DNA, 2505 bp, synthetic construct
  misc_feature 1..2505: note = source = /note="Description of Artificial Sequence: Synthetic coding sequence"
  source 1..2505: mol_type = other DNA
atgaaacataccttagcgctgctcgccccgttgctgggactcgggcttggcttggccctctcacagctcgccgccggagcaacagactgtaaattcctcgggcccgccgaacatctcacctttactccggctgcccgagcacgctggctcgctccacgggttagagcccctggcttactagattcactgtatggcacagtccgcagatttttgagcgtagtacagctgaatcccttcccttcagagctcgtaaaagccctcctaaatgagctggcctccgtgaaagtgaacgaagtggttcgctatgaggcaggatatgtagtctgcgctgtgatcgctgggctctacctgttactggtacccaccgcaggattatgcttctgttgttgccggtgtcacaggaggtgtggtggccgggtcaaaacagagcataaggctctggcttgcgagcgagccgcgctgatggtgtttctcctgttgactacactcttattactgatcggcgtggtgtgcgcattcgtcactaatcagaggactcacgaacagatggggccaagtattgaagccatgccagagactctattgtccctgtgggggttagtttccgatgtgccgcaagaactgcaagctgtggcacagcaattttctttgcctcaggagcaggtttcagaggagctggatggcgtgggtgtatctattgggtccgccatacacactcagctcagatctagtgtttacccactgcttgcagccgttggcagtctgggtcaggtgctgcaggtgagcgtgcatcacctgcaaacattaaacgccaccgtagtggagctgcaggctggtcagcaagatctggagccagcaatccgggaacatcgggatcggctgctcgagctcctccaagaagcacgctgccagggagactgcgccggagctctctcatgggccaggacccttgaactcggagcggacttttcacaagtaccctcggtcgaccatgtgcttcatcagttgaagggagtgccagaggctaactttagtagcatggttcaagaggagaatagcacattcaacgctttaccagccttagcggccatgcaaacgagcagcgtggtccaggagctgaaaaaggccgttgcacagcaaccggagggcgttcgcaccctcgctgagggattccctgggcttgaagctgcaagccgatgggcacaggctctccaggaggtggaggaaagctcccggccctaccttcaggaagtgcagcgctacgaaacgtatagatggatcgtcggatgtgtgctgtgcagcgtggtgctgttcgtcgtgctgtgcaacctgctgggtctcaatctgggcatttggggtctaagtgcccgcgacgatcctagccaccccgaagctaagggagaggcaggggccaggttcctgatggccggagtgggtctcagcttcctgtttgcagctccgctgatcctgctggtgtttgctacgtttctagtcgggggaaatgtccagaccctggtttgtcagtcgtgggagaatggggagctgtttgaattcgcagatacaccagggaacttacctccctccatgaatctgtcacagcttctcggacttcggaagaacatatctatccaccaagcttaccaacagtgtaaggaaggcgccgctctgtggaccgtgttgcaacttaatgattcctatgacctggaggagcacctggacatcaatcagtatactaataaactccgccaggagttacagagtttaaaggtggatacacagtccctggaccttctgtcaagcgccgccagacgggatctggaagctttgcagagctccggtctgcagcgaatacactaccccgatttcctggtccaaatccagcgacctgtagtgaaaacctccatggaacagttggcccaggaacttcagggcttggctcaggcccaggataactcggttctggggcaacgattgcaggaagaggcacagggtctccggaatttgcatcaggaaaaagtagtaccccagcagtcgttagtcgctaagcttaacttgagtgttcgtgccctcgaaagctctgcaccaaaccttcagctggagacatctgacgttttagctaacgtcacctatttgaagggcgaactgcccgcctgggccgcgcgtatccttcggaacgtcagcgagtgcttcctggcaagggaaatgggctatttcagccagtatgttgcatgggtccgtgaagaggtgacacagaggattgcaacctgccagccccttagcggtgcgctcgacaattcacgtgtgatactttgcgacatgatggcagacccatggaacgcgttttggttctgcctggcttggtgcacgtttttcctcatcccctctattatctttgctgtcaagacgtctaagtactttcggccaatccgaaagagactgtcctccacctcaagcgaggaaacacagttgttccacattcctagagtgactagcctcaaactttag

SEQ ID NO: 5441 - DNA, 216 bp, synthetic construct
  misc_feature 1..216: note = source = /note="Description of Artificial Sequence: Synthetic coding sequence"
  source 1..216: mol_type = other DNA
atgacccaattgctgctgttcctggtggctctgctggtcctgggccacgttcccagcggcaggagtgaattcaaaagatgttggaaagggcaaggggcgtgtcaaacatattgtacacgccaggagacctatatgcacctctgccctgacgcgagtctctgctgtctgtcctacgctttgaaaccccctcccgtccccaagcatgagtacgagtag

SEQ ID NO: 5442 - DNA, 1377 bp, synthetic construct
  misc_feature 1..1377: note = source = /note="Description of Artificial Sequence: Synthetic coding sequence"
  source 1..1377: mol_type = other DNA
atggaggccacaggaacagatgaagtagacaaactaaaaacaaagtttattagcgcctggaataacatgaagtattcatgggtgctgaaaaccaagacctacttttctcgaaacagccctgtccttcttttgggtaagtgctatcacttcaagtatgaggatgaagacaaaactcttccagcagagagtggctgtacaattgaagaccatgtgattgctggcaatgtggaggagtttagaaaagattttataagcaggatttggctgacatacagagaagagtttccccaaatagagggatccgctctcaccactgactgcggttgggggtgcaccctgcggaccggtcagatgctgctagcccagggacttatactgcacttcctcggtcgggcctggacctggccagacgctttgaatattgaaaattccgattcagaaagctggacaagtcacaccgttaagaagttcaccgccagcttcgaggcatcactgtccggtgagcgcgaattcaagacaccaacaatctccctgaaggagacaattggtaagtactccgatgaccacgaaatgagaaatgaggtgtaccacaggaaaatcatctcatggttcggtgactctcctctggccctgtttggactgcaccagcttattgaatacggaaaaaaaagtggcaagaaggccggagattggtatgggccagcagtcgtggctcatattctgaggaaggccgtcgaagaggcgcgacaccctgacctgcaggggattactatatatgtagctcaggactgtacagtctacaacagcgacgtgatcgataagcagtccgctagcatgacatctgacaatgcagatgacaaggcagttattatcctcgtgccagtccgcctgggcggcgagcgaaccaacactgattacctcgagtttgtgaaaggaatcctttctttggaatactgcgtcggaatcatcgggggcaaacctaagcaaagctattacttcgctgggtttcaggatgattccctgatttatatggacccgcactactgccaatcattcgtggacgtgtcaataaaagatttcccgctggaaaccttccactgccctagtccaaaaaagatgtcgttcaggaagatggacccgagttgcaccatcggattctattgtcggaatgttcaggattttaagcgcgcgtcggaagagattaccaagatgctgaaattttccagtaaggagaagtaccctctctttacctttgtgaacggtcattcacgagattacgattttacctctaccactactaatgaagaggatctgttctccgaggatgaaaagaaacaactaaagaggttcagtacagaagaatttgttttactgtag

SEQ ID NO: 5443 - DNA, 342 bp, synthetic construct
  misc_feature 1..342: note = source = /note="Description of Artificial Sequence: Synthetic coding sequence"
  source 1..342: mol_type = other DNA
atgagacagaggctgctgccatcggtgacctccctgcttcttgtcgcattactcttcccaggatcctcccaggccagacacgtgaatcactcggcaacagaagcactcggtgaattaagagagagagcccctggacagggcactaacggcttccagctcctcagacacgcagtaaagcgtgacttgctgccgccacggaccccaccttatcaggaaccggcctccgaccttaaggtggtcgactgcaggagatcagaggggttttgccaggaatattgcaactatatggagacgcaggtcggctattgtagcaaaaaaaaggatgcctgttgtctgcactag

SEQ ID NO: 5444 - DNA, 258 bp, synthetic construct
  misc_feature 1..258: note = source = /note="Description of Artificial Sequence: Synthetic coding sequence"
  source 1..258: mol_type = other DNA
atgaaaaaagttctgctgttaattacagcaattctggccgtcgccgtcgggttcccagtaagtcaggaccaggaacgtgaaaagcgttccatttcagatagcgacgaactcgcaagtggcttttttgttttcccctacccatacccattcaggccgctccctcctataccatttcctcggtttccctggtttcgccgcaattttcccattccaatcccggagagcgcccctactactcccctaccatccgagaagtag

SEQ ID NO: 5445 - DNA, 264 bp, synthetic construct
  misc_feature 1..264: note = source = /note="Description of Artificial Sequence: Synthetic coding sequence"
  source 1..264: mol_type = other DNA
atggcggtgtcagtgttacggctgaccgtggtattaggcctcttagtgctctttctgacgtgctatgccgacgacaagccagataaacccgacgacaagcctgacgacagtggcaaagaccccaaaccagattttcctaagttcctgtctttattgggtacagagattattgagaatgctgtggaattcattctgaggagtatgagccggagtacaggattcatggagttcgatgataatgagggcaaacactcctccaaatag

SEQ ID NO: 5446 - DNA, 945 bp, synthetic construct
  misc_feature 1..945: note = source = /note="Description of Artificial Sequence: Synthetic coding sequence"
  source 1..945: mol_type = other DNA
atgtcttccgaggctgaaacccaacagccgcccgccgctcccccagctgctcccgcgctgtctgccgcagacactaagccagggactactggtgcccagggcgctgtcgctcgggcccatatcggcggagcaggcggagataagaaagtgattgccactaaagttcttggaacagtgaaatggttcaacgtgcggaatgggtacgggttcattaataggaatgataccaaggaagacgtgtttgttcaccagacagctataaaaaaaaacaaccctcgcaagtatctgaggtccgtaggcgacggcgagacagttgagttcgacgtggtggagggagaaaagggagctgaagccgcgaatgtgacaggccccggaggcgtccccgtgcaggggtcaaagtacgcggcagaccggaaccactacaggaggtacccgcgtcgccgcggtcccccccgcaattatcagcaaaattatcagaattctgagtctggcgagaaaaacgagggtagtgagtctgctcccgaacgacccaataatgcaggcccccaagcaaaagtacccaccttactgcatgctgagtacggtcgacggccccagtactcaaatcctcctgttcagggtgaagtgatggagggggcggataaccagggggccggcgaacaagggcgtcctgtgaggcagtgtatcggggatattgaccacgacagtgccggagcattgttagccagacagccccgagaggacggcaacgaggaagacaaagagaaccagggagacgagactcagggacagcagccacctcaaagaaggtaccgtcggaactttaattacaggcgcagacgcccagagaacccaaaaccccaagatggtaaggaaaccaaggcagcggacccgccagccgagaacagtagcgccccggaagcagagcagggcggtgctgaatag

SEQ ID NO: 5447 - DNA, 636 bp, synthetic construct
  misc_feature 1..636: note = source = /note="Description of Artificial Sequence: Synthetic coding sequence"
  source 1..636: mol_type = other DNA
atggtgtttctcaagttcttctgcatgagctttttctgtcatttatgccagggctacttcgacggcccactctatcccgaaatgtccaatggtaccttgcaccactattttgtacctgacggggactacgaagaaaacgatgaccccgaaaaatgccagctcttgtttcgtgtgagtgaccaccggaggtgcagtcaaggagaaggatcccaggtcgggagcctcctgtcccttaccttgcgagaagagtttaccgtcctgggtcggcaagttgaagacgcagggcgcgtgctggagggcatttccaaaagcatatcttacgacttggacggagaagaatcctatggcaagtatcttcggcgagaatctcaccagatcggagatgcctacagcaattcggataagtcactgacagagctcgagtctaaattcaaacaggggcaggagcaggattccagacaggaaagccgcctgaatgaggactttctcgggatgctcgtgcatacaaggtcacttctaaaagaaaccttagacatatccgtcggcctgcgagataagtacgagctcctcgctcttaccattcgcagtcatggaacaaggcttggtcgactcaaaaacgactatcttaaggtgtag

SEQ ID NO: 5448 - DNA, 1566 bp, synthetic construct
  misc_feature 1..1566: note = source = /note="Description of Artificial Sequence: Synthetic coding sequence"
  source 1..1566: mol_type = other DNA
atgctgtgcgccctgcttttgctgccaagcctgctgggggctacaagagccagtcccactagtggcccacaggagtgcgccaaaggtagcaccgtctggtgtcaagacttacagaccgcagctagatgcggggcagtcggctactgccagggagcagtgtggaacaagccaactgcaaaatctttaccctgtgacgtctgccaggacatagctgctgccgcgggaaatggcctaaacccggacgcaactgaatccgacattctggcgcttgtgatgaagacatgtgaatggttgccgagccaggagtccagcgccggctgcaaatggatggttgatgctcactcatctgccatcttatcaatgctgagaggagccccagattctgcacccgcgcaggtctgcactgccctgagtctctgcgagccacttcagcggcacttagccacattgagacctttatctaaagaggataccttcgaggcagtggctcctttcatggccaatggaccacttacatttcacccaagacaggccccggaaggagcattgtgccaagattgcgtgcgccaagtgtcacgcttacaggaggctgttcgcagtaacctgacattggcagatctgaacatccaggaacagtgcgaaagcttaggccctgggttagcagtgctttgcaaaaattatctgttccaatttttcgtgcctgccgaccaagcgctgcggcttctgcctccccaggagttgtgcaggaagggcgggttctgtgaggagctgggagcacccgcgcgcttgacccaagtcgtggccatggacggagtgccttctcttgagctcggactcccccgcaaacagagcgaaatgcaaatgaaagctggtgtcacgtgtgaagtttgcatgaacgttgtgcaaaagctggatcattggctgatgtcgaactcaagcgagctcatgatcacacatgcgctggagcgggtctgctcagtgatgccagcatctatcacaaaagagtgcattatcctggtggacacgtacagtccctcactcgtgcagctggtggctaaaatcacccccgaaaaggtatgcaagtttattcggctgtgtggaaatcggcgcagggctcgcgctgtgcatgacgcctacgccatagttccatcccctgaatgggatgcagagaatcagggaagcttctgcaacgggtgtaaacggctcctgaccgtctcaagccacaacttggagagcaaatctacaaaacgggatattctggtggcgtttaagggtggctgctcaattctccccctgccatatatgatacaatgtaagcattttgtgactcagtacgagcccgtcttgattgaatccctaaaagacatgatggacccggtggctgtctgtaaaaaggtcggcgcttgtcacgggccccgcacaccacttctgggaacggaccaatgtgccctcggcccatctttttggtgtaggtcgcaagaagctgcgaagctatgcaacgccgtccagcattgtcaaaagcatgtatggaaggagatgcatctgcacgccggtgagcatgcctag

SEQ ID NO: 5449 - DNA, 2127 bp, synthetic construct
  misc_feature 1..2127: note = source = /note="Description of Artificial Sequence: Synthetic coding sequence"
  source 1..2127: mol_type = other DNA
atggccgcggccgctgtggcagccgccgcagcagctgcagccgctgcatccctgcaggtccttgaaatggaatctatggaaaccgcagccgccggctctgccggcctggccgcagaagtcaggggatctggcactgtggatttcggacctggacctgggatcagcgcgatggaggcctctggcggggacccaggcccggaagcagaagactttgagtgctctagtcactgctcggagctgtcatggaggcagaatgagcagaggaggcaaggactgttttgcgacattaccttgtgcttcgggggcgccggaggccgcgagtttcgagctcaccggtctgtccttgccgccgcaaccgagtacttcacacctctcttgtctgggcagttcagcgaaagccggagcggccgagtagagatgagaaagtggagcagcgaacctgggccagagccagataccgtagaagccgtgatcgaatatatgtacaccggaaggatacgcgtgagcacgggttccgtacacgaggtgttggagttagctgataggtttctgctgatcagactaaaggagttttgcggcgaatttctcaagaaaaaactccatctttcaaattgtgtggcaatccactctttggctcatatgtacacactcagtcaattggcccttaaagcagccgacatgatccgccgtaacttccacaaagtgatacaggacgaagaattctatacgctccccttccatttaattcgtgactggcttagcgatctggaaattaccgtggattctgaggaggtgttgttcgagactgtgttgaaatgggtgcagcggaatgcagaagagcgggagagatactttgaggaactattcaagctactgagactgtcccagatgaagcctacctatcttactaggcacgtgaaaccagaacgtcttgtggcgaataatgaggtgtgcgtgaaactggttgccgacgcagtagagcgccacgctctgcgggccgaaaatattcagagtggaacctgccagcaccctacaagccatgtctcactgctgccacggtacggccagaacatggacgtcatcatggtgatcggcggggttagcgaagggggggattatctcagtgaatgcgtgggatacttcgtcgacgaggataggtgggtgaatctgcctcacatccataaccatctcgacggacatgcagtcgccgtcacagaaagctatgtttacgtggccggctccatggagccgggctttgcaaagactgtggaaaggtacaatcccaacctgaatacatgggaacacgtatgtagtctgatgacgagaaagcatagtttcgggcttaccgaggtgaaaggaaagctgtatagcattggcggccatgggaatttcagcccagggtttaaggacgtgacagtctataatccagagctcgacaagtggcacaatctggagtccgcaccaaagatcttgcgggatgtgaaagcactcgccattgaggataggtttgtgtatatcgcagcgagaactcctgtggatcgagataccgaggacggcttgaaggcagttattacatgctacgacaccgagacacgacagtggcaggacgtggagagcctgccgctgatagacaattactgctttttccagatgagtgtggtcaattccaacttctaccagactgcctcctgctgtccgaaatcctattgcctcgagaatgaggaggcagtacggaagatagcttcccaggtgtcagacgagattctggagagtcttccacctgaagtgttgagtatcgagggcgcagctatttgctactataaagacgatgtttttatcattggtgggtggaagaatagtgacgacattgataagcagtaccggaaagaagcctacaggtactgcgccgagcgaaagcgttggatgcttcttcctcccatgcctcagccaaggtgccgagccaccgcctgccacgttcggatcccttacagatacctacacggcacgcaacgatatcccatgccacagaatctaatgtggcagaaagatcggattcgtcagatgcaggagatccaccgacacgccctcaacatgcgccgtgttccaagttctcagattgagtgttag

SEQ ID NO: 5450 - DNA, 1578 bp, synthetic construct
  misc_feature 1..1578: note = source = /note="Description of Artificial Sequence: Synthetic coding sequence"
  source 1..1578: mol_type = other DNA
atgtctgggaattgggttcacccaggacaaatcctgatttgggcaatctgggtcctggccgcgccgactaagggtcccagtgcagaaggccctcagaggaatacccgcctgggctggattcagggtaagcaggtcaccgttctgggaagcccagttccagtcaacgttttcctgggcgtgcctttcgccgcacctcccctcggcagtttgaggtttaccaatccccaacctgccagtccttgggataacctccgtgaggcgacttcgtaccccaacctttgtttgcaaaatagcgagtggcttctcctcgatcagcacatgcttaaagttcattacccaaagttcggggtctctgaagactgcctatacctgaatatttatgctcccgctcatgcagataccggatctaagctccccgtcctagtttggttcccagggggagccttcaagacagggtctgcctccatttttgatgggtccgcactggccgcgtacgaggacgtgttagtggttgttgttcagtatcgcctggggatttttggattctttacaacatgggaccaacacgcaccggggaactgggccttcaaggatcaagtggccgcactcagctgggtgcaaaaaaacatcgaattcttcggcggagacccatctagtgtcactattttcggcgagtccgctggcgctatctctgtgagttctcttatactgagtccgatggccaaaggactgtttcacaaggctataatggaaagtggtgtggcgattattccctacctggaagcccacgactacgagaaaagcgaggatctgcaggtggtggctcacttctgcggtaataacgctagcgactcagaggcactcctgcgctgtctgcggacaaaaccttcaaaggaactgctgacactttctcagaagactaaatctttcacaagagtggttgatggtgcattcttccccaatgagcctcttgacctgctgtctcagaaggcttttaaagcaataccgtccatcatcggagtgaataaccatgagtgcggcttcctgctgcccatgaaggaggcccccgagattctgtctggatccaacaaaagcctcgcgcttcatctaattcagaatatcctgcacataccgcctcagtacctgcacctcgtcgcaaacgaatacttccacgataaacatagcctcactgagatacgagatagcctcctcgacctgttaggagatgtattcttcgtcgttcctgctctgattacagcacggtatcaccgtgagggggccaccgaggaggaaaagctgctctcccgcaagatgatgaagtactgggctaccttcgccagaacaggaaacccaaatggaaacgacctgtccttatggcccgcttacaatctgaccgagcaatacttacagctggatctgaatatgtcgctaggccaaaggttgaaggagccaagggtggatttttggacctccaccatccccttaattctctctgcctccgatatgctgcatagtcctctctccagcctaacatttctgtcattacttcagccctttttcttcttttgtgctccctag

SEQ ID NO: 5451 - DNA, 900 bp, synthetic construct
  misc_feature 1..900: note = source = /note="Description of Artificial Sequence: Synthetic coding sequence"
  source 1..900: mol_type = other DNA
atggtgcggtgtctgggacctgctcttctcctcctgctgctgctgggcagcgcctcttcggtagggggaaacaggtgtgtcgacgcagccgaagcgtgcacggccgacgcacgttgtcagaggctgcgatcggagtacgttgctcaatgcctggggagggccgcacaaggtggatgtccgagggctaggtgtagaagagctttacgacgcttcttcgcacgcggacctccggctctgacgcacgcactgctgttttgtccgtgcgccggtccagcctgtgccgaaaggcgccgtcagacgtttgtaccaagctgcgctttttctggacccggccccgcccctccctcctgtttggaaccattgaacttctgcgagagatcccgcgtctgccgatgcgctcgtgccgcagctggaccctggcgtggctggggacgtggcctctcccccgcacacaggcctcccgccgcccaggctagtccgcccgggctcagcggcttggtgcatccttccgcccagagaccacggcgcctgcctgccggtcccggtagacccctacctgcaagactgagagggccacgaggcgttccagcggggacggccgtcacacccaactatgtcgacaacgtcagcgcacgcgtggctccttggtgtgattgtggagcctccggcaacaggcgtgaagactgcgaagcctttcgcgggttgtttaccagaaacaggtgtctcgatggggccattcaagcgtttgcttctggctggcctcccgtgctgctggatcaacttaatccccagggggaccccgagcacagtctccttcaggtttcctctaccgggcgagcgttggagcggcggtcactgttgtctatactccccgtactggctcttcccgccctgctgtag

SEQ ID NO: 5452 - DNA, 270 bp, synthetic construct
  misc_feature 1..270: note = source = /note="Description of Artificial Sequence: Synthetic coding sequence"
  source 1..270: mol_type = other DNA
atgcaggcctgtatggtccctgggctcgccctgtgtctcctcctcggaccgctcgcaggtgccaaacccgtacaggaggagggggatccatacgccgagctgccagccatgccttattggcctttctccacaagcgacttttggaattacgtgcagcacttccaagctctgggagcttacccccagatcgaggacatggcacgtactttcttcgcccactttcctctcgggagcacgcttggttttcacgtgccgtaccaagaagactag

SEQ ID NO: 5453 - DNA, 663 bp, synthetic construct
  misc_feature 1..663: note = source = /note="Description of Artificial Sequence: Synthetic coding sequence"
  source 1..663: mol_type = other DNA
atggcctcggagcggttgccaaataggcccgcctgtctcctggtggccagcggagctgctgagggagtgtcagcccagagttttttgcattgtttcaccatggcctcaacagcctttaatcttcaagtggcaactccgggcggcaaggctatggaatttgtcgatgtcactgaatccaacgcaaggtgggtgcaggacttccgactgaaagcatatgcttctcctgcgaaattagaatcaattgatggggcgcgctatcatgcactgctgattccatcatgccctggggctctcactgatcttgcatcttcgggcagcctggcgcggatcctgcagcactttcacagcgagtccaagcctatatgtgctgtcggccatggagtagcagcgttatgttgtgctacaaacgaggataggtcatgggtgttcgactcctacagccttacaggcccaagtgtgtgtgaactagtgagagctccaggattcgctcgccttccgttggtggtggaggattttgttaaagacagtggagcgtgtttttccgcgagcgaacccgacgccgtccatgtggtactagatcgacacctcgtgacaggtcagaacgcttcatccacagtgcccgctgtgcagaaccttctttttttgtgtggttctagaaaatag

SEQ ID NO: 5454 - DNA, 1158 bp, synthetic construct
  misc_feature 1..1158: note = source = /note="Description of Artificial Sequence: Synthetic coding sequence"
  source 1..1158: mol_type = other DNA
atgtgggggtttcgactactgcgctccccacccctgctcctgcttctgccccagttaggaattggcaatgcatcgtcatgtagccaggcgcggaccatgaatccaggagggtctggcggggctagatgctcgctgtccgcagaagtccgccggcgccagtgcttacagctgtctacagtacctggtgcggaccctcagagatcaaatgagctgttactgctggcagccgctggggaaggcctggagcggcaggatttgccgggcgaccctgccaaggaggagccacagccccctccgcagcaccacgtgctctactttccaggggacgtccaaaattatcacgaaattatgactcgccacccggagaattatcagtgggaaaattggtcgctcgaaaatgtggccaccatcctggcccaccggttccccaactcctacatatgggtgattaagtgcagcaggatgcacttgcacaaattcagctgctatgataatttcgtgaagtcgaatatgttcggcgcccctgaacataacaccgattttggcgccttcaagcacctgtacatgctccttgtgaatgcctttaatctctctcagaattccttgtctaagaaatcgctgaatgtttggaacaaagattccattgctagcaattgtcgatcaagccccagccacaccaccaacgggtgccagggcgaaaaggtgaggacatgtgaaaagtcagatgagtccgccatgtcattttaccccccttcattaaatgatgcctctttcaccctgatcggatttagcaaaggctgcgtcgttctcaatcagttattgttcgagctcaaggaggcaaagaaggacaaaaacatcgacgccttcatcaaatccatcagaactatgtactggctggacggtgggcattctgggggctcaaatacatgggtcacatacccggaggtcctaaaggaatttgctcaaacaggaattatagtgcatacacacgtgactccatatcaagtaagggacccaatgcggagttggattggcaaggagcacaagaaatttgtccagatcctgggggatctgggaatgcaggtgacatcgcagatacatttcacgaaggaggcaccatctatcgaaaatcatttccgggtgcacgaagttttttag

SEQ ID NO: 5455 - DNA, 936 bp, synthetic construct
  misc_feature 1..936: note = source = /note="Description of Artificial Sequence: Synthetic coding sequence"
  source 1..936: mol_type = other DNA
atgaggggggcggccagagctgcctggggccgtgccggccaaccctggccccgtccgcctgcgcccgggcccccaccccctccccttcccctcctgctgctccttctcgccgggttgctcggtggggccggagctcaatattcctcagacagatgtagttggaaagggtccggtctaactcatgaggcgcatcgaaaggaagtagagcaggtttacctgcgctgcgcagcaggagcggtcgaatggatgtaccctaccggcgcactaatcgtaaatctgagacctaataccttctctcccgctaggcacctcacagtatgcattcggtcatttactgactcatctggcgccaacatctatctggaaaaaacaggggagctgcggctgctggttcccgacggcgatgggagacctgggagggttcagtgttttggcctagagcagggcggcctgttcgtagaggccacaccccagcaggacatcgggaggcggacaactggatttcaatatgagctggtgagaagacaccgcgcttcagacctgcacgaactgtcggccccatgcagaccttgtagtgacactgaggtgctgcttgctgtttgtacctccgacttcgctgtgagggggagcatacagcaggtgactcacgagcccgaaagacaggacagcgctattcacctgcgcgtgtctcggctgtaccggcagaaaagtagggttttcgaacctgtcccagaaggggatgggcactggcaggggcgggtcagaaccctgttggaatgtggtgtgaggccagggcatggagacttcctcttcaccggtcacatgcattttggcgaggcgcggctcggttgtgcccccaggtttaaagactttcagaggatgtatagagacgctcaggaacgcgggttaaatccttgtgaggtgggcacagactag

SEQ ID NO: 5456 - DNA, 1221 bp, synthetic construct
  misc_feature 1..1221: note = source = /note="Description of Artificial Sequence: Synthetic coding sequence"
  source 1..1221: mol_type = other DNA
atgggaccatctacacctcttcttatactcttcttgctgagttggtcgggcccgctccaggggcagcagcatcatctggtagaatatatggagcggaggctggccgcactagaggagcgtttggcccaatgtcaagaccaatcctccaggcatgctgcagagctgagggactttaagaacaagatgctgcctttgttggaggtggctgagaaagagcgagaggctctgcgcacagaggcagatactatctccggcagagtggaccggctggagcgggaagtggattatctggagacacagaacccggcactgccttgcgtggagttcgacgagaaagtaactggaggtcctgggacgaagggaaaggggcgccgcaacgaaaagtacgacatggtcaccgattgcggctataccatctcccaggtccgttcaatgaaaatattaaagcgcttcggagggcccgccggactgtggacgaaagaccctctgggccaaactgagaaaatctacgtgctggatggaacccagaacgacaccgcctttgtattcccgcggctaagggattttacactcgcgatggctgcccgcaaggccagtcgtgttcgtgtcccttttccatgggtgggcacaggacagctggtttatggcggctttctgtactttgccaggagaccaccagggcggcctgggggcggcggagagatggagaacaccttacagctcattaagttccatttggccaaccgcaccgtcgtcgattcaagcgtttttcccgcggaaggtcttatccctccctacggactgactgctgatacttacattgacctagccgctgacgaggaaggattgtgggccgtttacgcgacaagagaagatgacagacatttgtgtcttgcgaaattggacccacagacactggatactgagcagcagtgggataccccttgtcctagagagaacgccgaggccgctttcgtgatctgcggcactctgtacgttgtttataacacacggcccgcaagccgagcacgtattcagtgcagttttgatgcaagcggcaccctcacccccgagcgggcagccctaccatacttcccgaggcgttatggggcacacgcaagtctgcgctataaccctcgagagcgccagctatatgcctgggatgacgggtaccaaatcgtctacaagctcgagatgaggaagaaagaggaggaagtgtag

SEQ ID NO: 5457 - DNA, 900 bp, synthetic construct
  misc_feature 1..900: note = source = /note="Description of Artificial Sequence: Synthetic coding sequence"
  source 1..900: mol_type = other DNA
atgggcgggccccgggctctgctggccgccttatgggctttagaagccgctggcaccgccgccctgcggatcggagctttcaatattcagtctttcggggattcaaaggtgagcgacccggcgtgtggttcgataattgctaaaatcctggccggttacgatctcgcactggtacaagaggtgcgagatcccgacttgtctgccgtatcagccctgatggagcagattaattcggtgagtgagcatgaatactcattcgtcagctctcagccgttagggcgggatcaatacaaggagatgtacctcttcgtgtatcggaaggatgctgtgtctgtggtggatacctacctgtatccagacccagaggacgtcttctcacgagagcccttcgtagtcaaattctctgctccgggaaccggagaaagggcaccccccttgcctagcaggcgcgccttaactccaccccccctcccagcggcagcccagaacctggtcctgattccactccatgccgctcctcaccaggctgttgccgagatcgatgccctctacgatgtttacctcgatgtgattgataagtggggtaccgacgacatgctatttctaggagacttcaatgctgactgcagctacgtccgggctcaggactgggccgctatcaggttaagaagcagcgaggtgttcaagtggttgattcctgacagcgccgatactactgttggcaattcagattgcgcctacgaccggatcgtcgcctgcggcgcgagattaaggcggtctctgaagccacaaagcgctacagtacacgattttcaagaagagttcggcttggaccagacacaggccctggcaatttctgaccattttccagttgaggtgacattgaaattccacaggtag

SEQ ID NO: 5458 - DNA, 1617 bp, synthetic construct
  misc_feature 1..1617: note = source = /note="Description of Artificial Sequence: Synthetic coding sequence"
  source 1..1617: mol_type = other DNA
atgggctgcctgtggggtctggccctcccgcttttctttttttgctgggaagtgggggtgtccggctcttctgctgggccttcaaccaggagagcggataccgcaatgactacagatgatacagaggttccagcaatgacactagctccagggcatgctgccctggagacacagacactgagcgcagaaacctcttcaagggcttcaactccagcagggcccatacctgaggcagagactcgaggcgccaagagaatttctcctgcccgtgagacccgcagttttactaagaccagccccaatttcatggttctgattgccaccagcgtagaaactagtgcggcttctgggagtcctgagggcgccggcatgactactgtgcaaaccatcacggggtctgaccccagagaggcgatctttgataccctgtgtacagacgacagcagtgaagaagccaagacccttactatggacattttgaccctcgctcataccagcactgaggcaaagggattgagtagtgaatcatctgccagctcagatagcccccaccccgtgataactccctcacgagcctccgaatcttccgcctcatctgacggtccacacccggttatcaccccgagccgcgcttctgagtcctccgcttctagcgacgggccccatcctgtcattacaccttcctggtcaccaggatctgatgtgacattgctggccgaagctctggtcactgttacaaatatcgaagtaatcaattgctccatcactgaaatagagactacgacatcttccatccccggggctagcgatacggatctcatccctactgagggtgtaaaagctagctcaacgagtgatccacccgcccttcccgactccaccgaggcaaaaccccacattaccgaggtgacggctagcgcggaaacgctgtcaacggcaggtacgactgaatcagccgctcctgacgctaccgtggggacccccctgcccacgaactccgccaccgagagggaagtgacagcccccggtgctaccacactgagcggtgcactggtgaccgtaagtagaaacccgcttgaagagactagcgcgctcagtgttgaaactccttcgtacgtgaaggtgtctggggccgccccagtgtctattgaggccggcagcgccgtggggaagacgacctccttcgctggctcctcggctagctcttattcgcctagcgaggccgcgctgaaaaatttcaccccgtcagagactcctacaatggacatcgcgacgaaaggccctttcccaacgtccagagatcccctcccaagtgttcctcccacaacaacaaactctagtagaggcacaaatagcacccttgccaaaatcaccacctctgcaaagaccacaatgaagccgcctaccgccacccccaccaccgcccggacacggccgacaacagatgtttccgccggcgagaatggtggattcctgttactccgtcttagtgtggccagccccgaggatctgaccgatcctcgggtggccgagcggttgatgcagcaactccatagagagcttcatgcgcatgccccacactttcaagtcagcctgcttagggtccgtaggggttag

SEQ ID NO: 5459 - DNA, 975 bp, synthetic construct
  misc_feature 1..975: note = source = /note="Description of Artificial Sequence: Synthetic coding sequence"
  source 1..975: mol_type = other DNA
atgtcttcagaggcagaaactcagcagccccctgctgcacctcccgcagctccagcactgtccgccgcagacacaaaacctggaaccacgggcagtggagcgggatcaggcgggccagggggactgacctccgcggcgcctgctggcggggataaaaaggtgatcgcgacgaaagtcctcggcaccgttaagtggtttaacgttagaaacggatatggctttatcaataggaacgatactaaggaagacgtttttgttcaccagacagccatcaaaaagaacaatcctagaaagtatctgcgtagtgtaggagacggtgaaacagtggagtttgatgtcgtggagggagaaaaaggtgccgaggccgctaatgtaaccggtcctggaggcgttccggtgcagggcagtaaatatgcagccgatcggaatcattacagaaggtacccccgccggcggggaccgccacggaattaccagcagaattaccagaattctgaaagtggcgagaagaatgagggatctgaaagcgcgcccgaagggcaggcccagcagaggaggccatacagaagacgacggttcccaccatactacatgcgacgcccttatggtcgcagacctcagtacagtaaccctcccgtgcaaggcgaagttatggagggtgcagataaccagggcgccggagaacaggggaggccggtgcgccagaatatgtaccgagggtataggcctaggtttagacgcggcccgccacgacagcgtcagccccgggaagacggcaatgaagaagataaagagaaccaaggcgatgagacccagggccagcagcccccccaacgccgttataggagaaacttcaactaccgccggcgtaggcccgaaaacccgaaaccccaggatggcaaagagacaaaggcggccgaccccccagccgagaactcatccgcaccggaagccgaacagggtggggcagaatag

SEQ ID NO: 5460 - DNA, 210 bp, synthetic construct
  misc_feature 1..210: note = source = /note="Description of Artificial Sequence: Synthetic coding sequence"
  source 1..210: mol_type = other DNA
atgcggatcttttattacttacactttctatgttatgtaacctttatcctcccagccacatgtactctggttaatgctgatcggtgtaccaaacgatacgggagatgcaaacgcgactgcttggaatctgaaaaacagattgacatctgcagcctgccccgaaagatatgctgtaccgagaagctgtacgaagaggacgacatgttttag

SEQ ID NO: 5461 - DNA, 342 bp, synthetic construct
  misc_feature 1..342: note = source = /note="Description of Artificial Sequence: Synthetic coding sequence"
  source 1..342: mol_type = other DNA
atgaaactcctgaccacgatctgccgactcaaattggagaagatgtactctaagaccaacaccagcagtacaattttcgagaaggcccgtcatgggactgagaagatctctacagcaaggagtgagggccatcacatcaccttttcgagatggaagtcctgcaccgccatagggggccgttgcaagaaccagtgcgatgactcggagttccggatctcatactgtgcgagacctaccactcactgttgtgtaacagagtgcgacccgaccgatccaaacaattggattccgaaggactccgtgggaacacaggaatggtaccctaaagacagccgccattag

SEQ ID NO: 5462 - DNA, 3030 bp, synthetic construct
  misc_feature 1..3030: note = source = /note="Description of Artificial Sequence: Synthetic coding sequence"
  source 1..3030: mol_type = other DNA
atggatctaattaggggagttctgcttcgattgttgctcctggcctcttctctaggcccgggagcggtgagcctgcgggccgctattagaaagcccgggaaggtaggacctcccctcgacataaaacttggtgcccttaattgtaccgcatttagcatccagtggaagatgccccggcatcctggcagcccaattctaggctatactgtcttctacagtgaagtaggggcagataagtccctgcaggaacagttgcactctgtccccctgtcaagagacattccgaccactgaggaagtgatcggggatcttaaacccggcacagagtacagagtgagtatcgcagcttactcgcaagcagggaaggggcgtctgtcatcaccacggcatgttaccaccttgtcacaggactcctgccttcccccagccgcccctcagcagccccacgtgatcgtggtgtctgacagcgaggtggcattatcctggaagcccggcgccagtgagggttccgcgcccattcagtactactccgtggagtttatccgcccggatttcgacaagaaatggacatccatacatgaaaggattcagatggacagcatggtgatcaaagggctggaccccgacacaaattaccaatttgcggttagggctatgaactctcatgggccgtctccacggtcctggccaagcgacatcatccgaaccctttgtcccgaagaggcaggctccggccgttacggtccccgctacatcaccgatatgggagccggagaggatgatgagggttttgaggacgatctggaccttgacattagcttcgaggaggtgaagcccctacccgcaactaaggggggtaacaaaaagttcctggtggagagcaaaaaaatgagcatcagcaaccccaagacaatctctagacttattccacccacctcagcctctttgcccgtgaccactgttgccccacagccaatccccatccagcggaaaggcaagaacggggtcgcaatcatgagcaggttattcgatatgccatgtgacgaaactctgtgtagcgcagacagcttttgcgtgaatgactatacctggggcggatcgcgttgtcagtgcacccttgggaaaggcggcgaaagttgctccgaggacattgttatccagtatccccaatttttcggacattcctacgttactttcgagcctctaaagaattcctaccaagcttttcagataacactagagtttcgtgccgaagctgaagatggcctgttactctattgcggggaaaacgaacatggccggggggattttatgtccctggccatcatacgtaggtctctgcagtttagattcaactgtggaaccggtgtagccattatagtttcagagacaaagatcaaattgggcgggtggcacacagtcatgctgtatcgggatggcctgaatggcctgcttcagctgaataacggaaccccagtaactggacagtcccaggggcagtacagcaagataacatttcgcacaccactatatctgggaggagctccctctgcctactggctcgtacgggccactgggaccaaccgaggctttcaaggatgtgtgcagtcattggcagtgaatggtagacgaatcgacatgaggccctggccattgggaaaggccctgagcggagcagacgtgggggagtgctcgtcgggtatctgcgacgaggcctcctgcatccacggcggtacctgcaccgcaattaaggcggattcctatatctgcctgtgtcctcttggatttaaaggcaggcattgcgaggatgctttcaccctgactattccgcagttccgagagagtctgaggtcctacgcagcgacgccatggcccctggaaccacagcattatttgagttttatggaatttgaaattaccttccgtcctgattctggcgatggcgtactcctgtattcgtatgatacaggcagcaaagactttttatctatcaacttggccggaggacatgtagaatttcggtttgattgtggaagcggcaccggggtgttgagaagtgaggacccactaacactgggcaattggcacgagctgagggtatcccgcactgccaaaaatggcattctgcaggtggacaaacagaagattgtcgaaggcatggctgagggcggtttcacacagattaagtgcaacactgacattttcatcggcggggtacccaattacgatgatgtgaagaaaaattccggggttctcaaaccattctccgggtctatccagaagatcatccttaacgacaggacaatacacgtcaagcatgactttacgagtggagtgaacgtcgagaatgccgcgcacccatgcgtgcgggcaccctgcgcacatggcggttcatgtcgacccaggaaagaagggtatgactgcgactgccctctcggcttcgagggtctgcactgccagaaggcaatcatagaggccattgaaatcccgcaattcatcggccgtagctatctcacttacgacaaccccgacatactcaagagagtcagtggctctcggagcaacgtcttcatgagattcaaaaccaccgcaaaggatggtctgcttctgtggagaggagattcacctatgaggcccaattctgacttcatctcactggggctccgagacggggcactggtttttagctataacctgggatctggcgttgcttctatcatggtgaacggatcgtttaacgacggtcggtggcacagggtcaaagccgtaagagacggtcagagtggaaaaattacagttgacgactacggcgctaggaccggaaagtctcctgggatgatgaggcagcttaacatcaacggcgcgctgtacgtggggggaatgaaagagatcgcactgcatacaaaccgccagtatatgcgggggttggttggctgcatttcccattttaccctctcaaccgattatcacatcagcctcgtagaagatgcagtggatggtaagaacatcaatacctgtggcgccaagtag

SEQ ID NO: 5463 - DNA, 1272 bp, synthetic construct
  misc_feature 1..1272: note = source = /note="Description of Artificial Sequence: Synthetic coding sequence"
  source 1..1272: mol_type = other DNA
atgtctgtaagagggatcctgcggctcggcactcaagagtatcccagtcctctggatcctgaggtaggaccctactgtgacaccccaacgatgagaaccctgttcaacttactttggttggctctggcatgttcacccgtgcacacaaccttatccaaaagtgacgccaagaaggccgctagcaagactctgcttgaaaaaagtcagttcagcgataagcccgtgcaggatcggggcctggtggtaacagatctgaaagcagaaagcgtggttctggaacaccgaagctactgttccgctaaagcccgggaccgacattttgcaggagatgttttgggatacgtgaccccgtggaactcccatggttatgatgtcactaaagtattcggcagcaagttcacccagatcagccccgtgtggttgcagctgaaacggcgagggcgcgagatgtttgaggtcaccggcctgcacgatgttgatcagggctggatgagagctgtcaggaaacacgccaagggactgcatattgttcctcgccttctgttcgaggattggacttacgatgattttcgtaacgtgttggatagcgaagacgaaatcgaggaactttccaagactgtggtccaggtggctaaaaatcagcacttcgacgggttcgtagtagaggtgtggaatcagctgctctctcagaaacgagtcggcctgatccatatgctaactcacttagcggaagcgctgcatcaagcccgcctgcttgcactcctggtgatccctccagctatcaccccaggcacggaccaactgggcatgttcacccacaaggaatttgaacaacttgcccccgtgctggacgggttcagcctgatgacttacgattatagtacagcgcaccagcccggacccaatgccccattgagctgggtgagggcgtgcgtgcaagtgttggatcccaagtctaaatggagaagcaagatcctgcttggtctcaatttttatggcatggattatgctacttcaaaagatgcccgagagccagtggtgggcgcaaggtatatccagacccttaaggatcatagaccaaggatggtgtgggacagtcaggcatcagaacactttttcgaatacaagaagtccaggtccggtcgtcacgttgtattttatcccacactgaagagtctacaggtacgcctggaactggctcgggagttgggcgtcggggtaagcatttgggagctgggccaagggttggactacttctacgatttgctgtag

SEQ ID NO: 5464 - DNA, 1182 bp, synthetic construct
  misc_feature 1..1182: note = source = /note="Description of Artificial Sequence: Synthetic coding sequence"
  source 1..1182: mol_type = other DNA
atgaggactctttttaatctgctgtggctggcactggcatgcagtcctgtccataccactttgtcaaaatccgacgccaagaaggctgcctcaaagaccttgctcgaaaaatcccaattctccgataagccagtccaggacaggggactggttgtaacagacctgaaggcagaatcagtggtgctcgaacataggagctattgctctgcaaaagctagagaccgacatttcgctggcgatgtgttgggttatgtgacaccctggaatagccacgggtacgacgtgacaaaggtttttggaagcaagttcacacagatctccccagtctggcttcagttaaagcggcgcggcagagagatgttcgaagtcacaggactccacgacgtggaccaaggctggatgcgagccgttcgtaaacacgcaaagggccttcacatcgtaccgcgcctgctattcgaagactggacttatgatgattttcggaacgtcctcgatagtgaagacgaaattgaggaattgagtaagaccgtagtgcaggtggcgaaaaaccaacactttgacgggttcgtggttgaggtgtggaatcagctgcttagccaaaagagagttggattgattcacatgctgactcacttagcggaagccctgcatcaggccagactgctggcgctacttgttattccgcctgccattaccccgggaaccgaccaactgggaatgtttacacataaggagttcgaacagcttgctcctgttctggatggctttagcctgatgacgtacgactactccacagcccaccagccaggcccaaatgccccactcagttgggtgagggcatgcgttcaggttctcgacccaaagtccaagtggcggtcaaaaatcctactcgggctaaatttctatggtatggactacgccaccagtaaagatgctcgagagccagttgtgggagcgcgatacattcagacacttaaagatcatcggcctagaatggtatgggacagccaggctagcgaacatttcttcgagtataagaagagccgaagtgggcgccacgtcgttttttacccaacactgaagagtctgcaggtcaggttagagttggctagggaactgggggtcggtgtcagcatatgggagctcggacagggcctggattatttctatgatctgctatag

SEQ ID NO: 5465 - DNA, 1959 bp, synthetic construct
  misc_feature 1..1959: note = source = /note="Description of Artificial Sequence: Synthetic coding sequence"
  source 1..1959: mol_type = other DNA
atggcctcagttgcatgggccgtcctcaaagtcctgttactgctccctacccagacttggtccccggtaggggcaggcaaccctccagattgtgacgcccccctggcctcagctctccctcgaagcagtttctctagctcatccgaactgtcatcctcccacgggccagggttttcccgactcaacaggagagatggggcaggcggatggactccactcgtgtctaacaaatatcaatggctccagattgatttgggagagcgcatggaagtaactgccgttgccacacagggaggctacggctctagcgattgggttacctcttatctgcttatgttctctgacgggggcaggaactggaaacagtatcggcgtgaggaatccatatggggtttcccaggcaacactaacgcagacagcgtcgtgcattaccgtctgcagcctccttttgaagcccgcttcctgaggtttctgcctctcgcttggaatcccagaggtagaattggaatgcggatcgaagtgtatggttgcgcctacaagagcgaggtagtgtatttcgatggtcagtccgccctgctgtaccgactggacaagaagccattaaaacccatcagagacgtgatcagtctgaaatttaaggcaatgcagagcaatggaatcctgttacatcgcgaggggcagcatgggaaccacattacgcttgagcttatcaaaggcaaactggtctttttcctcaactctggcaacgctaagttgccttccactatagctccagtgactcttacattaggctctctgttagatgaccagcactggcacagtgttctgattgaacttctggacacgcaagtaaattttactgttgataagcatactcatcatttccaggccaaaggagattcctcatacctggatttgaactttgaaatcagtttcgggggcatccccacccccggacgcagtagggcgttcagacgcaagtctttccacgggtgtctagagaatctatactacaacggggtggacgtgacggaattagccaagaaacataagccacagattctcatgatggggaatgtcagcttctcctgtccgcaaccacagaccgttccagtgacatttttaagctcacggtcctatttggcactaccggggaatagtggggaagacaaggtgtcggtcacctttcaatttcgcacctggaaccgcgcgggccacctcttgttcggagagttaagacgcggcagcggttcgtttgtcctgttcctcaaagatggcaaactgaaactgagcttgtttcagcccggccaaagccccaggaacgtaactgctggcgccgggctcaacgacggccaatggcatagcgtgagctttagcgctaagtggtcgcacatgaatgtcgtggtcgatgacgatacagccgtgcagccgctggtggctgtcttaatcgattccggcgacacttattatttcggggcactctacgaacaatcttgcgaggctcacaagcatcggggtaaccctagcggcctgtattacatcgatgccgatgggagcgggcctctgggaccatttttggtgtattgcaacatgactgacgccgcttggacagtagtgcagcatgggggtcccgacgctgtgactctcagaggcgctccttctggccatcctcgctctgccgttagttttgcctacgctgctggagctggacagctgcgatcagcagtgaaccttgctgaacgctgtgaacagcggctggctttacgctgtgggacagccagaaggcccgacagccgggatggtacacctttgtcatggtgggtcggaagaactaacgaaacacataccagttggggaggtagtttacctgacgcacaaaagtgcacatgcgggcttgagggtaattgtatcgattcccagtattactgcaactgtgatgccggaagaaacgaatggtag

SEQ ID NO: 5466 - DNA, 1455 bp, synthetic construct
  misc_feature 1..1455: note = source = /note="Description of Artificial Sequence: Synthetic coding sequence"
  source 1..1455: mol_type = other DNA
atgtggtatgtcagtacaaggggggtagccccaagggttaacttcgaaggggccctcttcagtggctacgcacccgatggtggactgttcatgcctgaggagctcccccagctcgaccggggcacgctgtgtcagtggagcactctgagctaccccgggctcgtgaaggagttatgtgctcttttcattggcagtgagctgcttcctaaggacgagctaaatgacttgattgacagagccttctcccgatttcgccacagagaggtcgtgcatcttagtcgcctgcgcaacggccttaatgtgctggagttatggcacggagttacttatgcctttaaggacctcagtctgtcctgcaccactcagttccttcagtattttctcgaaaagagagaaaagcatgtgaccgtggtcgtaggtacatcgggcgataccggtagcgctgccatcgagagcgttcagggcgcaaagaacatggatattatcgtccttcttcctaagggccactgcaccaaaatccaagaactgcaaatgaccacggtccttaagcagaatgtgcatgtgttcggggtggaaggcaatagcgatgagctcgatgagcctattaaaacggtctttgccgatgtggctttcgttaagaaacacaacctcatgtcgctcaatagtatcaactggagtcgggtgttggttcagatggcacaccacttctttgcatactttcagtgtaccccctcgttggacacccatcccctgccactggtggaggtggtggtgcccacaggagctgcagggaacctagctgccggatacatcgctcagaagataggattgcctattaggttagttgtggctgtgaatagaaatgatatcatccaccgcacagtgcaacagggtgatttttcgttgtccgaagctgtgaagtcaacacttgcttcagccatggacattcaggtcccctacaatatggagagagtcttttggcttctctcagggtctgacagtcaggtgactagggctcttatggaacagttcgagcgcacgcaatccgttaacttgcctaaagagttgcactctaaactatccgaggcggtcacctcggtgagcgtgagcgacgaagccatcacgcagactatggggcgatgctgggacgaaaatcaatatctgctgtgcccccacagcgctgtggctgtcaactaccactaccaacagatcgaccgacaacagccatctacaccacgctgctgcttagctcctgcttcagctgccaaatttcctgaggctgtactggctgccgggctcactcctgaaacacctgcggaaatcgttgccctggagcataaggaaactagatgcactctgatgcgcaggggcgataattggatgctcatgctgagagacacgattgaggacctgagtcgtcagtggcgcagtcacgctctcaacacatcccaatag

SEQ ID NO: 5467 - DNA, 264 bp, synthetic construct
  misc_feature 1..264: note = source = /note="Description of Artificial Sequence: Synthetic coding sequence"
  source 1..264: mol_type = other DNA
atggttagtctaatgaagctgtggattccaatgctgatgacctttttctgtaccgtcctgctctcggtactgggcgaaatgcgtaagaaaagatatgaccgaaaggaactgttgctggaagagtgttgggggaagcctaatgtgaaggagtgtaccaacaaatgctcaaaggcttttaggtgtaaggataaaaactatacatgttgctggacatactgtgggaacatttgttggatcaatgtggaaacttctggagactactag

SEQ ID NO: 5468 - DNA, 453 bp, synthetic construct
  misc_feature 1..453: note = source = /note="Description of Artificial Sequence: Synthetic coding sequence"
  source 1..453: mol_type = other DNA
atgcgcttcatggcaggccccgcaggatctcagagcctgggtcctttatgctttcactcctctcctcaggcactctatactgtgctgctcatagtcttagtcatgatgagtttggtttttggaaaatttgtgcccgtcaattgggaaccaccccagcctctccctttcccgaagtatctgagatgttaccggtgcctgcttgaaacaaaagaacttggctgtttattaggttccgatatatgccttacacccgccggctcaagctgcattaccttacacaaaaagaactcgagtggatctgatgtaatggtcagcgactgccgatccaaagaacagatgtctgactgcagcaacactcggacatcacctgtcagtggcttctggatattctctcagtactgtttcctggatttctgcaacgatcctcagaaccggggcctgtacacaccctag

SEQ ID NO: 5469 - DNA, 873 bp, synthetic construct
  misc_feature 1..873: note = source = /note="Description of Artificial Sequence: Synthetic coding sequence"
  source 1..873: mol_type = other DNA
atgtcagtaaggcgcgggcggaggcccgccagaccaggaacccggctctcctggttactctgctgtagtgctctgctcagcccagctgctgggtacgtgattgtgtctagtgtttcctgggcggtcacgaacgaggtcgacgaggagctagactctgcaagcacggaagaggcaatgccagcactgttggaggacagcgggtcaatatggcagcagtcctttcccgcatccgcacataaggaggatgcacatctaaggccaagagctggagcggcgagggctcgcccgcctcccgcccccccgggcatgttttcttaccgtcgggaaggcggacagacagcgtccgcccctccgggtccgcggctgagagcagccacagcccggtcactcgcccacgccagcgtatggggatgcctcgctaccgtgagcacccataagaagatccaggggctcccttttgggaactgtcttcctgtttcggacggtccatttaataactctactggaatcccatttttttatatgacggccaaggacccagtcgtggccgacttgatgaagaatccaatggcctctttgatgttgcctgagtcagagggtgaattctgccgaaaaaacatcgtggacccagaggaccctcggtgtgtacagctgaccctgactggacagatgatcgccgtctcgccagaggaagtcgagttcgctaaacaagccatgttttcccgacacccaggaatgagaaagtggcccagacagtacgagtggttctttatgaagatgagaattgagcacatctggctccagaaatggtacggaggcgcgtctagcatctcacgagaggagtatttcaaggcggtgccccgcaaggcctag

SEQ ID NO: 5470 - DNA, 2742 bp, synthetic construct
  misc_feature 1..2742: note = source = /note="Description of Artificial Sequence: Synthetic coding sequence"
  source 1..2742: mol_type = other DNA
atggggccggaagcactgtcatcgctcttgctcttgttgttagtggcctctggcgacgcggatatgaaaggacacttcgatcccgccaagtgtcgctacgccctcggaatgcaagatcggacaatcccggatagcgatatatcagcatcctcttcctggagtgatagcaccgctgcccggcactcccggttagaatcttcagacggcgacggggcgtggtgcccagccggttctgtgttccctaaagaggaggaatacctgcaggtggacttacaaagactgcatctggtggccttggtgggcacccagggacggcacgcagggggtcttgggaaggaattcagtcgttcttaccgtttgcgttattcaagggacggaagaagatggatgggatggaaagaccggtggggacaggaagtcataagtggcaacgaggaccctgaaggggtcgtgctcaaggacctaggccctcccatggttgcccggctggttaggttttacccacgggctgaccgggtgatgagcgtttgcctgagagtagaactgtacgggtgcttgtggcgggatggcttgctgagttataccgcacctgtggggcagactatgtatctgtctgaggctgtttatctgaatgattctacctacgacgggcacaccgtcgggggactgcagtacggggggctgggccaactggctgatggtgtcgtcgggctcgatgactttcgaaagagccaggaattgagagtgtggcccggctatgactacgtgggatggtccaaccacagcttttcctcaggttatgtcgagatggagtttgagtttgacaggttaagagcgttccaggcaatgcaggtgcattgcaataacatgcataccctgggcgctcgcctgccgggtggcgtggagtgtcgattcagacgagggccggccatggcctgggaaggggagcccatgcgccataacctcggaggtaatctgggagaccctagggcgcgtgccgtgagcgttccactgggaggtcgcgtcgcccgctttctgcagtgcagatttctcttcgccggcccttggctgctcttcagcgagatttcgtttataagcgatgtggtgaacaactcttcacccgcacttggcggcacattcccccccgccccctggtggccccccggcccacccccaaccaatttcagttcactggaactggagcctagagggcagcagccagtcgccaaggccgaggggtcacccaccgctatcctcataggttgcctagtcgccataatcctcctccttcttttgatcattgccctaatgctttggcggcttcattggagaagactgctttcgaaagccgagagaagggtgcttgaagaggaactgactgtgcatctctccgttcccggagacactatactcataaataatcgcccaggacctagagagcctccgccctaccaagaacctagaccccgcggcaacccccctcattccgccccttgcgtgcccaacggttcagctttactcctctctaatcctgcctatcgcctgctgctggctacctatgcgcggcccccacgtggcccgggtccgcccacccctgcgtgggctaagccaacaaacacccaggcctattccggcgattatatggaaccagaaaaacccggagcccctctcctgccgccccctccacagaattccgtccctcactacgccgaagccgacattgtgacactacagggagtcacaggcggcaatacttacgcagtaccagcccttcccccgggagcagtgggggatggcccccccagggtggattttcccaggtcaagattgcgcttcaaagagaagctgggagaggggcagtttggcgaagttcacctctgtgaagtcgatagtccgcaggacctggtgtctctagacttccctctcaatgtgcgcaaggggcatcctctgctggtggcggtgaaaatccttcgccccgatgccaccaagaacgcccggaacgacttcttgaaagaggtgaagatcatgtcccggctcaaggaccctaacataattcgactattaggagtatgcgtccaagacgatcccctgtgcatgatcactgactacatggaaaacggcgatctgaatcagttcctatcagcacaccagttggaagacaaggctgcggagggagctcctggtgatggccaggcagcacaaggcccaacaatttcttatcccatgctcctgcacgtggctgcccagatagcttcaggcatgaggtatctggccacactgaattttgtgcatcgggacttggctacacggaactgcctcgttggcgaaaacttcacgatcaaaatcgccgactttgggatgagtcggaatctgtatgccggagactactatcgcgtccaaggtagagctgtactccccattcggtggatggcttgggaatgcatactaatggggaagtttactaccgcttccgatgtgtgggccttcggggtcaccctctgggaggtacttatgctctgtagggctcagccgtttggacagctgactgatgagcaggtgattgaaaatgctggcgagttctttcgcgatcagggaagacaggtttacctgtcccgcccacctgcatgcccacagggcctgtacgagcttatgctccgctgctggtcccgcgagtccgagcagaggcctcctttcagtcagctgcacaggtttctggccgaggacgccctgaacacagtgtag

SEQ ID NO: 5471 - DNA, 243 bp, synthetic construct
  misc_feature 1..243: note = source = /note="Description of Artificial Sequence: Synthetic coding sequence"
  source 1..243: mol_type = other DNA
atgaagttgagtgggatgttcctcctactttctcttgccctattttgcttccttacaggagtgttttcacaaggcgggcaggtagattgcggagaatttcaggaccccaaggtgtattgtactagggagtccaacccacactgcggaagcgacgggcagacctatggtaacaagtgcgccttctgcaaagccatagtaaaatccggcgggaagatcagcctgaagcatccggggaaatgctag

SEQ ID NO: 5472 - DNA, 270 bp, synthetic construct
  misc_feature 1..270: note = source = /note="Description of Artificial Sequence: Synthetic coding sequence"
  source 1..270: mol_type = other DNA
atgaagccatggattcttctgctggtcatgtttatttccggtgtagtaatgctgctgcctgtgctagggtcgttctggaacaaggacccgttcctggatatgattagggagaccgaacagtgttgggtccaaccgccatataagtactgcgaaaaacgctgcacgaaaattatgacctgtgtcagacctaaccatacctgttgttggacttactgcggaaacatatgcctggataatgaggaacctctcaaatccatgttaaatccctag

SEQ ID NO: 5473 - DNA, 264 bp, synthetic construct
  misc_feature 1..264: note = source = /note="Description of Artificial Sequence: Synthetic coding sequence"
  source 1..264: mol_type = other DNA
atgctgccatgtctggccctcctacttcttatggagttaagcgtttgtacggtcgctggtgacggaggggaagagcaaacactgagcaccgaagccgaaacatgggaaggcgccggtccaagcatccagttacagcttcaggaggtcaaaaccgggaaagcttctcagttttttggactcatgggcaaacgagtggggggccggcctttaatccaaccccggcggaagaaaggtcgagaggatgaagcccagggttcagagtag

SEQ ID NO: 5474 - DNA, 285 bp, synthetic construct
  misc_feature 1..285: note = source = /note="Description of Artificial Sequence: Synthetic coding sequence"
  source 1..285: mol_type = other DNA
atgcagcattccctggtgtttttcttcgcagtaattttacacttaagccatttgctgcatctagacgcctcaatccacccattccgtctgccattttcgagcaagccattcctgcttatcccaatgtcaaataccacactgcctcataccgcttggccacttagctttttacatcaaacagtgtctacacttaaggccgtcgccgtcacacattccctgtggcacctgcagatccccgttgactgccaggcatgtaatcgaaaatcaaaaaagatttattgctag

SEQ ID NO: 5475 - DNA, 327 bp, synthetic construct
  misc_feature 1..327: note = source = /note="Description of Artificial Sequence: Synthetic coding sequence"
  source 1..327: mol_type = other DNA
atgcggcaaagattacttccatcagtgacaagcctactgctcgtggctctgcttttccccggcagtagccaggccagacatgtaaatcactctgccaccgaagcgctcggcgagttgagggaacgagcacctggacagggtacaaacggctttcagctgctgcggcatgctgtaaagcgagatctcctgcccccaagaacccctccttaccagggtgacgtgcctcttggaatcaggaacacgatctgcagaatgcaacagggtatctgccgcctgttcttttgccattctggcaccggacaacagcatcgccaacgatgcgggtag

SEQ ID NO: 5476 - DNA, 807 bp, synthetic construct
  misc_feature 1..807: note = source = /note="Description of Artificial Sequence: Synthetic coding sequence"
  source 1..807: mol_type = other DNA
atgttgctgcttgctgctgccttcctggtggccttcgttctcctgctctacatggtaagtcctctcatttcaccaaaacccctcgccttgccgggagcccatgttgtagtgactggggggagctctggtattggtaaatgcatcgctattgagtgttataaacagggtgcattcatcaccctagtcgcaaggaatgaggacaaactgttgcaggccaagaaagagatcgaaatgcactctatcaacgataagcaagttgtgctgtgtatttccgtggatgtttcacaggactataaccaggtcgagaacgtcattaagcaggcacaggagaaactcggtccagtcgacatgctggttaattgcgcgggaatggccgtgagcggcaagtttgaggacctggaggtatcaaccttcgaagtgaagccctataatgtgtacataaccgtcgcatatccccccgacacggacacccccggatttgcagaggaaaatcggacaaagccccttgaaacccgattaatctcagagactacatcagtgtgtaagccagagcaagttgccaagcagattgtgaaggatgctatccagggtaactttaatagttctctgggatcagacggctacatgctgagtgccctgacgtgtggtatggctccggtgacgtctattaccgaggggctgcagcaggtcgtgaccatggggctattcaggactattgcacttttttacttgggcagctttgatagcattgtacgacggtgtatgatgcagagagaaaagtcagaaaatgctgataaaaccgcttag

SEQ ID NO: 5477 - DNA, 1686 bp, synthetic construct
  misc_feature 1..1686: note = source = /note="Description of Artificial Sequence: Synthetic coding sequence"
  source 1..1686: mol_type = other DNA
atgcgatggatactgtgttggtcactgactttgtgcctgatggcccagactgccctgggtgcgctgcatactaagaggccacaggtggttaccaaatatggcaccctccaggggaagcaaatgcacgttggtaaaacacctattcaggtcttcctgggcgtccccttttccagacctcctctgggcatccttagatttgccccccctgagcccccagaaccatggaaggggataagggacgcaaccacgtacccgccagggtgtctacaggaaagttgggggcagcttgctagcatgtacgtgagtacccgtgaaaggtacaaatggctacggttcagcgaggattgtttgtacctgaacgtgtatgccccagcccgcgctccaggtgaccctcagctgcccgtaatggtgtggtttccgggaggtgctttcatcgttggcgctgcctctagctatgagggcagcgacctggccgcccgcgaaaaggtagtcttagtgttccttcaacaccgactcgggatatttggcttcctttccaccgacgatagccacgccagaggtaactggggcctgcttgatcagatggcagccctgcggtgggtacaggaaaatatcgccgcattcggcggtgatcctggcaatgtgactctcttcggccagagtgcaggtgctatgtccatcagtgggctgatgatgtcgcccttagcctctgggctgtttcatcgggcaattagtcagtccgggacagctttattcagactatttatcacctcaaaccccctgaaggtggcaaaaaaggtggcccacctcgccggctgtaaccataatagcacccagattttggtcaattgtctgcgggctctaagcggcactaaagtgatgagagtgtccaataaaatgagattccttcagttgaatttccaacgggaccccgaagaaataatttggtctatgagcccggttgtggatggagtggttatcccagacgatccactggttctactcacccaggggaaggtctcgtctgtaccttacctgctaggcgtaaacaatttggagttcaactggctgctgccctatattatgaagttccccctcaaccgtcaggctatgcgcaaggaaactatcacaaagatgctttggtcgacgcgcacgctgctaaacattacaaaggaacaggttccactcgttgtggaagaatacctggacaacgtgaacgaacatgactggaaaatgcttcgcaaccgtatgatggatatcgttcaggatgccaccttcgtctatgcaacactccagaccgcccattaccaccgtgatgctgggctccccgtatatttgtatgagtttgagcaccacgcccgggggattatagtcaagcccaggacagacggggcagaccatggcgacgagatgtatttcttatttggaggccccttcgccactggcctgagcatgggcaaagaaaaggcgctctccctgcagatgatgaaatattgggccaattttgcacgcaccgggaacccaaacgatgggaacttgccgtgttggcccaggtataataaagatgaaaagtatctacagctcgattttactacacgtgtgggaatgaaactcaaagaaaaaaaaatggctttctggatgagtctctaccagagccagcgccccgagaagcagcgacaattctag

SEQ ID NO: 5478 - DNA, 444 bp, synthetic construct
  misc_feature 1..444: note = source = /note="Description of Artificial Sequence: Synthetic coding sequence"
  source 1..444: mol_type = other DNA
atggctagtagcctgaagatatgggggacgctattggccctactgtgcattctgtgtacactgcttgtgcagagcaaggaggttagctggagggagtttatgaaacagcactacctgtcaccttcccgcgaatttagagaatacaaatgcgatgtgctgatgcgtgaaaacgaagcgttaaaagacaaatcaagtcacatgttcatctacatttcctggtacaaaatcgaacatatatgtactagtgataattggatggatcggttcaggaatgcctatgtgtgggtgcagaaccccctcaaggttcttaagtgccaccaggaaaattcaaaaaatagctacacagagagccggtcatttaattatattgagttccattgcagtatggacgggtacgtggacagcatcgaggacctgaaaatggttgagcccattgggaattag

SEQ ID NO: 5479 - DNA, 444 bp, synthetic construct
  misc_feature 1..444: note = source = /note="Description of Artificial Sequence: Synthetic coding sequence"
  source 1..444: mol_type = other DNA
atgacatccagcctgaaaatctggggtattctgctggctctgctgtgtattctctgcaggctgtgcgtttactctaacaacatttattggagagagtttattaagcttcactacctgagccccagccgtgaattcaaagagtacaagtgtgacgtcctgatgcgtgaaaaggaggccttgaaggggaagtcatttcacatgttcatttacagtctgtggttcaagatccagcgcgcctgcatcaacgagaagggaagcgacaggtatcgcaacgcttatgtatgggccccaggggctctcaaggtgcttgagtgtcactgggagaagtataataatcgctataccgaatctcgttccttcagttatattgaattccactgtggcgtagatggatacgtagacaatatcgaagatttgagaattattgaaccgatcagcaattag

SEQ ID NO: 5480 - DNA, 1248 bp, synthetic construct
  misc_feature 1..1248: note = source = /note="Description of Artificial Sequence: Synthetic coding sequence"
  source 1..1248: mol_type = other DNA
atgtctccctttctgtatcttgtattactggtattgggcctacatgccacaattcattgcgcctccccagaaggcaaagttacagcgtgtcactcctcccagcctaatgcaaccttatacaagatgtcctccataaatgccgatttcgcgttcaatctgtatcgccgattcacagtcgaaacccccgataagaatattttttttagtcccgtttccatatccgccgcccttgttatgctaagctttggggcctgctgctccacacagaccgagatagtagaaactcttggattcaatctaactgatactcctatggtggagatccaacatggcttccagcacctcatctgctccctgaatttccctaagaaggaactagagctacagattgggaatgcattgtttatcggtaagcacctaaagcctctcgccaagtttctgaacgatgttaagacactgtacgagactgaagtgttcagtaccgacttttccaacataagcgctgccaagcaggagataaacagtcacgtggaaatgcaaacaaagggaaaagttgttggtctgattcaagatctgaaacctaacaccattatggtgctggtcaactacatacacttcaaggctcagtgggctaatccttttgacccttctaagaccgaagattccagtagctttctgattgacaaaaccactaccgtgcaggtgccaatgatgcaccaaatggagcagtactaccatctcgtggatatggaactcaattgcaccgtgttgcaaatggactacagcaagaacgcgctggctttgttcgtgctaccaaaggagggccagatggaatctgtagaggcagctatgtcaagcaagaccctcaagaagtggaacaggctgttgcaaaagggatgggtggatctattcgtgcctaaattttccataagcgcaacatacgatctgggcgcgacactgctgaaaatggggatccagcacgcttactcagaaaatgccgacttctcaggcctgactgaagataacggtttgaagctgagtaatgcggcgcataaagccgtgttacacatcggtgaaaagggtactgaggcggccgccgtgccagaggtggaactcagtgatcagccagagaacacttttctccaccctattatccaaatagataggagcttcatgctgctgatcctggaacggtctactaggagcatcctgttcctgggaaaagtggtgaaccccacggaggcttag

SEQ ID NO: 5481 - DNA, 285 bp, synthetic construct
  misc_feature 1..285: note = source = /note="Description of Artificial Sequence: Synthetic coding sequence"
  source 1..285: mol_type = other DNA
atgaggactcttgccatcttggccgctattctcctggtggcactccaggcgcaagctgaacccttacaggctagggccgatgaggtcgccgctgcccccgaacagatcgcagccgacatccctgaggtggtggtgtctctggcctgggacgagtctttagccccaaaacacccggggtcccggaaaaacatggattgctattgtcgcataccagcttgtattgccggggagagaagatatgggacgtgcatctaccaggggaggctgtgggcattctgttgctag

SEQ ID NO: 5482 - DNA, 1062 bp, synthetic construct
  misc_feature 1..1062: note = source = /note="Description of Artificial Sequence: Synthetic coding sequence"
  source 1..1062: mol_type = other DNA
atgaggctcccgaggcgagccgcgttaggtctgctcccgctgcttctacttctacctccagcacccgaagccgctaagaagcccacaccgtgccatcgatgtaggggattggtcgacaagttcaatcagggcatggttgatacagcgaagaaaaactttgggggggggaacacagcctgggaagagaaaactttgtcaaaatacgaatcttcggagatccgtctgcttgaaattttggagggtctgtgcgagtcttcagatttcgagtgcaaccaaatgttggaggcccaggaagagcacctcgaggcctggtggctccaactgaaatcagagtaccctgatctctttgagtggttctgcgtcaagacactgaaggtgtgctgctctccaggcacttatggacccgactgcctagcttgccaaggcggttcacagcggccatgcagcggcaatgggcactgttccggagacggctccaggcagggggacggctcttgcagatgtcacatgggctaccaggggccactgtgcacggattgtatggatggatacttcagttcacttagaaacgagactcacagtatttgcacagcttgcgacgaaagctgcaagacgtgctctggattaacaaaccgagactgcggagaatgcgaagtagggtgggtgttggatgagggcgcctgtgtagatgttgatgaatgcgccgcagagccccccccatgttcagcagcccagttttgtaagaacgcaaacgggtcgtacacttgcgaggagtgcgacagttcttgtgtggggtgtacgggagaaggacctggtaactgtaaggagtgtatttccggctacgctcgtgaacacggccagtgcgctgatgtggacgaatgctccttggccgaaaaaacttgtgtccggaagaatgagaactgttacaacacccccgggtcctacgtctgtgtttgccccgatggattcgaagagaccgaagatgcttgcgtgccacccgccgaagctgaagctaccgagggcgagagtccaacacaactaccatctcgcgaagacttgtag

SEQ ID NO: 5483 - DNA, 651 bp, synthetic construct
  misc_feature 1..651: note = source = /note="Description of Artificial Sequence: Synthetic coding sequence"
  source 1..651: mol_type = other DNA
atgaagcttaaccttgtccagattttctttatgctgctcatgctcctgttagggctgggcatgggcctcggtctaggattacacatggcaacggcagtactggaggagtctgaccagcctctgaatgaattctggagcagcgacagccaggacaaagctgaggccaccgaggagggggatggaacacagacaaccgaaacacttgtactgtctaataaagaagtggtacagcccggttggcctgaggatccaatactcggcgaggatgaggttggaggcaataagatgctaagggcttcagctctcttccaatccaataaggattatttacgactagatcagaccgaccgggagtgcaacgacatgatggcccacaagatgaaggagccttctcagtcttgcattgcccagtacgcatttatacacgaggacctaaacaccgtaaaagctgtttgtaattcacctgtgatagcttgtgaacttaaaggcggtaagtgccacaaatccagtagacccttcgatctcacgttatgtgaattaagccaacccgatcaggtgaccccaaattgtaattacttaacttctgtaatcaaaaaacacattataatcacttgcaacgacatgaagagacaattgcccacagggcagtag

SEQ ID NO: 5484 - DNA, 222 bp, synthetic construct
  misc_feature 1..222: note = source = /note="Description of Artificial Sequence: Synthetic coding sequence"
  source 1..222: mol_type = other DNA
atgcgtatagcggtgctgctttttgcaatcttcttttttatgagccaggtcctgccagctagaggcaagtttaaagaaatttgtgagcgacccaatgggagctgtcgagacttttgcttggagacagaaatccatgttggtaggtgcctgaacagtcagccttgttgcttaccactcggccatcagcccagaatcgagtccactactcctaagaaggactag

SEQ ID NO: 5485 - DNA, 609 bp, synthetic construct
  misc_feature 1..609: note = source = /note="Description of Artificial Sequence: Synthetic coding sequence"
  source 1..609: mol_type = other DNA
atggagcggggcgctggggccaagctgttgcctttgctactccttctccgggccactggctttacttgcgcacagacggacggccgcaatggttacaccgcagtcatcgaggtcacatccggcggaccctggggtgactgggcttggccagagatgtgccccgatgggttttttgccagcggcttctcgctcaaagtggagcccccacagggtattcccggagacgatacagctctaaatggaatcaggctgcattgcgcccgaggtaacgtgctggggaatacacacgtggtggagtcccaatcggggagctggggtgaatggtctgagcccctctggtgccgggggggggcatatcttgtcgccttcagtctgcgggtggaagcccccacaacactgggggacaatacagccgctaataacgtacgcttcaggtgctcggatggggaagagctccaaggtccaggcttgtcctggggcgactttggtgactggagcgatcactgccctaagggtgcctgtggcctccagaccaagatacaggggcctaggggtctcggggacgataccgcgctgaatgatgcgaggcttttctgttgccggtcctag

SEQ ID NO: 5486 - DNA, 759 bp, synthetic construct
  misc_feature 1..759: note = source = /note="Description of Artificial Sequence: Synthetic coding sequence"
  source 1..759: mol_type = other DNA
atgcagctaactcgctgttgctttgtgtttctcgtacaaggttcgctctacctggtgatttgcggccaggatgacggtcctcccgggtcagaagacccagaaagagatgatcatgaaggtcagccccgccctagggttcctcgaaagcgcggccacattagccctaagtctaggccaatggctaatagcacactgctggggttgctggccccccccggtgaagcctggggcattctaggacagcctcccaacagacccaatcactcaccacctcccagtgctaaagtgaaaaaaatctttggatggggagatttctattcaaatatcaagaccgtcgccctgaacctgctagtgacaggtaagattgtcgatcatgggaatggcacattttctgtgcattttcagcataatgcgacgggacaaggaaacatctctatttccctagtccctcccagcaaggccgttgaattccatcaggagcagcagattttcatcgaggcgaaggcctcgaagatttttaactgtaggatggaatgggagaaggttgagcgggggagacggacttccctgtgcacccacgatccggcgaaaatctgttcccgcgatcatgctcagtcctcagcgacatggtcgtgctctcagcctttcaaggttgtttgtgtttatattgcattctattccacagactatcgcctcgtacagaaagtgtgccccgattacaactatcacagcgacactccatattaccccagcggttag

SEQ ID NO: 5487 - DNA, 555 bp, synthetic construct
  misc_feature 1..555: note = source = /note="Description of Artificial Sequence: Synthetic coding sequence"
  source 1..555: mol_type = other DNA
atgaaaattcttgtcgcattcctcgtagtgctgacgatcttcggcatccagtcccacggctacgaggttttcaatataataagtccctcaaacaacggtggcaatgtgcaggagacggtgactatcgataacgaaaaaaacaccgcaattattaacattcatgcgggatcatgcagtagcaccaccatcttcgattataaacatggatacatcgccagtcgcgtactgagcagacgcgcctgcttcatcctgaagatggatcaccagaacatccctcctctgaataatctccaatggtatatctacgaaaagcaggcacttgacaacatgttctcatcaaagtatacatgggtgaagtataaccccttggagtcccttattaaggatgtcgattggttcctcctgggcagcccaatagagaaactctgtaagcatatcccgctgtataagggcgaggtggtggagaatactcataacgtcggcgctggaggctgtgcaaaggccggcctgctgggaatcctcggaatctcaatttgtgctgacatccacgtatag

SEQ ID NO: 5488 - DNA, 651 bp, synthetic construct
  misc_feature 1..651: note = source = /note="Description of Artificial Sequence: Synthetic coding sequence"
  source 1..651: mol_type = other DNA
atgggggccgttatgggtacattcagcagcctccagaccaagcagagacggccttcaaaagataagattgaggatgaactcgagatgaccatggtttgccatagaccggagggtcttgaacaactggaggcccagactaactttactaaaagggaactgcaggttctctaccgcggctttaagaacgagtgcccatctggggtcgtgaacgaagacactttcaaacagatctacgcgcagttctttcctcacggagatgcttctacatacgcacattatctctttaacgcctttgacacaacgcagaccggttccgttaagttcgaggactttgtcaccgcgctgtctattctgttacgggggacagtgcatgaaaaacttaggtggacatttaacttgtacgatattaacaaagatgggtacatcaacaaagaggaaatgatggacattgtcaaagcaatatatgatatgatgggtaaatatacttatccggtcctaaaagaggacactccccggcaacacgtggacgtcttttttcagaaaatggacaaaaataaggacggtatagtgacgctcgacgagtttctggagtcttgtcaggaggacgataacataatgagaagccttcaactcttccaaaacgtcatgtag

SEQ ID NO: 5489 - DNA, 2736 bp, synthetic construct
  misc_feature 1..2736: note = source = /note="Description of Artificial Sequence: Synthetic coding sequence"
  source 1..2736: mol_type = other DNA
atggcacagttgtttttacctttgctggccgccctggtgctcgcacaagccccggccgccctcgctgacgtccttgaaggtgactctagtgaggatcgcgcatttcgggttcggatcgccggggacgcccctctgcagggagttctgggaggagctcttactatcccgtgccatgtacactacctccgaccccctccgtcaagacgagctgtgctgggttcccctcgggtcaagtggacctttctctccagaggccgggaggctgaggtcttagtggctcgcggggttagggtaaaagtgaatgaggcgtatcggttcagagtggccctgccagcttatccagccagtctgacagacgtgtctttggctctgagcgaactgcgccctaacgattcaggcatttacagatgcgaggttcagcacggtatcgacgactccagtgatgcagtggaagtcaaagtcaaaggcgtggtgtttctgtatcgggaaggcagcgcaaggtacgctttttcattcagtggagcccaggaggcttgcgccagaataggggctcacatcgccaccccggagcagctttacgccgcctatctgggaggctacgaacagtgcgatgcagggtggctatccgaccagaccgtacgctacccaatacagacaccccgtgaagcctgctacggagacatggacggcttcccaggtgttcggaactatggagtggtagaccctgatgatctctacgatgtctactgttatgctgaagatctcaacggggaattattcctgggcgacccacccgagaaacttacactcgaggaggcccgcgcgtactgccaggaacggggagcggaaatcgctacgaccggtcaactctatgccgcttgggacggggggctggatcattgcagcccgggctggctggccgatgggtccgtcaggtaccctattgtgacccctagccagagatgcggcggcggactgccaggcgtcaaaaccctgttcctcttccctaaccaaacgggctttcccaataaacattctcggtttaatgtttactgttttagagactctgcacagccttccgccattcccgaggcctccaaccccgcaagtaacccagccagtgacggtctggaagccatcgtgacggtcactgagactttggaagagctgcaactgcctcaagaggctaccgagtccgagtctcgaggggctatctacagtattcccatcatggaggacggaggcggtggaagctccaccccagaggaccctgcggaggctcctaggactcttctcgaattcgaaacacagtctatggtgccacccaccggtttctcagaggaagaaggcaaggcgctagaggaagaggagaagtatgaggacgaggaggagaaagaggaagaagaagaagaggaggaggtggaggatgaggcgctctgggcctggccaagcgagctcagttcccccggacccgaggcatctctccctaccgagccggctgcccaggaggaaagcctgtcacaggcacccgcacgcgcagttttacagcctggagcctcccccctgcctgatggcgagtctgaagcatcccggccgccgcgcgttcacgggccgccaaccgaaaccctgcctactcctcgtgagaggaacctcgcctccccttctccgtctacgcttgtagaggcccgcgaggtcggcgaggcaaccgggggaccagagctctctggcgtaccccgcggcgagagcgaagagaccggaagtagcgagggggctccctctcttctgccagcgactcgggcacctgagggaacgcgagagctcgaggccccttctgaggataattcgggaagaactgcacctgcaggtacaagcgtgcaagcacagccggtactgccaacggattccgcctcccgtggcggggttgctgtggtcccagccagcggagactgtgtgcccagcccttgccataatggaggaacctgtcttgaagaagaagaaggcgtgcgctgcctctgcctgcccggatacggcggcgatttgtgcgacgtgggactgcgcttttgcaatccgggatgggacgcctttcagggagcctgttataagcacttctctacccgccgctcatgggaggaagccgagactcaatgtcggatgtacggcgcacacctggcgtcaattagcacccccgaggaacaagattttattaacaatcgttatcgggagtatcagtggattggtctgaatgataggacgattgagggtgactttttgtggagtgacggcgttccgctgctctatgagaattggaatcccgggcagcccgatagttattttttgagtggagaaaattgcgttgtaatggtgtggcatgaccaggggcagtggtctgacgtaccctgtaattatcatctttcatacacatgtaagatgggtctcgtttcttgtgggcctccaccggaactaccgctggcccaggtgttcgggagaccacgtcttcgctacgaagtggacacagtcctgaggtatcgctgtcgagagggactggcccagcggaatctgcccctgattaggtgccaagagaacggaagatgggaagctcctcagattagctgcgtgccgagacggccggcaagagccctgcacccggaggaggatccggaaggacgccaagggcgcctgttaggacgatggaaagcccttttaattcccccttcgtcacctatgcctggcccctag

SEQ ID NO: 5490 - DNA, 852 bp, synthetic construct
  misc_feature 1..852: note = source = /note="Description of Artificial Sequence: Synthetic coding sequence"
  source 1..852: mol_type = other DNA
atggggttgggactgcgcggatggggtagacctctcctgacggtagccacggccctgatgctcccagttaaacctccagcgggctcgtggggcgcgcagataatcggaggacatgaagttacccctcacagtcgcccatacatggcctcagttagattcgggggtcagcatcactgcgggggttttctgttgagggccaggtgggttgtgtcagccgcccactgtttcagtcaccgcgatctccgtacagggctggttgtgctaggggcacacgtgcttagcacggccgagccgacccagcaagtttttggcattgatgcacttaccacccaccctgactatcacccaatgacccatgctaatgatatttgcctgctaagactaaacggcagcgctgtgctgggtccggcagttggtctgttgagaccaccagggaggcgagctcgaccacccactgccggcacccggtgccgtgtagccgggtggggcttcgttagtgacttcgaggaattgcccccagggctgatggaggctaaggtgcgcgtcctggatcctgatgtgtgcaattctagttggaaagggcatctcactttgactatgctgtgcacaaggtctggagactctcatcggcgaggcttctgcagcgcggattccggagggccacttgtatgccggaatcgggcccacgggctggtttcttttagcggcttgtggtgtggcgacccaaagactccagatgtttacacgcaggtcagtgcattcgttgcctggatttgggatgtggtgcgccgttcttccccccaacctggccctttgccaggtaccacgcgcccacccggagaggctgcttag

SEQ ID NO: 5491 - DNA, 1209 bp, synthetic construct
  misc_feature 1..1209: note = source = /note="Description of Artificial Sequence: Synthetic coding sequence"
  source 1..1209: mol_type = other DNA
atgatggttgcccttaggggcgccagcgctctcctcgtgctatttctggcggcatttctgccgccgccacagtgtacacaggatcccgccatggtgcattatatttaccagagattccgggtccttgagcagggcctcgagaagtgcacccaggcaacacgcgcttatatccaggagttccaggaattctccaaaaacatcagtgtcatgctcgggcgttgccaaacctatacatctgagtacaagtcagcagtgggaaatctggcacttcgggtggagagggcgcagagggagatagactacatccagtacctgcgcgaagccgatgaatgcatcgagagcgaagataagacgctcgccgaaatgctgctacaggaagctgaagaggagaaaaagatcaggactttactgaatgcctcatgtgacaatatgcttatgggcatcaaatctctgaaaatcgtgaaaaagatgatggacacacatgggtcatggatgaaggacgccgtctacaattccccaaaagtatacctgctaattggctctcgtaataacaccgtctgggaattcgccaacatccgcgcattcatggaggataataccaagccagctccgcgcaagcagatattgacattgtcctggcagggtacaggtcaggtaatatacaagggatttctgttttttcataatcaggccacatctaatgagatcattaagtataacttgcagaagcgaacggtcgaggaccgcatgctcctgcccggcggggtgggcagagccctcgtgtatcaacattctccttctacatacatcgacctggctgtggacgagcacgggctttgggcaattcactctggcccagggactcactcccacctggtgctgacaaaaatcgagcctggtacgctcggagtggagcactcctgggacactccttgtcgttcccaggatgctgaggcttcctttctgctgtgcggggtactgtatgtggtctattcgaccgggggacagggcccacatcgtattacctgtatctatgacccactagggactatctccgaagaggatctccccaacctcttcttcccaaaacgtcccagatcccacagcatgattcattacaacccccgcgacaagcagctgtatgcctggaacgagggtaatcagataatttataaattgcagacaaaaaggaagttaccccttaaatag

SEQ ID NO: 5492 - DNA, 1221 bp, synthetic construct
  misc_feature 1..1221: note = source = /note="Description of Artificial Sequence: Synthetic coding sequence"
  source 1..1221: mol_type = other DNA
atgcagctgttcctcctgctttgtttagtgctgttaagcccacagggagcctctctgcacaggcaccatccccgagaaatgaaaaaacgtgtggaggatctgcatgtgggtgctacagtggcccccagcagcagaagagactttacattcgatctctatagggccctagcctctgccgccccgtctcagtccatcttcttctctccggtttccatttccatgtccctggccatgctgtctctgggagcagggtctagcaccaagatgcagatactggagggcctgggcctgaatctccagaagagtagtgagaaagagctacacaggggtttccaacaactgcttcaggaactcaaccagcccagagatggttttcagctgtctttgggcaatgccctttttacagacttagttgtcgacctgcaggatacgttcgtttcggcgatgaagacgctgtacctcgctgatacctttccaactaatttccgcgactcagcaggagccatgaaacagattaacgactatgttgcaaaacaaactaagggaaaaatcgtggacctcttgaaaaacttagactcgaacgcggtggtgatcatggtaaactacatattcttcaaagccaagtgggagacaagcttcaaccataagggtactcaggagcaagacttctacgttacctccgagaccgtggtccgggtacctatgatgtctagggaagatcaataccactatctactggacagaaacctctcctgtcgggttgtgggggtgccctatcagggcaatgccacagcactattcattctaccttcggaaggcaagatgcagcaggtggaaaatggactgtcggagaagacgttgcgcaagtggctgaaaatgtttaagaaacgacaactcgagttgtatttgccaaagttttctattgagggctcttaccagcttgagaaggtcctgccctcactcgggatctcaaatgtctttaccagtcatgctgacctcagcgggatctcgaaccacagtaacattcaagtatccgagatggtgcataaggcagtcgttgaggtagatgaatctggaactcgcgcagccgcagcaacgggtactattttcacgtttcgctccgctaggttgaattcacagcgactcgtgtttaatcgacctttcctgatgttcatcgtggacaataacatactcttcctcggaaaagtaaacagaccatag

SEQ ID NO: 5493 - DNA, 1626 bp, synthetic construct
  misc_feature 1..1626: note = source = /note="Description of Artificial Sequence: Synthetic coding sequence"
  source 1..1626: mol_type = other DNA
atgcggctttctccctttcatttacagctcgagttccatatgaaagagaaaagagaggacctgcagattagttggagcttcatctccgtgcccgagatggccgtgaatatccaacccaaagccctgggagaagatcaggtcgccgaaacatcagcgatgtcagatgtgctgaaggacattctaaagcacctggccggtagcgcatccccaagtgtggtcctgataactaaaccaacaaccgttaaagaggcccagaacctacagtgtgccgcgtctacggcgcaggagtcatgccctccaaaacctccgagggcgcacgagctgaaactgctcgtccgcaatattcacgtgctcctgctcagcgaaccgggagcttctgggcatatcaacgcagtatgtgtagtgcagctcaacgaccctgtgcagagatttagcagcacgctcactaagaataccccagacctcatgtgggaggaggaatttaccttcgagctcaacgctaaatctaaagaacttcacttacaaattagtgaggctggaaggtccagcgaaggcctcctagccaccgccacagttccactggacctattcaagaagcagccgagcgggccacaatcatttacactcacgagtgggagcgcctgtggtagctccgtgcttggctcagttaccgcagaattctcctacatggagcccggcgagctcaaatcatggccaatccctcccccggtaccagcggcaaaaattgaaaaagacaggacagtcatgccctgcgggacagtagtcacaacggtcaccgcggtgaagacaaagcctcgcgtggatgtggggagagccagcccactgtctagcgatagcccggttaagacacctatcaaggtcaaggttatagagaaagacattagcgtccaagctatcgcttgccgaagcgcaccggtgagtaagaccctgtcctctagtgacacggaattactggtattgaatggcagcgaccctgtggccgaggtggctattcgccagctgtctgaatcctccaaattgaagctaaaaagccctagaaagaaatctactatcataatttccggaatctctaagacctcactgtctcaagaccacgacgccgcccttatgcagggatacactgcttccgtggatagcacccaccaggaagacgcaccctcacatcctgaaagggcagctgcttctgcaccccccgaggaggcagaatcagcacaggcaagcctggcccccaagccgcaggaagacgagctggactcatgggatctcgaaaaggaaccacaggctgcagcctggtcaagccaagtactccttgatccagacggtgatgagctaagcgagtctagcatgtcggtgctggagcccggcactgccaaaaagcacaaaggaggaatacttcgtaagggagcgaagctcttctttaggagacgtcatcagcagaaggatcccggcatgagccagtcacacaacgatctggtgtttctagaacagccggaaggcagccggcggaagggtatcacacttactagaatcctgaacaaaaaactcctctcacgtcaccggaacaaaaacaccatgaatggcgcaccagtagaaccatgcacatag

SEQ ID NO: 5494 - DNA, 993 bp, synthetic construct
  misc_feature 1..993: note = source = /note="Description of Artificial Sequence: Synthetic coding sequence"
  source 1..993: mol_type = other DNA
atggctttccttccaagctgggtgtgcgtcctggtgggatcctttagcgcgtccctggctggtacttctaacctgtctgaaaccgaaccccctctgtggaaagagtcccctggacaattgtctgactacagggtcgaaaactccatgtacattataaatccctgggtctacctcgaacgaatgggcatgtataaaattatactgaaccaaaccgcaagatattttgccaagtttgccccagataacgaacagaacattctgtggggtctgcccctccagtatggatggcagtatcgcacgggccgcctcgccgatccaacaagacgcaccaactgcggatatgaatctggcgaccacatgtgcatttctgtggatagttggtgggcagacctgaactactttttaagctcgttgcccttcctggcggccgtcgacagtggcgtgatggggatttctagtgaccaggtacggctacttcctcccccgaaaaacgagcgcaagttttgttacgacgtctccagttgcaggtcttcctttccggagacaatgaataagtggaatacattttatcagtacctgcaatccccattcagtaaatttgatgacttgctaaagtacttgtgggccgcacacaccagtacgctggctgataacatcaagagtttcgaggatcgatatgattactactccaaagccgaagcacactttgaaaggtcttgggtactggccgtagatcatttggcggccgtgctatttccgaccacattgatacggtcgtacaaattccagaaagggatgcccccccgcatcctgctgaatactgacgtggcaccattcattagtgactttacagcctttcaaaatgtcgtgctggtactgctcaatatgcttgacaatgtggataaatcaattggttatctgtgtactgagaagtccaacgtgtaccgagatcactcagagtccagcagtcggagctatggcaataatagttag

SEQ ID NO: 5495 - DNA, 813 bp, synthetic construct
  misc_feature 1..813: note = source = /note="Description of Artificial Sequence: Synthetic coding sequence"
  source 1..813: mol_type = other DNA
atggactcactggaatggaactgggcactggtctacgagctgagcggcgaacaccacgatgaagagtggagtgttaagacctaccaagaagtggctcagaagtttgtggaaacgcacccagagtttattggaattaaaatcatttattctgatcatcgttccaaggacgtggcagttatagctgagtcgattcgcatggctatggggcttcgcattaagttcccaacagttgtggccggtttcgatctcgtgggccacgaggacactggacactccctgcatgactacaaggaagccctgatgatcccagccaaagatggcgtgaaactgccttacttcttccacgccggcgagacagactggcagggaaccagcatcgataggaacatcctcgatgcactcatgctgaacacaacaagaattggtcacggatttgccctgagtaagcatccggcagtacggacctatagctggaaaaaagatattcccatcgaggtgtgccccataagtaatcaagtcctcaagctagtgtcagatttacgtaatcacccggtggctacattaatggcaaccggacatcccatggtgatctctagcgatgaccccgcaatgttcggggcgaaaggcctaagttacgatttttatgaggtcttcatggggatcggcggcatgaaggctgacttgagaactttgaaacagctagcaatgaactcgattaaatattctacactgctggagtcagagaaaaacactttcatggagatttggaagaagaggtgggacaagttcatcgccgacgtcgcaacaaagtag

SEQ ID NO: 5496 - DNA, 939 bp, synthetic construct
  misc_feature 1..939: note = source = /note="Description of Artificial Sequence: Synthetic coding sequence"
  source 1..939: mol_type = other DNA
atgggcgtgatggctatgttaatgctgcctttgctcttactgggaatcagtggactcctcttcatttaccaggaagtaagtaggctatggtctaaatcagcagttcaaaacaaagtagtggtgataaccgatgctatcagtggcctcggcaaggaatgcgccagagtctttcacaccgggggcgcccgcctagtgctgtgtggaaagaattgggagaggctggaaaacttgtatgacgccctgatttccgtggctgatccgtcgaagcagacattcacaccaaaactcgtgttgttagacttaagcgacatcagctgtgtgcccgacgtcgctaaggaggtgctggattgttatgggtgtgtagacattctcataaacaatgcttcagtgaaagtgaaagggcctgcccataagatctccctagaactggataagaagattatggatgccaactacttcgggccaataacactgaccaaggcactactgcctaatatgatctctaggaggaccggccagatcgttctggttaataacattcagggaaagttcggaatcccttttcggaccacatatgccgcttccaaacacgctgcattgggatttttcgactgtctgcgcgctgaggtggaggaatacgatgttgtcatctccacagtgagtccgacttttattagaagctatcatgtataccctgaacaggggaactgggaagctagcatctggaaattttttttcagaaaactaacatacggcgtccaccccgttgaggtggcagaggaagtgatgcgcactgtaagacgaaagaaacaggaggtctttatggccaacccaattcctaaagccgcggtctatgttcggactttttttcccgaatttttcttcgctgttgtggcctgtggggtgaaggagaaactgaacgtgcccgaggaagggtag

SEQ ID NO: 5497 - DNA, 738 bp, synthetic construct
  misc_feature 1..738: note = source = /note="Description of Artificial Sequence: Synthetic coding sequence"
  source 1..738: mol_type = other DNA
atggcctccaccgcccttctggcactgtgctccactggagcgttcagtggactcgccgtcgaggcaggagctggcgtttgtcacgctacccctatatacgcaggacactcctggcaccaagctacttttagactaaatgtggcagggagcacgctatccaggtacttaagggatttattggtggccgcgaaccctgacctcctgcagcaggcccttccacgaaaagcgattacacatctgaaaaaaagaagttgttacgtgagtttagacttcgagggtgacctgagagatcccgcacgtcatcatcccgcttcttttagcgtgggtaatggatgctgtgtgtgcctctccagcgaaagatttcgctgccccgaaccaatcttccaacccggcctcctggggcaggctgagcaaggcctgcccgctctggcttttcgggcactgcagaagatgcccaaaacactccgaactcgcttggctgacactgtggtccttgccggagggagcaccctgtttcctggttttgccgaacgtctggacaaggaattagaggcacagtgcagacgtcatgggtatgcagctctgcgtccccacctggtggccaagcatggccgcgggatggctgtttggacagggggaagtatggtggcatccctacactcatttcagagacgctggatcacacgtgctatgtaccaggagtgcggatctcgtctgctttacgatgtgtttaactag

SEQ ID NO: 5498 - DNA, 909 bp, synthetic construct
  misc_feature 1..909: note = source = /note="Description of Artificial Sequence: Synthetic coding sequence"
  source 1..909: mol_type = other DNA
atgagaagatgggcgtgggcagccgtagtagtgctactcggcccgcagctggttctccttggaggtgtgggtgcccgccgcgaggcccaacgcacgcagcaaccaggacagagggccgatcctccaaacgccacggcaagcgcctcctcccgcgagggcctgccggaagctcctaaaccctcacaggcgtccggccccgaattcagcgatgcgcacatgacatggctgaatttcgtgcgtcgtcctgacgacggggctttgcgcaaacggtgcggctctcgcgataagaagcctcgagacctttttggcccacccggcccccccggggccgaggtcaccgccgaaacactcttgcacgaatttcaagaactgcttaaggaggctaccgagcggagattctcaggcctgctggatccactgcttccacagggagccgggctgcgcctggtgggcgaagcattccattgtcgcctgcaggggccgcgccgggtagacaagaggacactcgtggagctgcacggcttccaagctcctgctgcacagggtgcctttctcagagggtccggtctctcattggcctccgggcggttcaccgctccagtttcaggcatttttcaattttccgcaagtcttcatgtagaccactccgagctgcagggaaaagctcgcctcagggcgcgcgacgtggtttgtgttttaatttgtatcgagtccttgtgccagcgccacacatgcctcgaggcagttagtggattggagagtaactcaagagtgtttacattacaggttcagggcctactgcagttgcaagccggacagtatgcctccgttttcgtcgataacgggtcaggagcagtacttactatccaggcaggatcctcgttcagcggactccttctgggtacttag

SEQ ID NO: 5499 - DNA, 1416 bp, synthetic construct
  misc_feature 1..1416: note = source = /note="Description of Artificial Sequence: Synthetic coding sequence"
  source 1..1416: mol_type = other DNA
atggattctgctccccttttccctagaccacatctcttccagaatttgctgctttttctgtgggccctcctcaattgcggactgggagtgtcagcgcaggggccaggtgagtggaccccctgggtgtcatggacacgctgttcttcctcatgcggcaggggggtctccgtgagatcccggagatgtttacgactgcccggtgaagagccttgctggggtgattcacacgagtatagattgtgccagttaccggactgcccgcctggcgcggtgccattcagggacctgcaatgtgccctgtacaacggacgaccagtcttggggacccagaagacataccagtgggtgcccttccacggcgcacccaaccagtgcgacctgaattgcctggctgagggacatgccttttaccattcttttggccgggtgcttgatggcacagcttgtagtccaggagcacaaggggtctgtgtggccggccggtgtctttcggcagggtgcgatggtctgctcggctccggcgctttggaggatagatgtggaaggtgcgggggcgccaacgattcatgcctgttcgttcaacgggtgtttcgcgatgccggagcattcgctggctattggaacgttactctgatccccgaaggagcaaggcacatccgggtggaacaccgaagccgtaatcatctggctttgatgggtggggacggaaggtacgtactgaatggtcactgggtagttagccctcccggaacctatgaggccgcaggcactcacgtggtctacacacgcgacaccggccctcaggaaactctccaggctgctggccctacttcccacgacttgttgctgcaggtgctgttgcaagagcccaatcccggcatcgagttcgaattttggctaccccgtgagcggtacagtccgttccaggccagggtgcaggcattaggctggcctctgcgccagcctcagccccggggggtggagcctcagcctccagccgctcctgcagtgacgcccgcccaaacccccaccctggcaccagacccttgtcctccatgtccggatacacgggggcgagcccacagactcttgcactactgcgggagtgatttcgtctttcaggccagagtgctcggacaccatcaccaggcccaggaaactcgatatgaggttagaatccagcttgtgtacaaaaaccgaagtcctctgagggctcgcgaatacgtgtgggctccgggccactgtccatgtccgatgctggcccctcaccgggactacctaatggcagtgcagcgcttagtttcacccgatggaacccaggatcaactgctgttgccacacgccggctatgcccgcccatggagcccagccgaggactcacgaatccgactgacagcccggaggtgtcccggctag

SEQ ID NO: 5500 - DNA, 222 bp, synthetic construct
  misc_feature 1..222: note = source = /note="Description of Artificial Sequence: Synthetic coding sequence"
  source 1..222: mol_type = other DNA
atggcacctcaaaccttgttactggtcctagtgctgtgtgttctacttctccaggctcaggggggctacagagataagatgaggatgcagcgaatcaaagtttgcgaaaaaagaccttccatcgatttgtgtatacaccactgctcttacttccaaaaatgcgagaccaacaagatttgttgtagtgccttctgcggaaacatctgcatgtccatcctatag

SEQ ID NO: 5501 - DNA, 2349 bp, synthetic construct
  misc_feature 1..2349: note = source = /note="Description of Artificial Sequence: Synthetic coding sequence"
  source 1..2349: mol_type = other DNA
atggcacgggcgcgggccggcgcgttattggcattgtgggtgctgggcgcagcggctcatccccagtgtctggactttaggcctcctttcagaccaactcagccgctgcgcctctgcgctcagtactcagacttcggttgctgtgatgaggggcgcgatgcagagctgacaagacgattctgggctctcgcatcccgcgtcgacgctgctgagtgggccgcttgtgcaggttacgcgagagacctcctatgccaggagtgttccccctatgccgcccacctgtatgatgccgaggacccgtttacaccgctccgcacagttcctggcctctgtcaggattactgcctagatatgtggcataagtgtcgaggactattccggcacctgtctactgaccaggaactgtgggccctcgaagggaatctggcccgtttctgccggtacctatcactggacgacaccgactactgtttcccatacttgcttgtgaacaagaatcttaactccaatctgggacatgtagtggcagacgccaaaggatgcttgcagttgtgtttggaggaggtcgcgaatggcctgcgaaatcccgttgctatggtgcacgccagggacgggacccacagatttttcgtcgcagagcaggtgggattagtctgggcttatttacccgaccggagcagactgggcaaaccattcctcaacatctctcgggtcgtgctgacaagtccctgggagggagacgagagggggttccttgggattgccttccatccatcgtttcagcacaatcgtcggctgtacgtctactatagcgttgggattaggagttccgagtggattcgaatcagcgaatttcgtgtgagtgaggatgacgaaaatgcagtggatcactccagcgaacgaatcatactggaagtaaaagaacccgcctcaaatcacaatggcgggcagcttctttttggggatgacggatatctttacatatttaccggtgacggtggaatggctggcgaccccttcggaacctttgggaatgcccagaataagagtgcgcttctgggtaaggtcctccgaatcgacgttgaccggaaggaaaggggcctcccttatggaatcccacctgataacccttttgtgggtgatccagccgctcaacccgaggtctacgccttgggtgtccggaacatgtggaggtgtagctttgacaggggagatccatcttctggaacagggcgaggaaggcttttttgtggggacgttggacagaacaagttcgaggaggtggatgttgtggagagagggggcaactacgggtggagggccagagagggatttgagtgctacgacaggtccctgtgcgccaacaccagtttaaacgatctcttgccaatcttcgcctatccacacacggtaggaaagtccgtgactggggggtacgtctatcgcgggtgtgaataccccaaccttaatggcctgtacatcttcggagactttatgtctggaaggctgatgagcctccaagagaatccgggaaccgggcagtggcagtactctgaaatctgcatgggacatggtcagacctgtgaattccctgggctgattaacaactactatccttatatcataagttttggagaggatgaagccggcgaactatattttatgtctacgggtgagccttctgctacggctcccaggggcgtcgtgtacaagattatcgacgcaagccgccgggccccccctggcaagtgtcagatccagcctgcccaagtgaaaatccgcagccggctgattccctttgttcctaaggagaaattcataccaaagacccgctctacaccgcgccccacggcaagagccccgacaagagcacctcgaagaggacgtccgaccgccgcacctccagccccaacccctaggcctgcacggcccacacagcagcccggatcgcgccgtggaggcggcagaaggagaggtcgccttaatagtgcgtctcgggctttcagagatggagaggtgcgactggttcgtccagccggattatcttccggtagcggccgggttgaagtgttcgttggggggcgatgggggaccgtctgcgatgattcctggaacatatctggagccgcagtggtctgtcgccaactgggcttcgcttacgcggtgagagctgtcaagcgtgctgagtttggacagggaggctcattgcctattcttcttgacgatgtgcgatgtgccggctgggaacgcaacctcttggaatgtcagcataacggggtcggcactcacaattgcgaacacgacgaggacgcaggggtggtgtgcagtcatcagaaccccgatctgtag

SEQ ID NO: 5502 - DNA, 1317 bp, synthetic construct
  misc_feature 1..1317: note = source = /note="Description of Artificial Sequence: Synthetic coding sequence"
  source 1..1317: mol_type = other DNA
atgcatcccctgccgggctactggagctgttactgcttattactactgtttagtctgggtgtgcaggggagtcttggggcccctagcgccgcccctgaacaggtgcacctgtcttacccaggcgagccgggatccatgacagttacttggacaacttgggtacctacacgcagcgaagttcagttcgggctgcagccatccggacccctgccactccgcgctcagggaacgttcgtcccatttgtcgatggaggaatcctgcgccggaagctgtatatacatcgggtcacattaaggaagctgctgccaggagttcaatacgtataccggtgcggaagcgcccaaggctggtcgcgccgattcagatttagagcactcaagaatggggcgcactggtccccgaggctggctgtctttggagatttgggtgctgacaatcccaaggctgtgcctagacttcgtcgcgacacgcagcaggggatgtatgacgcagtactccacgtcggcgactttgcctataacttggaccaggacaacgccagagtcggtgaccggttcatgagactcatagaaccggttgctgctagtttaccatatatgacatgccctggaaaccacgaggagaggtataatttcagcaactacaaggcgcggttttctatgcctggggataacgaggggctctggtactcctgggatctcgggccagctcatattatttccttctctactgaggtgtacttttttctgcattatggtaggcacctggttcagcggcagtttcgctggctggagtctgatttacaaaaagctaacaaaaatcgggccgcaagaccttggatcattacaatgggccataggccaatgtactgctctaacgccgaccttgacgactgcacacggcatgaatccaaggtgagaaaagggctgcaaggcaagctgtacggcctggaggatctgttctacaaatacggagtcgatctacagctttgggcacacgaacactcttacgaaagactgtggccaatttataattaccaagtgttcaatggcagccgggagatgccttacacgaatcctagggggcccgtccacattattactgggagcgccggatgtgaagaaagattgaccccctttgctgtctttccgaggccttggagcgctgttagggtaaaagagtacgggtacacccgcctgcatattctcaacggtacccatattcacatccagcaagttagcgatgaccaggatggtaaaatagtggacgacgtgtgggtagtacggccgctgtttggccgccgaatgtacctatag

SEQ ID NO: 5503 - DNA, 411 bp, synthetic construct
  misc_feature 1..411: note = source = /note="Description of Artificial Sequence: Synthetic coding sequence"
  source 1..411: mol_type = other DNA
atggcaaggacaaagcagaccgcccgcaaatcaacaggtggcaaggcacccaggaagcaactggcaaccaaagcagcacgaaagtcggcaccggccaccggtggtgtcaaaaagccgcaccgctatagaccggggaccgtggcacttcgagaaattcgcaggtatcagaaaagtaccgaactgttgattcgcaagctgcccttccaaaggctcgtgcgcgagatagcacaagacttcaagactgacttacgtttccagtcgagcgcggtaatggcgctacaggaagcttccgaggcatatctggtggggcttttcgaggatacaaatctttgcgccatccacgcgaaacgtgtcactatcatgcctaaagatatccagcttgctaggaggatccggggagagcgcgcctag

SEQ ID NO: 5504 - DNA, 1209 bp, synthetic construct
  misc_feature 1..1209: note = source = /note="Description of Artificial Sequence: Synthetic coding sequence"
  source 1..1209: mol_type = other DNA
atggccgctaggcctggacctctctggctcctgggactgacgttgtgcgctctgggaggcggagggcccgggctgcggccaccccccggctgtccccaaagaagactgggagcccgcgaaaggcgggacgtccaaagggagatcctggccgtcctgggcttgccagggcgacctagacctagggcaccccccgctgcttcccggttgcccgccagtgctcccttattcatgctcgatctctaccacgccatggcaggggatgatgacgaggacggagctcctgccgaacaacggctcgggcgggctgacttggttatgagctttgtgaacatggttgaaagggatcgagctctgggccaccaagagcctcattggaaagagtttagattcgatctgacacagatccctgcgggcgaggctgttacggcggccgaatttaggatttacaaggtgccaagcatacacctcctcaaccgcacactgcacgtttccatgttccaagtggtgcaggaacaaagcaatagagagagcgacctgtttttcctggacctccagacacttagggccggggacgaaggatggcttgtgcttgatgtgactgccgccagcgactgctggctgctaaagcgacacaaagatctcggactgcggctttacgtggagacggaggatggtcattctgttgaccccggtctcgctggactacttggacaaagggcgcccagaagtcaacagcctttcgtggtaaccttcttcagagcctcaccaagtcccattaggaccccacgcgcagttaggccgctacggcgaagacaaccaaaaaagagcaatgaactgccccaggcgaaccggcttcccggaattttcgatgatgtgagaggttcgcacggacggcaggtttgccggaggcacgagctgtatgtttcttttcaggatttgggttggcttgactgggtgattgccccccaaggctactctgcttattattgcgaaggggagtgctcatttcccttggatagctgcatgaatgcaactaatcacgcgatcctgcagagcctggttcatctgatgaagccgaacgcagttcctaaagcttgctgcgcacccacaaaacttagcgccacaagtgtgttatattatgatagctctaataacgtgatcctgaggaagcatcggaatatggtcgtgaaggcctgcgggtgtcattag

SEQ ID NO: 5505 - DNA, 957 bp, synthetic construct
  misc_feature 1..957: note = source = /note="Description of Artificial Sequence: Synthetic coding sequence"
  source 1..957: mol_type = other DNA
atggccgctgcggccctgcccccgcgccctctgctgctgcttccactcgtgctccttctttccgggcgtcctacccgagctgactccaaggtcttcggagatctcgatcaagtccgaatgacctcagaggggagtgactgccgatgcaagtgcattatgcggcctctcagtaaggatgcatgttctcgtgtgcggagtggaagagcacgcgtggaagatttctatacggtcgaaacagtatcatcgggcactgactgccgctgttcatgcacagctccgcctagttccctgaatccttgcgagaatgaatggaagatggagaaactaaagaaacaggctcccgaacttctgaagagcattaaagcaaatctcagtagggagaacgaagtggttaaagactcagtccggcacctgagtgaacaactgcgtcattacgagaatcactcagcaatcatgcttgggataaagaaagagctgagtcggctagggctccagctgctgcagaaggacgccgccgctgcaccggcaacccccgctaccggaaccgggtcaaaggctcaagacacagcccgtggtaaggggaaggacatatctaagtacggctcagtgcagaaaagcttcgcagacagagggctgccaaaaccacccaaagagaagcttttgcaggtggagaagctgaggaaggagtcaggcaagggaagctttctgcaaccaacagctaagcctagagcgctggcacagcagcaggcggttatccgagggtttacttactataaagcaggtaagcaggaagtgaccgaggctgtggccgacaatactttgcaggggacctcttggttggagcagctacctcccaaagtagagggacgctcaaatagtgctgagccaaacagcgccgagcaggatgaggccgaaccaaggtcaagtgagcgggtagacctagcgagtgggacctag

SEQ ID NO: 5506 - DNA, 402 bp, synthetic construct
  misc_feature 1..402: note = source = /note="Description of Artificial Sequence: Synthetic coding sequence"
  source 1..402: mol_type = other DNA
atggctttaggtgtgcccataagcgtgtaccttttgttcaatgcaatgactgccctgaccgaggaagccgccgtcaccgtcacgcctcccatcactgcacagcaggccgataacatcgaggggcctatagctctgaaatttagtcacctttgtctggaagaccacaactcctattgcattaacggggcctgcgctttccaccatgaactcgagaaggcaatttgcagatgttttactggatatacaggtgaacggtgcgagcatttgaccctcacctcctatgccgtggacagctacgaaaaatatattgccatcgggataggagttggtttgttactgtccgggtttctcgtgatcttctactgttacatccggaagcgctatgagaaggataaaatttag

SEQ ID NO: 5507 - DNA, 651 bp, synthetic construct
  misc_feature 1..651: note = source = /note="Description of Artificial Sequence: Synthetic coding sequence"
  source 1..651: mol_type = other DNA
atgtctagtgaggccgagactcagcagccccctgcggccccacccgccgccccagcactgtcagccgccgataccaagcctggcactactggatccggcgccggctccggcggacccgggggactgacatctgccgcacccgccggcggcgataaaaaggttattgcaactaaggtgttgggaaccgtgaaatggtttaatgtccgaaacggatacgggtttatcaaccgcaacgacacgaaggaagatgtgtttgtgcaccagggggcggaagctgccaatgttaccggccccggcggtgtgcccgtacagggctcaaagtatgccgccgatagaaaccattatcggcgctatccaagacgtcggggcccaccacgaaattatcaacaaaactatcaaaacagcgaatcaggggagaagaatgaagggtctgaaagtgctccagaaggacaggcccagcaacgacgcccatacaggagacgtaggtttcccccttactacatgcggaggccctatgggagaagaccccagtattcaaatcccccagtgcaaggcgaagtgatggagggagccgacaatcagggcgcaggggagcagggaaggccagtgcgacagaatatgtaccggggataccggccaagattcagatag

SEQ ID NO: 5508 - DNA, 756 bp, synthetic construct
  misc_feature 1..756: note = source = /note="Description of Artificial Sequence: Synthetic coding sequence"
  source 1..756: mol_type = other DNA
aacgattggtctgccgaccagttgtatttggaaacaacagggaaatcacggacattacagagcggactagctctcctatacggcttcctgccggatttcgactggaagaaaatatactttcggcatcagccatccgcactcttctgttcagggtcctgttactgtccagtacgtaaccagtatcttgaaaaggagcagagaaggcagtatttactgcgactgaaaaattcacagctcgagaaaacatatggggaaatggccaaaatcgtggacgtgcctactaaacagctgagagctgccaatccaatcgacagcatgctatgtcacttttgccacaacgtgtcctttccgtgcacgcgaaatggatgtgtggacatggagcatttcaaggtgatcaagacacaccagatcgaggacgaacgcgagcgacgggaaaaaaaactctactttgggtatagtctgcttggtgctcaccctattctaaaccaaactatcggtaggatgcaacgtgccactgaagggcggaaggaagaactgttcgcactatactccgcccatgatgtgaccctctcccctgtcctgtcagctctcggactttccgaggcacgctttccacgattcgcagctagagtaaacatcccatctggtttttttacgatggctagcatgtcccacagcactcctctatcagccaaaactaccacatccgtgctgccaagcccctgcgctcggctaaagacttggtccgctttgtag

SEQ ID NO: 5509 - DNA, 576 bp, synthetic construct
  misc_feature 1..576: note = source = /note="Description of Artificial Sequence: Synthetic coding sequence"
  source 1..576: mol_type = other DNA
atggctgctccacgggggagagctgcaccatggactacagcgctcctactgcttctcgcatcgcaggtcctgtccccaggatcctgcgccgacgaagaagaggtaccagaagagtgggtcctccttcacgtggtgcaggggcagatcggggccggaaactacagttaccttagacttaatcatgagggcaagatcgtcctgcggatgcggagcctgaaaggtgacgcggacttgtatgtttcggcctcaagcctgcacccctcgtttgacgattacgaattacagtcagcgacctgtggacccgacgcagtgagcatccctgcccacttccgacgacccgttggaataggagtatatgggcacccgtctcacctggaatccgagttcgagatgaaggtttattatgacggtacagttgaacagcacccatttggggaagcagcttaccctgccgatggtgccgatgccggtcagaaacatgcaggggctcccgaggatgcctcccaggaagaggaaagtgttctgtggaccattctgataagcatccttaaactggttctggaaattctgttctag

SEQ ID NO: 5510 - DNA, 2301 bp, synthetic construct
  misc_feature 1..2301: note = source = /note="Description of Artificial Sequence: Synthetic coding sequence"
  source 1..2301: mol_type = other DNA
atgggccgaagaaggctgttagtttggctgtgtgcagtcgccgcattactctcgggtgcccaggccaggggtaccccattgctcgcccggcctgctccccctggcgcctcacgatacagcctttataccacaggctggaggccccgcttaaggcccgggccgcacaaggctctgtgtgcgtacgttgtccaccgaaatgttacttgcattctgcaggaaggcgcagaatcctatgtgaaagctgagtatagacagtgccgctggggcccaaagtgccccggaacagtaacctaccgcaccgtgcttagacctaagtacaaggtggggtacaagactgtaaccgatctcgcttggaggtgttgccctggcttcactggaaagaggtgtcccgagcacctgaccgatcacggcgcagctagtccacagttagaacctgagccgcagatcccatctggccagctggatccaggcccaaggcctcctagctattcacgcgccgctcctagcccccacggtcgcaaggggcccggtcttttcggagagcggctggagcggctcgagggcgatgtccagaggttggcgcagacctacgggaccctgagcggactcgtcgcatcccacgaggatccgaacagaatgactggaggcccccgagctcctgctgttcctgtaggcttcggggtcattcctgaggggctagtgggaccaggagaccgagcgaggggcccgcttactccacccctggatgaaattctgtcaaaggttacggaggtgagcaataccctccagaccaaagtacagctgctggacaaggtacatggattagcattgggccacgaggctcatctgcagaggctgagggaagcccctccctccccattgaccagtctggcactcctagaggagtacgttgatcgaagattgcacaggctatggggaagtctgttagatggttttgagcagaaattacaaggcgtccagagtgagtgcgacctgagggttcaggaggtccggcgtcagtgtgaagagggacaggcggcctccaggagactgcatcagtctctcgacggcagagagctggcactgcgccaggaactttcccagctgggctctcaactccagggattgagcgtatctgggcgcggttcttgctgtgggcagcttgccctaatcaacgcaagaatggatggactggaaagggctctgcaggcagtcactgaaacccagcgaggcccaggggcacctgctggagacgaactcacgcgactgtctgcagccatgctggaggggggggtggacggacttctagagggccttgaaactttgaatggcacggagggaggagcaaggggctgctgccttcgcctggacatgggcggctggggagtcggtgggttcggcactatgctggaagagcgcgttcagtctttggaagagcgcctggccacgctcgccggggagctcagtcatgactccgcttctcctggccgcagcgcaaggccgctggtgcagaccgaattggcagtcttagaacaaagactggtgagcttggagacatcatgcactccctcaaccacctcagcaattttggacagtctagtcgctgaggtcaaagcgtggcaatcccgctctgaggcccttctgcgacaggtggcatcccacgcagcccttctacaacagctcaatggaaccgtggcagaggtgcagggacaacttgctgagggtaccggttcttcactgcagggggagattaccctgctcaaagtcaaccttaacagcgttagcaaaagtttaaccgggctgtctgattccgtgtcccagtatagtgacgctttcctggccgcgaatacctcactcgatgagcgcgagcgcaaagtagaagccgaggtgcaagccatccaagagcaggtgtcttcccagggttccagactccaggcaggtcacagacaggtgctcaacctgagaggcgagctcgaacagttaaaagccggggtggccaaggtagcaagcggactctctagatgccaggacaccgcacagaagctccagcataccgtgggccacttcgatcaacgcgttgcccaagtggagggtgcctgtcgtcggttagggctgctcgccgcgggactcgattcactgcctacagagcctctgagaccccgcgaggggctctggagccatgtggatcagcttaacaggacccttgcccagcatactcaagacatcgcaaggttgagggacgacttactggattgccaagcacagttggcagaacaggtgaggccaggccaggcgaactag

SEQ ID NO: 5511 - DNA, 1251 bp, synthetic construct
  misc_feature 1..1251: note = source = /note="Description of Artificial Sequence: Synthetic coding sequence"
  source 1..1251: mol_type = other DNA
atgtacagacacggcatcagtagccagaggagctggcctctgtggaccaccatctttatcttcctcggagtcgctgccattctcggagtgacaatcggccttcttgtgcatttcctggctgtggaaaagacctattactatcaaggcgatttccacatatctggcgtgacatacaacgacaactgcgaaaacgctgcaagccaggccagtactaatctgtccaaagacatagaaaccaagatgctgaacgctttccagaactcctcaatatacaaggagtacgttaagtctgaggtcatcaagctgcttccaaatgccaatggatcaaacgtccagctccagctgaagtttaaatttcctcctgcagagggagtgtctatgcgcactaagattaaggcgaagttacaccagatgcttaaaaacaacatggcaagctggaatgccgtgccagcgagcatcaagcttatggagatctccaaggctgcctccgagatgcttactaataattgctgtggcaggcaggtggccaacagcatcatcacagggaacaagattgtcaatgggaagagtagtctcgaaggtgcctggccgtggcaggccagcatgcagtggaaggggaggcactactgcggtgcgagccttatctcctccagatggctcctgagtgccgctcactgttttgctaagaaaaataattccaaagactggactgtgaattttggaatagttgtcaataaaccgtacatgactagaaaagtgcagaatattatctttcacgaaaattacagcagtccaggcctgcacgatgatatcgccctcgttcagctggcagaagaggtttcattcaccgagtatatcagaaagatttgcctccccgaggccaagatgaaactctcagagaacgacaatgtcgtagttaccggttggggcaccttgtacatgaatggcagtttcccggttatcttgcaggaagattttttgaagataattgacaacaaaatctgcaacgccagttacgcctattcgggtttcgtgacggacacgatgctgtgcgccggctttatgagcggggaagctgacgcttgtcagaacgattctggcggccctttagcctatcccgactcacggaatatatggcacctcgtgggaattgtgtcgtggggtgacgggtgcggcaagaagaataaaccaggcgtgtacacacgcgtcacaagttaccgcaactggatcacttcaaaaacaggcttgtag

SEQ ID NO: 5512 - DNA, 639 bp, synthetic construct
  misc_feature 1..639: note = source = /note="Description of Artificial Sequence: Synthetic coding sequence"
  source 1..639: mol_type = other DNA
atgctgagttccgttgttttttggggcctgatcgcgctcatagggacatcacgcggaagctatccttttagtcattccatgaagccgcacttacaccctaggctgtaccacggctgttacggagacatcatgacaatgaaaaccagtggggccacttgtgacgcaaactctgtcatgaactgcggaatccggggatccgagatgtttgccgagatggacttgcgggcaattaaaccttatcagacgcttattaaggaagtgggtcagcgtcactgcgtcgatccagccgttattgctgcaattatctcaagggagtctcacggcggatctgtccttcaggatggatgggatcatcgtggtctgaaattcggtctaatgcagctggataagcagacgtatcaccccgttggcgcatgggattccaaagaacacctctcccaggccactggtatccttacagagcggatcaaggcaattcagaaaaaatttcctacatggtctgtggcccagcacctgaaagggggtctgtccgcttttaagtccggaattgaagcaatcgccacgcctagtgatattgacaatgacttcgtgaacgacataattgcgcgcgcaaagttctataagagacagtccttttag

SEQ ID NO: 5513 - DNA, 378 bp, synthetic construct
  misc_feature 1..378: note = source = /note="Description of Artificial Sequence: Synthetic coding sequence"
  source 1..378: mol_type = other DNA
atggcccggtctgctacccttgccgctgctgccctcgccctgtgtttgctgctagctccaccaggactggcctggtacaagccagcagccgggcatagttcttatagcgttggccgcgcggccggcctgctcagcgggctgagaagaagcccttacgctcggcgctctcaaccatatagaggcgccgaaccacccggcggagcgggagcaagccccgagctgcaactgcatccacggctgcgctctctggccgtatgtgttcaggatgtggcacccaacctgcagaggtgcgagcggctccctgacggccggggcacataccagtgcaaagccaatgtgttcctgagcctcagagccgctgattgcctggccgcatag

SEQ ID NO: 5514 - DNA, 867 bp, synthetic construct
  misc_feature 1..867: note = source = /note="Description of Artificial Sequence: Synthetic coding sequence"
  source 1..867: mol_type = other DNA
atgaataatctatctttctccgagttgtgttgtctattctgctgccctccctgcccaggcaaaatcgccagtaagctggcatttctcccaccagaccccacctacacactgatgtgcgatgaatcaggtagcaggtggaccttacatctgagcgagagagccgactggcagtactcgtcccgagagaaagacgctatcgagtgctttatgacccggacttcgaagggaaatcgaatagcctgcatgtttgtgagatgttccccaaacgccaaatatactttgctgttttcccacggaaatgccgttgacctgggacagatgagctccttctacatcggcctggggtccagaatcaactgcaatatattcagttacgattatagcggttacggagctagcagcggcaagcccaccgaaaaaaacctctatgccgacatcgaagcggcctggctggctctccgaacccggtatggaatccggcccgaaaacgtgatcatctacggtcaatccattggcactgtaccgtcagtcgacctggcagcccgctacgaatccgcagctgtgatcctacattcacccctgaccagcgggatgcgggtagctttcccagatacaaaaaagacctactgctttgacgcttttcccaatatcgacaaaataagtaaaatcaccagtccagtgctgatcattcacggtacagaggacgaagtcattgacttctctcatggcctagctcttttcgagagatgccaacgaccagtggaaccactgtgggtcgagggagcgggtcacaatgacgtagaactgtatgggcaatatctggaaagactaaagcagttcgtcagccaggaactggtgaatctctag

SEQ ID NO: 5515 - DNA, 417 bp, synthetic construct
  misc_feature 1..417: note = source = /note="Description of Artificial Sequence: Synthetic coding sequence"
  source 1..417: mol_type = other DNA
atggttgctccggcagccagggtgtttcttagggccgttagggctgccctgacatcgactgtgccggatctcctgtgtctgctggctagagggtcaccacggggactagcgtccggacgcttaccactcgcagtccactcagcgcagcacggccctggatcaggagcaccatggctgaggattgctagacgcgcgctgaggtttgtgttaagcaagcattggggggacgattgctacttgactaataggctttggcaggatctcaaaccaccgagtcacgtggaaaatggccaggagttgagactggcccccccagtccagtgggcactgcaagtgcagggcaaccagttgcagactgctgtgctctgtctacggatggcccccccagagcccgccgggtctcgacagagaatttag

SEQ ID NO: 5516 - DNA, 1332 bp, synthetic construct
  misc_feature 1..1332: note = source = /note="Description of Artificial Sequence: Synthetic coding sequence"
  source 1..1332: mol_type = other DNA
atgggtggtccccgagcatgggccttgctatgtctgggccttcttctgcctggaggcggggccgcttggtccattggggcagcccccttctccggaagaaggaactggtgctcgtacgtcgtgacccgaactatcagctgccatgtgcaaaacggcacatacctgcagcgagtgctccagaactgtccgtggccaatgtcatgtccagggagctcataccgcactgttgtgcggcccacctacaaggtcatgtacaagatcgtgaccgcacgggagtggcggtgttgtcctggccattcgggcgtcagctgcgaggaagttgcggcatctagcgccagcctcgagcccatgtggagcggttcaacaatgcggagaatggcgttgaggcctaccgccttttcagggtgtctgaactgttccaaagtaagtgagcttaccgaaagacttaaagttctggaggccaaaatgacaatgctcacggtcatcgagcagcccgttcctccaacacccgccacccccgaagatccagcaccactctggggccctccccccgcccaaggtagtccgggtgacggcggcctgcaggaccaggtgggagcgtggggtctgccaggcccaactgggccaaagggtgatgccggttctagggggcctatggggatgcggggtccaccaggtccccagggcccgccaggctctcctggtcgcgctggcgcagtcggaacccctggagaacgcggcccccccggacctcctggaccacccggaccccccggcccacccgcccccgtcggcccccctcatgcgagaatttctcagcacggcgatccactgctgagtaatacattcacagagacaaacaaccattggccccagggccccaccggtcctcccggtccccccggtccaatggggcctcccggtccacccggtccgacaggtgtgcccggatctcctgggcacatcggacctccagggcccactgggcccaaagggatttccggccatccgggggagaaaggtgagcggggcctgcgtggcgagccaggcccccagggttcagcggggcagcgcggagagcccgggcctaagggcgatcctggggagaaatctcactggggtgagggactgcatcagttgagggaggcccttaagatccttgcagagagagtcctgatacttgaaacaatgatcggattgtatgagcctgagttgggtagcggagcaggacccgcaggtacagggaccccttccttactgcgtggaaaacggggcgggcacgcaactaattaccgaatcgttgccccgcggtcaagggacgaacgcggatag

SEQ ID NO: 5517 - DNA, 717 bp, synthetic construct
  misc_feature 1..717: note = source = /note="Description of Artificial Sequence: Synthetic coding sequence"
  source 1..717: mol_type = other DNA
atggtgttactgttgctggtggccatacctctcctggtccacagttcgcgaggccctgcacattatgagatgttgggtcgctgccggatggtctgcgatccacatggccctaggggtcccggtcccgacggcgcaccggccagtgtgcctccattcccacccggcgccaagggcgaggtgggtagacggggaaaagccggtctgagaggcccacctggcccaccaggaccccgcggaccaccaggggaacctggacgcccgggacctccaggcccacctgggccaggcccgggtggcgtggctcctgctgccggctacgtgccgaggattgcgttctatgctggcctaagaaggcctcacgaaggatatgaggtattgcgctttgacgatgtggttactaacgttggcaacgcatacgaggccgcgtccggcaaattcacctgcccaatgcccggtgtttacttctttgcttatcatgttcttatgaggggtggcgacgggacttctatgtgggccgaccttatgaagaatggccaggtgagagccagtgccatcgcccaggacgccgatcagaattacgattatgcctcaaattccgtcatccttcacctcgacgttggcgatgaagtattcattaagctggacggtgggaaggtccatggtgggaatactaataagtactcgacgttcagtggctttattatttatcccgattag

SEQ ID NO: 5518 - DNA, 282 bp, synthetic construct
  misc_feature 1..282: note = source = /note="Description of Artificial Sequence: Synthetic coding sequence"
  source 1..282: mol_type = other DNA
atgaaactgtttctggtgctgattattttgctcttcgaggtactgaccgatggcgcgcgactgaagaaatgctttaacaaggtaacgggatattgcaggaaaaaatgcaaagtgggcgagcgatatgagattgggtgtttgtccggaaagctctgctgcgcaaacgatgaagaagaaaagaagcatgtgtccttcaaaaagccccatcagcatagtggagaaaagctgtctgtgttacaggattacataatcctgcccacaatcactatctttaccgtttag

SEQ ID NO: 5519 - DNA, 609 bp, synthetic construct
  misc_feature 1..609: note = source = /note="Description of Artificial Sequence: Synthetic coding sequence"
  source 1..609: mol_type = other DNA
atggtccggatctggactacgattatgattgtgctcatcctcctcttgcgtataggtccgaacaaaccaagtcttagtggcaggcaggcccctgctcaggcccaaacatctgatctggttccatctctgttcccgctggggttgtgggccccgggcttctgcacatggtccagccccgacgaggacaaggtatggaggcccgcatgggaacaaggccccaaaggagaaccggacccaaggggacttaggccgagaaagcctgtccccggaactgggaatcgcgattccggcactcgccgccggctgcaggacgccaccgaacaggatcccaggcctgggaatgatgtagcctccgccgagacagccggaccgcccagtccctcgggaattcgtgctcaggatcgagctccccgccaccggagagcaccgcctgcccggatgccagtcgctccggcaccctctgcagatggtgaacctctgcaagagcagggcggtggtctattccacaggaccagaagtgtgtacaacgggctggagcttaacacttggatgaaagttgaacggctgttcgttgagaagttccaccagtccttctccctggataactag

SEQ ID NO: 5520 - DNA, 342 bp, synthetic construct
  misc_feature 1..342: note = source = /note="Description of Artificial Sequence: Synthetic coding sequence"
  source 1..342: mol_type = other DNA
atgttgccatgtttggcactattactgctgatggagctatcagtgtgcactgtggccggggatgggggggaagagcagacactgagcaccgaagccgagacctgggtaatcgtagccctggaggagggggccggcccatctattcagttgcagctgcaggaggttaagactgggaaagcatctcaatttttcggactgatgggtaaaagagtcggcggccggcccctgattcagccccgacgaaaaaaagcatatcagctcgagcacacttttcaagggctgctcgggaaacggagtcttttcaccgaaggcagggaggatgaggcccaagggagtgagtag

SEQ ID NO: 5521 - DNA, 1269 bp, synthetic construct
  misc_feature 1..1269: note = source = /note="Description of Artificial Sequence: Synthetic coding sequence"
  source 1..1269: mol_type = other DNA
atgggccccgcctggctgtggcttcttggaaccggaattttggcttccgtccattgccaacccttactcgcccacggcgataaatccttgcaaggcccacagcccccgcgccaccaactgagcgaacccgcacctgcctatcatagaataacgccaacaatcacaaatttcgctcttcggctgtataaagaacttgccgccgacgccccagggaacatcttcttctctcccgtgagcatatctacaacactggccctgttaagcctgggcgcacaagcgaacacttccgccctcatccttgagggactcggatttaatctgaccgagactccggaagcagatattcatcaaggattcaggagcctgcttcatactctcgctctcccttcgcctaagctagagcttaaagttggtaattccctgttcctcgataaaaggctgaagccacgtcagcactacctggacagcatcaaagagctctatggtgcttttgctttctccgcaaattttacggattcagtaacgaccggcagacagattaacgactatcttcgcaggcagacgtatggacaggtggtcgactgtcttcccgagtttagccaagacacgtttatggtgctcgctaattacattttcttcaaagctaagtggaaacatccttttagtaggtaccagacgcagaagcaggagtcattctttgtagatgagcgaacctcccttcaggtccctatgatgcatcagaaggagatgcacagattcctctacgaccaggacctggcctgcacggtgctgcaaatagaataccggggcaatgccctggctctccttgttctgccagatcctggaaaaatgaagcaggtagaggcagctctgcaacctcaaaccctaaggaagtggggccaactgctcctcccgtctctgctcgatctacacctgccgaggttctccatctcaggtacctataatctggaagacattctccctcagatcgggctcactaacatcctgaaccttgaagccgacttttcgggggtgacaggacaactgaacaaaacaatttcaaaggtgagccataaggccatggtcgacatgtctgagaagggcacagaggcgggggcggcctcagggcttttgtctcaaccccccagcttgaatactatgtctgaccctcatgctcacttcaaccgcccattcctgctgttactgtgggaggtcaccacacagagtttgctatttctgggcaaggtcgtgaatccagtggctggatag

SEQ ID NO: 5522 - DNA, 237 bp, synthetic construct
  misc_feature 1..237: note = source = /note="Description of Artificial Sequence: Synthetic coding sequence"
  source 1..237: mol_type = other DNA
atggccctgatcagaaaaacattctatttcctgtttgcaatgtttttcatcttggtgcagttgccatccggatgccaggctggcctggatttcagccaaccgttcccatctggcgagttcgcagtgtgtgaatcatgtaagttgggacgcggaaagtgcagaaaggagtgtttagagaacgaaaaacctgatggtaactgtagactgaactttctgtgttgtagacaacgtatctag

SEQ ID NO: 5523 - DNA, 2139 bp, synthetic construct
  misc_feature 1..2139: note = source = /note="Description of Artificial Sequence: Synthetic coding sequence"
  source 1..2139: mol_type = other DNA
atggccgcggccggacttgtcgccgttgccgccgccgccgagtacagtggtacagtagcttccggtggcaatctaccgggtgtgcattgcgggcccagttccggggctgggcctggtttcggccccggatcctggtcacgatcccttgatagagccctggaggaggcggcagtcacaggcgtgttatccctgtcaggaaggaaactccgggaattcccccgcggtgccgctaaccacgatttaaccgatacaacaagggcagacctgtcaagaaataggctctctgagatacccattgaagcgtgtcattttgtgtccctggaaaaccttaatctgtaccagaattgtattcgctatatccccgaggcgattctaaacctgcaagcacttaccttcttaaacataagccgaaaccaattgtctacacttccggtgcatttgtgtaatctcccactgaaggtgttgatcgcatccaacaacaaattagtgagcctccccgaggagatcggccacctcagacacctcatggagttggacgtgtcctgcaatgagatacagaccataccgtcccagatagggaatttagaggccctgagagatctgaacgtccgtagaaaccatctagtgcatttaccagaagaactcgcagaattaccgctcatcaggctggatttttcctgtaacaagatcacgactatccccgtctgttaccgaaacttacggcacctccaaaccattactctcgacaacaatcccttacagtccccccccgctcaaatctgtatcaaaggtaaagttcacattttcaaatatctgaacattcaggcttgcaagatagcccctgacctgcccgattacgaccgccgacccctggggttcgggagttgtcacgaggagctgtacagttcaaggccctatggagccctggattccggcttcaattctgttgattcgggcgacaagagatggtcaggaaacgagccgaccgatgagttttcggacctgcccttgcgcgtcgcagagataacgaaggagcagcgactccgcagggaaagccagtaccaggagaatcgaggctctctggtggtcacgaacgggggcgttgagcacgatttagatcagatcgattatatcgactcatgtactgcggaagaggaagaggctgaagtgaggcagcccaagggtcctgatccagatagcctatcttcacagtttatggcctacattgagcagcgtcggatatctcacgagggcagcccagttaaacctgtagccattcgcgagttccaaaagactgaagacatgcggcgatacctccaccaaaatagagtacctgccgagccttccagcctgctgtctttgtccgcctcacataatcagctctcacacaccgatttagagctccatcaaagaagagaacagttggtcgagagaacacgccgcgaggcccagctcgcagccttacagtacgaggaggagaaaattcgcacgaaacagatacagagggacgccgtgcttgacttcgtgaaacagaaggcttctcagtctccccagaagcagcatcccctgttggacggagtggacggcgagtgtccattcccttcacgcagaagccaacatactgatgacagcgccctctgtatgtccctgtctgggctgaatcaggtgggctgcgcggctactttaccccactcaagtgccttcactcccctcaaatcagatgaccgcccaaacgcccttctgtcttctcccgcaacggagaccgttcatcactctcccgcctactcatttccggccgccatacagcgaaatcagccacaaaggcctgaatcgttcctctttcgggccggggtcagagctgaaactaacaaaggacatgcaagccccctgcctcccagcgctgctccaaccacagacagcaccgattcaatcaccggacagaacagtagacaaagagaggaggagctcgagctaattgaccagcttcgcaagcacattgaatatcggttaaaagtatcgttaccatgcgacctgggagccgccttaaccgacggcgtcgtgctttgccatttggccaatcacgtccggccccgatcagtgcccagtattcacgtcccttccccggcagtcgttagctag

SEQ ID NO: 5524 - DNA, 213 bp, synthetic construct
  misc_feature 1..213: note = source = /note="Description of Artificial Sequence: Synthetic coding sequence"
  source 1..213: mol_type = other DNA
atgcgcgtgctgttcttcgtctttggcgtactctctctgatgttcaccgtgccacctgctcgtagtttcatcagcaacgatgaatgtcctagcgagtattatcattgtagactcaagtgcaatgccgatgaacatgctattcgttactgcgccgatttctccatctgctgtaagctaaagattatcgaaatcgatggccagaagaagtggtag

SEQ ID NO: 5525 - DNA, 789 bp, synthetic construct
  misc_feature 1..789: note = source = /note="Description of Artificial Sequence: Synthetic coding sequence"
  source 1..789: mol_type = other DNA
atggccgcagcatccgcaggagctacccgactgctgctgctgttgctgatggccgtcgcagcgccctcccgagcaagagggtctgggtgtcgtgctggaacaggagctcgcggcgctggcgctgaaggcagggaaggcgaggcgtgtgggaccgtaggcctgctgctggagcactctttcgagattgatgatagtgccaacttccgaaaacggggtagcctactttggaatcagcaggatggtactctctcgctttcacagcgacagctgtcggaggaggagaggggccgcctcagagacgtggcggctttaaatggtctgtatcgggtgcgtatccccagacgtccaggtgccctggatggcctcgaggcagggggctacgtttccagctttgtcccagcctgctccctcgtggaaagccatcttagtgatcagctgaccctccacgtggatgtcgccggtaatgtcgtgggggtgtcggttgtgacccaccccggtggatgtagggggcacgaagtggaggatgtagatctcgagctcttcaacacatccgttcagctgcaaccccctacgaccgcccctggtccagagaccgcagctttcattgaaaggctcgagatggaacaggcccagaaggcgaagaatccgcaggaacagaagtcattttttgcaaaatactggatgtacataattcctgttgtcctctttctgatgatgtctggggcgccagacactggaggacaaggcggaggaggggggggggggggaggcggcggatccgggcgctag

SEQ ID NO: 5526 - DNA, 150 bp, synthetic construct
  misc_feature 1..150: note = source = /note="Description of Artificial Sequence: Synthetic coding sequence"
  source 1..150: mol_type = other DNA
atggattcatcgcgcgagcccactctcggcaggctcgatgcagcgggcttctggcaggtgtggcagcgcttcgatgccgacggacacggccatgagtctaagtttgcccagggagaaaccgctgtgtatgactacccccgttgcctttag

SEQ ID NO: 5527 - DNA, 213 bp, synthetic construct
  misc_feature 1..213: note = source = /note="Description of Artificial Sequence: Synthetic coding sequence"
  source 1..213: mol_type = other DNA
atgccaggggctatgaaaattttcgtgtttattcttgctgcactcatcctcctcgcccagatctttcaggctcggactgcgatccaccgggcactaatttcaaagaggatggagggccactgtgaagctgaatgcttaacattcgaagttaagatcggaggttgtcgcgccgaactggcccctttctgttgcaagaacagaaaaaaacactag

SEQ ID NO: 5528 - DNA, 711 bp, synthetic construct
  misc_feature 1..711: note = source = /note="Description of Artificial Sequence: Synthetic coding sequence"
  source 1..711: mol_type = other DNA
atgatgccagccgaaagaaggctgccacttagttttgtccttgacgtactcgaaggccgcgctcagcatcccggagtattatacgtccagaaacagtgctctaacctgcccagtgaattgccccagctgctaccggacttggaatcgcacgtgccatgggcttccgaggcactgggtaaaatgcctgacgcagtgaatttctggttaggagaagcagccgctgtgaccagcctgcataaggaccattacgagaatttatactgcgttgtgagtggagagaagcatttcctctttcatcccccatccgatagacccttcatcccctacggtctcagagtaccggggtgtctacagtttcctcacacacttctcccatgggcccctgagctgtacacccccgccacatatcagttgacggaggaggggacttttaaagttgtagacgaagaggcaatggagaaagtcccatggattccgttagacccactggctcctgacctggccaggtacccatcttactcccaggcccaggcattgaggtgtacagtgagagccggagagatgctttatctgcccgctctctggttccatcacgtacagcagtcacaggggtgtatcgccgtcaacttctggtatgacatggagtacgacttgaaatactcatactttcagctgctggatagcctgaccaaggccagtggcctcgattag

SEQ ID NO: 5529 - DNA, 1098 bp, synthetic construct
  misc_feature 1..1098: note = source = /note="Description of Artificial Sequence: Synthetic coding sequence"
  source 1..1098: mol_type = other DNA
atggcaccaaagctcattacagtgctgtgcctggggttttgtctgaatcagaagatttgtccccacgccggtgcccaagataaattctccctaagcgcgtggccatcacccgtcgtacctttaggcggccgagtgacactgagttgccacagtcatctaaggttcgtgatttggacgatcttccagaccactggtacacggtcccatgaactgcataccggactatcaaataatatcaccatatctccagtgactccagaacacgcagggacctatcggtgcgtgggtatctataaacatgcttcaaagtggagtgcagagtccaattccctgaaaataatcgtaacaggcctgttcaccaagccttcaatctccgcccacccatcatcactcgtgcatgcgggcgcccgtgtgagcctgcggtgccacagcgaactggctttcgatgaattcatcctctataaagaggggcacatccagcactctcagcagttagaccagggcatggaggccggtatccactatgtggaggccgtcttttctatggggccggttacaccagcacacgctggcgcctacaggtgttgcgggtgtttcagccacagccgctacgagtggtccgcccccagcgatccactggacattgtgatcaccggaaagtacaagaaaccgtccctcagtacccaggtggaccccatgatgcgcttgggagagaagttgaccctgttctgctcaagcgaaatatcctttgaccagtatcacctgttccgccacggcgttgcccacggccagtggctgagcggcgggcagcggcaccgggaagcattccaggccaatttttctgtaggcagagccacgccagtgcccggcgggacgtatcggtgttacgggtctttcaacgattcaccctataaaccccctgtcaccaggtgtaattttactccacaggaaacattaagggtgcttctttgccactctcaaaatccacctctaaacctcacccccccttggcagacccagtcacctcggaaggcgaacggtcggatgaagcgcagcctccagcaaaagcggcatagacggtcttatatgccctcgtag

SEQ ID NO: 5530 - DNA, 198 bp, synthetic construct
  misc_feature 1..198: note = source = /note="Description of Artificial Sequence: Synthetic coding sequence"
  source 1..198: mol_type = other DNA
atgagaactttcctgttcttgtttgctgtactgttctttctcacaccagcaaaaaatgccttctttgacgagaaatgtaataagctcaagggcacctgcaagaacaattgcgggaagaacgaagaactgatcgcactgtgccagaagtccctgaaatgctgccggacaatccagccgtgtggatcaatcatagactag

SEQ ID NO: 5531 - DNA, 198 bp, synthetic construct
  misc_feature 1..198: note = source = /note="Description of Artificial Sequence: Synthetic coding sequence"
  source 1..198: mol_type = other DNA
atgcggacctttctctttttattcgcggtcctatttttcctcactccagctaagaatgccttctttgatgagaaatgcaataaactaaagggcacatgtaagaacaattgtggcaagaacgaagagctaatcgcattatgtcaaaaatcactgaagtgctgccgtactatccagccttgcggcagcatcatagactag

SEQ ID NO: 5532 - DNA, 237 bp, synthetic construct
  misc_feature 1..237: note = source = /note="Description of Artificial Sequence: Synthetic coding sequence"
  source 1..237: mol_type = other DNA
atggccctgattcggaaaaccttctactttttgttcgctatgttctttatactcgtccagctgccctcgggctgtcaggccgggctcgacttctcccaaccatttccatccggtgaatttgctgtgtgcgagtcctgtaaacttgggaggggcaaatgtagaaaagagtgtctcgaaaacgagaagcctgacgggaactgccggctgaatttcctgtgctgccgccagcgcatctag

SEQ ID NO: 5533 - DNA, 2868 bp, synthetic construct
  misc_feature 1..2868: note = source = /note="Description of Artificial Sequence: Synthetic coding sequence"
  source 1..2868: mol_type = other DNA
atgtgggccgggttgctcctgcgcgctgcttgcgtcgctcttctgctgccaggggctcccgcacgcggatatactggtcgcaaaccacctggccactttgcggccgagagaaggagactgggcccacatgtttgcctatccgggttcggcagcgggtgctgtcctggctgggcaccctcaatgggcggagggcactgcactctcccactatgtagtttcggttgcggcagtggcatttgtatcgctccgaacgtctgcagctgccaggacggggagcaaggggccacctgtcctgaaacccacggcccttgtggagaatatggatgtgacctcacttgtaaccatggcggctgtcaggaggtggctagagtgtgccccgtaggtttctctatgacagaaactgccgtcggtataagatgcactgatatcgatgaatgtgtcacatcctcatgcgagggccactgtgttaacactgaaggaggctttgtctgcgagtgtggacctggcatgcagttgtccgccgaccgccacagttgtcaagacacagatgaatgtctagggaccccttgtcagcagagatgtaagaattcgattggttcatacaagtgttcttgtcggaccggctttcacctgcatggcaacaggcactcttgtgttgacgtgaacgagtgccgccgacctctggaacgtcgggtctgtcatcatagttgccacaacactgtaggcagttttctctgtacctgtcggccggggtttcgcctcagggcggatcgcgtgtcctgtgaggcctttcccaaggctgtactcgcgccatccgctattcttcaaccccggcagcatccaagcaaaatgttgctgctgctgcccgaggccggtcgaccagctctaagcccaggtcacagccccccaagtggagcccctggccccccggctggcgtgcggacaacaaggctgccaagccctacccctcgtctgcctacatcctctccctcagcaccagtgtggctcctttccacacttctggcaacccccgtccctactgcatcgttgctgggaaatctgagaccgccaagcctacttcagggggaggttatgggtaccccgtcgagcccccgcgggccggagtcaccccggctggcagccggtccatctccatgttggcacttaggagccatgcacgagtctcgatctcgctggaccgagccaggctgttcccagtgttggtgcgaggatggtaaggtgacttgtgaaaaagtcaggtgtgaggcagcttgcagtcatccaataccctctcgagatggcgggtgttgcccttcatgcacagggtgttttcattcaggcgtcgtgcgtgctgaaggagatgtttttagtcctccaaatgagaactgcactgtttgcgtgtgtctagccggaaacgtgtcttgcatttcccccgaatgtccctccggcccctgccagaccccaccacagacagactgttgcacgtgcgtccctgtgcgctgctatttccacggcagatggtatgccgacggagctgtgttctccggtggcggagacgagtgcacaacctgtgtgtgccagaatggtgaggtagagtgcagtttcatgccttgtcccgagctggcctgtcctcgggaagaatggcggttaggacctgggcagtgttgctttacatgccaggaaccaactcctagcacaggttgcagcctagatgataatggtgtggagttcccaataggacagatctggtcgccaggtgacccttgcgagttatgtatctgtcaggcggatgggtccgtgtcctgcaagcgtactgattgcgtcgactcctgtccccacccgatacgtatcccaggacagtgctgccccgattgttcagccggctgcacttatacaggcaggattttctacaataatgagactttcccgtccgtactggatccttgcctgtcctgcatatgcctgttaggttctgtggcttgctcccctgttgattgccccattacttgcacctatccgtttcatcctgacggagaatgctgtcctgtgtgcagggactgtaactacgaggggaggaaagtagccaacgggcaggtctttaccctcgatgatgaaccctgtactaggtgtacttgccagctgggcgaggtgtcctgcgaaaaggtcccttgtcaaagagcctgtgccgatccggctttgctccctggcgactgctgttctagctgtccggacagtcttagccctctcgaagaaaagcagggattaagtcctcatggaaatgtggccttctccaaagctggcaggtctttgcatggagacaccgaggcccctgtgaattgctcatcctgtcctggcccacctaccgcaagcccaagccggccagtcctgcatctcctacaacttctgctcaggacaaatctgatgaaaacccagacattgccaacgtcccctgctggcgcccacggaccacatagcttagccctgggccttaccgcgacatttcctggggaacccggagctagccctaggctgtcccctggaccgagtacaccacctggtgccccaaccctgcctctggcttccccaggggctccccaaccgccgcccgttacaccagagaggagttttagcgcctctggtgctcagatcgtgtcaagatggcccccgttacctgggaccctgctgacagaggccagtgccctgtccatgatggatccctccccaagtaagactcccatcactctcctgggaccacgcgtgctctctcccaccactagtcgtctttcaaccgccctggccgccacaacacaccctggtccccaacagccccctgtcggggcttctcgtggtgaagagtccactatgtag

SEQ ID NO: 5534 - DNA, 270 bp, synthetic construct
  misc_feature 1..270: note = source = /note="Description of Artificial Sequence: Synthetic coding sequence"
  source 1..270: mol_type = other DNA
atggtctcttgcgagcgcagggcttccaaaagtgtagggcagattttgctgtgggattttggctacacctgtcgtctaagtcacaggcggcgaaatagcacagaaatcctgtcacgcaacctgcctgccttatacacaggcatcaaggtctgcgagaaacggccttctatcgatttatgcattcaccattgctcttacttccagaaatgcgaaacaaataaaatctgttgctcagcattttgtggtaacatttgcatgtcaatcctttag

SEQ ID NO: 5535 - DNA, 600 bp, synthetic construct
  misc_feature 1..600: note = source = /note="Description of Artificial Sequence: Synthetic coding sequence"
  source 1..600: mol_type = other DNA
atggagacttttcccctactgcttctgtccctcgggcttgttttagctgaagcgagcgaatcgactatgaaaatcattaaagaagagttcaccgacgaggagatgcagtacgacatggccaagagcggacaggagaagcagactatagagattctgatgaatccaattctgttggtcaagaatacatctctgagtatgagcaaggatgatatgtccagcacccttttaacctttcgctcactgcactacaacgaccccaaaggcaacagctccggcaatgataaagagtgctgtaacgacatgacagtgtggagaaaggtaagtgaggccaacggcagttgtaaatggagcaacaacttcatacggtcatcaaccgaggtgatgcgccgtgtccacagggccccgagctgtaaatttgtgcaaaatcctggtataagctgttgtgaaagcctggaactggaaaatactgtatgtcagttcaccaccggaaaacagtttccacgatgtcagtatcacagcgtcacttctctggagaagatactgacagtcctcacaggccattcgttgatgtcctggctggtgtgcgggtcgaaactttag

SEQ ID NO: 5536 - DNA, 729 bp, synthetic construct
  misc_feature 1..729: note = source = /note="Description of Artificial Sequence: Synthetic coding sequence"
  source 1..729: mol_type = other DNA
atggccgccgcaacacgaggttgtagaccctggggttcacttctgggccttctgggtctggtgtccgcagcagctgctgcatgggatttggcgagtcttaggtgtaccctcggcgctttttgcgagtgtgactttcgccccgacctgcccggcctggaatgtgacctggcacaacacttggcagggcagcacctggctaaggccctggtggtgaaggcattgaaggccttcgttagagaccccgcacccaccaaacccctcgttttatcactgcacggttggacaggcaccggcaagagctatgtgtccagcctgctggcacactacctgttccagggcggactgcggtcccctcgcgtccaccatttttctcccgtgctgcacttcccccacccttctcatattgaaaggtacaaaaaggatctgaaatcctgggtgcagggcaaccttacagcctgcgggaggagcctcttcctctttgacgaaatggacaagatgccacctggactgatggaagtgctgaggccgttcctggggagcagctgggttgtctacggcacaaactaccgaaaggccatatttatttttatcagatggttgttgaagttaggacatcacggtagggcccctccccgcaggtccggagctctgccacccgcccccgctgcgccacggcctgctctgcgggcacaacgagccggacccgccggacccggggccaaggggtag

SEQ ID NO: 5537 - DNA, 627 bp, synthetic construct
  misc_feature 1..627: note = source = /note="Description of Artificial Sequence: Synthetic coding sequence"
  source 1..627: mol_type = other DNA
atgctggggctgctcgtggccctactagcactcggcctagctgtgtttgcactcctcgatgtttggtatctcgtacgcctcccctgcgccgtcttacgagcaagactgctccagccccgggtgagagatctgcttgcggaacagagattccccggacgagtacttcctagcgatctcgatcttctgctgcatatgaacaatgccagataccttcgggaagctgatttcgcgagggtggctcatcttactcgttgcggcgtgttgggcgccctccgcgagctcagggctcacactgtgttggccgccagctgcgctcggcataggcggagcctcaggctgttagagcccttcgaagtccgcacccgtctgctgggctgggacgacagggcattctatttagaagctaggttcgtttcccttagggacggcttcgtctgcgcactactgaggtttaggcagcacctcctcggcacctctccggagagggtggtgcaacatctctgtcaaagaagggtggaacctcctgagctccctgccgatctccaacactggatctcctacaatgaggcttccagccagctcctcaggatggagagtgggctgtctgatgtaactaaggaccagtag

SEQ ID NO: 5538 - DNA, 423 bp, synthetic construct
  misc_feature 1..423: note = source = /note="Description of Artificial Sequence: Synthetic coding sequence"
  source 1..423: mol_type = other DNA
atgttggttaaactaaatagtcaagcacgactcagctctatggtgaaaaaagttcgtctgccaagccggtgcgagccccctggaaccacatgtactgtgtctggctgggggaccaccactagcccagacgtcacattcccttccgatctcatgtgtgtcgatgtgaagttgatttcgccacaggattgtactaaggtgtacaaggacttactggaaaattccatgctttgtgccggaattcctgattcaaaaaagaatgcatgtaacggagatagcggcgggcccctggtgtgtcgcggcacactgcagggcctggtgtcttgggggacgtttccatgcgggcaacccaacgatcccggggtctacacacaggtgtgcaagttcaccaagtggatcaacgacacaatgaagaagcacagatag

SEQ ID NO: 5539 - DNA, 354 bp, synthetic construct
  misc_feature 1..354: note = source = /note="Description of Artificial Sequence: Synthetic coding sequence"
  source 1..354: mol_type = other DNA
atgttgagcaaagcacacgggtgcaaaacggcccttagccttggccgctgcccaaaaattagggaggagtgcgaatttcaagagcgcgatgtgtgcactaaggataggcagtgccaagacaacaagaagtgctgtgtattctcatgcggtaagaagtgcctggacctcaagcaggacgtctgtgaaatgccaaaggaaaccgggccctgcttggcctattttctccattggtggtacgacaaaaaagacaacacatgttctatgttcgtgtatgggggatgccaaggcaataacaataattttcagagtaaggctaactgcttaaacacctgtaaaaataaacgctttccctag

SEQ ID NO: 5540 - DNA, 2328 bp, synthetic construct
  misc_feature 1..2328: note = source = /note="Description of Artificial Sequence: Synthetic coding sequence"
  source 1..2328: mol_type = other DNA
atgcacccaggccctgaagaagctggatcagggcgatatggcccacggtatatcaccgacatgggggccggcgaagacgacgaaggattcgaggacgatctcgaccttgatatctctttcgaagaagtgaaaccattgccggccacaaagggcggaaataaaaagtttctggtggagtcaaagaaaatgagcattagcaacccaaaaaccatcagtagactcatccccccaactagtgcctctctgcctgtcacaaccgtggccccacagcccatccctattcagcgcaaagggaaaaacggtgtggctataatgagtagactgtttgatatgccctgcgacgagaccctgtgcagcgccgacagtttctgcgtgaatgattatacatggggaggcagtcggtgtcaatgtaccctaggcaaggggggggagtcatgctctgaagatatcgtcattcagtacccccaattctttggtcacagctacgtcacattcgagcctttgaagaatagctatcaggcttttcagataacgctcgaatttcgggccgaggctgaagacgggctgctgctgtactgcggagagaacgaacatggacggggggactttatgtctctggccattatccgcagaagcttgcagtttaggtttaattgcggaaccggggttgcaatcattgtttctgaaaccaaaatcaagctgggcggatggcatacagtcatgctgtaccgagacgggctgaatggactgctgcagcttaacaacgggactccagtgacaggacaatctcaggggcaatattcgaagattaccttcagaacccccctctatctgggaggagctccctcggcgtattggttagtcagggctaccggaaccaaccggggatttcagggctgcgtgcagagtttggctgtgaacggccggaggatcgatatgaggccctggccactcgggaaagctctgtccggagcagacgtgggagagtgcagctctggaatctgcgatgaagcctcatgcatacacgggggtacttgtaccgctattaaagccgacagctacatttgtttatgtccactgggattcaaagggagacactgtgaggatgcgttcactctcaccatcccccaattcagagagagcttacggagttacgccgccaccccgtggcctctggagccacagcattatctctcatttatggagtttgaaattactttcaggcccgattctggcgatggtgtgcttctgtatagctatgacaccggaagcaaggacttccttagcataaatctcgcaggtgggcatgtggaatttcgttttgattgcggaagcggcaccggggttcttcggtcagaggacccacttaccttgggcaattggcacgagctgcgggtgagtcggactgcgaagaacggcattctccaagtggacaaacaaaaaatagtcgaagggatggcagaagggggtttcacccaaatcaagtgtaacaccgacatctttataggcggggtgcctaactacgacgacgtcaagaagaactccggggtgttgaaacctttctccggctccattcagaagattatcttgaatgatagaaccatacatgtgaagcacgattttacttcaggcgtaaacgttgagaacgcagctcacccatgtgttcgcgccccctgtgcccatggcggctcatgccgcccaagaaaggaaggctacgactgtgattgcccgctaggattcgagggtctccactgccagaaggctatcattgaggccatcgaaattccacagtttatcggcagatcttacttaacttacgacaatcctgacatcctgaagagagtctctggcagcaggtccaacgtgttcatgcgtttcaagacgaccgcaaaggatggccttttgctgtggagaggtgattcacctatgcgccctaatagtgattttatttcactcgggctgcgtgacggggctcttgtcttttcttacaacctcggcagcggcgtggcttctatcatggtgaatggcagttttaatgatggtcggtggcatcgcgttaaagctgtgcgggatggccagagcggcaagataacggtcgacgattacggcgcccggacggggaaatcaccaggtatgatgagacagcttaacattaatggcgcgctgtacgtgggggggatgaaagaaattgcactgcacacaaacaggcagtatatgcgtgggctcgtgggctgtatatctcacttcaccctgtcaactgattatcacattagcttagtggaggacgccgtggatggcaaaaatattaacacctgcggcgccaagtag

SEQ ID NO: 5541 - DNA, 1257 bp, synthetic construct
  misc_feature 1..1257: note = source = /note="Description of Artificial Sequence: Synthetic coding sequence"
  source 1..1257: mol_type = other DNA
atgaggactctgttcaatttgctgtggctagccctggcctgttctcccgtgcataccacactctctaaatccgacgccaagaaagccgcctcaaagacactgctcgaaaaggtcaaattttgcagttgttgccccggctggtccgcaatggctagaagctggctgactgcaacatctgccacccagtcgcagttttctgataaacctgttcaggatcgtggacttgtggtaactgacctgaaagccgagtctgtagtgctggagcatcggagttactgcagcgccaaagccagagacagacactttgccggagatgtgctgggatacgtgacaccttggaattcacatggatatgatgttacaaaggttttcggatcgaagttcacacagatttcccccgtctggctacagctcaaacgaaggggccgtgagatgtttgaggtgacgggactacatgatgtggaccagggttggatgcgagcagtgaggaaacacgctaaaggactgcatattgtgccaaggctcttgtttgaggactggacttacgacgactttagaaatgtccttgatagcgaggatgagattgaggagctgagcaagaccgtagtacaggtcgccaagaaccagcatttcgacgggttcgtcgtcgaagtctggaatcaactgctgtcccaaaaacgtgtcgggctcatccacatgctaactcacctagccgaggcactccatcaagcgcggctgttggcgctcctggtgataccaccggccatcacgcctgggacagatcaactcggcatgttcacgcataaagaatttgaacagcttgcccccgtacttgacgggttctccctgatgacttacgactattcaacggcccaccaacccgggccaaacgctccactcagttgggtaagagcttgtgtacaggtgctggatcctaaaagtaagtggcgttccaagattctgctggggctaaatttttacgggatggactatgcgacgagcaaggacgcccgcgaaccggtggttggggccaggtatattcagactttgaaggaccataggccccgaatggtgtgggattcccaagcaagtgagcatttcttcgagtacaagaagtcaaggagcggacgccacgtcgtcttctatccaacactcaagtctctgcaggtgaggctggagctggcccgcgaacttggggtaggcgtgtcgatctgggagctcgggcaaggcttggattacttttatgacttgttatag

SEQ ID NO: 5542 - DNA, 813 bp, synthetic construct
  misc_feature 1..813: note = source = /note="Description of Artificial Sequence: Synthetic coding sequence"
  source 1..813: mol_type = other DNA
atgatgctccgcctcctatcgtccctcctcctggtggcggtcgcctctggatacggcccgccgtcgtcaaggccatcttcgcgtgtggttaatggcgaagacgccgtaccctacagttggccctggcaggtgagcctccagtatgaaaagtctgggagcttttaccatacgtgcggaggctctctaatagctcctgattgggtggtcacagcagggcattgtataagcagctcccgtacctatcaagtcgtgcttggggagtatgatcgcgcagtgaaagagggccccgagcaggtgataccaattaattctggtgatctctttgtgcatcctctttggaatcgaagctgtgttgcctgtgggaacgatatagccctaatcaagctttcgaggagcgcgcaactgggggacgcggtgcagctcgccagccttccccccgccggcgacatccttcctaatgagaccccctgttatatcactggatgggggaggctatacactaacgggcctcttccagacaaactgcaagaggctctcctgccagtagttgattatgaacattgctcacgctggaactggtgggggtcatctgtgaaaaagaccatggtgtgtgccggcggggacatacgatccgggtgtaatggcgacagcggcgggcctctcaactgtcctacagaagatggtggatggcaagtgcacggtgttacgtcctttgtgtctgcattcgggtgtaacactcgccgcaaaccaacagtgtttactcgggttagtgctttcatcgattggattgaggagacgatagcctcacattag

SEQ ID NO: 5543 - DNA, 585 bp, synthetic construct
  misc_feature 1..585: note = source = /note="Description of Artificial Sequence: Synthetic coding sequence"
  source 1..585: mol_type = other DNA
atgaccatgagacacaattggaccccggacttaagtccgttgtgggtcctgctcctttgtgctcatgtcgtgaccctgcttgttagagccacacccgtctctcagaccaccacggccgctaccgcaagcgtaagaagcacgaaggacccctgtccaagccaaccgccggtgtttcctgcggcaaaacagtgtcccgccttagaggtgacatggcccgaggtcgaggtgccccttaacggtaccctttccctatcttgtgtggcctgctctcgttttcctaatttctctattctgtattggcttggcaatggatctttcatcgagcatctacctggacgcctgtgggaaggaagcacgtctagggaaaggggatcaacaggtacacagctgtgtaaagcactggtgctggaacagttgacacccgcattacattccactaacttttcgtgtgtgttggttgacccggagcaagtcgtgcaacgccatgtggttctcgcacaactttgggccggtttaagggcgacccttccaccaactcaggaggctctgccatcctcacatagcagccctcagcagcagggctag

SEQ ID NO: 5544 - DNA, 1308 bp, synthetic construct
  misc_feature 1..1308: note = source = /note="Description of Artificial Sequence: Synthetic coding sequence"
  source 1..1308: mol_type = other DNA
atgcagggacaagggagaagaaggggaacttgcaaggacatattttgctccaagatggctagctacttgtatggtgtactctttgccgttggactctgtgcccctatatactgtgtctccccagcgaatgctccttcagcttaccctcgccctagctctactaaatctacccctgcctcccaagtctattccctaaataccgactttgcatttcgcctgtatcgcaggttggtgctggaaaccccatctcagaatatcttcttctccccagtttcggtgtccacttctctggcgatgctctccttgggcgctcattccgtgacgaaaactcagattctccagggattgggctttaacctgactcatactcctgagtcagctattcatcagggatttcaacaccttgtgcattcactcaccgtcccgagcaaggacctgaccctcaagatgggcagtgctctgttcgtgaaaaaggagttgcagctgcaagcaaattttctcggaaatgttaaacgtctgtacgaggcagaggtgttctccacagatttcagcaacccctctatagcacaggccagaattaactctcacgtaaaaaagaagacccaggggaaagtcgtggacatcatacagggcttggacctgctcactgcaatggtgctggttaatcacattttctttaaggctaaatgggagaaaccatttcacccagaatacaccagaaagaattttccattcttggttggcgagcaagtgacagtgcacgtccctatgatgcatcaaaaagagcagtttgctttcggggtggacactgagctcaactgctttgtactgcaaatggattataaaggcgatgctgtagcctttttcgtcctgcctagtaaaggtaagatgcgccaattggaacaggctctcagtgcgcggaccttgaggaagtggagccatagtctgcagaaacgctggatcgaagtctttatccctaggttttccataagtgccagctacaacctggagacaatactccccaaaatggggatacaaaacgtgtttgataaaaacgcagacttttctggcattgctaaaagagattcactgcaggtgtccaaggcaactcacaaggcagtgttggatgtcagcgaggaggggaccgaggccacagccgctactactactaagttcatagtaaggagcaaagatgggccgtcatattttaccgtcagtttcaatcgcaccttcttaatgatgattactaacaaggctactgacggcatcttgttcctgggcaaggtagagaaccccactaaatcatag

SEQ ID NO: 5545 - DNA, 393 bp, synthetic construct
  misc_feature 1..393: note = source = /note="Description of Artificial Sequence: Synthetic coding sequence"
  source 1..393: mol_type = other DNA
atggcttctgaccttatccggaccatcctcgctgttgcgttgatttctaagctcggcaccgctgtcgacgctgagctcatgccctcaggggcaatcctgcagaacaagcgcgagaatttgccacgcgtttgccacgcactcgcattcctaggcatggctagatgccaggacctgtttctcgtgaggctgcaaggatggaagctgggaacccgatttcaggacggcccaaggtctactccccaggaggagggcgggagcccacagcggaagagagggatgccggttcaaatacacttccttttgaagagcttcttaagttcaccgatcacgttcgcattcataagcctagccaggactgtatctctggccactgctatctgcaagatcgtgtag

SEQ ID NO: 5546 - DNA, 837 bp, synthetic construct
  misc_feature 1..837: note = source = /note="Description of Artificial Sequence: Synthetic coding sequence"
  source 1..837: mol_type = other DNA
atgcagtggctgcgggttcgggaatcaccaggggaggctaccgggcaccgcgttacaatggggactgccgccttgggcccagtttgggcggcacttctgctgtttctcctaatgtgcgagattcccatggtggagctgaccttcgatcgtgcagtggcgagcgggtgccagcgctgctgcgacagcgaagacccactggaccccgcccatgtgtcgtcagccagcagcagtggcaggccccacgctcttccagaaatccggccctacatcaacatcaccatactcaaaggtgataagggggaccctggcccaatggggttgccagggtacatgggtagagagggccctcagggggaacccgggccgcagggtagtaaaggcgataagggggagatgggaagcccaggtgccccttgccagaagaggtttttcgctttctctgtaggccgcaagacagcgttgcacagtggagaagattttcagactttactattcgaacgcgtgtttgtgaacttagatggatgctttgatatggcgactgggcaattcgcggcgccactgcggggaatttattttttttctttaaatgtgcactcctggaactacaaggaaacgtacgtgcatattatgcacaatcagaaggaagccgtgatcctgtacgcccagcccagtgaacggtcaattatgcagtcccaatctgtaatgctggacctggcctatggcgatcgcgtgtgggtgaggttgtttaagcgccaaagggagaacgccatatactctaacgacttcgacacctacattacattctctgggcatctaataaaagctgaagatgattag

SEQ ID NO: 5547 - DNA, 1635 bp, synthetic construct
  misc_feature 1..1635: note = source = /note="Description of Artificial Sequence: Synthetic coding sequence"
  source 1..1635: mol_type = other DNA
atgtgtactgtggtcgacccgcggattgtgcgtcgctacctgttacgtaggcagcttggccagggtgcctatggtattgtgtggaaggctgtcgacagaaggactggggaagtggtggcaataaagaagatctttgatgcgttccgcgacaagacagacgctcagaggactttccgcgagatcacactgttgcaggaattcggagaccatcccaacataatctcgcttcttgatgtcatccgcgccgagaacgaccgtgacatctatctggtcttcgaattcatggacaccgatctgaacgcagtgattagaaagggaggtctgctacaagacgtgcatgtgcggagcattttctaccaactgctgagggccaccaggtttcttcactcagggcatgtcgtgcacagggaccaaaagccctccaatgtgctgctggacgctaactgcacagtcaagttgtgtgacttcggactggctcggtctcttggcgatctccccgaggggcccgaagaccaggccgtgacggaatacgtcgctacaagatggtacagggccccagaggttctgctgagttcccataggtacactctgggcgtggacatgtggagcctgggatgtattttgggcgaaatgctgagaggaaggccgctgtttcccggaacatccacgctgcatcagctggagttaattctggaaacaatccccccacctagtgaggaggacctgttagcactggggtccggatgccgcgcctcagtccttcaccagctaggctcacgacctcgccaaacccttgacgccctgctgccacctgatacaagtcctgaagccctggacctcctgcgtagactgctggtgtttgccccagataagcgtttgagcgccacacaagctcttcagcatccttatgtacagagattccactgtccatcagatgaatgggccagggaagctgacgtgagacctcgggcccacgagggcgtccaactgtctgtccctgagtatcgctcccgggtctaccagatgattctggagtgcggcgggtcgtccggaacctcccgggagaaaggaccagaaggggtgagcccttctcaagcacacctccacaagccccgcgcggaccctcagctgccgtccagaactccagtgcagggcccccggcctcggccgcagtcatcacccggtcacgaccccgccgagcatgagagccctagagcagcaaagaatgtgccaaggcagaatagcgctccattgttacagaccgccctcctgggtaatggggagcgcccaccgggggcaaaggaggctccgcctctgactctctccctcgtgaaacccagcggcaggggagccgctcccagtttaacctcacaggctgctgcacaggtcgcgaaccaggcccttattcgcggcgactggaaccgtgggggcggagtgcgggtcgcctcagtccagcaggttcctcctcggctgcccccagaagctcgcccgggccgcaggatgttttctacatcagccctccagggagcccaaggcggtgcaagagcattgcttggaggctacagccaagcctacgggacagtctgtcactccgccttgggccacctacctttgctcgaagggcaccacgtctag

SEQ ID NO: 5548 - DNA, 399 bp, synthetic construct
  misc_feature 1..399: note = source = /note="Description of Artificial Sequence: Synthetic coding sequence"
  source 1..399: mol_type = other DNA
atgaaaagttctggccttttccccttcctggtactcctagccctgggaactctagccccatgggcagtggaagggagtggaaaatcattcaaagcaggggtgtgcccacctaaaaagtccgcccaatgtctcaggtacaaaaagccagaatgccagtctgactggcagtgtccggggaagaagaggtgttgcccagatacttgtgggattaagtgcctcgatccggtggacactcccaatccaacaagacggaagcccggcaagtgccctgtcacctacggccagtgcctgatgctcaacccccccaatttctgcgagatggacggacagtgtaaacgtgatctgaaatgctgtatggggatgtgtgggaaatcatgtgtgtcccctgtgaaagcttag

SEQ ID NO: 5549 - DNA, 1401 bp, synthetic construct
  misc_feature 1..1401: note = source = /note="Description of Artificial Sequence: Synthetic coding sequence"
  source 1..1401: mol_type = other DNA
atgaaaccaccactgcttgtattcatcgtctgtttgttgtggcttaaggactcacactgcgctccaacctggaaagacaagactgcaatttcggagaacttgaaaagtttctctgaagtgggtgagatcgacgcggacgaggaggtcaagaaagccctgaccggtatcaagcagatgaaaataatgatggagagaaaagagaaagaacacaccaatctgatgtccactctgaagaagtgtagggaagaaaagcaggaggcgcttaagttactgaacgaggttcaggagcatctggaagaagaagagcgcctgtgcagagagtctctggccgacagctggggggaatgtaggagttgcctcgagaataattgcatgagaatctacaccacctgccagccttcgtggtctagcgtgaaaaataagattgagaggttcttcaggaaaatttatcagtttctttttccatttcatgaagataacgaaaaggatctgcccatcagcgagaagctgatcgaggaggacgcgcaacttacccaaatggaggacgttttctcccaattgaccgtggacgtcaactcgctgttcaatcgatcctttaatgtgttcagacagatgcaacaggagttcgaccagaccttccagtcacatttcatcagcgacacagatctgacagagccttactttttcccagcattcagcaaagaaccaatgactaaagctgatcttgaacaatgttgggatatccccaattttttccagctcttttgcaatttcagcgtcagcatctacgagtcagtctcagagacgataactaaaatgttgaaggccatcgaagaccttcccaagcaagacaaggcacccgatcacgggggccttattagcaaaatgcttccaggacaggataggggtttatgtggggagctcgatcagaacctaagtcgctgcttcaagttccacgagaagtgtcagaaatgccaagctcacctcagcgaggactgccccgatgtgcccgcactgcatactgagctggacgaggcaatccgtctagtcaacgtctcaaaccaacagtatgggcagattctacagatgacccgcaaacacttggaagatacagcctacctcgtcgagaaaatgagagggcaattcggatgggtgagcgaactggctaaccaggcccccgaaacagagattatttttaacagcattcaggtcgtccctagaattcatgaaggcaacatctctaagcaggatgagaccatgatgacggacctttctatattgcctagcagcaactttacattgaagattcctctggaggagtcagccgaaagttcgaattttatcggttacgttgtggctaaggctctccagcactttaaggaacatttcaagacgtggtag

SEQ ID NO: 5550 - DNA, 522 bp, synthetic construct
  misc_feature 1..522: note = source = /note="Description of Artificial Sequence: Synthetic coding sequence"
  source 1..522: mol_type = other DNA
atgcattggaagatgctccttctgcttctcctgtactacaatgctgaagctagcatgtgccataggtggagccgtgcagtgctgtttccagccgcccacagacccaaaaggtccagctcccttcctctaaaccccgtactgcagacttccttggaagaagtcgagctactttacgagttcctgctggcggagctggaaattagccctgacctacagatttcaatcaaggacgaagagcttgctagccttcgtaaggcctccgatttcagaactgtctgcaataacgtgattccaaaaagcatcccagacatccgtcgactgagcgcttccctgtcctcgcacccaggcattctgaaaaaggaagactttgaaagaaccgttctgactctcgcctataccgcttacagaacagcactgtcgcatggccatcagaaggacatctgggcccagtcgctcgtctccctgttccaagccctgcgccacgatctaatgaggagctcacagccaggggtccccccatag

SEQ ID NO: 5551 - DNA, 1473 bp, synthetic construct
  misc_feature 1..1473: note = source = /note="Description of Artificial Sequence: Synthetic coding sequence"
  source 1..1473: mol_type = other DNA
atggaagactccgattcagctgctaagcagctggggctggctgaggccgcggcagtagccgctgctgccgctgtcgcggccgctgccgccgccgcggcgggcggagaagcagaggagcctgtgctgtcaagagatgaggactctgaagaggatgctgactctgaggccgagagggaaacgcccagggtgaccgctgtcgcggtgatggccgccgaaccgggccacatggacatgggagcagaggcgttgccaggacctgacgaagcagcggctgccgccgcttttgctgaggtgacgacggtgacggttgccaacgtcggagcagctgctgacaacgttttcaccacaagtgtcgctaacgcagcatccattagcgggcacgtgctctccggcaggactgccctacagatcggggacagcctgaacacagaaaaggctactctgattgttgtgcatactgacggaagtatcgtggagacaacagggctaaaagggcccgcagcccctctcacccccggcccacagagcccaccaactcctctggcgcccggccaagaaaagggcggtactaagtataactgggatcccagcgtctacgattcagaactacctgtccgctgtaggaatatcagcggcaccctatataagaaccgactgggatctgggtgggatctcaaaccctcgagatgcctccttcacctgtgctgcctattgcgccgacacgatctcattactgtaacacctagtggccagatcacgacatctggggccctgacctttgacagggcctcaaccgtagaggccactgcggttatttcagagagccccgcccagggagatgtcttcgccggggcgaccgtacaggaagccagcgtccagccaccctgccgtgcatcacatcctgaaccacattatcccggctaccaagattcttgtcaaattgcgccattccccgaggctgcgctacctacatcccatccgaaaattgtcctcacaagtctgccagcattggctgtgcctccacctacgcctactaaggccgccccccctgctttagtcaatggactggaactgagcgaacccaggtcgtggctgtatctcgaagagatggtgaattccctgctgaataccgcgcagcaattgaagacattgtttgaacaggcaaagcacgcctcgacataccgggaggccgctacaaatcaggccaaaatccacgcagatgcagagagaaaggaagtgatccatcctccccgtctgccgaaggtgttgggtctgcagcagtcttgcgttaactgtggtagagaggcaatgtcggagtgcacgggatgccacaaagtcaactactgttccaccttctgccaaaggaaagactggaaagaccatcagcatatctgcggacagtcagccgccgtgacggttcaggcagatgaggtccacgtggccgaaagcgtgatggagaaggtgaccgtgtag

SEQ ID NO: 5552 - DNA, 1476 bp, synthetic construct
  misc_feature 1..1476: note = source = /note="Description of Artificial Sequence: Synthetic coding sequence"
  source 1..1476: mol_type = other DNA
atgccctcaactgtgctaccttcgacagtgctgcctagcctactgccgaccgctggcgccggatggtctatgcgctggattttatgttggagtctgacactgtgcctcatggcccagactgcactcggtgcgctccataccaagaggccacaggtggtgaccaagtatggcaccctccaagggaagcagatgcatgtgggaaaaacgccaattcaggtttttcttggagtaccattctccaggccgccccttggtatccttagatttgccccgccagagcctcccgaaccatggaagggaataagagacgcaactacgtaccccccaggatgtttacaggagagttggggccaactggcgtcgatgtatgtgagtactcgcgaaagatacaagtggcttcggttcagtgaggattgcctctaccttaatgtgtatgctcccgctcgcgctcctggcgatccccaactgccagtgatggtgtggttccccgggggagcatttattgtgggagctgcgtccagctatgaggggtctgatctcgctgcgcgcgaaaaagtggtgctagttttcctccagcaccgattaggaatctttggtttcttgtcaacagacgatagtcatgctcgtgggaactggggattgctagaccaaatggcggccctccgatgggtgcaggagaatatcgccgccttcgggggggaccccgggaatgtgaccctgttcgggcaaagtgcgggggccatgtccatcagcggccttatgatgagtccgctggctagcggcctgttccacagagcgatatcccagtctggcaccgcgttgttccggcttttcataactagcaacccactgaaggttgctaagaaggtcgcacatctcgccggatgtaaccataactctacccaaattttggtgaactgcctgagggccctgtctggcacgaaagtgatgcgcgtgtccaataagatgaggttcctgcaactgaattttcagagagatcccgaagagataatatggtcaatgagtccagttgtcgacggcgtagtgattcccgacgacccactggtgctcctaacccagggaaaggtatccagcgtgccctacttgcttggggtaaataacttggagttcaactggctgcttccttacatcatgaaattccctctcaaccggcaagccatgcgcaaagagaccatcaccaaaatgttgtggtccaccagaaccctactgaacataaccaaagagcaggtaccccttgtggtggaggaatacctggacaatgtgaacgagcatgactggaagatgctgcgcaatcgaatgatggatatcgtccaggacgctactttcgtttatgcaactttgcagacagctcattatcatcgcgaaacccctatgatgggaatctgccctgcaggtcacgctaccacacgcatgaaatccacttgttcatggatcctgccacaggagtgggcttag

SEQ ID NO: 5553 - DNA, 753 bp, synthetic construct
  misc_feature 1..753: note = source = /note="Description of Artificial Sequence: Synthetic coding sequence"
  source 1..753: mol_type = other DNA
atgcccgcctcctcaccctttctgctggccccgaagggcccgcccggtaacatgggaggacccgtgcgagagccagccctttcagttgcactgtggctgagttggggcgccgctttgggcgcggtagcctgcgccatggcgctgctcacacagcagaccgagctacagagtctgagaagggaagtgtccagactccagggtacaggcggcccaagccaaaatggcgagggctatccctggcagtccctcccagaacagagcagcgatgccctcgaggcatgggagaacggagagaggtcccgcaaacggagagccgtgttgacccagaagcaaaagaagcagcattcagtgcttcacctggtgccaattaacgccacctcaaaagacgacagtgatgttacagaagtaatgtggcaacctgccctcaggcgcggaagaggcctgcaggcacagggttacggcgtgcggattcaggatgcaggagtgtatctcctgtattcacaggtcctgtttcaagacgtgaccttcacgatgggccaggtagtgtctcgggagggccagggtagacaggagaccctgttcaggtgcatacgaagtatgcccagtcatccggatagggcttacaatagttgctacagtgccggcgtatttcacctgcaccagggagatatcctttctgtgattatcccacgggcgagggctaagcttaatctgagccctcatggcaccttcttgggtttcgtcaaactgtag

SEQ ID NO: 5554 - DNA, 1437 bp, synthetic construct
  misc_feature 1..1437: note = source = /note="Description of Artificial Sequence: Synthetic coding sequence"
  source 1..1437: mol_type = other DNA
atgtcacctcccctactcaaactgggggccgtcttgagcaccatggccatgatttctaactggatgtctcagaccctccctagtttggtgggccttaacactacacgtctgagcacaccagacacactaacacaaattagcccgaaggaagggtggcaagtatacagcagtgcccaagaccccgacggccgatgcatttgtacagttgtcgctcccgagcaaaacttgtgctcaagagatgccaagagccggcagctccgtcagctgctagaaaaggtccagaacatgtctcagtctattgaggtcctgaatctcaggacccagcgcgattttcagtatgtactcaaaatggaaacacaaatgaagggcctcaaggccaagtttcgacagattgaagacgatagaaaaacactcatgacaaaacatttccaggagctgaaagaaaagatggacgaactcctgccacttataccagtgctggaacaatacaagacagacgctaagttgatcacccagttcaaagaagagatccggaacctatccgcagtgctgaccggcatccaagaggaaatcggcgcatacgattacgaggaactccaccagcgggttctctccttggaaacccggttgcgagactgtatgaaaaaactcacctgtggcaaactcatgaaaatcactggaccagttacagtaaaaacctcagggaccaggtttggcgcatggatgactgacccactggctagcgagaagaacaatcgggtgtggtacatggacagctacaccaacaacaagatcgtccgagaatacaagagtatcgccgattttgtgtccggggcggaatcaagaacgtataatctcccttttaaatgggccggtacaaatcacgttgtgtataatggctccctatacttcaataaataccagagcaatattataattaaatatagttttgacatgggccgagtcctggcccagcgcagtctcgagtacgccgggtttcacaacgtgtacccttacacctggggcggcttttcagacatcgatcttatggccgacgaaatcggcctttgggctgtgtacgccaccaatcaaaacgctggaaatatagtcatctcccaactgaaccaggacaccttagaggtgatgaagtcttggtccaccggttacccaaagagatctgcgggggaatcctttatgatctgtggcaccttatacgtgaccaattctcatttgacaggagctaaggtctattactcctactctacgaagaccagcacctacgaatacactgacatccccttccacaatcagtattttcatattagtatgctggactacaacgcaagggatcgtgcactatacgcttggaataacggtcatcaggtccttttcaatgtgacactgttccacattataaaaactgaagacgatacctag

SEQ ID NO: 5555 - DNA, 1101 bp, synthetic construct
  misc_feature 1..1101: note = source = /note="Description of Artificial Sequence: Synthetic coding sequence"
  source 1..1101: mol_type = other DNA
atggctagagaaagacccccaggaagaggttgtggagtcctacggcgctgtctgctcggcgcagtccttttattcgggctcagattgtgcgccgagctgcggcgcgccggtcctggatctcccacccggtctgccccacctggcccagcctggcgcccccctggacctcacctcccacctgcaccaggtcagccaaggggggccagcagacgtcaggttacctatgtgcgcagcggaagaagagccccacccggcgggggaggctccggtactccagagcctggctgttgcgcccccaggggaagacctcgcagaaaaggcccaagatggcacatagatctgcagccttgggcaggaagtgcccagagtctggacgaagaagcatggagatttctgcgctatatctcaacgacccaaattgcttgtaaccatatgaacacggatagtctcgctacggatagtagtccgacccataagccgtggtctgtgtgcctggacgatcggttcaatctcgctcaccagatacggaacaaacagtgccgcttgtacagcctaggattggggagcgacgatacgcatttcgaggtaagcatggctaataatggctgcgaggtccaccggttcgaccccagtgtgaagtccgcccacattctcgagtcacagcatctgtggtaccaccggctctcaatcgattggagagatccccacccggccgtagccgcccagaaacctcactccaacacgagaaagttgggatccattctgaatgagtttgggcaccacaagatcgatgtgctgaaggctgatttagaaagtgcagagtggaaagtccttgaaaatctgatcctggaggacgtgttagaacagattgggcagttaatcttcgaaatccatctccactggcctggttttgaagtttccggcagcgattcgtccgttgtcagattctggtatagcctgttaaaggagttggaacaaaaagactttcggctgtttcatagctacaaggatttgtctaagcctcagctgttcctcaagaaagacatttttaacgctagtagctgctacacattgtcctgggtgaatacacgatggaagtag

SEQ ID NO: 5556 - DNA, 300 bp, synthetic construct
  misc_feature 1..300: note = source = /note="Description of Artificial Sequence: Synthetic coding sequence"
  source 1..300: mol_type = other DNA
atgaagatcccagttctgccagccgtggtcctgctctcactgctggttcttcactctgcgcagggggctactctgggaggccccgaggaggagagcaccatcgaaaactatgcatcccgcccagaagctttcaacacaccattcctgaacattgacaagctgcgaagtgcatttaaagctgacgagtttctgaactggcatgccctatttgaatcaattaaaaggaaattgccttttctgaattgggacgccttccccaagttgaagggactaagaagcgccactccggatgcgcaatag

SEQ ID NO: 5557 - DNA, 618 bp, synthetic construct
  misc_feature 1..618: note = source = /note="Description of Artificial Sequence: Synthetic coding sequence"
  source 1..618: mol_type = other DNA
atgatgcgaacgctgatcacaacccatcctctccccttgctgctcctgcctcagcagctcctgcagctcgtccagttccaggaagttgacacagactttgacttcccagaggaggataagaaggaagaatttgaagaatgtctggaaaagttcttctctactggtccagctaggcctccaaccaaagaaaaagtgaagagaagggttttgattgagccaggcatgcctctgaaccacatcgaatattgtaaccacgaaataatggggaagaatgtgtactataagcatcgctgggtagctgagcattatttcctgctgatgcagtatgatgagttacaaaaaatctgttataatagattcgtcccttgcaagaacgggattaggaagtgcaatagaagcaagggtctggtggaaggagtatactgcaatctgaccgaagcttttgaaatcccggcgtgtaagtatgagagtctgtacaggaagggatatgtgctgataacgtgctcctggcagaacgaaatgcagaaacgcataccccacaccattaacgacctcgtcgaacccccggaacaccgctcctttctcagtgaggatggggttttcgttataagtccgtag

SEQ ID NO: 5558 - DNA, 402 bp, synthetic construct
  misc_feature 1..402: note = source = /note="Description of Artificial Sequence: Synthetic coding sequence"
  source 1..402: mol_type = other DNA
atgctagactggcgcctggcctccgcacattttatcctggctgtgacattgaccttgtggtctagcggaaaggtgctctcagtggacgtgacaacaaccgaagcattcgacagcggcgttattgacgtgcagtctacccctaccgtgcgtgaggagaaatccgcaactgacctgactgctaagctcctgctgctagatgagctcgtgtcactggagaatgacgttattgaaacaaaaaaaaagcggagcttctccggattcgggtcaccactggatcgtctcagtgcaggctcagtggaccataaaggcaagcagaggaaggtggtggaccatcctaagcggcggtttggcatacctatggatcggataggacgaaatcgcttatcaaattctcggggatag

SEQ ID NO: 5559 - DNA, 846 bp, synthetic construct
  misc_feature 1..846: note = source = /note="Description of Artificial Sequence: Synthetic coding sequence"
  source 1..846: mol_type = other DNA
atgggatctcggggacaggggctcctgttggcctattgcttgcttctagcttttgctagcggtctcgtcctaagccgcgtgcctcacgtgcagggtgagcagcaagagtgggagggaaccgaggaactgccgtctcctccagatcacgcggagagggctgaggaacagcacgagaaatatcggccatctcaggaccagggcctgcccgcaagcagatgtctgaggtgctgtgatccaggaacatccatgtaccctgcaactgcggtgccccaaataaatatcaccatccttaagggagaaaagggtgaccgtggagatcgcgggcttcaggggaagtatggaaagacgggttctgccggtgcgagggggcacaccggaccaaagggccagaaaggctcgatgggcgctccgggcgagagatgtaagtcccactatgccgcattctctgtcggtagaaaaaaacctatgcactcaaatcactactaccagacagtgattttcgataccgagttcgttaatctatacgaccacttcaatatgtttactggtaagttttattgctacgttccgggactgtacttctttagtcttaatgtgcatacatggaatcagaaggagacatatctgcacataatgaaaaacgaggaggaggtggtaatcctattcgcccaagttggtgaccgatcaattatgcagtcccagtctctcatgctcgagttgcgcgaacaggaccaagtatgggtccgcctgtacaaaggagagcgcgaaaacgctattttctccgaagagctggatacttatattaccttctccggttacctggtcaagcacgcgacagaaccttag

SEQ ID NO: 5560 - DNA, 132 bp, synthetic construct
  misc_feature 1..132: note = source = /note="Description of Artificial Sequence: Synthetic coding sequence"
  source 1..132: mol_type = other DNA
atgaaattgttgtatctgttcctcgctattctgcttgccatcgaagagcctgtgatttctgcgctggtgcgcacagtgggctgctgtctcgacacagcgaggcagacgcctcatccctccatgcatgggtag

SEQ ID NO: 5561 - DNA, 861 bp, synthetic construct
  misc_feature 1..861: note = source = /note="Description of Artificial Sequence: Synthetic coding sequence"
  source 1..861: mol_type = other DNA
atgaaagtgctcctgctgacaggactgggtgccctgtttttcgcctattattgggatgacaatttcgaccccgcttcattacaaggagccagagtgcttctcactggagcgaacgccggcgtcggggaagagcttgcttaccactacgccagactgggttcccatctcgtcctgacagctcatacggaggcacttctacaaaaggtcgtgggcaattgtagaaagctgggagcccccaaggtgttttatattgcggccgacatggcaagcccagaggctcctgaatccgtagtccaatttgccctcgacaagcttggagggttggactatctggtattgaaccacattggcggggcaccagccggcactcgagcacggtctccacaagcgacccggtggctgatgcaagtgaatttcgtaagctatgttcaactgacaagccgggctcttcctagcttaactgactctaagggctcactcgtggtggtctcgagtcttctggggagagtgccgacctcttttagtacaccctattccgccgctaagtttgctctggacggcttctttgggtctctgcgtcgtgaactcgatgtccaggatgttaacgtagccattaccatgtgcgtgctgggcctgcgtgatcgtgcttccgctgcagaggctgtccgaggcgtgacccgtgtgaaggctgctcctggccccaaggccgctttggcagtgattcggggcggggctaccagagctgcaggagtgttttatccctggcggtttcgactcctgtgtttgctgcgccggtggttgccgaggcccagggcgtggttcatcagacaggagttgaacgttaccgctgctgctgcctag

SEQ ID NO: 5562 - DNA, 1326 bp, synthetic construct
  misc_feature 1..1326: note = source = /note="Description of Artificial Sequence: Synthetic coding sequence"
  source 1..1326: mol_type = other DNA
atgagagtagttacgattgtgatcctcctctgcttctgcaaggctgccgagcttcgcaaggctagtccaggctcagtgagaagtcgggttaatcacggcagagcgggcggaggtaggcgggggtctaaccccgtcaagcgctacgcacccgggctgccgtgtgacgtgtatacatacctgcacgagaagtacctcgactgccaggaacggaagctggtctacgtgctgcctggttggccacaagacctcctgcacatgttgttggccagaaacaaaataaggaccctgaagaacaatatgttttccaaatttaaaaaactcaagtcactggacctgcagcaaaatgagatctccaaaatcgagtctgaagctttcttcggactcaataaactgaccacgctgctcttacagcacaaccagataaaggttcttactgaggaggtctttatctacacaccgttgctgtcctatctgcgcctttatgacaacccatggcactgtacatgtgagattgaaacactgatttctatgctgcagataccacggaatcggaatttgggcaattacgcgaagtgtgaaagcccgcaggagcaaaaaaataaaaagctccggcagattaaatcggagcagctctgcaacgaagaagaaaaggagcagctcgatccaaaaccacaggtaagtggccgtccccccgttattaaacccgaggtggatagcaccttttgtcacaattatgtgttcccaattcagaccttagattgcaaaaggaaagagctgaagaaagtgccgaacaatataccccccgatatcgtcaaactggatttatcatacaacaaaattaaccaacttaggcccaaagagtttgaagacgttcacgagctgaagaagcttaacctgtcaagtaatggcatcgaattcatagacccagccgcattcttgggactgacccaccttgaggagttagacctcagtaataatagcctgcaaaacttcgactacggggtattagaagacctgtattttctcaaactgctgtggctaagggacaacccctggaggtgtgattacaatattcattacctgtattattggcttaaacatcactacaatgttcacttcaacggactcgaatgcaaaactccagaagagtataaaggttggtctgtcggtaagtacattagaagctactatgaagagtgccctaaggataaactaccagcctatcccgagtccttcgaccaagatacagaggatgatgaatgggagaaaaaacatcgggatcacaccgccaaaaagcagagtgtgatcattacgatcgtgggctag

SEQ ID NO: 5563 - DNA, 1539 bp, synthetic construct
  misc_feature 1..1539: note = source = /note="Description of Artificial Sequence: Synthetic coding sequence"
  source 1..1539: mol_type = other DNA
atggcagaatctggcctggcgatgtggcctagtctccttttgcttctactgctccccggccctccaccagtcgcggggctagaggatgccgcctttccacatctgggagagtcgttgcagcccctgccacgcgcatgtccactacgctgttcctgtcctcgggttgacactgtggactgtgacggcctggacctgcgcgtgtttccggataacatcactcgagccgctcagcacttgagcctccagaacaatcagctgcaagaactgccctacaacgaactaagccggctgagtgggctcaggactctcaacctccataataatctgatctccagcgaagggctgcccgacgaggcattcgaatccttaacccagctccaacacctgtgtgtggcccataataagctcagcgtggctcctcaattcctgccaaggtcactgcgggtggccgatctggccgcaaaccaagtgatggaaatatttcccttgaccttcggcgagaagcccgccctgcggagcgtgtatttgcataacaatcagctcagcaacgccggattacccccggacgccttcaggggctctgaagcaattgctacactgagcctgtccaataatcagctcagctacctgccaccttccctccccccgtcgcttgagcggctccatctccagaacaatctgattagtaaggttccccggggggccctcagccgtcagacccagctcagggaactctacctgcaacacaaccagcttacagatagtggtctcgacgccacgactttttccaaactgcattccttagagtatctcgacctgtcacacaatcagctaacaaccgtccccgcggggcttccccgcacactggccattctgcaccttgggcggaataggataagacaggtcgaagccgcgagattgcacggcgcccgaggattacggtatttgttattgcagcataatcagctagggagttccggattgccagctggggccctcaggcccctaaggggattgcacacactccacctgtacgggaatggcctggaccgggtcccacctgctctgccacgtcggcttagggcactggtgcttccccacaaccacgtcgcagccctcggagcacgcgatctcgtggctacgcctggcctaaccgagctgaatctggcctacaatcggttggcttccgctcgcgtgcaccaccgggcttttcgtaggcttagggcattaaggagtctggatctcgccggcaaccaactcacaagacttccaatgggactgcctacagggcttaggaccttacagttgcagcggaaccagcttagaatgctggagcctgaacccctggcgggtctggaccaattaagggagttgagcctggcgcacaacaggctcagagttggagatattgggccaggaacatggcatgagctgcaggcactgcaggtcaggcacaggctggtgagccacacggttccccgcgctccaccgtcaccttgtcttccttgtcacgtgccaaacattctcgtctcctggtag

SEQ ID NO: 5564 - DNA, 2328 bp, synthetic construct
  misc_feature 1..2328: note = source = /note="Description of Artificial Sequence: Synthetic coding sequence"
  source 1..2328: mol_type = other DNA
atgaaggaaggtccagaggaagcgggctctgggagatacggcccgcgctatattacagacatgggtgcgggcgaggacgacgaaggcttcgaagatgacctggatctggacatctccttcgaggaagtgaagccccttccagccacaaaaggaggcaacaagaagtttctcgtggagtcaaaaaagatgagcattagtaacccaaagactatatcgcgtttgattccccctacatccgccagcctgccagtgacaactgtggcccctcaacccattcctatacaaaggaaaggtaaaaacggcgtggctattatgagtcgactgtttgatatgccatgcgatgaaacgctgtgctcagccgattcattctgtgttaacgactatacttggggcggcagtagatgtcagtgtaccttaggcaagggtggtgagtcttgttccgaggatatcgtgattcagtatcctcagtttttcggacactcctacgtgacattcgagcctctaaaaaactcataccaggctttccagatcacgttggaattcagagcggaggctgaagatggactacttctttactgtggcgagaacgaacatggccggggcgatttcatgagcctagccattattaggagaagtttgcagttcagatttaattgtggaacaggcgttgccatcatagtgtccgaaaccaaaattaaattgggcgggtggcataccgttatgttatatcgcgatggattgaatgggctgttacaacttaataacgggacgccagtcactggccagagtcagggccagtattcaaaaattacctttcgtaccccactgtacctcggcggcgcccccagtgcgtactggttggtgcgcgccaccgggactaacaggggttttcagggctgtgtccagtcattggccgtgaatggccgtcgtatagatatgcgtccttggcctctgggtaaggccctaagcggcgcggacgtaggggaatgctcttctggcatctgcgacgaagcgagctgcattcacggcggaacttgtaccgctattaaagccgatagctatatctgcctgtgtccactcggctttaagggtcgtcactgcgaggacgctttcaccctgacgattccccagttcagagagtcgctcaggagctacgcagcaactccctggccattggagccacaacattacctgagctttatggagttcgagataacatttcgacccgatagcggcgatggagttctgctgtacagctacgataccgggagcaaagactttctcagtattaacctggctggtggacacgtggagttccgtttcgattgcgggtccggaacaggggtcctgcggtctgaagacccacttacattaggtaattggcacgagctgagggtctcccggactgctaaaaatggaatcctgcaggtcgacaagcagaaaattgtggaggggatggccgagggcggtttcacgcaaattaaatgtaacacggacatattcatcgggggcgtccccaactatgacgatgtcaaaaaaaacagcggtgtgctgaagcccttctcagggtcaattcagaaaatcattctgaacgatcgaaccatccacgtgaagcatgactttaccagcggcgtaaacgtggaaaacgctgcccacccctgtgtgagggccccttgcgcacacgggggctcttgcagaccaagaaaagaaggttacgactgcgactgtccgttgggtttcgaaggactccattgccagaaagcgatcattgaggccattgagattccccagttcatcgggcgcagttatctgacctacgataaccctgatattctgaaacgggtctctggttcgagaagtaatgtgttcatgcgctttaagaccaccgctaaagatggtctgttgctgtggcgcggagattcccccatgcgccccaatagcgattttatatcgcttgggctgcgcgacggcgctctggtgttcagttacaatctaggtagcggggtggcatcgattatggtaaacggctcgtttaatgatggtcgttggcacagagttaaggctgtgcgagacggccaaagtggtaagataactgtcgacgattatggtgctcgaacaggcaaatccccaggtatgatgagacagctgaatataaacggagccctgtacgtaggaggaatgaaggagattgccttgcataccaacagacaatatatgcggggtctggttggatgcatttctcattttaccttatcaacggattaccatatctcccttgttgaggacgccgtagatgggaagaacatcaacacttgcggtgccaagtag

SEQ ID NO: 5565 - DNA, 1431 bp, synthetic construct
  misc_feature 1..1431: note = source = /note="Description of Artificial Sequence: Synthetic coding sequence"
  source 1..1431: mol_type = other DNA
atgaagttccagggacccctggcatgcctgctgctcgccctgtgtctgggatcaggcgaggccggccccctacagtcaggtgaagagtctaccgggacgaacataggcgaggcgttggggcacggactgggggatgccttatccgaaggagtgggaaaggctattggtaaggaggccggcggagcagctggctctaaggtgagcgaggccttaggacagggaactcgggaggcggtcggaaccggcgtgcgccaggtccccggctttggcgttgccgatgcactgggcaaccgagtcggagaggctgcacacgccctggggaacacaggtcacgaaatcggacgccaggctgaggatgttatccgtcatggggctgacgccgtaagaggatcctggcagggggtgccagggcacaatggcgcctgggagacctccggggggcacggcatctttggttcacaggggggcctgggggggcagggccagggtaatcctggcggtctgggcactccttgggtacatggctacccaggtaattctgccgggagtttcggaatgaatcctcagggagctccatggggccagggtggtaacggaggcccacccaatttcggaaccaacacacagggtgcggtggcccagccaggatacggctcggtgcgcgcgtccaatcaaaatgaaggatgtaccaatccccctccctctggctcagggggggggtcatcgaactcaggggggggaagcggaagccagtccggttcatcagggagtggcagtaatggggataacaacaatggctccagctcaggcggcagctcgagtggctcctctagcggcggcagttctggtgggtcgtccggcggatcttcaggcaactccgggggctctagaggggatagcgggagcgaatccagttgggggtcttccactgggagctcctccgggaaccacggcggctccggaggcggaaacggacacaaacccggctgcgagaaaccaggaaatgaggcccgaggaagtggagaatccggaattcaaaattcagaaactagtcccggaatgttcaacttcgacactttttggaagaacttcaagtcgaaattgggatttattaactgggacgcaattaacaaaaatcaagtccctccgccctccacgcgggctctgttgtactttagtcgcctgtgggaggacttcaagcaaaatacgcccttcctgaactggaaggcgatcattgagggggcagatgcctcatcactgcaaaagcgagccgggcgcgacgatcaaaattacaattacaaccagcatgcctacccgacagcatacggagggaagtactccgtgaagacgcctgccaaagggggagtgtcacctagctccagtgcatctcgcgtgcagccgggcctgctgcagtgggtgaagttctggtag

SEQ ID NO: 5566 - DNA, 1911 bp, synthetic construct
  misc_feature 1..1911: note = source = /note="Description of Artificial Sequence: Synthetic coding sequence"
  source 1..1911: mol_type = other DNA
atgaccacctggtccctgaggagaagacccgcacgaactctggggcttctcctcctggtcgttttgggctttctcgtccttcgaagactggattggagcactttggtacctctcaggctgaggcaccgacagttgggcctccaggccaaggggtggaacttcatgttggaggatagtacattttggattttcggaggaagtatacactacttcagagtgcccagagagtactggcgagaccgcctccttaaaatgaaggcctgtggcttgaacaccctgacaacctacgtgccatggaacctgcacgaaccagagcggggcaaattcgatttctccggtaacctggacctggaagcatttgttttgatggcggcagagatcggtctttgggttattctgcgccccggcccatacatctgcagcgaaatggatctgggggggctgcctagctggcttctgcaggatccagggatgcggcttcgaaccacttacaaagggtttacagaagcggtggatctgtacttcgatcatttaatgagtagagtcgttccactgcagtacaagcggggcggtcctattattgctgttcaggttgagaatgaatatggcagctataacaaagatcccgcctatatgccctacgtgaagaaggcgcttgaagatcgcggcattgtggaactactgcttacatccgacaataaggatggactttctaaggggattgtgcagggcgtgctggccacgatcaatctgcagtccacacacgaacttcagctgctgaccacgtttttgtttaacgtgcaagggacacagccaaagatggtgatggaatactggaccggatggttcgactcatggggtggaccacacaacatcctcgactcgagcgaggtccttaagaccgtgagcgcaattgtggacgccggctcctccatcaatttatatatgttccatgggggcactaactttggatttatgaacggtgccatgcactttcacgactataagtctgatgtgacttcctatgattatgacgctgtcttgactgaggccggcgattataccgctaaatatatgaagctgcgcgactttttcggatccatttctggaatcccactccctcccccacccgacttactacccaagatgccctacgaaccattgaccccggtgctgtacctctcactgtgggatgccttgaagtatctgggcgagccaatcaaatcggagaagcctattaacatggagaatcttccagttaacggaggcaacggtcagagttttggctacatcctgtacgaaacaagcatcacctcaagcggcattctttctggccatgtgcatgatcgcggccaggtatttgtcaatactgtttctatcggttttctggattacaagacaaccaagatcgccgtccccttgattcagggctataccgtgcttaggatcctggtggaaaaccgaggtcgcgtcaactatggtgagaacatcgatgaccagagaaaaggactcatcgggaatctgtacctaaacgattcgccattaaaaaacttccgcatatattccttagacatgaagaaatccttctttcagcgatttggcctggacaagtggagcagcctccctgagacacccacattacccgctttttttcttggaagtcttagcatatcaagcactccctgcgacacgtttctgaagctggaggggtgggagaaaggcgttgttttcataaatgggcagaacctggggcgctattggaacatcgggccccaaaagaccctgtacttacctggcccctggctatcatcaggtattaaccaggtcatcgtgtttgaagagactatggcaggccccgccctgcaatttaccgagactccacacctaggtcggaatcagtatataaagtag

SEQ ID NO: 5567 - DNA, 672 bp, synthetic construct
  misc_feature 1..672: note = source = /note="Description of Artificial Sequence: Synthetic coding sequence"
  source 1..672: mol_type = other DNA
atgacaagatggtcttcatatctgctgggttggacaacatttctgttgtactcttacgagagtagcggcggaatgcacgaggagtgtgtgtttccattcacgtataaaggttcagtgtattttacgtgcacacacatccacagcctctcaccatggtgcgcgacccgcgccgtttacaacggccagtggaagtattgccagagtgaagattacccgaggtgtatcttcccttttatctatcgcgggaaggcctataactcttgcatatcccaaggaagctttctgggctccttatggtgctctgtgacctctgtgttcgatgagaagcagcagtggaaattctgtgagacgaacgagtacgggggaaattcgctgaggaagccatgtatctttccctctatctaccgcaataacgtggtgtctgactgcatggaagacgaatccaataagctttggtgccctactactgaaaacatggacaaagacggcaagtggtccttttgcgcagacacacgaatcagtgcactcgtgccaggattcccatgccatttcccatttaattacaaaaacaagaactacttcaattgcacaaatgagggcagcaaagaaaacttggtttggtgtgcgacatcatacaattacgaccaggatcacacatgggtgtattgctag

SEQ ID NO: 5568 - DNA, 1368 bp, synthetic construct
  misc_feature 1..1368: note = source = /note="Description of Artificial Sequence: Synthetic coding sequence"
  source 1..1368: mol_type = other DNA
atgttgcaccccgagacctcgcccggaagagggcatctgttagcagttctgcttgcgctgctcggaactacctgggcggaagtctggccaccacaactgcaagaacaggctccaatggcaggcgcactgaaccgtaaggagagttttctcctgctgagcctgcacaaccgcctgaggagttgggtgcagccaccggctgctgacatgagacgcctggattggtctgactccctagcccagttagcacaggcacgagctgccctgtgtgggattccgactcccagtctggctagcggcctgtggagaaccctccaagtcggatggaatatgcagctgctgcccgccggcctggcgagctttgtggaagtggtgtcactgtggttcgctgaggggcagcgatactcccacgcagctggcgagtgcgctagaaatgccacctgcacacattacacgcaacttgtgtgggccactagtagccaactggggtgtggcagacacctctgcagcgccggacagaccgccatcgaagcattcgtgtgtgcatactcacccggaggaaattgggaagtaaacggtaagaccataattccatataagaagggcgcttggtgctctctctgtactgcaagcgtgtccggctgtttcaaggcatgggaccacgctggaggcttgtgcgaggtccctcgaaacccgtgtcgtatgtcctgccagaatcacgggcggctgaacataagtacctgccactgccattgccccccaggttataccgggagatattgtcaggtgcgatgcagccttcagtgcgttcacggccgctttcgggaagaggaatgttcatgtgtctgtgatattggatacgggggagctcagtgcgcaactaaggtgcactttccgttccacacgtgcgacctgcgtatagacggagactgcttcatggtcagttccgaggccgatacatactatagggcacgaatgaagtgtcagcggaagggcggtgtgctggctcagattaaatctcagaaggtacaggacatcctggctttttacctgggcagactcgaaactactaacgaggtcatcgacagcgacttcgaaaccaggaacttctggattggcttaacgtacaagacggcgaaagacagctttcggtgggccaccggagagcaccaggcttttacctcatttgcctttggacaacctgacaaccacggtcttgtctggttgtcagctgccatgggctttggcaactgtgtcgagttacaggctagtgcagcctttaattggaatgatcaacgctgcaagacgagaaacaggtacatttgccagttcgcccaggaacacatctctagatggggccctggctcctag

SEQ ID NO: 5569 - DNA, 1425 bp, synthetic construct
  misc_feature 1..1425: note = source = /note="Description of Artificial Sequence: Synthetic coding sequence"
  source 1..1425: mol_type = other DNA
atggccgacatgcagaatttagtcgagcggctggagcgcgcggttggtaggctggaggctgttagccacacttcggatatgcaccgaggatacgcagatagtcctagcaaaggcgctgcgccatatgttcaagcttttgatagtcttctcgccggaccagtcgccgaatatctgaagatcagtaaagaaatcggaggtgatgtgcagaagcacgcagagatggtccacactggactcaagctcgagcgcgcattactcgtcacggcctcacagtgtcagcagcccgcagagaacaagctctcagatctgctggcccccatctctgaacagattaaggaagtcataacattcagggagaaaaacaggggatctaaactgtttaaccatctcagtgcggtgtccgagtccattcaggcactgggctgggttgcaatggcccctaagcctgggccctatgtgaaagaaatgaacgacgcagcgatgttctacactaatagagtgttgaaagaatacaaggacgtggacaaaaaacacgttgactgggtgaaggcctaccttagcatctggaccgaactgcaggcatacattaaggaatttcacacaacgggcttagcctggtcaaagaccggccccgtggccaaagaactgtctggcctgcctagtggcccatcagctggctcttgcccacccccacctcccccttgcccgccacccccgcctgtctcgacaatctcctgctcctacgaaagtgctagcagatcttctctttttgcacagatcaaccagggagagtccataacacacgccttgaagcatgtctcagatgacatgaaaacccacaaaaatcctgccctcaaagcccaaagtgggcctgtccgctctggccctaaacccttctccgctcctaagccgcagactagtccttcccccaagagggctactaaaaaggagcccgcagttctagagttggaagggaaaaaatggcgagtggagaaccaggagaatgtatccaacctcgtgatcgaggacacagagctgaagcaagtcgcatatatctacaagtgtgtgaacacaaccctacagattaaaggaaaaattaatagcatcacagtcgataactgcaagaagcttggcctggtttttgacgacgttgtggggattgtggagataatcaactcaaaggacgtgaaggttcaggttatgggaaaagtgcctacgatctccattaacaagacagacgggtgccacgcatatctcagtaaaaattctctggactgcgagattgtgagtgccaagtcaagcgaaatgaacgtactgataccaacagaaggaggtgacttcaatgagttcccagtacctgaacaattcaagactctctggaacggccagaagctggttaccactgttaccgaaattgcagggtag

SEQ ID NO: 5570 - DNA, 360 bp, synthetic construct
  misc_feature 1..360: note = source = /note="Description of Artificial Sequence: Synthetic coding sequence"
  source 1..360: mol_type = other DNA
atgaataaaattctgtctagcacggtgtgctttggcttactcacactgctttctgttttgagctttttacagtccgtgcacggcagaccctacctgacgcaaggaaacgagatctttcccgataagaagtatacaaaccgggaagaactgttactggcactgctgaacaaaaacttcgactttcagcggccttttaataccgaccttgcccttcctaacaagctggaagagctgaaccagctggaaaaattgaaggagcaactcgtggaggagaaagacagtgagacaagctacgcagttgatggtctatttagctcccacccgagcaaaagggcgtgcttttggaagtactgcgtatag

SEQ ID NO: 5571 - DNA, 3756 bp, synthetic construct
  misc_feature 1..3756: note = source = /note="Description of Artificial Sequence: Synthetic coding sequence"
  source 1..3756: mol_type = other DNA
atgcgactcctactgctcgtccccctgctgctggcgcccgcacctggcagctcagcaccaaaggtgaggagacagtcggatacctgggggccatggtcacagtggtcaccttgttcaagaacatgtggaggcggagttagctttcgggagagaccatgctacagccagagaagagacgggggctcctcttgtgttggcccggcccgtagccacaggtcatgtcgcacggagtcatgccctgatggcgcacgggattttcgggccgaacaatgtgcggagttcgacggtgccgaatttcaagggcggcgctaccggtggcttccttactactcggcccccaacaagtgtgagctgaattgtataccaaaaggcgagaacttttactacaaacaccgggaggcagtcgtcgatggaacgccctgcgagcccggtaagagggatgtgtgtgtggacggaagctgccgggtggtaggatgtgaccacgaacttgattcctccaagcaagaggacaagtgtcttagatgcggcggagacggtaccacttgctaccctgtggctgggacattcgacgccaatgatctctccagagctgttaagaacgtgagaggtgagtactacctcaacgggcattggactatagaggctgctagggccctgccagcagcttccaccatcctgcactacgagaggggcgccgagggcgaccttgcccctgagcgcctccatgcccgcggtccaacatcagaaccactcgtgattgagctgatctcccaggagccgaaccctggcgtgcactatgagtatcatcttccgctgcgacgacccagccctgggttctcctggtctcatgggtcttggagcgactgttctgctgaatgtgggggtgggcaccagtctcggctggtcttttgcacgatcgaccatgaagcttaccctgatcatatgtgtcagcgccagccccggcctgctgataggcgatcctgtaacctgcacccttgccctgaaacaaaacggtggaaagccggcccatgggctccgtgtagcgcaagttgtggaggcggctctcagtcccggtctgtctattgcatctcatccgacggtgcggggatccaagaagcagtagaggaagctgagtgcgctgggttgcccggaaaaccgccagctattcaggcctgcaacctccagcgttgtgccgcctggtcaccggaaccgtggggcgagtgtagcgtgagttgtggtgttggagttcgcaaacgttcggtcacttgccgaggcgaacggggatctctactgcatactgctgcgtgctccctggaggatcgaccaccgctgactgaaccttgtgtgcacgaggactgtccactcttgagtgaccaggcctggcacgtaggcacttggggtctttgctcaaaatcctgcagtagcggcacgagacgcagacaggtcatatgtgccataggtcccccctctcattgcggctccctccaacattcaaagccggtcgatgtcgagccctgtaatacccagccctgtcacttgcctcaagaggtgccatctatgcaagacgttcataccccagcttccaatccctggatgcctctgggtccccaggagtcacctgcttccgactctcgcggtcagtggtgggcagcccaggagcacccgagtgctcggggcgaccaccggggggagcgcggcgatccaaggggggaccagggtacccacctgtcggccttaggtccagcacctagtttacaacaacccccctaccagcagccgctgagaagcgggagcggcccccatgactgccggcattccccccacggatgctgccccgacgggcatactgccagcctgggcccccagtggcagggctgtccgggtgcaccttgccagcagtcccgttacgggtgttgccccgaccgggttagcgtagctgagggcccacaccacgctgggtgtaccaagagttatggcggcgatagtaccggaggcatgccccggtctcgcgccgtagccagtacagtgcacaatacccatcagccccaagctcagcagaacgagcccagcgagtgtcgcggtagtcagttcggatgttgttacgacaatgtcgcaacagccgccggacccctaggtgagggctgtgtggggcagccctcacatgcttaccccgtcaggtgcctattgcctagtgcccatggcagttgcgcagactgggcggcccgatggtacttcgtggcttctgtcgggcaatgtaatcgtttttggtacggaggctgtcacggcaatgcgaacaactttgccagcgagcaagaatgtatgagctcttgccagggatcactgcacggtcccagacgcccgcagccaggtgcttccggaaggagcactcatactgacggaggggggtcaagccccgctggagaacaggagccatcgcagcatcggacaggggccgccgtgcaacgcaagccttggcccagtggtggcctgtggaggcaggatcagcagcctggtcccggagaggccccccacacacaggctttcggcgagtggccatggggacaagagctcggctctcgggcccctggactgggtggtgatgcaggctctccggccccaccattccactcctcatcatacaggatctccctagccggagtggagccatctctggtccaggcagcgttagggcagttggtgaggctgtcctgttctgacgatacagcgcctgaaagtcaggccgcttggcagaaagacggacagcccatatcctcagatagacaccgccttcaattcgatgggtcactcattattcaccctctgcaggctgaggacgccggaacatactcatgcgggtctactagacctggaagagacagccaaaagatccagctgaggataattggcggggatatggcagtattgagcgaggctgaattgagccgatttcctcaacctagagacccggcgcaggacttcggtcaggctggggcagccggcccactcggggcaattccgtcaagtcacccccagccagcgaacaggctccgcttagaccagaaccagccgcgcgtcgtggatgctagccctggccagcggatccgcatgacgtgcagagccgaaggcttccctccgccagccatcgagtggcaaagggatggtcagcccgtcagcagcccacgtcaccaactccagccagacggatctttggtgatttcacgtgtagccgtggaagatgggggcttttacacctgtgtggccttcaacggccaggatcgagaccaaaggtgggtgcagttgcgtgtgttgggagaactgactatttccggtcttcccccgactgtaacagtccctgagggggacacagcaaggctgttatgcgtggtggccggagagagcgtgaatattcgctggtctcgcaacgggctgcccgtgcaagccgatggacaccgcgtgcaccagagtccagacgggacccttctgatatataacttaagagcaagggacgaaggcagctatacgtgcagcgcctaccagggatcgcaggcagtgtctcgatccactgaggtgaaagtggtgagcccggcaccgaccgcccagcctcgagacccgggccgcgattgtgtggatcagccagagctagcaaattgcgatttgattttacaagctcagttgtgcgggaacgaatactattcttctttctgttgtgcgtcctgttctaggttccagccccatgcccagcctatatggcagtag

SEQ ID NO: 5572 - DNA, 1731 bp, synthetic construct
  misc_feature 1..1731: note = source = /note="Description of Artificial Sequence: Synthetic coding sequence"
  source 1..1731: mol_type = other DNA
atggcacagggggtcctatggatactgctggggctactgttgtggagcgacccaggtactgcctctctcccattgctgatggactccgtaattcaggccctggccgagctcgaacaaaaggtacccgcggctaagacccgccacacagcctctgcttggctaatgtccgcaccaaactctgggccacataatcgattgtaccacttcctgctgggcgcatggtcgctcaatgccacggaactagacccatgtcccctgtcacccgaactgctgggacttactaaggaggtggcgcggcacgatgtgcgcgaggggaaggaatacggggtggtcctggcacctgacggatctaccgtagctgttgagccattgctggcgggactagaggctggcctccagggacgaagagtgattaacctcccattagactctatggccgcgccttgggaaaccggcgacacatttcctgatgtggtcgctatcgcccctgacgtgagggctacttcatcccccgggctgcgtgatggctccccagatgttactaccgctgatatcggagccaacacaccagatgctaccaagggatgtcctgacgtacaggcatccctgccggatgctaaagcaaagagccccccaaccatggtggactctctgctggcagtcaccctggccggcaacctggggctcaccttcctgagaggcagccagacgcagtctcatccagacctggggacagaggggtgttgggatcagctgtcggcacctagaacttttacattattggatccaaaagctagcttgttaaccatggcttttctcaatggggccctcgatggcgtgatcctcggtgactatctgagtcggacgcccgagccaaggccaagcttgagccatctgctgagccagtactacggcgctggcgtagcccgcgatcctggatttcgatctaatttcagacgtcaaaacggagccgcacttactagcgcttccatattggcacagcaggtctggggaaccctcgtgttacttcaacgacttgaacctgtgcatctccaattacagtgcatgagccaggagcagctggctcaggtggctgccaacgccactaaagaattcactgaggccttcctcggatgtccagccattcatccccgatgccggtggggtgcagctccatacagaggaagaccaaaactgctccagcttcccctcggattcctgtacgtccaccacacatatgttcccgcaccgccatgcacggattttacacggtgcgcagcgaacatgcggagtatgcagcgctaccatcaggatacccaagggtggggagatatcggatatagctttgtggtgggttccgatgggtacgtgtatgaaggacgcggatggcattgggtgggtgcccacactcttggccataacagccggggcttcggggtcgcaatcgtcgggaactataccgctgccttaccaacagaggctgctcttaggactgtgcgggacaccctgccttcatgcgctgtaagggccggactattgcgccctgactacgccctcctcgggcatagacagcttgtgcggacagattgtccaggtgacgccctctttgatctgctacggacatggccccacttcacagccacggttaagccacgccctgcacgctccgtgagcaagaggtcccggcgtgagcctcctcctcggacactacccgccaccgacttgcaatag

SEQ ID NO: 5573 - DNA, 846 bp, synthetic construct
  misc_feature 1..846: note = source = /note="Description of Artificial Sequence: Synthetic coding sequence"
  source 1..846: mol_type = other DNA
atgttgccaaagagtcgcagagcactcactattcaggagatcgccgccttggctaggagcagtctccatggcatttcccaggtggtgaaggaccatgtgaccaagccaactgcaatggctcagggcagggtggcccacttgatcgaatggaaggggtggtccaagccttctgatagccccgcggcactggagtccgccttttcctcctatagtgatctctccgaaggggagcaggaagcacgctttgccgccggcgtggctgaacaattcgctatcgccgaagcaaagttacgagcatggagctcagtcgacggtgaagactccactgacgacagttatgatgaggacttcgccggggggatggacaccgacatggctgggcaactcccacttggcccacacctccaggacctctttacaggacatagattctccaggcccgttcgccagggatctgttgagcctgaatccgactgctcccagacagtctctcccgataccttatgctccagtctgtgctctttggaagatggtctgctggggagccccgccaggctggcaagccagctcctgggcgacgaacttctcctggcgaagttacccccaagccgagagagtgcgtttaggtctttaggacccctggaggcccaggatagtctgtataactccccccttaccgaaagctgtctttcacccgccgaggaagaacctgcaccctgtaaagactgccaaccactgtgcccccctttaacagggagctgggaacgacagaggcaagcaagcgatttggcaagttctggtgtggtctcactggatgaggacgaggccgaacctgaagaacagtag

SEQ ID NO: 5574 - DNA, 2619 bp, synthetic construct
  misc_feature 1..2619: note = source = /note="Description of Artificial Sequence: Synthetic coding sequence"
  source 1..2619: mol_type = other DNA
atggggatcgtctggatcttgatgtccgtcttgccatggtgggggcgatgtgcagatctagcgattgcaagcactcagctggtgcccagcaccgcctctgcccgtatggccctgtcttcgcagctgatgggccgcaccgtgtggacaccaatgagtgctagcgccttacaggagcccgcctaccccgccttggctcggacatccagggcgccatccgcagcctcggtccccctggccagcaggtgtcgggtgacgacagccctaatcagtacttctgctcagagatcccccacaagtgcgtcgcttgccccggtgccgactgctttgggcgcgtctagcgcctccgctcacttagcactgagcagtctgaccatgggcacagtggctttaacacatggaagggtaagcgcgtcacccgtgctgcgtctgggctctgcacgctgtcctaagctgagcactcccccccgtcctgcagccgctgccgtgcgaggcctggggagagctggtgagaccccggctaactgtgtaccaagaagggcagtgcccggcccggatgattcccgagaggacgtcaacgaatgtgccgaaaaccccggcgtctgtacaaatggcgtgtgtgtgaataccgacggatctttcaggtgtgaatgtccatttgggtacagtctggatttcaccggaatcaattgcgttgacactgacgaatgtagcgtgggccacccgtgtgggcaggggacttgcaccaacgttattgggggcttcgaatgtgcgtgtgctgatggattcgagccaggactcatgatgacgtgcgaggatattgacgaatgttccctcaatcccttactgtgcgcttttcgatgccacaacactgaaggatcctacctatgtacttgtccagccggctatacccttagagaggatggcgccatgtgccgagatgtcgacgaatgcgcggacgggcaacaagactgccacgcacgcggcatggaatgcaaaaacttgataggtaccttcgcctgcgtttgtccacctggtatgcggcccctgccgggcagcggtgaaggatgtacagatgataatgagtgtcatgcgcagcccgatctatgcgttaacggacgttgcgttaacacagctgggtccttcaggtgcgattgcgatgaaggctttcagccaagcccgacattgacggagtgccacgacatccgacaggggccttgtttcgccgaggtgctgcagactatgtgccgcagccttagctcttctagtgaagcagtaacaagagcagagtgctgttgcggcggagggcggggctggggaccccgctgcgagctttgtcctctgcccggtacttctgcatacagaaagctctgtccacacggcagcgggtacaccgctgaaggcagagacgtggacgagtgcaggatgctcgctcacctctgcgctcatggagaatgtattaattctttagggtccttccggtgtcactgccaggccgggtatacaccagacgcaacagctaccacatgtttagacatggatgaatgtagccaggtgccgaaaccctgcacttttctgtgcaagaacacaaaggggtcttttctctgttcgtgtcccagaggctacctccttgaagaagacgggcgcacctgcaaggatctcgacgaatgcacatccagacagcataattgtcaattcttgtgtgttaacacggttggggccttcacctgcaggtgccccccgggctttacgcaacaccatcaggcatgcttcgatgttaacgaatgcgacggcccccatcggtgccaacacgggtgtcagaaccagctgggcgggtatagatgctcatgtccccagggattcactcagcacagtcaatgggcccaatgcgtcgacgagaacgagtgcgcccttagcccccctacctgtggctccgcctcctgtagaaacaccctgggtgggttcaggtgcgtttgtccgagcggctttgatttcgatcaggctctgggcggctgccaggaagtcgacgaatgcgcgggccggagagggccatgctcttattcttgcgccaacacccccgggggctttctttgtggctgtccacaggggtattttcgggctgggcagggacattgcgtctcaggccttggattctcaccaggtcctcaagacacccctgacaaagaagagcttctttcctctgaagcctgttacgaatgcaaaattaatgggctctcaccaagagatcgcccccgtagatccgcgcacagggaccatcaggtgaacctggcgacgttagactctgaggcccttctaacactagggctgaacctatcccacctgggtcgggccgagagaattctggagctgagaccagcattggaagggctcgagggcagaattcgatatgtgatcgtgcggggaaacgagcagggtttctttagaatgcatcacctccgtggcgtttcctctttgcagctgggccggaggcgccccggaccaggaacatatcggctcgaggtagttagccacatggcagggccatggggggtgcagccagagggacagccgggaccgtgggggcaagcgctgaggctcaaagtacagctccaacttctgtag

SEQ ID NO: 5575 - DNA, 1368 bp, synthetic construct
  misc_feature 1..1368: note = source = /note="Description of Artificial Sequence: Synthetic coding sequence"
  source 1..1368: mol_type = other DNA
atggcccggaaggcactgaaactcgcttcatggacatccatggccttggctgcatcaggtatttatttctacagcaataagtacctggatcctaacgacttcggcgccgtgcgagtaggcagggctgtcgcgactacagcagtcatttcttacgactacctaacctcactcaagtctgtgccttatggttcagaggagtacctacaactcagatcaaagatccacgatctcttccagagcttcgacgacactcctctgggcacagccagtctggcccaggttcacaaggcagtgttgcacgacggccggacggtggctgtgaaagttcaacacccaaaagttcgcgcacagagttctaaggacatcctccttatggaagtgctggtcctagccgtgaagcaactgttccctgagtttgagttcatgtggctcgtagatgaggcaaagaagaacctccctcttgaacttgattttttgaatgaagggagaaatgctgagaaggtttcccagatgttgcggcatttcgatttcctgaaagtcccgcgaatccactgggatctgtccacagagcgtgtgctcttgatggaattcgttgacggaggacaggttaacgatcgggattacatggagaggaacaaaatcgatgtgaatgaaatcagccgtcacctcgggaagatgtattcagagatgatttttgtcaatggtttcgtgcattgcgacccccaccctggtaacgtgctggtgaggaagcatcctgggactgggaaagcagaaattgtcttactcgatcatgggctgtaccagatgctcacagaggagtttaggctgaactattgtcacctgtggcaaagtttgatatggactgatatgaaacgagtgaaggaatattcacagcggctgggagcaggcgatctgtatcctcttttcgcatgcatgctgacagcgagatcttgggattcagtgaatcgcggtattagccaggccccagttactgccaccgaggatcttgagattcggaacaatgccgccaattatctgccccagatttcacacctgctgaaccacgttccgcgacagatgctgctcatcctgaagaccaacgatttgctgaggggcattgaagccgcgctcggaactagagctagcgcctcgtcctttctcaacatgagccgctgctgcattcgcgcactcgccgagcataagaaaaagaatacttgttcatttttcagaagaacgcagatttcgttttccgaagcattcaacctgtggcagatcaacctccacgaattgatcctgagggtaaagggcctcaaattagctgacagagttcttgcgctgatctgctggctgttccctgcaccgttatag

SEQ ID NO: 5576 - DNA, 1245 bp, synthetic construct
  misc_feature 1..1245: note = source = /note="Description of Artificial Sequence: Synthetic coding sequence"
  source 1..1245: mol_type = other DNA
atgaaccctaccctgggtctggccatctttctagctgtccttttgaccgtaaagggactgcttaagcctagcttcagcccaaggaactataaagcactgagcgaggtgcagggttggaagcagcggatggccgccaaggaactggctcggcagaacatggatctgggcttcaagctgctgaaaaagctggcattttataatcccggaagaaacattttcttgtccccgctgtccatctcaacagctttctccatgttatgtctgggcgcccaggactccaccctcgatgaaatcaaacagggatttaattttagaaaaatgccagaaaaggatcttcacgagggatttcactacataatacacgaactgacacagaagactcaggatctcaagctctccattggaaatacgctgtttatagatcagaggctgcagcctcaaaggaaattcctcgaagacgccaagaacttttattctgccgagactatcctgaccaacttccagaatctggaaatggcacagaagcaaatcaacgatttcatttcacaaaagacgcacgggaaaataaacaatctcattgaaaacattgatccgggcaccgtgatgctgcttgcaaactatattttttttagggcccgctggaagcacgaatttgacccaaacgtcaccaaggaagaagattttttcctggagaaaaacagctctgtcaaggtacctatgatgtttagatctggaatctatcaggttggctacgacgacaagctctcatgcacaatcctggagatcccctaccagaaaaatatcacagcgatttttatcctacccgacgaggggaaattaaaacacttggaaaaagggctgcaggtggacacattttcgcgttggaagacactcctatctagaagggttgtggatgtctccgtgcctcgcctccacatgaccggtacattcgatttgaaaaaaacgctgagttatatcggggtcagcaaaatatttgaggagcacggggatctcactaaaattgcacctcaccggtccctgaaggtaggcgaggctgtgcataaagccgaacttaaaatggacgaaagagggacggaaggggccgcaggtacaggagcccagactttgccaatggagacacccctggtagtgaagattgataagccctatctgctgcttatctacagtgaaaaaattccatcggtgttgtttttaggcaaaattgtaaatccaatcggtaaatag

SEQ ID NO: 5577 - DNA, 942 bp, synthetic construct
  misc_feature 1..942: note = source = /note="Description of Artificial Sequence: Synthetic coding sequence"
  source 1..942: mol_type = other DNA
atgagcgacttactcctgctgggtcttattgggggcctcactcttctactgctgctgactttattggctttcgccggttactcgggtttactcgccggagtcgaggtttcagccggatcccccccaatcagaaatgtgaccgtggcctacaagttccacatgggcctgtatggcgagaccggacggctattcaccgaaagttgctcaataagccctaagctgcgtagcatcgcagtgtactacgacaatcctcacatggtccctcctgacaaatgtcgctgtgctgtcggtagtatcctgagcgagggggaggagagtccctcccccgaactcattgatctttatcagaagtttggcttcaaggtctttagcttccctgccccaagccacgtggttacagctacatttccttacacgacgattctgagcatctggctggctacgagaagagtccatccggccctcgatacctacattaaggagcgcaaactgtgcgcctacccgcgcctcgaaatttaccaagaggatcagatccatttcatgtgccctctcgccaggcagggcgatttttacgttcccgagatgaaggagactgagtggaaatggcgggggctcgtggaggctatagacacacaggtagatggcactggggcagacacaatgagcgatacttccagcgtctcccttgaagtgagccctgggagtcgcgagacgtcagcagcaacactttctcctggagcctcttctagaggatgggacgatggggacactagaagcgagcattcctacagcgagtctggcgcaagcggtagctctttcgaggagctggatctagagggggaggggcccttaggagaatctcgccttgaccctggcacggaacctctcggaacgacgaaatggctgtgggaacccactgccccagaaaaagggaaggaatag

SEQ ID NO: 5578 - DNA, 603 bp, synthetic construct
  misc_feature 1..603: note = source = /note="Description of Artificial Sequence: Synthetic coding sequence"
  source 1..603: mol_type = other DNA
atggcttggggaggtgtccacacctgctgttttcatctctgttgctgctgttcatggccacaaggcgccgtcccagaagaacttcataagcatccgggacagactctgctgctccagtgccagtacagccccaagcgcgggccttaccaaccaaagtcttggtgccaacagacgagcccatccaggtgtaccttactagtcacatcatctaagccatggaccgcggttcaaaagtcgcactacaccatctgggataagccaaatgccggattcttcaacatcaccatgatccagctgacacaaaatgactctggcttctattggtgcggcatttacaacgcatcagagaatatcatcacagtactcagaaatatttcgctggtggtgagtccagctcctacaaccagtccaatgtggaccctcccatggctcccgacgagtaccgtgctcattacatcaccagaggggacatctggtcacccaagcatcaatgggagcgaaacaagaaagtctagggcacccgcctgcttaggcagcgggggcccgcgtttcctggtgctggtgctctgtggtctgctgctagccaaaggcctgatgctgtag

SEQ ID NO: 5579 - DNA, 1035 bp, synthetic construct
  misc_feature 1..1035: note = source = /note="Description of Artificial Sequence: Synthetic coding sequence"
  source 1..1035: mol_type = other DNA
accacccccagcagagctttgccaggatggagcaattgtcgacccaggtggagagcagggccgactccacagagtccaaccccccagagccgtatgcgtctgtcacccggccccccctcggaatggacctggctcctgccccattttaacccgtgccatcatcaccacagacaccatcatcccaatcctacaactagcctgttgcccactgaacctcctagcggcccagaagtatcgagtcagggcagggaagcatcgtgtgagggaactttgcgtgcggtggatccccccgtgcgccatcacagctacggccgccacgaaggggcttggatgaaggacccagcagcccgggatgaccgaatctacgtgaccaactattactacggaaactccctagtggaatttcgtaacctggaaaactttaagcagggcaggtggagtaacatgtacaaactgccatataattggatcggcaccgggcacgtggtatatcagggagccttctactataacagggcattcacaaaaaacatcatcaagtacgacctgagacaaagatttgtggcgagctgggcactcttacccgacgttgtatacgaggatacaactccttggaagtggagagggcattccgacatcgatttcgccgtggacgagagcggcctgtgggtgatctatccagccgttgatgaccgagacgaggcccagcccgaggttatcgtactatcaagattggatccaggcgacctgtccgtacatagggagacgacatggaagacaagactgcgccgcaattcttatgggaattgctttctggtgtgtggaatcttatacgccgtggatacatataaccagcaggagggccaggttgcatacgcatttgatactcacaccggcacggacgcacgcccccagctgccattcctgaacgagcacgcttacacaacccagattgattacaatcccaaggagcgcgtgctgtatgcctgggataatggacaccaattgacatatactttgcatttcgtagtatag

SEQ ID NO: 5580 - DNA, 2682 bp, synthetic construct
  misc_feature 1..2682: note = source = /note="Description of Artificial Sequence: Synthetic coding sequence"
  source 1..2682: mol_type = other DNA
atggccgaagccgccttagaagcagtcaggtccgagctacgggagttcccagctgcggctagagagttgtgcgtgccactggctgttccttaccttgacaagcccccaacccctttgcatttctacagagattgggtgtgccctaatcgcccctgtatcatccgtaacgccctccagcattggcctgcactccaaaagtggtctttaccgtacttccgggccacagtagggagcactgaggttagtgtggccgtgacccccgacggctacgccgatgcggtaagaggtgataggtttatgatgccggccgagcggcgcctgcccctttcattcgtgctcgacgtcctggaaggccgtgcacagcacccaggggtcctttacgtgcagaaacaatgctctaatctgccaagcgagctaccccagttgctgcccgatttagaatcacacgtcccttgggcctcagaagctctgggtaaaatgccggacgctgtgaacttttggctgggagaggctgctgctgtcacatcattacacaaagatcattacgaaaacctgtattgcgtcgtcagtggcgagaaacacttcctgttccatccccctagtgaccgacctttcatcccatatgaactctacactccagccacctatcaactcacagaggagggaacatttaaggtggtcgatgaagaagccatggaaaaagctgaagttagtcgcacatgtctgctcacagtgagagtactccaagcacaccgtttacccagcaaagatctagttactccaagtgattgttacgtgactctttggctgcctaccgcctgctcccacagactgcagactagaacagtgaagaattctagttctcccgtgtggaatcagtcttttcacttccgtatacatagacagcttaaaaacgtgatggaactgaaggtcttcgaccaggacctcgttaccggcgacgaccccgtgctaagtgtgttattcgacgctggtacattgagggccggagagttcaggcgcgagagcttctccttatcaccacagggtgaaggcaggctcgaggtcgagttccgcctgcagagtctggcagaccgaggcgagtggctcgtgagtaatggggtcttggtcgcccgcgaactgtcctgtttgcacgtacagctggaggagaccggcgaccagaagtcttcggagcatagagttcagctcgtcgtccccggttcttgtgagggtcctcaggaggcctctgttggcaccggcacattcaggttccattgtcctgcctgttgggaacaggagctgtccatcaggctacaagacgcacccgaagagcaactcaaagcgcccttgtccgcactcccatctgggcaggtggttagactggtgttccctaccagtcaggagcccctgatgcgagttgagctgaagaaggaggcaggcttgcgagaactcgcagtcagactgggcttcggaccatgcgcagaggagcaagcattcctatccagacgcaaacaggtcgtagcagctgccctccggcaggcactccaactggacggcgacttacaagaggatgagattcctgtagtggccattatggctaccggaggtggaatccgggcgatgacctccctgtatggacagctcgcgggtctgaaggagctcggcctgctggactgtgtttcatacatcacaggcgcatctggtagcacgtgggccctcgccaacctgtacgaagacccagagtggagccagaaggacctggcaggcccaacagagctcctcaagacccaggtaactaaaaataagttaggagtgctggctcccagccagctgcagcgctacaggcaggagctggccgagagggcgcgcctgggttacccctcctgcttcactaatctctgggccttgataaacgaagccctgctccacgatgagcctcacgatcataaactgtcggaccaacgggaggcactgtcccacgggcaaaaccctctacctatctactgcgccctaaatacaaaggggcagtcgctaactaccttcgagttcggagaatggtgcgagttttccccttacgaggttggtttccctaaatacggagcctttatcccgagtgagttgtttggctccgaattcttcatgggacagctgatgaaacgcctgcccgaaagcaggatttgcttcctggagggcatctggagcaacctgtatgctgccaatttacaggatagcctgtactgggcctcggaaccatcacagttttgggatcggtgggtgagaaaccaggcaaacttggacaaagagcaggtcccgctcctcaagatcgaggaacctccaagcactgccggaaggattgcggaattcttcaccgatctgctgacgtggcgtccgttggcccaagctacccacaatttcttgagggggcttcattttcataaggactacttccagcatcctcacttctcgacttggaaggccactacactggacggactccccaaccagttgactccaagcgaacctcacctctgtcttctcgatgtcgggtatttgattaatacctcgtgcttaccactcctgcagcctacacgagacgtagaccttatcctcagtctcgactacaacctccacggtgcttttcaaggctccggcgggcaccctcgccgccgccagcttgggcgctag

SEQ ID NO: 5581 - DNA, 354 bp, synthetic construct
  misc_feature 1..354: note = source = /note="Description of Artificial Sequence: Synthetic coding sequence"
  source 1..354: mol_type = other DNA
atgattattgactcgtcacggatcccaagcttcacccagttacatagtactatgaccagagcaccactgttactgttatgcgtagcactcgtgctccttgggcacgtaaatggagcgacagtgcggaatgaagacaaatggaaacccctgaacaatcctcgaaacagagacctgttcttcaggaggctacaggcatactttaaaggtaggggcttggacctgggaactttccccaatccatttcccactaacgaaaatcccagaccattgtcgttccagtctgaactcacagcatcagcaagtgccgattacgaggagcagaaaaattccttccataactacctcaagggttag

SEQ ID NO: 5582 - DNA, 4143 bp, synthetic construct
  misc_feature 1..4143: note = source = /note="Description of Artificial Sequence: Synthetic coding sequence"
  source 1..4143: mol_type = other DNA
atgaggcacggcgtggcttgggcactgctggtagccgccgctctgggactgggagcccgaggggtacgcggcgcagtcgcccttgctgatttctaccccttcggagctgagcgcggagatgcggtaacccctaagcaggacgacggtggcagcggcctaagaccgctgagtgtgcccttcccctttttcggggctgaacattctgggttatacgtcaataataatggcatcatctcattcctgaaggaggtttcccagtttacaccagttgcctttcccattgccaaggatcggtgcgtggtggccgccttctgggctgatgtggataatcgtagggcaggagatgtttattacagagaggctacggatcctgccatgttgcgtcgggcgaccgaagatgtccggcactattttcccgaacttctggactttaatgcaacttgggttttcgtggcaacatggtatagagtgaccttctttggaggcagcagctctagccctgtaaacacgttccagacagtcctgattacggacggaaaacttagcttcacgatatttaattacgagagcatcgtgtggacaacagggacccatgccagctccgggggaaatgccactggcctcggcggcattgcagcacaagccggcttcaatgcgggggacggtcagagatatttttctatcccaggaagtcggacggctgatatggctgaggttgagaccacgacgaacgtgggagttccagggcgctgggcatttcggatcgatgatgcacaggtgagagttggtgggtgcgggcacacaacgtctgtctgtttggccctgcgaccttgcctcaacggaggaaaatgcatcgatgactgcgtcaccggtaacccctcctatacatgcagctgcctctctggcttcacgggacgccggtgccacctagacgtgaacgagtgtgctagccaaccatgtcagaatgggggcacttgcacacatggcattaactcatttcgctgtcagtgcccagctggattcggcggccccacgtgcgaaaccgcccaatctccttgcgacactaaggaatgtcagcatggggggcagtgccaggtagaaaatggcagtgccgtctgcgtgtgccaggctgggtatacgggggccgcatgtgaaatggatgtggacgactgttctcccgacccctgcctgaatgggggcagttgcgtagatttagtcggaaattatacttgcctctgcgccgagcctttcaaaggtttacgatgcgaaactggcgaccaccctgtacccgacgcctgtctgagtgcaccttgccacaatggaggtacctgcgtcgatgcagaccagggctacgtctgcgaatgccctgaagggttcatgggattagactgtagagaacgcgtgcccgatgattgcgaatgtcgaaacggcgggcgttgcctgggtgcaaatacgaccctctgccagtgtccccttgggttcttcgggctgctctgcgagtttgagatcactgcaatgccttgcaacatgaatacacagtgtcctgacgggggatactgtatggaacacggagggagttatctatgcgtatgccacaccgaccataacgcctcccattcacttcccagtccctgcgactcagatccctgctttaacggcggctcctgcgatgcacacgatgactcctacacctgtgaatgtcccagaggtttccacggaaagcattgtgaaaaggcaagacctcatttgtgtagcagtggcccatgtcggaacggcgggacctgcaaggaagctggcggcgagtatcactgcagttgtccttaccggttcacaggacgccattgcgagatcggtaaacccgattcctgtgctagtgggccatgccacaatgggggaacatgtttccattacatcggtaagtacaaatgcgactgtccccctggcttctcaggccgccactgcgaaattgccccatctccttgctttcgctccccttgtgtcaatggcggtacttgcgaggatcgggacaccgacttcttttgccattgtcaggcaggatatatgggtcggagatgtcaggctgaagtggactgtggcccgcccgaagaggtgaagcacgcaacactgcgatttaatggcactagactaggtgccgtggctctctacgcatgcgaccggggctactcactgtccgccccctcccgtattcgcgtgtgtcagccccacggagtatggagtgagcctccccagtgcctggagattgatgaatgccggagccagccatgcttgcacggaggcagctgccaagaccgcgtcgctgggtacctctgtctctgttccactggctatgaaggcgcacactgtgaactggagcgggacgaatgccgtgcacatccttgtcggaatggcgggagctgtcgtaatctgccaggagcctacgtttgtcggtgccctgcaggcttcgtaggagttcactgcgagacagaggttgacgcgtgcgactcatctccctgtcagcatggaggcagatgtgagtctggcggaggcgcgtatttatgcgtttgtccagaatcattctttggttaccactgtgaaactgtttcagatccatgcttttcgtcaccttgcggcgggagggggtattgcctggcatcaaatggctctcattcgtgtacgtgcaaggtcggctacacgggcgaagactgcgccaaagaactgttccccccgactgcactgaagatggagcgtgtggaagaatccggcgtctcaattagttggaatccacctaatgggccagccgcgcgccagatgctcgatggctatgccgtaacatatgtatcatccgacggaagttatagacgaacagacttcgtcgaccgaaccaggtctagccatcagctacaggcgctcgcagcagggcgggcatacaatatttccgttttttcggttaaacgaaattcaaacaacaaaaacgacatctcccgaccagccgtgcttcttgctcggaccagacctcggcctgtcgaggggttcgaagtaacgaacgtgaccgcgtctactatcagtgtgcagtgggccctacatcgtatccgccacgctacggtgagtggtgtgcgagtgagcatccggcatcccgaagctcttcgtgaccaggcaactgacgtagatcggtcagtggatcggttcactttccgggcccttttgccgggaaaacgttataccatccaactcaccacactgagcggtttgcggggcgaggagcatccaacggaaagtttggcgactgctcccacgcacgtgtggaccaggccgctcccacctgctaatctaaccgccgctcgcgttactgctactagtgctcatgtcgtgtgggacgcgcccacccccggcagtctactcgaggcttacgtcatcaatgtcactacatcacaaagcactaaatcacggtatgtgcccaatggaaagctggctagctatacagtacgtgatttactgcccggacgccgataccagctctccgttatcgcagtgcagtccacggagcttggtccgcagcatagcgaacccgctcacctgtatataattacctccccgagggacggcgccgatagacgctggcaccagggtggacaccatcccagggtactcaagaaccgcccacctcccgccagactccccgagctcagactgctgaacgaccacagcgcgccagaaacaccaactcagccaccccggttttccgagttggtcgatgggaggggcagagtcagtgcccgattcggaggatccccgtccaaagcagctacagtacggtcacatgtgcctgggaattgctctgagaatccttgccagaacggcggaacttgcgtacccggcgccgatgcacattcgtgcgattgtggccctggctttaaaggccgtcggtgcgaactggcgtgtatcaaggtttctagaccgtgtactagactcttctctgagaccaaggcatttcccgtctgggaaggtggagtgtgtcaccatgtgtacaaacgggtgtacagagttcatcaggatatttgcttcaaagagtcatgtgagagtacctctcttaagaaaactccaaaccgaaaacagagtaagtctcaaaccctggaaaagtcatag

SEQ ID NO: 5583 - DNA, 474 bp, synthetic construct
  misc_feature 1..474: note = source = /note="Description of Artificial Sequence: Synthetic coding sequence"
  source 1..474: mol_type = other DNA
atggaggcactccgtcgggcccatgaggtcgcactgaggctgctgttgtgtaggccctgggctagccgcgctgcggccagacccaaaccctctgcatctgaggtcctaactagacacctgctccagcgaaggttaccacactggacctccttctgcgtgccttatagcgctgttaggaacgaccagtttggtctttcacatttcaattggcctgtgcagggcgcaaattaccatgtcctccgtacagggtgttttccttttattaaataccactgcagtaaggctccgtggcaggatctggccagacagaataggttcttcacagcgctgaaggttgtgaacttgggtatcccaacgctgctttacgggttggggtcatggctgttcgcacgtgtgactgagacagtgcatacatcctacggccccatcacagtgtattttttgaacaaagaagatgaaggtgcgatgtattag

SEQ ID NO: 5584 - DNA, 288 bp, synthetic construct
  misc_feature 1..288: note = source = /note="Description of Artificial Sequence: Synthetic coding sequence"
  source 1..288: mol_type = other DNA
atgaaaggaagtagggccctgcttctggtggcgctcaccttattctgcatttgcagaatggccactggagaggataacgatgagttctttatggatttccttcagacacttcttgtagggacaccagaagagctctatgagggaacgctggggaagtacaacgtcaatgaggacgctaaggcagcgatgaccgagctaaaatcctgtatcgacggactgcaaccaatgcacaaggccgagctcgtgaaactcctggttcaagttctgggaagtcaggacggcgcttag

SEQ ID NO: 5585 - DNA, 1053 bp, synthetic construct
  misc_feature 1..1053: note = source = /note="Description of Artificial Sequence: Synthetic coding sequence"
  source 1..1053: mol_type = other DNA
atgaaatgcagtctgcgggtgtggtttttgagcgtcgcctttctgctggtatttataatgtctctcctgtttacctactctcaccattctatggcgactctgccttatctcgactctggcgccctggatgggacgcatcgcgtcaagttagtccccggctatgctggacttcagagactttccaaagagaggctctctgggaaaagctgcgcatgtagacgctgtatgggcgatgctggagcgtcagactggtttgacagtcattttgatggtaatatctctccagtgtggacaagggagaatatggacctgcctcccgatgttcaacgttggtggatgatgttacagccccagtttaagagccacaacacaaacgaagtgctcgaaaaacttttccagatagttcccggggagaacccatatcgctttcgcgaccctcaccaatgtcgaagatgcgccgtggttggtaattcaggcaatctccggggctcgggctacggtcaggacgtagacggccacaacttcattatgaggatgaatcaagctcccacagtgggctttgaacaggacgtaggtagtcggactacacatcattttatgtaccccgagtcagctaagaatcttcctgccaatgtgagcttcgtgcttgtaccatttaaagtcctggatcttctgtggattgccagcgcactatctacgggtcagatccgtttcacttacgcaccggtgaaaagcttcctgcgggtcgataaggagaaggtacagatttacaatcctgcattttttaagtacatccacgacaggtggactgagcaccacgggagatatcctagtacaggaatgctcgtgctctttttcgccctccacgtctgcgatgaggtcaacgtctacggtttcggcgccgacagccggggcaattggcaccactactgggagaacaatcgctacgccggagaatttcggaaaacaggcgtgcacgacgccgatttcgaagcccacattatcgacatgcttgcaaaggcaagcaagatagaggtctaccgtgggaattag

SEQ ID NO: 5586 - DNA, 600 bp, synthetic construct
  misc_feature 1..600: note = source = /note="Description of Artificial Sequence: Synthetic coding sequence"
  source 1..600: mol_type = other DNA
atggcctcccctgaggcaccagagagcgtggtccaatttgccttagacaagctgggagggctggactatctcgtcctgaatcacatcggcggcgctccagccggcactcgggctcgctcaccgcaggcaacaagatggctgatgcaagtaaactttgtgagctacgtgcagctgacttccagagcgctgccgagcttgaccgacagtaaagggagcctggtcgtggtgtcttcgctactgggcagggtgcctacttcttttagtaccccctatagtgcagctaaatttgcgttggatggcttctttggcagtctgagacgggaactagatgtgcaggacgtcaacgtggctattaccatgtgtgtactggggctgagggatcgggcttctgccgctgaagcggttaggggtgtcacccgcgtcaaggccgcccctgggcccaaggcagccttagcggtgatcaggggcggcgctacccgtgcagcaggagtgttctacccttggcggtttcgcctcctgtgtctcctcagaaggtggttacctcggccacgcgcatggtttatacgccaggaactgaatgttacagctgctgccgcgtag

SEQ ID NO: 5587 - DNA, 411 bp, synthetic construct
  misc_feature 1..411: note = source = /note="Description of Artificial Sequence: Synthetic coding sequence"
  source 1..411: mol_type = other DNA
atggttcggccatacccactcatatacttcctgtttctgcctctaggggcttgttttcctctactcgataggagggagcctacagacgctatgggcggtctgggcgccggtgagagatgggccgacctggccatggggccccggccccattccgtatggggtagctctagatggctgagggcatcacagccacaggcccttctcgttatcgcccgcggcctccagaccagtggccgcgaacatgccggatgtaggttcaggttcggaaggcaggacgaaggttctgaagcaacagggtttctgcctgccgccggggagaagacatctggcccactcggcaacttggcagaagagctgaacggttattccagaaagaaaggcggcttctcgtttcggtttggccgtcgttag

SEQ ID NO: 5588 - DNA, 663 bp, synthetic construct
  misc_feature 1..663: note = source = /note="Description of Artificial Sequence: Synthetic coding sequence"
  source 1..663: mol_type = other DNA
atgcgtggacaaggaaggaaagagagtctttccgacagccgagatttagacggctcttatgaccagttgaccgactctgtggacgacgagttcgagctgagcacagtgtgtcaccgcccagaggggctggagcaactccaggagcaaaccaagttcactcgcaaagagctgcaagtcctgtacaggggcttcaaaaatgagtgtccgtcaggtattgtcaatgaagagaattttaaacagatctatagtcagttctttccgcaaggcgattcctcaacctacgccacatttctgtttaacgcctttgacaccaaccacgacgggagtgtgagcttcgaggacttcgtcgccggcctcagtgtcattctgcgaggtacggttgatgaccgccttaactgggcttttaatttatatgatctgaacaaagatgggtgtattacaaaggaagagatgttggacattatgaagtcaatttatgacatgatgggaaagtatacataccctgctctgagagaagaggctcccagggagcacgtcgagagtttcttccaaaagatggatcggaacaaggacggcgtagtcaccatcgaggaattcatcgagtcttgccagaaggatgagaatataatgaggtccatgcagctgtttgacaacgtaatatag

SEQ ID NO: 5589 - DNA, 2175 bp, synthetic construct
  misc_feature 1..2175: note = source = /note="Description of Artificial Sequence: Synthetic coding sequence"
  source 1..2175: mol_type = other DNA
atgttgaggactagcacgccaaacctctgcggcggcctgcactgcagagctccttggcttagcagcggcattctgtgtctctgccttatctttttgttgggccaggtgggcctcctacaaggtcatccacagtgcttggattatggtccccccttccaaccacccctgcatctagagttctgttccgattatgaatctttcggttgctgtgaccagcacaaggatcggcggatcgcagcccgttactgggacattatggaatactttgacctgaagagacatgaactttgcggcgattatattaaggatattctgtgccaggagtgttcaccctacgcagcccacctgtacgacgcagaaaacactcaaactcccttaagaaacctcccaggcttgtgctccgactattgttctgcttttcattcaaactgccactccgcgatatccttgctaacgaacgacagggggcttcaggaaagtcacggccgggatggaacccgattctgccacctcctggatctccccgacaaggactactgctttccgaatgttttgcggaatgattacctaaacaggcacctgggtatggtggctcaagatcctcaagggtgtctgcagttgtgcctgtctgaggttgctaatggtctgaggaatccagtgtctatggttcacgccggggacggcacacaccgtttttttgtggccgaacaagtgggtgtcgtatgggtgtacctgccagacggctcacgactagagcagccatttctcgacttgaaaaatatagttctgaccaccccgtggatcggcgacgagcgggggtttctcggcctcgcctttcaccctaagttcaggcataatagaaaattttatatttactatagttgcctagacaagaaaaaagttgagaagattcgcatctcagaaatgaaagtttctagggctgaccccaacaaggccgacctcaaatccgaacgagttattctggagattgaagagcccgcctctaatcataatggggggcagctattattcggtttagacggctacatgtatattttcacaggtgacggaggtcaggctggggacccttttggacttttcggaaatgcacagaataaatctagtttgctcgggaaggtattacgaattgacgtgaacagggctgggtctcacgggaagcgataccgagtgccctcagataaccccttcgtaagtgagcctggagcacacccagccatttatgcttacggcatccgaaacatgtggagatgtgctgttgacagaggcgatcctatcacacgacaaggacgagggagaattttctgcggggatgttggccagaatcggtttgaagaagtagacctgatccttaagggtggaaattatggctggcgggctaaggagggcttcgcctgttatgacaaaaaactgtgtcacaacgcctcattagacgacgtcttgccgatttacgcctacggacatgctgtgggaaaatccgtgacgggcggttatgtttaccgcggctgtgaaagtcctaatctcaatggtctgtacatcttcggagattttatgtccggccgtttaatggcactccaagaagatcgaaaaaataagaaatggaagaaacaggacctgtgcctcggttccactacaagctgtgcctttcccggcctgatatcgactcattcaaagttcattatttcctttgccgaggacgaggctggcgagctttacttcctggctacctcctaccccagtgcctatgccccacggggctcgatctataaatttgtcgatccctcgagaagagccccgccgggaaaatgcaaatataagcccgtccccgtgcggaccaaatcaaaacgaatcccattcaggcccttggccaagacagtgcttgatctgctaaaggagcagagcgaaaaagctgcacgaaaatcctcatctgccactctagcatccgggcctgcccaaggcctgtccgaaaaaggctcctcaaaaaagctggcgagccctacctcttcaaagaacactttgcgcggacctggcacaaaaaaaaaggctcgggtagggccccacgtacggcagggcaagcgaaggaagagtcttaaaagccattccggcagaatgcggccttcagctgagcagaagcgagccggacgaagcctcccctag

SEQ ID NO: 5590 - DNA, 1218 bp, synthetic construct
  misc_feature 1..1218: note = source = /note="Description of Artificial Sequence: Synthetic coding sequence"
  source 1..1218: mol_type = other DNA
atgtggtacgtctctacgcggggtgtggctccacgcgttaacttcgagggagccttgttttccggatatgcgcctgatgggggattattcatgcccgaggaattaccacagctcgaccgagggacgctttgtcagtggtctaccctgtcttatcccgggctggtaaaggaactgtgtgcactttttattggatctgaactgcttccaaaagatgagttgaatgacctcatcgatagagctttctcacgattccggcacagagaggtggttcatctatcgaggctcaggaacggcctcaatgtgcttgagctttggcacggagtcacgtatgcattcaaggacctgagcctctcttgcaccactcaatttctgcaatatttccttgaaaagcgagaaaaacacgtcacagtcgtcgtgggcaccagcggcgataccgggagcgccgccatcgagagtgtgcaaggagctaagaatatggacatcattgttctgctacccaagggtcattgtaccaaaatccaggagttgcagatgacaacggtgttgaagcagaatgtccatgtttttggggtggaaggtaatagcgacgagctcgacgagccaattaaaaccgtcttcgctgatgtcgctttcgtcaagaaacataatctgatgtccctgaacagtattaactggagtcgcgtgcttgtccagatggcccaccatttttttgcatactttcagtgtacacctagcctggatacacatcctctacccctcgtggaggtggttgttcccacaggtgcggctgggaatttggcggccggatatattgcccagaaaatcggcttgcccatccgcctggtggtcgccgtgaaccggaatgacatcattcacagaacggtacaacaaggcgatttctcccttagtgaggccgtgaagagtacactcgccagtgctatggatatccaggtcccatataacatggagagagtattttggcttctgtccgggtctgactcccaagtgacccgcgcactcatggagcagtttgagagaacccagtctgtgaacctgccaaaggagctgcatagtaagtgggagagacaggattacgagaaaatggctgtaatggagtgtgacggatgctgcgtcgaattgtgtctgggcaattgtggcccacggcgcggctccgtcaccgatattcccggcacggccatggtccgcggcggtggatag

SEQ ID NO: 5591 - DNA, 492 bp, synthetic construct
  misc_feature 1..492: note = source = /note="Description of Artificial Sequence: Synthetic coding sequence"
  source 1..492: mol_type = other DNA
atgaccatgaggcataattggactcccgacctgagcccattatgggttttgcttctctgtgcgcacgtggtaaccctgctcgtaagagcaacacctgtcagccagacaaccaccgctgctacagcatctgtccgctccacaaaggacccctgtccatctcaaccaccagtgtttcccgctgctaagcaatgcccggccctggaggtgacatggccagaagttgaggtgccactaaatggcactctgtcgctatcatgtgtcgcgtgctcaaggtttccaaactttagcattttgtattggttaggtaacggaagtttcatcgagcaccttcctggccggttatgggagggttcaaccagtcgggagaggggaagcactgggtgggccgagggtaacctggccccccacccaaggagccctgctctccagcctcagcagagcacggcagcgggcctgcgattgtccacaggccccgcggccgcgcaaccatag

SEQ ID NO: 5592 - DNA, 1590 bp, synthetic construct
  misc_feature 1..1590: note = source = /note="Description of Artificial Sequence: Synthetic coding sequence"
  source 1..1590: mol_type = other DNA
atggctccagccagaactatggcgagggcccggcttgcacccgctgggatccccgcggttgccctgtggctgctttgcactcttgggctccaaggtacccaggctgggccccctcctgctcctccaggacttcctgctggcgctgattgcctgaacagtttcaccgccggagttcccggattcgtcctggacacaaatgcatccgtctccaacggagcaaccttccttgaaagcccaacagtgcggcgtggatgggactgcgtcagggcctgctgcacaacacagaattgcaatcttgctctcgtggagctgcagccagatcgtggcgaagacgcgatagccgcctgctttctgatcaactgtctgtacgagcagaatttcgtctgcaaattcgcacccagagaggggtttatcaactatttaacccgcgaggtttatcggtcatatcgccagttgcgcacacagggatttggaggatcagggataccaaaggcatgggctgggatcgacctgaaagtgcagcctcaggagccgctggtgctcaaggatgtagagaacactgattggaggctgctgagaggtgacactgacgtacgagtcgaaaggaaagatcccaaccaggtggaactgtggggcctcaaggaaggcacgtatctatttcagcttacagttaccagctcggaccaccccgaggacactgccaacgtcaccgtaacagtgctttctacaaagcagacagaagactattgtctcgcttccaacaaggtaggaagatgtcggggatccttccctcgatggtactatgacccaaccgagcagatttgcaagtcctttgtgtatgggggctgcctgggcaataaaaataactacctaagagaagaggagtgcatccttgcctgcagaggagtccaggggggccccttgaggggctcatccggagcccaggcaaccttccctcaaggtccatccatggagaggagacatccagtgtgctctggaacctgccaacctactcagtttcggtgctcgaacggatgctgcatagacagctttctcgagtgcgacgacactcctaactgccctgatgcctccgacgaggccgcctgtgagaaatatacttccggattcgacgaactccagcgcatacattttccgagcgataagggccattgcgtcgacctgcccgacaccgggctctgtaaggagtctataccgaggtggtattataaccctttctctgaacactgtgccaggttcacttacggcggatgctacggcaacaagaacaattttgaagaagaacagcagtgtctggagagttgtaggggaatcagcaaaaaggatgtgttcggcctgaggagagagatcccgatcccctccaccggaagtgttgaaatggctgtagccgtatttctggttatctgcatagtcgtcgttgtagccattctggggtactgcttttttaaaaaccagcgtaaggacttccatgggcatcaccaccaccctccccccacccctgcttcatccaccgtctcgacaactgaagataccgagcacttagtttacaaccacacaacccgcccactctag

SEQ ID NO: 5593 - DNA, 1803 bp, synthetic construct
  misc_feature 1..1803: note = source = /note="Description of Artificial Sequence: Synthetic coding sequence"
  source 1..1803: mol_type = other DNA
atgcaagggcccttgctgcttcccgggttatgtttcctgctctccctgttcggggcagtgactcagaagaccaagacgtcatgcgctaaatgcccaccgaacgcgtcttgcgtcaacaacacgcactgcacttgtaaccacggctatacctcagggagcgggcagaagctttttacttttcccctggaaacctgtaatgatactaccagttctaagaccactgaaggtagaaaggaactccagaagatcgtggacaagtttgagtctcttctcacgaaccaaacattgtggagaacggaaggtcgccaggaaatatcttctacagccacaaccatcctccgagatgtggagtccaaggtgctggagactgctcttaaggaccccgagcagaaggtgctgaaaatccagaatgactctgttgctatcgaaacccaggctatcactgacaattgtagcgaagagcgcaaaaccttcaacctgaacgtccagatgaactctatggacatccgctgttccgatattattcaaggtgacacgcagggccccagcgccattgcatttatatcctatagttccctgggcaatataatcaatgcaacattttttgaagagatggacaagaaagatcaggtgtacctgaatagccaagtcgtctcagcagctataggccccaagagaaacgtctccctcagcaaaagtgttacgctgacattccaacacgtcaagatgacgccttcaacaaagaaagtgttctgtgtgtactggaaatcaaccggccaaggctcacagtggtcacgtgatggatgcttcctgatacacgttaataaatctcataccatgtgtaactgcagccatctaagctcgttcgccgtgctaatggctttgactagccaggaagaggacccagtgttaaccgttattacctacgttgggttgagtgtgtctctgctgtgtctgctgctcgcagcactgacattcctgctatgtaaagccattcggaacacctctaccagtctgcacctgcaattatccctttgtctatttttagctcacctcctgttcctggttgggatagataggacagaacctaaggtcctgtgttccattatcgcaggcgcgctgcactacttgtacttggctgcattcacatggatgctgttggagggtgtgcacttgtttttaactgctcggaacttaactgtggtgaactatagctccatcaaccgcctgatgaagtggatcatgtttcccgtgggctatggagttcctgccgtgaccgtggccatcagtgctgcaagctggccccatctgtatggaaccgcagaccggtgctggctccatctggaccagggattcatgtggtccttcctcggaccagtgtgcgcgatattttccgccaatcttgtgcttttcatcttggttttttggatcctgaagcgcaaactgagctccttgaattccgaggtatccactattcaaaatacacggatgctggcttttaaggccactgcccaactctttatactgggctgcacctggtgtctggggcttctgcaggtcggtcccgcagcccaggtgatggcgtatttgttcacaattattaactcactccagggctttttcatcttcctggtgtactgtcttctttctcagcaagtgcagaaacagtatcagaagtggttccgggaaattgtcaaatccaagtccgaatctgagacatatacgctttcatccaaaatgggacctgattccaaaccttcagaaggtgacgtgttcccaggccaggtgaaacgaaagtactag

SEQ ID NO: 5594 - DNA, 660 bp, synthetic construct
  misc_feature 1..660: note = source = /note="Description of Artificial Sequence: Synthetic coding sequence"
  source 1..660: mol_type = other DNA
atgaagctcttgctgtgggcctgtattgtatgcgtggcctttgctcggaagcgacgcttcccatttatcggtgaagacgacaacgacgacgggcatccgctccatccgagcctgaatatcccttacggcattcgaaacttgcctccacctctctactatcggcccgtcaataccgtaccctcttatcccggcaacacatacaccgacaccgggctgccgtcatacccttggattttaacaagtcctggttttccttacgtctaccatattcgagggtttcctttggctacacagctgaacgtgccacctcttccccctaggggttttcccttcgtccccccaagccgcttcttttcagccgctgccgctccggcagccccacccatcgcagccgagcctgccgcagcggcgccactaaccgccaccccggtggccgccgagccggccgctggagctcccgttgccgcagaacccgcagccgaggctccagttggggccgaaccagccgcagaggcgcctgtcgcggctgagccggccgccgaggctccggttggagtggaacccgccgctgaggagcccagtcctgcagagcctgcgacggcaaagccagcagctccagaaccacacccttcacctagtctggagcaggccaatcagtag

SEQ ID NO: 5595 - DNA, 1743 bp, synthetic construct
  misc_feature 1..1743: note = source = /note="Description of Artificial Sequence: Synthetic coding sequence"
  source 1..1743: mol_type = other DNA
atgcacctttcggcggtcttcaacgcactattagtatccgtcctggcagccgtcctgtggaaacatgtcagattaagggagcacgccgccaccctggaggaggaactggccctgtctagacaggccacagagcctgcgcccgctctgaggattgactaccccaaggcactgcagatcttgatggagggcggaacacacatggtatgtacggggcggactcatacagatcgtatttgcaggtttaagtggctatgctatagcaatgaggcagaagaattcatcttctttcacggtaatacgtccgtgatgctgcccaatctggggagcaggcggttccaacctgctctgctggatctgtccacggtggaggatcataacacgcagtactttaatttcgttgagctgccagccgctgccctcagatttatgcccaagccggtcttcgtgcccgacgtggccctgattgcaaaccggttcaacccagacaacctgatgcacgtgttccacgacgacctgctcccacttttttacactcttaggcagtttcctggtctggcccatgaggccaggctcttctttatggaggggtggggtgagggagcccattttgatctgtacaaattgttatctccgaagcagcctttattgcgggcacagcttaaaacacttggaaggcttttgtgttttagccacgcttttgtggggcttagtaagatcactacttggtaccagtatggcttcgtgcagccccagggccctaaagcaaatatactggtctccggcaatgaaatcaggcagtttgcccgttttatgacagagaagctgaatgtgagccacactggtgtgcctctgggagaggaatatatccttgtgttcagtaggacccagaatagactgatacttaacgaggctgagctactcctggctcttgctcaagagttccagatgaaaaccgtgaccgtgtccctggaggaccacacatttgccgatgtggtacgacttgtctctaacgcctctatgctggttagcatgcacggtgcccagcttgtgacaactttgttcctcccccggggggctacagtcgtggaactatttccgtacgctgtgaatcccgaccattacacaccatataaaaccctggccatgctgccaggcatggacctccagtacgtcgcctggaggaatatgatgcccgagaatactgtgacccaccccgaacgaccttgggaccagggtggcatcactcatctggaccgggctgaacaggcgcgcatcctgcagtcacgagaggtgcctcgtcacctgtgctgtaggaatccagaatggctgttccggatatatcaggacaccaaagtggacattccatcgctgatccagacaatccggcgggtggtcaaaggacgcccaggtccccgaaaacagaagtggacagtagggctgtatccaggcaaggtgagagaagcgagatgccaggctagcgtacacggagcctccgaggcaaggctcacggtctcctggcagattccttggaatttaaagtatctgaaggtccgcgaagtgaagtacgaagtctggttgcaggagcagggtgagaacacctacgtgccttatattttggccctgcagaatcataccttcactgagaacatcaagccatttacgacatacctggtatgggtccggtgtatttttaataaaatactgctgggaccgttcgccgacgtgctcgtctgcaacacctag

SEQ ID NO: 5596 - DNA, 5130 bp, synthetic construct
  misc_feature 1..5130: note = source = /note="Description of Artificial Sequence: Synthetic coding sequence"
  source 1..5130: mol_type = other DNA
atgggttttttgcccaaactgctcctcctggcatcttttttcccagcaggccaggcatcatggggagtgagctctccgcaggacgtgcagggggtgaaggggtcttgcctcttgatcccgtgcatcttctcatttcccgccgatgtggaggtgccagacggcattacagctatctggtattacgactacagtggccaacggcaggtggtgtctcacagtgcagatccaaagttagttgaggctcgtttccgcggaagaaccgaatttatgggcaatcctgagcacagggtctgcaatctgctgctcaaggacctgcaacccgaagactccgggtcttataacttcagatttgagatcagtgaggtcaataggtggtcagacgtgaaaggcaccctggtgacggtcaccgaagagccacgagtccccaccatcgcctctccagtggagctgctcgaaggcactgaagtggactttaactgctctacaccatatgtgtgcctgcaagagcaggtgcgcctccagtggcaaggccaggaccccgcgcgttctgtgaccttcaattcccagaagtttgagcctactggagtggggcatctagagactctgcacatggccatgagttggcaggaccacggccgcattctcaggtgccaactcagcgttgcgaatcaccgggcccaaagcgagatccatctgcaagttaaatacgctccaaaaggagtcaaaatccttttgagcccatctgggcggaatatcctgcccggcgagttggtcacactgacctgccaggtgaatagtagttaccccgctgtgagtagtatcaagtggctcaaagacggcgtgagattacaaaccaagactggggtactccacctgccacaagccgcctggtctgatgccggagtctacacatgtcaggccgaaaatggcgtgggtagcctggtctcacctcctatcagcctccatatctttatggcagaggtacaagtaagccccgcgggccctatattggagaatcagacagtgaccctcgtatgcaacacacccaatgaagctccatccgacctacggtattcttggtacaagaaccacgtcctgctggaggatgcccattcccatactctgagattgcaccttgctaccagggctgatacaggtttttacttttgcgaggtccaaaacgtgcacggatctgaaagatcaggtccagttagtgtggtcgttaatcacccaccacttactcctgtgcttacagccttcttagaaacccaggctggccttgttggaatcttacactgttccgttgtctccgaaccactggccaccctagtcttgtctcacggcggtcatatcctggcctctaccagtggggactctgaccacagtccacggttctccggtactagtggacccaattccctcaggctggagatcagagacctggaagagactgatagcggcgaatataagtgcagtgcaaccaactctctggggaatgccacgtccacactggatttccacgctaacgctgccaggctgctgatctctccagccgccgaggtcgttgaaggccaggctgtcacactgtcatgccgaagtggcctgagtcccacgcctgacgccagattcagttggtatctcaatggcgctctgctccacgaaggtcctgggtcgagcctgcttctaccagcagcgtcttctactgatgctggctcttaccattgtagagccagagatgggcacagcgcttccgggccgagtagccctgcagtgctgacagttttgtacccaccccgtcagccaacttttaccactcggcttgacctggatgctgctggggccggggccggaagacgcgggctcctgttgtgccgggtggacagcgaccccccggcacgactgcagctgctgcataaggacagggtggtcgccacttctcttccatctggcggaggttgtagtacatgtggagggtgctcacctagaatgaaggtgacgaaagctcccaacttgctgcgagtggagatacataaccccttgctggaagaggagggcttgtacctctgtgaggccagtaatgcgctagggaatgcctctacatcagctacctttaacgggcaggccaccgtcctggcaatcgccccttcacacacactccaagaggggactgaggcaaacctgacctgtaatgtatcaagagaagcagccggttcaccagcgaattttagctggtttaggaatggggttctatgggctcaagggcccctggaaacagtgactctcctacctgtcgcccggactgatgccgcgctctacgcgtgtcggatcctaacggaagctggagctcaactaagcacccccgtcctgttgtccgttctgtaccctccagacagacctaaactttcggcactcctggatatgggtcagggacatatggcactcttcatctgcacagtagattcacgtccacttgccctcctggccttgtttcacggagaacacctgctcgctacttcccttggcccacaagtcccaagccacggaaggttccaagctaaggctgaagcaaattcattgaagctggaggtgcgtgagctgggactcggtgatagcggtagttacagatgcgaggcgaccaacgtcctgggcagctcaaatacttcactgttctttcaagttcggggagcatgggtgcaggtgtccccgagtccagaactgcaggaaggacaagccgtagtactgagctgtcaagtgcacaccggggtgccggagggcacaagttatcgatggtacagagatgggcagcccctacaggaatcgacgagtgctacactgaggtttgccgcgataacactgacacaggccggagcttaccattgtcaagcacaagcaccaggaagtgctacaacatcccttgctgcccctatctctctccatgtctcatatgctcctcggcacgttacgctcacaaccctgatggacaccggtccaggtcgtctcggccttctgctgtgtcgcgttgacagtgacccccctgcccagttgaggctgcttcatggtgatcgtcttgtcgcgtccactctccaaggtgtggggggccccgaggggagtagcccacgtctgcacgtggctgttgctccgaacaccttaagacttgaaatccacggagctatgctcgaggatgagggcgtctacatttgtgaagcgagcaacacgttaggccaagcatccgcttctgcggactttgacgcccaagcggttaatgttcaggtgtggccaggggcgacggttcgcgagggccagcttgttaatctgacctgtcttgtgtggaccacccacccagcgcagctgacatacacatggtatcaggacggccagcagcgcttggatgctcactctatccctttgcctaacgtgactgttagggatgcaacatcttataggtgcggcgtggggcccccagggcgggccccacggttatccaggcctattactctcgacgtcttgtatgccccacgaaacttacggttgacgtatttactcgaatctcacgggggtcagctagcgctggtgctttgcactgtggattcacgccctccagcccaactggctttgtcccatgccggtaggctgttagcatcctccactgccgccagtgtgccgaacactcttcgcttagagctacgcgggccacagcccagagatgagggcttctacagctgctcggcgcggagtcccctgggccaagccaacacttcccttgaactccgattggagggcgttcgggtcatcctggcacctgaggccgccgtgccagagggagcacccatcacggtgacttgcgctgacccggctgcgcatgctcccacgctgtatacgtggtaccataatggtcgctggctgcaggagggcccagcagcaagcctgagcttcctggtggcgaccagggcccacgcaggcgcgtacagttgtcaggcccaagatgcccaggggacacgcagttcccggccagctgccttgcaggtcttgtacgctcctcaggatgcagtgctgtcctccttcagggactctagagcccgctcgatggcagtcattcagtgcacagttgatagcgagcctcctgctgagctagcactcagtcacgatgggaaggtgctggctacctccagtggtgtgcatagcctagcaagtggtacagggcatgtgcaggtagcccggaatgcattgagattgcaggtgcaggacgtccccgccggtgacgacacgtacgtgtgcacagctcaaaatctgctggggtcaattagcacaatcggccgcttgcaggtagagggagctcgtgtggttgccgaaccagggctggatgtccccgagggtgccgccttgaacctatcatgccggctgctcggagggccaggcccggtagggaactcgacatttgcttggttctggaacgaccgacgcctgcatgcggaacccgttccaactctcgccttcacgcatgtcgcccgggcccaagctggcatgtaccactgcctagctgaactaccaacaggtgcagctgcttcagcccccgtgatgttaagagtgctgtacccccccaagaccccaaccatgatggtcttcgtggagccagaaggagggctacgtgggatcttagattgtcgcgtggattctgagcccctcgcctcactgacactacatcttgggagtcgactggtcgcgtcctcacagccccagggtgctcctgctgagccccatatacatgtgcttgcaagcccaaatgcgctcagggtagatattgaggcccttcggcctagtgatcaaggggagtacatttgcagtgcaagtaatgtgctgggaagcgcttctacctcaacctacttcggggtgcgggccctccatcgactgcaccagtttcaacagctcctgtgggttctcgggctattggtggggcttctgctcttactattgggtctgggagcatgctatacctggcgaaggcgaagggtgtgtaagcaaagcatgggcgagaatagcgtggagatggccttccagaaagagactacccagctcattgaccctgacgcagcaacctgcgagactagtacctgtgccccacctttgggctag

SEQ ID NO: 5597 - DNA, 693 bp, synthetic construct
  misc_feature 1..693: note = source = /note="Description of Artificial Sequence: Synthetic coding sequence"
  source 1..693: mol_type = other DNA
atgtgtgtgacttaccacaatggcacaggatattgcaagtgtcctgagggttttctgggtgagtattgccagcaccgtgatccttgcgaaaaaaacaggtgccagaacggtggcacctgcgtagcccaggcgatgttgggtaaggcaacgtgccgatgcgctagcgggtttaccggggaggactgccagtatagcactagccacccatgtttcgtctccaggccttgcctcaacggcggtacctgtcacatgctttctagggacacttatgaatgtacctgccaggtcgggttcacgggtaaagaatgccagtggacagacgcatgcctctcccacccatgcgccaacggatcgacttgcaccacagtagcaaatcagttctcctgcaaatgtttgacaggcttcaccggacagaagtgcgagacagacgtcaatgagtgtgatattcctggacattgccaacacgggggtacgtgtttgaatctgcccgggagctaccagtgccagtgtctacagggttttaccggacaatactgcgactcactttacgtcccttgcgctccctccccctgcgtaaacggcggcacgtgtcgtcaaacaggtgactttacgttcgagtgtaactgcctccccgcgacatggccaatcttccccaaactccttagcctgcaggaaaaggaatcctattgctag

SEQ ID NO: 5598 - DNA, 660 bp, synthetic construct
  misc_feature 1..660: note = source = /note="Description of Artificial Sequence: Synthetic coding sequence"
  source 1..660: mol_type = other DNA
atgttcgtgtcctatctgattctgactctgttacatgtgcagacagccgtactcgccagacccggcggggaaagtatagggtgcgacgattacctgggaagcgacaaagtggttgataagtgtggggtgtgtgggggggataatactgggtgtcaagtggtgagcggcgtattcaagcacgcattgacttctctaggataccaccgagtcgtcgagattccagagggtgctaccaagatcaacattaccgagatgtataaatctaacaaaaagaaatctcacctgaagccggcaacacgcggttctcagttctctagcgtgaaagtatgctccgtgcctgcggcatgcaagctattagggacacccgggcgggcccgccagccggtgccggccccaagagagctcgaacatgataagaattctcctcattgcgcttatctgagtctgtatcttacttcacttgctcagtccagttggcgtgtattctcactgttctcttacgtgctaatatatctcttcagcaagtatttagccttcaatacactttttgcattgaagcggatggctctacagagagatcgtaaggaaaagacacgcgcatggtgcatttttattaaactgtgtgggagggagatccagatcctgcccgggcctgtgtag

SEQ ID NO: 5599 - DNA, 363 bp, synthetic construct
  misc_feature 1..363: note = source = /note="Description of Artificial Sequence: Synthetic coding sequence"
  source 1..363: mol_type = other DNA
atggacaacgtgcagcccaagattaaacaccgtccgttttgcttttccgtcaaaggacacgttaaaatgttacgactagcccttacagtcacctcaatgactttcttcatcattgcacaggccccagagccttatattgtcattaccggattcgaggtgacggtcatcctgttcttcattctactgtacgtgcttcgccttgatagactaatgaaatggctgttctggcctctgctggtcttcgctttagttacggcagtgtgttgcctggctgatggtgcccttatatacagaaagctgctattcaatccctccggcccttatcagaagaagcctgtgcacgagaagaaggaggtgctatag

SEQ ID NO: 5600 - DNA, 864 bp, synthetic construct
  misc_feature 1..864: note = source = /note="Description of Artificial Sequence: Synthetic coding sequence"
  source 1..864: mol_type = other DNA
atggccccttggagccacccttccgctcagctgcaaccagtgggtggggacgccgtctctccggccctcatggtgctgctgtgcctgggtaacctcagtaaagctaccttatgggctgaaccgggcagcgtcatctcgaggggtaactctgtgaccattcgttgtcaagggacactcgaggcccaggagtaccgtctggtgaaggaagggagcccagagccctgggacacccagaacccgctggagcccaagaacaaagcccgcttttctattccgtccatgacagagcatcacgctgggagataccggtgttattattactcaccggccggctggagtgagccaagcgatccactggagttggttgtgaccgggttctacaataaaccaaccctgtcagcactgccgtccccggtagtgacctccggggagaacgtcacgttgcagtgtggttctcggctgagatttgatagattcatcctcacagaagagggagaccacaaattgtcatggacactggactcccaactaacacctagcggccaattccaggctttgttcccggttggtcctgtgacacctagccaccgctggatgttgcgatgctacgggtctaggcgccacatcctgcaagtctggagtgaaccaagcgacctcctggaaatccctgtatctggtgccgcagataatctcagtccttctcaaaacaagtctgattcaggtaccgccagtcacctccaggactacgcggtggagaatctgatcagaatgggaatggcaggactgatcctagtggtcctgggtatcctgatttttcaggactggcattcacagcgatccccgcaggctgctgcaggccgatag

SEQ ID NO: 5601 - DNA, 438 bp, synthetic construct
  misc_feature 1..438: note = source = /note="Description of Artificial Sequence: Synthetic coding sequence"
  source 1..438: mol_type = other DNA
atgggcattggttgttggagaaatcctttgctgttgttgatcgccttggttctctctgccaaactcggccattttcagcgctgggagggcttccagcaaaaactgatgagcaaaaaaaacatgaacagcacgctcaattttttcattcagtcatacaataatgccagtaacgacacttatctgtatcgggttcagcgccttatccgaagccagatgcaactgacgaccggcgtggagtacatcgtgaccgtgaagataggctggacaaagtgtaagcgcaatgatacctcaaatagctcctgtccactgcagtccaaaaaattaagaaagtcattgatatgtgaatccttaatctacaccatgccctggattaactattttcagctctggaacaacagttgcctggaagcggagcacgtcggtcggaacctgaggtag

SEQ ID NO: 5602 - DNA, 1776 bp, synthetic construct
  misc_feature 1..1776: note = source = /note="Description of Artificial Sequence: Synthetic coding sequence"
  source 1..1776: mol_type = other DNA
atgcagcaagacggactgggtgtaggtacaaggaatggcagcgggaagggacgcagtgttcatccatcctggccatggtgtgccccaaggcctctgcgctacttcggccgagatgcccgcgctcggcgagctcagaccgctgccatggcgttagccatccaagtgaccgtgagtaatccttaccatgtggtgatcctgtttcagcctgtcaccctgccttgtacataccaaatgacgtccacacctacgcaacccatcgtcatctggaaatataaaagcttctgccgggaccgtattgctgatgctttctcaccggccagtgtagataaccagctcaacgctcaattggcggctgggaaccccggctacaacccttacgtcgagtgtcaggattccgtgcgcaccgtcagggttgtggccacaaaacaggggaatgccgtcacactcggcgactactaccagggaaggaggataaccattactggcaacgccgacctcacattcgaccaaacagcttggggggatagcggggtgtattactgttccgtggttagtgcgcaagatctccaggggaacaacgaggcttatgctgagctcatagtactgggccggacatctggcgtcgccgagctcctgcctggattccaggcaggccctattgaagactggctattcgtggtggtagtctgtctggctgcgtttctcatcttcctacttctcggcatctgttggtgccagtgttgcccccatacctgttgttgttacgtgagatgtccctgttgtcctgacaaatgctgttgccccgaagcattgtacgcggcgggcaaggccgctacatctggtgttccatcgatctacgcaccatcaacctacgcccacctcagccctgctaaaaccccgcctccaccggccatgatcccaatggggcctgcctacaacggctacccaggcggttatcctggagacgtggacagatctagctcggtacggtctggataccgcatccaggcgtcgcagcaggacgactcaatgcgagtgctgtactacatggaaaaggaattggcgaacttcgatccaagcagacctggcccccctagtggccgcgttgagcgagctatgagcgaagtcacctctctacatgaggatgattggcggtcaagaccatcacgcgggcctgccttaacccctattcgggacgaagagtgggggggccactctcctcggagtccaagggggtgggaccaagaacccgcaagggagcaagccggcggaggatggcgcgcgagacgtccccgtgctagatcggtggacgcactggatgacctcacacccccctccacagctgagtctggcagtaggagccccacatcaaatgggggccggagtcgcgcctatatgccaccaagatcccgctcacgggacgatctgtatgaccaggacgattctagggatttccctcggtcccgggacccccactatgacgacttccggagccgcgagcggcctccggctgaccctaggagccatcaccaccgtacgagggacccaagggacaacggttcaaggtccggggatcttccttatgacggcaggctgctggaggaggcggtccggaaaaaagggtctgaggaaaggcggcgccctcataaggaggaagaggaggaagcctactatcccccagcccctcccccttactctgagacggattctcaagcatcaagggagagacgtctaaagaagaatctcgccctgtctagagagtctcttgtcgtgtag

SEQ ID NO: 5603 - DNA, 678 bp, synthetic construct
  misc_feature 1..678: note = source = /note="Description of Artificial Sequence: Synthetic coding sequence"
  source 1..678: mol_type = other DNA
atgaaccggtgcccaagaaggtgcaggagtcccttgggacaggccgcccgcagcctgtaccagctggtcaccggcagcctgagtcctgatagcgtcgacgatgaattcgaactttctaccgtctgtcataggccagaaggcttagagcagctgcaggaacaaacaaaatttacaagaaaggagttgcaagttctgtacagaggatttaaaaatgagtgcccatccggcatcgtgaatgaagagaactttaagcagatatactcgcaattctttccacagggggactccagcacttacgccacgtttctgttcaacgcgtttgacactaaccatgacggcagcgtgagctttgaggattttgtggccggcctgtcagttattctgcgcggaacggtggacgacaggctgaattgggcatttaacctgtacgatctcaataaagacgggtgtattaccaaggaggagatgctggatatcatgaaatcaatatacgatatgatgggtaagtatacatacccagctctgagggaggaggccccaagggagcatgtggagagcttctttcagaagatggacaggaacaaggacggcgtggtgacaattgaagaattcattgaatcttgtcagaaggatgagaacatcatgaggagcatgcaattgtttgataatgtaatctag

SEQ ID NO: 5604 - DNA, 705 bp, synthetic construct
  misc_feature 1..705: note = source = /note="Description of Artificial Sequence: Synthetic coding sequence"
  source 1..705: mol_type = other DNA
atgcctgccagttcgccattcctactggcgccaaaaggccccccgggaaacatgggtggcccggttagagaaccagccctaagcgtggccctgtggctgtcctggggagccgctctgggggccgtggcctgtgctatggccctgttgacccaacaaaccgagctgcagagccttaggagagaggtgagtaggttgcaaggaaccggcggcccttctcaaaacggagagggatacccctggcaatcacttccagagcagtcttctgatgctttggaggcctgggaaaatggggagcgttcacggaaaagaagagccgtcctaacacaaaagcaaaaaaacgattccgacgttaccgaggtgatgtggcagcctgctttgcggagaggacgagggctccaggcgcaagggtatggcgtacgaatccaggatgcgggggtgtacctgctttactcccaggtcctgttccaggatgttacattcacaatgggccaggtggtaagcagagagggacagggcagacaggaaactctgtttcgctgcattagaagcatgcccagtcatcctgaccgtgcttacaactcctgttactccgcgggggtgtttcatctgcatcagggtgatatcctgtcagtgataatcccccgggcccgagctaagcttaatctcagcccccacggtactttccttggcttcgtgaaactgtag

SEQ ID NO: 5605 - DNA, 2400 bp, synthetic construct
  misc_feature 1..2400: note = source = /note="Description of Artificial Sequence: Synthetic coding sequence"
  source 1..2400: mol_type = other DNA
atgaagccaatgctgaaggacttttctaatcttctgcttgtcgtgctctgtgactacgtgctaggcgaggccgaatatctgctgctgcgggagccgggccacgttgccctctccaatgataccgtctatgttgactttcagtacttcgatggcgccaatggaacactccgtaacgtctcagttctgctgcttgaggctaacaccaaccaaactgtcaccactaagtatctgctcactaatcaatctcagggaacattgaagtttgagtgcttttatttcaaggaagccggagattattggtttactatgacacctgaggcaaccgataattcgaccccatttccctggtgggagaagagcgcctttctgaaggtcgagtggccagtcttccacgtcgacctgaatcgcagcgctaaggctgcagaggggactttccaggttggattgttcacatcacagccactgtgccccttccccgtcgataaacctaatattgtggtggatgtgattttcacgaactcccttccggaggcccgcaggaacagccgacaacctcttgagatcagaacctctaagcgcacggagctggcccagggccagtgggtcgagttcgggtgcgccccgttggggccggaagcatacgtgactgtggtcctgaaacttttagggcgcgattcagttattacttccaccggaccaatcgacctcgcgcaaaagttcggatacaaacttgtcatggttccagagctgacctgtgaatctggggtggaggtgacagttctccccccaccttgcactttcgtgcagggagtagtcactgtctttaaggaggcaccgcggtacccaggaaaacggaccatacacttggcagagaactccctgccacttggcgaaaggcggaccatttttaactgtacactgttcgacatggggaaaaataagtactgctttgactttgggataagctcccgtagccacttctctgcaaaggaagagtgcatgctgattcaacgcaatacagcttttcaaccatcctctccctccccgcttcagccacagggaccagtaaaaagcaacaacattgtaactgtgactggaatctcactatgtctgtttattatcattgccaccgtcctcataaccctctggcggcgttttggacgccccgccaagtgctcgactcccgcccgacacaattcaatccattcccctagtttccggaaaaactcggatgaagaaaacatctgcgaactctctgagcagcggggatccttctcagacggcggcgacggacctacgggatctcctggcgacacggggataccgctgacctataggcgaagtggccctgtccctcctgaggatgatgctagcggtagcgagtcgttccagtcaaacgcccagaagataatcccacctttgtttagttaccggttagctcagcaacagctcaaggaaatgaaaaaaaaaggcctgactgaaacaacgaaggtgtatcacgtcagtcagtcccctttgacagacactgctatagacgctgctccttcggctcctcttgatctggagagccctgaggaggctgccgccaacaagttccgcatcaaaagtccatttcccgaacagcctgctgtcagtgccggagagaggcctccctctcgcttggatctcaatgtgactcaagcatcttgcgctatcagtccctcgcaaacccttatacgaaaatcacaagcacgccacgtcggatcccgtggtggcccctcagagagatcacatgccaggaatgcccatttccgtaggaccgcatcattccatgaggcacgacaggctagaccatttcgcgaaagatccatgagcaccctgacgcctcggcaggcccccgcctatagctccagaacgagaacctgtgagcaggcagaagatcgatttcgccctcagagtcgaggtgcacacctgttccctgagaagctggagcacttccaggaagcttcgggcacgagagggcctttaaatcccctcccaaagtcttacactctaggccagcctttgagaaaaccggatctgggtgatcaccaggcaggactggttgccgggattgaaagaacagaaccacaccgtgctcgcagaggcccctccccaagccacaagtccgtgtcaaggaaacagagctcacctatcagccccaaggataactaccagagagtgagctcactttctcccagtcagtgtcgtaaggacaagtgccagtcctttccaacgcatccagaatttgccttttacgacaatacatccttcggactgaccgaagccgagcaacgtatgctagatctgccaggctacttcgggtcaaacgaagaggacgaaacgacaagtactctttccgtcgagaaactggttatctag

SEQ ID NO: 5606 - DNA, 927 bp, synthetic construct
  misc_feature 1..927: note = source = /note="Description of Artificial Sequence: Synthetic coding sequence"
  source 1..927: mol_type = other DNA
atgcgacttttgccggagtggttcttgttattgtttggcccctggctgctcagaaaggctgtgtccgctcagattcccgagtccgggagaccgcagtacctcggactgaggccagctgccgccggtgccggcgcacccggtcagcagctgcctgaaccgcggtcttcagacgggttgggagttggccgagcttggagctgggcctggccgaccaatcataccggcgctcttgccagggcaggcgccgccggcgcactccccgcccagcgaacaaaacgcaaaccctcgatcaaggcggctagggccaaaaagattttcgggtggggggacttttacttcagggtgcatacgctgaaattctcactccttgtcactggaaaaattgtggatcatgtcaatggtaccttttctgtgtatttccgccacaactctagtagccttgggaatttgagcgtgagcattgttccgccatctaagagggtcgagtttgggggcgtttggctccctggaccggtcccccaccctcttcaatctacactcgccctggaaggtgtgctgcccgggttagggccccccttaggaatggctgcagcagccgctgggccagggctgggcggcagcctcgggggggctttggcggggccccttgggggggccctgggagtccccggagctaaggaatcaagggcgttcaactgtcatgttgagtacgagaaaaccaatagagcgcgcaagcaccggccctgcttatacgaccctagtcaggtttgcttcactgagcacacacagagccaggcagcatggttgtgcgctaaaccgtttaaagtgatctgtatcttcgtgagtttcctgagtttcgattacaaactcgtacaaaaggtatgcccagactataactttcagtcagagcacccctattttggctag

SEQ ID NO: 5607 - DNA, 795 bp, synthetic construct
  misc_feature 1..795: note = source = /note="Description of Artificial Sequence: Synthetic coding sequence"
  source 1..795: mol_type = other DNA
atgaaactggggtgtgtattaatggcctgggctttgtatctgtcactgggtgtgctgtgggtggctcaaatgctacttgcagcatcctttgagacactgcaatgtgaaggtccagtgtgtacagaagagtcctcttgccacacagaggacgacctgacagatgcacgcgaagctggctttcaagttaaagcttacactttttccgagccattccatctgattgtgagttacgattggttaattctgcagggacctgcaaagcccgtctttgagggtgacctgctggtgctcaggtgtcaagcttggcaggactggcctctgacccaggttacgttctatcgcgacggatcagcgctcggtccccccggccccaatagggaatttagtataacagttgtgcagaaagccgattcaggacactatcattgtagcggtattttccagagtccaggccccggcatcccagaaaccgcttcggtcgtagcaataacagtccaaggggcatcctcatctgctgcgccgcccacgctgaaccccgccccacagaagagcgccgcccctggaactgctccagaggaggcccccggtccactccccccacccccgaccccctcgtccgaagaccccggcttcagtagccctctggggatgccagatcctcacctgtaccaccagatgggattgctgctgaaacatatgcaggatgtgagggtgctgcttggtcacctgcttatggagttaagagaattatccggacatcggaagccgggcaccacaaaagctactgcggaatag

SEQ ID NO: 5608 - DNA, 1362 bp, synthetic construct
  misc_feature 1..1362: note = source = /note="Description of Artificial Sequence: Synthetic coding sequence"
  source 1..1362: mol_type = other DNA
atgctgaggatcctctgcctcgcgctctgcagcctgttgaccggcacacgcgccgaccctggcgcgctcctgcggctgggcatggacattatgaaccaggtgcagagcgccatggacgaaagccatattcttgagaaaatggccgctgaagctggcaaaaaacaaccaggcatgaagccaatcaaagggatcaccaatctgaaagtcaaggacgttcagctccctgtgatcaccttgaactttgtacccggcgtcggtatatttcagtgcgtgtcaaccggtatgaccgtcaccggcaagtcttttatgggcgggaacatggaaatcatcgtcgccctcaacataacggctaccaatcgcctccttcgggacgaagagactgggctgccagtgtttaaaagtgaaggctgtgaagtcattctcgtaaatgtgaaaactaacctgcccagcaacatgttaccaaagatggtgaataaatttttagatagcaccctgcataaggtcctcccaggattaatgtgtccagccatagacgccgttttagtatatgtgaatcggaaatggacaaacctgtcagacccaatgcccgtgggccaaatgggtacggttaaatacgtgttaatgtcagcccctgcaaccaccgcttcatatattcagctggattttagccccgtggtgcaacagcaaaagggcaagaccattaagctggctgacgccggcgaggcattgacctttccggaggggtacgccaaagggtcttcccagctcctcttgccggcgacatttttgtcggcagagctagctctgctgcagaagagttttcatgtcaacatccaggatactatgataggcgagctgccaccacagacgaccaaaacattagcgcgtttcattcctgaggtcgcagttgcctatcctaaatctaaacccctgactactcagattaaaattaagaaaccacctaaagtcactatgaagactggcaagagcttactacatctgcactcgactctcgaaatgtttgctgctcggtggcgcagcaaggccccgatgtccctgtttttgttagaagtgcactttaaccttaaagtgcagtatagcgtccatgaaaaccagctacagatggccaccagtttagacagactgctcagtctgtctcggaaatccagtagcataggaaacttcaatgagagggagctcacaggcttcatcacatcataccttgaagaggcgtatatcccagtggtgaatgacgttttgcaagtcggactgccccttcccgacttcctggctatgaattacaatctggctgagctggacatagtggaaaacgccttgatgctcgacctgaaactaggttag

SEQ ID NO: 5609 - DNA, 1323 bp, synthetic construct
  misc_feature 1..1323: note = source = /note="Description of Artificial Sequence: Synthetic coding sequence"
  source 1..1323: mol_type = other DNA
atgagtgctcgcgggcgatgggagggagggggacgtcgcgcctgtaggggaagtttggggctagcccgtgcccagggcgccgagcgtgtgacgtcttctgaacagagacccgccatggcctcgctgggcctgctgctgctgctgctgctgaccgcgttaccaccactgtggtcttcctccctgcccggcctcgacacggccgaatcaaaggctaccatcgccgatctgattctgagcgcacttgaaagggctaccgtttttcttgagcagcgtctacccgagatcaatttggacggcatggtgggggtgagggtgctggaggagcagctcaagtcggtgagggaaaaatgggcgcaagaaccactcctgcagccgctcagcctaagagtggggatgctcggtgaaaagcttgaggctgctatccagaggagcctgcactacctgaaactgagcgacccgaagtatctccgagagttccagctcacactgcaacccggattctggaagctgccacatgcctggatccatacagacgcgtccctagtgtaccctacctttgggccacaggactcattttccgaggagcgctccgatgtttgtcttgtgcaactcctcggaacaggcactgactcctcggagccttgcggattgagtgatctctgtcgctccttgatgacaaaacctggttgtagcgggtattgtctgtcgcaccagttactcttctttctttgggcccgcatgcggggctgtactcagggccctctgcaacaaagccaagattacatcaacttgttctgtgcgaacatgatggacctgaataggcgagcggaggccattggatacgcctaccctactagagacattttcatggagaatatcatgttctgcggcatgggcggcttcagcgatttttacaagttacgctggctcgaggctatcctctcgtggcagaaacaacaggagggctgtttcggcgaaccggatgctgaggacgaggagctctccaaggccattcagtaccagcagcactttagcaggcgggtgaagcggagagaaaagcaattccccgatagtcgatctgtcgcgcaggcaggagtccaatggagaaatctgggctctctacagcctctccccccaggcttcaaacagttctcctgcttgatactgccttcatcctgggactatcggtccgttcccccatacctggccaatttctatatttttttagttgagaccggattccatcacgtggcgcatgccggcctcgaactgttgatctcacgcgacccccctacatcaggatctcagagcgtgggcctttag

SEQ ID NO: 5610 - DNA, 708 bp, synthetic construct
  misc_feature 1..708: note = source = /note="Description of Artificial Sequence: Synthetic coding sequence"
  source 1..708: mol_type = other DNA
atgaagtacgtcttctacctgggcgtgttggccggcacctttttttttgctgactcaagcgttcagaaggaagatcctgccccctacttggtatatctgaaaagccactttaacccttgcgttggtgttttgataaaaccgtcctgggtattggccccagcacattgctatctccctaatctgaaggttatgctcgggaattttaagtcaagggtccgcgacgggacagaacagactatcaaccccatccagatcgttcgctattggaattattcccacagcgcaccccaggatgacctgatgcttattaaactggcaaaaccggccatgttgaaccctaaggtgcagccactgacactcgcaactacgaacgttcgcccaggaaccgtgtgccttctttccggattggactggtcgcaggagaacagcggtagacaccccgatctgcgccagaacttggaagcccccgtaatgagtgatcgcgaatgccaaaagacagaacagggaaagagccaccggaactccctgtgcgtaaaatttgtaaaagtgttctccaggattttcggggaggtcgccgtcgcaaccgtgatttgcaaagataaactgcaggggattgaggttggccactttatggggggagacgtgggtatctacactaatgtgtacaaatacgtctcatggatagagaataccgcaaaagacaagtag

SEQ ID NO: 5611 - DNA, 426 bp, synthetic construct
  misc_feature 1..426: note = source = /note="Description of Artificial Sequence: Synthetic coding sequence"
  source 1..426: mol_type = other DNA
atgctgaagaaaatttccgtgggagtggcgggcgacctcaatacagtgaccatgaagctggggtgcgttctgatggcatgggccttgtatttgagcttgggggtcctgtgggtggctcagatgcttctcggtgcatcgtcaagtgccgcaccccctactctgaatcctgccccacaaaaatcagccgctccaggcacagcaccagaagaagctccgggccccctgccaccccccccaactccctcaagtgaggatccaggattctctagtcccctaggaatgcctgaccctcacctctaccaccagatgggactgctcttaaagcacatgcaggacgtccgagtgctgctggggcacttactgatggagcttagggaactgtccggacacagaaaacctggaactaccaaggccacagccgagtag

SEQ ID NO: 5612 - DNA, 2886 bp, synthetic construct
  misc_feature 1..2886: note = source = /note="Description of Artificial Sequence: Synthetic coding sequence"
  source 1..2886: mol_type = other DNA
atgttagccccgagaggagccgctgtcctcctgttacacctggtgttacagaggtggctggcagccggcgcacaggctaccccacaggttttcgaccttctaccatcctcttcgcaaaggttgaacccaggagcattacttccggtcctgaccgatcccgctttgaacgatttgtacgtgatctcaacgttcaaactgcagacaaagtcatctgcgactatctttggcttatactctagcactgacaacagcaagtactttgagttcacagtcatgggccgcctcaataaggccatcctgcgctacctgaagaacgacggaaaggtccatctggtggtctttaacaatcttcaactcgctgatggccgtcggcatcgcatcctactgcggttgagcaatcttcaaaggggcgctggatctctggaactatacctcgactgcatccaggtggactccgtgcataacttgccaagagccttcgccggtccttcacagaaacccgagacaatcgagctacgcactttccagcggaagcctcaggattttctggaggagctgaaattggtagtgcgcggatctctcttccaggtggcctcacttcaggactgctttctgcaacagtctgaacctctggccgccacaggaacaggcgacttcaaccggcagttcctgggtcaaatgactcagttaaaccagctgctcggggaggtcaaggatttgttgcggcagcaagtgaaggaaacttccttcctacggaacactatcgccgaatgccaggcatgcggacccttaaaattccagagccctacgcctagcacagtggtgcctccggccccaccagctccgcccacacggccccctcgaagatgcgactcaaacccctgcttccgaggagtgcagtgtacagatagtcgtgacggttttcaatgcggtccctgccctgagggttatacaggtaacggcattacctgcattgacgttgacgagtgcaagtaccacccatgctacccaggagtgcattgcatcaacttgtcaccagggttccgttgcgacgcgtgccctgttggcttcactggccctatggtgcagggagtgggaatctcattcgcaaagtcaaataaacaggtgtgtactgatatcgacgaatgtcggaatggcgcctgtgttcctaacagtatctgcgtcaataccctggggtcctacagatgtgggccctgcaaaccaggctacaccggcgaccagattaggggctgtaaagcagaaaggaactgtcggaatccagagctgaacccctgctccgtgaacgcacagtgcattgaggaaaggcaaggggatgtaacctgtgtgtgtggagtggggtgggccggcgacggctatatttgcgggaaagacgttgacattgatagctacccagatgaggagctgccgtgttcagccagaaactgcaagaaggataattgtaaatatgtgcccaactctggtcaggaagacgcagatcgcgacggcatcggagacgcatgcgatgaggacgcagatggcgacggtatccttaacgaacaggataactgtgtgctgattcataacgtggatcagagaaactccgataaggatatctttggagatgcatgcgacaactgcctgtctgtattgaataacgatcagaaggacaccgatggagacggtaggggcgatgcctgcgacgatgacatggacggcgacgggatcaagaatatccttgataactgcccaaagttcccgaatagagaccagagggataaggatggcgatggggtgggggatgcctgcgattcatgtcccgatgttagtaacccgaatcagagcgatgtcgacaatgatctggttggggactcctgtgatacaaaccaagacagtgacggcgacgggcaccaagacagtacagataactgtcccaccgtgataaactccgctcagctagatactgacaaagacggcatcggcgacgagtgcgatgacgacgacgataacgacggcattccagacctggtaccccccgggcctgacaactgccggctagtaccaaaccccgcgcaggaggatagcaactccgacggtgtgggggatatctgtgagtccgacttcgaccaagatcaggtcattgatcgtattgacgtttgccccgagaacgccgaagtgacccttacagacttcagggcctaccagaccgtcgtgctggaccccgagggcgacgcacagattgaccccaactgggtggttctgaatcagggtatggagatcgtgcagactatgaacagcgatcccggcctggctgtgggctatacagctttcaatggagtagacttcgagggcacgtttcacgtcaacacacagaccgatgatgactatgcaggtttcatatttggctaccaagacagctcttctttctacgtggtgatgtggaaacaaactgagcaaacctactggcaagcgactcctttcagagccgtcgctgaaccaggcattcagttgaaagccgtgaagtcaaagacagggcccggtgagcacctccgaaactctttgtggcatacgggagatacatccgaccaagtaagactgctctggaaggattccagaaacgtcggctggaaagacaaagtctcatatcggtggtttctgcagcaccgtcctcaggtgggatatatccgggtgagattttacgagggatccgagcttgtggcggacagcggggttaccattgatacaacgatgaggggcgggcggctgggcgttttttgtttcagtcaagagaacattatctggagtaacctgaaatacaggtgcaacgacaccatcccagaggattttcaggagttccaaacccagaattttgaccgttttgacaactag

SEQ ID NO: 5613 - DNA, 300 bp, synthetic construct
  misc_feature 1..300: note = source = /note="Description of Artificial Sequence: Synthetic coding sequence"
  source 1..300: mol_type = other DNA
atggacaacgtacagcctaagattaagcaccgacctttctgtttctctgtcaagggacacgtaaaaatgctcaggctggacattatcaactctcttgttactaccgtgtttatgctgatcgtttccgtgctcgccctcatcccagagacaactaccctgactgtgggtggaggagtcttcgcactggtcacagccgtgtgctgtttggctgatggagccctgatttatcgaaaactgctatttaacccgtcaggtccataccagaaaaagccggttcacgaaaagaaagaggtcttatag

SEQ ID NO: 5614 - DNA, 408 bp, synthetic construct
  misc_feature 1..408: note = source = /note="Description of Artificial Sequence: Synthetic coding sequence"
  source 1..408: mol_type = other DNA
atgtccccacatctgactgcactgctgggtttggttctgtgcctggcccagaccatccacacccaagaaggagcactcccacgccctagcattagtgcagagcccggtactgtgatatcacccgggagtcacgtgacctttatgtgtcgggggcccgtgggcgtgcagacattccgactcgagagggaagacagagccaaatataaagactcatataatgtgttcaggcttggtccctctgaaagcgaagcccgctttcacatcgattctgtctctgaggggaatgcagggttgtatcgttgtctgtattacaagcctcctggatggagtgagcactcggacttcctggagctcttagtcaagggcacagtgccagggaccgaggccagcggattcgacgctccctag

SEQ ID NO: 5615 - DNA, 231 bp, synthetic construct
  misc_feature 1..231: note = source = /note="Description of Artificial Sequence: Synthetic coding sequence"
  source 1..231: mol_type = other DNA
atgctgccatgccttgcactgctccttcttatggagctgagtgtctgcacagtggcaggagatgggggcgaggaacaaactctctccacagaagccgaaacatgggagggtgcaggtccttctatccagctgcagttgcaggaggtgaagacggggaaggctagccagtttttcgggcttatgggcaaaagagtaggcggacgagaggacgaagcccaaggtagtgagtag

SEQ ID NO: 5616 - DNA, 684 bp, synthetic construct
  misc_feature 1..684: note = source = /note="Description of Artificial Sequence: Synthetic coding sequence"
  source 1..684: mol_type = other DNA
atgcgcggtcagggacgtaaagaatctctgtctgactctcgcgatttggacggatcgtatgatcagctgaccgactccgttgatgatgaattcgagctctccacagtgtgccacaggcccgaggggctagagcagcttcaagaacagaccaagttcactagaaaggaactgcaggtcctgtatcgtggctttaagaatcctggggccctttcctttcaggagtgcccaagcggaatcgtcaacgaagaaaatttcaagcagatttactctcagttttttcctcagggcgactctagtacttatgcaaccttcctgttcaacgctttcgatactaaccacgatggttcagtttcctttgaggactttgtcgctggcctgtcggtcatcctgcgggggaccgttgacgacagacttaattgggccttcaacctctatgacctgaacaaggacggatgcattaccaaagaagaaatgcttgatattatgaagtccatttacgatatgatgggaaaatacacataccctgccctgagagaggaggctccacgagagcatgtcgaatcgttcttccaaaagatggataggaataaagacggcgtcgtgacgatcgaagagttcatagaatcttgccagaaagacgagaacatcatgagaagcatgcagctctttgataacgttatatag

SEQ ID NO: 5617 - DNA, 876 bp, synthetic construct
  misc_feature 1..876: note = source = /note="Description of Artificial Sequence: Synthetic coding sequence"
  source 1..876: mol_type = other DNA
atgatgagcgctaccggacctggccgcaaaatgggcagtaggggtcagggcctgctgcttgcttactgtcttctcttggcttttgcatccggcttggtactttcgcgggtgccgcacgtgcagggcgaacaacaggagtgggaagggacagaagagctgccatcgccccccgaccatgccgaacgagccgaggaacagcatgaaaaatataggccaagtcaggaccagggattaccagcctctcggtgcctgcgctgctgcgacccaggcacatctatgtaccccgctaccgccgtaccccagattaacatcacgattctaaagggggagaaaggtgacaggggagacagaggactccagggaaaatatgggaagacaggatctgccggagccagaggccatacaggtccaaagggacaaaaagggtctatgggagcccctggtgagagatgcaaatcccactatgccgccttctcagtgggcaggaagaaaccaatgcactccaaccactattatcagacagtgatattcgacactgaattcgttaacttgtacgaccattttaatatgttcaccggtaaattctattgttacgtgcctggcctttactttttcagtctgaatgttcacacctggaaccagaaggagacctacttgcatatcatgaagaatgaagaggaggtggtgatcctgttcgcacaggtgggcgatcgatctattatgcagagccagtctttgatgctggaactgagggaacaggaccaggtgtgggtgagactttacaagggagagcgcgagaacgcaatcttctccgaagaactggatacctatatcacattctctggctacttagtgaagcatgcaacggagccttag

SEQ ID NO: 5618 - DNA, 213 bp, synthetic construct
  misc_feature 1..213: note = source = /note="Description of Artificial Sequence: Synthetic coding sequence"
  source 1..213: mol_type = other DNA
atggaacgtggggctggagccaaactcctgcctctgctgctcctattgcgagccaccggctttacatgcgcccagacagacggtcgaaatggctatacagccgtcatcgaggtgacctccggcgggccctggggtgactgggcctggcctgagatgtgcccggacggtttctttgctagcggtttcagcctaaaactcgggaggatggagtag

SEQ ID NO: 5619 - DNA, 402 bp, synthetic construct
  misc_feature 1..402: note = source = /note="Description of Artificial Sequence: Synthetic coding sequence"
  source 1..402: mol_type = other DNA
atgggttcatcgggattgctgtccctgttagtactatttgttctcctggccaacgttcaggggcctgggctcactgattggctattcccgcggagatgtcctaagattcgtgaagaatgtgagttccaagaacgagatgtgtgcactaaagacaggcaatgtcaagataataagaaatgttgcgtgtttagctgtggcaaaaagtgtttggacctaaagcaggatgtctgtgagatgccaaaggagacaggcccatgtctggcctattttttacactggtggtacgataagaaggacaatacttgcagcatgttcgtgtacgggggttgccagggaaacaacaataatttccagagcaaggcaaattgcctgaatacatgcaagaataagagattcccctag

SEQ ID NO: 5620 - DNA, 771 bp, synthetic construct
  misc_feature 1..771: note = source = /note="Description of Artificial Sequence: Synthetic coding sequence"
  source 1..771: mol_type = other DNA
atgttccagactggcggccttattgtcttctacggcctgttagcccaaactatggcccagtttggcggactccctgttcctctggaccaaacactccccctgaacgtgaaccccgcactcccacttagtcccactggtcttgccgggagtctgaccaatgctctttctaatggacttctgagcggcggcctgttgggcattctggaaaatctccccctcctggatatcctaaagcctggtggaggcacaagcgggggactcctgggaggcctgttagggaaagtgacttccgtgattccgggactgaataatattattgatattaaggtgacggatccgcagctactggagttgggactggtgcaaagccctgacggacaccgtctgtatgttacaattcctctgggcattaagctgcaggtgaatacaccattggtaggcgcgtccctgctgcggctggcggtcaagcttgacatcactgccgagatcctcgcagtgagggacaaacaggagcgtattcatctggtcttgggagattgtacccacagcccggggtcacttcagattagtttgctggatggcctgggacctcttcccattcagggactgttggacagcttgactggcatacttaataaggtgctccctgaactggtgcaggggaatgtgtgtccactggtcaatgaagttctcaggggacttgatattaccttggtgcacgacatagtgaacatgcttatccacgggttacagttcgttattaaagtctag

SEQ ID NO: 5621 - DNA, 1386 bp, synthetic construct
  misc_feature 1..1386: note = source = /note="Description of Artificial Sequence: Synthetic coding sequence"
  source 1..1386: mol_type = other DNA
atgagcctagatatccaaagtttggatatccagtgcgaggagctgtccgatgcccggtgggccgaattgctgcctctattgcagcagtgtcaagttgtccgattggatgactgcgggctaacagaggcccgatgcaaggacatcagctcggccctaagagtgaaccctgccttggctgaactgaatctcagaagcaatgaactgggagatgtgggtgtgcactgtgtgctgcaaggtctccagactcccagctgtaaaattcagaaactgagcttacaaaactgctgcctgacaggagcaggatgcggtgtcctctctagtacactcagaacactccctactttgcaggagctccatctgagcgataatctactgggagacgcaggactgcagctcctctgcgaaggtctattagatcctcagtgtagactggagaaattgcaactggagtactgctccctctcagcagcaagttgcgagcctctggcctcggtcctgcgggccaagcccgacttcaaggagcttaccgtgtctaataacgatattaatgaagcgggagtgcgggtactgtgccaaggcctaaaggatagcccatgtcagcttgaagccctgaagctggagagttgtggtgtaaccagtgacaattgccgcgatttatgcggcatagtcgccagcaaggcaagcctccgggaactcgctttgggaagcaacaagctgggtgacgtcgggatggccgagctctgtccagggctcctccacccctcttctagactgagaacgctgtggatttgggagtgtggcataaccgctaagggttgcggtgatctatgtagggtgctcagggctaaagagtccctaaaggagctgagcttggccggcaatgagctgggggatgaaggcgcccgcctcctgtgcgaaacactcctggaacccggctgccagctggagtccctctgggtgaagtcttgcagctttactgccgcctgctgctctcattttagctccgttctggcccagaatagattcctattagagctccagatttccaacaatagactggaggatgctggtgtgcgggaactgtgccagggactgggacaaccaggttctgtgctgcgggtgctgtggctggctgactgtgatgtgagtgacagcagttgttccagtctggctgccaccttgctcgcgaaccatagcctgcgggaactggatctgtccaataactgcttaggcgacgcaggcatcctgcagctggtggagagtgtgcggcagcccggctgcttactggaacagttagtactttacgacatttactggagtgaggagatggaggatcgcctgcaggccttggaaaaagataaaccttcgctgagagtaatatcatag

SEQ ID NO: 5622 - DNA, 534 bp, synthetic construct
  misc_feature 1..534: note = source = /note="Description of Artificial Sequence: Synthetic coding sequence"
  source 1..534: mol_type = other DNA
atgcgactgttgatactgacttgcctggtcgcagtggcgctggcacgcccgaagctgcccttacgctatccggagcgtctgcagaacccttccgaatccagcgaacctatccctctggagtcacgcgaggagtacatgaacggcatgaatcgccagaggaatatattgagggaaaagcagactgacgagattaaaaactgcgttgtcgccgaacccgaaaagatggaatctagtatatccagtagcagtgaggagatgagcctgtctaagtgcgcggaacagttttgtcgcctgaatgagtacaaccagctccagttgcagaagatgagcaagcaagagcaaatccgaaggatgaacgaaaattcccatgtccaagtaccattccagcagttgaaccagctggcagcatatccctacgccgtttggtactatccccagattatgcagtatgtgcctttcccacccttttccgacatcagtaatcctactgcccacgaaaactatgagaaaaacaacgtcatgttacagtggtag

SEQ ID NO: 5623 - DNA, 3054 bp, synthetic construct
  misc_feature 1..3054: note = source = /note="Description of Artificial Sequence: Synthetic coding sequence"
  source 1..3054: mol_type = other DNA
atggatcttattagaggcgtgctattacgcctgctgctcctagcctcctcgctggggcctggggctgtcagcttgagggctgctatccgcaaaccaggcaaagtcggcccgccgctcgacatcaagttaggagcattgaactgtacagctttcagcatacagtggaaaatgcctcgacatccaggaagtcccatactgggttacacagtattctattcggaagtaggggctgacaagtcccttcaggagcagctacactccgtccccctgtctcgcgacatccccacgacagaggaagtgataggcgacctgaaacccgggacagaatacagggtcagtatcgcagcatattcacaggctggtaaaggacgcctcagcagccctaggcacgttaccacattgagccaggactcttgtttgccaccagccgccccccaacagccgcatgtgattgtcgtcagcgatagcgaggtcgcactatcctggaaacctggtgcctctgagggctctgcacctatccaatactacagcgtagagttcatacgaccagacttcgacaaaaagtggacatccattcacgagaggattcagatggattccatggtgatcaagggtctggacccggacacaaattaccagttcgcagtcagggctatgaacagtcacggaccttctccccgttcctggccttctgatataatcaggacgctttgcccagaggaggccggttccggccgctacggccctcgatatattactgacatgggtgcaggagaggatgatgaaggtttcgaggatgacttggacctggatatttcctttgaggaggtgaagccactgccagcaactaaaggtgggaacaagaaatttctcgtagagtctaagaaaatgtccatctcgaatcctaagacgattagccgcttgatcccccccacatctgcatccctcccagtcactactgtggcacctcaaccaatccctattcagaggaagggcaagaacggcgttgccataatgtctaggctctttgatatgccttgtgatgagacgttgtgcagtgccgacagtttttgcgtgaatgattatacctggggaggatcaaggtgccagtgtactctgggtaagggcggagaatcgtgctctgaagatatagttattcagtatcctcagttttttggtcactcttacgttactttcgagcccttgaaaaactcttatcaagcctttcagatcacccttgagttcagggcagaggctgaagatgggctgttgctgtattgtggtgagaatgaacatggccggggagacttcatgagtcttgccatcataaggcggagtctgcagtttcgctttaattgtgggacaggggtcgcgattatagtctctgaaacaaaaatcaagctggggggctggcacactgtgatgctctaccgcgatggcctcaacggcctacttcagttgaataacggtactcctgtcacaggtcaatcccaaggtcaatatagcaagattactttcagaacccccctgtatctcggcggcgcccccagcgcctactggcttgtgcgagctactggaacaaaccgtgggtttcagggttgcgttcaatcattagcagtcaatgggcgtaggattgatatgcggccttggcccttagggaaagccctcagcggagccgacgtcggcgagtgtagctccggcatctgcgacgaagcatcctgcattcacgggggcacttgcaccgctatcaaggcggatagctatatttgcctctgtccccttggatttaagggccgtcactgtgaggacgcctttacactcacgatcccacagtttagggaatctctgcgttcatatgctgccacgccttggccattagagcctcagcactatctaagcttcatggagtttgaaattacctttaggccagatagtggggacggcgtgttgctctactcctatgacactggaagcaaggattttctctctatcaatctggccggcggtcacgtagagttcaggttcgactgtggttctggtactggggtgctgcggagcgaggacccattgaccctcgggaactggcacgaactgcgcgtgagcaggacagcaaagaacggtatccttcaggtagataagcagaaaattgttgaagggatggcagaaggtgggtttacccagattaagtgcaatactgatattttcataggcggggttcctaactacgatgatgtcaaaaagaattccggtgtgctgaagcccttcagcggcagtattcagaagatcattctgaacgataggactattcacgttaagcacgatttcacttccggagtgaacgtggagaacgctgcccacccatgcgtgagggccccgtgcgctcacggcggctcatgccgaccgcgaaaagagggctacgactgtgactgtcctttggggtttgaaggactgcactgtcagaaagagtgcggcaactattgcctgaacacaattattgaggccattgagatcccccagttcattgggcgtagctatctgacatatgacaatcccgacatccttaagcgcgtctccggaagtcgcagcaatgtgtttatgcggtttaagacaactgctaaggacggccttctgctctggagaggggactctcctatgcgcccaaattcagattttatcagtttggggctgcgtgatggcgcactagtgtttagctataatttgggctcgggggttgccagcatcatggtcaatggaagctttaatgatgggcgctggcaccgggtcaaagctgtgcgagacgggcagagtgggaaaatcacagttgacgactatggggccagaactgggaaatccccaggcatgatgcgccagttaaacatcaacggcgcactctatgtgggtggaatgaaggaaatcgcactgcacacgaatagacagtatatgagggggcttgtggggtgtatcagtcacttcaccctgtcaaccgactaccacattagcttggtggaggacgcagtggacggcaagaacataaatacttgtggtgctaaatag

SEQ ID NO: 5624 - DNA, 1893 bp, synthetic construct
  misc_feature 1..1893: note = source = /note="Description of Artificial Sequence: Synthetic coding sequence"
  source 1..1893: mol_type = other DNA
atgcaacaagacggtctgggagtagggactaggaatggtagcgggaaaggcagatcagttcacccctcttggccatggtgtgcacctcgaccattacgatattttgggcgggacgctagggcccggagggctcaaacggccgcaatggcgctcctcgcaggaggattgagtaggggtctgggcagccatcctgccgccgctgggagagatgctgttgtttttgtatggctcctcctgtcaacatggtgtaccgcccccgccagagccatccaggtgaccgtctcaaacccgtatcatgtagtgattttgttccagcctgtgacactaccctgcacataccagatgacaagcactcctacccaacccatagtgatctggaagtacaagagcttttgtcgggaccgcattgcagatgctttcagtcccgcatcggtggataatcagttgaatgcccagctggctgccggaaacccaggatataacccctacgtagaatgccaagattcagtgaggactgtgcgagttgtggccacaaagcagggaaacgctgttacactgggagactactaccagggaagacggatcaccattaccggaaatgccgatctcactttcgaccagacggcatggggcgacagcggcgtgtactactgcagtgttgtctcagcccaggatttgcaggggaataacgaggcttacgctgagcttatcgtcctggactggctctttgtggtcgtcgtgtgcctcgccgcatttttgatatttctcctgctggggatatgctggtgtcagtgttgcccacacacatgttgctgctatgtcagatgtccctgttgccccgataaatgttgttgcccagaggccctctacgctgccggcaaagcagccacttccggagtacccagcatttatgcacctagtacctatgctcacctctcacccgcaaaaactccaccacctcctgccatgattcccatgggtcctgcttataacgggtacccaggcgggtatcctggtgacgtcgacagatcttccagcgctggcggccagggaagctacgtgccgttgctccgggatactgattctagcgtggcaagcgaggtgcgatctggataccgaatacaggcctcccagcaggatgattcaatgagggtgctctattatatggagaaggagctggcaaacttcgatccttcaaggcccggtccacctagtgggcgcgtggaaagggcaatgtcagaggtgacgtcactccacgaagacgactggcggtctaggccgagtagaggcccagcactgacccccatacgagacgaggagtggggaggacactcacctagaagccccaggggctgggatcaagagccagctcgggaacaggccggcggagggtggagggcacgtcgaccccgagcccgctctgtcgacgcactcgacgacctcacacctccttcgaccgccgagtctggatcgcgaagccctactagtaatggaggccgctcgcgggcatacatgcctccgcggtcaaggtcacgggatgatctgtacgaccaagacgattctcgggatttccctcggtccagagaccctcattatgatgacttcagaagtagggagcgaccccccgctgatccacgttcccatcaccatagaactagggatcccagggacaacggatcaagatctggcgacctgccctatgacgggagactgctggaagaggcagtgaggaaaaaaggctctgaggagcggcgtaggccacataaggaggaggaggaagaggcctattatccacccgcccctcccccatattccgagactgatagccaggcttcaagggaaagacgattaaagaaaaatctggcattaagtcgagagtctctcgtagtctag

SEQ ID NO: 5625 - DNA, 750 bp, synthetic construct
  misc_feature 1..750: note = source = /note="Description of Artificial Sequence: Synthetic coding sequence"
  source 1..750: mol_type = other DNA
atgctacaactgtggaaattagtgttgctatgcggtgtactgacaggtactagtgagtctttgttggataacctaggcaatgatttaagcaacgtggttgacaagctcgaaccagtgctgcacgaggggctcgaaacagtggacaacaccctgaaagggatcctggagaaactgaaggtggacctgggtgtgctgcagaagtcctccgcttggcagcttgctaagcagaaagcgcaggaagctgagaagcttctgaataacgtgatctctaaactcctgccaaccaacacagacatctttgggcttaaaatcagtaactcgctcattctggatgtcaaggcagaaccaatagacgacggcaaagggctgaacttatcttttccagtgacagccaatgtgacggttgccggaccgataataggccagatcattaacctgaaagcatcccttgaccttcttaccgctgtgaccattgagactgatccacagactcaccagccagtcgccgtgctgggtgagtgtgctagcgatcctactagtatcagcttgagtttgcttgataagcactctcagatcatcaacaaatttgtgaatagcgtgatcaatacattgaagtcgaccgtcagttcgttgctccagaaggagatttgtcccctgatccgtattttcatccactccttggatgtcaatgttattcagcaggtggtggacaacccacagcacaagactcagctccagacactgatctag

SEQ ID NO: 5626 - DNA, 3057 bp, synthetic construct
  misc_feature 1..3057: note = source = /note="Description of Artificial Sequence: Synthetic coding sequence"
  source 1..3057: mol_type = other DNA
atggtctcacacttcatgggatccctgtccgtcctttgtttccttcttctgctgggctttcagttcgtgtgtccccaaccatcaacccagcatcggaaagtgccgcagagaatggccgcagaaggggcacccgaagacgatgggggcgggggcgcgcctggcgtctggggtgcttggggaccgtggagcgcttgctccaggtcctgctccgggggggttatggaacagacccgcccgtgtctcccacgcagctatagacttcggggcgggcagcggcctggagcgcctgccagagccttcgctgatcacgtggtctctgcggtccggactagcgtgccactccatcgctcccgagatgagacgccggctctcgctgggaccgatgccagtagacaaggcccgactgttcttcgcgggtcgagacatccccagccccagggcttggaggttactggcgatcggagatccaggacccgcggaacaataggacctggaaagtatggatacgggaaagcaccctatatactgcccctccagacagataccgcccacacgccacagcgtttgaggagacagaaactcagctctcgccactcacgctcacagggagcctcgtcagctcgacatggatattcaagtcccgctcaccaggtccctcagcacggaccactttatcaatctgattcaggtcctcgttcgggccttcaagctgccgaggcacccatctaccagctgccacttacgcatgaccaggggtatcctgccgcttcgtcgctctttcattcccccgagacctccaacaaccatggcgtcgggacacatggggccacccagtccttttcacaacctgcacgctccacagccatctcgtgcatcggagcctacagacagtacaagttgtgtaatactaacgtgtgccctgagtccagccggtcaattcgtgaggtacagtgcgcctcatacaataacaaacccttcatggggaggttttatgaatgggagccattcgctgaagtgaagggcaaccgaaagtgtgagttaaattgccaggcgatgggatacaggttttatgttcggcaggccgagaaggtcattgatgggaccccatgcgatcaaaacggcacagccatttgcgtctccgggcaatgtaaaagtatcgggtgcgatgattacctcggatctgacaaggtggttgacaaatgcggcgtgtgtgggggggacaatacaggatgtcaggtcgtgtccggcgttttcaaacacgcgctaactagcctgggatatcacagggtggtggaaataccagagggagccaccaagattaacatcaccgagatgtacaagagtaacaattacttagcactcaggtctaggtccggtcgaagcatcatcaatggcaactgggcgatcgaccgcccgggaaaatatgaaggcggagggacgatgtttacttataaacgacccaacgaaatatcttccaccgccggtgagtctttcctggccgaaggacccactaatgaaatacttgacgtctacatgatccaccaacaaccgaatccaggcgttcactatgagtatgtgatcatggggacgaacgccattagccctcaagtaccaccacatcggcgaccaggcgaaccctttaatggccagatggtgaccgaaggcagaagtcaggaggaaggggagcagaaaggtcggaacgaggagaaggaggatcttcggggtgaggcacctgagatgtttacatcagaatccgcccagaccttccccgtgagacatccagaccgcttctctccacatcgcccggataatctggtgcccccggcaccccaacctccgcgccgttctcgcgaccacaattggaaacagctgggaaccaccgagtgctccacaacatgtggcaagggatcacaatatccaatctttcggtgtgtgcacagatccacgcatgaggaagctccagagagctattgcgacagcagcatgaaaccaaccccggaggaggagccgtgcaatatattcccctgtccggccttttgggatattggggagtggagcgagtgcagtaagacttgtgggctggggatgcagcacagacaggtgttatgcaggcaagtgtacgccaacaggtcgctcacagtccagccttatcggtgtcagcatctcgagaaaccagaaacaaccagcacgtgtcaactgaagatttgctcagagtggcagattcgcacagactggacatcctgctctgtgccctgcggggtcgggcaacgcaccagggatgtgaagtgcgtttctaatataggtgacgtcgtcgacgacgaggagtgtaatatgaaactgcgtcctaacgatattgaaaactgtgatatgggcccttgtgccaaatcttggtttttgaccgagtggagcgagcggtgttctgctgaatgtggcgcaggtgtccgcacccggagtgtggtgtgcatgaccaatcatgtttcgtcgcttcctctggagggatgcggcaataatagaccggctgaagcaacaccatgtgataacggcccctgcaccggtaaagtggagtggtttgccggctcatggtcccagtgtagtattgaatgtgggagcgggacccagcagcgcgaggttatttgcgtgcggaagaatgcagacaccttcgaggtcctggacccgagcgaatgcagtttcctggaaaagccccccagccagcagagctgccacctcaaaccgtgcggtgctaagtggtttagcactgaatggtctatgtgcagtaagtcatgccagggggggtttcgtgtccgagaagtgcggtgcttgtccgatgatatgaccctgtcaaacttgtgcgaccctcagctgaagcctgaggagcgcgagtcctgtaatccccaggactgcgtgccagaagtggatgaaaattgcaaggacaagtactataattgtaacgtcgttgtacaagccaggctgtgtgtatacaattactacaaaacagcctgctgtgcatcgtgcaccagggtggccaatcgccaaaccggcttcctgggcagccgatag

SEQ ID NO: 5627 - DNA, 1311 bp, synthetic construct
  misc_feature 1..1311: note = source = /note="Description of Artificial Sequence: Synthetic coding sequence"
  source 1..1311: mol_type = other DNA
atgcagggtactccagggggtggtacgcgccctggcccatccccagttgataggcggaccctgttagtgttttcgttcatcctagctgccgctctgggacaaatgaatttcactggcgaccaggtactgagggtgttagctaaagatgagaaacagctgagcctgctcggcgatctggagggcctgaagccccaaaaggtggacttttggcgcgggccagctaggccatccctcccagtggacatgagagttccgtttagcgagctgaaggacataaaagcctatctggaaagtcatgggctggcctacagcatcatgatcaaagatatccaggttcttctagatgaagagcggcaggccatggcaaagagccggcgccttgaaagatctactaattctttcagttattctagctaccataccttggaggaaatttattcctggattgataacttcgttatggaacactcagatatcgtttccaagatacagattggaaatagcttcgagaaccagagcatccttgtactcaagttctccactgggggatctcggcacccagcaatctggatagataccggcattcacagtcgggagtggattacgcacgctaccggaatttggacagccaataaaatcgtaagcgactacggcaaggacagagtgctcaccgatatcctcaacgctatggacatttttatcgagctagtaaccaatcctgatggtttcgcctttacacacagcatgaatagactctggcgaaaaaataaatcgatcaggcctggtatattctgcatcggggtcgatctgaaccgtaattggaagtccggctttgggggcaatggctccaatagcaatccctgctcggaaacatatcacggtcccagccctcagtcggagccagaggttgcagctatcgtgaattttattactgcacatggcaacttcaaggctctgatatcgattcacagttactcacagatgctgatgtacccctatggaagacttctggagccagtgtctaaccaaagagaactgtacgatttggctaaggatgccgtggaagcactttacaaggtgcacggtatcgagtacatttttgggagtatttccactaccctgtacgtggcatcggggatcactgttgactgggcttacgactccggaataaagtatgcattttcattcgagctcagagataccgggcagtatggtttcctgcttcctgcaactcagattataccgacagcccaggagacctggatggccctcagaacaataatggagcatacccttaatcacccctactag

SEQ ID NO: 5628 - DNA, 492 bp, synthetic construct
  misc_feature 1..492: note = source = /note="Description of Artificial Sequence: Synthetic coding sequence"
  source 1..492: mol_type = other DNA
atgtttcaaggtctgttactgctcctgctgctcagtatgggaggaacatgggcatctaaagaacctcttcggcccagatgccgtcctatcaatgccacactggcagtcgagaaggaagggtgccccgtgtgtataaccgtaaacactactatttgcgctggatactgcccgacgatgacacgggttttgcagggagtattaccggctctcccccaggtcgtgtgtaactatagagacgtccgattcgaatccatccgcttacccggatgcccacggggcgtcaatcccgtggtctcttacgccgtggcgctgtcttgccagtgcgccttgtgcaggcgttcaaccactgactgcggtggcccaaaagatcaccctctaacctgcgacgacccccgttttcaggactcttccagctccaaggccccgccaccatcactcccaagcccctcacgcttaccgggcccgtccgacacccccatcctgcctcagtag

SEQ ID NO: 5629 - DNA, 213 bp, synthetic construct
  misc_feature 1..213: note = source = /note="Description of Artificial Sequence: Synthetic coding sequence"
  source 1..213: mol_type = other DNA
atgccgggagccatgaaaatcttcgtgtttattctcgcagctctgattctcctcgctcaaatctttcaggcccggactgccatccatcgtgcgctgatctcgaagaggatggaaggtcattgtgaggctgagtgcctgactttcgaggtgaagattggagggtgcagggcagaactggctccgttctgctgtaagaaccgcaagaaacactag

SEQ ID NO: 5630 - DNA, 1098 bp, synthetic construct
  misc_feature 1..1098: note = source = /note="Description of Artificial Sequence: Synthetic coding sequence"
  source 1..1098: mol_type = other DNA
atgtggctattgttaacaatggcctccctgatctcagtcctggggaccactcacggtttattcggtaaactgcacccaggcagcccagaggtcaccatgaacatcagtcaaatgatcacctactggggctaccccaacgaggagtacgaagtggtgaccgaagacggctacatcctggaagtgaatcgcatcccatacggtaaaaagaacagcggtaatacggacgctggttatgatgtttggctaggcaactccagagggaatacctgggctcgacggaatctgtactacagccccgactctgttgagttttgggctttctctttcgacgagatggccaaatatgaccttccagccactatagactttatagtgaagaagaccggacagaagcagttgcactacgtcggtcattcgcagggtactaccattggttttatagcctttagcaccaacccttcactggccaaaaggatcaagactttctacgctctggcccccgtggccacagtgaagtatactaagtctctgattaataaactaaggtttgtcccacagtcactctttaagttcattttcggcgacaaaatcttttacccacacaatttcttcgaccaatttctggcaacagaggtgtgtagcagggaaatgttaaatctgttgtgcagcaacgccttatttatcatctgcggtttcgacagcaaaaactttaatacatcgcggctagatgtgtacctgtctcacaatccggccggaactagtgtgcagaacatgttccattggacacaggccgtgaaatcaggaaaatttcaggcatacgactgggggtccccagttcagaaccgaatgcattatgaccaaagtcagccaccctattacaacgttaccgctatgaacgttccaatcgctgtatggaacggcggaaaagaccttctggcagatcctcaagacgtcgggttgttgctgcctaagctgccaaatctgatctaccacaaagagattcccttctataatcacttggacttcatatgggcaatggatgccccgcaagaagtgtataatgacatcgtgtcaatgatttccgaagacaagaaatag

SEQ ID NO: 5631 - DNA, 2535 bp, synthetic construct
  misc_feature 1..2535: note = source = /note="Description of Artificial Sequence: Synthetic coding sequence"
  source 1..2535: mol_type = other DNA
atgggtccgggcgcccccttcgcaagggtgggttggccgcttcccttactggtggtcatggcggccggggtggccccggtgtgggcttctcactcaccgcatctcccacggccgcactcaagagttcccccacatccctcttcagagcggcgggccgtttatattggggctctgttcccgatgtctgggggatggcctggtgggcaggcttgccaaccagcggtcgaaatggcactcgaagatgttaacagcagacgtgacattctcccagattatgaactgaaactgatccatcacgatagtaagtgtgaccccgggcaggccactaaatatctgtacgagttattgtacaatgaccccatcaagatcattctcatgcctggctgttcatctgtgagcacactggtggctgaggcagcccgaatgtggaatctgatagtgttgagttatggctcctcttccccggctctgtcaaatagacagaggtttccaaccttcttcagaacacatcctagcgcaacattgcacaatccaactagggtcaagctcttcgagaagtggggctggaagaaaattgcaacgattcaacagactaccgaggtctttacctctactttagacgacctggaagaacgggtgaaggaggcgggcatcgaaataactttcagacagagctttttctcggatccagccgtccctgtaaaaaacttaaagcgacaggatgcccgaattattgtaggactcttctacgagactgaggcaagaaaggtgttttgcgaggtttataaggaaaggcttttcggcaaaaagtatgtgtggttcttaattggatggtatgctgacaactggttcaagatttatgatccatcgattaactgtactgtggacgaaatgactgaggccgtggagggccacattaccacagagatcgtgatgctgaatcctgcgaatactaggagcatcagcaacatgacttctcaggagttcgtcgagaagttgactaaacggctgaaacggcacccggaagagactgggggctttcaggaagctcctctggcttacgatgccatctgggccctggcgttggctctgaataaaacttccggtgggggtgggcggagcggagtgcggctcgaggactttaattacaacaaccagactataacggaccagatttatagggcgatgaactcctcatcctttgagggcgtaagtgggcacgtagtgtttgatgccagtgggtcacgtatggcctggacccttatcgagcagctgcaggggggctcatacaaaaagataggttattacgatagcaccaaggatgatctatcgtggtcaaagactgacaagtggattgggggcagtcctcctgctgatcaaacattggtgatcaaaactttcagatttttatcgcagaagctttttataagcgtttccgtactcagctctctggggatcgtgctggctgtggtgtgcctgtccttcaacatttataattcccacgttagatatattcagaacagccagcctaatctgaacaatctcactgccgtcggctgttccttagccctcgccgctgttttccctctgggactggacggctatcacattggacgaaatcagttcccattcgtgtgtcaagcccgattgtggctccttggtcttgggttctctctgggatacggtagcatgttcacaaaaatatggtgggtacacacagtgttcacaaagaaggaagagaagaaggagtggcgcaaaaccctggaaccatggaagctgtacgcaacggtcggtctgctggtcgggatggacgtgttaaccctggccatctggcagatagtggatccactgcacaggacgattgagacttttgccaaagaggagcccaaggaggatatcgatgtctccatccttccccaactcgagcactgctccagccgaaaaatgaatacctggttgggaatattctacgggtacaagggactcctgctgctcctgggaatcttcctcgcgtatgaaaccaagagcgtgtccacagaaaaaatcaatgaccacagagcagtcggtatggcgatatacaacgtagcggttctctgcctcatcacagcgcctgtcactatgatcctgtcatcgcaacaggacgcagctttcgcttttgcctcattggcaatagttttctcctcctacatcactctggtggtcctgtttgttccgaaaatgcgacggctgattacgagaggggagtggcagagcgaggcccaggacacgatgaaaacaggcagctccactaataacaacgaggaggagaagtcacgactgttggagaaagagaatcgagagcttgagaagatcattgccgaaaaggaggagcgtgtatctgaactgcgccatcagctgcaatctcgtcagcagctgagatctcgaagacatccaccaactccacccgagcctagcggtgggctgccgcgaggacccccagagcctccagatcgcctgtcgtgcgatgggtccagagtgcatcttctatacaagtag

SEQ ID NO: 5632 - DNA, 1020 bp, synthetic construct
  misc_feature 1..1020: note = source = /note="Description of Artificial Sequence: Synthetic coding sequence"
  source 1..1020: mol_type = other DNA
atggtctccaagtcccgctggaaactgctggcaatgctcgccttggtcttggttgtgatggtctggtattcaatttcacgggaggatcgctacatcgagctgttttactttccaatcccggagaagaaagaaccttgccttcaaggagaggccgaatcgaaggcgagcaagctgttcggtaagttatcgccactgtgctcgtactctcgggaccaacccattttcctcagactggaggattacttttgggtgaagaccccatctgcttatgagctaccgtacggaacgaaaggcagcgaggatctgttattaagagtcctcgccattacttcatcatcgattccaaagaatatccagtctcttcggtgtcggaggtgtgtagtcgtggggaacgggcatcgactgcgcaacagcagtcttggggacgcgatcaacaaatacgatgtggtgatccgtcttaacaatgctcccgttgcggggtatgagggcgacgtgggatccaagactacgatgagactgttttaccccgagtccgcacactttgaccccaaggtcgaaaacaacccagacaccctcctcgtgctcgtggcttttaaagccatggacttccattggatcgaaactattttgagcgacaaaaaacgcgtaagaaagggattttggaagcagcccccgctgatctgggacgtgaaccctaaacagattaggatcctgaacccttttttcatggagattgcagccgacaaactgttaagtctccccatgcagcagccaaggaagattaaacagaaacccactacaggactacttgcgattacccttgccttgcatctgtgcgatttagttcatatcgcagggtttgggtaccctgatgcctacaacaaaaagcagaccatccactattacgaacagatcacactgaaatcaatggctggaagtgggcacaatgtcagccaggaagccctggctatcaaacggatgctggagatgggcgctatcaaaaatcttacttctttctag

SEQ ID NO: 5633 - DNA, 1386 bp, synthetic construct
  misc_feature 1..1386: note = source = /note="Description of Artificial Sequence: Synthetic coding sequence"
  source 1..1386: mol_type = other DNA
atgtccctggatatccagtccctggacatccaatgtgaggagctgagcgacgctcgctgggcagagctgctgcccttgctccagcagtgtcaggttgtgaggttggatgattgcgggctgaccgaggctcgatgtaaggatatctcttcagcactgagggtgaatcccgcactcgctgagcttaacttacggagcaacgagctaggcgatgttggtgtgcactgcgtgcttcagggactgcagacaccctcttgcaagatacagaaactgagtctgcaaaattgttgtctgaccggagccgggtgcggtgttctgtcgagcacacttagaacactgcctacactccaagagctacatttgagcgacaacctactaggagatgcaggtctccagttactctgcgagggcttattagaccctcagtgccgtcttgagaaactacagctggagtattgctccctgtcagctgcaagttgtgaacctttagcctccgtgctcagagccaaacctgatttcaaagagttgaccgtttccaataatgacatcaacgaagctggtgtgagagtactgtgccagggcctaaaggactccccctgtcaactggaggcactaaagcttgagtcatgtggggtcacttccgataattgtagagacctctgcggaatcgtcgcctctaaagcctccctcagagaattagccctcggttctaataagctgggagacgtgggcatggctgagctgtgtcctgggctcctgcatcctagttcacggctgcgaactctgtggatctgggagtgtggtataacggctaagggatgcggcgatctatgtagggttttacgcgccaaagagtccctcaaagagctgtcgctggcaggtaacgagctcggcgacgaaggtgcccggctactctgcgaaactctgctcgagccaggatgtcaactggagtcactttgggtcaaaagctgcagctttaccgctgcgtgctgttcccacttttctagcgtactggcgcaaaataggtttctcttagagctgcagatctcaaataatcgacttgaggatgccggcgtccgagagttatgccagggcctcggccaaccaggctccgtcctgcgcgtcctgtggctcgctgactgcgatgtgagcgattcctcatgctcctcgctcgccgcaactcttctagctaaccactcactgcgggaactggatctaagcaataactgtttgggggacgccgggatcttacagctggtggagtcggtgcgccagcccggatgcctcctcgaacagcttgtgctctatgacatctattggagcgaggagatggaagatcgcttgcaggcactcgaaaaagacaagccaagcttacgtgtgatctcatag

SEQ ID NO: 5634 - DNA, 1695 bp, synthetic construct
  misc_feature 1..1695: note = source = /note="Description of Artificial Sequence: Synthetic coding sequence"
  source 1..1695: mol_type = other DNA
atggcacctaaaaagttatcctgccttagaagcctgttattgccattaagcttgacgcttctgttaccacaggctgatacacgcagttttgtcgtggatcgcggacacgatagattcctgctggatggggcaccatttagatacgtgagtggatcgcttcattactttcgggtccctcgagtcctgtgggcagacaggcttcttaagatgcgctggagtggcttaaatgctattcaattctatgtgccgtggaattatcacgaacctcagccgggggtgtacaacttcaacggaagccgcgaccttatcgccttccttaatgaagcagccttggctaatctcttggtgatccttaggccaggaccatatatatgtgcagagtgggaaatgggcggattgccgagttggcttctccgcaaaccagagatacacttacgcacgagcgatcctgccgacaatatgactaagatatttactctcctgaggaagtacgaaccccacggtccccttgttaactctgagtattacactggttggctagactattggggacagaaccacagcaccaggtctgtaagtgccgtgacaaaaggcttggaaaatatgctcaaactcggagcttccgttaatatgtacatgttccacggggggacaaacttcgggtactggaatggcgcagataagaaaggacgcttcttacctatcacaactagctacgactacgatgctccaatttctgaggctggcgatccaacacctaaacttttcgcactgcgtgatgtgatctcgaagttccaggaagtgcctttgggacctttgcctcccccaagtcctaaaatgatgctcgggccagtgacgctgcatttggtagggcacctcctggcatttctcgacttgctgtgcccacgcggtccaatccacagtatcctgccgatgaccttcgaagcagtgaagcaggatcacggatttatgctgtatcgcacatacatgacccataccattttcgagcctacccccttttgggttcccaataatggtgtacacgaccgagcctatgtcatggtggatggcgttttccaaggcgttgtcgagagaaacatgagggacaagctgtttctgaccggtaaactcggatctaaattagatatacttgtagagaacatgggccgcctttccttcggtagcaacagctcagacttcaaggggttgttgaagcctcctatcctgggacagaccatcttgacccaatggatgatgttcccccttaagatcgataacctggttaagtggtggtttccactgcagcttcctaagtggccctacccacaggcccccagcggccctacattctattccaagaccttccctatcctcggatccgtcggggacacattcctgtatcttcccgggtggacgaaaggacaggtgtggattaacggctttaatctgggccgctattggaccaagcagggcccccagcagacactctatgttccccgcttcctgctgtttcctagaggcgctttgaacaaaattactctgctggagctggaagacgttcctctacaaccccaggtgcagttcctggataagccaatacttaacagcacaagcactctgcacaggacccacattaactccctgtccgcagacacgttgtcagcttccgaaccaatggaactgtccgggcactag

SEQ ID NO: 5635 - DNA, 1317 bp, synthetic construct
  misc_feature 1..1317: note = source = /note="Description of Artificial Sequence: Synthetic coding sequence"
  source 1..1317: mol_type = other DNA
atgatgtacgcacctgtagagttctcagaagcggaatttagtcgggcggagtatcagagaaagcagcagttttgggatagtgtgcgcctggctctctttacattggcgatcgttgctatcatcgggatcgctattggcatcgttactcacttcgtagtcgaggatgacaaatctttctactacctcgctagctttaaggttactaatattaaatacaaagagaactacggcatcagatccagtagagaatttattgaaagaagccatcagatcgaaaggatgatgagcaggatatttcgccactcatccgtaggaggacgctttatcaagagccacgttataaagctctcccctgacgagcagggcgtggacattctgatcgtcctaattttcagatatcctagcactgactccgcggaacaaataaagaagaagatcgagaaggcattataccagtctctcaaaactaaacagctgtcactgactatcaacaaaccttcattccgactgacccctatcgactctaaaaaaatgaggaacttgctaaatagtcgatgcggaatcagaatgacttctagcaacatgccgctcccagcatcaagctccacacagcggattgttcaggggagagagaccgcaatggagggcgaatggccgtggcaggcatctctgcaattgatcggttcaggccaccagtgtggcgcctcattaatctctaatacctggctgctgacagcagctcactgtttttggaaaaacaaggaccccacccagtggatcgccacttttggagcgacgatcactccgcccgctgtcaagagaaatgttcggaaaattattcttcacgaaaattaccacagggaaaccaatgaaaacgacatcgcccttgtccagctctccaccggcgtggagttttcgaatatcgttcagagggtgtgcctacccgactcgtccattaagctacccccaaagacaagcgtttttgtgaccggcttcgggtctattgtcgatgatgggccaatccaaaatacgctgcggcaagcccgcgttgaaactatttctactgacgtctgcaaccggaaagacgtctacgatgggctaatcactcccggcatgctgtgcgctggttttatggaggggaaaatcgatgcttgtaagggtgactccgggggtcccctggtgtatgataatcacgatatatggtacattgttggcattgtatcctggggccaaagttgcgctttacctaaaaagcctggggtgtacacacgtgtgaccaaatatcgggactggatcgcgagcaagactggaatgtag

SEQ ID NO: 5636 - DNA, 4392 bp, synthetic construct
  misc_feature 1..4392: note = source = /note="Description of Artificial Sequence: Synthetic coding sequence"
  source 1..4392: mol_type = other DNA
atggaaccccgcctgttctgttggactacgctatttctgctcgcaggttggtgtctccctgggctcccttgcccatccaggtgtctgtgttttaaatcgacggtgcgatgtatgcatcttatgctggatcatattccacaggttccacagcagacaacggttctggatttgcggttcaaccgcatacgggaaatccccgggagcgccttcaagaagcttaagaacttgaatacattgttgcttaataataaccacatccggaagatctcacgaaacgcctttgaaggcctggaaaatttgctttacctgtacctgtataagaacgaaattcatgctttagacaaacagacgttcaaggggctaatatcattagagcacttgtatatacactttaaccagctcgaaatgctccagccggagacattcggtgatctgctcagactcgagagactgttcctgcacaataacaagctgagcaaaatccctgctggttctttcagcaacttggactccctgaaacgactgcgactcgattcaaacgccctcgtctgcgattgcgacttaatgtggttaggagagttactccagggtttcgcccagcacggacatacgcaagctgccgccacctgcgagtacccgcgccggctgcatggacgcgctgtggcatctgtaactgtcgaagagtttaattgccagtctcctagaatcacgtttgagcctcaggacgtggaagtgccatcgggcaatacagtgtacttcacatgtagggcggaagggaacccgaagccagagatcatatggatccataacaaccactccctcgatctagaggacgatactagattgaacgtctttgatgacggaacccttatgatccggaatacgagggaatcagatcaaggggtgtaccagtgcatggctagaaattctgctggcgaggctaagactcaaagtgcgatgctgaggtattcatcactgcccgctaaaccatcctttgtcattcaaccccaggacacagaagtgttaattgggacaagcactaccttagagtgtatggctacaggccaccctcacccgttaattacctggacccgggacaatggcttagaactcgacggatcccgccacgttgccactagcagcggcttgtatctccaaaatattactcagagggaccatgggagattcacgtgccacgccaataactcgcacggcacagttcaggctgcggcaaacattattgttcaggctcctccacagttcaccgtgacccctaaagaccaggttgtgctggaagaacacgcagtggaatggctatgtgaggctgacggcaacccaccccctgtaatagtgtggaccaagacaggaggccagctaccagtggagggccagcacacagtcctgagtagtgggacactccggatagaccgggcggctcagcatgatcaggggcagtatgagtgccaagccgtgagcagcctgggcgtcaaaaaggtgagcgttcagctgaccgtgaaacccaaagctctggcggtctttacgcagttgccgcaggacacaagcgtcgaggtaggaaagaacattaatataagctgccacgcccaaggtgaaccacagccaatcattacatggaacaaggaaggagtgcagattaccgaatctggtaagttccatgttgatgatgagggcacgctgactatttacgacgcaggatttccagatcaggggcgttatgagtgtgtggcgcgcaacagctttgggctggccgtgaccaatatgttcctaacagtaaccgctatacagggcaggcaggccggcgacgactttgttgaatccagcatcctagacgccgttcaaagggtagactccgcaattaattctactaggcgacatctcttcagccagaaacctcacacaagcagcgatctgctggctcagtttcactacccccgcgatccgctcattgtggaaatggctcgggcaggcgaaattttcgaacacaccctgcagcttattcgcgaacgtgtgaagcagggcctgacagtggacctggagggaaaggaatttaggtacaatgacctggtgtcccctcggtccctcagtctgatagccaacctcagtggttgtacggcccgaagaccattgcctaactgctccaaccggtgtttccacgcaaagtatagagcacacgacgggacctgcaataatctccagcaaccgacatggggggctgcattgaccgctttcgctcgccttttgcagccagcttacagggatggaattcgcgcccctcgaggcctgggcctgcccgtgggcagtaggcagccactacctccccctcgcctggtcgcaactgtttgggcccgggcagccgctgtgactcctgaccatagttacaccaggatgcttatgcattgggggtggtttctggaacacgatctcgatcacacagttccagccctctccacagcccgtttcagtgacggaagaccttgtagttccgtctgcacgaacgaccctccatgctttcctatgaacacccgtcacgctgatccacgcggaacacacgcaccctgcatgttgttcgccaggtcctcaccagcgtgtgcctcaggcagaccctccgcaaccgtggattccgtctacgcccgcgagcagataaatcagcagaccgcatatatcgacggcagcaatgtctacggcagttccgaacgcgaaagccaggctctccgcgatccaagcgtgccgcgtggcctgctgaaaacaggctttccctggcccccttcagggaaaccactccttccgttctctacagggcctcccacagaatgcgcccgtcaggagcaagagtccccttgctttctcgctggtgaccatcgggcgaacgagcacctcgccttggccgctatgcatacactttggttccgagaacataatcggatggcaacggaattgagcgcccttaacccccactgggaaggcaacacagtctaccaagaggcacggaaaattgtaggcgcagaactccagcacatcacatacagtcattggctgcccaaggtactgggagacccaggcacacggatgttacgggggtacagggggtataaccccaacgtcaacgctggcattatcaattcatttgcaacagctgcgttccgctttggccatacgctcattaatccgattctctatagactgaacgccaccttaggagaaattagtgagggacacctgccattccacaaagctctgttctctccatctcgaatcattaaagaaggtgggattgacccagtacttcggggactatttggagtggcggccaagtggagagctccatcatacctcctaagcccggagcttacgcagcggctcttttcagccgcctattcggcagcagtcgatagcgccgccaccatcatccaacgaggtcgcgaccacggcatcccaccctacgtagatttccgcgttttttgtaacctgacctcagtcaagaatttcgaggatctgcagaatgagatcaaggattccgaaatacggcagaagctgaggaagctgtacggctcccccggggacattgatctttggccagctctgatggtcgaggacttgatcccgggtactcgagtgggccctaccctgatgtgtctgttcgtgacacagttccagaggctgcgagatggagatcggttctggtacgagaaccccggcgtgttcaccccggcccagttaacgcagctgaaacaggcatctctctcaagggtgctgtgtgacaacggcgatagcatacaacaggtgcaggccgatgtgtttgtgaaagccgaataccctcaggactacctcaactgcagcgaaatacccaaggtggatctgcgggtgtggcaagactgttgtgccgactgtcgtagccgcggccagttcagggcggtcacacaggagtcacaaaaaaagcgctctgcccagtactcataccctgtggataaggacatggaactgagccacctgaggtcgcgccagcaggacaaaatttatgtgggggaagacgctagaaacgtcacagtccttgccaaaacgaagttctcccaggacttttccacatttgcggctgagatccaggagaccatcactgccctccgagagcagataaataaactagaagctagactgagacaggccgggtgcactgatgtgagaggggtgcctaggaaggctgaggagcgctggatgaaggaagattgtacacactgtatatgcgagagtggtcaggtgacctgcgtcgtcgaaatttgccctccagctccctgccccagtcccgagctcgtgaaggggacatgctgtcccgtctgtcgggacagaggcatgccctcagatagccccgagaaacgctag

SEQ ID NO: 5637 - DNA, 1206 bp, synthetic construct
  misc_feature 1..1206: note = source = /note="Description of Artificial Sequence: Synthetic coding sequence"
  source 1..1206: mol_type = other DNA
atgggccttaaggctctctgcctcgggctgctctgtgtcctgttcgtcagccacttttacacccctatgccggataacattgaggagagttggaaaattatggctctggatgccatcgccaagacttgcacattcactgccatgtgcttcgagaatatgagaattatgagatacgaggagtttatatcgatgatattccgcctggactacacccagccactgtcagacgagtacattacagtcacagatacaaccttcgtcgatattcccgtgcggctttacctgcccaagcgtaaatctgagactcgccgtcgagccgtcatatattttcacggagggggcttctgtttcgggtcttccaagcaacgcgcattcgattttctcaatcggtggacagccaataccctggatgctgtagtggtgggtgtggattaccggcttgctccgcagcatcactttcctgctcagttcgaggacgggcttgccgccgttaaattcttcttgctggaaaagattctgaccaaatacggcgtcgacccaacccggatctgtatagccggagattccagtggtggcaatctcgccaccgctgtcacccagcaagtgcagaacgacgctgaaatcaagcacaagattaaaatgcaagtcctactgtacccgggtctgcagatcaccgatagttacctgccttcccaccgagaaaacgaacacggcatcgtactcacaagagacgtcgctataaagttggtatccttgtactttacaaaagatgaggccctgccatgggccatgcgcagaaatcagcatatgccactggaaagtcggcatttgtttaaattcgtcaactggagtatccttctgcccgagaaataccgtaaagactacgtatatactgagccaattctgggaggcctgagttattcactgcctggccttacagatagcagagccttgcctctcctggcaaatgactcccagctgcaaaatctaccgcttacttatatcctgacatgtcagcacgatcttctcagagacgacggcctcatgtatgttaccaggctgcgcaatgtgggcgtgcaagtggtccatgagcatatcgaagatggcattcatggcgccttatcctttatgacatcccccttttatctgaggctagggctgcgtatacgtgacatgtatgttagctggctcgataagaatctgtag

SEQ ID NO: 5638 - DNA, 264 bp, synthetic construct
  misc_feature 1..264: note = source = /note="Description of Artificial Sequence: Synthetic coding sequence"
  source 1..264: mol_type = other DNA
atggtgtccctgatgaagctctggattccgatgcttatgacttttttctgtacggtgctcctcagcgtccttggtgagatgcgaaagaagcggtatgacaggaaggaactgctcctcgaggaatgctggggcaaaccaaatgtaaaagagtgcacgaataaatgctccaaggccttccggtgtaaggacaaaaattatacatgttgttggacatattgcggcaacatctgctggattaatgtagaaacttctggggattattag

SEQ ID NO: 5639 - DNA, 813 bp, synthetic construct
  misc_feature 1..813: note = source = /note="Description of Artificial Sequence: Synthetic coding sequence"
  source 1..813: mol_type = other DNA
atgcgtggccagggacgcaaagaatccctgagcgatagtcgggacctggacggaagctacgatcagctcaccggacaccccccgggtcccacaaagaaagcactgaagcagcgctttcttaagttgttaccctgctgtgggcctcaggcacttccgtctgtgtctgagactctcgccgcacccgcttcactacgtcctcatagaccacgcctccttgaccctgactccgtggatgacgagttcgaattgtctactgtttgtcacagacccgaagggctggagcagctccaggagcagactaagttcacccggaaggagctccaggtcctataccggggtttcaagaacgagtgcccatcagggattgttaacgaggagaacttcaagcaaatatattcacagtttttccctcagggtgattcctccacatatgccaccttcttatttaatgcctttgacacaaaccacgacgggagcgtgtccttcgaggatttcgtcgccggtctgagcgttattctcagggggactgtcgacgaccgcttgaactgggccttcaatctgtacgatctgaacaaagacgggtgcatcacaaaggaagagatgctggatatcatgaaatccatatatgacatgatgggaaagtatacttaccctgccctgagggaagaagctccaagggaacacgtagagtcgttctttcaaaagatggacagaaataaagacggcgttgtgaccatcgaggaattcatcgagtcatgtcagaaagatgagaatattatgcgatccatgcagcttttcgacaatgttatctag

SEQ ID NO: 5640 - DNA, 819 bp, synthetic construct
  misc_feature 1..819: note = source = /note="Description of Artificial Sequence: Synthetic coding sequence"
  source 1..819: mol_type = other DNA
atgcacttacgtttgatctcttggctgttcattatacttaacttcatggagtatattggcagccagaacgcctcaaggggaaggcggcagaggcggatgcacccaaacgtgtcccagggatgccagggtgggtgcgccacttgcagcgactacaacggatgtctctcatgcaaaccgagactattcttcgcactagaaagaatcggcatgaaacagatcggtgtgtgcttatcatcatgccccagtggttattacgggacacgatacccagatattaacaagtgcaccaagtgtaaggctgattgtgacacttgctttaacaagaatttctgtacaaaatgtaaatctggcttctatctccacctcggaaagtgtttagacaattgccctgaagggctcgaggcaaataatcacacaatggaatgcgtctccatcgttcattgcgaagtcagcgaatggaacccttggtcaccttgcacaaagaaagggaagacttgcggattcaagaggggcaccgaaaccagggtgagggaaataatccagcacccgagtgccaaaggaaacttgtgcccgcctaccaacgagacacgcaaatgcactgtgcagagaaagaagtgtcagaagggggaaaggggcaagaaaggaagagagagaaagcgcaaaaagcccaacaagggagagagtaaggaggcaattccagattcgaagagcctggaaagttccaaagaaattccggaacagagagaaaacaagcagcagcagaaaaaacgaaaagtgcaggacaaacagaagtcagtgtctgtgagcacagtacactag

SEQ ID NO: 5641 - DNA, 294 bp, synthetic construct
  misc_feature 1..294: note = source = /note="Description of Artificial Sequence: Synthetic coding sequence"
  source 1..294: mol_type = other DNA
atggccaaaagcttcccagtattcagccttctctccttcattcttatacacctcgttctgagctctgtgtccgggccccgacactggtggcctcctcgagggatcatcaaggtgaagtgtccatacgaaaaggtgaacctttcatggtacaacgggactgtcaacccatgccctggtctgtatcagcccatctgcggaacaaacttcatcacttatgataatccatgtattctgtgtgtggagtcgttaaagtctcacggacgtataaggttttatcacgatgggaaatgctag

SEQ ID NO: 5642 - DNA, 726 bp, synthetic construct
  misc_feature 1..726: note = source = /note="Description of Artificial Sequence: Synthetic coding sequence"
  source 1..726: mol_type = other DNA
atgtggacggttcggaccgagggtggacatttcccccttcactctcctacattcagttggcggaatgtggcctttctcctcctcttgtctttagctctggaatggacatccgccatgctgacaaagaaaataaagcataagcccggcctctgtccgaaggaaagactcacttgcaccaccgagctaccagatagttgcaatactgattttgattgcaaggagtaccaaaagtgctgtttcttcgcctgtcagaagaagtgcatggatccctttcaagaaccatgcatgctgcccgttcgccacgggaactgcaaccatgaagcacaaagatggcactttgattttaaaaactatagatgtacacccttcaagtaccgcggctgcgagggcaatgccaacaacttcctcaacgaggacgcatgtcgcactgcctgcatgttgatcgtgaaagacgggcagtgtcccttgtttccctttactgagagaaaggaatgcccaccgagttgtcacagcgacatagactgtccacagacagataagtgctgcgaaagtagatgtggattcgtgtgcgccagggcctggacagttaagaagggcttttgcccaagaaaacctcttttgtgcaccaaaatcgataagcccaaatgtctgcaagatgaagagtgccctcttgtagaaaaatgttgctcccactgtggcctgaagtgcatggatccgcggaggtag

SEQ ID NO: 5643 - DNA, 1827 bp, synthetic construct
  misc_feature 1..1827: note = source = /note="Description of Artificial Sequence: Synthetic coding sequence"
  source 1..1827: mol_type = other DNA
atggcacgagcccgggcgggagccttacttgccctgtgggtcctaggcgcagcagcacatcctcagtgcttggacttccgcccaccttttcgtccaactcagcccctgagactttgtgctcagtatagtgacttcggatgttgtgatgagggtcgcgatgccgagctcacacgacgattttgggctctggcgtcgcgggtggatgccgctgaatgggctgcttgtgccggttatgcaagggacctgctgtgccaagaatgctctccctatgccgctcacctgtacgatgctgaggatccatttactccactgcgcaccgtgcctggtttatgtcaggattattgcctggacatgtggcacaaatgtcgcggactgtttcggcacctctcaacggaccaggaactttgggccttggaaggtaacctcgccagattttgtcgctacctttccctggatgacaccgactattgctttccctacctgctcgttaacaaaaatctgaactctaatctgggacacgtcgtcgccgatgccaaaggctgcctccagttgtgcttagaagaagtggctaacggcttgagaaaccccgtggccatggtgcacgcccgagacggcacccatcgtttttttgtcgcggagcaagtgggtctcgtgtgggcctaccttccagacagatcgcgacttggaaaacccttcctgaacataagccgggtagtgctcacctcaccttgggagggcgacgaaaggggctttttggggatcgcatttcatccatctttccagcataacaggcggctatacgtatactacagcgtcggcatccgctcatctgaatggatccgcatctctgaatttcgcgtttcagaggacgatgaaaacgcagtagaccacagctctgaacgcatcatactggaggtgaaggaaccagcctctaatcataatgggggacagctgcttttcggagatgacggctatctgtatatcttcacgggagacggcggaatggctggggacccttttggaacctttggcaacgcccagaacaagagtgccttgttagggaaagtacttaggattgatgtggatagaaaagagaggggcctcccctacgggatcccgcctgacaacccgtttgttggagaccccgctgctcagcctgaggtgtacgctttgggtgtcagaaacatgtggagatgctcattcgaccgtggagatccttcctccggcacaggcagagggcggctattttgtggcgacgtgggccaaaataagtttgaggaggtggacgtagtagagaggggaggcaactatgggtggagggcccgcgagggatttgagtgttatgataggtcgctgtgtgcaaatacaagcttgaacgacctactacctatttttgcctatccacacaccgtgggtaaaagcgtgaccggtggttacgtctatcggggatgcgaatacccgaatctgaacggcctctacatattcggagatttcatgtcaggtcggctgatgtcgcttcaggaaaaccctggcaccggccagtggcagtattcagaaatttgcatgggacatgggcaaacttgcgagttccccggtctcatcaataactattacccctatattatttcttttggtgaggacgaggccggcgagttgtacttcatgtccacaggagaacccagcgctaccgccccacgaggtgtggtatataaaattatagatgcttcctcctgcaaggcgcggtcagccatgcctgggtacgttccagcaccctcagtctgctcgtcactgaccagccagcccttcattttacaatggtggaagtag

SEQ ID NO: 5644 - DNA, 351 bp, synthetic construct
  misc_feature 1..351: note = source = /note="Description of Artificial Sequence: Synthetic coding sequence"
  source 1..351: mol_type = other DNA
atggcacctcctagcgttccactggtgctcttgctcgtgttactcctctccctagccgaaacccccgcaagcgctccagcacatcggggccgtgggggatggaccctgaattctgcagggtacctcctcgggcctgttctccatcttccccagatgggtgatcaggacggcaagagggagacagcattagagattctcgatctatggaaagctatcgatggacttccatattcgcacccacctcaacctagcaaacgtaacgtcatggaaacctttgctaaacccgagatcggtgatctgggtatgctgtcaatgaaaatccctaaggaggaagacgtactcaaatcttag

SEQ ID NO: 5645 - DNA, 3618 bp, synthetic construct
  misc_feature 1..3618: note = source = /note="Description of Artificial Sequence: Synthetic coding sequence"
  source 1..3618: mol_type = other DNA
atgagaaagccccgaagaaagagcaggcagaacgccgagggacgcagatctcctagtccctacagcttgaaatgcagtcccacccgggaaaccctcacgtacgcgcaggctcagaggattgtggaagtagatattgatgggaggttacataggattagtatctatgatccgctgaagatcatcaccgaagatgagctcacagctcaggatataactgaatgcaattctaataaagaaaactctgaacagccgcaattccccggaaaatctaaaaagccttctagcaagggcaaaaagaaggagagttgcagcaaacacgctagtgggacgagttttcacctcccccagccttcctttagaatggtagactccggaatacaacctgaggcccctccactgccagccgcttactaccggtatatcgaaaagccaccggaggatctggacgcagaagtagaatatgacatggacgaagaggaccttgcttggttagacatggttaacgagaagagacgcgtcgatggccattccctggtaagcgctgatacattcgaacttctggtggataggctagagaaagagagttacctggagagccgttcttccggagcacagcagtccctgattgatgaggacgccttctgctgtgtatgcttagatgacgagtgtcataattccaacgtgatcctattctgcgacatatgcaatctagcggtccaccaggagtgctatggagtgccctatatacccgaaggccaatggctgtgccggtgttgcctccagagccctagccgtcccgtggactgtatactgtgccccaataagggcggggcttttaagcagacctctgacggtcattgggcccacgtggtgtgtgcaatctggattccggaggtttgcttcgccaacaccgtgttcttggaaccaatcgaagggattgacaacatccccccagcacggtggaagctaacctgttacatctgtaaacagaaggggctaggagctgccatacagtgtcacaaggtcaactgctacactgctttccatgtgacctgtgctcagcgagctgggctgttcatgaaaattgagccgatgcgggagacctctttgaatgggaccatattcaccgtgcgtaagacagcctactgcgaggcccactccccgcccggcgccgctacagccagacggaagggggatagtcctcgcagtatctctgagaccggcgatgaagaggggttgaaagaaggcgatggagaagaggaggaggaggaagaagtagaagaggaagagcaggaggcccagggaggagtctcagggagcctcaagggcgtccctaagaaatctaaaatgagtttgaaacagaaaatcaaaaaagagcccgaggaggcaggccaagacactcccagcaccttgcctatgttggcggtgcctcaaatccctagctataggctgaataaaatctgcagcggactgagtttccaaaggaaaaaccaattcatgcagcgtctgcataactattggctgctcaagagacaggctcggaacggagtccccttgattaggcgtctacactcgcacctacagagtcagaggaatgcggaacagcgcgagcaggacgagaagaccagcgcggtcaaggaagagctcaaatactggcagaagctaaggcacgacctggagcgcgctagactcctcatcgagctgattcggaagagggaaaaactgaaaagagaacaggtcaaggttcagcaggctgctatggaattggagctgatgccgttcaacgtgctcttgaggactacccttgacctgctgcaagaaaaagaccctgcacacattttcgccgagcctgtgaatctgagcgaggttccagattacctggagttcatcagcaaaccaatggacttctcaaccatgcgaagaaagctggaatctcacttgtataggaccctggaagaatttgaagaagacttcaacctcatcgtcactaactgtatgaagtataacgcaaaggatactatattccatcgggccgccgtccgcctccgcgatctgggcggggctatcctgcgtcatgcccgcagacaggccgaaaatatcgggtatgacccagagagaggcacccatttacccgaatctcctaaattagaagacttctaccgcttcagctgggaagatgtggacaatattctgatcccggaaaacagagcccacttgtcaccggaagtgcaactcaaggagctcctggaaaagctggacttggtgtctgcgatgcgctcctctggggcccggacccggagggtgcggctgttgagacgtgagatcaacgctctgcgccagaaactggctcagcctccgccgccacagcctccttctctgaataagaccgtgagtaacggagagttgccagctggacctcaaggagacgcggccgtcctcgagcaggccctgcaggaagaacctgaggatgatggcgatagggacgactccaagctgcccccccctcctactttggagcctactggaccagcccccagtctgtctgagcaggagagccctcctgaaccccccacgctgaaacctattaatgacagcaagccgccttcccgcttcctaaagcctcggaaggttgaagaagacgaattgctcgagaagtctcctctgcaactcggcaacgaacctctgcagcgcctcctttccgataacggcatcaaccgcctgtcactgatggcccccgatactccagccggaacacccctgagcggtgtaggcagacgcacaagcgttttgtttaaaaaggccaagaatggagtaaaactccagagatcgccagatcgcgttctggagaatggtgaggatcatggcgtggccggctcacccgccagtcctgctagcatcgaggaggagagacacagccggaaaagaccaagaagtagatcttgctccgagagcgaaggtgaaaggagtccacagcaggaggaggaaacagggatgactaatggctttggcaaacatactgagagcgggtcagattcagagtgttcactcggtcttagcggcgggcttgcgttcgaagcctgttctgggctcaccccaccaaagcgatcgcgaggcaagcccgcgctaagcagggtcccctttctggagggcgtgaatggggactccgactacaatggctccgggagaagcctgttattgccttttgaggataggggagacctcgagccgcttgagctggtgtgggcaaaatgccgagggtatccgagctaccccgccctgattatcgaccccaagatgccacgagaaggattgttacacaacggagtacccatacccgtcccacctttagatgtgttgaagctgggagaacaaaagcaggccgaggcaggtgagaaactttttttggtcttgttctttgacaataaacggacatggcagtggctaccacgcgacaaggtgcttccactgggtgtggaggataccgtcgataaactaaaaatgctcgaagggcgcaagaccagcattaggaagtctgtgcaagtggcctacgatagggccatgatacacctgtctagggtccgaggccctcatagctttgtcacctcttcatatctctag

SEQ ID NO: 5646 - DNA, 1977 bp, synthetic construct
  misc_feature 1..1977: note = source = /note="Description of Artificial Sequence: Synthetic coding sequence"
  source 1..1977: mol_type = other DNA
atgttcgtgagttatttgattctgaccctgctgcacgtgcaaaccgccgttctggctcgccccggcggagaatctataggatgtgacgactacttgggctccgataaggtggtggacaagtgcggtgtctgcggcggggacaacaccggctgccaggtggtgagcggtgtattcaaacacgcgctgacctctcttggctatcacagagttgttgaaattcctgagggggccaccaaaatcaacatcactgagatgtacaaaagtaacaattacctggcactgcgctcacggtctggccggtcaattataaacggaaattgggcaattgacagaccgggaaaatatgaagggggaggcaccatgtttacatacaagaggccgaatgagattagtagtacggctggagaatcatttttggccgagggccctacgaacgagattttagacgtgtacatgatccatcaacaacctaaccccggtgtgcattatgagtacgtgattatgggaaccaacgccatttcaccacaggtgcccccccatcggagacctggggagcctttcaacggccaaatggtgaccgagggacgctcacaggaagaaggcgagcaaaaaggacgaaacgaagagaaagaggacctgcgaggggaggcaccggaaatgttcacatctgagagtgcccagaccttccctgtgcggcacccagatcgcttcagccctcatagacccgataatttggtaccccccgcccctcagcctccaaggagatctagggatcacaactggaagcagctgggcaccaccgaatgtagtacaacctgtgggaagggcagccagtaccccatctttagatgtgtccatcgctcgactcacgaagaagcccccgaaagctattgtgactcctctatgaagcccactccggaggaggaaccttgcaacatatttccctgtccagccttctgggacataggcgaatggtcagagtgctctaaaacctgcggcctcggaatgcaacacaggcaggtcctctgcagacaagtttatgctaacaggagtttgactgtgcagccgtaccggtgccagcatctggagaaaccagagactacatcaacgtgtcagctcaagatctgttcagagtggcagatcaggaccgattggacatcatgctccgttccctgcggagtgggccagagaactcgagacgttaaatgtgtgtcaaatatcggcgatgtagtggacgatgaggagtgtaacatgaaattgcgacctaatgacatcgagaattgtgacatggggccctgcgcgaagtcatggttcctcacagaatggtccgagagatgctccgccgagtgtggggccggggtccgaactcgaagtgtcgtgtgtatgacaaatcacgtgtcctctttgcctttggaagggtgcgggaacaaccggcccgccgaagccaccccctgcgacaatgggccctgcacagggaaagtggagtggtttgccggttcctggtcccaatgctccatagaatgcggcagcggcacacagcagcgtgaagtgatttgtgtccgaaaaaacgctgacacctttgaggtgcttgacccttctgaatgctccttcctcgaaaagcccccgtcacagcagagctgccatttgaagccttgtggggcgaagtggttctcaacagagtggagcatgtgtagcaaatcttgccagggcggatttagggtgcgtgaggtccgttgcctaagcgacgatatgaccctgagtaacctgtgtgatccccagttgaagccagaggagagagagagctgcaatccccaagactgcgtgccagaagtagatgagaactgcaaggacaaatattacaattgcaacgtggtcgtccaggctcggctgtgtgtctacaactattacaaaaccgcttgttgtgcttcttgcaccagggtggctaaccggcagacgggatttctgggtagcaggtag

SEQ ID NO: 5647 - DNA, 708 bp, synthetic construct
  misc_feature 1..708: note = source = /note="Description of Artificial Sequence: Synthetic coding sequence"
  source 1..708: mol_type = other DNA
atgcggcctctcgccggtgggctgctcaaggtcgtcttcgtcgtgttcgccagcttgtgtgcctggtatagtggctatcttctcgcagaattaattcctgacgcccccctgagctctgccgcctactccattcgcagcatcggcgagcgaccggtgctgaaggcaccagtcccaaagcggcagaagtgcgatcattggaccccctgccctagtgatacttatgcctaccgcttattatcaggcggaggcaggtccaagtatgcaaagatctgttttgaggacaacttgttgatgggggaacagctcgggaacgttgccagagggatcaacatagctattgtaaactatgtcactggcaatgtaacagccactaggtgttttgacatgtatgaaggtgacaacagtggacctatgaccaaatttatccagtctgcagccccgaaaagtctgcttttcatggtaacctacgacgacggctcaactcgattaaataatgatgccaagaacgcaatcgaggccctcggtagcaaggagatcagaaacatgaagtttcgcagttcctgggtgttcattgccgcaaagggcctcgaacttcctagcgaaatccagagagagaagattaaccattccgacgccaagaacaatcgctactccggatggccagcagagattcagatcgaggggtgtatcccgaaggaaaggtcttag

SEQ ID NO: 5648 - DNA, 759 bp, synthetic construct
  misc_feature 1..759: note = source = /note="Description of Artificial Sequence: Synthetic coding sequence"
  source 1..759: mol_type = other DNA
atgaggggacaaggacggaaagagtctctcagcgattctcgagacttggatggatcatacgaccagctgacaggacatcctcctgggcctaccaaaaaagcactgaaacaaagattcctgaaattgttgccttgctgtggtcctcaggccctccccagcgtgtccgagaactcagttgatgatgaattcgaactgtctaccgtctgccacaggccggagggcctcgaacagctacaagagcagaccaaatttacaaggaaggagctgcaagtactctatcgggggttcaaaaatgagtgcccaagcggcatagtcaacgaggagaattttaaacagatttattctcagttttttcctcagggagacagtagcacttacgccacgtttctgttcaacgcctttgacaccaatcacgacggttccgtgagcttcgaagatttcgtcgcaggtttaagtgtgattcttagaggaaccgtggatgataggctgaattgggcctttaacctgtatgatctgaacaaagatggctgcataaccaaagaagagatgttggatatcatgaagtccatctacgacatgatgggcaagtacacatatcccgccctccgcgaagaggcaccccgcgaacatgttgaatcatttttccaaaagatggacagaaacaaagacggggtcgttactatcgaagaattcatcgaatcttgtcagaaagacgagaatataatgcgatccatgcagttgttcgataatgtcatctag

SEQ ID NO: 5649 - DNA, 312 bp, synthetic construct
  misc_feature 1..312: note = source = /note="Description of Artificial Sequence: Synthetic coding sequence"
  source 1..312: mol_type = other DNA
atgtctggtagaggcaagggaggaaaggggctgggaaagggcggcgccaagcgtcataggaaagtcctgcgggataacatacagggcatcacaaagcctgctatacggagattagctcgccgggggggcgtgaaacggattagtgggctgatttacgaagagacgaggggcgtgttgaaggtgttcttagagaacgtgatcagggatgcggtgacatacacagagcacgcaaagcgaaagaccgtcacagccatggatgtcgtgtatgcgttgaagcggcagggacgcacattatatggctttggtgggtag

SEQ ID NO: 5650 - DNA, 3120 bp, synthetic construct
  misc_feature 1..3120: note = source = /note="Description of Artificial Sequence: Synthetic coding sequence"
  source 1..3120: mol_type = other DNA
atggaggtgactgcagtagcgacccagggtgggtacggctcctctgactgggtgacatcatacctgcttatgtttagcgacggggggcggaattggaaacaatataggcgcgaagaaagtatctggggattcccaggtaacaccaatgctgactccgtggtgcactatcgcctgcaaccgccgttcgaagcacgcttcttgcggtttctaccgctggcctggaaccctagaggccgcattgggatgcgcattgaagtttacggctgcgcttacaaatccgaagttgtttatttcgacggtcagagtgctctcctgtacaggttggataagaaacctctgaagcctatcagagatgttatcagtctcaagtttaaggccatgcaatctaacggtatcctcctacaccgagagggacagcacggaaaccatatcacactggagctgatcaaaggaaagctggtattctttttgaacagcgggaatgccaagctgccatctactattgcacctgttaccttgaccctaggctccctactggacgaccaacactggcattctgtgctgatcgaattactcgacacacaggtgaactttacagtagacaagcacacacatcactttcaggctaagggcgattcaagctacctcgacctgaacttcgaaatcagtttcggcggaatcccaacacctggtagatcaagagcattccgccggaagtcttttcacggctgcttggaaaacctgtattacaacggggtggacgtaacagaactcgctaagaaacataagccgcagattctaatgatgggcaatgtaagtttctcttgccctcagccgcagacagtcccagtcaccttcctgagttcccggagttaccttgccttgcctggcaacagcggagaggataaggtgagcgtaacgtttcagttccgcacttggaatagggcaggccacctgcttttcggtgagctcagaagaggctccgggtcctttgtgcttttcctcaaggatggaaagctaaagctcagccttttccaacctgggcagagccctcgaaacgtgacggctggggcgggcctgaacgatggccagtggcatagcgtaagcttttccgctaagtggagtcacatgaacgtggtggttgatgatgacactgcagttcagcccttagtcgcagtgctgatcgatagcggagacacatattattttggcgggtgcctggataacagttctgggtctggctgcaagtcaccactcggtggattccaggggtgtctcagactaatcaccatcggggacaaggccgtcgaccccatcctagtgcaacaaggggcattaggaagtttccgagaccttcaaattgattcatgcggtataacggatcgctgcctgcctagttattgcgaacacggcggagagtgtagccaaagttgggacacctttagctgtgattgtctgggaaccgggtatacaggagaaacatgtcactcaagcttgtacgagcagagctgcgaggcacacaagcaccggggaaaccccagcggtttgtattatatagatgcggatggctctggcccgcttggaccttttctggtttattgtaacatgactgctgacgcagcttggactgttgttcaacacggaggtcctgacgctgtgactttaagaggcgctccaagcggacacccaagatcagcagtgagcttcgcatatgctgccggagcaggacagctacgttccgcagtgaacctggccgaacggtgcgagcagcgcctggccctgcggtgcggaactgcacggcgtcccgattctcgggacgggactcctctgtcctggtgggtgggccggaccaacgagacccacacgtcttggggcggcagcctcccagacgcccagaagtgcacttgcgggctcgaggggaactgcatagactcccagtattattgtaattgtgatgccggacggaacgagtggacgagtgataccatcgtgctctcccagaaagaacatttgcccgtgactcagatcgtgatgaccgatgctggtcggcctcattccgaagccgcatacacattgggaccactgctctgccggggggaccagtcattttggaactccgcaagcttcaacaccgaaactagctacctccacttcccagcctttcatggggagttaacagctgacgtgtgctttttttttaaaactaccgtgagttccggagtgttcatggagaacctcggcattaccgactttattcggatagagcttcgagcaccaaccgaagtgacgttcagttttgacgtcggaaatggaccttgcgaagtgacagtgcaatctcctaccccatttaacgacaatcagtggcaccacgtccgagcagaaaggaacgtcaagggcgcatcccttcaggtggaccagctgccacagaaaatgcagcccgcccccgcagatggccatgtcaggctgcaactgaatagtcagctgtttattggaggaaccgccacaagacagagaggttttctaggttgcatccgtagcctgcagttgaacggcgtggccctggacctggaagagcgagccactgtcactcccggcgtcgagcccggatgcgcaggccactgctctacctacggtcatctttgcagaaacggagggagatgcagggagaaacggcgaggggtgacctgcgactgcgcgtttagtgcgtatgacggccccttctgtagcaacgagatctccgcctattttgccaccggcagttctatgacataccactttcaggaacattatacacttagtgagaattcatcttctctggttagtagcttgcaccgggatgttacgctgactcgcgagatgataacattgtccttccggacgaccaggaccccaagcttgctcttatatgtgtctagtttctatgaggagtacctgtctgtgatactggcgaataacggcagtctgcagatccgctacaagttggataggcatcagaatcccgatgcctttacctttgacttcaagaacatggcggacggccagctacatcaggtgaagataaatagggaagaggccgtagttatggttgaggtgatcccgcagatgcagaagagcaattag

SEQ ID NO: 5651 - DNA, 1257 bp, synthetic construct
  misc_feature 1..1257: note = source = /note="Description of Artificial Sequence: Synthetic coding sequence"
  source 1..1257: mol_type = other DNA
atgcgaagcctccttctgctgtctgctttctgtctgttggaagcagcactcgccgctgaggtcaaaaagccagcagctgcagcagctcccggaaccgccgagaaactcagtccaaaggccgcaacactggccgagcggtctgcgggtttagccttttcgctgtatcaggccatggccaaagaccaggcagtggagaacatcttggtatcaccagtagtggtggcctctagcctcggcctcgtgtcactgggtggcaaagctacgacggctagccaggctaaggcggtgctgagtgccgaacagctccgcgatgaggaagtgcatgccggcttgggcgagttgctcaggagcctgagtaacagcaccgcgagaaatgttacttggaaactcggaagcagactgtacggcccctccagcgtgtcattcgccgacgactttgtaaggtcctccaaacaacactataactgcgagcattcaaagattaatttcagagacaagcgctcagctctgcaaagcataaatgagtgggctgcgcagacaaccgacggaaagctgcccgaagtgaccaaggatgtcgagcgcactgacggagcactgctggttaacgccatgttctttaagccacactgggacgaaaagttccatcataaaatggtggataatcggggcttcatggtgactaggtcttacacagtgggggttatgatgatgcatcggaccggtctctacaattactatgacgacgaaaaagagaagcttcagatcgttgaaatgcccctggcccataagctgagcagcctgatcatactgatgcctcaccatgtggagccccttgagcggcttgaaaaactcttgaccaaagaacagcttaagatctggatggggaaaatgcaaaagaaggccgtggccattagtttaccaaagggcgtcgtagaggttacccatgatcttcagaagcatctggcaggattgggcttaacagaggctattgacaaaaataaagctgacctctccagaatgtcaggcaagaaggatctgtatctagccagcgtgttccatgctaccgcctttgagctggatactgatggaaatccatttgatcaggatatttatgggagagaggagctcagaagcccaaagctattttatgccgatcaccctttcattttcctcgtcagagacactcaatctggcagcctgttattcataggccggcttgtccgcccaaaaggtgacaagatgcgggacgagctgtag

SEQ ID NO: 5652 - DNA, 378 bp, synthetic construct
  misc_feature 1..378: note = source = /note="Description of Artificial Sequence: Synthetic coding sequence"
  source 1..378: mol_type = other DNA
atgcagctgcttaaggcactctgggccctggccggcgctgccctgtgttgtttcctagtcctggtgatacatgcccagttcctgaaggaagggcagttggcagcgggcacctgcgagatcgtgactttagaccgcgactcctcacagcctcgacgtacaatcgctcgccagacagcacgttgcgcatgcaggaaaggacagatcgctgggacgacaagggccagacctgcatgcgtcgacgccagaatcataaaaaccaagcagtggtgcgacatgctgccttgtctggaaggagaaggctgtgatctgctgattaatcggagcggttggacctgtacgcagccggggggccggattaaaacaactactgtttcatag

SEQ ID NO: 5653 - DNA, 5859 bp, synthetic construct
  misc_feature 1..5859: note = source = /note="Description of Artificial Sequence: Synthetic coding sequence"
  source 1..5859: mol_type = other DNA
atgccggctctgggacccgctctgctgcaggctctgtgggccggctgggttctcactctacagcctctgccacctactgcattcactcccaacggaacttacctacaacatctggcacgcgaccctacttcagggaccctgtaccttggagcaactaatttcctctttcaactgagtcccggtctgcagctagaggctactgtgtcaacagggcctgttcttgacagcagggactgcttaccgccagttatgccagacgagtgtccccaggcacaaccgacaaataaccccaatcagctgcttttggtatcccctggggcgttggtcgtgtgcggatccgtgcatcaaggcgtatgcgagcagcgaaggttgggtcagctagagcagctgctgctaaggccagagaggccaggagacacccagtacgtggccgcaaatgatcccgccgtatcgaccgtggggcttgtggctcagggattagcgggagaacccctactttttgtgggtaggggatatacgtcccgaggagtaggcggcgggatcccccccatcaccactcgagcactttggcctcccgaccctcaagcggcattttcttacgaggagaccgctaagttggccgtcgggcgcttgtctgagtattctcaccatttcgtgtcagccttcgcccgtggcgcatccgcctacttcctctttctgaggcgggacctccaggcacagagccgggcctttcgggcctatgtaagtcgtgtctgtctgagagatcagcattattacagctatgtagaacttcctctagcatgcgagggtggccgatatgggttaatccaagctgccgctgtggccacgtcccgcgaagtggcgcatggtgaagtcctgttcgccgccttctcatcagcagcgcccccaaccgtagggaggccaccctcagccgcagcgggcgcctccggcgcatcggcgctatgtgcctttcctctggatgaggtcgatcgcctagccaacagaacccgtgacgcatgctacacacgggaggggagggcagaagacggcacagaagtggcatacatagaatacgacgttaatagcgactgtgcacagctacctgtagacacactggatgcctatccgtgtggaagcgaccacacccctagtccgatggcatcaagagtcccgctcgaagctactccgatcttagagtggcccggcattcagttgaccgctgtggcagttactatggaagatgggcacaccatcgccttccttggcgacagtcaggggcagctccacagggtgtacttgggtccaggctctgacgggcatccttattccacgcagagcattcaacagggaagcgcagtgtccagagacctgacatttgacggcacctttgaacacctgtatgtgatgactcagtccacattattaaaggtgcctgtggctagctgtgcacagcacctggactgtgcatcctgtcttgcccatagggatccctactgcggttggtgtgtgctgctaggacggtgttcccgcagatcggaatgtagcagaggacaggggcctgagcaatggctgtggagttttcagcctgagcttggctgtctgcaggttgccgcaatgtccccagccaacatctctcgagaggagacaagggaagtatttttgtctgtgcctgatctgccacctttgtggcccggtgaatcttattcatgccactttggtgagcaccaatccccggctctgctgaccggctccggagtaatgtgtccttcccccgatccatctgaagcccccgtgctccccaggggagcggactacgtgagtgtgagcgtcgagctgcgctttggggcggtagtaattgccaaaacgtccttgagtttctacgattgcgtagctgttacagaattacgcccctctgctcagtgtcaggcctgtgtgtcttcgcgctggggatgcaattggtgtgtttggcagcacctgtgcacgcataaggcaagttgtgacgcagggcccatggtggcaagtcatcaatcccctctggtctctcctgatccgcctgctcgcggtgacggcgatagcgccgagctggaaggaccacctgcccctctgattctgcccagctccctggattaccaatacgacaccccgggcctatgggagctggaggaggcgactttgggggcctcatcttgcccatgcgtggagtcagttcaaggcagcacattaatgcccgtgcatgtcgagcgcgagattcggcttctcggacggaacttgcacctgttccaggacggccctggcgataacgagtgtgtgatggagctggaggggttggaggtggttgtggaagcgagagtggagtgtgaacctcccccggacacccagtgccacgtgacctgccagcagcatcagcttagttatgaggcactccagccagaactgcgggttgggctgtttctacgccgggcaggaagacttcgggtagactctgccgaaggattacacgttgtgctctatgactgctcggtcggccatggagactgctctcggtgtcagactgcaatgccacaatatggctgtgtgtggtgcgaaggagagagaccaagatgtgtcacaagagaagcttgcggggaggccgaagctgtggccacacaatgccccgccccattaatccacagcgtcgaacccctcacaggacctgtggacggaggcacccgtgtgaccatccggggtagcaatctaggtcagcacgtgcaggacgtcctgggcatggtgactgtggctggcgtaccctgtgcagtggacgctcaggaatacgaggtgtcatcctccctggtatgtattaccggggcctcaggggaggaggttgccggagccaccgccgtggaagtgcccggaaggggccggggcgtatcagaacatgattttgcttatcaggaccctaaagtgcactctatttttccagccagaggtccaagagcggggggcactagactaaccttgaatggaagtaaactgctcacgggaagactggaggacatcagagtggtggtgggcgaccagccttgccacctgctgccggagcagcagagtgagcagctccgctgcgaaacatcccctagaccaactccagctaccctgcccgtggcggtgtggttcggagcgaccgaaagaagactccaaagaggacagtttaagtatactttagaccctaacataacgagtgccggcccaactaaatccttcctatcgggagggcgcgagatatgtgtgagggggcaaaatctcgacgtagtacaaaccccaaggataagggtgaccgtggtttctcggatgttgcagccgtcccagggactgggaagacgacggagggtggtgcccgagacggcctgttcacttgggccgagttgtagctcccaacagtttgaagagccctgccacgtcaatagttctcaacttatcacctgtcgcacaccagcattgcctggactgccagaagatccctgggtgcgcgtagagttcatattagacaatctagtatttgattttgcaacactcaaccccacacctttcagctatgaagccgacccaactctgcagcccctaaacccagaggacccgaccatgccctttagacacaagcccggcagcgtgttctccgtggaaggggagaatctggacctagccatgtccaaggaggaagtagtggcgatgattggagacggcccgtgcgtggtgaaaaccctgactcggcaccacctgtattgcgaacctcccgtggagcagcctctgccaaggcaccatgcgttacgagaagctccagacagcttgccagaatttaccgtgcagatggggaatcttcgctttagcctcggacatgtccaatacgatggagagtcaccaggtgcctttcctgttgctgcccaggtcggactaggggtagggacgtctctgcttgccctgggcgtgatcattatcgttctgatgtaccggcgaaagagcaagcaggcactgcgcgattacaagaaggtgcagatccaactcgaaaacctggagtcttccgtgcgggacaggtgtaagaaagagtttacggatttaatgaccgaaatgaccgatttgacaagcgaccttcttggctctgggatcccattcctggactacaaagtgtatgctgagagaatcttttttccagggcaccgtgagtcacctttgcatagagatcttggcgtccccgaatctagaagaccgacagtggaacagggactcggacagttgtcaaacctgctgaattccaaactcttcctcaccaaattcatacatactctggagtcacagcgaacctttagtgcaagggatcgcgcctacgtggcgagtctgctcaccgtggcactgcatggcaaattagagtattttacggacattctcaggaccctgctttctgacctagtggcccagtacgtggccaagaatcccaaattgatgctgcgacggacagagaccgttgtggaaaagctgctcacgaattggatgtcgatatgcctgtacaccttcgttcgagactctgtgggtgaacccctgtacatgcttttcagaggtataaagcaccaggtggacaagggaccagtggacagcgtaactggcaaggcaaaatacactttaaatgataataggctgctccgagaagacgttgagtacaggcccctcacactcaatgcccttcttgccgtcggcccaggggcaggagaggcacaaggcgtaccggttaaagtactggattgtgacaccatcagccaagcaaaagagaagatgctcgaccagctgtataaaggagtgcccctgacgcagcggcccgatccccgaaccctcgacgtcgaatggcgttcaggagttgccggccacctcatcctgagcgatgaggacgtaacatccgaggtgcagggactgtggcgtaggctgaatacactccagcactataaagtccctgacggagcaacagtcgctctggtgccgtgtctcacaaaacacgttctcagggagaatcaagactatgtgcctggcgaaagaacacctatgctggaagatgtggacgagggaggcatccgaccatggcatctcgtcaaaccttcagacgagccagagccccccaggcccagaagggggtcactccgaggaggggagagggaaagggctaaagcaatacccgagatttatcttacccgactgctgagcatgaaggggactctgcagaagtttgtagatgatctcttccaagtgatcctgtcgacgtctcgccccgtgcctttggccgttaagtacttctttgacctcctcgacgagcaagctcagcaacacgggatttcagaccaagatactatacacatttggaagactaatagccttcctctccggttctggattaatattatcaaaaacccccagtttgtatttgatgtgcagacaagcgataacatggatgctgtgctattggttattgctcagacgttcatggatgcctgtacgctggctgaccacaagttgggtagggattccccaatcaataagctgctgtacgctagagacatccctcgctataagagaatggtggagaggtactacgctgacatcaggcaaacggtgccagcatcggatcaagaaatgaatagtgtcctggccgaattgtcctggaattatagcggggacctcggcgccagagttgccctgcacgagctgtacaagtacattaacaagtactacgaccagatcattacagctctggaggaagatggtaccgcccagaagatgcaactcggttatcgtctgcaacagatcgctgcagccgttgaaaacaaggtgacagacctctag

SEQ ID NO: 5654 - DNA, 342 bp, synthetic construct
  misc_feature 1..342: note = source = /note="Description of Artificial Sequence: Synthetic coding sequence"
  source 1..342: mol_type = other DNA
atgctggtgttatttctgctagggacagtgtttcttctgtgcccttactggggcgaactgcacgaccccattaaagcgacagaaataatgtgctacgagtgtaaaaaatatcacctcggcctctgctacggagtgatgacctcttgcagcctgaagcataagcagagttgtgcagtggaaaatttttacatcctgacaaggaagggacagagcatgtatcattattccaagctatcatgtatgacctcttgcgaagacattaactttcttggttttaccaagcgagtggagctcatttgttgcgatcactcaaattactgcaatttgcctgagggcgtctag

SEQ ID NO: 5655 - DNA, 6408 bp, synthetic construct
  misc_feature 1..6408: note = source = /note="Description of Artificial Sequence: Synthetic coding sequence"
  source 1..6408: mol_type = other DNA
atgcccgcgcttggtcctgcccttctgcaggctctctgggctgggtgggtgttaaccttgcagcccctgccacctacagcctttacacctaatggcacatatctgcagcatcttgctagggatcctacgtcaggcacattatatctgggtgctacaaatttcttgttccagctcagtccaggcctgcagcttgaggccaccgtgtctactgggcccgtcctcgatagtcgagactgcctgccaccggtcatgcccgacgagtgcccccaggcgcagccgacgaacaaccccaaccagttacttcttgtatctccaggggctcttgtggtctgtggcagcgtccaccagggggtgtgcgaacagcgcagacttgggcaacttgagcagctgctgctgaggccagaacgtcccggagatacccaatacgtcgccgccaacgatcccgcggtgtccaccgtcggcctcgttgctcagggcttagccggagagccgttgctgttcgtggggcgcggatacacgtcacgcggcgtcggcggcggcattcctccaatcacaaccagagctttgtggccaccagatccacaggccgctttttcttatgaagagaccgccaaattggcagtaggtaggctgagtgaatatagtcatcatttcgtaagcgcctttgcccgcggcgcgagtgcatattttctttttctgcgtcgagacctgcaggcccagtcgagagcgtttagggcctacgtgagtagggtatgcctgagggaccagcactactactcctatgtcgaactgccacttgcctgtgagggcggcaggtatgggttgatccaggcagcggccgtggcaacaagcagggaagtcgcacatggcgaggttctgttcgcggcgttttctagtgctgcccctccaactgtggggaggccccctagcgccgcggctggtgccagcggcgcatccgccctctgtgccttcccactcgatgaggtagatcgcttggccaatagaacccgagacgcatgttacacaagggagggtagagcagaggacgggacagaagtcgcctacattgagtatgacgtgaattccgactgcgctcagcttccagtagacacgctggacgcttacccttgtggctctgatcatacaccctctccaatggccagccgggttcccctggaagccactccaatcttagagtggcccggcatacaactgacagctgtcgcagttacgatggaggacggccacactatagcctttctaggtgactcccagggccaattgcatagagtgtatcttggacccggcagcgacggccatccctactccacacagagcatccagcaaggaagcgccgtgtcccgggacctgacatttgacgggactttcgaacacctgtacgtcatgacccagtctacgctgcttaaggtcccagtggcttcctgcgcccagcatctcgattgtgcatcttgtctagctcaccgggatccatattgtggttggtgtgtgttactgggtagatgttcccggagatctgagtgttctcgcggacagggacctgagcaatggctgtggagtttccagccagagctcggatgtctgcaagtggccgctatgtcgcctgctaacatttcccgcgaggagacaagagaggtattcctcagcgtgccggatctgccgccattatggccgggtgagagctactcttgtcattttggcgaacaccaatcccccgcactcctgacaggtagcggcgtgatgtgtccgtcaccagaccccagcgaagcaccggtgctgccacgcggagccgactatgtgtcagtgagtgtggagctgcgctttggtgccgttgtgattgccaagacaagtctctctttctatgactgtgtagcagtcaccgagctgcgtccaagcgctcagtgccaagcctgcgtctcaagtagatggggatgcaattggtgtgtgtggcagcacttgtgcacgcataaggcaagctgcgacgcgggacctatggtcgcctctcaccagagccctcttgtgagccccgatccccctgctcgtggtggaccttctcccagtcccccgacagcgccaaaggccctggccacccctgcaccagataccctacctgtggaaccaggcgctcctagcaccgcaacggctagtgatatcagtcctggcgcaagtccaagtttactctcaccctgggggccatgggccggcagcggctctatcagcagccctgggtctaccgggtcacccctccatgaagagccaagtccgccgagcccccagaatggaccaggcaccgcagtgcctgcccctactgactttcggccctccgccacacctgaggatctgctagccagccccctgtctccatccgaagtggctgcggtccccccagccgatccaggccctgaagccttgcacccaactgtgccactagatcttccccctgcgaccgtccccgcgaccaccttcccaggcgcgatgggaagcgtgaagcctgccctagactggctgactagggagggcggtgaactgcccgaggccgacgagtggaccgggggcgacgcaccggcttttagcaccagcactctgttgtctggggacggggatagtgctgaactggaggggccacctgcaccattgatccttcctagttctctggactaccagtatgataccccagggttgtgggagcttgaggaagctactttgggcgcatccagttgcccctgcgtggagagtgtgcagggcagcacgctcatgccagtccacgtggaacgcgaaattagactgcttggacgcaatcttcacctctttcaggacggaccaggagataacgagtgtgtcatggagcttgaggggctcgaagtcgtagttgaagccagggtggaatgtgagccaccccctgatacccagtgtcacgtgacgtgtcagcaacaccagctgagctatgaggcacttcagcccgagcttagagtgggtcttttcttaagaagggcaggacgactgagggtcgacagcgccgagggactacacgtcgtgctttacgactgtagcgtgggccacggcgattgctcaaggtgccagaccgccatgccccagtacgggtgcgtgtggtgtgaaggggagaggccacgatgtgtgactcgggaggcttgtggagaagctgaggcagtcgctacccagtgccccgcacccctgattcattcggtcgagcccctgaccggtccagtggatggcggtaccagggtaactattaggggatcaaaccttggacaacacgtccaggacgtgctggggatggtgacagtggccggggtgccgtgcgctgtggacgctcaggagtatgaggtgtcctcttctcttgtgtgtattaccggtgcttctggcgaggaggtcgctggcgctacagcggtggaggtgcccggacggggaaggggcgtctcagaacatgactttgcttaccaggatcctaaagtccactctatctttcccgcccgaggcccccgtgccggagggacacgccttaccctgaatggtagcaagctactgacaggccgactcgaggatatccgtgtcgtagtaggcgaccaaccttgccacctgttgccggaacaacaatccgaacagctccgttgcgaaacttctccccgccctacccccgctactttgccagtggctgtttggtttggtgctaccgagagacggcttcagcgtggacagttcaaatatactttggaccccaacataacaagcgccggccccactaaaagctttctgtccggaggccgcgaaatctgcgtgagaggacagaatttggatgttgtacaaactcctcgcatcagggtgactgtggtcagtagaatgctgcaaccctcgcagggtcttgggcgacggcgccgagtcgtgccagaaacggcatgtagccttggtccctcttgctcttcacagcaatttgaggagccatgccacgtgaacagttcacagctgatcacctgtcggaccccagcactgccaggactgcccgaagacccttgggtgagagtggagtttatcttagataacctcgtcttcgatttcgccacactgaatcctactccgttttcatatgaagctgaccccacactgcagcctttaaatccagaggatccaaccatgccctttagacacaaacctggcagtgtgttcagtgttgaaggggagaacttggacttggctatgagtaaggaagaagtcgttgcaatgatcggggacggcccatgcgtcgtcaaaaccctgacccgccaccacctatactgcgaacctcccgtcgagcagcctctcccccgacaccatgctctcagagaggctcccgactctctcccagaattcacggtccagatgggtaatttgagatttagtctcgggcacgtgcagtatgatggggagtctcccggtgcatttcctgttgccgcacaggtgggactgggtgtcggtacttccctgctggctctgggggttatcattattgtccttatgtataggcgcaaaagcaagcaggccctgcgcgactataagaaagtccagatccagctggaaaatctcgagtccagcgttcgcgataggtgtaagaaggagtttactgacctcatgactgaaatgacagacttgactagcgatctgctcggatccgggatcccatttctcgactataaggtctacgccgagagaatcttctttcctggccaccgagaatcacctctgcaccgggacttgggggtaccagagtccagaagaccaaccgtcgagcaaggtctcggacagttgtccaacctgctcaattctaagctgttcctcaccaagttcatccatacgctcgaaagccagaggacatttagcgcccgggaccgggcctacgtcgcgtccttgttgacagttgcactacatggtaagttagagtattttacagacatcctccgaactttgctcagtgacctcgttgctcagtacgtcgccaagaatccaaaacttatgcttcgacgcaccgaaaccgtcgtggaaaagctgttaaccaattggatgtcaatttgtttatacacctttgtaagagacagtgtgggcgagcctctgtacatgctgttcagaggaatcaagcaccaggtcgataaaggcccagtggacagcgtcacagggaaggcaaaatataccttaaacgacaacaggctgctgagggaggacgttgaataccgtcccctgaccctgaatgccttactggcggtgggccctggagctggggaggcacaaggtgtaccggtgaaggtcttagattgtgacacgatctctcaagcgaaggagaaaatgttagaccagctttataaaggtgtcccactgactcagagaccagatccacgcactctggatgtggaatggcggtcaggggttgctggacatctgatcttgagcgacgaagatgtcacctccgaagtgcaaggtctgtggaggagactgaatacactccagcattacaaagtgcccgacggtgccactgtggctctagtgccttgcctgacgaagcatgtgcttagagagaatcaggattacgtgccaggagaacgcacccccatgttagaggatgtggatgagggtggaattcgtccttggcatctcgtgaaaccaagtgacgaacccgagccacctagacctcgacgcggtagcctgagagggggtgaaagagagcgcgccaaggctatacctgagatttatttaactcggctgttgagcatgaagggcacgctgcaaaaatttgtcgacgatttgttccaggtaatcttgagtaccagccgccccgttccgctcgccgtgaagtactttttcgacctcctggacgagcaggctcagcaacatggaatctccgatcaggatactatccacatctggaaaaccaacagtctgccactgcggttctggattaacattattaaaaatcctcagttcgtgtttgatgtacagacgagtgacaatatggacgccgtccttctggtgatcgcccagacttttatggacgcctgcacactagccgatcacaagctgggacgcgactccccaattaataaactgctgtacgctagggatatcccaagatataaacggatggtagagcgttactacgccgacatcagacagactgtcccagctagcgaccaagaaatgaattcagtcttagcagaactgagctggaattactccggcgatctgggcgctcgtgtagcccttcatgagctgtacaaatacattaacaagtactacgaccagattatcacagctctggaagaagacggcactgcacagaaaatgcagcttggatataggttgcagcagatcgccgctgccgtggagaataaggttaccgatctgtag

SEQ ID NO: 5656 - DNA, 390 bp, synthetic construct
  misc_feature 1..390: note = source = /note="Description of Artificial Sequence: Synthetic coding sequence"
  source 1..390: mol_type = other DNA
atgcgaccactcaaacccggtgctcccctccccgcccttttcttgttagccctagccctgtctccccacggggcacacggtcgcccacgtggcagacgcggagcccgggttactgacaaagagccgaagccactgttgtttctaccagctgccggcgccggaaggactccaagtgggtctcgctcagccgagatatttcctagagactctaacttgaaagacaagtttattaaacacttcaccggacccgtgacgtttagcccagaatgttcaaagcacttccacagactgtactacaatacaagggagtgttcaactcccgcctattacaaacgctgcgccagactcctgacgcgcctcgctgttagtccattgtgttcacagacttag

SEQ ID NO: 5657 - DNA, 252 bp, synthetic construct
  misc_feature 1..252: note = source = /note="Description of Artificial Sequence: Synthetic coding sequence"
  source 1..252: mol_type = other DNA
atgcgcttaagtgtctgccttctgatggtgagccttgctctttgttgctatcaagcccacgcccttgtgtgtccagccgtcgccagtgaaatcacggtgtttctctttctgagcgacgcggctgtgaacttacaagtggccaaactaaatccccctcctgaagccttggccgcaaaactggaggtgaaacattgcaccgaccagatcagcttcaagaaaaggctgtccctgaagaaaagttggtggaaatag

SEQ ID NO: 5658 - DNA, 1455 bp, synthetic construct
  misc_feature 1..1455: note = source = /note="Description of Artificial Sequence: Synthetic coding sequence"
  source 1..1455: mol_type = other DNA
atgtggtatgtgagtacaaggggtgttgccccaagagtgaattttgagggggctctcttcagcggctacgcccctgatggcggtctgtttatgcccgaggaactcccacagttggatagaggaacactttgtcagtggagcacgctttcctaccccggactcgtgaaagaactgtgcgccctgtttattgggtctgagctcctccctaaagatgagctgaacgatctcattgaccgagctttctcccgcttcagacatcgcgaagtggtgcatctgtctcggttacgcaatggccttaacgtacttgagctatggcacggcgtaacatacgcattcaaagacctgagcttatcttgcacgacccagttcctacaatactttttagagaagagggagaaacacgtgaccgtggtcgtcggcacttctggggacacaggaagtgctgccattgagagcgtgcagggagccaagaacatggacataatagttctacttcccaaagggcattgtacaaagatccaggagctgcagatgactacagtactgaaacagaacgtgcacgtctttggggttgaggggaatagcgacgaactggatgagcccattaagacagtcttcgccgatgtggcctttgttaaaaagcacaacctcatgtcactaaacagtatcaactggtcacgggtcctggtacagatggctcatcacttctttgcctattttcagtgcacccccagtctcgatacccatcctttgcccttagtggaggtggtggtgcccaccggcgccgcgggcaacctggcagccggctacatcgctcagaagataggcctgccaatcagactggttgtggctgtcaaccgcaatgacataatccacaggaccgtgcagcaaggggactttagcctgtctgaggctgtaaagtccaccttggcatccgccatggacattcaggtaccttacaacatggagcgcgtgttttggctgctctccgggtccgattcccaagtgacaagggctttaatggaacagtttgagagaactcagagcgtcaacctccctaaggaactccattcaaaacttagcgaagcggtgacaagcgtaagtgtgagtgatgaggccatcacccaaacaatggggcggtgctgggacgagaaccagtatctgctgtgtccacatagcgctgtggccgtaaactaccactaccagcagattgatagacagcagccaagcacacccaggtgttgcctggcacctgcatcagccgcgaaatttccagaggccgtcttagcagcaggattgacacccgagacacctgcagagattgtggccctcgagcacaaagagacccggtgcacgctgatgagacggggggacaactggatgctgatgctccgggacactattgaagatctgtcacgacagtggcgttcacacgcactgaatacgtcccagtag

SEQ ID NO: 5659 - DNA, 159 bp, synthetic construct
  misc_feature 1..159: note = source = /note="Description of Artificial Sequence: Synthetic coding sequence"
  source 1..159: mol_type = other DNA
atgaaactgtgtgtgaccgtgttgtcactcctggtgttggttgccgccttctgttccctggccctgtctgcgccaagtaataagcctctagaggcttccaagagcgccctgactcctgtgtcaccaggatcgcggagcacctgtatgacttggaattag

SEQ ID NO: 5660 - DNA, 675 bp, synthetic construct
  misc_feature 1..675: note = source = /note="Description of Artificial Sequence: Synthetic coding sequence"
  source 1..675: mol_type = other DNA
atgcgagtgagtggcgttctccgactcttagccctcatcttcgctattgtgactacatggatgttcatccggtcgtatatgtctttctccatgaagaccatcaggcttcctcgctggctggccgcctctccaaccaaggagattcaagtgaagaagtacaaatgcggtctgatcaaaccctgtcccgctaattatttcgctttcaaaatttgtagcggcgctgcaaatgtggtcggccccaccatgtgtttcgaagaccggatgattatgtcacccgttaaaaacaacgtcgggaggggcctgaacatcgctctggtcaatggcaccacaggcgcagtgcttggccagaaggctttcgacatgtactccggtgatgtaatgcatttggtgaaatttctgaaggagatccccgggggggctttagtcctcgtggcctcctatgatgatccgggaaccaaaatgaacgacgaatcaagaaagctttttagtgatctcggtagcagctacgcgaaacaactgggattcagggactcatgggtttttatcggcgccaaggatctgcgtggaaaatctccgttcgagcagtttctcaaaaactcaccggacaccaacaagtatgagggttggcccgagctcttagaaatggagggttgtatgccaccaaaacccttttag

SEQ ID NO: 5661 - DNA, 1404 bp, synthetic construct
  misc_feature 1..1404: note = source = /note="Description of Artificial Sequence: Synthetic coding sequence"
  source 1..1404: mol_type = other DNA
atgttgatattttggacgataacgctgttcctgctaggcgccgctaaaggaaaagaggtctgctacgaagatcttggttgttttagtgataccgaaccatggggcggtactgccattaggcccctgaaaatcctgccctggagccccgaaaaaataggaacaaggtttctcctgtacactaacgaaaacccgaataatttccagatcttactcctgagtgacccctcgaccatcgaagcctcaaattttcagatggataggaaaacaaggtttatcatacacggattcattgacaaaggtgatgaatcatgggtgacagatatgtgcaagaagctgttcgaagtcgaagaagtgaactgcatctgcgtggactggaaaaagggctcacaggcgacatacacccaggctgccaacaacgtgcgcgtcgttggggcccaagtggctcaaatgctcgatattttacttacagaatactcgtaccctcccagtaaggtgcacctcatcggacactcactgggcgcacatgttgctggggaagctggatctaaaacccccggattgagccgtataaccgggctggaccccgtggaagcctcattcgaaagtactccagaagaggtgcgccttgacccctcagacgccgatttcgtcgacgtgattcacacagacgccgcccctctgataccattccttgggtttggcacgaaccagcaaatgggacacttggacttcttcccgaacggcggggaatcaatgcctgggtgcaagaagaatgccctcagtcagatcgtggatctggacggcatttgggccggtacacgtgatttcgtagcctgtaaccacctccggagctacaagtactatttggaatctattttaaatcctgatggatttgccgcttacccctgtacctcttacaagtcctttgagtccgataagtgcttcccatgccccgatcagggatgcccacagatggggcactacgctgacaagtttgcaggcaggacgagtgaggaacagcagaagttttttctgaacactggagaggcctctaatttcgctcggtggcgctacggcgtgagtatcacactctccggtaggactgcaaccgggcagatcaaggtcgcattatttggaaacaagggcaatacccatcaatattccatttttagggggattctgaagcccggaagcactcactcttatgaatttgacgccaaactggatgtcgggactatcgaaaaagtgaaatttctctggaataataacgtgataaatccaactttgccaaaagtgggagccaccaagattacggttcagaagggggaagagaaaaccgtctacaatttctgctccgaagacacagtgcgggaggacactctgttaactctgacgccttgctag

SEQ ID NO: 5662 - DNA, 237 bp, synthetic construct
  misc_feature 1..237: note = source = /note="Description of Artificial Sequence: Synthetic coding sequence"
  source 1..237: mol_type = other DNA
atggggagtggactgccactggtcctgctcttaacactgctgggatcctcgcatgggacggggcctggtatgacactccagttaaagctgaaggagtcttttctgacaaactcgagttacgaaagcagcttcctggagctgttggagaagctctgtctcctgctgcatctaccctccggcacttcagtcaccctgcaccatgcccgcagccaacatcacgtggtatgcaatacgtag

SEQ ID NO: 5663 - DNA, 291 bp, synthetic construct
  misc_feature 1..291: note = source = /note="Description of Artificial Sequence: Synthetic coding sequence"
  source 1..291: mol_type = other DNA
atggagcacaaggaggtcgtcctcctgttactcctgttcttgaaaagcgggcagggagagcccttggacgattatgtcaacactcagggaccaagcctttttagcgtgactaaaaagcagttaggagcagggagtcgggaagagtgcgcagcaaagtgcgaagaggacaaggagtttacatgccgtgcattccagtaccattcaaaagaacagcagtgtgtcatcatggcggaaaataggaaaagctccatcattatcaggatgcgggacgcagttctgttcgaaaagtag

SEQ ID NO: 5664 - DNA, 1083 bp, synthetic construct
  misc_feature 1..1083: note = source = /note="Description of Artificial Sequence: Synthetic coding sequence"
  source 1..1083: mol_type = other DNA
atggggttgctgcttctcgtcccactgctactgctccccggttcttacgggttgcctttttataatgggttctactattcaaattcggctaacgatcaaaacttgggtaatgggcacgggaaggacttgctaaacggggtgaaattagtggtggaaacaccagaggaaactctgttcacctatcagggagccagtgtcattctcccgtgtagatatcgctacgagcctgccctcgtttccccccgcagagtgagggttaagtggtggaagctgtcagaaaatggcgctccagaaaaagatgtactcgttgccattggcctgagacatagatctttcggtgactaccaggggagagttcatttacggcaggacaaagagcatgatgtcagcctggagattcaagacttgcggctggaggattatggccggtacagatgcgaggtaatagacggactggaagatgaatcaggactggttgaactcgaactccggggcgtagtcttcccttatcaatccccaaacgggaggtaccaatttaatttccacgaagggcagcaggtatgtgcagaacaggctgcagtggttgcatctttcgagcagttattcagggcctgggaggagggcctggactggtgcaatgcaggctggttgcaggacgcaacagtgcagtacccaatcatgctaccgcggcagccctgcggcggacccggcttggctcccggcgttcgctcatacggacctaggcaccgtagactgcacagatacgatgtgttttgtttcgctaccgccctcaagggccgcgtctactacttagagcatcctgaaaagctaacactgactgaggcccgtgaagcctgccaggaagacgacgccacaatcgccaaggtggggcagctcttcgcggcttggaagttccatggactggacaggtgcgatgctgggtggctggccgacggcagtgtccggtatcctgttgtccacccccatcctaattgtggccccccggaaccgggtgttcgcagcttcggatttcctgatccacagtccagactgtatggcgtctactgttaccgacagcactag

SEQ ID NO: 5665 - DNA, 810 bp, synthetic construct
  misc_feature 1..810: note = source = /note="Description of Artificial Sequence: Synthetic coding sequence"
  source 1..810: mol_type = other DNA
atgattaggaccttactgctgtcaactctggttgctggagcattgtcctgcggggatccgacctaccctccttatgtgacacgtgttgttggtggggaggaagctaggcccaatagctggccttggcaggtcagcttgcagtattcttctaatggcaagtggtaccatacatgcggcgggtcccttatcgctaacagttgggttctgactgcagcccattgcatttccagttctcgcacatatagagtgggcctggggcgtcacaatctgtatgtcgccgagagcggcagtctcgctgtctctgtgagcaagatcgttgtgcataaggattggaactcaaaccagatttccaagggtaatgatattgcgctgctgaagctcgccaaccctgtctcactcactgacaagatccagctcgcatgtctcccacccgccggaacaattttacccaacaactatccttgctacgttaccggttggggtcggctgcaaactaatggggcagtgccagacgtgttacagcagggtcgcttgctcgtcgtagactatgcgacatgcagcagctcagcctggtggggttcaagtgtgaaaacaagcatgatatgtgccgggggagatggtgtcattagctcctgtaacggtgacagtggcggaccactcaattgtcaggcctctgacggacgttggcaggtgcacgggatagtgagttttggcagcaggctggggtgtaactattaccataagccatcagttttcaccagagtgtcaaactacatcgattggatcaatagcgtcatcgcgaataattag

SEQ ID NO: 5666 - DNA, 1122 bp, synthetic construct
  misc_feature 1..1122: note = source = /note="Description of Artificial Sequence: Synthetic coding sequence"
  source 1..1122: mol_type = other DNA
atgctgccgtggttgttggttttctcggctctgggcattcaagcatggggggactcttcctggaataaaacacaagccaagcaggtctctgagggtctgcagtacttatttgagaacatcagtcagcttaccgaaaagggcctccctactgatgtctctacaacagtgtcacgcaaagcatggggggcagaagcggttggctgctccatacaacttactactcctgtgaatgtgttggtaattcatcacgtgcctggactggaatgtcacgaccagaccgtctgcagtcaaaggcttcgcgagcttcaagcacatcacgtccacaacaattcagggtgtgatgtggcttataacttcctggtgggggacgatggcagggtgtacgagggggtcgggtggaacattcaaggcgtgcacactcaggggtacaataacatcagtcttggtttcgcattcttcggaaccaaaaagggccatagcccctccccagccgctctatccgctatggagaatctcataacatacgccgttcaaaagggccacttgtcttcgtcgtatgtgcagccactgctcggtaagggtgaaaactgcctagccccacggcagaagacctccttgaagaaggcctgtcctggcgtagtgcctagaagcgtatggggagcgcgggagacccattgccctaggatgacactgcctgccaaatatgggatcataattcacacagcaggtcggacttgtaatatcagcgacgagtgccgcctgctggtgcgtgatatacaatccttttatatagaccggcttaaaagctgtgacatcggctataactttctggtaggccaggacggtgccatttatgagggcgtcggatggaatgttcagggcagctccactccaggttatgacgacattgctctgggcatcacttttatgggcactttcaccggcattccaccaaacgcagctgcccttgaagctgcccaggatctgatacagtgcgccatggttaagggctatcttactcctaattacctcctagtgggacactccgacgtggctcgaacactgtccccagggcaggctctttacaacatcatcagcacctggccacacttcaaacactag

SEQ ID NO: 5667 - DNA, 327 bp, synthetic construct
  misc_feature 1..327: note = source = /note="Description of Artificial Sequence: Synthetic coding sequence"
  source 1..327: mol_type = other DNA
atgaggcagcgactgctgccttctgtgaccagtctgctactcgtggccctcttgttccccgggagctcgcaagcacgccacgttaaccacagtgccaccgaggcgctgggcgaactccgcgaacgggcccccggccagggtacaaacggctttcaactgctgcgtcatgctgttaagcgagacttactgcctccgagaacacccccgtaccagggggacgttcccccaggaatccgcaataccatttgccacatgcaacaggggatctgccggctgttcttctgccatagtggtacaggtcagcaacaccggcagaggtgtggctag

SEQ ID NO: 5668 - DNA, 708 bp, synthetic construct
  misc_feature 1..708: note = source = /note="Description of Artificial Sequence: Synthetic coding sequence"
  source 1..708: mol_type = other DNA
atgtctccacccctgcttaagctgggagctgtgctctccactatggcgatgattagcaactggatgtcccaaaccctgccgtcccttgtgggactgaacaccacccggcttagtactccagatacgttgacgcaaatcagcccaaaggaggggtggcaggtgtactcatctgcacaagatccagacggacgatgcatttgtactgtagtcgcacccgaacagaacctctgttctcgggacgcgaagtccagacaattaagacagcttctcgaaaaggtgcagaacatgtcccaaagcattgaggtgctcaatctccgtacccagagagatttccagtatgtactcaagatggaaactcagatgaaggggttaaaggccaaattccggcagatcgaggacgatcggaagactcttatgactaaacactttcaggagctcaaggagaagatggacgaactgctaccattgatacccgttctcgaacaatataaaacggacgccaagttgatcacgcagttcaaagaggagattcgcaacctgagcgccgttctcacaggcatccaggaggagattggcgcctacgactacgaggaactccaccagcgtgtgctctcccttgagacaaggctgagagattgcatgaagaagctgatcgatctgaagaaaaggaaggaagaggagaagaggcagcagaaaggggaagcctag

SEQ ID NO: 5669 - DNA, 606 bp, synthetic construct
  misc_feature 1..606: note = source = /note="Description of Artificial Sequence: Synthetic coding sequence"
  source 1..606: mol_type = other DNA
atgaacttaaattgcccaccttgtgtgacgggtctgagggtgtggtcctcatgtcgctcgaaaccaaactcacgcgcgcgatcttgccgaagctgtaccggagcttctaggacactgccctcccaccatatgagccacgttgaatgcccgagtggcatagtcaacgaggaaaacttcaagcaaatttactcgcaattctttccacagggcgattctagtacttacgcaacattcctttttaatgctttcgacacaaatcacgacggctcagtttcgtttgaggactttgtagctggcctgtccgtcatcctgagaggcacagtggacgaccgactcaattgggcatttaacctgtatgacttgaacaaagacgggtgcatcaccaaagaggaaatgttggacattatgaagtcaatatacgacatgatgggaaagtatacgtatccagccctcagggaggaagccccaagagagcatgtggagtccttcttccaaaagatggatcgaaacaaagacggcgtagttactatcgaggaatttattgaaagctgtcagaaagatgagaatattatgaggtcaatgcaactgttcgacaatgttatatag

SEQ ID NO: 5670 - DNA, 693 bp, synthetic construct
  misc_feature 1..693: note = source = /note="Description of Artificial Sequence: Synthetic coding sequence"
  source 1..693: mol_type = other DNA
atgcggctagcaggcccattgagaatagtggttctggtagtgtcggtaggtgtgacttggatcgtcgtgtcaatcctcctaggaggccccggcagtggatttcccaggatccaacagcttttcacttccccagaatcctctgttacagctgcgcccagggcaaggaagtacaaatgtggcttgcctcagccctgtccagaggagcacctcgcctttagggtggtaagtggtgctgccaatgttattgggcccaaaatctgcctagaagacaaaatgcttatgtcgtcggtgaaggacaacgtgggtcggggcctaaatatagccctcgtcaatggcgtatcgggcgagctcattgaggcccgcgctttcgatatgtgggccggggacgtcaatgacctgctgaaatttatacgtcctctgcatgagggcacgctagtgtttgtggcgagctacgacgaccctgccactaaaatgaacgaagagacccggaaactgttcagtgagttaggctctcggaacgcaaaagaattagcctttagagacagctgggtcttcgtcggtgctaagggagtccagaataaatcgccttttgaacaacatgtgaaaaattctaagcattcgaataaatacgaaggctggcctgaggccctggagatggaaggctgtattccacgaagatctacagccagctag

SEQ ID NO: 5671 - DNA, 684 bp, synthetic construct
  misc_feature 1..684: note = source = /note="Description of Artificial Sequence: Synthetic coding sequence"
  source 1..684: mol_type = other DNA
atgcgggtggccggcgccgccaaattggtcgtggctgttgccgtgttcttacttacgttttacgttatatcccaagtgttcgaaatcaaaatggacgcctccctgggcaacctcttcgcgcggtccgcgttagacaccgccgccaggtctactaaaccccccaggtacaagtgtggcatcagtaaagcatgccctgaaaagcacttcgcgtttaagatggcttcaggagctgctaacgtggttggccccaagatatgtttagaagataatgtcctgatgagcggcgttaaaaataacgttggtagggggatcaacgttgctctagctaacggcaaaacaggtgaggttctggatacaaagtattttgacatgtgggggggagacgtggcccctttcatcgagttcttgaaggcaattcaggacgggactatcgttcttatgggaacctatgatgatggcgccaccaagcttaatgacgaagctcgtcgactcattgccgacctgggctctacctcgattactaatctgggctttagggacaactgggttttttgcgggggcaaagggattaaaactaaatcacctttcgagcagcacataaagaacaacaaggacaccaacaagtatgaagggtggcccgaggtggtcgagatggagggctgtatcccacagaagcaagactag

SEQ ID NO: 5672 - DNA, 1656 bp, synthetic construct
  misc_feature 1..1656: note = source = /note="Description of Artificial Sequence: Synthetic coding sequence"
  source 1..1656: mol_type = other DNA
atggaagacagcgattcagcagctaagcagttgggactggccgaggcggctgcagccggcggcgaagccgaggagcccgtcctttctagagacgaagattcagaggaagacgcagatagcgaagccgaacgcgagacgcctcgggtaacagccgtcgccgtgatggccgccgagcctggacatatggacatgggtgccgaggccctgcctgggccagatgaagcggctgctgccgccgcctttgctgaggtcactacagttaccgtcgctaatgtgggggccgctgcagacaacgtgttcactaccagcgtggccaatgctgcctccatctcagggcacgtccttagcggaagaactgctttgcaaatcggggacagtcttaacacagagaaggccaccttgattgtcgtgcatactgatggatccatagtcgagacaacaggccttaaaggccctgctgcacctctcactcccggaccgcagagcccgcctaccccgctggcccccggacaagaaaagggcggtacgaagtacaactgggacccttcggtgtatgactctgaactgcccgtgcgctgtcgcaatatctctggtactctctataagaatcggctgggttcaggtgggaggggccggtgtatcaagcagggggagaattggtactctcccacggaattcgaagcaatggccggccgtgcttcctccaaggactggaagcgctcaatccgctatgccggacggcctttacagtgtcttattcaggatggaatcctaaacccacacgctgccagctgtacgtgtgccgcttgttgcgatgacatgaccttgagcgggcccgtccgattgtttgtaccatacaagcgtcgcaaaaaagaaaatgaattgccgaccacccccgttaagaaggacagccctaagaatatcacacttttacctgcaacagccgccacaacgttcaccgtcacaccaagtggtcagatcactacaagcggcgccttgaccttcgatcgagcttccactgtcgaggccactgccgtcatctcagaaagtcctgcccagggagatgtatttgctggggccaccgttcaggaagccagcgtgcagcccccttgtcgggcctcacatcctgagccgcattacccaggctatcaagattcttgccagattgcccctttccctgaggccgcactcccaacaagccacccaaagatcgtcctcacctctctccccgcacttgccgtcccccccccaactccgaccaaagcggcccctcctgcactggtgaatggattggaattgagtgagcctcgaagctggctgtacctggaggagatggtcaactcgctgctgaacacagctcaacagttgaaaacactgttcgaacaggcgaagcacgcctccacataccgagaagccgctactaaccaggcgaagattcatgccgatgccgagcggaaagagcagtcatgcgtgaactgtggccgcgaggctatgagcgagtgcaccggctgtcataaagtcaattactgttcaactttttgccagaggaaagactggaaggaccatcagcatatctgtgggcaatccgctgccgtcacagtacaggccgatgaggttcacgtcgctgagagcgttatggagaaggttactgtttag

SEQ ID NO: 5673 - DNA, 2022 bp, synthetic construct
  misc_feature 1..2022: note = source = /note="Description of Artificial Sequence: Synthetic coding sequence"
  source 1..2022: mol_type = other DNA
atgaaaccgggcggtttctggctgcacctcacgctgctgggagcctccctgccagctgccctcggatggatggacccaggtacaagtagagggcccgatgtcggcgtcggagaatcacaggctgaagagccaagaagtttcgaggtgacaaggcgagaaggactttcttcccacaatgaactgttggcatcctgcggaaaaaagttctgctcccggggatcccggtgcgtgctgagtctggcccctgaggacagggtgtccgtgactaccgtgacagtagggctgagtaccgtgctgacctgcgcagtgcacggggaccttcggcccccaatcatctggaaaagaaacggactcactctgaatttcctcgatttggaagacatcaacgacttcggggaagatgacagcctctacatcaccaaggtcacaacaatacacatggggaactacacttgccacgcttcagggcatgagcagctgtttcagacccacgtgctacaggtgaacgttccccctgtcatccgtgtctatcccgagagccaagcacaggaacccggagttgccgcctccttgcgctgtcatgcagaaggtattccaatgcctaggatcacctggctgaaaaacggggtggatgtatccactcaaatgagcaagcagctctctctgctcgccaacggatccgagctgcacatctcatcagtcaggtatgaggacactggcgcctatacatgcatcgcaaagaacgaggtgggagttgatgaggatatttccagtcttttcatagaagatagtgccagaaagaccctggccaacatcctgtggcgcgaagaaggcttgtccgtgggaaacatgttttacgttttctcagacgacggcattattgtcattcatccggtggattgcgaaatccagcgccacctgaaaccaacggagaagatatttatgtcctacgaggagatttgcccgcagagagagaagaatgccactcagccttgccagtgggtaagcgcagtgaacgtgcgcaatagatatatttacgtcgcccagcctgctctatcacgcgttcttgttgtagacatccaagcccagaaggtgttgcagtccatcggagtggaccccctgccagccaaactgtcttatgacaagagccatgaccaggtttgggtattatcctggggagacgttcataagtctagaccatcactgcaggtgatcacagaggcttccaccggacaatcccagcacctcatccggactcccttcgcgggagtggacgactttttcatcccaccaaccaatctcattatcaatcatatacgatttgggtttatcttcaataaaagtgacccggctgtccacaaggtggacctcgagacgatgatgcccttaaagacaatcggactgcaccatcatggatgtgtgcctcaggccatggcccacacccatcttggtggctactttttcatccagtgcagacaagatagccctgcctctgccgccagacaactcttagtggacagcgtgacagatagcgtgcttgggccaaacggcgatgtgacgggaaccccccacacttcacctgacggccgctttatcgtctctgccgccgctgacagtccatggttgcacgtgcaggagataacagtccgcggagaaatccagactttgtacgacctgcagattaactctggcataagcgatctggcttttcagcgctcttttacggagtcaaaccagtacaatatatatgcggcattgcatacagaaccggatcttctgttcctggagctcagcaccggaaaagtcggcatgctaaagaaccttaaagagcctcctgctgggcccgctcagccctggggagggacacatcgcatcatgagagactccggactgtttggccagtacttactcacacctgcccgagaatccctctttctgattaatggccgccagaatactctgcggtgcgaggtgtccggtatcaaggggggcactacggtggtctgggtgggagaggtgtag

SEQ ID NO: 5674 - DNA, 2007 bp, synthetic construct
  misc_feature 1..2007: note = source = /note="Description of Artificial Sequence: Synthetic coding sequence"
  source 1..2007: mol_type = other DNA
atggatctggtgttaaagagatgtcttctgcacctagccgttatcggggctcttctagctgttggagccacaaaagtccctcgtaatcaagactggttgggtgtgtcaaggcagctgcgcacaaaggcctggaatcgccaattgtatcctgagtggactgaggcacagagattagactgctggcgcggcggtcaggtgtcattgaaggtatcaaatgatgggccaacactcattggtgctaacgccagtttctcaattgctctaaatttccctgggagtcagaaagttttgcccgatggccaggtcatctgggttaataatacaattattaatggggatcaggtttggggcggacagccagtctaccctcaagagaccgacgatgcttgtatcttcccagatggagggccctgtccatcgggcagctggagtcagaagagaagttttgtatatgtgtggaaaacctggggccagtactggcaggtgctgggcggacccgttagcggactgtccatcggcacaggaagagctatgctcggaacccatacaatggaggtgactgtatatcaccgccgtgggagcaggtcttacgtacccctagcacattccagttccgcattcactattaccgatcaggtaccgtttagcgtgagcgtgagtcaacttagagccctggacggaggaaacaaacatttcctgcgaaatcaacccctcacctttgctcttcagctgcatgatcccagcggatatctagctgaagcagacttatcatacacttgggacttcggcgattcatcaggcacccttattagtcgtgcgctggtcgtaacgcacacgtacttagagcctgggccagtaactgcgcaggttgttcttcaggcggcaattcctttaacaagctgcggcagctcacccgtgcccgggaccactgacgggcacaggcccaccgccgaggcacctaacacaaccgccgggcaggtccccactacggaggtagtgggaactacccccggccaggcacccacagcggaaccttccgggactacctctgtccaggtacccaccacagaagtgatctccactgcaccggtccagatgcctacagccgagtcaaccggtatgactcccgagaaagtgccagtttcagaggtcatgggcacaaccttagcggagatgtccacacctgaagctacaggcatgacacccgcggaggtgagcattgtggtgctttcagggacgactgctgctcaggtcaccaccacagaatgggtggaaacaaccgcacgcgagctaccgataccggagcctgaaggcccagacgccagctctataatgagcaccgagagcattactggctcccttggtccactgttggacggcaccgccacattgcgactagtgaagcggcaggtgcccctggactgcgtgctttacagatacggctctttttcagtgactttagacattgtgcagggcattgagagcgctgagattctccaggccgttccatcaggtgagggcgatgcgttcgagctgaccgttagttgtcagggcggactgcccaaggaggcctgtatggagatcagctcccctggttgccagccccctgcccagaggctatgtcagcctgtgctcccctctccagcctgtcagcttgtcctgcatcaaattcttaagggcgggagtgggacatattgtctgaacgtgtctttggccgacacaaactctcttgccgtggtatcaacacagctcatcatgccagtccctggcattctcctgacaggacaggaggcaggactgggtcaggtaccccttattgttgggattctgttggttctgatggcagtagtgctggctagtttaatctatcggaggagactaatgaagcaggatttttctgtgccacagctgccccattcctcctcccattggctaaggcttcctaggattttttgttcttgccctatcggcgaaaacagtccccttctttctggccagcaggtgtag

SEQ ID NO: 5675 - DNA, 1746 bp, synthetic construct
  misc_feature 1..1746: note = source = /note="Description of Artificial Sequence: Synthetic coding sequence"
  source 1..1746: mol_type = other DNA
atgcagcaggatggtctgggagtgggtactaggaacggctcaggcaaagggcgcagcgttcacccaagctggccatggtgcgctccacgtccactcagatatttcgggagagatgcgcgggccaggcgtgctcagactgccgccatggcgcttttggcaggggggctcagcagggggttaggaagccacccagctgctgccggcagagacgccgttgtatttgtgtggcttcttctctccacgtggtgcacagcgccagcaagagctatccaggttactgtgtccaatccttaccatgttgttatcctgtttcagcccgtcactctgccatgtacctatcaaatgacaagcacgcctacccagcctattgtgatatggaagtacaaatctttctgtagggaccgaatagccgacgccttttcacccgcctctgtagacaatcagttaaatgcccaattggccgcagggaacccaggatataatccgtacgtcgaatgtcaggactcggtaaggactgttcgcgtggtggccaccaaacagggtaatgctgtgacactcggagactactaccagggtaggaggatcacaataaccggaaacgctgatttgacatttgaccagacggcgtggggtgactcgggagtttactactgcagcgtagtttcagcccaggacctccagggcaataacgaggcttatgctgaactaatcgttctggtttatgcggccgggaaagccgctactagcggggttccgtctatctatgcaccttctacgtacgcccacttaagtccagccaaaacaccaccaccccccgccatgatccctatgggaccagcgtataatggttatcccgggggctaccctggagatgtggatcgcagtagctccgcgggcggccaggggtcttatgtaccacttcttcgagacaccgatagttcagttgcgagcgaggttagaagtggctatagaatacaggcatcccagcaagacgattctatgagggtgctctactatatggagaaggagcttgccaattttgacccgtctagaccgggccccccatccggccgtgtggaacgggcgatgagtgaagtgacgtcccttcacgaagatgattggagaagtagacctagtaggggcccggctttaacacccatccgagatgaagagtggggagggcactcgcccaggtctccaagaggatgggatcaggagccagcgcgggaacaggctgggggcgggtggcgcgcgagacggccccgtgccagaagtgtagatgcactggatgatctgactcctcccagcacggctgagtccgggtccaggtctccaacctctaatggaggtcggtctcgagcttatatgcctcctcggtccaggtctagggacgacctgtacgatcaggacgactcacgggactttccacgatccagggatccacactacgatgactttcgctcccgcgagcggccccccgccgatcctcgcagccatcatcaccgcacaagggacccaagggacaatggttccaggtcaggtgatcttccatacgacggacgtcttttagaagaggccgttcggaaaaaggggtccgaggagcgtcggcggcctcacaaagaagaagaggaggaagcctactatcctccagccccacctccatactccgagactgatagccaggcatcgagagaaagacggctgaaaaagaatttagcgttatcaagggagagcctggtggtgtag

SEQ ID NO: 5676 - DNA, 1959 bp, synthetic construct
  misc_feature 1..1959: note = source = /note="Description of Artificial Sequence: Synthetic coding sequence"
  source 1..1959: mol_type = other DNA
atgccccctccactgcctctgcttctcctgaccgtgctagtcgtggcagctgcccgccctggttgcgaatttgaaaggaaccccgccggggagtgccaccgcccacccgcagccgacagtgcgacctgcgtggatctacagctaaggacctgctcagacgccgcttacaaccacaccacatttcccaacctgctgcagcatcgtagctgggaggtggtcgaagccagtagtgagtatatcctacttagcgttctgcaccaactgcttgaggggcagtgtaacccagatctgcgacttctcggatgcgctgtcctggcccctcggtgtgaggggggatgggtgcggagaccctgcaggcatatttgtgaggggctccgcgaggtctgccagcccgccttcgacgcaatagacatggcctggccatacttcctagattgccatcgctatttcactcgggaggatgaaggatgctacgatcctcttgagaagttacggggcggcctggaagccgacgaggcattgccctccggtcttcccccgacatttattaggttctctcaccattcctacgcacagatggtacgtgtcttaagacggaccgctagcaggtgtgcgcatgtggcccggacatactccattgggcgctcttttgatggaagggaactcctagtcatcgagtttagctctaggccgggtcaacacgaactcatggaacccgaggtgaagctcatcggtaatattcatggaaatgaggtggccggtagagagatgctgatctatttggcccagtatctgtgctcagaatacctgctcggaaaccccaggatccagagattgctcaatactaccagaatccatctcctcccctcaatgaacccagatgggtatgaggtagctgcagctgagggagcgggctataacggctggacatccggccgacaaaatgcccagaacctagatctgaatagaaatttccccgacctgaccagtgaatattaccggctcgccgaaacgagaggagctagatcggatcatatccccatccctcagcactattggtggggcaaggttgcgccagaaacgaaagctatcatgaagtggatgcagacaatcccttttgtgttgagcgcgtctttgcatgggggagatctcgttgtgagctatccctttgacttctccaagcatcctcaggaggagaaaatgttctctccaacccctgatgagaagatgttcaaactgctgtcccgtgcttatgccgatgtacatcccatgatgatggaccgaagtgagaatcgatgtggagggaacttcttgaagagagggagtatcattaatggggccgattggtattccttcacaggtggaatgagcgacttcaattatctgcatactaactgctttgaaatcaccgtggaactcggatgtgtcaagtttccaccagaggaggcattgtatatcttatggcagcacaataaagaatcattgctcaatttcgtggaaaccgtccatcgcgggattaagggggtagtgactgacaagtttggaaagcccgtgaagaacgcacgcatttcagtcaagggcatccgccacgatatcactaccgctccagacggagactattggcggctgctgccacccggtatacatattgtgattgcacaagccccgggctatgctaaggtcatcaagaaagtgattatacctgcaagaatgaaaagagctggccgtgtggatttcatcctgcagcccctcggcatgggccctaaaaatttcatccatggactgcggcgcacaggccctcacgaccctttgggcggcgcttcctccctgggcgaagcaaccgaacccgatccactaagggctaggcggcagccatccgcggatgggagtaagccgtggtggtggagctattttactagcctgtccactcaccgccctaggtggctccttaagtactag

SEQ ID NO: 5677 - DNA, 279 bp, synthetic construct
  misc_feature 1..279: note = source = /note="Description of Artificial Sequence: Synthetic coding sequence"
  source 1..279: mol_type = other DNA
atgaagctatgtgttaccgtgttgagcctccttgtccttgtggccgccttttgcagtctggctctgtccgccccaatgggatcagatcccccaaccgcctgttgtttcagttatacagccaggaaactccctagaaacttcgtggtggattattatgaaacttcttctctgtgcagccagcctgccgtcgtcgggtttttgggtcggaagggcaaacaggtctgcgcagacccgtcagaatcatgggtacaagaatacgtgtacgaccttgaactgtag

SEQ ID NO: 5678 - DNA, 249 bp, synthetic construct
  misc_feature 1..249: note = source = /note="Description of Artificial Sequence: Synthetic coding sequence"
  source 1..249: mol_type = other DNA
atgagacagcgattgctaccctcagtcacttccctcctgctagtggcgctgctgttccctgggagtagtcaggctcgccatgtgaatcattccgccacggaagctcttggagaactgagagaacgtgctcccggacaggggacgaacggatttcagttactgcgacacgccgtgaaacgagatctgctgccaccccgcacgcctccataccagggcacggggcaacaacacaggcagagatgcgggtag

SEQ ID NO: 5679 - DNA, 411 bp, synthetic construct
  misc_feature 1..411: note = source = /note="Description of Artificial Sequence: Synthetic coding sequence"
  source 1..411: mol_type = other DNA
atggacaacgtgcagcccaagataaagcacagacctttctgcttcagcgtgaagggtcacgtcaaaatgctgaggctggccttgaccgtgacatcaatgaccttctttatcatcgcccaggcccctgagccctacatagtcatcaccgggtttgaagttaccgtgatcctgtttttcatcctcctatatgtactaagactcgatcggctcatgaagtggctgttttggccgttgttggacatcatcaattcgttagtcactacggtgtttatgctcatcgttagtgttctggcactcattccagagaccaccaccctcaccgtcgggggcggagtctttgcgctagttactgctgtgtgctgtctggcagatggcgcactgatctaccggaagcttctcttccttagatag

SEQ ID NO: 5680 - DNA, 1068 bp, synthetic construct
  misc_feature 1..1068: note = source = /note="Description of Artificial Sequence: Synthetic coding sequence"
  source 1..1068: mol_type = other DNA
atgcagctcacgacctgcctgagagagaccctctttaccggcgcctcacagaaaaccagcctctggtggctgggcattgcaagtttcggggtgccggaaaagcttggttgcgccaacctgcctctcaacagccgacagaaagagctgtgtaagaggaagccctaccttctgccctctattcgcgagggcgctcggctgggtatacaagagtgcggctcacagtttcgacatgaaaggtggaattgcatgatcactgcagccgcgaccaccgccccgatgggtgcctcgccccttttcggctacgagctctcaagtgggacaaaagaaaccgcctttatatatgccgtgatggcagccggactggttcacagtgtcaccagaagctgcagtgccggcaacatgaccgaatgcagctgcgacacaaccctgcagaatggggggtccgctagtgagggatggcattggggaggttgctctgatgatgttcagtacggaatgtggttcagcaggaagttcctagacttccctattggtaacactaccggcaaggagaacaaggtgctgttggcaatgaacctgcataacaatgaggcggggcggcaggctgtcgccaaactgatgagcgtcgactgtaggtgtcatggtgtctctgggagttgcgctgttaaaacctgctggaagaccatgagcagcttcgagaaaatcggccacctgctcaaggacaaatacgaaaatagtattcagatctccgataagaccaagcggaagatgagacggcgcgaaaaggatcaaaggaagatacctattcacaaggacgaccttctctacgtgaataagtccccaaattactgtgtggaggacaaaaaactgggtattccaggcacccagggcagggagtgcaaccgaacatcggaaggggccgacggctgcaatcttctctgttgcggacgcgggtacaacactcacgtggtcagacatgtcgaacggtgtgagtgcaagtttatatggtgctgctacgtccggtgccggcgatgcgaatccatgaccgatgtccatacctgcaagtag

SEQ ID NO: 5681 - DNA, 2916 bp, synthetic construct
  misc_feature 1..2916: note = source = /note="Description of Artificial Sequence: Synthetic coding sequence"
  source 1..2916: mol_type = other DNA
atgcttcggcgcccggctccagcgttggctccggcggccagactgttgctagctgggctgctgtgtggcggaggcgtctgggccgccagagttaacaagcacaaaccctggcttgaacccacataccatggtatagtgacagagaatgataatacagttctactggatccacccctaatagccctggacaaggacgctcccctaaggtttgctggcgaaatatgtgggtttaaaatccatgggcagaatgtgccctttgacgctgtcgtggtggacaagtctaccggtgaaggggtgatcagatccaaggaaaagcttgattgtgagttacagaaagattactcctttaccatccaggcgtatgattgcggcaaagggccagatggcacaaatgtcaagaaaagtcataaagcgacagtacacattcaggtaaatgacgtgaatgaatacgcaccagtgttcaaagaaaaaagctacaaggcaaccgttatagaggggaagcaatacgattctatcctgagagtagaggccgtcgacgccgactgttcccctcagttctcccagatttgttcctacgagatcatcacccccgacgtgcccttcacagtagacaaggatggatacatcaagaatacagaaaagctgaactatgggaaggaacatcagtataagctgaccgtaactgcttacgactgcggcaagaagcgggccactgaggacgtgttggtgaagatttctatcaagcctacttgtaccccgggctggcaaggttggaacaaccgcattgaatatgagcccggtaccggggcccttgcagttttccccaatatccacctcgaaacctgcgacgaaccagtcgctagcgtacaagctacggtagagctcgaaactagccacatcgggaaaggatgcgaccgcgacacctacagcgaaaagtctcttcatagattgtgtggagctgccgccgggacggctgaactgctgccatctccctcagggtcccttaattggactatgggcctgccgaccgataacgggcacgactccgatcaggtattcgagtttaatggaactcaggccgtgcgaatccccgatggggtggtttccgtttcacccaaagagcctttcactatctcagtttggatgagacacggccctttcggacgcaagaaagaaaccatcctgtgctcttctgataagaccgatatgaacagacaccattactctctgtacgtccacggatgccggctcatttttctttttcggcaggaccccagcgaagagaaaaaatatcggcccgcggaattccattggaagctgaatcaggtgtgtgacgaggaatggcatcactacgtcctcaacgtagagttcccgtccgtgaccctctacgtggatggaacttcccacgaaccgttctctgtgacagaggactacccactgcacccttccaagattgagacacagttagtagtcggagcctgttggcaggagtttagcggcgttgagaacgacaacgaaactgagcctgtgacggtagctagtgctggaggagacctgcacatgactcagttcttccgtggtaatcttgccggcctgacattgaggtctggaaagctggccgataagaaagtgatcgattgcctgtatacatgcaaagaaggtctagatctgcaggttctggaagattccggtcgcggagtacagattcaggcccatccctcgcagttggtactcactttggaaggagaggatctgggggagctggacaaagccatgcagcacatctcctacctcaattccaggcagtttccgacgccgggtatacgtagattgaagatcacctcaactataaagtgcttcaacgaagccacttgtataagtgtgcccccagtggacggatacgttatggtcttacaacccgaggagcccaagatttccctctctggagtacatcactttgcccgcgcagcttcagagttcgaatcctctgaaggtgtgtttttgttccccgaactgcgcatcatttcgacgataaccagagaagttgagccagagggcgacggggccgaagatccgacggtacaagagtctcttgtgagcgaagagatcgtgcacgatctggatacatgcgaagtaacggtggagggagaagaacttaaccatgagcaggagtccctggaggtcgacatggcgagactgcagcagaagggtatagaggtgtcctcatctgaactggggatgacctttactggcgtggacactatggcatcatacgaggaggtgctgcatctgctcagatatcggaattggcatgcgcgaagcctgctggacagaaagttcaagctgatttgctccgagctgaatggacgctacatcagtaatgaatttaaggttgaggtgaacgtgatacatacagctaatcctatggaacatgccaaccacatggcggcccagccccaattcgtgcacccggaacatcggtcttttgtcgacctctctgggcacaatctcgcgaaccctcaccccttcgccgtcgtgccgtctaccgcaacagtggtaattgtggtgtgcgtgagttttttggtgttcatgattattctgggagtattccgcatcagggccgcccacagacgtacaatgcgtgatcaagataccggcaaagagaacgaaatggactgggatgatagcgcactcactatcactgttaatcccatggaaacctacgaggaccagcattcttccgaggaagaggaggaagaggaggaagaggaagagagcgaagatggtgaagaggaggatgatatcaccagcgctgaatcagagtcttcggaggaggaagagggggaacagggggaccctcaaaatgccacgcgacagcagcagctagagtgggatgacagtaccctgagctattag

SEQ ID NO: 5682 - DNA, 564 bp, synthetic construct
  misc_feature 1..564: note = source = /note="Description of Artificial Sequence: Synthetic coding sequence"
  source 1..564: mol_type = other DNA
atggtcgctgcaaccgtcgctgcagcatggctgctgctgtgggctgcggcttgtgcgcagcaggagcaagacttctatgatttcaaggccgtgaacatacgcggtaagttagtgagtctggagaagtatagaggaagcgtgagtcttgtagtgaatgtggcctctgaatgtgggtttactgatcagcactacagggcactgcagcagctgcagagagacctgggtcctcatcactttaatgttctcgcttttccatgcaaccaatttggacagcaagagcctgattccaataaggagattgaatcctttgccaggaggacctatagcgtgtcattcccaatgttcagtaagatcgcggttaccggtaccggagctcatcctgcttttaaatacctagctcagacttccggcaaagagccgacatggaacttctggaagtacctggtggctccagacggcaaggtggtcggagcttgggatccaacggtgtccgtcgaagaggttagaccccaaataacagctctggttcgcaaacttatcctgctgaagcgggaggatctttag

SEQ ID NO: 5683 - DNA, 303 bp, synthetic construct
  misc_feature 1..303: note = source = /note="Description of Artificial Sequence: Synthetic coding sequence"
  source 1..303: mol_type = other DNA
atgtggggtttccttgttttgaaggcccggtggttggtgacgccagtacggactctggccacagaggcgggccagaagccttccttaagagggctactcgacgtgggcaacatccagcatagggctgccagagcacgcggactgacgcgaggcgttatcagagtgagccctcaagagcgaagccagcagaaccagtccgccccaaaaggccctacacccagcactcgacctaagccccggacccttggcccccaggcccacagcctggctttacaatccgtcgacctgctctttcgcccatag

SEQ ID NO: 5684 - DNA, 2352 bp, synthetic construct
  misc_feature 1..2352: note = source = /note="Description of Artificial Sequence: Synthetic coding sequence"
  source 1..2352: mol_type = other DNA
atgcgatggcagtgcggaactaggttcagagggctgaggccggcggtagctccctggactgccctgttagctcttgggctgccgggctgggtgctagcagttagcgccacggcagctgccgtggtgcctgagcaacatgcctcagtggccggacagcacccactcgactggctgctgaccgaccgtgggccctttcatagggctcaggaatatgcagattttatggaaaggtaccggcagggcttcacgacacgatatagaatctacagagagttcgccaggtggaaagtgaacaacctggccctcgaacggaaggacttcttctctttgccccttccactggcacctgagttcattagaaatattcggctgctagggcggcggccaaatctacaacaggttacagagaatctgatcaaaaaatatggcacccactttctcctctccgctacgctgggaggcgaggaatcactcactatttttgttgacaaacaaaaactgggaagaaaaaccgagaccactgggggcgcaagcattatcggaggaagcggtaactccacagccgtaagcttggagacgctccaccagcttgccgctagttattttattgacagagaaagcacactgcgccgcttacaccacatccagatcgccacaggggctataaaagtgacagaaacgcgcaccggcccacttggttgtagtaactatgacaacctggactccgtctctagcgttctcgtacagtctcccgagaataaggtgcaattgcttggcttgcaggttctgctccccgagtacctgcgcgagagatttgtggctgctgcattgtcatacattacttgttcctcagaaggggagctggtatgcaaggaaaatgactgttggtgtaaatgctcgcccacgtttcccgaatgtaactgccccgacgcggatatccaagcaatggaggactctctattgcagattcaggattcctgggctacccacaatcggcagttcgaggagtccgaggaattccaggcactgttgaagcgattgccggatgatagatttctgaattccacagcgatttcgcagttttgggcgatggataccagcctgcagcaccggtaccaacagcttggggcaggccttaaggtactcttcaaaaaaacccataggattttacgcaggctcttcaatctatgtaagagatgccacagacagcctagattccgccttcccaaagagagatctctgagctattggtggaatcgcatccagtcgttgctgtattgtggtgaatctacttttcccggaaccttccttgagcagagtcacagctgcacatgcccatatgatcagtcttcctgccagggtccaatcccttgcgccctgggtgagggcccagcatgcgcccactgtgccccagataatagtacacgatgtggatcctgtaatccagggtatgtgctcgctcagggactctgtcggcccgaggtcgccgaatctctggaaaattttctcggactggagaccgacctccaggatttagaactaaagtacctgttacagaaacaggattcccgcattgaggtgcatagtattttcatcagcaacgatatgagactgggaagctggtttgatcctagttggcgcaaacgcatgcttctaactttgaaatctaacaaatataagccaggcctggtacacgtgatgttggccctctcactgcagatctgtctgactaagaactccaccctagaaccagtgatggcgatatacgtgaacccattcggcgggtctcattccgaatcatggttcatgccagtgaatgagggtagctttcctgattgggagaggacaaacgtggacgctgccgcacagtgtcagaattggaccatcacactggggaacagatggaagactttctttgaaacggttcacgtttacctgcgtagccggattaagagcctggatgactcctcgaacgagaccatctactacgaacctcttgaaatgacagacccaagcaagaatcttggatatatgaagattaatacgttgcaggtctttggctattccctcccattcgatcctgacgccattcgcgacttaatactacagctggactatccatatacccaagggagtcaggactcggcccttttacagcttattgaactacgcgacagggtgaaccagctcagcccaccgggcaaagtgaggctagatttgttctcttgccttctgcggcaccgcctgaagctggccaacaacgaagtcgggcgtatccaaagtagcctgcgagctttcaattcaaagctaccaaatccggtggaatatgagaccggtaaactgtgttcctag

SEQ ID NO: 5685 - DNA, 2016 bp, synthetic construct
  misc_feature 1..2016: note = source = /note="Description of Artificial Sequence: Synthetic coding sequence"
  source 1..2016: mol_type = other DNA
atggctcagttgtttctgcccctcctagccgcactggttttggcccaggccccggccgcgctggcggatgtactggagggcgattcttcagaagacagagcctttcgggtccggatagctggtgatgccccacttcagggcgtgctcgggggagccttgaccatcccctgccatgttcattatctgcggccccctccatcccgccgggctgtgctaggttcccctcgcgtgaagtggacatttctaagccgcggtagggaggcggaagtgcttgttgcaagaggagtgcgggtcaaggttaacgaggcatatagatttagagttgccctccctgcttaccccgcctctctgactgatgtttctctcgctctgtctgagctgcggcctaacgatagtggtatctatcgatgcgaggttcagcatgggatcgacgacagcagcgatgccgtggaggtaaaagtgaagggcgtggtgtttctgtacagagaaggatctgcgaggtatgcatttagcttttccggcgcccaggaggcatgcgctcggataggcgcacatatagctacaccagaacaactttacgctgcatacctcggcggttatgagcaatgcgacgccggatggctgtcagaccaaacggttcgctacccaatacagaccccacgcgaagcatgttatggcgatatggatggctttcccggcgtgaggaactatggcgtagtcgaccccgatgatctctatgacgtctattgctacgctgaggatctgaacggagagctgtttctgggtgatccgcccgagaaactgacattggaggaggctagggcttactgtcaagagcgcggcgccgagattgcaacaacaggacaactttacgcggcttgggatggcggcttggaccactgttctccgggttggctggctgacggaagtgttaggtacccaattgtcacaccctcacagaggtgtggaggcggcttgccaggcgtgaagaccttatttctgtttccaaatcagactggatttcccaacaaacacagtcggttcaacgtgtactgtttcagagacagtgcacagccttccgcaattcctgaagctagcaaccctgcttcaaaccccgccagcgacgggctagaagcgattgttacggttacagagacactggaggaactgcagctgcctcaggaggcgaccgagtcagaatctaggggcgcgatttatagcatccccattatggaagatggcgggggtggctcttccactccggaagaccctgctgaagcacctcgaacactgctggagttcgagacacagtctatggttccacctaccgggttttcggaagaggagggtaaggccctggaagaagaggaaaaatatgaagatgaggaagagaaggaggaggaggaggaagaggaagaggtggaggacgaagccctgtgggcctggccatccgagctgagctcacctgggccagaggccagcttacctacggagccagcggcacaggaggagtccctgagccaagcaccggcaagggctgtacttcaaccaggcgcatcccccctaccggacggcgaaagtgaagcctcccgccccccccgtgtgcacggaccccctaccgagacactccctacgccacgggagcgaaacctcgcatccccctctccctccactttggtagaagctcgcgaagtcggggaggcaaccggggggcctgagcttagcggagtgccgcgcggggagtctgaggagaccgggagcagcgagggggcaccaagtttgcttcccgccactagagcccctgaaggcacgcgtgaacttgaagctcctagtgaggacaacagtggtagaactgcacccgcaggcacgtccgtccaagcccagcccgtgctgcctacagactctgctagccgtggtggggtggctgtggtaccggcctccgggaacagcgctcaaggctcaactgcactgtcaatcctgctgctgttctttccactgcaattgtgggtcacgtag

SEQ ID NO: 5686 - DNA, 375 bp, synthetic construct
  misc_feature 1..375: note = source = /note="Description of Artificial Sequence: Synthetic coding sequence"
  source 1..375: mol_type = other DNA
atgtataaactggcctcatgttgcctcctgtttatagggtttctaaaccctttgttgtccctgccgctgctggactcacgagagatcagctttcagctgagtgctccccatgaggacgcacggctgacgcctgaagaacttgaacgggctagcttattacagattctgcctgagatgttaggggctgaacgtggcgatatcctcagaaaggcggactctagcacgaacattttcaacccacgcggaaacttgaggaagttccaggatttctccgggcaggacccaaacattctgctgtctcatctcttagctcggatttggaaaccgtataagaaaagagagacacccgactgtttttggaaatactgcgtttag

SEQ ID NO: 5687 - DNA, 1326 bp, synthetic construct
  misc_feature 1..1326: note = source = /note="Description of Artificial Sequence: Synthetic coding sequence"
  source 1..1326: mol_type = other DNA
atggagtttgaattcgaccgactaagggcatttcaggcgatgcaggtgcactgtaataacatgcacaccctgggggcaaggctgcccggaggggtggaatgccgtttccgcaggggccctgccatggcgtgggagggggaaccaatgcgccataacctcggtgggaacttaggcgatccacgggcccgagccgtgtcagtgcccctgggtggccgggtggcgcgttttctgcagtgccggtttttgttcgccggcccatggctgctgtttagtgagataagttttatctctgatgtggtaaataatagttctccagccctgggcggcacctttccacccgcgccctggtggcctcccggtccccctcctactaacttctcttctctggaactggaaccgagggggcagcagccagtcgctaaggctgaaggatccccaaccgccattttaattggatgcttggtagctattatcctcctgctgctgttgatcatcgctctcatgctgtggcgtctccattggcgtcggttgctgagcaaagtccttgagagtcacccccgcacaagatcgccaggcctggtagggattcgacctacaccgcttccggtgtcccctatggctctgagatgttgttcaccaattcaaccaacggctagcttctggccactgacccctgtcccactcgaggcacgagctccacctcacccgccggggcccaaccctcctactcccagaggcgtgacaggaggcaacacctatgcagtgcctgctctaccccctggcgcagtaggtgatggtcccccccgggtggacttcccaagatctcggcttcggtttaaggagaaactgggcgagggccagttcggggaggtccacctatgtgaggttgattcaccccaggatctggtctcccttgacttcccactgaatgtaaggaagggccatccgctactggtcgctgttaagatcctgcggccggacgccactaagaacgctcgcaacgacttcctgaaggaggtgaaaatcatgtctagactcaaggatcctaacataattcggttgttgggggtgtgtgtgcaggatgaccctctgtgcatgattacagactatatggaaaatggggaccttaaccagttcctatctgcccaccaactggaagataaggccgcagagggcgccccaggcgatgggcaggctgctcagggccccacaatctcttacccaatgcttctccatgtggctgcccagatcgcttccgggatgcgatatcttgccaccctcaacttcgtgcatttctggggtgagcggcaccggtttcttcactag

SEQ ID NO: 5688 - DNA, 1950 bp, synthetic construct
  misc_feature 1..1950: note = source = /note="Description of Artificial Sequence: Synthetic coding sequence"
  source 1..1950: mol_type = other DNA
atgcagcaggacggcttaggggtcggaacacgtaatggcagtggtaaaggaaggagcgtgcatcctagttggccgtggtgcgcacctcggcccctgagatatttcgggcgcgacgcccgagctaggcgcgcacagacggccgcgatggctctgctagcaggaggattgagccgcggtctcggatctcacccggctgcagctggcagggacgcggtcgttttcgtgtggctccttctctccacctggtgtaccgctcctgctcgcgctattcaagtcacagtaagtaacccatatcacgtcgtgattctatttcagcctgtgaccttaccttgtacttaccagatgacatcaacacccacccagccgatcgtgatctggaaatacaagagtttctgccgagacagaatcgcagacgctttttcccctgcctcagtcgataatcaactcaacgcacaactggccgctggtaaccccgggtacaatccttacgtggaatgccaggattcagttcgcactgttcgcgtggtggcaactaagcagggtaatgcggtgactcttggcgactattaccaaggaagaaggattacgattacaggcaatgccgacctgacctttgatcagaccgcctggggggattctggcgtgtactattgctcggtagtgagtgcccaagacctacaggggaacaatgaggcatacgcagagctcattgttctgggtcgaacatccggggtggcggagctcttgccaggattccaggcagggcccatcgaggactggctgttcgtagtcgtggtttgtcttgccgccttccttatctttttgctgctgggaatctgctggtgtcagtgttgtccccatacgtgctgttgttacgttcgatgcccatgctgccctgacaaatgttgctgtccggaggccttgtatgcggccgggaaggcggcaacttcaggcgtgccttctatttatgcacctagcacgtatgcacatctgagcccggctaaaaccccccctcctcctgctatgattccaatggggcccgcatataacggatatcctggcggctatccaggcgacgtggatcgctcgtcctcagctgggggtcaaggctcttacgtcccactgctccgggacaccgattcttctgtcgcatccgaggtgaggagcggctaccggatccaagctagtcagcaggatgactcaatgagagtgttgtactatatggagaaggaactggccaacttcgaccccagcagacccggaccaccatcagggagagtggaacgggccatgtccgaggtcacatcactgcacgaagacgattggcggtcccgcccatcacggggtccagccctcacacccatccgcgacgaagagtgggggggacactcaccacggagccctagaggttgggatcaggagcccgcaagggagcaagctgggggtggatggcgcgccagacgcccacgggctaggagcgtagacgctctggatgacttaacccctccatcaactgctgagtccggctcacggtcaccaacttccaacggcgggaggtccagggcttatatgccacccagatccaggtccagggacgacctatacgaccaagatgactcccgggacttcccgaggtcgcgagacccacactatgacgactttagatcccgcgaaagacccccagcagacccaaggtctcatcatcaccggacaagagaccccagagataacgggtcaagaagtggagatctgccatatgatggccggcttctggaggaagccgtgaggaagaaggggtctgaggagcggcgccgtccgcataaggaggaggaggaggaagcctactatcctcctgcgccccccccttacagtgaaaccgattcgcaggcatcaagggaaaggaggttgaagaaaaacctggcactgagccgggagtcactggttgtctag

SEQ ID NO: 5689 - DNA, 402 bp, synthetic construct
  misc_feature 1..402: note = source = /note="Description of Artificial Sequence: Synthetic coding sequence"
  source 1..402: mol_type = other DNA
atgtcggaaagggttgagaggaactggtctaccggaggatggctgcttgccctctgcctggcttggctgtggactcacctgacactggcagcactgcagccacccacagcaacagtcctggtacaacagggcacctgtgaggttatagcggcccatagatgttgcaatcggaaccgcatcgaggagcggtcacaaacagtgaagtgtagttgtttcagcgggcaggtggctggcaccaccagagccaaacctagctgtgttgatgcaagtatcgtcctgcagaggtggtggtgccagatggaaccatgcctccccggtgaggaatgcaaagtcctgccagacctgtctggatggtcttgctcttcagggcacaaggtgaagacaacaaaagttacaaggtag

SEQ ID NO: 5690 - DNA, 699 bp, synthetic construct
  misc_feature 1..699: note = source = /note="Description of Artificial Sequence: Synthetic coding sequence"
  source 1..699: mol_type = other DNA
atggtggccgcaaatactcgggccccagaggacacgcgcgctccggccggacccaagccatcttcgtgcgagtgggcagtgtgctgggcaccagctagatgtagaattagcgccaccgcttgcggtaatagctgggatcgacctgccggccggacacagctgctgtggacgcccgcggcccctaccgccatggctgaggtaggacccggccacacccccgcacacccaagtcaaggggctgtgcccccatcccgtgctgcagcagagccgcatttgaagccttccccttcagaactgcagaccgccggtcctgccgccaccataccagctcgcttatgtacacgcaaacccagacttgtttatacccagtgttggtatgtcaaagagccaaaacaccctgagattgtgaccccgtgggggacggcagccaggcatagctggcgccagcatcaaatgctcagtgcgtccgaaaggagatgtctccccagggatgtcgaacagaagttgggaccagagcatactggcccctgcttagatgagcaaggacgtgaggctgaactggcaaggagcggcccttctgctgctggcccagtgcgtcttaaaccaggactggtgcctgggctgttcctgttgagttgcactacttctccttcaacgtgcctgcctgtgggccaggagggcgaaaggggaatgctgtag

SEQ ID NO: 5691 - DNA, 711 bp, synthetic construct
  misc_feature 1..711: note = source = /note="Description of Artificial Sequence: Synthetic coding sequence"
  source 1..711: mol_type = other DNA
atgtgcgtcacctaccacaacggaactgggtactgcaagtgcccggagggcttcctcggagagtattgtcagcatagggacccatgcgagaagaatcgctgccagaatggaggcacctgtgttgctcaggcgatgctaggaaaagctacctgccgctgtgcctctgggtttacaggagaggattgtcagtactcaacctcccacccttgcttcgtgagtcgcccgtgtttaaacgggggtacgtgccacatgctcagccgggacacttacgagtgtacctgtcaggtcggctttacaggaaaggaatgccaatggactgatgcgtgtttatcacacccctgtgccaacgggtccacatgcaccactgtggccaaccagttctcctgcaaatgcctgaccgggtttactggacaaaaatgcgaaactgatgtcaatgagtgcgacatccccgggcattgtcagcatggcggtacttgcttgaacctgccaggatcttatcaatgccaatgtcttcaggggtttaccggccaatactgcgacagcctatacgttccatgtgcaccctccccttgtgtgaacggagggacatgtaggcagaccggtgactttacctttgaatgcaattgccttcccgaaaccgtccgacgaggcacagaattgtgggaacgtgaccgcgaggtgtggaatggtaaggaacacgacgaaaactag

SEQ ID NO: 5692 - DNA, 204 bp, synthetic construct
  misc_feature 1..204: note = source = /note="Description of Artificial Sequence: Synthetic coding sequence"
  source 1..204: mol_type = other DNA
atggacaatgtgcaaccgaaaatcaagcaccggcccttctgcttcagcgtgaagggacacgttaagatgctccgattggtgtttgccctggttactgctgtttgctgcctggccgatggggctctgatctacaggaagctgctatttaacccttccggtccctaccaaaagaaaccggtgcacgagaagaaggaagttctatag

SEQ ID NO: 5693 - DNA, 75 bp, synthetic construct
  misc_feature 1..75: note = source = /note="Description of Artificial Sequence: Synthetic coding sequence"
  source 1..75: mol_type = other DNA
atgcttgtggacggcccctccgagagacccgcactgtgctttctcctactcgccgttgccatgtcctttttttag

SEQ ID NO: 5694 - DNA, 3345 bp, synthetic construct
  misc_feature 1..3345: note = source = /note="Description of Artificial Sequence: Synthetic coding sequence"
  source 1..3345: mol_type = other DNA
atgctagctagctctagtcggatccgtgccgcatggacgcgggccctgttgttaccgctactcttggcgggtcccgtgggttgtctgagtagacaggaactgtttcccttcggtcccggccagggggatctggagctggaggatggggacgactttgtgtcgccagccctggagctgtccggggcactgcggttctatgacagatctgatatcgacgcagtttatgtgacaactaacggcattatcgccacaagtgagccccctgctaaagaatctcatcccggtttattcccccccacttttggagcagtggcgccctttcttgctgacctggacactacggatgggctggggaaggtgtattacagagaagatctctctccatccattactcaaagggcggcagagtgtgtccatcgaggcttccccgaaatcagtttccagccaagctcagcagtggtcgtcacctgggaatcagtggctccctaccaaggcccatctcgggatcccgatcagaaggggaaaagaaacacctttcaggcagtgttggcatcctctgattcaagttcctacgcgatctttctctatcctgaggacggactgcagttccacacgaccttttcaaaaaaagagaacaatcaggtgccagcagtagtggcattctctcagggtagtgtagggtttctctggaagtccaacggtgcttacaatatcttcgctaatgatcgggagagcgtcgaaaatctggctaagagcagcaattctggccagcagggtgtctgggtgttcgaaatcggatcccctgcaaccacaaacggcgtggtgccagcagacgtgatcctgggcaccgaggacggcgcagagtacgacgatgaggatgaagattatgatttggcaactaccaggctcggcctggaagatgttgggacaacccctttcagttacaaagcgttacgacgggggggggccgatacttactctgttccttctgtgcttagcccgcgccgtgccgccaccgaacgtcctctcggcccgcccacggagaggactagatcttttcagctcgctgtggaaaccttccatcagcaacatcctcaggtcattgatgtggacgaagtagaggaaactggagtcgtttttagttataacactgattcccggcagacttgcgctaataaccgtcatcagtgcagtgtccatgcagagtgcagagattacgctaccgggttctgctgctcatgcgtggctggctatacaggtaacggtcgccaatgcgtggcagagggctccccccagcgcgtgaacggaaaagttaagggtaggatattcgtgggtagcagtcaagtgcccatcgttttcgagaacactgatctgcacagctacgtggtcatgaatcacggccggagctacactgccatctccactatccctgaaaccgtggggtactctctgctgccgctggcccccgtaggagggatcattggctggatgtttgcagtggagcaggacggcttcaaaaatgggttcagtatcacggggggagagttcactcgacaggccgaggtaaccttcgtgggacatccgggtaacctggtgatcaagcaaagattcagtggaatcgatgaacacgggcacctgaccattgacactgaattggaggggcgcgttccgcagattccttttggaagctcagtccacatcgagccctacactgagctgtaccattactcaacgtctgtcattacatcaagctctacccgggagtacacagtgactgagcctgagcgtgatggtgcgagtccaagtagaatctatacatatcaatggaggcagacgatcacatttcaagaatgcgtgcatgacgattcccggcccgctctgccgtcgactcagcagctctctgtggacagcgtatttgtcctatataatcaggaggagaagatcctcaggtatgccctgagtaatagcataggaccagtgcgggaaggatctcccgacgcgctccaaaacccttgctatatcgggactcatgggtgcgataccaacgccgcgtgcagaccgggcccccgcactcagtttacgtgtgaatgttccattggcttccgtggtgacggcaggacctgttatgaagtggagaagacgcggtgccagcatgagagggagcatatcttgggtgccgcaggagctacagatccccaaagacctattcccccaggactctttgtccctgaatgtgacgcacatgggcactacgcacctacacaatgtcatggctcaaccggatactgttggtgtgtagacagagacggcagggaagtagaagggacaagaacccgtccggggatgacaccaccctgcctctccacggtggccccccctatccaccaagggcccgctgttccaacagcagtgatccccctgccacctggtacgcacctgctattcgcccagacagggaagattgaacggttgccactcgaggggaacacgatgcggaaaactgaggctaaggcatttttgcacgtgcctgcaaaggttatcattggactggcttttgactgtgtggacaaaatggtctattggaccgacatcacggaaccatctatcgggcgcgcttcattgcacggtggcgagcctaccaccattatccgacaggacctgggcagtcccgagggtatagccgtggaccatctgggtcgcaatattttctggaccgattccaatttggaccgcattgaggtggctaagctggacggcacccagcggcgagtgttgtttgagaccgatctagttaatcccaggggcattgttactgactcagtaagagggaacctgtactggaccgactggaaccgcgacaaccctaaaatcgagacttcctacatggacggcaccaaccgtagaatcttggtgcaagacgacttaggactccccaatggactgactttcgacgcattctctagtcaactgtgttgggtggatgccggcactaatcgagcagagtgtctgaacccctcccagccatcccggagaaaggcgttggagggcttacagtatccattcgcagtcaccagctacgggaagaatttatatttcactgattggaagatgaatagcgtggtggcactggatctggccatttccaaggagaccgacgccttccaaccccacaagcagacacggctctatggcataactaccgcccttagccagtgccctcaaggtcacaactactgctccgttaacaacggtggctgcacccacctgtgtcttgcgactcccgggagcagaacctgccggtgtcctgataacacattgggagtggattgcattgagcagaagtag

SEQ ID NO: 5695 - DNA, 2172 bp, synthetic construct
  misc_feature 1..2172: note = source = /note="Description of Artificial Sequence: Synthetic coding sequence"
  source 1..2172: mol_type = other DNA
atggggtcccggtgcgccctggctctcgctgttcttagcgccttgttatgtcaggtgtggtcgagcggcgtctttgagctaaaactgcaagagtttgtaaacaaaaagggattgctgggaaacagaaactgttgtcgtggaggggctggtccacctccatgtgcatgccgtacattctttagggtctgccttaagcactaccaagctagtgtttcccccgaacctccctgtacttacgggagtgcggtgacaccagtcttgggggtggactccttctccctacccgatggcgggggtgctgacagcgcattctccaaccctattaggtttccctttggctttacttggcccgggacttttagtctgatcatcgaggccctgcacactgattctccggatgatctggctactgaaaacccagagagactgatttcaaggctggcaacccagcggcacctgacagtcggcgaggaatggtcccaggacctgcattcctcaggccgcaccgaccttaaatactcctatagatttgtgtgcgacgagcattactatggtgaaggctgttcagtcttctgccgccccagagatgatgcgtttggacactttacatgtggcgagaggggagaaaaggtttgcaaccctggttggaaaggcccttactgcaccgaacctatttgcttacctggttgtgacgagcagcatggtttctgtgacaagccaggagagtgcaaatgcagagtagggtggcaggggagatactgcgatgagtgtattcggtatccgggttgtctgcacggaacatgtcagcagccgtggcagtgcaactgtcaagaaggatggggaggccttttttgtaatcaggatttgaattactgtactcatcacaagccatgcaaaaacggcgcaacctgcacaaatacaggtcagggatcctacacttgctcttgcaggccaggatacaccggggctacctgtgaactaggtatcgatgagtgcgaccctagcccttgtaagaatgggggctcttgcactgatctcgagaactcatactcatgtacatgcccacccggcttctacgggaaaatttgcgaactctcggcaatgacatgcgccgatggcccatgttttaatggaggccgctgcagcgactctcccgatggcggctactcgtgtcggtgtcccgtggggtatagtgggttcaactgtgaaaaaaaaattgactactgctcatcttctccttgcagtaatggagccaaatgtgtggacctaggggatgcctatctctgcaggtgtcaggcggggttttccggaagacactgcgatgacaacgtggacgattgcgctagttctccatgtgctaacgggggcacgtgtcgcgacggagtgaacgacttttcctgcacgtgccctccgggctataccgggcgtaactgtagtgctccagtgtcacgctgtgagcatgctccatgccacaatggcgcaacgtgtcacgaaagaggacatcgatacgtctgcgagtgtgctagaggctacgggggacccaactgccaatttctactgccagagcttcctcccggcccagccgtggtagacctaacagaaaagttggaggggcaagggggccctttcccatgggtggctgtttgtgccggggtgattctggttctcatgctgttacttggatgtgctgctgttgttgtgtgcgtcagactccgtttgcaaaagcataggccacctgccgatccatgcaggggggagactgaaaccatgaacaatctcgctaattgtcagagagaaaaagacatttccgtatccatcatcggagctacccagataaaaaacacaaacaagaaggctgactttcacggagaccattccgctgacaaaaatggattcaaagctagatacccagccgtggactacaacctggtccaggacctaaaaggtgatgatactgccgtgcgtgatgctcactccaagcgggataccaaatgtcagccccaaggctctagcggcgaagagaaaggcacccctaccacactaagaggtggcgaggcgtccgagcgcaaacgcccagacagcggctgcagcaccagcaaggacactaaataccagtctgtgtatgtcatatccgaggaaaaggatgaatgtgtgatcgccaccgaagtgtag

SEQ ID NO: 5696 - DNA, 981 bp, synthetic construct
  misc_feature 1..981: note = source = /note="Description of Artificial Sequence: Synthetic coding sequence"
  source 1..981: mol_type = other DNA
atggccgctcctgcttccgttatgggtccactgggaccaagcgctctgggactcttacttctgctgctagtcgtggccccaccccgggtggccgcgctcgtccatcgacagcccgaaaatcaaggcatctcactgactggcagtgtcgcctgcggacgacccagcatggaggggaaaatcttggggggagtgcccgcccccgaacgtaaatggccgtggcaggtgtctgtccattacgcagggctccatgtgtgtggggggtctatcctgaacgagtattgggtcctgtccgcagcccattgcttccaccgcgataagaacatcaaaatctacgacatgtacgttggactggttaatctgcgagttgctggtaatcatacacagtggtatgaggtgaaccgggtgattctccatccaacgtacgaaatgtatcatccgattggaggagacgttgcattggtgcaactgaagacaagaatcgttttctcagagtccgtacttccagtgtgtctagccacgccagaagttaacctaacatccgctaactgttgggcaactgggtggggtctggtgtcaaagcagggagaaacctcagatgaactacaagagatgcaactgcccctgatcctcgaaccgtggtgtcacctgctgtatggtcacatgtcttatattatgccagatatgctgtgtgctggggatatactcaacgccaaaaccgtgtgtgagggcgacagcggaggccccttagtgtgtgagttcaacaggagttggctgcagatcggaatcgtgtcttggggccggggttgttctaatcctctgtaccctggggtctacgcgtccgtctcgtactttagtaagtggatttgcgataatatagagattactcccactccggcacagcctgcccccgctctcagccccgcactgggtccgacgttaagcgtcctgatggcaatgctggctggttggagcgtgttgtag

SEQ ID NO: 5697 - DNA, 1596 bp, synthetic construct
  misc_feature 1..1596: note = source = /note="Description of Artificial Sequence: Synthetic coding sequence"
  source 1..1596: mol_type = other DNA
atgtctctggccgcctactgcgtcatttgttgccggcgcattggaacatccacctcgccgccaaagtctggcacacattggcgggatattagaaatattattaagttcacagggtctctgattctgggcggatctctcttcctgacctatgaggttctcgcactgaaaaaagcggtgactctcgacacccaggttgtggaaagggaaaagatgaaatcttatatctacgtgcatacagtcagcctagacaagggcgagaaccatggaattgcctggcaggcccggaaagaattgcataaagcggtacggaaggtgctcgcaacaagtgccaaaatactgcgaaacccttttgcagacccattttccaccgtggacatcgaggaccacgagtgcgcggtctggctattgttgaggaagtctaagtctgacgacaaaacgacacgccttgaagccgttagagagatgagtgagacgcaccactggcacgactatcagtaccgcattatcgcccaggcttgcgaccctaaaaccctgatcggactggcgaggagcgaagagagcgacctgcgtttttttctgcttccacctccattgcctagtctgaaggaagacagttccaccgaggaagagctgaggcagctgctggccagtctgccccagaccgagctcgacgagtgcatccagtatttcacatccctggctctgtcagagtcctcacagtctctcgcagcccagaagggggggttgtggtgcttcggcggcaacggcttgccttacgctgaaagcttcggcgaagtgccaagtgccaccgtcgagatgttttgcttggaagccattgttaagcattctgagatctcaacccactgtgataaaatcgaggcaaatggcggactgcagctgctgcagcgactctatcggctgcacaaagactgccctaaagttcagagaaatattatgcgagtgattggaaacatggcactcaacgaacaccttcactccagcattgtcaggtccggctgggtgagtatcatggccgaagcaatgaagtcgccgcatatcatggaaagctcccatgcggcaagaatcttggcgaacttagacagggagactgtgcaggagaaataccaggatggcgtgtatgtgttgcaccctcaatatcgaacatctcagcctatcaaagcagatgtgctcttcatccacggcctgatgggggcggctttcaaaacatggagacagcaggactcagaacaggcagtgatcgagaagcccatggaggatgaggacagatatacaacctgttggcccaaaacttggttggccaaagactgtccggccctgcgcatcatttccgtggaatacgacacatccctgagcgactggcgtgccaggtgtcccatggagcgccgctctttattgagcatatcctctgggattgttgaaggtctggagtccccactgcatagcgaggctaccaactttctggggtcttccgaactgttagttttgggaataggccagtggttcggatatcatatagcatgggaagtatttctgtcaaagagatgctgctggaaaccactgaggtctcaaaaatag

SEQ ID NO: 5698 - DNA, 1596 bp, synthetic construct
  misc_feature 1..1596: note = source = /note="Description of Artificial Sequence: Synthetic coding sequence"
  source 1..1596: mol_type = other DNA
atgtccctcgcggcttactgtgtaatctgttgccgtcggattgggacgtctacatcccctccaaagagtggcacccactggagggacatcagaaatataattaaattcactggttcccttatcctgggagggtcactctttctgacctatgaggtgctggccctcaaaaaggccgtcactctggatacccaggtcgtggagagagagaaaatgaagtcatatatatacgtacataccgtgtcattggataagggtgagaaccacggcattgcctggcaggcacgaaaggagctacataaagcggtccgcaaagtgctggcaacgagcgctaagatcctacgaaaccctttcgcagatcctttttccacagtcgacatcgaggatcacgagtgcgcagtgtggctgctcctcaggaagtccaagagcgatgacaagacaacaagactggaggctgtgcgggagatgagtgaaactcaccactggcatgattatcagtatcggattatagcccaggcatgcgatccgaagacactaattgggcttgctaggtcggaagaaagcgacctacgatttttcttattgcctccccccctgccgtctctgaaagaagactcttcaactgaagaggaactccgacagctgctcgcatctcttccccagaccgagctggatgaatgcatccagtactttacatcgctcgccttaagcgagtcctcgcaaagccttgctgcccagaaaggcgggctgtggtgtttcggcgggaacggactgccatacgctgagtctttcggagaagtgcccagtgctacagtggaaatgttctgtctcgaagcaattgttaaacattctgaaatctccacacactgtgataagattgaggcgaatggtggtctgcaattgttgcagagactctatcggctacacaaagattgcccaaaagttcagaggaatattatgcgggttattggaaacatggccctgaacgaacatctgcacagcagtattgtgaggtctgggtgggtctccatcatggccgaggcaatgaagtcccctcacatcatggaatcttctcatgctgctaggattctcgcaaaccttgatagagagacggtacaggagaagtatcaggatggcgtttacgttctacatccccagtaccgaacaagccagccaattaaggcggacgtgctgttcatccatggactgatgggtgccgcttttaagacttggcgtcagcaagatagcgagcaggcggtgattgagaagccaatggaggatgaggacagatacaccacctgctggcctaagacatggcttgctaaggactgccccgccttgcgcatcattagcgtcgagtacgacactagcctgtcagattggagagccaggtgtcctatggaacgtagaagcttgctgagtatttcttccggcattgtggaaggattagaatcacctctgcatagcgaagccactaattttctcgggtcctcggaactactggtcctagggattggtcagtggtttggatatcacatcgcgtgggaagtgttcctgtccaagagatgttgttggaagcccttgcggagccagaaatag

SEQ ID NO: 5699 - DNA, 1965 bp, synthetic construct
  misc_feature 1..1965: note = source = /note="Description of Artificial Sequence: Synthetic coding sequence"
  source 1..1965: mol_type = other DNA
atgagcctggcggcttactgcgtgatctgttgtcgacggatcgggacctctacgtcgccacccaaatccggaacacattggagggacatcaggaacattattaagtttaccggttctctgattctgggtggctccctgttcctgacttatgaggtcctcgcactcaaaaaagcagtgacacttgatacccaggtggtagagcgggagaagatgaagtcctatatctacgtgcacacagtgtctctggacaaaggcgagaatcatggtattgcttggcaagcgagaaaagaactccataaagcagtgcgcaaagtgctggccacctctgccaagattttgcggaaccccttcgcggaccccttttccactgtggacattgaggatcacgagtgtgctgtctggcttctcctgcgcaaaagcaagagtgacgataagactacgagactggaagcggtccgcgagatgtccgaaactcaccattggcatgattatcagtatcggatcatcgctcaggcttgtgaccctaagaccctgattgggctggcccgcagcgaagagagcgacctgcggttttttcttttgccaccccctctcccatccttaaaagaggattcatcaaccgaggaggaactgaggcagctcctcgctagcttgccacagacggagctcgatgagtgcatccaatacttcactagcctcgccctctcagagagctctcagtcactcgccgcccagaaaggcggactatggtgcttcggcgggaacggacttccctatgctgaaagcttcggggaggtgccttccgccactgttgaaatgttctgtttggaggcgattgtcaagcactctgagatctcgactcattgcgacaagatcgaggctaatggcgggctccaattgctccaaagactctaccggctgcataaagattgccctaaggttcagcgcaacattatgcgcgtgatcggcaatatggccctgaatgaacacctgcactcttccatagtgagatccggatgggtctccatcatggccgaagccatgaagagtccgcacataatggaatcctcccatgctgctcgcatcctggccaatttggacagagaaaccgtgcaggaaaaataccaggatggcgtatatgtgctgcatcctcagtatagaacatctcagccaataaaagcagacgtgttgtttattcatgggctgatgggggcggcttttaaaacttggcgacagcaagatagcgaacaggctgtgattgagaagcctatggaagacgaggaccgatacacaacatgctggcctaaaacgtggctggccaaggattgtcccgcgctcagaattatatcagtagaatatgatacatctctcagcgactggcgggcccgatgtcccatggagcggaagtcaatagctttccgcagcaatgaactactgcgtaagcttagggccgccggagtgggggatagaccagtagtttggatctcacactctatgggcgggttgctggtgaaaaaaatgctcctagaagccagtacaaagcccgaaatgagcaccgtaataaataacacaagaggtattatcttctattccgtcccccatcacggtagcagactggcagaatactccgttaacattcgctacttgctttttccatcactagaggtcaaagaactcagcaaggactctcctgccctaaagaccttgcaggacgatttcctggaattcgctaaagataagaattttcaagtgctgaatttcgtcgaaactctgcccacctatatcgggtccatgatcaagctccacgtggtgccagtagagtccgcagacctgggcattggagatttgatccctgtagacgtgaatcacttgaatatctgtaaacccaaaaagaaggatgcctttctgtaccaacggacattacagttcatccgcgaggccctggccaaggaccttgaaaattag

SEQ ID NO: 5700 - DNA, 1509 bp, synthetic construct
  misc_feature 1..1509: note = source = /note="Description of Artificial Sequence: Synthetic coding sequence"
  source 1..1509: mol_type = other DNA
atggcacagcgctgtgtgtgcgttctcgcactggtagctatgctactccttgtgtttcctacggtatcgaggtccatggggcctcgcagcggggaacatcagagggccagccgcattccctctcaattttccaaggaagagcgggtcgcaatgaaggaggccctcaaaggcgctattcagatcccaaccgtaaccttcagcagcgagaagagtaacactactgccctggccgagtttggtaaatatatccacaaagtattcccaacagtggtcagcacttccttcattcagcatgaagtcgtggaggagtattcacacctgttcaccattcaagggtcagacccctctctacagccgtatcttctgatggctcattttgacgtcgttccggctcctgaggaaggttgggaggtcccccctttctctggtctcgaacgcgatggtatcatctacgggaggggcaccctagacgacaagaactccgtgatggcactgctacaggctctcgagctgttactgattagaaaatacatcccgcgccgtagctttttcatatctctgggacacgatgaggaatcctccgggaccggggctcagagaatctccgccctccttcagagcagaggagtacaactggcctttatcgtcgatgagggaggtttcatcctcgatgacttcatccctaactttaagaagcccatcgccttgattgctgtgtctgaaaagggtagcatgaacctcatgttacaagtaaacatgacctcaggccacagttccgctccaccaaaggagacctcgatcgggattttggccgcagctgtttcccggttggagcagactccaatgcccataatattcgggtcggggactgttgtgaccgtactgcagcagctggctaacgaattcccgtttcctgtgaatataattctgagtaacccttggctctttgagcctcttatctctagattcatggagcgcaatcctctcacgaacgccattatcagaacaactacagccctgacgattttcaaggctggggttaaattcaatgttatcccccccgttgctcaggcaaccgttaatttccgtatacacccaggtcagactgttcaggaggtgctggaattgacgaagaatattgtcgcagataatagggtacagttccacgtgctgtccgcctttgaccccctgcccgtttcaccgtcagacgataaggcgctgggctatcagctcctcagacagaccgtgcagtccgttttccctgaagtgaacattacagccccagttacgtcaataggcaatacagattctcgatttttcacaaatctcaccacagggatctatagattctaccccatctacatccagccagaagatttcaaacgcatacacggcgttaacgagaagatcagtgtccaggcctacgaaactcaggtgaagtttatctttgaactgattcagaacgctgacactgaccaggagcccgtctcccatttgcacaaactctag

SEQ ID NO: 5701 - DNA, 999 bp, synthetic construct
  misc_feature 1..999: note = source = /note="Description of Artificial Sequence: Synthetic coding sequence"
  source 1..999: mol_type = other DNA
atgagactcctggcatttctgtctctactggctctggtgctccaggaaacagggaccgcatccttgccacggaaggaaagaaaacgacgcgaggagcagatgccccgcgaaggcgattcatttgaagtcctccccctccgtaacgacgtactcaacccggataactatggagaagtaatcgacctgtcaaactatgaagaactgacagactacggggaccagctgcccgaagtcaaagtgacttcgcttgctcctgcaaccagtattagtccggctaagtccactacggcaccgggtactccatctagtaatcccacaatgacaagacccacgacagcgggactcctgctgtcttcccaaccaaatcacggcctccctacttgtttggtctgcgtctgtttggggagctcagtctactgtgatgatatcgatctggaggacatcccacctttgcccaggcgaacagcgtatctctacgctcggtttaaccgcatttcccggatccgcgctgaggattttaagggcctgactaagctcaagcggatcgacctgtcaaataatttaatatcgtccatcgacaatgatgcgttccggcttctccatgcactgcaggacctgatcctgcccgagaaccagctagaggctctgccagtgctaccatcagggatcgagttcctggacgttcggctgaacagactgcaatcatctggtattcagcctgccgccttccgggctatggaaaagcttcagttcctgtacctcagtgataacctgctggattccattccaggccccctaccattaagtcttcggagcgttcatctgcagaataatctgatcgagacaatgcagagagatgtattttgcgatcctgaggagcacaaacacactaggcgtcagctagaggacataaggctggacggaaacccaattaacctttcactattcccaagtgcctacttctgcctacctaggttaccaatcggtagattcacttag

SEQ ID NO: 5702 - DNA, 1401 bp, synthetic construct
  misc_feature 1..1401: note = source = /note="Description of Artificial Sequence: Synthetic coding sequence"
  source 1..1401: mol_type = other DNA
atggtgcggtcagtggcctgggccggctttatggtgttactcatgatcccatggggtagcgcagccaagcttgtgtgctacttcactaactgggcccagtatcgccagggggaggctcgcttccttcccaaagacctggatcccagcttgtgtacgcatctgatctatgctttcgcggggatgaccaaccaccagctctcaaccacagagtggaatgacgaaacactctatcaggagttcaatgggctcaagaaaatgaatcccaagctgaaaacattgctggcaatcggcggatggaattttgggacacagaagtttaccgatatggtcgccaccgcaaacaatagacaaacatttgtgaatagtgccatacggtttttgagaaagtactccttcgacggcctagacctcgactgggaatatccgggaagtcagggctcacccgcggtcgataaagagcgattcaccacattggtgcaggacttggccaatgccttccagcaggaggcacagacatccggaaaagagcgcctgctgctgagtgccgctgtacccgcaggacagacatacgtcgacgcggggtacgaagtggataaaattgcacagaaccttgatttcgtcaacttaatggcttacgacttccacggatcatgggagaaagtcacaggccacaatagtccgctgtacaagcggcaagaagagtctggggcggcagcatcccttaacgtggacgccgccgttcagcaatggctgcaaaagggaacccctgctagcaagctaattcttggcatgcccacctatggacgttcttttacactggctagtagctcggatacgagggtcggtgcccctgctacaggttccgggactcctggccctttcacgaaggaggggggcatgctagcatattatgaagtatgttcctggaaaggcgcaacaaaacaaaggattcaagatcaaaaagttccttatattttcagggacaatcagtgggtcggcttcgatgatgtcgaaagtttcaagaccaaggttagttacctcaagcagaaaggtttaggcggcgctatggtgtgggcccttgatttggacgacttcgccggcttttcctgcaaccagggacggtatcccctgatccaaaccctaaggcaggagctctctctcccctacctgccaagtggcaccccggagctggaggtgcccaaacctggccagccatcagagccagaacacgggcctagtccgggtcaggataccttttgccaggggaaggccgatgggttgtacccgaacccacgggagaggagttccttttactcttgtgccgctggccggctgtttcagcagtcctgtcctacggggttagtgtttagtaattcgtgtaagtgttgtacttggaattag

SEQ ID NO: 5703 - DNA, 1596 bp, synthetic construct
  misc_feature 1..1596: note = source = /note="Description of Artificial Sequence: Synthetic coding sequence"
  source 1..1596: mol_type = other DNA
atgagactgtgtctcggccggccccaccctaggggacacagccgggtgggcaagagtgagagaggccgaggcgcacgcgggttagccagacagcgaacgcttgaggacgaggaagagcaggaacgtgaaagaaggcgacgacaccggaatctttccagcaccacggatgacgaggctcccaggctctcccagaacggtgaccgccaggcttccgccagtgaacggctcccatcagtggaagaagctgaagttcctaaacctctaccacctgctagcaaggatgaggatgaggatattcagagtatactgcggaccagacaggaaagacggcaaagacggcaggtagtggaggctgctcaagctccaatacaggagaggcttgaggctgaagagggtcggaactcgttgagcccagtccaagctacccagaaacccctggtaagtaagaaggaattagaaatcccaccgcggcgcagactatcacgggaacagaggggcccctgggccttagaggaagagagccttgtaggccgggagccggaggagcgcaagaagggcgtgcctgagaagtcccctgttctcgagaaaagctcaatgcctaaaaagaccgcacccgagaaatccctcgtgagtgataagacctccatttcagagaaggtccttgccagcgaaaagacaagcctgagtgagaagattgccgtgagtgagaaacggaactcaagtgaaaagaagagtgtgctcgagaagacaagtgtatctgagaaaagtttagcacctggaatggctctgggttccggtaggcggttagtctcggagaaggcatcaatcttcgaaaaagcactagcctctgagaaaagtccaactgccgacgccaagcctgcccccaaaagggcaaccgccagtgagcagccacttgctcaggagccaccagcctctggtggttctcctgcaacaacaaaggaacagagaggtagagctcttccagggaaaaatctccccagtctggccaagcagggcgcatctgacccccccacagtggcctcgcggctgccacctgtcaccctgcaggtcaagatcccaagtaaggaggaagaagctgatatgagcagcccgacccaacggacctactcatcttctcttaagcgcagctctcccaggactatcagctttcgaatgaagcccaaaaaagagaattcagaaactactctcaccagatccgcatccatgaagttgccagacaacacagtgaagctgggtgagaagctggaacggtatcacacagcaattagaaggagcgagtcagttaagagtcgggggctcccctgcacggaactattcgtggctccggtaggagtggcgtcaaagaggcacctgtttgaaaaagaacttgcaggacaaagccgcgctgagcctgcttctagcaggaaggaaaacctgcgcctgtccggcgtcgtgaccagccgcctcaacctttggatcagccgcacacaggaatctggcgaccaggatccccaagaggctcagaaggcctccagtgccaccgagcgcacccagtggggccagaagagcgatagttcactcgatgccgaagtctag

SEQ ID NO: 5704 - DNA, 1782 bp, synthetic construct
  misc_feature 1..1782: note = source = /note="Description of Artificial Sequence: Synthetic coding sequence"
  source 1..1782: mol_type = other DNA
atgaaagccgacttgaagcagcatcatcatcactggtccatcttttcctatataaggctgcgtctgccctcaatgctgcttctgttcagcgttatcttgattagctgggtgtcgaccgtcggcggagaggggaccctttgcgacttcccaaaaattcatcatggatttctgtacgacgaggaggactacaaccccttctctcaagtgccaactggggaagtgttctattactcgtgtgagtataattttgtctccccaagcaaatcattttggacaaggatcacctgtacagaggaaggctggagccccactccgaaatgtctgaggatgtgttccttcccctttgtaaaaaacggccatagtgaatcttcaggccttatccacctggaaggtgatacagttcagatcatatgcaacaccggctacagcctgcagaacaatgaaaaaaatatatcatgtgttgagcgagggtggagcactcctcctatctgcagctttaccaagggtgaatgccatgtcccaatacttgaggccaacgtggatgcccagcccaagaaggagtcctacaaagtcggagatgtactgaagttctcctgtagaaaaaatctgatcagggtgggctccgactccgtacagtgttatcagttcggatggtctcccaacttcccaacctgcaaaggacaagtccggagctgtgggccgccacctcagctgagcaacggcgaggtaaaggagattcggaaggaagaatatggccacaacgaggtggttgaatatgactgtaaccctaacttcattattaacggccctaaaaaaatccagtgtgttgacggggagtggaccactctgcccacatgtgtagagcaggtgaagacctgcgggtacattcctgaactggaatatgggtacgtccagccatctgtgcccccctaccagcacggcgtcagtgtggaggtcaattgccggaatgagtacgccatgatcggcaacaatatgattacctgcattaacggcatatggacggagttaccgatgtgtgtggctacccatcagttgaaaagatgcaagattgcgggtgtaaatatcaagacactcctgaaactatccggcaaggagttcaaccacaattcgagaatcagatatcgctgttcagacatattccgttacagacatagcgtatgtatcaatggcaaatggaatcccgaggtcgattgtactgaaaagagagagcagttctgccctcctcctcctcagatccctaacgcgcagaacatgactaccaccgtgaattaccaggatggtgaaaaagtcgcagtgctgtgcaaggagaactatttactgccagaagcaaaagagattgtgtgtaaagacggcagatggcagagccttcccaggtgtgttgagtctacagcctattgtggtccccctccttctataaacaatggagacacaacaagcttcccattatctgtctaccctcccggatcgaccgtgacctacaggtgtcagtctttctacaaactgcaggggtccgtgaccgttacctgccgcaataaacaatggtccgagccaccacggtgtctggacccatgtgtcgtgtctgaagaaaacatgaataaaaacaacatccagctcaagtggcgtaatgatgggaagctgtacgctaagaccggagacgccgttgaatttcagtgtaagtttccacacaaagctatgattagcagccctcccttccgggccatttgccaggagggaaagttcgaataccctatttgtgagtag

SEQ ID NO: 5705 - DNA, 2301 bp, synthetic construct
  misc_feature 1..2301: note = source = /note="Description of Artificial Sequence: Synthetic coding sequence"
  source 1..2301: mol_type = other DNA
atgatctggaggtctagagcaggtgccgaacttttctctttgatggcactctgggagtggatcgccctgtcattgcattgctgggtgctcgctgtagccgcggtctcggaccagcacgcgaccagcccgtttgattggttgctcagcgacaaaggcccattccacagaagtcaggagtacacagactttgtagaccgatccagacaaggatttagcacgaggtacaagatctaccgagagttcgggcgttggaaagtaaataatctagccgtcgagcggcgtaacttcctaggtagccccctgcctttagccccagaattcttccggaacatccgattgctggggagaagacctacgctgcagcagattaccgaaaatctcatcaagaagtatgggacacacttcctgctatcggccacattaggcggtgaggagtcactgactatcttcgtcgacaagagaaaactgagcaagcgcgctgaaggatctgatagcactacgaactcttcttcggtcaccttagaaaccctccaccagctcgccgcctcctacttcatcgacagagactcaaccttgagaaggctgcaccatattcagattgcaagtaccgctatcaaggtgaccgagacccgcaccggccccctcgggtgcagcaactatgacaatctggattcagtgtcgtcagtccttgttcagtcccccgaaaataaaattcaactccagggactgcaggtcctcctccctgattatttacaggaaaggttcgtccaagcagcacttagttacattgcttgtaattcagagggcgagtttatttgtaaggagaacgactgctggtgccactgtgggcctaagttcccggagtgcaactgtccgagcatggatatacaggccatggaggagaatctgctgagaattacagaaacatggaaagcatataactccgatttcgaagagtccgatgagtttaaactgttcatgaagcggcttccaatgaattacttcctaaatacctccaccattatgcacttgtggaccatggacagcaattttcagaggaggtatgaacagctcgagaatagtatgaagcaactgtttcttaaagcccagaagattgtgcacaagctgttttcactctcaaaaagatgtcacaagcaacccctaatctccttgccccggcagcgaacctccacatactggttgacacggatccagagctttttgtactgtaatgagaacggactgcttggcagcttctctgaggagacgcacagctgtacatgccctaacgaccaggtggtctgtactgctttcctgccttgtactgttggagatgcatctgcgtgcttgacttgcgctccagataataggaccagatgcggaacctgcaacacaggctatatgctaagtcagggattatgcaagccagaagtggccgaatccacagaccattatattggctttgagactgatctccaggacctggaaatgaagtacttgttacagaagacagacaggcggatcgaagttcacgccatctttatatctaacgatatgcgcttaaactcatggttcgatccatcctggcgaaagaggatgctccttacacttaagtcaaacaaatacaaaagcagtctggtgcacatgatcctggggttgtctttacagatctgcctcaccaaaaattctactcttgagcctgttctcgccgtgtacgttaaccctttcggagggtcccacagcgagtcctggttcatgcccgttaatgagaacagcttccccgattgggaaagaactaagctggatctccctctccagtgctacaactggaccttaacacttggcaataagtggaaaaccttttttgagacggtgcacatatacctgcgaagtcggatcaagtctaacggtcccaatgggaacgagtccatctactatgagccacttgagttcattgacccctccagaaacctcggatacatgaagattaataacatccaggtgttcggttacagcatgcattttgatcctgaggcaatccgagacctgattctgcagctggattatccctacacccagggctcgcaagattctgcgctactccaactgctcgagataagggaccgagtcaataagctgagccccccgggtcaacgcagactagacttgttttcatgtctgttgcgacacagattaaaactgtctacttctgaagtagtccgcatacagagcgcactgcaggcgtttaacgcaaagctgccgaatacgatggattacgacaccacgaagctctgctcttag

SEQ ID NO: 5706 - DNA, 1815 bp, synthetic construct
  misc_feature 1..1815: note = source = /note="Description of Artificial Sequence: Synthetic coding sequence"
  source 1..1815: mol_type = other DNA
atgcggcggtgcaattctgggagtggccctcctccatcgttgctgctgctgctgctctggctcctcgccgtgcccggggccaatgctgcgccgagatcggccctgtacagcccgtccgatccactgacccttctgcaggctgacacggtgcggggcgctgtcctgggaagccggtcagcttgggccgttgaattttttgcctcctggtgcggtcattgtatcgccttcgcacctacgtggaaggccctagcagaggacgtcaaagcttggaggccggccctttaccttgcagcactcgactgcgcagaggaaacaaattccgcggtttgccgtgactttaatatccctgggttccccacagtcagattctttaaggctttcactaagaacggatcaggggccgtgtttcctgtagctggagccgacgtccagacactgagggagcgcctgattgacgccctcgaaagccaccatgacacctggccgcccgcgtgtccccccctggagcccgccaaactggaggagatcgacgggtttttcgcccgaaataatgaggaataccttgctctcattttcgaaaagggcggctcttacctcggacgtgaagtcgccttggacttgtcacaacataagggagtggccgtccgtcgagttctgaacaccgaagccaatgtcgtacgaaaattcggcgtcaccgactttcccagttgctacctgctgttccggaacgggtccgtgtcacgggtcccggtgctgatggagagtaggagtttctatacagcctacctgcagcgcctgtccggcctaacgcgagaagcagcccaaactacggtagctcccaccacagccaataagatagcaccgacagtgtggaaattggctgaccgctcaaaaatatacatggcagaccttgagagcgccctgcattacattctgaggatcgaggtcgggagatttcctgttttagaaggccagcgattggtggccctcaagaagttcgtagctgtcctggccaaatacttccccgggaggccgctagttcagaatttcctccattcggtcaacgagtggctaaagcggcagaagaggaacaaaataccgtacagtttttttaagaccgcacttgatgataggaaggagggtgcggtgttagccaaaaaagtcaattggattggttgtcaagggtcagaaccgcacttccggggattcccatgctcactgtgggtgcttttccactttttgaccgtacaggctgcccgtcagaatgtggaccactctcaggaggctgccaaagcaaaagaagtgcttccagccattcggggctacgtgcactacttttttggttgcagagattgcgcctcccacttcgagcagatggctgcggcttcaatgcatagggtagggagtcccaatgctgccgtgctctggctttggagtagtcacaaccgcgtgaatgcaagactggccggtgcccccagtgaggacccccagtttcctaaggtgcaatggccgccccgggagttatgttcggcttgtcataatgaaagacttgacgtgcctgtgtgggatgtggaagctactctcaactttctcaaggcgcactttagtccgtcaaatataatcctagactttccagctgctggctccgcagcgcggagggacgtccagaatgtggccgcagcgcccgaactggctatgggcgccctagaattggagagccgcaacagcacactggatcctggaaagcccgaaatgatgaaatctcccaccaacactactccccacgttcctgccgaggggcccgaactgatttag

SEQ ID NO: 5707 - DNA, 2244 bp, synthetic construct
  misc_feature 1..2244: note = source = /note="Description of Artificial Sequence: Synthetic coding sequence"
  source 1..2244: mol_type = other DNA
atgcggcgctgcaactcaggttccggacctcctccaagccttctgctactgctgctgtggctactggcagtcccgggagccaacgcagccccgagatccgctctgtactctccatccgacccccttactcttctgcaggcagacaccgtcaggggagcagtactgggctccaggagcgcctgggccgtggagtttttcgctagctggtgtggccattgcattgcatttgcccctacttggaaagcgctggctgaagatgtgaaagcatggcgaccggctttgtaccttgctgccttagactgtgccgaggagacaaatagtgctgtttgcagagacttcaatattccaggcttccccaccgtacgattttttaaagcctttacaaagaacggctccggcgctgtgtttccagtggctggtgcagacgtgcaaacattgagggagcggctgattgacgctctcgagtcccaccatgatacctggccccccgcatgtcctcccttagagcctgcaaaactcgaagaaatcgatggtttctttgcacggaataacgaggaatatttggcactgatttttgagaaaggaggctcttacctgggcagggaggtggcactcgatctgagccagcacaagggggtggcagtcagacgggtactaaacaccgaagctaacgtggtccgcaaatttggcgtgaccgatttccccagctgctatcttctgttccgtaacgggtctgtaagccgggtgccggtcttgatggaatcccgatcgttctatacagcgtatctccagcgactctctgggctgacgcgcgaggccgcccaaaccaccgttgcgcccacgactgctaataagatcgctcccacagtgtggaagttggcggatcggtcaaaaatttatatggccgatctggagagtgccctccactacatactccgaatcgaggtcggtcggtttcccgttttagaggggcagcgcttggtcgctctgaagaagttcgtggctgtccttgcgaaatatttcccggggcggccattagtgcagaattttctccattcagttaatgaatggctgaagcgccagaaacggaacaaaatcccttattcattttttaaaactgccttggatgatcgtaaagaaggagctgtcctcgctaagaaggttaactggattggttgtcagggatcagaaccccacttccgcggctttccctgtagcttgtgggtgttgtttcatttcctcacggtgcaagcagcaaggcagaacgtggatcactcccaggaagccgcaaaggccaaagaagtgctgccagcaattcgcggatacgtgcattatttttttggctgccgagactgtgcctcccactttgagcagatggcagctgcttccatgcacagggtcggcagccctaacgcggctgtgctgtggctgtggtcctcccacaatagagtgaacgctagactggccggggccccaagcgaagatccccaattccccaaggtgcaatggcctccacgggaattgtgctcggcctgccataatgagcgcctggacgttccagtgtgggatgtggaggctacactcaatttcttgaaggcccacttcagcccttcaaatataatcctagatttccccgccgcaggatccgccgcaagacgggacgttcagaacgtggcagcagcccccgaacttgccatgggagcattggaactggaaagcaggaattccacactggacccaggcaagcccgagatgatgaaatcacccacgaacaccactccccacgtccctgccgaaggacccgaggcgagccgacccccaaaactgcaccccggacttcgagcagcgccagggcaggagccccccgaacatatggcagagttgcagcgaaatgagcaggaacaaccgctgggccagtggcacctatccaaacgcgatacaggagcagcactcctggccgaaagccgggctgagaagaatcgtctttggggcccattagaggtgcggcgcgtggggcggtcgtcaaagcagttagtagatattccagaagggcagctcgaggctagagccggccggggacggggacaatggctgcaagtgttgggtggcggcttttcatatctcgacatctccttgtgtgtcggcctgtattctctttcgttcatgggcctcctcgccatgtacacatactttcaggcaaagattcgggctcttaaaggacacgccggacacccagccgcctag

SEQ ID NO: 5708 - DNA, 1476 bp, synthetic construct
  misc_feature 1..1476: note = source = /note="Description of Artificial Sequence: Synthetic coding sequence"
  source 1..1476: mol_type = other DNA
atgaaaaccttcacgtggacgctgggggtactgtttttcctgctggttgataccggacattgtagagggggccaattcaagattaaaaaaattaaccagcgcagataccccagggccaccgacggtaaggaggaggcaaaaaagtgtgcctatactttcctggttcccgaacaaaggataacagggcctatttgtgtgaacacaaaagggcaggacgcatctacaataaaagacatgatcaccaggatggacctggaaaacctgaaggatgtcttatcaaggcaaaagagggagattgatgtcctgcagttggtcgtggacgtggacggcaatatcgtgaacgaggttaagctgctcagaaaagagtctcgcaacatgaattccagggttacccaactgtacatgcagctcctgcatgaaatcatccggaagagggacaacagcctggagttatcacagctagaaaataagatcctgaatgtgaccaccgagatgctgaagatggcaacccgctaccgtgagttagaggttaagtacgcttcactcaccgatctggtgaacaatcagtctgtaatgatcactctgcttgaggagcaatgtctcaggatcttttcaagacaggatacccatgtttcccctccactggttcaggttgtgcctcagcatatccctaactcccaacagtacaccccgggcctgcttggcggtaacgaaattcaaagagacccaggataccctcgtgatctgatgccacctcccgatctcgccacaagtcccactaaaagtcccttcaaaatccccccggtcacattcatcaacgaaggtccctttaaggactgccaacaggcaaaagaggctggtcactctgtgagcggcatctacatgattaagcccgagaattcaaacgggccaatgcagctctggtgtgagaatagtttggatcctgggggttggacagtcattcagaagagaacggacggaagcgtcaacttctttcggaactgggagaattataagaagggctttggtaacattgatggagagtattggctgggcctagaaaacatctatatgctcagcaatcaggataattacaaattactcatcgaactggaagattggtccgataagaaggtttacgcagagtacagtagctttcggctggaacctgaaagcgagttctacaggctccgtttgggaacataccagggcaacgctggcgactcaatgatgtggcacaatggaaagcagtttacgacgctcgaccgcgataaggatatgtatgccggcaattgtgcacactttcataagggcgggtggtggtataatgcatgcgcccacagtaatctcaacggagtctggtatcggggggggcactatcgctctaagcaccaagatggaattttctgggcagagtatagaggaggaagctatagcctgagggctgtgcagatgatgattaagcctattgattag

SEQ ID NO: 5709 - DNA, 2484 bp, synthetic construct
  misc_feature 1..2484: note = source = /note="Description of Artificial Sequence: Synthetic coding sequence"
  source 1..2484: mol_type = other DNA
atgatgtgtttaaagatcctcagaatcagcctcgccatcttagccgggtgggccctctgtagcgccaattcggagttggggtggacgcggaagaagtcgctggtggagcgtgagcatttaaaccaggttctgctcgaaggggaaagatgctggctcggggctaaagtacgtcggcctcgcgctagccctcagcaccacttattcggagtgtatcccagccgagctggcaattaccttcggccttatcctgtgggagaacaggaaatccaccacacaggacgatcaaagccggacaccgaggggaatgccgtgagtttggtaccccccgatcttacagagaacccagctgggctcagaggagcggtggaggaacctgcagcaccttgggtgggggattcgcccattggccaatctgaactgctgggtgacgacgatgcttacctgggtaaccagagatcaaaggagtctctgggcgaggccggaatacagaagggctctgccatggccgccacaacaacaacggccatattcaccaccctgaacgaacccaagcctgagacacagcggaggggctgggctaagtctcggcaacggcgacaggtctggaagaggcgcgctgaggatggtcaaggggacagtggtattagtagtcatttccagccctggccgaaacactctctgaaacatagagtgaaaaagagtcctccggaggaaagcaatcagaacggcggcgaggggagttaccgagaggccgaaactttcaacagccaggtcgggttgcccattctgtacttctcaggacgaagagagagactgctgctgaggcccgaagtcctggcggaaatcccccgcgaggcttttacagtggaagcatgggttaaaccagaagggggacaaaataacccggcgatcatagcaggtgtgtttgacaactgctcacatactgtttctgacaagggctgggctcttggaatccgttctgggaaggacaaggggaagcgcgacgcccgctttttcttttcgctgtgtaccgatagagtaaagaaagccaccatcctgatcagccatagtcggtaccagccggggacttggacccacgtagctgctacatatgacggaagacacatggcattatacgtggacggaacccaggtcgcgtcatccctggatcagtccgggccgctgaacagccctttcatggccagttgtaggagcctgctgctgggaggtgacagctcagaagatggacactacttcaggggccacttagggactctggttttctggtccactgcgttgcctcaatcacatttccagcattcatcccagcactccagtggtgaggaagaagccaccgaccttgtgttgacagcgagttttgagcctgtgaacactgagtgggtccctttccgcgatgaaaaatatcctcggcttgaagttctccaaggctttgagccagagccggaaatcctgtccccgttgcagcctccattgtgtggacagaccgtctgcgacaacgtggagctgatcagccagtacaacggatactggccccttaggggcgagaaagtaatccgttaccaggtggtgaacatttgtgacgacgaaggactaaacccgattgtgtcagaggaacagatacggctacagcatgaagccttgaatgaggcgtttagtaggtataacatcagttggcagctgagtgtgcaccaggtgcataactcaacccttcgtcatagggtggttctcgtgaactgtgagcctagcaaaatagggaatgaccactgtgaccctgaatgcgaacatccattaaccggctacgacgggggtgactgcaggctccagggcaggtgctactcctggaaccgccgcgacggactatgccacgtggagtgtaataatatgctgaacgacttcgatgacggtgactgctgtgacccccaggtagccgacgtgcgcaaaacatgtttcgacccagattctcccaaacgagcgtatatgagcgtgaaagagctcaaagaagctctccagctgaattcaacacatttcttgaatatctacttcgcctcgtctgtcagagaagatcttgcaggggcggcaacatggccctgggataaagacgcagttacccatttgggcgggatcgtgttaagcccagcctactatggaatgccggggcataccgacaccatgatccatgaggtgggccacgtccttgggctttatcacgtatttaagggagtctctgagagagagtcatgcaacgacccttgtaaggagaccgtgcctagcatggaaactggggatttatgtgcggacacagcgcctaccccaaagtccgagctatgccgcgaaccagagcctacatccgatacctgcgggttcaccaggttccctggtgcccctttcactaactacatgagctatactggcataaccaccgtgctattctgtttcctcctccgcatccatggggggctgtag

SEQ ID NO: 5710 - DNA, 5376 bp, synthetic construct
  misc_feature 1..5376: note = source = /note="Description of Artificial Sequence: Synthetic coding sequence"
  source 1..5376: mol_type = other DNA
atgatgtgcctgaagatcctcagaatttcgctggcaattttggcaggatgggcattatgcagcgccaattcggagctgggatggacccgaaaaaaatctctggtggagagagagcatttgaaccaggtgcttctcgaaggcgagagatgttggcttggagccaaggtccgtcgcccaagggctagcccacagcatcatctgttcggcgtgtacccaagccgtgccggcaactatctgaggccgtacccagtgggggagcaggagattcaccatacaggccggtccaaacccgatactgagggcaatgccgtctccctggttccgccagaccttaccgagaatcccgctggcctccgcggcgccgtcgaggagccagctgccccctgggtgggggatagtccgattggccagtccgaactacttggcgacgatgacgcttacctgggcaaccagcggtctaaggagtctctcggggaagcaggaattcagaaaggctccgcaatggctgcaaccacaactacagccatttttactactttgaatgaacctaagccagaaactcagcgccgcgggtgggctaaaagccgacagcgcagacaggtctggaagcgccgagccgaagatggccagggagactccggtatttcctcacattttcagccctggcctaagcacagcttgaagcacagggtcaagaaatctcctcctgaggaatcaaatcaaaatggaggggaagggtcttaccgtgaggcagaaacttttaactctcaggttggtctccccattctgtatttctctggcagaagagagagactgctcctccgccctgaggtcttggccgagattccccgggaggcctttactgtggaagcctgggtcaaacccgagggtggccagaataacccggccattatcgcaggtgtatttgataattgctctcacaccgtgagcgacaaggggtgggcgctgggcattagatccggcaaagacaaagggaaacgcgatgctcgatttttctttagtttatgcaccgaccgggtgaagaaggccaccatcttgatttcccattcgcggtatcaaccggggacatggactcatgttgccgccacctatgatggccgccacatggcactgtacgtcgacgggacccaggtagcatcatcactcgaccagtctggccccctcaatagtccctttatggcttcctgtaggtcacttttgttgggaggagactctagcgaggatggccactacttccgaggacacctgggtacgttagtcttttggtctaccgcactcccacagagccatttccagcattcaagccagcacagctctggggaagaggaggccactgacttagtcttgaccgcctcatttgagcccgtgaatactgagtgggttcccttcagggacgaaaaatatccacgactcgaagtcctccaggggtttgaaccagaaccggaaattctcagtcctttgcaaccgcctctttgcggccagaccgtatgtgacaatgtagagctgatttcccagtacaacggctattggccactccgtggggagaaggtcattagataccaggtggtgaacatttgtgatgatgagggattgaacccaatcgtctccgaggaacagataagactgcagcatgaggctctcaatgaagcattctccagatataacatatcatggcagctgagcgtgcaccaagttcataactccaccctgaggcacagggtagtgctagtaaactgtgagccaagcaagatcggcaacgatcactgtgacccggagtgtgaacacccactgacggggtacgacggtggagactgtcgccttcagggtcggtgttacagctggaacagaagggacggtctgtgtcatgttgagtgcaataacatgctgaacgatttcgacgacggtgactgctgtgatccccaagtggcagatgtccgaaaaacttgtttcgatcctgatagccccaagcgtgcatacatgtccgttaaggaactgaaggaagccctgcaactgaactcaacacatttcctgaatatttatttcgctagcagtgtgcgggaagacctcgccggagctgctacatggccttgggacaaggacgcggtgactcacttaggcggtatcgtcctcagcccggcctactacggaatgcccggccacactgacaccatgatacacgaagtcggtcacgtgctgggcctataccacgtgtttaagggcgtaagtgagagagagtcttgcaacgatccatgtaaggagacggtgccatcaatggaaaccggcgacctctgtgctgatactgcccctacccccaagagtgagctttgtcgcgagcctgagcctacatcggacacatgtggttttacgagattcccaggggctccattcaccaattacatgagctacaccgatgataactgtacagataacttcacacccaatcaggtggcgcgcatgcactgctaccttgatcttgtctatcagcagtggactgaaagcaggaaaccgacccctatcccgatcccacccatggtgatcggtcagaccaacaaatctcttaccattcattggcttcctcccattagcggagtcgtatacgacagagcgagcggctctctgtgtggggcctgtaccgaagatggcaccttccgacaatatgtgcacacggcttcaagcaggagggtctgcgactccagcgggtactggacgccagaggaggcggtgggaccacctgacgtggatcaaccttgtgaaccttcactgcaggcttggtctcccgaggtgcatctatatcatatgaacatgacagtgccgtgcccgactgagggatgttcactggaactactgttccaacacccagtgcaggccgacactctgactttatgggtcacaagcttctttatggaatccagtcaggtgctcttcgacacagagatattgttagagaacaaagagtcagttcatctgggacctctagacaccttctgcgatatccccctgacgatcaagttacacgtggatgggaaagtttctggggtcaaagtgtacacctttgacgagcgcatcgaaatcgacgctgcgctgcttactagtcagccccattcacctctttgcagtggttgccgccccgtgcgataccaggtgctccgggacccgcccttcgcaagcggcctccccgtggtggttacacactctcacagaaaattcaccgatgtcgaggtcacccccggtcagatgtatcaatatcaggtgctggccgaggccggaggggaacttggtgaagctagtccaccccttaaccatattcacggtgcaccatattgcggagatggcaaggtgagcgagcgcctgggagaggaatgtgatgacggcgacctggtctccggagatgggtgcagtaaggtgtgtgagcttgaagaaggcttcaattgtgtgggagagccatctctgtgctacatgtatgaaggtgacggtatatgcgaaccatttgagagaaaaacatcaatcgtcgactgtgggatttacacaccaaaggggtatcttgaccaatgggcgactcgggcttactcaagccatgaagacaaaaaaaagtgcccagtctcattagtgactggcgagccacacagtctaatttgcacaagctaccatcccgatctgccaaaccaccgtcctctgaccgggtggttcccctgcgtggcaagcgagaatgaaactcaagacgaccgcagcgaacagccagagggctcgttaaaaaaggaagacgaagtgtggctgaaggtatgtttcaatcggcctggcgaggcccgtgccattttcatcttcctgacaaccgacggccttgttcctggcgaacatcaacagcctaccgtgaccctgtatctcacagatgtgcggggatcaaatcactccctgggaacatacggcctttcatgtcagcacaatccactgatcatcaacgtgactcaccatcaaaacgtcttgtttcaccacaccacaagcgtgctgcttaattttagttctccgcgcgtggggatcagcgcagtcgctctgaggacttcttctaggattggtttgtcagcgccaagcaattgcatctcagaggacgaaggccagaaccaccagggccagtcgtgcattcatcggccgtgcgggaaacaggactcttgcccctcccttctgctcgatcacgcagacgtcgtcaattgtaccagcattggtcccggactgatgaagtgcgcaatcacttgtcaacgcggtttcgcacttcaggctagtagtgggcagtacatccgcccaatgcagaaggaaatactgctcacatgctccagcgggcactgggaccaaaatgtatcttgtctccctgttgattgtggggtccccgacccatctcttgttaattacgctaacttctcgtgcagcgaagggaccaaatttctgaaacggtgtagtatctcttgtgtccctcctgccaagctacagggattatccccctggctgacatgtctggaggatggtttatggtctttgcccgaggtatactgcaagctggagtgtgatgccccaccgattatactgaatgctaacttgctcttaccacattgtctacaggataaccacgacgtcgggacgatctgtaagtatgaatgcaagcccggctattacgtggcagaatctgccgaggggaaggtgcgcaataaactgttgaaaattcaatgccttgaaggggggatctgggagcagggttcctgcattcctgtcgtatgcgagccccccccgccagtcttcgagggcatgtatgagtgtacaaacgggttctctttagacagccagtgcgttcttaattgcaaccaggagagagagaagctgccaatactttgtaccaaagaggggctatggacccaggaattcaaactatgtgaaaacttacagggggaatgtccccctccccccagcgaactgaattccgttgaatataagtgtgagcaaggttatgggatcggggcagtctgctcaccactgtgcgtcatacctccgtccgacccagtgatgcttcctgagaacataaccgctgatacacttgagcattggatggagccagtcaaggtccagagcatagtgtgcaccggccgccggcaatggcatcccgaccctgttcttgtgcactgtatccaatcttgcgagccattccaggctgacggatggtgcgacaccatcaataaccgtgcttactgtcattacgatggtggggactgttgttcttctactttatcctcaaaaaaggtaatccccttcgcagcagactgcgacctggatgaatgtacttgcagggaccctaaagctgaggaaaatcagtag

SEQ ID NO: 5711 - DNA, 702 bp, synthetic construct
  misc_feature 1..702: note = source = /note="Description of Artificial Sequence: Synthetic coding sequence"
  source 1..702: mol_type = other DNA
atgaaagaccctcttgcaaaagacgagaggatctacgtcactaactattattatgggaacacactcgtcgaatttcgtaatctcgagaatttcaaacagggccgatggagcaactcctacaagttaccgtactcttggattggaacaggacacgtcgtgtataatggcgcattttactacaatagggctttcacccgcaacattattaaatatgatctaaagcagcggtacgtggccgcttgggccatgcttcacgacgtggcctacgaagaggcaactccatggagatggcaggggcattctgacgtggatttcgccgtcgacgagaacggactctggttgatttatccagcactagacgacgaaggctttagccaagaagtgatcgtcctgtcaaaactgaatgcagctgatctcagcacacagaaggagaccacatggagaaccgggctgcggagaaatttctacgggaattgttttgtcatttgcggagtgctgtatgcggtggactcctataaccagagaaacgctaacatttcctatgcctttgatacgcacaccaatacccagatcgtccctcgtctgctgttcgaaaatgaatatagttacactacccagatcgactataatcccaaagaccgcttactttatgcgtgggacaacgggcaccaagtaacctatcacgtgatcttcgcctattag

SEQ ID NO: 5712 - DNA, 579 bp, synthetic construct
  misc_feature 1..579: note = source = /note="Description of Artificial Sequence: Synthetic coding sequence"
  source 1..579: mol_type = other DNA
atgttgaaaaagattagtgtgggagttgcaggggaccttaacaccgtgaccatgaaactcggctgtgtgctaatggcctgggcactatacctctccttgggggttctttgggttgcccaaatgctcttggcggccagctttgagactctccagtgtgagggccccgtgtgcacggaggagtcttcttgtcatacagaagacgatttaacggatgctcgagaggccggatttcaggtcaaagcttacaccttctctgagccgttccacctgatagtttcatacggggcaagctcttccgccgctccccctaccctgaatcctgcaccgcagaagagcgcagctcccggaacagcacccgaggaggctcctgggcccctaccgcccccccccacaccctccagcgaagatcctggcttcagcagccccttgggtatgcccgacccccacctttatcatcagatgggtcttctactgaagcacatgcaagatgtgagagttttattaggtcacttgttgatggagctgagggaattgtcaggccaccgtaaacctgggacgacaaaggcaactgccgagtag

SEQ ID NO: 5713 - DNA, 459 bp, synthetic construct
  misc_feature 1..459: note = source = /note="Description of Artificial Sequence: Synthetic coding sequence"
  source 1..459: mol_type = other DNA
atgctgctggctgcctccttcgaaactttgcagtgcgaaggccccgtgtgtacagaggagtcttcctgtcacaccgaggacgacctgaccgacgcccgggaggcagggttccaggtaaaggcttacacgttttccgaaccgttccacttgatcgtgtcttacggagcatccagctccgctgcgccccctacattgaaccctgcccctcagaagtcagcagccccaggcacagcaccagaagaagcacccggccctctgcctccacctcccactccgtcaagcgaggatccaggattcagttctccactcggaatgcctgatccacatctgtatcaccaaatggggctgctcttgaagcatatgcaggacgtaagggtgcttctcggccatctcctgatggaactgcgcgaactgagtggccaccggaagccaggcaccacgaaagctactgccgaatag

SEQ ID NO: 5714 - DNA, 1098 bp, synthetic construct
  misc_feature 1..1098: note = source = /note="Description of Artificial Sequence: Synthetic coding sequence"
  source 1..1098: mol_type = other DNA
atgaaactgggttgcgtgcttatggcatgggctctttacctgtctttgggggttctgtgggtggctcagatgctgctagcagctggctgtcacgctgcagctagctttgagacactccaatgtgagggtcccgtctgtactgaggagtcctcttgccacacagaagacgacctcacggatgctcgcgaagccggcttccaggtgaaggcatatacgttttccgaacccttccacctcatcgtatcctatgattggctgatcctgcaaggcccggccaagcccgtgtttgaaggagacctgttggtgctccgctgccaggcttggcaggattggccgctgacacaggtaaccttctatcgcgacggctctgcattggggccacccggccctaaccgagaattttcaattacagttgtccagaaggcggacagcgggcattaccattgcagtggcatcttccagagccctggacccgggatccccgaaacggccagcgtcgtcgcaatcaccgtccaggaactgtttcccgcacccatattgagggcagtcccaagcgccgagccacaagccggatcaccaatgaccctcagttgtcagaccaagctgccactccagcgctccgccgctaggctcctgttctctttctacaaggatgggcgcatcgtgcaatcccgcggactgagcagcgaattccagataccaacagcatcagaggaccatagcggcagctactggtgcgaagcggccaccgaggataaccaagtatggaaacagtctccccaactagagatccgcgtgcaaggagctagcagctcagccgccccacccacgcttaaccccgccccacagaaaagtgctgcccctggaactgccccagaggaggcaccgggacctctccctccgcccccaacaccctctagtgaagaccctggtttttccagtccgctcggaatgcccgatccccacctgtaccatcagatgggtctccttctgaagcacatgcaggatgttagagtcctgctgggccatcttttgatggaactcagggagctgtccgggcaccgaaaacccggtaccacaaaggccaccgcagagtag

SEQ ID NO: 5715 - DNA, 711 bp, synthetic construct
  misc_feature 1..711: note = source = /note="Description of Artificial Sequence: Synthetic coding sequence"
  source 1..711: mol_type = other DNA
atgctaaaaaaaatcagcgtgggcgtagccggagatctgaacaccgtgacaatgaagctgggatgtgtcctgatggcctgggcactttacctgagcttaggagtcctctgggtggcgcagatgttgcttgagttgtttcccgcccccatcctgcgtgcagtgccctccgccgagccacaggcgggctcccctatgacactgtcttgccagactaaactccctctccagcgatcagccgcgagactactgttctctttctataaggacgggaggatcgtccaaagcagaggcctgtctagcgaatttcagatccccacagcctccgaggatcatagcggcagctattggtgcgaggcggccacggaggacaaccaggtatggaaacagtctcctcagctggaaatacgcgtacagggtgcaagtagcagtgcggccccgcctaccttgaatcccgctcctcagaagagcgctgcccccggcacagccccagaggaggctcctggcccccttccccctccccctactccaagttccgaggaccctggatttagtagcccactggggatgccagaccctcatttgtatcaccaaatgggacttctgctgaagcatatgcaagatgtcagagtgctgctgggccatctgctgatggaactgcgggaactgtcaggacaccgcaagcctggaactacaaaagcaaccgccgaatag

SEQ ID NO: 5716 - DNA, 1149 bp, synthetic construct
  misc_feature 1..1149: note = source = /note="Description of Artificial Sequence: Synthetic coding sequence"
  source 1..1149: mol_type = other DNA
atgctcaagaaaatatccgtgggcgtcgcaggagatttgaacacggtcacaatgaaacttggatgtgtgctcatggcatgggctctgtatctgtcactgggggtcctctgggtcgcccagatgctgctggccgcagggtgccacgccgccgccagttttgagaccttacagtgtgaaggacctgtctgcaccgaagagagttcttgccacacagaagatgacttaacagacgcgcgagaggccggattccaggttaaggcttacacattctccgaaccctttcaccttatcgtgtcctacgattggttaatactgcagggccccgccaaacctgtgtttgagggtgatcttctggtcctgcgctgccaggcatggcaggattggccgttaacccaagttacattctatcgtgatgggagcgcactgggccctcccggtccaaatagagagttctccatcacggtcgttcagaaagccgacagtggtcattaccattgtagcgggattttccagtcaccagggcccggtattccggagacggcaagcgtggtagctataaccgtccaggaactctttcctgcacctattctccgggccgtaccatccgccgaaccccaggccgggtcaccgatgacccttagttgccagacgaagctgccgctgcagcgttctgcagcccgtttgctgtttagtttctataaagacgggagaatcgtacagtccaggggattgtccagcgagtttcagataccaaccgcctccgaggatcactccgggtcctattggtgtgaagccgcgacagaggacaatcaggtgtggaaacagtcccctcagctagagatacgggtgcagggggcatcctcaagtgctgctcccccgaccttgaaccccgcgccccaaaaatcggcagcgccaggcacggccccagaagaggctccagggccactgcctccgccgcctaccccatcaagtgaagatccaggatttagtagccctctagggatgccagacccccacttgtatcatcagatgggcttactgctcaaacacatgcaggatgtacgcgtacttttggggcacctgctgatggagctacgggaactctctggacatcggaagccaggtaccactaaagcaacagctgaatag

SEQ ID NO: 5717 - DNA, 738 bp, synthetic construct
  misc_feature 1..738: note = source = /note="Description of Artificial Sequence: Synthetic coding sequence"
  source 1..738: mol_type = other DNA
atgtcaagacttcgagccttgctgggtctgggattgttggtggcaggaagtcgagtcccgcgcatcaaaagtcaaactatagcatgccgctcagggcctacctggtggggccctcagagactcaactctgggggacgttgggactctgaggtgatggcgtccactgtggtaaagtatctcagtcaggaggaagcccaggccgtcgatcaggagctgtttaacgaataccagttttccgtcgaccagttaatggagctggcgggcctgagttgtgccaccgccatagcgaaggcttacccacctaccagcatgtcccgcagcccgccgaccgtcctggtgatatgtggtccaggcaacaacgggggcgatggattggtatgcgcaaggcaccttaaactatttggttacgagcccactatctactatccaaaaaggccaaacaaacccctgttcactgcccttgtcacccagtgtcagaaaatggatatcccctttttgggagagatgcccgcggagcctatgaccattgacgagttatacgagttggttgttgatgccatttttggatttagttttaaaggcgatgtgcgagaaccatttcattcgattctgagcgttctgaaaggccttacggtacccatcgcctctattgacataccatcaggcgccgggattcagaaagtcggctggggacgcctgggtccatatcccccagactcttgtccccaccaggtatag

SEQ ID NO: 5718 - DNA, 783 bp, synthetic construct
  misc_feature 1..783: note = source = /note="Description of Artificial Sequence: Synthetic coding sequence"
  source 1..783: mol_type = other DNA
atgagccgactccgcgcacttttgggacttggactcctcgtcgctggaagtagagtacccaggattaaaagccagactatagcttgcaggtctggccccacgtggtgggggcctcagaggttaaattcagggggcagatgggattccgaggtaatggccagtacagtcgtaaaatacctgagtcaggaagaggcgcaagcagtggatcaggagctttttaacgagtatcagttctctgtagaccagctgatggagctagctggtctttcctgcgccaccgcaatcgccaaggcctatccccctacttctatgtctagatcaccccccactgtgctggtcatctgcggtcccggcaacaacggcggcgatggccttgtctgtgctcggcacttgaagctgttcgggtacgagcccacaatctactacccaaagaggcccaacaagcctcttttcactgcactggtcactcaatgccagaaaatggatatcccttttttgggcgagatgccagccgagctacaggggaggtgttccggcaccgtaccccaacacccagagtgccccgaaggcacccactgcgcccattgccagcataggcattccctccgaatgggtaggggtgaggggaaatgctggagagacccagcaagactggctcacatcccccactcaccacaaaaaatctgtaacccagtctatagaagcctccccctgcctggtggctccttttgtgctacctgttctggagaagaagtgccggctgaacccgcgaccctcccctag

SEQ ID NO: 5719 - DNA, 867 bp, synthetic construct
  misc_feature 1..867: note = source = /note="Description of Artificial Sequence: Synthetic coding sequence"
  source 1..867: mol_type = other DNA
atgtcacgacttcgcgcgctcctggggcttgggctactagtggcaggatccagggtgccccgcattaagtcccagactatcgcctgtcgttcgggcccgacctggtggggccctcaacggctgaactccggaggtagatgggattccgaagtgatggcttccacagtggtgaagtacctgtcccaagaagaggcccaagcggtcgaccaggagctattcaacgaataccagttctccgtggaccagttaatggagctggcagggctttcctgcgctacagcgatcgccaaggcctacccccccacctctatgagccggtcccctcccacagtgttggtaatttgcggaccaggcaacaatggcggggacggacttgtctgcgctcggcaccttaagctcttcggatatgaaccaacaatatactacccaaagagacctaataagccactcttcacagctctggtcacacaatgccaaaaaatggacatcccttttctgggtgaaatgccggccgaaccgatgaccatcgacgagctctatgagctcgtggtggacgcaattttcggtttctcattcaagggcgatgtcagggaaccgttccatagcattctctccgtcttaaagggactgaccgtacctatagctagtatcgacatacccagcggatgggatgtcgaaaaaggtaacgcaggggggattcagccagaccttttaatatctctgaccgcaccaaagaagtcagctacgcagttcacaggacggtaccactatttaggcgggcggtttgttccaccagcactcgaaaaaaagtatcagttgaatctgccgccctacccagacactgaatgcgtgtaccggcttcaatag

SEQ ID NO: 5720 - DNA, 879 bp, synthetic construct
  misc_feature 1..879: note = source = /note="Description of Artificial Sequence: Synthetic coding sequence"
  source 1..879: mol_type = other DNA
atgcacttgagactgattagctggctgtttattatcctgaatttcatggagtatattggctcccagaatgcctccagaggtcgtcggcagcggaggatgcacccgaacgtgtcccaaggttgccagggtggctgcgctacatgttccgactacaacggatgtctttcctgcaaacctcgactgtttttcgccttagaaagaatcggcatgaagcagattggcgtctgcctcagctcatgtcccagcggatactacgggactagatatcctgacattaataagtgcactaagtgcaaggcggactgtgacacttgctttaacaaaaatttctgcactaaatgcaaaagtgggttttatcttcatctgggcaaatgcctcgacaactgccccgaaggcttagaggcaaataatcacacgatggaatgcgtgagcatcgttcattgcgaggtcagtgaatggaatccatggagcccctgcaccaaaaaagggaaaacttgcggcttcaaacgcgggaccgaaactcgcgtgcgggagattatccagcatccttccgccaaaggtaacctttgtccccccaccaacgagactcgcaaatgtaccgtccagcgaaagaagtgccagaaaggcgaacgcgggaagaaaggacgcgaacggaagcggaagaagccaaataaaggcgagagtaaagaggccatccctgatagcaaatctctcgagagctccaaagagatccctgagcagagagagaacaaacagcaacagaagaaaaggaaggtgcaagacaagcaaaagtccggcatagaagttaccctcgccgaaggcttaacttcagtgtcacaaagaacccaacctactccttgtcgtcgccgctatctgtag

SEQ ID NO: 5721 - DNA, 2871 bp, synthetic construct
  misc_feature 1..2871: note = source = /note="Description of Artificial Sequence: Synthetic coding sequence"
  source 1..2871: mol_type = other DNA
atggaaacccaggagctgcgaggagccctggctctgctcctcctatgtttttttactagcgcttcgcaggacttgcaggtgatcgatctcctgactgtaggcgagagtcggcagatggtggccgttgccgagaagatcagaaccgcgctgctgaccgccggggatatctatctcttgtctaccttcagactgccccccaagcagggcggcgtactcttcgggctgtactcccggcaggataacacaaggtggctggaggctagcgtggtggggaaaatcaacaaggtcctcgttaggtatcagagagaagacgggaaagtccacgccgttaacctacagcaggccggcttagccgacggacgcacgcacacagtgttattgagattgcgaggtcccagtaggcctagtcccgctctgcacctgtatgtggactgcaaacttggagatcagcatgccggccttccagctctggctccaattcctcctgccgaggttgatggtctcgaaatccggaccgggcagaaagcctacctgcgcatgcaaggctttgtcgaaagcatgaaaattatcctgggaggtagtatggctcgggtcggggcactcagcgaatgcccgtttcagggcgatgagagcatccactccgcggtcacaaatgccctgcattctatcctcggcgagcagaccaaagcactagtcactcagctaacactattcaatcaaatactggttgagttgcgagatgacattagagatcaagtcaaagaaatgagccttattagaaatactattatggagtgccaagtctgtggctttcatgagcaacggtctcattgctcaccgaatccatgttttcgcggcgtcgactgcatggaggtctacgaataccccggttatcgatgcggcccctgtcctccaggcctgcaaggaaatggtacgcattgtagtgatatcaatgagtgtgcccacgccgacccatgcttccctgggtcttcatgtatcaataccatgcctgggttccactgtgaagcgtgcccccgcggctacaagggcacccaggtcagtggtgtaggaattgattacgcaagggcctccaaacaggtctgtaacgatattgatgagtgtaacgacggaaataatggaggctgtgaccctaactctatttgcactaatactgtcggcagtttcaagtgcggcccatgccggctcggcttcctggggaatcagagtcagggctgcttacccgcaaggacatgtcactctcctgcgcattctccctgtcatattcacgcgcattgtcttttcgagcgcaatggagctgttagttgtcagtgcaacgtgggctgggctggtaatggcaacgtgtgtggaacagacaccgacatcgacgggtaccctgatcaggcactgccttgtatggataacaataagcactgcaagcaggataactgtctgttaacgccaaacagcggacaggaggatgctgataacgacggagtaggagatcagtgcgacgacgatgcggatggcgatgggattaaaaatgtcgaagacaactgtagactcttccctaacaaagatcagcaaaacagcgacactgactctttcggcgatgcatgcgataactgccctaacgtccctaataatgatcagaaggataccgatggtaacggcgagggcgacgcttgcgacaacgatgttgacggagacggaatacctaatggactggacaattgccccaaagtacctaaccccctgcagaccgaccgggacgaagatggagtgggcgatgcctgcgactcttgtccagagatgtccaacccaacacagaccgacgctgacagcgaccttgttggcgacgtgtgcgatactaatgaggacagcgatggagatgggcatcaggacacaaaagacaactgtccccaattacccaattctagccagttggactcagataacgatggattaggtgacgagtgtgacggggatgacgataacgacggtatcccagattatgtcccgcctgggccagataactgcagactggtccctaaccctaatcagaaagacagcgacggcaatggcgttggggacgtctgtgaggacgattttgataatgacgctgtcgttgatccgctcgatgtgtgccctgagtcggctgaagtgacactgaccgacttccgcgcctaccagactgtagtactcgatcccgagggtgacgcacagatcgaccctaattgggtcgtcttgaatcagggaatggagattgtgcaaaccatgaattctgacccaggcctcgccgttgggtatactgcgtttaacggcgtagattttgagggaactttccacgtgaataccgtcacagacgacgattatgctggttttttattttcctaccaggattctggacgcttctacgttgtcatgtggaagcagaccgagcaaacttactggcaggcaaccccatttagggcagttgctcagcctggtttacagctgaaagcagtgacttcagtgtcagggccgggcgaacacctccggaatgcgctctggcataccggacacacccctgaccaggtgcggctcctgtggacagaccctcgcaacgtgggctggagggacaagacaagctaccgttggcagctgctgcatcgtccccaggtcgggtacattcgcgtaaaactctacgagggcccacagctggtagcagacagcggcgtcattattgacacatccatgagagggggtcgtctgggcgtcttctgtttctctcaagagaatattatctggtccaatctccagtatcgatgtaacgacaccgtgcccgaagacttcgagccctttagacggcaacttttgcaaggcagagtgtag

SEQ ID NO: 5722 - DNA, 1110 bp, synthetic construct
  misc_feature 1..1110: note = source = /note="Description of Artificial Sequence: Synthetic coding sequence"
  source 1..1110: mol_type = other DNA
atgctgccctggcttcttgtattcagtgcactcggcatccaggcctggggggattcaagctggaataagacacaggcaaagcaggttagtgagggcctccaatacttgtttgagaatatttcgcagttgaccgagaaagatgtatctaccaccgtgtctcgaaaggcctggggcgccgaggccgtcggctgtagcattcagctgacaactccagttaatgtgctcgtcatccatcacgtccccggattggaatgccatgaccagacagtgtgtagccagcgcctccgagaattgcaggctcatcacgtacataataattcgggttgcgatgtggcatacaactttctggtcggtgacgacggacgggtgtacgaaggggtgggttggaatatccagggcgtccacactcaagggtacaacaacatttctctgggtttcgctttcttcggcaccaagaaggggcacagtccctcgccggcggctctgagtgccatggagaacctcatcacctacgccgtccagaaagggcacctgagtagctcatatgtccagcctctgctggggaaaggcgagaattgtctggcgcccagacagaaaacatcactcaagaaagcctgtccgggtgtggtgcccaggagtgtctggggggctagggaaacccactgtcctaggatgacacttccagcaaaatacggcatcataatacacacagctggacgcacttgtaacattagcgacgagtgtcggttactggtgagagacattcaatctttctacattgatcggctcaagtcctgcgacatcggctataatttcctcgtgggtcaggacggagcaatttacgagggcgtgggctggaacgtacagggctcttctacgcctgggtacgatgacattgcgctaggtattactttcatggggactttcaccggtatcccgcctaacgcagctgccctggaagccgcacaggatctgattcagtgtgccatggtcaagggatatttaaccccaaactacctgctggtgggccacagtgatgttgctcgcactctgtcacccgggcaggcactgtataacattatcagcacatggccccactttaaacattag

SEQ ID NO: 5723 - DNA, 675 bp, synthetic construct
  misc_feature 1..675: note = source = /note="Description of Artificial Sequence: Synthetic coding sequence"
  source 1..675: mol_type = other DNA
atggaaaaaattcctttcgttcttggcggaaacttacaggggggcgaactggtggtagcctatccctacgacttggtgcggagcccctggaaaacccaggaacacacacccactccggatgaccatgtcttcagatggctcgcttactcctacgcttcgactcatcgcctcatgacagacgcaaggcggcgggtgtgccatacggaggacttccagaaagaagaaggtaccgtgaacggggccagctggcacaccgtcgccggatcacttaatgatttcagttatctgcacactaattgcttcgagctgtcgatctatgtcggatgcgataaatatccacatgagtcgcaactccccgaagagtgggaaaataaccgcgagagcctgatcgttttcatggagcaggtccaccgcgggatcaagggcctggtgagagattcacacgggaaggggattccgaatgcaatcatttctgtggaaggaatcaatcatgatattaggacaggccgggtcagtttgcagaagttgagcctggcctgccgtcgggtacggtgcgcatttgccctgagctctagcagtacaatgattgtgagacctccgcagccctacggtacagtgcctcactcatctccggatccggtgactacaaagatctctcctttgcgcaacttctag

SEQ ID NO: 5724 - DNA, 285 bp, synthetic construct
  misc_feature 1..285: note = source = /note="Description of Artificial Sequence: Synthetic coding sequence"
  source 1..285: mol_type = other DNA
atgcctgtcatcgctggtggaatacttgcagctctcttgctgctaatcgtggtggtgctttgcttgtactttaagatccacaacgcactgaaagcggctaaggagcctgaggcggtagctgtcaagaatcacaaccccgacaaggtgtggtgggcgaaaaatagccaggcaaagaccatcgctactgaaagctgtcccgccctgcaatgctgcgagggctacaggatgtgcgcctcatttgattctctccccccttgctgctgcgacattaatgaagggctgtag

SEQ ID NO: 5725 - DNA, 285 bp, synthetic construct
  misc_feature 1..285: note = source = /note="Description of Artificial Sequence: Synthetic coding sequence"
  source 1..285: mol_type = other DNA
atgcccgtaattgccggcggtatactggctgccttgctattgctgatcgttgtggttctatgcctgtatttcaagattcataatgctctgaaggctgccaaagagcctgaagctgtggccgtgaagaaccataatcctgataaggtctggtgggctaagaacagtcaggccaagaccatcgccactgagagttgccccgctttacagtgctgcgaagggtataggatgtgcgcgtcctttgacagcctacccccctgttgctgtgatataaacgaagggctttag

SEQ ID NO: 5726 - DNA, 1026 bp, synthetic construct
  misc_feature 1..1026: note = source = /note="Description of Artificial Sequence: Synthetic coding sequence"
  source 1..1026: mol_type = other DNA
atggtcccagctgcgggggccctgctttgggtcttgttactgaacctgggaccaagggctgccggggcacagggcctaacccagacaccaaccgagatgcaacgcgtctcactgagattcggcgggccaatgacccggtcctaccgctccacagccagaacgggtctgcctagaaaaacaaggatcattctggaggatgaaaacgacgccatggccgacgcagatcgccttgccggacctgctgccgcggagctgctggcagctactgtgagtaccggctttagtcgcagcagcgcaattaatgaagaggacggcagctcggaagaaggtgtggtaataaatgccggaaaggattcgactagcagagagttgcctagtgcaacacccaacacagcaggcagttctagcactagatttatagccaatagccaggaaccggagattagattgacctcctccctgccgcggtctccaggcaggtcaaccgaggacctacctggctcacaggctacactttcccagtggtccacacctggtagcacacccagcaggtggccttctccaagccccacagctatgccgtcaccagaagacctgcgcctggtgctgatgccctggggaccttggcactgccactgtaaatcaggtaccatgagtaggtcacgctctggaaagctccatggactaagtggccgcctgcgcgtgggtgcactgtctcagttacgaacagagcacaagccgtgtacttaccagcaatgtccatgcaacaggctgagagaagaatgcccgcttgacacctcactttgtaccgatacaaactgcgctagccaatccactacctccacgcgtacaaccactacccctttccctaccatccatctgcgcagcagccctagcctgccccctgcatctccatgtccagccctagccttttggaagagagtgaggattggtctagaggacatttggaattccctatccagtgtgttcaccgagatgcaacctattgacagaaatcagcggtag

SEQ ID NO: 5727 - DNA, 366 bp, synthetic construct
  misc_feature 1..366: note = source = /note="Description of Artificial Sequence: Synthetic coding sequence"
  source 1..366: mol_type = other DNA
atggacgtgttattcgtcgccattttcgcggtgccgttgattctgggccaggagtatgaggatgaggagcgattaggcgaagacgaatactatcaggtggtgtactattacactgtaacacctagttacgatgattttagcgccgacttcacaatcgattatagcatttttgagagtgaggaccgactcaaccgactggataaggatatcactgaggctattgagacgacaatatcactggaaaccgcgagggcagatcaccccaagcccgtgactgtcaagcctgtaacaaccgaacccgtcgaagaggggtgttacgatagtctcgatggcagtctcgcgagaggtaattggaagattaagtag

SEQ ID NO: 5728 - DNA, 396 bp, synthetic construct
  misc_feature 1..396: note = source = /note="Description of Artificial Sequence: Synthetic coding sequence"
  source 1..396: mol_type = other DNA
atggacgttctgtttgttgccatcttcgcggtaccacttatcctcggccaggagtacgaggatgaggaacgactgggagaagacgagtactaccaagttgtctattattacactgtgaccccatcgtatgatgattttagtgctgatttcaccatagactatagcatcttcgaatccgaggaccgcctgaatcgcctggacaaggacatcacggaagctatagagactacgattagtctggagacagcacgagccgaccatcccaagccagttaccgtcaagccggtgacgacagagcccagtccagacttgaacgatgccgtgtcatccctgcgctcccctattcctctcctgctgtcatgcgcgttcgtgcaggtgggcatgtattttatgtag

SEQ ID NO: 5729 - DNA, 396 bp, synthetic construct
  misc_feature 1..396: note = source = /note="Description of Artificial Sequence: Synthetic coding sequence"
  source 1..396: mol_type = other DNA
atggacgtgctgtttgtcgcaatcttcgcggtgcctttaatcctgggacaggaatacgaggacgaagaacgattgggcgaggatgaatactatcaggttgtctactactacaccgtcacaccatcatatgatgatttctccgccgattttaccattgattactccatttttgagagcgaagaccgactcaatcggttggataaggatatcaccgaggccattgaaacgacaatcagcctggagaccgctagagccgaccacccaaagccagtcacagtcaagcctgtaactactgagcccagccccgacctgaacgacgcagtatcttctctccgcagtcctatccccctgcttctgagctgcgcttttgtgcaggtcggcatgtatttcatgtag

SEQ ID NO: 5730 - DNA, 312 bp, synthetic construct
  misc_feature 1..312: note = source = /note="Description of Artificial Sequence: Synthetic coding sequence"
  source 1..312: mol_type = other DNA
atgtccggacggggaaagggaggcaagggactggggaaaggaggagcaaagaggcaccggaaggtcctccgtgacaacattcagggaatcactaagcccgccattcgcagactggcccggcgcggaggcgtcaaacgaatctcaggtctcatatatgaggaaactaggggggtcctgaaggtctttttggaaaatgtcatccgtgatgcagtcacatatacagaacatgccaagcgcaagaccgtcaccgccatggatgtcgtctatgccctgaaacgtcaggggagaacactgtatggatttgggggctag

SEQ ID NO: 5731 - DNA, 312 bp, synthetic construct
  misc_feature 1..312: note = source = /note="Description of Artificial Sequence: Synthetic coding sequence"
  source 1..312: mol_type = other DNA
atgtccggccggggaaaaggcggcaaaggactggggaaaggtggggccaagaggcatagaaaagtactccgggacaacatccaggggattacgaagcctgccatcagaaggttggcaaggcgtgggggcgtgaagcgcattagcggcctcatctatgaggagacgcggggggtgctcaaggtgtttcttgaaaatgtgataagagacgcagtgacgtacacggagcacgcgaaacggaaaacagtcaccgccatggatgtagtttacgcactcaaaagacagggtagaacgctctacggattcggaggctag

SEQ ID NO: 5732 - DNA, 1404 bp, synthetic construct
  misc_feature 1..1404: note = source = /note="Description of Artificial Sequence: Synthetic coding sequence"
  source 1..1404: mol_type = other DNA
atgctgggtatttggatcgtcgcctttctgtttttcggtaccagcaggggcaaggaggtctgttacgaaaggctgggttgttttaaggatgggcttccatggacacgaacgttttccaccgagcttgtgggactgccatggtctccggagaagattaatacgcgcttcttgttgtatacgattcataatccaaacgcctaccaagagatctcagctgtgaacagctctaccatccaggcgagctacttcggcaccgataagattacccggattaacattgccggatggaagaccgacgggaagtggcagcgagatatgtgcaatgtcttactccagctggaggatatcaattgtattaacttagactggattaatggaagtagagagtatattcacgccgtgaacaatttgcgtgtggtcggtgccgaagttgcgtattttatcgacgtactcatgaaaaagttcgaatattcccccagtaaggtacatctaatcgggcatagcctgggagcccatctggctggagaggctggatctaggatccctggcctgggaaggattacagggctggaccccgcgggcccatttttccacaatacacctaaggaggtgaggcttgatcctagcgacgcaaatttcgtggacgtgattcacacaaacgccgccaggatcctgtttgagctcggggtggggaccatcgacgcttgtggacaccttgacttctaccccaatggaggcaaacatatgccgggatgcgaggatttaattaccccattgcttaagtttaacttcaacgcttacaaaaaagaaatggcctcattttttgactgcaaccacgcccgaagctatcaattctacgccgagtccatcctgaatccggatgccttcatcgcgtatccctgtcggtcgtataccagctttaaagccggcaactgctttttctgttctaaagaagggtgcccgactatgggccacttcgctgaccgtttccacttcaaaaacatgaaaaccaatggaagccactattttctcaacactggttctctttccccttttgcccggtggaggcataagctgtcggtcaaactgtcaggcagcgaagtgactcaaggaacagttttcctgagagtgggaggcgccgtccgtaagacaggtgaatttgctatcgtctcgggcaaactggaacccgggatgacatacacaaaacttatcgacgctgatgttaacgtaggtaatatcactagtgtgcagttcatttggaagaaacatctgttcgaagacagccagaataagttaggggccgaaatggtgatcaatacaagcggaaaatacggctataaaagcacattctgcagtcaggatatcatggggcctaacatcttacagaacctgaaaccttgttag

SEQ ID NO: 5733 - DNA, 1287 bp, synthetic construct
  misc_feature 1..1287: note = source = /note="Description of Artificial Sequence: Synthetic coding sequence"
  source 1..1287: mol_type = other DNA
atgattaccggagtgttcagcatgcgactgtggacccctgtcggagtcttgacctctcttgcatactgcctccaccagagaagagtggcactggctgagctgcaggaagcagatgggcaatgccccgtggacagaagtctgctcaaattgaaaatggtgcaagtggtgtttcgccacggggcccggtccccactgaaacctctgcctctggaggaacaggtagagtggaatccacagttgctggaagttcccccacagacccaattcgactatacagtcaccaatctcgcgggcggaccaaagccttactctccctacgatagccaatatcatgagacaacactcaaaggcggcatgtttgctggacaactaacaaaggtcggcatgcagcaaatgttcgcgctcggagagaggttgagaaagaattacgtcgaggacatcccatttctgtctcctacctttaacccgcaagaggtatttatcagaagcaccaatatttttcgaaacctggaaagcacacggtgtctcttggcaggcctttttcagtgtcagaaggagggtcctataattatacatactgatgaggcagatagcgaggtcctgtaccccaactaccagagctgttggtcactcaggcaaagaacccgcggccgcaggcagactgcgtctctgcagcctgggatttccgaagaccttaaaaaggtgaaagacagaatgggcattgactcctccgacaaagtggacttcttcattctcctcgacaacgttgcggccgaacaggcgcacaatctgcccagttgtcccatgctgaagcgctttgcccggatgatagagcagcgtgccgtggacactagtctgtatatcctacccaaggaggaccgggagtccttgcagatggccgtgggcccctttctacacatcctcgagtccaacttgctaaaagccgtagactctgctacagcgcccgataaaatccggaaactgtatctttacgctgcccatgacgtcaccttcatcccgttgttaatgacattggggatcttcgaccataagtggccacctttcgctgtggacttaacaatggaactgtaccagcatcttgaaagcaaagagtggttcgtgcagctttactatcacggaaaagaacaagttccccgaggttgtcctgacgggctatgccccctcgacatgttcctgaacgcaatgagcgtctataccttgagtcccgagaaataccacgccctgtgtagccagacccaggtaatggaggtgggtaacgaggagtag

SEQ ID NO: 5734 - DNA, 711 bp, synthetic construct
  misc_feature 1..711: note = source = /note="Description of Artificial Sequence: Synthetic coding sequence"
  source 1..711: mol_type = other DNA
atgtgtgtgacataccacaacggaaccggctactgtaaatgtcctgaggggtttctgggggaatactgtcagcatagagacccttgtgagaaaaataggtgtcagaacggcggcacttgcgtggcccaggccatgttaggaaaggctacatgcagatgcgcaagcggattcacaggcgaggactgtcagtattccacgtcccatccctgcttcgtgtctcgcccatgtctgaacgggggcacctgccatatgctcagtcgggatacatatgaatgcacctgccaggtgggattcacaggaaaagagtgccagtggaccgatgcctgcctttctcatccttgcgccaacgggagcacttgcacaacagttgcaaaccagtttagctgtaaatgtctcacgggatttaccggtcagaaatgtgaaaccgatgtgaatgaatgtgacattccaggacactgtcagcacggcggcacctgcctgaacctgcctggctcctatcagtgtcagtgtctccagggattcactggacagtattgtgactcactttacgttccttgcgccccctcaccctgcgtgaacggcggaacctgtaggcagacgggcgacttcacatttgagtgcaactgtctccccgagaccgtcagacgcgggacagagctatgggagcgagatcgggaggtgtggaacggtaaagagcacgacgagaattag

SEQ ID NO: 5735 - DNA, 990 bp, synthetic construct
  misc_feature 1..990: note = source = /note="Description of Artificial Sequence: Synthetic coding sequence"
  source 1..990: mol_type = other DNA
atggtgaccaaagcattcgtgcttttagctatctttgcagaggcgtccgcaaagagctgtgcaccaaataaggctgatgttatcctggttttctgttaccccaagaccatcattaccaagattccagagtgcccgtacggctgggaagtgcaccagttagccttaggcggtctgtgttataatggtgtgcatgaaggagggtattaccagtttgtgatcccagatctctcccccaaaaataagtcatactgcggaacacagtctgaatacaagccccctatctatcacttttattcacacatcgtctccaatgataccacggtgattgtcaaaaatcagcccgttaattacagttttagctgcacataccactccacgtatcttgtgaaccaggcagcatttgaccagcgtgttgccacagtccacgtcaaaaatggtagcatgggaaccttcgagagccaattgagtcttaacttctacaccaacgcgaagttcagcatcaaaaaggaggccccttttgtcctggaagcctcagagatcgggtcagacctgtttgccggggttgaagcaaagggcctcagtatccgtttcaaagttgttcttaactcttgctgggccaccccctccgccgacttcatgtatccccttcagtggcagctcatcaacaaggggtgccccactgatgagaccgtgttagtccacgagaacggtcgcgatcaccgtgctactttccaattcaatgccttccggtttcagaatatcccaaaactatccaaggtctggcttcactgcgagacatttatttgcgatagcgagaagctctcatgtcccgttacttgcgataagaggaagcgcctgctgagggaccagactgggggtgtcctagtggtggagctgtcattgaggtcccggggcttctccagcctctacagcttcagtgacgtccttcaccatctcatcatgatgctcgggatatgtgccgtgctgtag

SEQ ID NO: 5736 - DNA, 1161 bp, synthetic construct
  misc_feature 1..1161: note = source = /note="Description of Artificial Sequence: Synthetic coding sequence"
  source 1..1161: mol_type = other DNA
atggcacagtggcactgcagtcagcgcacgcaggccggcggacacggcgtgggagaaagacttgctcagtgccaggatcagtcatctcggcacgcagcagagctacgagacttcaaaaacaaaatgctgccccttttggaagtagcggaaaaggaaagggaggctctgcgtactgaagctgacacaatctccggaagggtcgatcggctcgagcgggaagtggactatcttgagactcaaaaccctgcacttccctgtgtagagtttgacgaaaaagtcaccggaggaccgggcacgaaaggcaaaggccgtcgcaatgaaaaatacgatatggtgactgattgcgggtacactatcagccaggttagatccatgaagatcctgaagcgcttcggaggaccagccggcctgtggacaaaagacccccttggacagacagagaagatttacgtgttagacggtacccagaatgacacggcttttgtctttccacgtctgagggactttacacttgctatggctgccagaaaggcttctcgagtgcgggtgccattcccgtgggttggtacggggcagctcgtgtatgggggatttttatattttgctcggcgccctccagggagaccaggggggggcggggaaatggaaaacactctgcaactcatcaagtttcacctcgcgaatcgaactgtggtggactcctctgtgttccctgccgaaggattaattcctccgtacgggttgactgccgacacatacatcgatttagccgcggatgaggaggggctttgggctgtgtacgctaccagggaagacgataggcacctgtgcctcgccaagttggacccccagacccttgacaccgagcaacagtgggatactccctgcccccgggaaaacgccgaggctgctttcgtgatttgtggtaccctttatgttgtgtataacaccagaccagcatctcgcgcccgaatccagtgctcgtttgacgcatccgggactttgacacccgagagggccgccctgccctactttcctcgtcgatatggagcccatgcatcgctccgatataacccacgggagcgtcagctctacgcttgggacgatggatatcaaatagtgtacaagttagagatgaggaagaaggaagaggaagtgtag

SEQ ID NO: 5737 - DNA, 510 bp, synthetic construct
  misc_feature 1..510: note = source = /note="Description of Artificial Sequence: Synthetic coding sequence"
  source 1..510: mol_type = other DNA
atgtccgaaagggttgagcgcaattggagtacaggaggctggctgctcgccctctgtctggcttggctctggacccatctgaccctagccgccctgcagccccccaccgccactgtactggtgcaacagggcacgtgtgaagtgattgccgcccaccgttgttgcaacagaaaccgcatcgaggagaggtctcagacggtgaaatgtagctgcttttctggccaggtggcagggaccacgcgcgctaaacctagctgtgttgacgaccttcttctagctgcacattgcgcgcggagagatccccgcgcagcccttagactcctgctgccccagccaccatctagttgccgggacggtggcgtgaggtggtcccccgcttgcaggggtaggtccgtgcggtgcagccgcacctgccgtgacggcgctgccgcggtagatactaaaagcaagcctccaaggagtcacgattccagttgggggtctcggccgggccaggaaaggctggattag

SEQ ID NO: 5738 - DNA, 693 bp, synthetic construct
  misc_feature 1..693: note = source = /note="Description of Artificial Sequence: Synthetic coding sequence"
  source 1..693: mol_type = other DNA
atgagactggccggaccactgaggattgtggtcctagtggtgagcgtgggagtcacatggatagtggtgtcaattcttctgggggggccaggttccgggtttcctaggatccagcaactgtttacctccccggagtcctctgtcactgctgcgccgagggctagaaaatataaatgcgggctgcctcagccctgcccagaggagcaccttgcgtttcgcgttgtgtctggtgccgccaacgtaatcggtcccaaaatttgtcttgaagacaaaatgctaatgagctctgtaaaagacaacgtgggtagaggcctgaacattgccctggtgaacggcgtttctggagaattaatagaagctcgcgcctttgatatgtgggctggagacgtcaatgacctcctgaagttcatacgcccgctacacgagggtactctggtattcgtcgcatcctacgacgaccccgccacgaaaatgaacgaagagacacgtaaattattctcagagctcggaagccggaacgctaaagagcttgcctttagggactcttgggtgttcgttggtgctaagggagtgcagaataaaagcccctttgagcagcacgtgaagaactccaaacacagcaataaatacgaaggctggcccgaagccctcgagatggagggatgtatccctaggcgctccacggcttcctag

SEQ ID NO: 5739 - DNA, 1176 bp, synthetic construct
  misc_feature 1..1176: note = source = /note="Description of Artificial Sequence: Synthetic coding sequence"
  source 1..1176: mol_type = other DNA
atgttgagacctggcggcgccgaagaggctgcacaactccccctgcgacgagcgtcagcacccgtgcccgtccccagtccggcagcccccgacggcagtagggctagcgcgcgccttgggctcgcttgcctgcttctcttattgctcttgacgcttcccgcgcgcgtcgacacttcatggtggtacatcggggccctgggcgctcgggttatttgcgacaatatcccagggcttgttagtagacagcggcaactgtgtcagaggtatcctgacatcatgcgcagtgtaggcgagggtgcgagggagtggatcagggaatgccaacaccagtttaggcatcacagatggaactgtacaacactggatcgggatcataccgtatttggaagagtaatgttacggtcgtcccgggaggccgccttcgtatatgcaatctcatctgccggcgtggtccacgcaatcacacgcgcatgcagccagggcgaactgagcgtgtgctcctgcgatccctacacacgcggcaggcatcacgaccaaagaggtgacttcgactggggaggatgctccgataacatccactacggtgtgaggttcgccaaggcatttgtggacgcgaaggagaagcgccttaaagatgctagggctctgatgaatcttcacaataatcgatgtggccgaaccgctgtccggaggttccttaagcttgagtgtaagtgtcacggcgtaagtggcagctgtacactgcggacctgctggcgtgccttgtctgactttagacgcaccggcgactatttgaggcgcaggtatgatggagcagtacaagttatggcgacccaggacggagccaactttacagccgctagacaaggatatagacgggcgaccagaaccgatctagtctactttgacaattctcctgactactgcgtactcgataaagcagccggctcgttaggaacggcgggcagagtgtgttcaaaaacctccaaaggcactgatggatgcgagattatgtgctgtggcaggggatacgatactacacgcgtaactagagtgacacagtgtgaatgcaagttccactggtgctgtgctgtcagatgcaaggaatgccgtaacactgttgatgtacatacctgcaaagcccccaagaaagcggaatggctggatcagacatag

SEQ ID NO: 5740 - DNA, 1119 bp, synthetic construct
  misc_feature 1..1119: note = source = /note="Description of Artificial Sequence: Synthetic coding sequence"
  source 1..1119: mol_type = other DNA
atgcttgacggccttggagtggtcgctatcagcatcttcggtattcagcttaagacagaaggctctctccggacagccgtccccggcattccaacgcaatcagcatttaacaagtgcctgcagaggtatatcggcgctctcggagctcgtgtcatatgcgataatatcccaggacttgtcagcagacaaaggcagctgtgccagagataccccgatattatgaggtcagtcggcgaaggcgcacgagagtggattcgcgagtgccagcatcagttccggcaccatagatggaattgcaccacactcgacagagatcacaccgtgtttgggcgggtcatgctaaggagctcacgtgaagctgcctttgtgtatgctatttctagcgccggagtggtccatgccataactagggcatgctcacaaggggaactcagcgtgtgttcatgcgacccatacacccgaggacggcaccacgaccagcgtggggattttgactgggggggctgttccgataacattcactatggcgtcaggttcgcaaaagcattcgtggacgcaaaggaaaagagactgaaagatgcaagagctctgatgaacctccacaacaatcgttgcggacggactgctgtccgcagattcttaaaactggagtgcaaatgtcatggtgtgtccgggtcgtgcactctacggacatgctggagggcactctcagatttccgcaggacaggtgattatctgagacgtaggtatgatggagcagttcaagtaatggcgacccaggacggagccaattttactgctgcccgccagggataccgacgcgctaccagaacagacctggtctatttcgataattcgccagattactgtgtcttggacaaggcggctgggagtctcggcaccgcagggagagtctgcagtaagacctccaaagggaccgacggctgtgaaatcatgtgttgcggccgaggatacgataccacccgggtgaccagagtaacccaatgcgagtgcaagttccattggtgttgtgcggtaagatgcaaggagtgccgaaacacagtcgacgttcatacatgtaaggcccctaagaaggccgaatggctggatcaaacttag

SEQ ID NO: 5741 - DNA, 1242 bp, synthetic construct
  misc_feature 1..1242: note = source = /note="Description of Artificial Sequence: Synthetic coding sequence"
  source 1..1242: mol_type = other DNA
atggagaatatgctgctgtggctgatctttttcacgcccggctggacactgatcgatggctccgaaatggagtgggacttcatgtggcaccttcggaaagttccaagaatagtttctgaaagaacgttccatttaacatctccagcctttgaagctgacgctaagatgatggtgaatacggtgtgcggaatagagtgtcagaaagagcttccgacaccaagcctgtcagagctggaagattacctaagttacgaaacagtgtttgagaacggaaccagaacacttacccgagtgaaggtgcaagacctagtactggaacctactcagaatatcaccacaaagggcgtatctgtgagaagaaagcggcaggtctatgggaccgattctcggttttccatcctggacaagcgcttccttactaattttccattctccacagcagtaaaattgagtaccggatgttccggcatattgattagccctcaacatgtattgacagccgcacattgcgtccatgacggaaaagattatgtcaagggatccaaaaaactccgcgtgggactattgaaaatgagaaacaagagtggcggaaagaaacggcgtggctctaaaagaagcagacgcgaagccagcgggggagatcagagagagggaactagagagcatctgcgggaaagagcaaagggcgggagacggcggaaaaaaagtggtcgcgggcagcggatcgctgagggaagaccaagcttccagtggacaagagtgaagaacacccacatacccaaagggtgggccaggggcgggatgggcgatgccacactggattacgactacgccctgctggagcttaagcgcgcacataagaaaaaatatatggaactggggattagtcccaccattaaaaaaatgccggggggcatgattcactttagtggcttcgataacgatagagccgaccagctggtttatcgcttttgctctgtatctgatgaatctaacgatctcctttaccagtactgtgacgccgagtcaggttcaactggatcgggtgtttatcttaggctgaaggatccagataaaaaaaattggaagaggaagatcatcgccgtgtactcaggtcatcaatgggtggatgtgcacggtgtgcagaaggattacaatgtggccgtcaggattacacctctaaaatacgctcagatttgcctgtggatacatggaaatgatgcgaattgcgcatatggctag

SEQ ID NO: 5742 - DNA, 1143 bp, synthetic construct
  misc_feature 1..1143: note = source = /note="Description of Artificial Sequence: Synthetic coding sequence"
  source 1..1143: mol_type = other DNA
atgggcgcaacaaccatggaccagaagagtctttgggctgggtccgcctacaagctggtgtgttacttcaccaattggtctcaggatcggcaggaaccaggcaagtttacaccagagaatatcgatccatttctatgctcacacctaatttactcattcgcctccatagaaaataacaaggtaataattaaggacaaatcagaagtgatgctatatcagacaattaactctctgaagactaagaacccgaaactgaaaatcttgctaagtattggcggatatctctttggcagcaaaggatttcaccccatggtcgattcatcaacctccagattagaatttattaactccattatccttttcttgcgaaaccacaacttcgatggactggatgtctcctggatatatccagatcagaaggagaatactcattttaccgtactgattcatgagctggctgaggcattccagaaagacttcacgaagtccaccaaggaaagactcctgttgaccgccggcgtttccgccggccgacagatgatcgacaatagctatcaggtggagaagctcgcaaaggaccttgacttcattaacctgctgtccttcgacttccacggtagctgggagaaacctctgattacaggacacaactcacccctctccaaggggtggcaagaccgaggtccatccagttactataacgtcgagtatgcagttggatactggattcacaagggaatgcccagcgagaaggtggtcatgggcattcctacttatggccactctttcactctggccagtgccgaaacaacagtcggagctcctgcctccggccctggagcagcaggccctatcacagaatcctctggttttctagcatattacgagatttgtcaattcctgaaaggcgcgaaaatcacccggttacaggatcagcaggtcccctacgcagtcaaagggaaccagtgggtggggtatgacgacgttaaaagtatggagacaaaggttcaatttctgaaaaatctaaatctgggcggcgcaatgatttggtccatagatatggacgacttcactgggaagtcttgcaaccagggaccttacccactggttcaggctgtcaaacggtccctcggctctctgtag

SEQ ID NO: 5743 - DNA, 1173 bp, synthetic construct
  misc_feature 1..1173: note = source = /note="Description of Artificial Sequence: Synthetic coding sequence"
  source 1..1173: mol_type = other DNA
atgggcgccactactatggaccaaaagtcgctgtgggccggagtggtggtgttactcttacttcagggcgggagcgcctataagcttgtatgttattttactaactggagccaagatagacaagaacccgggaaatttacaccggagaatatcgaccccttcctttgttcacacctaatatacagtttcgctagcatcgagaacaacaaagttattatcaaggacaaatccgaagtcatgttgtaccagacgataaattctttaaagaccaaaaaccccaagctcaagattctcctatctatcggaggttacctgttcggatccaaaggttttcaccccatggtggattcatctacatcacgtctggaattcataaatagtatcatcttgttccttagaaaccacaactttgatggcctggatgtgtcatggatatacccggatcagaaggaaaatacacatttcaccgtgctgattcatgagctggctgaggcctttcagaaggacttcaccaagtctacaaaggaaagactcctgcttacagccggcgtatctgctggccgccagatgatagacaactcctatcaagtggagaagttggctaaagacctcgacttcatcaacctactgtcattcgactttcatggctcatgggagaaaccactaataacgggacataactcaccattgagcaagggttggcaggatagggggccttcctcctattacaatgttgaatatgcagttggctattggatccacaaagggatgcctagcgagaaggtggtcatgggcatcccaacctatggccatagttttaccctagcgtcggccgaaacgaccgttggggcgcccgcgagcggcccaggcgctgctggacctattactgagagtagtggcttcctcgcctactatgagatctgccaattcctcaagggggccaaaatcacgaggctgcaggatcagcaggtgccctatgcagtgaagggcaaccaatgggtgggctatgacgatgtgaagtcgatggagactaaggtgcagtttctcaaaaatcttaatctgggtggggccatgatctggtctatcgatatggatgacttcaccggaaagtcgtgcaatcaagggccctatcctctggttcaggcggtgaagaggagtttgggcagcctgtag

SEQ ID NO: 5744 - DNA, 2202 bp, synthetic construct
  misc_feature 1..2202: note = source = /note="Description of Artificial Sequence: Synthetic coding sequence"
  source 1..2202: mol_type = other DNA
atggccggggggcgagaaacatgcctaccactcattggatttattctgatctgtctgaaaatggtcgcgtcagccaaaagtgcccccgagatcccaaccattgatcaggcttatagcaaattgagcaactctatcactgtggagtgggccacggtgcctggtgcaacctcttacctgctcaccgccgaggatggggacacggtgatcgagacaactgtcgccaacagtcctggaaccgtaacggggctcaaggccgcaacatggtacgagattactattcggtcaattagcgcagcaggccgcagccaggcctcaccaccaaagcaggcgaaaacagtactcgcagcgcccatcctagaagtcagcagtccttcctctgactctattctggttcagtgggaggctgtttacatggcgattgcattctcagtctccattatgagggcaaatggtctcggcagtatatggaaagaaaacacaaccaacacaagcttgacattcacttccctggaagccggtaccctgtacacaatcaaggcatatgcctggaatgccaaccgtattcccggcgacgattccacctgcaatcagagaacctcacctagagcaccagctaacatccaagtaagcttcgactcaggcgcattaaaggccagttttagctgggctagagccgagggggccttcaactacactgtgatggctttaagcgattcttcagaattgacctgttctactacattctcttcttgtacgatcagttcccttcaatgtggaacggaatacttaataagcgtcctcgcgtctaacgatgccgggtctagtaagtctagtagcgcaatgactttgaagactgtggcctgcgcccctggcagggtcactatccaggaggacccacctggacacctgtcggtggcttggagttccgtggacttaggcgattactatgtggtcttcgttaaaagcgacgatggcctcgaggtgcattgcaacactagccttacccagtgcaatttcttgtccgagtgtggatttacgtactttatttcagtcttcgtgtacaacaaagctggacagtcccccttaggcgatatttttaattatacaaccgctccttgttgcccctccgacatcaatccagtgctggtcagcagcgatcgggtggagattgtttggtcccccgtgcgcggtgccgagctgtatgaaaccaaagccgtggacggttacaatatggtggagtgtaatgacaccacgcccgcatgtaccctgtccgccctggaatgtgacacaaagtataatatcacagtttacagctttaatgaggtgagaggctcaaacatgtcttgtacaccgcagttcatcactacagcaccttgtagcccagaaataaaaaatgtctcccgtgacgccttctctatgattaatgtgcattggcgcagcaccaatgacgacgcaacttacactgttacggcccaaggcgaaaaaggtttgtaccagtgcagcagtacaggcgaatcttgtacgatgcgcggcttgccttgtggctccgtcttttccgtaaccgcagtggctgagacgcaggcaggtaggtcattacctagctactctgtgcccctggagacagtgccatgttgtcctactgggctgacagtgacccaaataacccaatccgtgattaacgtgagctggaccattgggcgcgtcgctcagactcatgtcgccgtattagaaagtcataccggtcagagtaagtgtcacacccatcagaaccactgcctcttgggctgtatcacctgtggtatcaactatactgtaactctcaaggcgatatccgccaccggcttaactgccgattgctcatatcaaagctattttagcggcgcttgttgtccattgggtgtcaagttatacaggctgggtcccaatggcattcgtatctattggcaggcaagtcggggtagcgcaaactatagcactgatctctacggctctaaaggcatattcacctgtacgccatccgcaggtctcagcttctgcgacgttaccgagattccctgtggagatgtgtacaccgtgatggtgtcccctgtcgctaagacaggactgaagctcaccttttgcccaaagaagatctacagtgtaacatgcagtggatccaccctaggaatggttatttatcgcggaaaaagaaacgaagagtag

SEQ ID NO: 5745 - DNA, 555 bp, synthetic construct
  misc_feature 1..555: note = source = /note="Description of Artificial Sequence: Synthetic coding sequence"
  source 1..555: mol_type = other DNA
atgagagggcagggccggaaggagtccctcagtgattccagagacctggacggctcctacgaccaactgacagacagcgtggatgatgagtttgagctaagcacagtatgtcaccgacctgaaggactcgagcagctccaagagcagacgaagttcacgcgcaaggaactgcaggtcctgtatcgcggtttcaaaaacgagtgcccgagtgggatcgtgaatgaggagaacttcaagcagatttatagtcagttcttcccccagggagacagcagcacgtatgccactttccttttcaatgcgttcgataccaatcatgatggttctgtgagcttcgaggagatgttagatattatgaaatcaatctatgatatgatgggcaagtacacctaccccgcactcagggaggaagcacctcgggagcacgtggaatcttttttccaaaaaatggacagaaacaaggatggtgtggtcaccatcgaggaattcatcgaaagttgccagaaagacgagaatataatgagaagcatgcagctgtttgacaacgtgatatag

SEQ ID NO: 5746 - DNA, 759 bp, synthetic construct
  misc_feature 1..759: note = source = /note="Description of Artificial Sequence: Synthetic coding sequence"
  source 1..759: mol_type = other DNA
atgcggggtcaggggcgcaaggagtctctatctgattcccgtgatctggacggatcctatgaccaactaacgggccatccaccagggccaacaaagaaggctctgaagcagcgattcctaaaactgttgccctgctgcggtccacaggcactgcccagcgtgagcgagtccaacgtggacgacgagttcgagctatcaactgtctgccaccgacccgaaggtctggagcaacttcaagagcagacaaagttcacacgcaaggagctccaggtcctatacaggggctttaagaacgaatgcccttctggaatcgtgaacgaagaaaattttaaacagatttacagtcaatttttcccccagggggactcatctacctatgcgacatttctctttaatgcctttgatactaaccatgatggcagtgttagctttgaggacttcgtggccggactaagcgtgatccttagggggaccgttgatgaccgcctgaattgggcttttaacctgtacgacctgaacaaggacgggtgcatcaccaaagaagagatgctagatatcatgaaatccatctatgatatgatgggcaaatacacatatccggcactgagggaggaggcacctcgcgagcatgtcgagtcattcttccagaagatggaccgcaacaaagatggggtagtgacgattgaggaatttattgagtcttgtcagaaagatgagaacattatgaggagcatgcagctgttcgacaacgtcatctag

SEQ ID NO: 5747 - DNA, 1377 bp, synthetic construct
  misc_feature 1..1377: note = source = /note="Description of Artificial Sequence: Synthetic coding sequence"
  source 1..1377: mol_type = other DNA
atgcaggccaccagtaatctgttgaacctcctgctgttgagtttgttcgccgggctcgaccctagtaagacgcaaatttcacccaaagagggatggcaggtgtattcatccgctcaggaccccgatggtcggtgcatctgcacagttgtggctcctgaacagaacctgtgtagccgagatgcgaagtcaaggcaactccggcagttgctcgagaaggtgcagaatatgtcacagagcatagaagtgctgaatctacgaacccagcgcgactttcagtacgtgttaaagatggagacacagatgaagggtctcaaagcaaagttccgtcagatagaagatgacaggaagaccttgatgactaagcactttcaagagcttaaggagaagatggacgagcttctgcctctcatacctgtcttggagcagtacaagacggacgccaagctcattacacagttcaaagaagagattagaaacctttctgccgtgctcactggcatccaagaggaaatcggcgcctatgactacgaagaactgcatcagcgcgttctgagcttggaaactcgcctgcgagactgcatgaaaaaactaacgtgtgggaagctaatgaagattacgggtcctgtcactgttaagacatctgggacccgattcggcgcctggatgaccgacccactagctagtgaaaaaaacaatagagtgtggtacatggatagttatacaaacaataagatagttagggaatataagagcatcgctgacttcgtgagcggcgcagaaagccgcacgtacaatttgccttttaagtgggcagggaccaatcacgtggtatacaacgggtccctgtactttaataaataccaatcaaatataattattaagtactcctttgatatgggaagagtgttggcccagagaagcctggaatacgcagggtttcataatgtgtacccctatacatggggaggctttagcgacattgacctgatggccgatgaaatcggattgtgggctgtatacgccacaaaccaaaacgccggcaacatcgtcatctcgcagcttaaccaggacacccttgaagtaatgaagtcatggtccacggggtacccgaagcgaagcgcaggggaatcatttatgatctgtggcaccttatacgtgactaacagccacctcaccggtgccaaggtctactactcttacagcaccaagacctcaacatatgaatatacagacattccctttcataatcagtatttccatataagcatgctcgactacaatgccagggacagggctttatacgcttggaacaacgggcaccaagtgttgttcaacgtgacactctttcacataatcaaaacagaggatgatacatag

SEQ ID NO: 5748 - DNA, 915 bp, synthetic construct
  misc_feature 1..915: note = source = /note="Description of Artificial Sequence: Synthetic coding sequence"
  source 1..915: mol_type = other DNA
atgttaccccccccgaggccagccgccgccttggctctccctgtgctgcttttattactcgtggtgcttacccctccccccactggcgcaagaccctctcccggcccagactatttacgacgaggatggatgaggttactggccgaaggcgaagggtgtgcaccttgtcgcccggaggagtgcgccgccccacggggatgtctggcgggccgggtgcgggacgcctgtggatgctgctgggagtgcgcaaacctagaggggcaactttgcgacttggacccaagtgcccatttctacggtcactgcggcgaacagctggaatgccggctagacacgggcggggacctttctagaggtgaggtgccagaaccattgtgtgcgtgtcgatcgcaatcacctctttgtggtagtgacgggcacacctactctcagatttgccgcctgcaggaagcagcccgcgctcggcctgacgctaacttgaccgtggcacatcctggcccgtgcgaatccgggcctcaaattgtgtcacacccatacgacacatggaacgtcacaggacaagacgtcatcttcggttgtgaggttttcgcctaccccatggcatccatcgaatggcggaaggatgggctggatatccagttgccgggggatgatccgcacatctctgtccagttccgcgggggccctcaacgcttcgaagtaacaggctggctacagatccaggccgtgcggccctccgacgagggcacatataggtgtctgggccggaatgcgctcggccaggtcgaagctcctgcatctctcaccgtgctcacccctgaccagctcaattctactggtatcccccaattgcggagcctgaacctggttcccgaagaagaggcagaatccgaggagaatgacgactactattag

SEQ ID NO: 5749 - DNA, 327 bp, synthetic construct
  misc_feature 1..327: note = source = /note="Description of Artificial Sequence: Synthetic coding sequence"
  source 1..327: mol_type = other DNA
atgaccccatctagactcccgtggctgctgtcctgggtttcagctaccgcatggcgcgctgcccgatccccgctgctctgccacagtctgcggaaaacttcatccagtcagggcgggaaatccgagcttgtgaaacaatctctcaagaaacccaagcttccagaaggcaggttcgacgcgcctgaggatagccatctagaaaaggagcctttggagaagtttccagatgatgtaaatcctgtaacgaaagagaaggggggaccccgtggccccgaacccacccgctatggagattgggagcgcaagggaagatgtatcgacttttag

SEQ ID NO: 5750 - DNA, 663 bp, synthetic construct
  misc_feature 1..663: note = source = /note="Description of Artificial Sequence: Synthetic coding sequence"
  source 1..663: mol_type = other DNA
atggccgggctaagccgggggagtgctagggcacttctcgccgcactccttgcctctactctgctggcccttctggtctcccctgcgaggggccgcggcgggagggatcacggcgactgggacgaagcttcccgcctgccgccactaccacctagggaggacgcagcgagggtggcccgcttcgtgacccacgtgagcgattggggcgctctcgcgacaattagcaccctagaggccgtgagaggaaggcctttcgcagacgtgctatctctctcagacggtcctccaggagctggaagtggcgttccatatttttatttgtcgcccctgcagctatccgtaagcaacctgcaggagaacccgtacgcgactttgacgatgaccttagcccagactaacttctgtaaaaaacacggttttgatccccagtcaccactgtgcgtgcacataatgctgtccgggactgtgaccaaagtcaatgaaaccgagatggacatcgccaagcacagcctattcataaggcacccagaaatgaagacctggccttcttcccacaactggtttttcgctaagctcaatatcacgaacatttgggtcctcgactattttggtgggccaaaaattgtaacaccggaggaatattacaatgtgacagtacagtag

SEQ ID NO: 5751 - DNA, 2760 bp, synthetic construct
  misc_feature 1..2760: note = source = /note="Description of Artificial Sequence: Synthetic coding sequence"
  source 1..2760: mol_type = other DNA
atgggtctgtttcggggcttcgtttttctgctggtgctctgcttgctgcaccaatctaataccagcttcattaagttgaacaacaacggattcgaagacattgtgattgtaatagatccgtctgtgcctgaggatgagaagatcatcgagcagattgaagacatggtgaccaccgccagtacttacctgttcgaggcaaccgaaaagcgctttttttttaaaaacgtgtctatccttatccccgaaaactggaaggagaacccacaatataaaagacccaagcacgagaaccacaaacacgctgatgtaatcgtggctccacccaccctacccggcagggatgaaccctatacaaagcagttcacggaatgcggcgaaaaaggcgagtatatccacttcactcccgacttgctcctcggaaagaagcaaaatgagtatgggcctcccggcaagctgtttgtccatgaatgggctcacctccggtggggcgtgtttgacgagtacaatgaagaccaacccttctatagggccaaaagtaaaaaaatagaagccactaggtgttcagccggcatttctggtaggaaccgggtgtacaagtgccaggggggcagctgcctttctcgcgcttgcagaatagactctaccacaaaactttacggtaaggattgccagttctttccagataaggtacaaaccgagaaggcttcgatcatgttcatgcagagcatagatagcgtagtggagttctgtaacgagaaaacccacaatcaggaggcaccctccctccagaacatcaagtgtaatttcagatccacctgggaagtgatatcaaacagtgaagatttcaaaaataccatacctatggtgacacctccaccgccccctgtcttctcgttgcttaaaatctcacagaggattgtgtgtctggtattagataaaagtggcagcatggggggcaaggataggctgaataggatgaaccaagccgcaaaacactttcttcttcagaccgtggagaatggttcgtgggttggaatggtccactttgacagcactgcaactatcgtaaacaaactcattcagattaagagtagcgacgaacggaacaccctgatggccgggctcccaacctaccccctcgggggcacctcaatttgttccggtataaaatatgcttttcaggtgattggagagctgcactcacagttagacggaagtgaagttcttctcctgactgatggagaagacaatactgccagttcctgcattgacgaggtcaagcagtctggcgcaatcgtacacttcatcgcactaggccgggccgccgacgaggccgtgattgaaatgtcgaaaataacaggtgggtcacatttttatgtgtccgacgaggcgcaaaataacggtctgatagacgcatttggggcgctgactagtggtaatactgatcttagccagaaatccttgcaactcgaatcaaaagggctcaccctgaactcaaacgcctggatgaatgatacagtgattatcgactcaacagtgggcaaagataccttttttctcattacatggaactctctgccgccaagcatctcattgtgggatcctagcggaacaatcatggagaactttaccgtagatgccacatcaaaaatggcttatctatctatcccgggaacagcaaaagtcgggacatgggcctataatctgcaagcgaaggcaaacccagaaacactcacaattacggtgacctctagagctgctaatagtagtgtaccccccattaccgtaaacgccaagatgaataaagacgtcaattccttcccctctcctatgatcgtttacgcagaaattctacagggctatgtgcccgttctgggtgcaaacgtgacagcattcatcgagtcccagaacggccacaccgaagttctcgagctgttagacaatggcgctggggcagacagtttcaaaaacgatggggtgtatagccgctatttcacggcctacactgagaacggacgctacagccttaaagttcgggcccacggaggagcgaataccgcacgcctgaaacttaggccccctctgaatagagcagcttacattccagggtgggtcgttaatggcgagattgaagccaatcccccgcggccagagattgacgaggacacccagacaactctggaagactttagccgaaccgctagtggaggggctttcgtggtgagtcaggtacccagcttgccacttcctgaccagtaccctccatctcaaatcacggacctggacgccaccgtgcatgaggacaagattattctgacttggacagctccaggagacaacttcgacgtggggaaagttcaacgttatatcatccgcatatcagcctccatcctggacctgcgggattcttttgacgacgccctccaggttaatactacagacctgagcccaaaggaagctaacagcaaggaaagtttcgcatttaagcccgagaatattagcgaagaaaatgctactcacatcttcatagcgatcaagtctattgataagtcaaacctgacttctaaagtcagcaacatagcccaagtgaccctgtttattccacaagccaacccagacgacatcgacccaaccccaacaccaacccctactccaacacctgataaatcgcacaacagcggagtgaatattagcactctggtcctgtcagtcatcggaagcgtggtcatagtgaatttcattttatcgaccacgatctag

SEQ ID NO: 5752 - DNA, 1938 bp, synthetic construct
  misc_feature 1..1938: note = source = /note="Description of Artificial Sequence: Synthetic coding sequence"
  source 1..1938: mol_type = other DNA
atggctccctctgctgaccccggcatgagtagaatgctcccattccttctgctcctgtggtttctgccgataacagagggctctcaacgcgccgaaccgatgttcaccgccgtaaccaacagtgtactcccaccagattatgatagcaatcccactcagcttaactatggggttgctgtgaccgacgttgaccacgacggcgatttcgaaatagttgtggccgggtacaacggacccaacctggtactcaaatatgatcgtgcccagaagagactggttaatattgctgtcgatgaacgtagcagtccctactacgccctcagggaccgccaggggaacgctatcggagttactgcctgcgacatcgatggtgatgggcgtgaagagatctactttctgaacactaataacgcttttagtggcgtcgccacatataccgacaaactctttaagttccgcaataaccggtgggaagatattctttcagacgaagtaaatgtcgcacgcggagttgctagcctgtttgctgggaggagcgtcgcctgtgtggaccgcaagggttccgggagatattcaatttacattgctaactacgcgtatggaaacgtgggtcccgacgcgctaatcgagatggatccagaggcatcggatctgtctcggggtatactggcactgagggatgttgccgctgaggctggtgtcagtaagtataccggtggccgtggagtctccgtgggacccatcctgtcttcatctgcctctgacattttttgcgacaatgaaaacggacccaactttctcttccacaatcgcggcgatggcacattcgtcgacgcggcggcctccgcaggggtcgacgaccctcatcaacacggccgcggggtggcgctggccgatttcaatcgtgacggaaaggtggacatcgtttacggaaattggaatgggccccaccgactgtatctccagatgtccacgcatggcaaggtccgatttagggacatagcttcgcccaaattttctatgcccagccccgtccggaccgtcattacagcggattttgataacgaccaggaactggagattttttttaataacatcgcttataggagttcctcggcaaataggttgttccgggttatcaggcgagagcatggcgatcctctgatcgaggaattgaatcccggtgatgctctggagccagaaggcaggggtacaggtggggtggtaacagatttcgacggcgacggcatgctcgatctcattctgtcccacggcgagagcatggcacagcccctcagtgtatttagaggaaaccagggcttcaacaataattggctgagagtggtgcctcggacgcgctttggggctttcgcgaggggagctaaggtggtcctgtacacaaagaaatctggggcacacctccgcatcatcgacggcggatccggatacctatgcgaaatggaacctgttgctcacttcggactgggtaaagacgaggcttcaagtgtggaagttacctggccagatgggaagatggtttccagaaacgtcgccagtggcgagatgaattctgtgttggagatcctttatcctagggacgaagacacccttcaggatccggctcctctcgagtgcggccaaggattcagtcagcaggagaacggccactgtatggacaccaacgaatgtatacagttcccgttcgtttgtccccgggataagccggtctgcgtgaatacctatggatcttatagatgccgtacaaacaaaaagtgttcccgcggatacgagccaaatgaggacggcaccgcatgtgtggcacaagtcgcattcctcggcggatatagctctgccgcatcgagaatcagtgaacccctctctcgggcttcatatctctctctaggtctcgggctatgtcttcagctgtatgccctatag

SEQ ID NO: 5753 - DNA, 1986 bp, synthetic construct
  misc_feature 1..1986: note = source = /note="Description of Artificial Sequence: Synthetic coding sequence"
  source 1..1986: mol_type = other DNA
atggcccccagtgcagaccccgggatgagccgcatgctgccttttctgctgttactatggtttcttcccatcaccgaggggtcccagagagccgagccaatgttcaccgctgtgactaattctgtccttcccccagattacgacagcaaccctacccagctgaattacggtgtggctgtcactgacgtagatcacgacggggacttcgagattgtggtggctggctacaacgggcccaacttggtgttaaaatacgaccgcgcccagaagagattggtgaatatcgccgttgatgaacgcagctctccatattatgccctaagagatcggcaaggaaacgccatcggcgtaactgcatgcgacatagatggcgatggccgtgaagagatatacttcctgaatactaacaatgctttcagcggagtggcgacgtacaccgataagctctttaaattccgaaataaccgctgggaagacatcctgtcagatgaggtaaacgtggctagaggcgtggcctctcttttcgccggacggagcgtagcatgtgtcgacagaaaaggctctggtcggtacagtatatacattgccaactatgcgtatggtaatgtagggcccgatgctctcatcgaaatggatcctgaagccagcgatttgtcccggggcatcctcgcgttgcgagacgtcgccgccgaggccggcgtaagtaaatacactgggggcagaggagtatccgtcggccccatcctctcgagcagcgcgtctgacatcttctgcgataacgagaatgggcccaacttcctgttccacaatcgtggcgatgggacctttgtggatgcggccgcgtcagcaggggttgatgatccccaccaacatggtcgaggcgtggccttagcagactttaatagggacggcaaggtggacattgtgtacggcaactggaacggtcctcatagactttaccttcagatgagtactcacggcaaagtacgcttcagggacattgcatcacctaagttttccatgccctctcccgtgaggaccgtcatcaccgctgactttgataatgatcaggagttagagatatttttcaataacatcgcctaccgatcgagctcagctaaccgacttttccgggttatcaggcgtgaacatggcgatcccctgattgaagagctgaatccaggcgacgcgctggagcctgaggggaggggcacgggaggcgtggtcaccgacttcgacggtgacggaatgctcgacctgattctttctcatggcgaatctatggcccagcccttatcagtgttccggggaaaccaggggttcaataataactggttaagagtcgtcccaagaacgcgcttcggagctttcgctcgaggggcaaaggtcgtcctttacaccaaaaaatctggagctcacctcagaattatcgacggtggcagtggttatctctgtgagatggagcctgtggctcactttggcctcgggaaggacgaggcttcttccgtggaggtcacttggccagacgggaagatggtgtcccggaacgtggctagcggcgagatgaattcagtgctggaaattctttatccacgggatgaagatacgttgcaggacccagccccactggagtgcggccagggcttttcacaacaggagaatggccactgcatggacacgaacgaatgcattcaatttccttttgtctgtcctcgggataagcctgtctgtgtcaacacatacggcagctacagatgtaggaccaataagaagtgcagccgcggctacgaacctaatgaagacggcacggcgtgcgtggggactttagggcaatccccgggaccgagaccaacgacacccacagcagctgctgctactgccgcggctgctgccgctgccggggccgccactgccgctcccgtcctcgtggacggggatctgaacctggggagcgtggtcaaggaaagctgtgagccctcctgctag

SEQ ID NO: 5754 - DNA, 1230 bp, synthetic construct
  misc_feature 1..1230: note = source = /note="Description of Artificial Sequence: Synthetic coding sequence"
  source 1..1230: mol_type = other DNA
atggctttgaccccgggatggggcagctcagctggccccgttagaccggagctttggcttttgctttgggccgccgcctggagattgggggcttcagcatgtcctgcactgtgcacatgtacaggcacaaccgttgactgtcacggtacggggttgcaggccatccccaaaaatatccctcgtaacactgagaggctggaattgaatggcaacaacattactaggatccacaagaacgatttcgccggcttgaaacagttacgggttctacagctcatggagaaccagatcggcgcagtagagcggggggctttcgacgacatgaaggagcttgagcgtcttcgcttgaatagaaaccagctgcatatgcttcccgagctgctttttcagaacaaccaggcactgtcgaggttagatttgtctgaaaacgccatacaagcaatcccccggaaggctttccggggcgctactgacttgaagaatctccaactggacaagaatcaaattagttgcatcgaggaaggcgcattccgggcacttaggggtctagaggttctgacactcaataataataacattaccaccatccctgttagcagcttcaatcatatgcctaaacttcgcacttttaggcttcattcaaatcatctgttttgcgactgtcatctggcttggctgtctcagtggcttaggcagagaccaactattggactattcacccagtgctccgggcccgcgtctctgcggggtctgaacgtagcagaagtccagaaatctgagtttagctgttccggccaaggagaggccgggcgagtgccaacatgcaccctgagtagtgggtcttgccccgctatgtgcacgtgtagtaatgggatcgtggactgtcgaggcaaaggcctcaccgcaatcccagccaacctccctgagacaatgaccgaaattagattggaactgaatggcattaaaagcattccacccggggcattctccccctacagaaagctcaggagaatcgatctgtcgaataaccaaatcgcggagattgccccagatgcattccagggcctgagaagtctaaatagcttacacactgggcccgtaacgtgcccacataccaccggcacccacagctcacactgtagggcattcgctgttgcggttccacatagtaggaatgatctggaggctatgttcgaagaagaggttccacgcatcttctatagtgcatag

SEQ ID NO: 5755 - DNA, 1143 bp, synthetic construct
  misc_feature 1..1143: note = source = /note="Description of Artificial Sequence: Synthetic coding sequence"
  source 1..1143: mol_type = other DNA
atggccctgacccctggttgggggagttctgctggtccagtgagacccgagctttggctcttgctgtgggccgctgcatggcgattgggggcaagcgcctgcccagcgctttgcacctgtaccggtaccaccgtcgattgccacggaaccggtctacaggcaatcccaaaaaacatcccccgtaacacagaaagactggaactgaacggaaacaacatcacacggatccataaaaacgatttcgctgggcttaaacagctacgggtattacagctgatggaaaaccaaattggggccgtagaaagaggcgcattcgacgacatgaaggagttagagcgacttgacctctccgagaacgctatccaggctattcctcgtaaggcatttcgcggcgcgactgacctgaagaacctgcaactcgacaaaaatcagatcagctgtatagaagaaggggccttccgggccctgcgggggctggaagtgctgaccctgaacaataacaacattactaccatcccagtttcttcatttaatcacatgccgaaactccgcacttttcgactgcacagcaaccatctattctgcgattgccacctagcctggctttctcagtggctgagacagagaccaactataggtctgtttacgcaatgttcggggcctgccagtctgcgcggactgaacgtcgccgaggtacagaaaagcgagttctcctgcagcggacagggagaagccggtagagtgcccacatgcaccctgagtagtggctcttgccccgcaatgtgtacatgttccaacgggattgtggactgcagaggcaaagggcttactgccatcccagccaacttgccagagaccatgactgaaattagactggagctgaacggcatcaagtccattcctccgggagctttttctccctatagaaagttgagaaggatcgacttaagtaacaatcagatcgccgaaattgcacccgatgctttccagggtttgaggtcccttaattccctggtgttgtatggcaacaagatcacagatttgcccaggggcgtttttgggggtctgtacaccctgcagctgctgctactgaacgccaataaaatcaactgtattaggcccgatgcttttcaggatctatag

SEQ ID NO: 5756 - DNA, 2448 bp, synthetic construct
  misc_feature 1..2448: note = source = /note="Description of Artificial Sequence: Synthetic coding sequence"
  source 1..2448: mol_type = other DNA
atggctctgaccccaggatggggctccagcgctggaccggtccgtcccgagctgtggttgctgctttgggccgctgcctggagactgggggcttccgcctgcccggcactttgcacgtgtaccggcacaaccgtagactgtcatgggactgggctgcaggcgatccccaagaacatacccaggaacactgagcgattggagcttaacgggaataacataactcgaatccataaaaacgacttcgctgggctgaagcaattacgtgttctgcagctgatggaaaaccagattggcgcagtagaacgcggggcgtttgatgatatgaaagaactcgaacggctgcgcttaaacagaaatcagctgcacatgttgccagagcttctgttccagaacaaccaggctcttagcaggctggatctatccgagaatgcaattcaggctatcccccgcaaagccttccgcggcgccactgacctaaaaaaccttcagttggacaaaaatcaaatctcctgcattgaagagggagccttcagggccttacgggggctggaagttcttaccttaaataacaacaacattaccaccataccggtgtcatcttttaatcacatgcccaaactgcgaacttttaggctgcattcaaatcatcttttctgcgattgtcatttggcctggctgtctcagtggctccggcaaaggccaacaatcggtctgtttacccaatgctccggccccgcaagtttacggggactaaacgtcgcagaagttcagaagagcgagttttcatgttctggacaaggcgaggccggccgcgtgcccacctgcacccttagcagcgggtcatgtcccgccatgtgtacatgttctaacggaatcgtagattgccgcggcaaggggctcaccgccatccctgccaatctgccggagactatgactgaaatccgattggaactgaacgggattaaatctattcccccgggtgccttctccccctaccggaagctaagaaggatatgtccactttcattctgttccccatgccgggatctgagtaataaccagatcgccgagatcgctcctgacgctttccagggtctaagatctttgaattcgcttgtactctacggcaacaaaataacagatctgccaaggggggtctttgggggcctgtacaccctgcagctactattgttgaatgcgaataaaatcaattgcatccgccctgacgcctttcaggatttgcagaacctttccctgctgagtctatacgacaataagattcagtcactggctaaggggactttcaccagcctccgtgcgatccagactttgcacttagcacaaaatccatttatttgtgactgcaatctcaagtggttagccgacttcctcaggacaaaccccatagagacatccggggcccggtgtgcaagcccaaggaggctggcaaataaacgtatcggacagatcaaaagtaagaagtttagatgttctgccaaagagcaatattttataccaggcactgaggactatcagctgaactccgagtgtaactcagatgttgtctgtccacacaagtgtcgctgcgaggccaacgtggtcgagtgtagcagtttgaagctgacgaagatccccgaacgtatcccccagagcaccgcagagctaagacttaacaacaacgaaattagcattttggaagccactggtatgtttaaaaaactcactcatctgaaaaagataaacctgtctaataacaaggtcagcgagatcgaagatggtgcttttgagggagccgccagcgtgagtgaactgcatctgacggcaaatcagctcgaatccatccggagtgggatgtttcgcggtctcgatggcctccgcacactgatgttgcgcaacaacagaatatcctgtatccacaacgatagttttactggactccgaaatgtgaggctgctgtccctgtacgataatcagataactaccgtttctcccggagcgttcgataccttacaatcgctcagcacactgaatttgctagcaaatccttttaactgcaactgtcagttggcttggctgggtggttggttaaggaaacggaagatcgtcacaggcaatcctagatgccagaacccagattttctgcggcagatcccccttcaggatgtggcatttcccgacttcagatgcgaggaaggtcaggaggagggtggctgcctcccccgcccccagtgcccccaggagtgtgcatgcctagatacagttgtgcggtgctccaataaacacctacgggcccttcctaaaggcatcccgaagaacgttaccgaactgtacctggacggcaaccagttcaccttggtgcctgggcagctctcaacttttaagtatctgcagctcgtaatcctcagctacaacgcactgcagtgtatccctcccctcgccttccagtag

SEQ ID NO: 5757 - DNA, 4386 bp, synthetic construct
  misc_feature 1..4386: note = source = /note="Description of Artificial Sequence: Synthetic coding sequence"
  source 1..4386: mol_type = other DNA
atggcccttactccggggtgggggtcctcagccggccctgtcagacccgaactctggctactcctttgggcagccgcctggaggttaggtgcaagtgcatgcccagcactgtgcacctgcactggtacaaccgttgattgccatggcaccggcctgcaggcaattcccaagaacattccgcgaaacactgagcgtcttgaactcaacgggaataatatcaccaggattcacaaaaacgacttcgccggactaaaacagctcagagtcctgcaacttatggaaaaccaaattggggccgtggaacgcggagcttttgacgatatgaaggaactggaaagactccggctcaatcgcaaccagctccatatgctacctgagcttctcttccagaacaaccaagcgttgagtcggctggacttgagcgagaatgctatacaggccatccctcgtaaggccttccgtggcgctactgacctgaagaatctgcagctggataagaatcagatctcttgcatcgaagaaggcgctttccgggcgctgaggggccttgaggtgcttaccttgaacaacaacaatatcaccacgatcccagtgtcgtcatttaaccacatgcccaagttaagaaccttccggctacatagtaaccatctattttgtgattgtcacttagcgtggctgagtcagtggctgaggcaaaggcctactataggtttattcacccagtgttctggcccagcctctctgagggggctaaatgtggctgaggtgcaaaagagtgaatttagttgcagtgggcagggggaggcgggtcgggtccccacctgtacactatctagcggtagctgtccggccatgtgcacgtgttcaaatggcatcgtcgattgtaggggcaaaggactgaccgctatcccggcgaatctgccggaaactatgacagagatccgcctggaactgaacggcataaagtcgattccaccaggcgcttttagcccttacaggaagctgcgacgcatcgacctgagcaacaatcagattgctgagatcgctcctgatgcattccagggattgcgctcactgaacagcctggtgttgtatggcaacaagattacggatcttccaaggggagttttcggtgggctttatactctccagctgttactgctgaacgctaataagataaactgcattcgtcccgacgcctttcaagatctgcaaaacttaagtcttctctccctgtatgataataaaattcagagcctggcaaagggcacgtttacaagcctgcgtgctatccaaaccctccacctggcccagaaccctttcatctgtgattgtaatctcaagtggctggctgacttcttaagaactaatcctatcgagacatctggcgcccgatgcgctagcccgagacgcctggccaacaagagaattggacagatcaagtccaagaagttccgatgctcggccaaggagcagtatttcatccctggtacagaggattaccagttaaactctgagtgtaattcagatgttgtgtgtccccataagtgtaggtgcgaggccaacgtggtggagtgctcttctctcaagctgacaaaaatccccgaaagaattccacagtctactgctgaattaagactcaacaataatgagatcagtattctcgaggccacaggcatgttcaagaagcttacccacctgaaaaaaatcaacctatccaacaacaaggtcagcgaaatcgaagacggggcattcgagggcgctgccagtgtcagcgagctccacctaaccgcaaaccagctggaatcaatccgtagcggaatgttccgggggcttgacggtctgcggaccctaatgttgcgcaataacagaatctcctgcatacataacgactcctttactggacttcggaatgtgagattgctgagcctctatgataatcagatcacaacagtttcgcccggtgcattcgataccctgcagagcctgtctactctcaacttgttagctaatcccttcaactgcaactgccagctcgcctggctggggggctggcttagaaaaaggaaaatcgtgaccgggaacccgcgatgccaaaaccccgatttcttaagacagattccattacaggatgtggccttccccgactttagatgtgaagaagggcaggaagaggggggttgtctgccacgtccgcagtgcccacaggagtgcgcctgtctggacactgtcgtaagatgtagcaacaaacatttgcgggcattgcctaaggggataccaaaaaacgtgactgagttgtacctcgacggcaatcagtttaccctggtgccaggacagctttccacttttaaatatctccaattggtggacctctcgaataacaaaataagctcactcagcaactcgagttttacaaatatgtctcagttaaccacccttatactctcttacaatgctctccaatgcattccaccacttgccttccagggattgagaagcctcaggttactttccttgcatgggaatgacatcagcacactgcaggaaggtatattcgcggacgtgacaagtctttctcatctggccatcggagcgaatccactgtactgcgattgccacttgcgctggctatcctcctgggttaaaacaggttacaaggagccaggcatcgcacggtgcgcgggcccccaggatatggagggcaaactgctgctgactactccagcaaagaagttcgagtgccagggcccccctacactggcagtccaggctaaatgtgacctgtgcctctcatccccatgtcagaatcagggaacttgccacaacgatcccctcgaggtttaccgatgcgcttgcccgagtggctacaaggggagagactgcgaggtgagtctggatagctgttcatcaggtccttgcgagaacggggggacatgccacgcccaggagggggaagacgcacctttcacctgtagttgtccaactggctttgaggggcccacttgcggagtgaataccgacgactgtgtggatcacgcctgcgcgaacgggggagtatgcgtggatggagttgggaactatacatgccagtgcccactgcagtatgaggggaaggcctgtgaacagcttgtggacttgtgtagccccgacttgaatccatgtcagcatgaggcccagtgcgtgggaacacctgacggcccacggtgcgagtgtatgccaggttatgcgggagacaattgtagcgagaaccaggatgactgccgggatcacaggtgccagaatggtgctcagtgtatggacgaggtcaacagttattcgtgtctttgcgccgaaggctactctggacagttatgcgaaatccctccccatctccccgccccaaaatcaccctgtgaggggacagagtgccagaatggggccaattgtgtggatcaggggaaccgaccagtctgccaatgcctgcctggattcggaggacccgagtgtgaaaaactgctgtctgtcaactttgtcgatcgggatacttacctccaattcaccgatctgcagaactggccccgcgccaacatcacgcttcaggtgagtaccgcagaagacaacggcatacttctgtacaacggagacaatgatcatattgctgtcgaactgtaccagggccacgttagagtcagctacgatcctggtagctacccttcctccgctatctattccgcagaaactatcaacgacggacagtttcataccgtggagctggtggctttcgaccaaatggttaatctcagtattgacggcggcagtcccatgacaatggacaacttcggcaagcattacacactgaattctgaggcaccattgtatgtggggggcatgccggtggacgttaactccgcagctttcagattgtggcagattcttaacgggaccgggtttcacggctgcatccgcaacctgtatattaacaatgagctgcaagacttcaccaagacccagatgaaacctggcgtggtgcctggatgtgagccgtgcagaaagctgtattgtctgcacggcatctgtcaacccaatgccacaccgggcccaatgtgccactgcgaagcgggctgggttgggctgcattgtgaccaacccgccgatggcccttgccatgggcataagtgcgtacacggccagtgtgtgcctcttgacgctttaagttacagttgccagtgtcaggatggttacagcggggccctctgtaatcagtccccctctgcgggtggaaccttaagcgggactttcacaaggagtcgcggagcaatgcctagcgcgcgtccccgagccccatgccacgggtggtccgccggagccagggctcaagctcgtgccgctgccagggccttcggctag

SEQ ID NO: 5758 - DNA, 570 bp, synthetic construct
  misc_feature 1..570: note = source = /note="Description of Artificial Sequence: Synthetic coding sequence"
  source 1..570: mol_type = other DNA
atggaggccacgggtacagatgaagtcgacaaactgaagacaaaattcatttctgcttggaataatatgaaatatagctgggtactgaaaaccaaaacctacttttcacgcaactccccggtcctgctgttgggcaagtgttatcacttcaagtacgaggatgaggataaaaccctgcccgccgagtcaggctgcactatagaagaccacgtgattgcaggaaacgtcgaggaatttaggaaggactttatcagcagaatctggctgacataccgagaagaatttccacagatcgagggctccgccctgaccaccgactgtggctgggggtgcaccctccggacaggccagatgttgcttgctcagggtctgatccttcactttctgggacgagcgtggacatggccagacgcgctgaatatagaaaattctgattcggagtcatggactagccacactgttaaaaagtttacagcgtcctttgaggcaagcttgtcaggggagagggagttcaaaacacccacaataagcctaaaggagaccatcggcaagtactcggatgatcattag

SEQ ID NO: 5759 - DNA, 1377 bp, synthetic construct
  misc_feature 1..1377: note = source = /note="Description of Artificial Sequence: Synthetic coding sequence"
  source 1..1377: mol_type = other DNA
atggaagcgacgggcactgatgaagttgacaaactcaaaaccaagttcatctccgcatggaacaatatgaagtactcctgggtgttgaaaactaagacttacttcagtcggaacagtcccgtactactcctgggtaagtgctaccactttaagtatgaggatgaggataagactttgccagccgagtctgggtgtactatcgaagaccacgtgatagcaggcaacgttgaggaattccggaaagactttatctctagaatttggctgacctaccgcgaagaattccctcagattgaaggctctgctctgacaacagattgtgggtggggttgtactctgcgcacaggccagatgcttttggctcaaggcctgatcctccacttcttgggcagggcatggacgtggcctgatgcattgaacatcgagaattctgactcagagtcgtggacttcccacactgtgaagaaattcacggccagctttgaggcatctctgagcggggagagggagttcaaaacccctacaatttcactcaaggagaccatagggaagtatagtgatgatcacgaaatgcggaacgaggtgtaccataggaagatcatatcatggttcggcgattcacctctggctctatttggcctgcaccagctcatcgaatatggtaaaaaaagcgggaaaaaagctggagactggtatgggcctgctgtggtagctcacatcctgaggaaggcagtagaggaggctaggcacccggatctgcagggcatcacaatctatgttgctcaggactgtactgtctataacagtgacgtcattgataaacagtcagcctctatgactagcgacaatgcggacgacaaggctgtcattatcttggtaccagtgagactcgggggcgaacgaactaacaccgattacctagagttcgtgaaaggaatcctttctctggaatactgcgttggcattattggtggcaagccaaagcaaagttactactttgctggcttccaagatgattcacttatctacatggaccctcattattgccaatctttcgttgacgtgagcatcaaggacttccccctcgaaacatttcattgtcccagtccaaagaagatgtcctttcgtaaaatggaccccagctgcacgatcggtttttattgtcgtaatgtacaggattttaagagggcctccgaggagatcactaagatgcttaagttctcctccaaggaaaaatatccactgttcacctttgttaatggccattccagagattatgacttcacttcaactacaactaatgaggaagatctgttctctgaagatgaaaaaaaacaacttaagcgctttagcaccgaagaatttgtgctgctgtag

SEQ ID NO: 5760 - DNA, 8178 bp, synthetic construct
  misc_feature 1..8178: note = source = /note="Description of Artificial Sequence: Synthetic coding sequence"
  source 1..8178: mol_type = other DNA
atggagcagaccgattgcaagccttaccagcctcttccaaaggtgaaacacgagatggacctcgcttatacatccagttctgacgaaagcgaggatggtcgtaaaccgaggcagtcttacaactcaagagaaacgttacatgaatataatcaggaactgcgcatgaattataacagccagagcagaaaacgaaaagaagttgagaagtccacacaagagatggagttctgtgaaacttctcacacactgtgttccggatatcaaacggatatgcattcggtgtctcggcacggctaccaactcgagatgggctcagatgtcgacaccgaaacagagggcgctgcctctcccgaccacgccctgcgtatgtggattagggggatgaaatctgagcactcttcctgcctcagctctcgagccaactcagccttgagtctgactgacaccgaccatgagcgcaagagcgacggtgaaaatggatttaaatttagtcctgtgtgctgcgatatggaggcgcaggcaggctccacccaagatgtgcagtcgagcccacacaatcagtttaccttcagacccctacctccacctccaccccccccacatgcctgtacatgcgctaggaaacctcctccagctgccgattccttgcaacgtagaagcatgacaacccgatcacaaccatcccctgcggcgcctgctccccccacaagcacccaggatagcgtgcacctccataactcctgggttctgaattcgaatatccctcttgagacgcggcatttcctctttaagcatggatccggtagctctgctatcttttcagcagcctctcagaattatcctctcacctctaatacggtctacagccctccccctcggcctcttcctcgctcaactttctctagacctgccttcactttcaataagccctatcgctgttgcaattggaagtgtacagccctaagcgccacggcgatcactgtgaccctggctctcctgctggcatacgtgattgcagtgcacctattcggcttgacttggcaactccaacctgtggagggagagctgtatgccaacggggtctcgaagggtaaccggggcacggagagcatggataccacctattcccccattggcggtaaagtgagcgataagagcgagaagaaagtgttccagaaaggaagggcaatagacactggagaggttgatataggcgctcaagtgatgcagaccattccaccaggtctattctggaggtttcagataactatccaccaccccatttatttgaagttcaacatcagccttgccaaagacagcctcctcggtatttacggccggaggaatattccccccacacacactcagttcgacttcgtcaaattaatggacggcaagcaactcgtaaaacaggacagcaaaggctctgatgacacacaacatagcccaagaaacctcattctgacatccctacaggaaacggggttcatagagtacatggatcagggtccatggtacctggccttttataacgatggaaagaaaatggaacaggtgtttgtgctgacgaccgccatcgagatcatggacgactgtagcacaaactgtaatggcaacggagagtgcatatctggccactgtcactgtttcccgggcttcctgggccccgattgcgcacgggatagctgtccggtgctgtgtggtgggaacggcgaatacgagaagggccactgtgtgtgtcgccacggctggaaagggcccgagtgtgacgttccggaagagcaatgtatcgatccaacctgtttcggccacggcacgtgcattatgggggtttgtatctgcgttcccggttataaaggggagatttgtgaggaggaagattgcctagatccaatgtgctctaaccacggcatatgtgtcaaaggggaatgccactgctccactggctggggcggcgttaattgtgaaaccccactgcctgtgtgccaagaacagtgctccggtcatggtacatttctcttagatgccggggtctgctcttgtgatcctaagtggacgggcagcgactgtagcaccgagctctgtactatggagtgcggatcgcatggggtatgcagtagaggaatctgtcagtgcgaggaagggtgggttgggcctacatgtgaggaaaggtcctgccacagtcactgcacagagcacggccagtgcaaggatggcaaatgcgagtgtagccctggttgggagggagaccattgcactattgctcactacctcgatgctgtgcgggacggctgtcccggcctgtgtttcggtaatgggcggtgcactttggatcagaacgggtggcactgcgtttgtcaggtggggtggtccggaacagggtgcaacgtggtgatggaaatgctttgtggcgataacctcgacaacgatggagatgggttgactgattgcgtggatcccgattgttgtcagcagtccaactgctatatctcgcctctgtgtcagggatctccagacccgctcgatctgatacaacaaagccagacattgttctcccagcacacatctaggttgttttatgatcgtatcaagttcctgatcgggaaagactccacacatgtcattcctcctgaggtgtcctttgattcgagaagagcttgcgttatccgcggacaggttgtggctatcgatggcacacctctggtgggcgtgaatgtgtccttcctccaccatagcgattatggatttactatttcgaggcaggacggatctttcgacctggtcgcgatcggtggcatctctgtcatccttatatttgacaggtccccttttcttcctgagaagagaaccttgtggctcccctggaatcagtttattgtggtggagaaggtgacaatgcagagagtagtgtccgatccgccaagttgtgacatctcaaattttatttcgcccaaccctattgtgctcccatcacccctgacgagtttcggtggctcttgccccgaaaggggcacaatcgttcctgagctgcaggtcgtgcaggaggaaatccccatccccagcagctttgtgcgcctgtcgtatctgtccagtaggacccctggctataaaactctccttaggattctgctgacacatagcaccatcccagttgggatgataaaggtgcatctgaccgtagctgtcgaggggcgccttacccagaagtggtttcctgcagcgattaatctcgtgtatacatttgcttggaacaagaccgacatctacggccagaaagtgtggggacttgccgaagcactggtgtcggtgggctatgaatacgagacatgtccagacttcatcctctgggaacagcgcactgtggtgctgcaaggctttgaaatggacgcctctaacctcggcgggtggagccttaataagcatcacattctgaatcctcaatcgggcatcatacacaagggaaacggcgagaatatgttcatcagccaacagcctcccgtcatctctaccataatggggaacggacatcaacggtctgttgcatgtaccaattgcaacggaccagctcataataataagttgttcgctcccgtcgcgcttgcatctggccctgatggttctgtgtacgtgggcgacttcaatttcgtccggcgaattttcccgtcagggaattcagtctctattttggagctcagcacctctcccgctcacaagtattatctcgccatggacccagtcagcgaatccctgtacctgagcgacaccaacacccgcaaagtgtataagcttaaatctctcgtagagacaaaagacctgagcaaaaacttcgaggtggtagccggtacaggcgaccaatgcctgccttttgaccagagtcattgtggcgacgggggacgagcgagtgaagcctccctgaatagtccccgtggaataaccgttgatcggcacggcttcatttacttcgtagatggtactatgatcaggaagatcgatgagaacgccgtgataaccaccgtgattggttccaacggcctcacctccacccagcccctgagttgcgatagtgggatggacattactcaggtgagactggagtggcctaccgatctggcagttaacccaatggacaattcactctatgtgctcgacaataacattgtgctgcaaatctcagaaaatcgtcgggtccgcataatagccgggcgcccaattcattgtcaggtccccggaatcgaccactttctggtgagcaaggttgcaatacattctactcttgagagcgctagagcaatatctgtatcccacagcgggctgctgtttattgcagagactgatgaaaggaaagtaaaccgcatccagcaagtgacgacgaacggcgagatttatatcatcgccggcgccccaactgactgcgattgtaaaatcgatcctaactgcgattgcttcagcggagatggagggtatgcgaaggacgccaaaatgaaagcaccaagttctctagcagtgtcccccgacggtaccctgtacgttgctgacctcggtaacgttagaatcaggacaatttcccgcaatcaggcgcacctgaatgatatgaacatctacgagatcgcatcaccagcggatcaggaactctatcagtttacagtgaatggcacccacttgcatacgctgaacctaatcacccgcgactacgtgtacaatttcacttataacagtgagggtgacctgggcgctatcacttcatcaaacgggaatagtgtgcatatccgacgtgacgcaggcggcatgccactttggttagtggtgccggggggccaggtctactggctgacaatctccagcaacggcgttctgaaacgggtcagcgcgcaaggctacaacctggccctgatgacctaccctggtaatactgggctgctggccactaaatcgaatgagaacgggtggaccactgtgtatgaatacgaccccgaagggcacctcacaaacgccacctttcccacaggggaggtctcctccttccattccgacctcgagaaattgactaaagtggaactcgatacctctaacagggaaaacgtcctgatgtcaacaaacctaaccgccacgtctactatttacattctcaagcaagaaaatactcaaagtacttaccgggtgaacccagacggaagcctccgagtgacttttgcaagtggcatggagatcgggctgagttcagagccccacattttggccggcgcagtcaacccaactctggggaaatgtaatatctccctgcccggtgagcacaacgctaatctcatcgagtggcgccagcggaaagaacagaataaaggaaatgtgagtgccttcgagcggcgtctacgggcacataatcgaaatcttctttctatcgacttcgatcacattacgcgaactggcaagatttatgacgaccacagaaagttcaccctgagaatcctgtatgaccagacaggacgccccatcctatggtcacctgtcagcaggtacaatgaagtgaacataacatactcgccatcaggcctggtaactttcatccaacggggcacctggaatgaaaaaatggaatacgatcagtctggtaaaattatctcccgaacgtgggctgatgggaaaatctggagctacacatacctcgaaaaaagtgtaatgctgcttctgcattcccagcgacgttacatctttgagtatgatcagccagattgtttgctgtctgtgaccatgcctagcatggtccggcactcgttgcagaccatgctgtctgtgggatactaccgaaatatctatacccctccagactcttctacaagtttcatccaagactattctcgggatggtcgcctactgcaaaccctacacctcggaaccggccgcagagttctatacaaatacactaagcaggctcgactatccgaggtgctctacgacactactcaggtgaccctcacatacgaagagagctctggcgtcatcaagaccatccacctgatgcatgacggattcatatgtacgatacggtaccgtcaaactgggcccttaattggccgccaaatcttcagatttagtgaggaaggcctggtaaatgccaggttcgattattcatacaataactttagagtgacctcaatgcaggctgtgatcaacgaaactcctctccctatagatttgtatagatatgtggacgttagcgggcgaaccgaacagttcggcaagtttagtgtgatcaattatgacttaaatcaggtaatcaccactacagtcatgaagcacaccaagattttttctgctaacggccaagtgattgaggtccagtatgagattcttaaggcaatcgcttattggatgaccatacagtacgataacgtgggcagaatggtcatatgcgacatcagagtgggagtggacgccaacataacccgatacttctacgagtacgacgcagacggtcagctccaaacagtgagcgtgaacgataagacgcaatggaggtacagctacgacttaaatggcaatatcaaccttcttagtcacgggaagtccgccaggttaacacctcttagatacgatctccgagatcgcatcactcggctgggagagattcagtacaagatggatgaggatggatttctccgacagagaggaaatgacatattcgagtacaactccaatggcctgctgcagaaagcgtataacaaagccagtgggtggacggtacagtattactacgatggtctgggccggcgcgttgcttctaagtcatcactcggccagcatctccagtttttctacgccgacctgaccaatcctattagagttacccacttgtacaaccacacttctagcgaaattacaagcctctattacgaccttcagggccaccttatcgccatggaactgtcttcaggagaggagtactacgttgcctgcgataataccgggacacctctcgctgtcttctcctcccgggggcaggtgattaaggaaattttgtacaccccatacggggacatttaccacgatacatatccagacttccaggtgattattggatttcatggggggctatatgacttcctcacgaagctcgtgcaccttggccagagggactacgacgtggtggcaggacggtggacaacccccaatcatcacatttggaaacaattaaacctgctgcccaagcccttcaacctatactcctttgaaaataactacccagtcggaaagatccaggatgtcgcgaaatacacaactgacattaggtcatggttggagctgtttggatttcaactgcacaatgtcctgcccggctttccgaagccagagcttgagaatttagagctgacctatgagctcctacgcctgcagactaaaacacaggagtgggacccagggaaaacaatacttgggatccaatgcgagttacagaaacagttacgcaattttatcagcttagaccagctgcctatgaccccacgctacaatgacggtcgctgtctggagggaggcaaacaaccccgtttcgctgccgtgccaagcgttttcggaaaagggattaaatttgccataaaagatgggatcgtcaccgcggacattatcggggtagcaaatgaagatagcaggcgcctggccgccatcctgaataatgcacactatttggagaacttgcatttcacaattgaaggtagagacacccactattttataaagctgggctcactcgaggaagacttggttctcatcggcaacacaggtggacgacgaatcctggaaaatggcgttaacgtcactgtttcccaaatgactagtgtactgaatggacgcacaagacggtttgccgacatacagctgcaacacggagcactatgtttcaacattcggtacggaacaacagtggaagaggaaaagaaccatgtgctggagatagccagacaacgggcagttgctcaagcctggactaaagagcaaaggcgccttcaggaaggagaggaaggcattcgggcatggactgaaggcgagaagcagcagctcctgagcacaggtcgcgtacagggttatgatgggtacttcgttctcagtgtggagcaatatcttgagctctctgatagcgcaaataatatacactttatgcgccagtccgaaatcggccggcgctag

SEQ ID NO: 5761 - DNA, 204 bp, synthetic construct
  misc_feature 1..204: note = source = /note="Description of Artificial Sequence: Synthetic coding sequence"
  source 1..204: mol_type = other DNA
atgaaaattcagcttttctttttcatcctgcacttttgggtgactattttacctgccaagaaaaaatacccggaatacggaagcctagacctacgcagagagtgccggataggcaacggccagtgtaagaatcagtgccacgaaaatgaaatcagaatcgcctactgcatacgaccaggcacccattgctgcctgcaacagtag

SEQ ID NO: 5762 - DNA, 831 bp, synthetic construct
  misc_feature 1..831: note = source = /note="Description of Artificial Sequence: Synthetic coding sequence"
  source 1..831: mol_type = other DNA
atgaaacagatccttcatcctgccctggagaccaccgcttgtaccaaccactttaacgccgatccctgctccaccggcttcgtgttcccagccatgaccctgttcccagttttgctgttcctcgtggctgggctgctgccttctttccctgctaacgaagataaagatcctgcctttactgctttgctgaccacccagactcaggtccagagagagattgttaataagcataacgagctgagaagagccgtaagcccacccgcccgtaacatgctaaaaatggaatggaacaaagaagccgccgcaaatgcacagaaatgggctaatcagtgcaattaccgccactctaatccaaaggaccggatgacttctttgaagtgcggcgagaacttgtacatgtctagcgccagcagcagctggagtcaggccatccagtcctggtttgacgagtacaacgacttcgacttcggtgtgggacctaaaacgcctaacgcagtggtggggcattacacccaggtggtgtggtacagttcttatttagtcggatgtgggaacgcatactgccccaaccagaaggtactcaaatattattacgtttgccagtactgccctgccggcaattgggccaaccgactatacgtgccttacgagcaaggagctccctgtgcctcttgtcccgacaactgcgacgacggactctgtacaaatgggtgtaagtacgaggatttgtacagcaattgcaagtctcttaagctaacactgacatgcaaacatcagcttgtccgcgatagttgcaaagcttcctgcaattgctctaactctatttactag

SEQ ID NO: 5763 - DNA, 1350 bp, synthetic construct
  misc_feature 1..1350: note = source = /note="Description of Artificial Sequence: Synthetic coding sequence"
  source 1..1350: mol_type = other DNA
atgctcgcagaatggggtgcctgtctcctcctagccgtggccctgctcggacccggactgcaagcgcaggctatggaaggagtgaaatgcggaggagtgttgagtgcaccatcaggcaattttagctctcccaactttccacgcctgtacccctacaatactgaatgcagttggttgatcgtggtcgctgaggggagctctgtattactcacttttcacgcttttgatttggaatatcacgatacttgctccttcgatttccttgaaatttacaatggagccagcccggataagggcaacttgctcggacggttttgcggaaaagtccctcccccccccttcacatcttcctggcatgtgatgtctgtcattttccattcagacaaacacgttgcctcccacggtttcagcgcaggctaccagaaagatgtttgtggcggggtgctgaccggcctctccggcgttttgaccagtcctgaatacccgaacaactaccccaactccatggagtgtcactgggtgattcgagcggccggccccgcccatgttaaattagtgttcgtggatttccaggttgaaggcaacgaggaatgtacctatgactatgtggcagtcctcggaggcccaggaccaaccagaggacatcactactgtggatcaacaagacctccgacgcttgtttcacttggtcacgagctgcaagttgtgttcaaaagcgatttcaatatcggaggaagaggcttcaaagcatattatttcagcggggagtgccaagaagtatatatggctatgagggggaacttcagttccccccagtacccctccagttacccaaataacattcgttgccactggacaatcaggctacctcctggatatcaggtgaaagtcttctttctcgacctggacctcgaggaaccaaattccctaaccaaaacatgcgattttgatcatctggccgcatttgatggcgcctccgaggaagcccccctcctgggaaactggtgtgggcaccacctccccccaccagtgacgtcatctcataatcagttattgcttctgcttcacacagacaggtcaactaccaggcgaggattcagcgtcgcttatatcggtggccagctggggtgtggcagtggctccacggaaggtgagggtgaggccctgcagcctcaatcactccaatcaccctcatccatccctcctgtgtgtccagctccccctatgaacggccttctgcagctgctgttacactggctacatccctgtccactcagtggcccactgagactcgatggcaccgcccccgcttgttttcactattgcagagcttcatttcctagcttctag

SEQ ID NO: 5764 - DNA, 1434 bp, synthetic construct
  misc_feature 1..1434: note = source = /note="Description of Artificial Sequence: Synthetic coding sequence"
  source 1..1434: mol_type = other DNA
atgacaagtaagttcctgctcgtctctttcatcctggcagctctgagcctatctactaccttctctctccagccagaccagcagaaggtgctgctagtgtccttcgacggctttcgttgggactatctatacaaggtacccacgccacactttcactatatcatgaagtatggcgtgcatgtgaaacaggtgacaaatgtctttattacgaagacatacccaaaccactacactcttgtcacaggtcttttcgctgagaatcacggaattgttgcaaacgacatgttcgacccgatccgcaacaagtcttttagcctggatcatatgaatatctatgattctaagttttgggaggaggcaaccccaatctggatcacaaatcagcgagccggtcacacctcgggtgccgcaatgtggccaggcacagacgtaaagatccacaaaagattccctacacactacatgccttacaacgagtctgtgtctttcgaagaccgcgtcgccaagattattgagtggtttacctccaaagaacccatcaacctggggctcctctactgggaggaccctgatgatatggggcaccatctcggaccggatagtcctctgatggggcctgttatctccgatattgacaaaaagctaggctacctcatccagatgctcaagaaggccaagctgtggaatacactgaacctcataatcaccagcgaccacgggatgacgcaatgttctgaggaacggcttatcgagcttgatcagtacctggataaggatcactatactctgatcgaccagtcccccgttgcggctatcctgcccaaagagggtaagtttgatgaagtatacgaggcacttactcatgcacatccaaaccttacagtgtataagaaggaggatgtcccagagagatggcattacaaatataactccaggatacagccaattatcgcggtggctgatgagggctggcacattcttcagaacaaaagcgatgattttttgctcggcaaccacggttatgataatgctctggcagatatgcaccccatattccttgctcacggaccagccttccggaagaattttagtaaagaagctatgaattccacggacctttacccactgctctgtcacctactaaacattaccgcgatgccccacaatggatcattctggaatgtacaggacctactgaacagtgccatgccacgtgttgtaccatacacccaatctactattttgcttccgggctcagttaaacccgctgaatacgaccaggagggcagttacccttatttcattggggtgagcctggggtcaataattgtcattgtgttctttgtgattttcatcaagcatttgatccactcacagatcccggcattgcaagatatgcacgctgaaatcgcacaacctttgttgcaggcgtag

SEQ ID NO: 5765 - DNA, 1479 bp, synthetic construct
  misc_feature 1..1479: note = source = /note="Description of Artificial Sequence: Synthetic coding sequence"
  source 1..1479: mol_type = other DNA
atgggatccgcaccttgggcccccgtccttctgttagctctgggcctgcggggcttgcaagctggcgcccgcagggctcctgacccaggttttcaggaaagattttttcagcaaagactggatcacttcaatttcgaacggtttggcaacaagacatttccccagaggtttctggtttccgacagattctgggtccgcggcgaggggccaattttcttttacacaggaaacgaaggcgacgtttgggccttcgctaataactctgcatttgtagccgagctggccgccgagagaggtgcactcctggtcttcgctgaacatagatactatggcaagtcactgcctttcggggcccagtctacccagagggggcacacagaactgctgactgttgaacaggctctggctgatttcgccgaacttctccgcgcgctgcggagagacttgggggctcaggacgcaccggcaatagcatttggcggatcttatgggggtatgttaagcgcctacctgaggatgaaatacccgcatctagtcgccggggccctggcagcctccgcacctgtgctcgccgtcgccggactaggcgacagtaaccagttctttcgtgatgttactgccgatttcgaaggccagtcaccgaagtgtactcagggcgttagagaagctttcagacagattaaggaccttttcctacagggcgcttatgacaccgtccgctgggaattcggaacatgtcaaccactgagtgacgagaaagacctgacccagttgtttatgtttgctcgtaacgcttttaccgttctcgctatgatggattacccataccccacagatttccttggacctctccctgctaatcctgtcaaggttggatgcgatcgccttctgtctgaggcacagcgaataactggattgcgtgctctggcgggcctggtgtataacgcatcaggctccgaacattgttatgacatataccggctataccacagctgtgcagatcctacagggtgcgggaccggcccagatgcacgggcgtgggattaccaagcctgtaccgaaattaacctgactttcgccagcaacaatgtgactgacatgtttccagacctcccctttactgatgaactgagacagcgctactgcctcgacacctggggcgtgtggccccgcccagattggctcctgacatccttttggggaggagacctgagggcagcctctaatattattttctctaatggaaatctggacccctgggcagggggaggcatacgcagaaacttatctgcaagcgtgattgctgtgacaatccagggcggggcccaccacctggaccttcgggcatcacacccggaagacccggcatcggtggtcgaggctaggaaattggaagccacaatcattggtgagtgggtcaaagctgcccgccgcgaacagcagcccgcactaaggggcggcccgaggctgtcactgtag

SEQ ID NO: 5766 - DNA, 2850 bp, synthetic construct
  misc_feature 1..2850: note = source = /note="Description of Artificial Sequence: Synthetic coding sequence"
  source 1..2850: mol_type = other DNA
atgattctgtccttgctgtttagcctgggtggtccgctgggttggggcctgcttggcgcctgggcccaggcatcctctacatcactctccgatctgcaaagcagcagaacccctggagtctggaaagctgaggctgaagacacaggcaaggaccccgtgggcaggaattggtgtccctacccaatgagcaaacttgttacccttctggccctgtgtaaaactgagaagtttctgattcattcacagcagccttgccctcagggagcaccagactgtcagaaggttaaggtcatgtataggatggctcacaagcctgtttatcaggttaagcaaaaagtcttgacttccctcgcttggagatgttgcccaggatatacagggcctaattgcgagcaccacgactcaatggcaattccagaaccggctgatccaggcgattcacatcaggaaccacaagacgggcctgtgagctttaagccagggcacttagccgctgttattaatgaggttgaggtccagcaagagcaacaggagcatttgttaggggatctccaaaacgatgtccatcgggttgccgactcactgcccggattgtggaaagctctgcccggcaatctgacagcggctgtaatggaggctaaccaaaccgggcatgagtttcctgacagaagcctcgagcaggtgcttctgccacacgtcgatactttcctccaggtgcatttttcaccaatttggcggtcctttaatcagagccttcacagcctgacacaggccattagaaacctgagtctggacgtcgaagctaatcgtcaggcaatatctcgagtccaggatagcgcagtcgccagggccgacttccaggagctgggggcaaaattcgaggccaaggtgcaagagaatacacagagggtcggccaactcaggcaggatgtggaagaccggctccacgcacagcacttcacccttcacagatccatttctgagcttcaagcagatgtagacacgaagctcaaaagactgcacaaggcccaggaggcgccaggcacgaacggttctttggtgctggctacccccggcgcgggcgccaggcccgaacccgatagtttgcaggcccgtctgggacagctacagagaaatctctctgaattacacatgactacagctcggagggaagaagagcttcagtacacattagaggacatgcgagctacactgaccagacatgttgacgaaataaaagagctgtatagcgaatcagacgaaacattcgaccagattagcaaggtcgaacggcaggtggaggagctgcaggtgaaccacacagcgctgcgagagctcagggtgatacttatggagaagagcctcataatggaggagaacaaagaggaagttgagaggcagctcctggagttgaacctgactctgcagcacctgcaaggtggccacgccgacctgattaagtatgtaaaagattgcaactgtcagaaattgtatctagaccttgacgtgatccgggaagggcagcgcgacgcaacccgcgccctagaagagacgcaggtgagcctcgacgagaggaggcagttggacggctcttccctgcaggcgttgcagaatgccgtggacgctgtcagtcttgctgtggatgcacacaaagcggagggggagcgggcacgcgctgccacttctcggctccggagccaagttcaggccctggacgatgaagtgggcgcacttaaggcggctgcggctgaagcccggcacgaagtgcggcaactacacagcgcctttgcagccctgctcgaggacgccctgcgtcacgaggcagtcctggctgctcttttcggcgaagaggtccttgaggagatgagcgagcaaacgccggggccattgcctttgtcctatgagcagatcagggttgcactgcaggacgccgcttccggccttcaagagcaggccctgggctgggatgagctggcagcgcgtgtcactgcactggaacaggccagcgaaccaccccggcccgctgagcacctcgaaccgtctcacgatgccggccgcgaggaggccgcaacaactgcactggccggcctggccagggaactgcaatccctgtccaacgatgtcaaaaacgtggggaggtgctgcgaagcggaggctggcgctggcgcagcctcactcaacgcctcgctgcatggcctccataacgctttgttcgcaacccaacggtctcttgaacagcaccagagattgttccactctctgtttgggaattttcagggactgatggaagccaacgtgagcctcgacctgggaaaactgcagaccatgctcagtcgcaaaggaaagaagcaacaaaaagatctcgaagccccacggaagagggacaagaaggaagccgagcctctggttgacatccgagtgacaggccccgtcccaggggccctcggagctgcattgtgggaggccggatcacctgtagcgttttacgcatcattctctgaaggcacagccgccctgcaaacagtcaagtttaacacaacttacattaacatagggtctagctattttccagaacacgggtatttccgggcacctgagagaggagtctatttatttgcagtgtctgtggagttcggaccaggaccaggcacaggtcaactcgtctttgggggccaccacagaacccccgtgtgtaccacgggccagggctccggcagtaccgccacagtctttgcgatggctgagctgcagaaaggtgagcgcgtgtggttcgaactgacccaaggctctattacaaagcgctctctgagtgggacagcctttgggggattccttatgttcaaaacttag

SEQ ID NO: 5767 - DNA, 246 bp, synthetic construct
  misc_feature 1..246: note = source = /note="Description of Artificial Sequence: Synthetic coding sequence"
  source 1..246: mol_type = other DNA
atgcgcttgctggtgctgagctcactgctgtgcattttgttgctttgtttttccatcttctcgactgaagggaaaaggaggccagcaaaggcctggagcggccggcggacacggctgtgctgtcaccgtgtgcccagcccgaatagcacaaacctgaaaggtcaccacgtgagattgtgtaaaccatgcaagttggagcccgaaccccgtctgtgggtagtgccgggcgcactgccccaggtgtag

SEQ ID NO: 5768 - DNA, 690 bp, synthetic construct
  misc_feature 1..690: note = source = /note="Description of Artificial Sequence: Synthetic coding sequence"
  source 1..690: mol_type = other DNA
atgtcatttctgcaggacccaagcttctttacaatgggtatgtggagcatcggggctggggccttgggtgctgccgctctggccctcctgctcgctaacacagacgtgttcctgagcaaaccacagaaggctgcactggaatatttggaggatatagacttgaaaactttggagaaagaaccacggacatttaaagctaaggaactttgggagaagaacggcgcggtcataatggcagtgcggcggcccgggtgctttctctgccgggaggaggcagcagacctgagttccctcaaaagcatgctcgaccaattaggagtgcctctgtacgccgtggtgaaggaacacatcagaacagaggttaaggattttcaaccgtactttaagggggagatcttcctggacgaaaagaaaaagttctacggccctcagcggcgcaagatgatgtttatggggttcatcagattgggtgtgtggtacaacttttttagagcatggaacgggggattctccggtaatttagagggcgagggcttcatcctcggcggcgtgtttgtcgtcggatcaggcaaacagggaattcttctagagcatcgcgagaaggagttcggcgacaaggtgaacttgctcagcgttctggaagccgccaagatgataaagcctcagactctagcctctgaaaagaaatag

SEQ ID NO: 5769 - DNA, 657 bp, synthetic construct
  misc_feature 1..657: note = source = /note="Description of Artificial Sequence: Synthetic coding sequence"
  source 1..657: mol_type = other DNA
atggggatgtggtccattggcgctggggcgcttggtgcagcagccttggcactcctgttggccaacacagatgtctttctctctaaacctcagaaggccgctctggaataccttgaggacatcgatctgaaaacactggagaaggaaccaaggactttcaaggctaaggagctgtgggaaaagaatggagctgtgataatggccgtgaggaggccaggttgctttctttgcagagaagaggcagcggaccttagctctctgaaatccatgctggaccagctcggcgtgccactttacgcagtggtgaaggagcacatccggaccgaagttaaggattttcagccctattttaaaggtgagattttcctggacgagaagaagaaattttacggtcctcagcgccgcaagatgatgttcatggggttcatcaggctgggcgtgtggtataatttcttccgggcttggaatggaggttttagcggcaatcttgagggcgagggatttatcctgggcggtgtctttgtggtggggtctggtaaacagggtattcttctggaacatagagaaaaagaattcggagacaaggtcaacctgctctcagttctggaggccgccaaaatgatcaagccccagactttagcgagtgaaaaaaagtag

SEQ ID NO: 5770 - DNA, 690 bp, synthetic construct
  misc_feature 1..690: note = source = /note="Description of Artificial Sequence: Synthetic coding sequence"
  source 1..690: mol_type = other DNA
atgagcttcctgcaggatccgtcctttttcacaatggggatgtggtccatcggagcaggcgctctgggcgccgctgccctggcccttctgctggccaatactgacgtattcttgagcaaaccacaaaaggccgcactggagtacctggaggacatagacctcaagacattggaaaaagaacccaggactttcaaggccaaggaattgtgggaaaaaaatggcgccgtgattatggctgttaggcgtcctgggtgcttcctctgcagggaagaggctgctgaccttagtagtctgaagagcatgcttgatcaattaggcgtgcctctgtatgcggtggtaaaagaacatataagaacagaagtaaaagatttccaaccttattttaagggcgaaatattcctcgatgaaaaaaagaagttctacggccctcaacgacggaagatgatgtttatgggctttatacggcttggcgtctggtataatttcttccgcgcgtggaacggtggcttttccgggaacctcgaaggcgaaggctttattttgggaggcgtgtttgtagtcggttcaggaaaacagggcatattattggaacacagggaaaaagaattcggagacaaggtcaatctactctctgtcctggaagctgcaaagatgattaaacctcagactctggcatcagaaaaaaaatag

SEQ ID NO: 5771 - DNA, 690 bp, synthetic construct
  misc_feature 1..690: note = source = /note="Description of Artificial Sequence: Synthetic coding sequence"
  source 1..690: mol_type = other DNA
atgtcttttctccaggacccctccttttttacaatgggaatgtggagcattggcgctggcgcactcggagccgctgctctggccctgctactggctaacactgatgtctttctaagcaagccccagaaagcggcactggagtatttagaggacatagatctgaagacactcgaaaaggagccaagaacctttaaggcgaaagaactgtgggaaaagaacggtgcggtcattatggccgtgcgaagaccgggttgtttcctgtgtcgcgaggaggccgctgacctgtctagtcttaaatccatgctggatcagcttggggtcccactctatgcggtcgtgaaagagcacatcagaacagaggtaaaggacttccaaccctattttaagggcgagatatttctagacgaaaaaaagaagttctacggtccccaaaggagaaaaatgatgttcatggggtttatccgtctgggggtgtggtataacttctttagggcctggaacggaggcttctctgggaatctggagggcgaagggtttattctgggtggtgtgttcgtcgtgggaagcggaaaacagggcatcctcctggagcaccgtgagaaagagttcggcgacaaggtcaatctgctatctgtgctggaggccgcaaaaatgattaaaccacagacccttgcgtcagagaagaagtag

SEQ ID NO: 5772 - DNA, 1248 bp, synthetic construct
  misc_feature 1..1248: note = source = /note="Description of Artificial Sequence: Synthetic coding sequence"
  source 1..1248: mol_type = other DNA
atgagtccgttcttgtaccttgttttgctcgtgctcggcctgcacgccaccattcattgtgcaagccccgaaggtaaagttactgcctgccactcctcccagccgaatgctaccctgtataaaatgtcaagtataaatgccgatttcgccttcaacctatatcgcagattcacggttgaaaccccagacaaaaacatcttttttagcccagtatcaatatctgctgccctggtcatgttgtcttttggcgcatgttgcagcacacaaactgaaattgttgagactttaggtttcaacctcaccgatacccccatggtggagatccagcacggctttcagcacttgatatgttctctgaattttcccaaaaaagagttggaactgcaaatcggaaatgcgctgtttatcggcaaacacttgaagcctctggccaagtttctgaatgacgtgaaaaccctctatgagacagaagtttttagtacagatttctctaatattagcgctgcgaagcaggagatcaactctcatgtggagatgcagacaaaggggaaggtcgtcggcctgatccaggacctgaagcctaacacaatcatggtccttgtgaattatatccattttaaggctcagtgggccaatccctttgacccttctaaaacagaagatagctcatcgtttttaatagacaagacaactacagtacaagttccaatgatgcaccagatggagcagtattatcatctggtagacatggagcttaattgcactgtgcttcagatggattattccaaaaatgcgctagcccttttcgtcctgcctaaggaggggcaaatggaaagtgttgaagccgccatgtcatcaaaaacactcaaaaagtggaataggctgctccaaaagggctgggtcgatctcttcgtgccaaagtttagtatttccgccacatacgatctgggggctaccctgctgaagatgggcattcagcatgcttatagcgaaaacgccgattttagcggtctgactgaagacaacgggcttaagcttagcaatgcggcccacaaggctgtgctgcacattggggaaaaagggaccgaagcagctgcagtacccgaagtggaactctccgatcagcctgagaatactttcttgcatcctatcattcagatagaccgtagttttatgctacttatcctggaacgtagcactcggtctatcctcttcctgggaaaagttgtgaaccccacagaggcttag

SEQ ID NO: 5773 - DNA, 240 bp, synthetic construct
  misc_feature 1..240: note = source = /note="Description of Artificial Sequence: Synthetic coding sequence"
  source 1..240: mol_type = other DNA
atggcgccacaaaccctcttgcccgtcctggtgctgtgcgtgctcctgcttcaggcacagggaggctaccgcgacaagaagagaatgcaaaaaacgcaactgtcccctgagatcaaagtgtgtcaacagcagcccaagttgtatttgtgtaagcacttatgcgagtcccaccgtgactgtcaggctaacaatatctgctgctcaacatactgtggcaatgtgtgtatgtctattctctag

SEQ ID NO: 5774 - DNA, 486 bp, synthetic construct
  misc_feature 1..486: note = source = /note="Description of Artificial Sequence: Synthetic coding sequence"
  source 1..486: mol_type = other DNA
atgggattgagcggcctgcttcccatactggtacctttcatcctcctgggcgacattcaggagcccgggcacgctgaaggaattttggggaaaccctgtcctaagattaaggtcgaatgtgaggtggaggaaatcgatcagtgcacaaagccccgggactgccccgaaaacatgaaatgctgtcccttcagcagagggaaaaagtgtcttgactttaggaaaatttatgctgtgtgtcaccgacgactggcgccagcgtggccaccctatcataccggaggtactatcaagaagacaaagatctgtagcgagttcatctatggcggcagccaaggtaataacaacaactttcaaacggaggccatttgcctcgtgacatgtaagaaataccacaagagcgccctgctgtacacgataagacgaagtctcaataacctgcaggacctagcccataacccaggactttcaccgagggtgcccgactag

SEQ ID NO: 5775 - DNA, 261 bp, synthetic construct
  misc_feature 1..261: note = source = /note="Description of Artificial Sequence: Synthetic coding sequence"
  source 1..261: mol_type = other DNA
atgggtttgtccggtctgctgccaattctcgttccattcattctgctgggggacatccaggaacctggacacgctgaggggattctcgggaagccatgccctaagattaaagtggagtgcgaggtggaggagatcgaccagtgtacgaaaccacgggactgccccgaaaacatgaagtgttgcccctttagtcgtggcaagaagtgtctagatttccgcaaggtatctttgacgctgtatcacaaagaggaactggaatag

SEQ ID NO: 5776 - DNA, 375 bp, synthetic construct
  misc_feature 1..375: note = source = /note="Description of Artificial Sequence: Synthetic coding sequence"
  source 1..375: mol_type = other DNA
atgcccgcctgccgactgggaccactcgccgctgcactgcttctgagtcttctgctgtttggcttcaccctcgtcagcggtaccggagcagagaagactggtgtttgccccgaactccaggcagaccagaattgtacacaggagtgtgtgtcagactccgagtgtgccgataacctgaagtgctgttctgctggttgcgccactttttgcagtctgcccaacgataaggagggcagttgcccacaagtgaatattaatttccctcagctaggcctgtgcagggaccagtgtcaggtagactcccagtgccccggacagatgaagtgttgccgtaacgggtgcggcaaggtttcttgtgtaacaccaaatttttag

SEQ ID NO: 5777 - DNA, 1428 bp, synthetic construct
  misc_feature 1..1428: note = source = /note="Description of Artificial Sequence: Synthetic coding sequence"
  source 1..1428: mol_type = other DNA
atggccgatatgcagaacttagtggaacgactagagagagccgttgggaggctcgaagcggtctcccacacaagcgatatgcataggggctacgccgattccccctctaaggcgggagctgccccgtacgtccaggccttcgattcgttgcttgctggacctgttgcagagtacttaaagatcagcaaggagatcggcggtgatgtacagaaacacgcagaaatggtgcacaccggcctcaaacttgaaagagccttgctggttacggcctcgcagtgtcagcagcctgcagaaaataagctgtctgacctcctcgcgcccatatccgaacagattaaggaggttattaccttccgcgaaaaaaatagaggatccaagctgttcaatcacctctctgcagtcagtgaaagtatacaagccttgggatgggtagctatggccccaaagcccggcccgtacgtgaaggagatgaacgatgccgcaatgttctacaccaatagagtgctgaaggagtataaggacgtagacaaaaaacacgtggactgggttaaagcctacctcagcatttggaccgaactgcaggcctacatcaaggaatttcacactactggcttagcttggagcaagaccggtccagtcgctaaggagctgagcggcctgcccagtggtccgtctgcggggagctgccctccaccaccacctccctgtccacccccccctccagtgtccaccatttcatgtagctatgaaagcgcaagtcgatcttcattattcgcacagatcaatcagggggaaagcattacccacgctctcaagcacgttagcgacgacatgaaaacgcataaaaaccctgcactgaaggcacagagcggacccgttcggtctggtccaaaacctttcagtgcccctaaaccccagacgagccctagtcctaagcgcgccaccaagaaagaacccgccgtactcgaactagaagggaagaagtggcgcgtggaaaaccaggagaatgtgtccaatttagttattgaggatacagagttgaaacaggtggcctacatatacaaatgcgttaacaccacactccagatcaaagggaagataaactctatcacagttgacaactgcaaaaaactcggtctagtgttcgacgatgtagtgggcattgtggagattattaacagcaaagatgtcaaggtgcaggtgatgggcaaggtgcctacgatcagtataaataagacagatgggtgccacgcttatctgtcaaagaatagtcttgattgtgagatcgtgagtgccaaatcttcagagatgaatgtgttgatccctaccgaggggggggactttaatgagttccctgtgccggaacagtttaaaacactgtggaatggacagaagctggtaaccaccgttactgaaattgccgggtag

SEQ ID NO: 5778 - DNA, 438 bp, synthetic construct
  misc_feature 1..438: note = source = /note="Description of Artificial Sequence: Synthetic coding sequence"
  source 1..438: mol_type = other DNA
atggcggatatgcagaatctcgtggagagactggaacgcgccgtcggacgcttggaggcagtttcccatacatcagacatgcaccgcggctacgcagatagcccctctaaagcaggggccgccccatacgtccaggcctacattaaagaattccataccacagggctggcctggtctaagaccggtcccgttgcgaaagagctgagcggactacctagcgggccgtcagccggctcctgtcccccgcccccgcctccatgcccgccccctccgcccgtctcaactatctcttgctcttacgagagtgcaagccggtcaagcctttttgcccagatcaaccagggagagtcaatcacgcacgcgcttaaacatgtgtctgacgatatgaagacacataagaatccagccctcaaggcacagtctggtcccgtccggtag

SEQ ID NO: 5779 - DNA, 1428 bp, synthetic construct
  misc_feature 1..1428: note = source = /note="Description of Artificial Sequence: Synthetic coding sequence"
  source 1..1428: mol_type = other DNA
atggcagatatgcaaaatctggtcgagcgcctagagcgggccgtgggcagattagaggctgtgagtcatacctccgacatgcatcgaggatatgccgactccccttctaaggccggggctgcaccctacgtgcaggctttcgactcgcttctcgccggaccagtggccgagtacttgaagatttcaaaagagattggcggggatgtccagaagcacgccgaaatggtgcataccggcctgaagctggaaagggctctgctggtgaccgcctcccaatgccagcagcctgccgagaataagctatcggacctgctggctcccatatccgaacaaatcaaagaggtgatcaccttcagagagaaaaatcgaggcagtaaactgttcaaccacttatctgccgtctccgagtctattcaggcactgggttgggtggccatggcacccaagcccggaccttacgtcaaggaaatgaacgacgccgccatgttttataccaatagggttctgaaagaatacaaagacgtagataagaagcatgtcgactgggttaaggcgtatctgtccatctggactgaattgcaggcttacataaaagagttccacacgacaggcttggcctggtcaaagactggccctgttgcgaaagagctctctggcctgccgagcggtccgtccgcaggatcttgtcccccccctcccccgccatgtcctccccctcctccagtgtctacaattagctgctcttatgaaagtgcaagtagaagcagcctcttcgcacaaatcaatcagggcgagagtatcacccacgccctcaaacacgtgtccgatgacatgaaaacccataagaatcctgctttaaaggcccagtcagggcctgtgcgcagcggccctaagcctttcagtgcccctaagcctcagacaagtccctcacctaaacgcgctaccaaaaaagaacccgcagttcttgagcttgagggcaagaagtggcgcgtggagaaccaagaaaacgtctccaatcttgttatcgaagataccgagcttaagcaggtggcgtatatttacaagtgcgtcaacacaacactgcaaatcaaaggaaagattaatagcataaccgtggataactgtaagaagttaggactggtctttgacgatgtcgtgggcatcgtcgagattattaattcgaaggatgtaaaagttcaagtgatgggcaaggtcccgacaatcagcatcaacaaaaccgacggttgccacgcctacttaagtaagaatagtcttgactgcgagatagtaagcgctaaatctagtgaaatgaatgtgctcattcccacagagggaggcgacttcaatgagtttcccgtcccggaacaatttaaaactctgtggaatggccagaaactggtgacaaccgtcaccgaaatcgctggttag

SEQ ID NO: 5780 - DNA, 1425 bp, synthetic construct
  misc_feature 1..1425: note = source = /note="Description of Artificial Sequence: Synthetic coding sequence"
  source 1..1425: mol_type = other DNA
atggccgatatgcagaatctggtggagaggcttgaaagagctgtcggacgacttgaagccgtgtcccacacaagtgatatgcacaggggctatgcagatagcccctccaagggagccgctccttacgtgcaggcattcgactctctgctggctgggcctgtggccgagtacctcaagatcagcaaagagatcggcggcgatgtgcagaaacatgcggagatggtccatacaggcctgaaactggaacgcgctttgcttgtaaccgcctcgcaatgtcagcagcccgccgaaaataaattatctgaccttttggccccaattagcgagcagattaaggaagtcatcaccttcagagagaagaatcggggttctaagctgttcaaccacctgagcgctgtctcggaatccattcaggcgctgggatgggtggcaatggcaccaaagccaggcccttacgtgaaggagatgaacgacgcggccatgttctacacaaatcgcgtcctgaaggagtacaaggacgttgataaaaagcatgttgactgggtcaaggcctatctttcgatctggaccgaactccaggcgtacataaaggagttccacaccacaggtctggcatggtccaagactgggcctgtggccaaagaattgagtggcctgccaagtgggcccagcgccggctcctgtccgcctccgcctcctccctgtccaccaccccctcccgtttctactatctcctgctcatacgagagcgcatctcgcagttccctatttgcgcagataaaccagggcgagtcaatcacgcatgctttaaagcacgtgtcagatgacatgaagacacacaaaaaccccgcactcaaggctcagtcgggtcccgtacgctcagggcccaagccctttagcgcccctaagccccagacgtcccctagccccaagagggcaaccaagaaggaacctgcagttttggagctcgagggcaaaaaatggcgcgttgagaatcaggagaatgtgagcaacctggttatagaggacacagaacttaagcaggtcgcgtacatctataagtgcgtcaatactaccctccaaataaaaggaaaaatcaatagcatcacagtcgataactgcaagaaactgggtttagtgtttgacgatgtcgtgggcattgtcgagatcattaactccaaggatgtcaaggtacaagtcatgggtaaagttcctactatatctatcaataagacagacggatgtcacgcctatctgtcaaagaacagtctggactgcgagatcgttagcgctaaatccagtgaaatgaatgtgttaatccctacagaaggaggcgactttaatgaattccccgttccggagcagtttaagactttatggaacggtcagaagctagtgacgacagtcactgaaattgcaggttag

SEQ ID NO: 5781 - DNA, 1425 bp, synthetic construct
  misc_feature 1..1425: note = source = /note="Description of Artificial Sequence: Synthetic coding sequence"
  source 1..1425: mol_type = other DNA
atggcggacatgcaaaatctggttgaaagactcgagagggctgttgggcgcctggaagccgtatcacacactagcgacatgcatcggggctatgctgatagcccaagcaagggtgccgctccttacgtccaggcattcgatagcctcctcgccgggcccgtggctgaatatctgaaaattagcaaggaaatcgggggcgacgtgcagaagcacgctgagatggtccatacaggactgaagttggagagggcgttgctggtcaccgctagccagtgccagcagcccgctgagaataaactcagtgacttgctggctccaatttcagagcaaatcaaagaggtgattacctttagggaaaaaaatagaggctcaaagctgttcaaccatttatccgctgtatctgaaagcatccaggccttgggctgggtggcaatggctccaaaacctgggccctacgttaaagagatgaacgacgcagccatgttctataccaaccgagtgctaaaggaatataaggatgtggataaaaaacacgtcgattgggtgaaggcctacctaagtatctggacggagttgcaggcctacattaaagagtttcacactacagggctggcttggtccaagacgggaccggttgccaaggagctgtccggcctccccagcggaccatctgccggttcttgtcctccgcccccacctccctgcccgcctcccccacccgtgagcacgatcagctgctcgtatgaatcagcttccaggtcaagcctatttgcacagatcaatcagggcgaatcaatcacccatgccctgaagcatgttagcgatgatatgaagacacataaaaacccggctttaaaggcacagtctggacctgtgcgatccgggccaaaacccttttctgccccaaaaccccagacttcccccagccccaaacgcgcaaccaaaaaggaaccagctgtgttagagctcgaagggaagaaatggcgtgtggagaatcaggagaatgtgagtaatttagtgatcgaggatacagaactgaagcaggtggcctacatttataaatgcgtaaacactacgctccagatcaaaggaaaaattaattccatcactgtggacaactgcaaaaaactcggcctcgtgttcgacgacgtggtcgggattgtggagataatcaatagcaaggacgtgaaggttcaggttatggggaaggtgcctacaatctcaattaacaagacagatggctgccacgcttacctcagcaagaacagtctggattgtgagatcgtatcagccaagtcctccgaaatgaacgtccttatcccgacagaaggtggtgactttaacgagttccctgtgcccgaacaatttaagacattgtggaacggacaaaagttagtaacaacagtgactgaaattgcaggatag

SEQ ID NO: 5782 - DNA, 1428 bp, synthetic construct
  misc_feature 1..1428: note = source = /note="Description of Artificial Sequence: Synthetic coding sequence"
  source 1..1428: mol_type = other DNA
atggctgacatgcagaatctagtggagcggctggagcgggccgttgggaggttggaggcagtcagccacacctcggatatgcataggggttacgcggacagcccttcgaaggctggtgcagcgccatacgtgcaggcctttgactccttgctcgccggcccggtggccgagtatcttaaaatttctaaggagattggtggtgacgtacaaaagcacgccgagatggtgcacaccggactgaaactcgaaagggcacttctggtaacagcatcacaatgtcagcagcccgccgagaacaaactgtctgacctcctggccccaatatcagagcagattaaagaagtaataacctttcgagagaaaaacagggggtctaagctttttaaccacctgtctgccgtgtccgaaagcattcaggccctcgggtgggtggccatggcgcctaaacccgggccatatgtaaaagaaatgaacgacgcagctatgttctataccaaccgcgtgctgaaggaatacaaagatgtcgataaaaagcatgtggattgggtgaaggcgtacttgagtatctggacagagttgcaggcctacattaaggagtttcacacaaccggtctggcctggtccaaaaccggtcccgtagcaaaggaactttctggacttccatctggtcccagcgctggaagttgcccacccccccctcctccgtgtccacccccaccacctgtgtctactatctcttgcagctacgagtcggcttcccgctcaagcctgtttgctcagatcaaccagggagagtcaatcactcatgccctgaaacatgtctccgatgatatgaagactcataagaatcccgctctgaaagcgcagtcaggccctgtgagatccggcccaaagccctttagtgcaccgaagccccagacatctccgagtcccaagcgagctacaaagaaggaaccagccgttttggaactggaagggaagaaatggcgagttgagaaccaagagaacgtatccaatctggttattgaggataccgaactcaagcaggtggcctacatttataagtgtgtcaataccacgttacagatcaagggcaagatcaattccatcacagtggacaactgtaaaaagctggggttggtgtttgatgacgtggtcggcattgttgagattattaattctaaggacgtgaaagttcaggtgatgggaaaggtacccacgattagcatcaacaagaccgacggctgccacgcctacctatctaagaattcccttgactgtgagattgtttctgccaagagctccgagatgaatgtgctcattccgactgagggcggagattttaacgagttccctgtgccggagcagtttaaaacgttgtggaatggtcaaaagctggtcacaactgtaacagaaatcgctgggtag

SEQ ID NO: 5783 - DNA, 1209 bp, synthetic construct
  misc_feature 1..1209: note = source = /note="Description of Artificial Sequence: Synthetic coding sequence"
  source 1..1209: mol_type = other DNA
atgacggcgctgccagggccactgtggctactcgggctggcactgtgcgccttaggtggtggtggcccaggcctgcggcctccacctggttgccctcaacgccggctgggagctagagagaggagggatgtgcagcgagagatcctggcggtgctcgggctccccggcagacccaggccccgtgcaccacctgcagctagccgtctgcccgctagcgcccccttgtttatgctggatctctaccatgcgatggcaggggacgatgatgaggacggtgcacctgcagaacgccgactgggaagagccgacctggttatgagctttgtaaatatggttgagagggaccgagcactgggacaccaggagccccattggaaagagtttaggttcgatttgacacagattcctgccggcgaggcggtgacagccgctgaatttagaatctataaggtgccatctatccaccttctcaatcggactctgcatgtgtcaatgttccaagtggtccaagaacagagtaaccgagagtctgacctctttttcctcgatctgcagaccctccgggcgggcgacgaaggctggctggtcctggacgtcaccgcagcctctgactgctggttgctgaaacggcataaggatttagggctgagactgtacgtggaaacagaagacggccattcggtcgatccagggcttgccggactactgggacaaagagcgccaaggtcacagcagccatttgtggtgactttctttcgagccagtcctagtcccatcaggactccgcgggccgtgcgcccattgcgacgtagacagcccaaaaagagcaacgaattgccccaggcaaatcggttgccgggtatttttgatgacgtccatggaagccacggccgacaggtgtgcagaagacacgaactgtacgtctcattccaggatctgggctggcttgattgggtcatagctccccaggggtactctgcgtactactgcgaaggcgaatgtagttttcctctggactcctgcatgaacgctacaaaccacgctattttacagtccttggtgcatctcatgatgccagacgccgtgcctaaggcctgctgcgccccaacgaagttgagtgctacaagcgtgctctattatgactcctctaataacgtgatcctacgaaagcacagaaatatggttgttaaagcttgtggctgtcattag

SEQ ID NO: 5784 - DNA, 804 bp, synthetic construct
  misc_feature 1..804: note = source = /note="Description of Artificial Sequence: Synthetic coding sequence"
  source 1..804: mol_type = other DNA
atggccgctatacggatgggaaagctgacaacgatgccggccggactcatttacgcatccgttagcgtgcacgcagctaagcaagaagaaagtaaaaaacagctcgtcaagcctgagcagctgcctatctacacggcgcctcctctccagtcaaagtacgtcgaggaacaaccggggcatctgcagatgggcttcgcatcgattcgcaccgctacaggatgctatataggatggtgcaagggcgtctacgtgtttgtgaagaatggcattatggacaccgtccagttcgggaaggacgcttacgtgtacctgaaaaacccaccacgagatttccttccgaaaatgggggtgataaccgtttctggccttgcaggtctggtatctgccagaaaggggagtaaatttaaaaaaatcacatatcctcttggtctggccactctcggcgcgacagtgtgctaccccgtacagtctgtgatcatcgccaaggtgacagctaagcggtacatgcttcaggcatccaagtttttggaacagctgaaccattgcgggcagaaagcagcaaaaaagtctcatagcctgaatctgaaaaaaacaaagctggggagttcgtccgagattgaggttcccgccaaaaccacacacgtgctgaagcatagcgtgcccttgcctaccgagttatcctctgaggccaaaacgaaatctgaaagtacttcgggagccacccaatttatgccagacccaaagctgatggatcatgggcagagtcaccctgaagacatcgatatgtactcaacgcggtcctag

SEQ ID NO: 5785 - DNA, 807 bp, synthetic construct
  misc_feature 1..807: note = source = /note="Description of Artificial Sequence: Synthetic coding sequence"
  source 1..807: mol_type = other DNA
atggcagcgatcaggatgggaaagctcaccacaatgcctgctggtctcatatacgctagtgtgagcgtgcacgctgcaaaacaggaggaaagcaaaaagcaacttgtgaagccagagcagctcccaatctacactgcaccgccattgcagtccaagtatgtcgaagaacaaccagggcatttacagatgggctttgccagcatacggacggcaactggatgctacattggatggtgcaaaggggtatacgtgttcgttaagaatggaatcatggatactgtgcagttcggaaaggatgcatatgtctacctgaaaaatccgcctagagatttccttcctaaaatgggagtgattactgttagcggcttggccggtttagtttctgctcgcaaaggctccaagtttaagaagattacatatcctctgggcctggcgactctgggggctactgtgtgttatcccgtccaatccgtgatcatcgctaaagtgacagctaaaaaggtgtacgccaccagccaacagattttcggggcagtgaaaagtctgtggacaaaatcctctaaggaagaatctctccctaaacccaaagaaaaaaccaagctgggatcatcaagcgaaattgaggtccctgcaaaaaccacccacgttctgaagcactccgtaccattgcctaccgagctgagttctgaggcgaagacaaaatccgagtctacttccggggccacccagttcatgcccgacccaaaacttatggatcatggtcaatcccatccagaagatatcgacatgtattccacccggagctag

SEQ ID NO: 5786 - DNA, 3672 bp, synthetic construct
  misc_feature 1..3672: note = source = /note="Description of Artificial Sequence: Synthetic coding sequence"
  source 1..3672: mol_type = other DNA
atggccccgcttcgagctttactatcctacctgctgcctctgcactgtgcactctgcgccgcggccggaagcagaacaccggagctccatctgtctggaaagctgtcggactatggagtgacagttccctgcagtaccgattttagaggcagatttctgtcccacgtggtgagcggaccagccgcggctagcgccgggtccatggtggttgacactccccccacactgccccggcatagctcgcacctgagagtggctagatctcctttacatcctggcggaacgctgtggccaggccgcgtcgggcgtcatagcctgtactttaatgtgacagtgttcggaaaggagctgcacctgagactacgcccaaacaggcgcttagtggtccctggcagcagcgtggagtggcaggaggattttcgcgagttattccggcagccactgcggcaggagtgtgtttatacaggtggcgtgaccgggatgccaggggctgcagttgccatctccaactgtgacggtttggctggtcttatacggacagactccactgacttcttcatcgaacccctggagcgcgggcagcaggaaaaggaggcctccggcagaacacacgtggtgtaccggcgggaagccgtgcagcaagagtgggctgagcctgacggtgaccttcacaacgaggcttttggactgggcgatctgcccaacttactgggcttggtaggcgatcagctcggcgacacagaacgaaaacggagacatgcaaagcctggtagctactcaatcgaagtgctgttggtcgtcgatgactcagtggtgaggttccatggcaaggagcatgtccagaattatgttctcaccctcatgaacatagtggacgagatttaccatgatgagtccctgggcgtccatattaacatcgctctcgtgaggttgattatggtaggatatcggcagtctttaagtctcatcgaaagaggcaatccttctagatcactcgaacaggtctgcaggtgggctcacagccagcaacggcaggacccaagccatgctgagcatcatgatcatgttgtcttcttaactcgtcaggacttcggaccctcaggttatgccccagtaacaggcatgtgccaccctttgagaagctgcgccctgaaccacgaagatgggttcagctcagccttcgtcatcgcacacgaaactgggcatgtgctggggatggaacacgacggccagggcaacggctgcgctgacgaaacatctcttggatccgtcatggccccactcgtacaggccgccttccaccgcttccactggagtaggtgttccaaattagaactatcacgttatctgccaagctacgattgtctcctcgacgatcctttcgaccctgcctggccacaaccccccgaactccccggaattaactattcaatggatgaacagtgtcggttcgacttcggcagcggttatcaaacatgcctggctttcagaacttttgaaccttgcaaacaactctggtgcagtcaccctgataacccctatttctgcaaaaccaaaaagggcccccctttagacggcaccgaatgcgcaccggggaaatggtgcttcaaaggccactgcatttggaaaagccctgagcagacttatggccaggacggtgggtggtcttcttggactaagtttggctcctgtagccggagttgcgggggcggagtgcgttctaggtctcgctcttgcaataaccccagccccgcatacggcgggcgactttgtctcgggccaatgtttgaataccaggtctgcaatagcgaggagtgcccaggcacatacgaggacttcagagctcaacaatgtgctaaacgcaactcatactatgtgcatcagaatgccaagcactcttgggtgccttacgaacctgatgacgatgcgcaaaaatgcgagctcatttgccaatcggcggacaccggcgatgtcgtcttcatgaaccaggttgtccatgacggaacaaggtgttcatatcgagacccatacagcgtctgcgcccgtggcgagtgcgtccccgtgggatgcgacaaagaagtcgggagcatgaaagccgacgacaaatgcggagtatgtgggggcgacaacagtcactgccgcacggtgaaagggaccttgggcaaagcttctaagcaggccggcgccctcaagctggttcagatacctgcaggagcacggcatatccagatagaagctctggagaaatctccacatagaatcgttgtcaagaatcaggtgacaggctcgttcatcctcaacccgaagggcaaggaagccacctctcggacatttactgcgatgggcctggagtgggaagatgcagtggaagacgctaaagagagcctcaagacatcagggcctctgcctgaggcaatagctatactcgccttgcccccgactgaaggggggccccggtcctctctcgcatacaagtatgtgatccacgaagacttgctgccactcataggcagcaataacgtattgctggaggagatggacacctacgaatgggcccttaagtcatgggctccttgcagtaaggcctgcggtggaggtatccagttcactaagtatgggtgtagacggcgcagggaccatcatatggtccaaaggcacttgtgcgaccacaagaaaagacctaagcctatccgtcggcgctgtaaccaacacccatgctctcagccggtgtgggtgacagaggaatggggtgcctgttcccgttcgtgtggcaagctgggggttcagacccgaggaatccagtgcctgttgccccttagcaacggtacacataaggtgatgccagccaaggcctgcgcgggggaccgccccgaggctcggagaccttgcttaagagtcccttgtccggcacaatggagattaggggcttggagccagtgttccgccacctgcggcgagggaatccagcaaaggcaggtagtgtgcaggaccaacgccaactcactgggccattgcgaaggggaccgtcccgacaccgtacaagtctgctcgctccccgcttgtggaggcaaccatcaaaactccaccgtcagggcggacgtgtgggaactcggaacacccgaaggacaatgggtgccccagtctgagccactgcaccctatcaataagatctccagcaccgagccctgcacaggagaccgcagcgtgttctgtcagatggaggtcctggacaggtactgctcaatcccaggttatcatagattgtgttgcgtttcctgcatcaagaaggcttccggacctaaccccggtccagaccccggaccaacgagcctgcctcctttcagcactcctggatcacccttgcccggccctcaagaccctgccgatgctgccgaaccacctgggaagcctaccgggagtgaggaccaccagcatggccgcgcaacgcagctgcctggagcgctggacacctcttcacctggcacacagcaccctttcgcccccgaaacccccatcccaggcgccagctggtcaatctcacctaccacgcccggagggctgccatggggctggacccagacacctactccagtgcccgaggacaagggacaacctggcgaagacctgagacatcccggtacctcgctgcccgccgcgagccccgtgacctag

SEQ ID NO: 5787 - DNA, 3681 bp, synthetic construct
  misc_feature 1..3681: note = source = /note="Description of Artificial Sequence: Synthetic coding sequence"
  source 1..3681: mol_type = other DNA
atggcacccctgcgagccctgctgagttatctgctcccactgcactgcgctctgtgtgccgccgccggtagcaggacgccggagctccatctcagtggcaaactgagcgactatggtgtaacagtcccatgctctacagattttcgggggcgatttctgtcacacgtggtgagtggtccagccgccgcctcagccggatcgatggttgtcgataccccacccacgctacctcgtcattccagtcatttaagagtggctaggagtccactccacccaggaggaactttgtggcctgggcgcgtaggacggcattcactgtatttcaatgtcacagtgtttggcaaggaactccacctcagattgagacccaaccgtcgtcttgtggtgcctggctcttccgtggagtggcaggaagatttccgagaactgtttagacaaccactacggcaggagtgcgtttacaccggcggtgtcaccggtatgcccggcgcggcagttgctatttccaactgcgatggcctggcaggcttaatccgtactgactccactgacttttttattgaaccactagagcgcgggcagcaggagaaggaagcctccgggcgaacccatgtcgtgtaccggcgcgaagccgttcagcaagagtgggctgagccggacggcgacctacataacgaggctttcggacttggtgacctcccaaatttgcttggtctggtcggggaccagctcggagacaccgaaaggaaacgcagacacgcaaagcctggatcttactccatagaagttctgctcgtggttgatgattctgtcgtacggttccatggaaaggagcacgtacaaaactatgtgctcacacttatgaacatagtagacgaaatttaccatgacgaatccctaggcgttcatataaacatcgccctcgtgcggttaattatggtgggttaccgtcagagcttgagtttaatcgaaagggggaacccaagtcgctccctggaacaggtttgccgatgggctcacagtcagcagcggcaggatcccagtcatgccgagcaccatgaccacgtggtgttccttacgcgacaggactttggcccctccggtatgcagggatacgcgccagttacagggatgtgccacccactccgctcttgtgctctgaatcatgaggatggcttttccagcgcttttgtcatagcacacgagacaggtcatgtcttagggatggaacatgacggacaaggcaatgggtgcgccgatgagacctcattgggctctgtcatggccccactcgtccaggctgccttccacagatttcactggagcagatgcagcaaactggaactcagtcgctacctgccctcctacgattgtctgctggatgacccattcgatcccgcttggccccaaccccccgagctccccggcatcaactattctatggacgaacagtgccggttcgattttggttcaggctaccagacttgcctcgctttccggacattcgaaccatgcaaacagctctggtgcagtcatcctgataacccctacttttgcaaaaccaagaaaggaccacctcttgatggaaccgaatgcgctcccggtaagtggtgcttcaaaggccattgtatctggaaaagcccagagcaaacttacggtcaggatggaggatggtcatcctggacaaaattcggctcctgttcccgcagttgtggtggaggggtgcgttcaaggagccgctcttgtaacaatccttcacctgcttacggtggcagattgtgtctaggcccaatgttcgagtatcaggtgtgcaattcagaggaatgtccgggcacatacgaagattttcgcgctcagcagtgcgcgaaacggaatagctattacgttcatcagaacgctaaacattcttgggtcccgtacgaaccggacgacgatgcccagaaatgcgaactcatctgtcaaagtgcagatactggggacgtcgtatttatgaatcaggtggttcacgacggtacccggtgtagttaccgagatccttatagtgtgtgcgcaagaggcgaatgcgttcccgtgggctgtgataaggaggtgggatccatgaaagctgacgataaatgtggcgtctgtggcggagacaatagccattgccgaaccgtaaaggggactctcgggaaggcctccaagcaagccggcgccctgaagctcgttcagatcccagccggggcacgccacatccagatcgaagcactggaaaagagcccacatcggatcgttgtgaaaaaccaggtcaccggcagtttcatactgaacccgaaaggcaaggaagccacttcaaggactttcaccgcaatggggctggagtgggaggacgccgttgaggatgcaaaagaaagcctgaagactagtgggcccctaccagaggcaatagccatcctggctctccccccaaccgagggtggaccgcgatcaagtctggcgtacaaatatgtgatacatgaagatttgttacctctgattggctccaacaatgtgcttctagaggaaatggatacctatgaatgggctctgaagtcttgggctccgtgctccaaagcatgcggcggcggcatccagttcaccaagtatggttgtcggcgccgccgcgaccatcacatggtgcagaggcacttatgcgaccacaagaaaaggccgaagcctataaggcgcaggtgtaaccagcatccctgttcccaaccagtgtgggttacagaggagtggggggcctgcagtcgcagctgcggcaagctgggcgtgcagactcgcggaatacagtgtctcctgcccctcagcaatggtacccacaaagtgatgccagccaaagcctgtgctggtgataggcccgaggcgcgacggccctgcctgcgggtcccctgtcctgcgcagtggcgattgggcgcctggagtcagtgctccgccacgtgtggcgagggcattcagcaacgtcaggtggtgtgcagaaccaatgctaactctcttggacattgcgaaggggaccgtccagatacagtgcaggtgtgttccctacccgcctgtggcggcaaccaccagaattctacagtaagagccgacgtctgggaactgggaacgcctgagggacagtgggtgccccagtccgaacctttgcaccccataaacaagatcagtagcaccgagccttgcactggcgatcggtccgtgttctgccaaatggaagtattagatcggtactgtagcattcctgggtatcaccgactgtgttgtgtttcatgtatcaaaaaggcctccgggcctaatcctggacctgatcctggaccaacctcactgccccctttcagtacgcccggcagtcctctgccagggccacaagatccagctgatgccgccgaacctcccggcaagcctacagggtccgaggatcatcagcacgggagagcgactcagctgcccggcgctctggacacaagcagcccgggcactcagcatcccttcgcccctgaaaccccaatccccggagccagttggagcatctctcccaccacacctggcggcctgccttggggctggactcagaccccgacgcccgtccctgaggataagggccaaccaggcgaggacctgagacacccagggacatctctccccgccgcctcaccggtgacctag

SEQ ID NO: 5788 - DNA, 762 bp, synthetic construct
  misc_feature 1..762: note = source = /note="Description of Artificial Sequence: Synthetic coding sequence"
  source 1..762: mol_type = other DNA
atggccgctgctacccgaggttgcagaccctggggtagtctgttgggcctgctcgggctcgtctcggctgcagcagcagcttgggatttagcgtctctccgttgcaccttgggcgctttctgtgagtgcgatttcaggcccgatctacctggtcttgagtgtgatctcgcccagcacctggcagggcagcacctagcgaaagcacttgtggtaaaggctcttaaagcttttgttcgggacccggccccaacgaaaccccttgtactgtccctgcatggatggactggcactggaaaaagttacgtgtcaagtctgctcgctcactaccttttccagggtggcctgagatcaccccgcgtgcatcacttttcaccagtgctgcacttcccgcacccttcccacatcgaacggtataagaaggacctcaagagctgggtgcagggcaatctgactgcttgcggccggtccctgtttctttttgacgagatggacaaaatgcccccagggcttatggaggtcctgcgccccttcctagggtcctcatgggtggtctatggtaccaactaccggaaggcaatatttattttcatcagatggggtccagcactgcagtgggctcagtggggtggacatttttccgaagtccagctttatagtctgtccctgtgttctcagcagaaccctgtaccacacgggctcagttgggccttccctgtgccctctgctaccctccgggacgacattgttatcccgcccggctag

SEQ ID NO: 5789 - DNA, 966 bp, synthetic construct
  misc_feature 1..966: note = source = /note="Description of Artificial Sequence: Synthetic coding sequence"
  source 1..966: mol_type = other DNA
atggctgctgctacccggggatgccggccctgggggagtcttctggggttgctgggactggtttcggctgcagcagctgcatgggaccttgcaagcctccgctgtaccttgggggccttttgcgaatgcgacttccgtcccgatttacctggcctcgaatgcgacctcgcacagcatcttgccggtcagcatctcgccaaagctctagttgtgaaggccctgaaggcctttgtccgcgatccagcccctactaagcctttagttctgtcattgcacggctggacaggaactgggaaaagttacgtgagctcattgttagcacactatctatttcaaggcggattaaggagcccacgcgttcaccacttttcccccgttctccatttccctcatccgagccacattgaacgctataaaaaagatttgaagtcttgggtacaaggcaatctgaccgcgtgtggtcgatccctgttccttttcgacgagatggacaagatgccacctggactgatggaggtacttcgaccattcctaggttccagttgggtggtctacggaaccaattacagaaaggccatcttcattttcatctccaatacgggcgggaagcaaattaatcaggtggctctggaggcctggaggagccgtcgtgatagggaagaaattctcctccaggagctggagcctgtgatatcgcgggcagtgctggacaacccccaccacggattctccaattcaggcattatggaggagcggctcctggatgcagtggttccctttctgcctctccagcggcaccacgtgcgtcattgtgtactgaacgagttggcacagctggggctggaaccacgtgacgaggtcgtgcaggcagttctggacagtacaactttttttccggaagacgaacagctgttttcaagtaacggatgtaagacagtggctagtcggatagcattttttctttag

SEQ ID NO: 5790 - DNA, 576 bp, synthetic construct
  misc_feature 1..576: note = source = /note="Description of Artificial Sequence: Synthetic coding sequence"
  source 1..576: mol_type = other DNA
atgcaggtgtggtgcgaccagaggcatgaccccgggggttggaccgtgatccagaggcgcctggatggaagcgtgaactttttccggaactgggagacttacaagcagggttttgggaatatcgatggcgagtattggctgggtcttgaaaatatttattggcttaccaaccaggggaactataagctgttggtgacaatggaggactggagtggtcgcaaagtgtttgcagaatacgctagcttccgcctggagcctgaatctgagtattataaattgcgcctcggacggtatcatggtaatgccggcgatagttttacctggcacaatggtaaacaatttaccactctggacagggaccacgatgtatacaccggcaactgcgcccactaccagaagggtggatggtggtacaacgcctgtgcgcacagcaatttgaacggagtatggtaccgcggaggacactaccgctctcggtatcaggacggggtatactgggcagaattcagggggggaagttactcattaaaaaaggttgtgatgatgattcgaccgaatcctaacacgttccactag

SEQ ID NO: 5791 - DNA, 1482 bp, synthetic construct
  misc_feature 1..1482: note = source = /note="Description of Artificial Sequence: Synthetic coding sequence"
  source 1..1482: mol_type = other DNA
atgcgccctttgtgcgtgacgtgctggtggctggggctgctcgccgcgatgggcgctgttgctgggcaggaagatggcttcgagggcaccgaagagggcagcccccgcgagtttatttacctgaacaggtacaaaagggctggagagagccaggacaaatgcacttacactttcattgtacctcagcagcgcgttacgggagcaatatgcgtcaatagtaaagagccggaagtcctcctggagaacagagtgcacaagcaggagctggaattgctgaataatgagcttttgaagcagaaacgccagattgagaccctgcagcaactggtggaagttgatggaggaatcgtaagcgaggtaaaactgctgaggaaagagtcacggaacatgaattcaagagtcacacagttatacatgcagctgctgcacgaaattatccggaaacgcgataatgcccttgagctgtcgcagcttgagaatcgcatattaaaccagacggctgacatgctccagcttgcatcaaagtataaagatcttgagcacaaataccagcatctggcaacgctcgcccacaatcaatcggagattatagcccagctggaagagcattgccaacgcgtgccctctgcccgcccggtgccacagccgccgcccgcagccccgccaagggtgtaccagccgccgacgtacaataggataataaatcagatttccaccaatgagatccagtccgatcagaatcttaaggtgctgccacccccactgcctaccatgcctacactcaccagtctgccatcctcaacagacaagccgtcgggcccctggcgcgactgtctccaagctttggaggacggccacgacacgtcttccatatacctggtgaagccagagaacacaaaccgcctcatgcaggtgtggtgcgaccagagacacgatcctgggggatggaccgtgatccaacgtcgactcgacgggtctgtcaacttctttaggaactgggagacctataaacaaggctttgggaacattgacggggagtactggctcgggttggaaaatatttactggttgactaaccaaggcaactacaagctgctggtaacaatggaggattggtccggtagaaaagtgttcgccgagtacgcatcatttcgtctggagcccgagtcagaatactacaaattgcgtctgggtagatatcacggtaacgcaggcgattctttcacctggcacaacggtaaacaattcactacactggatcgtgaccacgacgtgtataccggcaattgcgctcactaccaaaagggtgggtggtggtacaacgcttgcgctcacagtaaccttaatggagtctggtaccgtggagggcactaccggtccaggtaccaagacggagtgtactgggcagaatttaggggtggcagctacagcctgaagaaggtggtcatgatgatcagaccaaaccccaatacattccactag

SEQ ID NO: 5792 - DNA, 1959 bp, synthetic construct
  misc_feature 1..1959: note = source = /note="Description of Artificial Sequence: Synthetic coding sequence"
  source 1..1959: mol_type = other DNA
atggccgctgccgcactaccacctcggcccctgctgctcctacctctagtacttcttctgtcaggaaggcctacccgcgccgactctaaggtgttcggagatttggaccaggtgcgcatgacatctgagggatccgactgccgatgtaagtgcatcatgcgaccgctgagtaaggacgcatgcagcagagttcggtcgggccgggctcgggtggaggatttctatactgtagagaccgtgtcttccggcacagactgcagatgctcctgcaccgcccctccttcatccttaaacccttgtgagaatgaatggaagatggaaaagctgaagaagcaggcaccggaactactgaaactgcagagcatggtggatcttctcgagggcacactttatagtatggatctcatgaaggtgcatgcatatgtccacaaggtcgcatcccagatgaatactctggaagaaagtattaaagcgaacttatcccgggagaatgaggtggtcaaggacagcgtcaggcaccttagcgaacagctgcggcattacgagaatcactccgcaatcatgctaggtatcaagaaagagctttctaggttgggactgcaactcttacaaaaggatgcagccgcagcccccgccacgcccgctacaggcactggctcaaaagcgcaggataccgcacggggaaaaggaaaggacatctctaagtatgggagcgtgcagaagagtttcgcggaccgggggctgccaaagccaccaaaagaaaaactgttacaggtggagaagctgagaaaggagagcggcaaaggttcatttcttcagccgacagctaagccccgggctctggcccagcagcaagccgtaataaggggtttcacctattacaaagcaggcaaacaggaggtaaccgaggccgtggccgataatactctgcaggggacctcttggctagagcagctcccaccaaaggttgagggacgatccaactcggcggagccaaatagtgccgaacaggacgaagctgagcctcggagtagcgaacgggtcgacctcgccagcggcacaccgacttctattccagctactaccactaccgcgacgacaacccctactcctactacctctcttttgcccacggagcccccaagcggaccagaggtgtcttcacaggggagggaagcttcttgtgaaggaactctgcgcgccgtggatcccccggtccggcatcactcatacgggaggcacgaaggggcctggatgaaggacccggcggcgcgggatgatagaatttacgtgaccaactattactacggcaattcccttgtagagtttcgcaatctggaaaacttcaagcagggacgctggtccaacatgtataagttgccctacaattggattgggactggacatgtggtctatcaaggggcattttactataacagagctttcaccaagaacatcatcaaatatgaccttcgccaacggttcgtcgcttcttgggcgttattgcccgacgtcgtgtatgaggacactaccccctggaagtggagaggccacagtgacattgactttgccgtggatgagtcaggcctttgggttatctacccagccgtggacgatcgcgacgaggctcagccagaggtcatcgtcctttctcgtctggatccgggagacttaagtgtccatagggagacaacatggaaaacccgccttcggagaaactcctatggtaactgcttcttggtttgtggaatactctacgctgttgacacatacaaccagcaggaagggcaggtggcgtatgctttcgatacacataccggaacggacgcacggccacagttgccctttctgaatgagcacgcctatactacacagattgattataatcccaaggagagagtgctctatgcttgggacaacggtcaccagctcacctacaccttacattttgtcgtgtag

SEQ ID NO: 5793 - DNA, 1641 bp, synthetic construct
  misc_feature 1..1641: note = source = /note="Description of Artificial Sequence: Synthetic coding sequence"
  source 1..1641: mol_type = other DNA
atgaaaaatcaggacaaaaaaaatggcgctgctaaacaatccaaccccaaatcgtcccctgggcagcccgaggctggccctgagggcgcacaggaacggccctctcaggcagcgccggcggtcgaggctgaaggccctggctctagtcaggcgcctagaaaacccgagggggcacaggcccgcacagcacaaagtggagccttacgcgatgtgtcagaggagctctcgagacagctcgaggacattctctcaacctactgcgttgataacaatcaggggggccccggcgaagatggcgcgcaaggcgagcccgcggaaccagaggatgcagagaaaagccgcacgtacgtcgcgcgaaacggagagcctgaacctacacctgttgtaaatggcgaaaaagaacccagtaagggagaccccaacacagaggagattagacagtctgacgaagtaggggacagggatcatcgacggccacaggagaagaaaaaagcgaaaggtctcggcaaagagatcaccctcctgatgcagaccctgaacacccttagcaccccagaagaaaagctggccgcattgtgcaaaaagtacgccgaactgctggaggagcaccgcaattctcaaaagcaaatgaaactcttacagaagaaacagtcccagttagtccaggagaaggatcaccttaggggcgaacactccaaggcggtgttggctaggagcaagctggagtctctgtgtcgagaactgcagaggcataaccggtctttgaaggaggagggtgtacaacgagcccgcgaggaagaggagaagcgcaaggaagtcactagtcactttcaggtaaccctaaacgacattcagctacagatggaacagcataatgagcgcaactccaaacttcgccaggagaacatggagctcgccgagcggctgaagaagttaatcgaacagtacgagctgcgcgaagaacatatcgataaggtcttcaaacataaagaccttcaacagcagctggtcgacgctaaactacagcaggcacaggagatgctgaaggaggctgaggagcgacaccaacgcgagaaagattttctgctcaaagaggcagtcgagagtcagcggatgtgtgaacttatgaagcaacaggagacccacctgaaacagcagctagccctgtataccgagaagttcgaggagttccagaataccctgtcaaagagcagtgaggtcttcactaccttcaaacaagaaatggagaaaatgactaaaaagatcaaaaagttagagaaggaaacaacaatgtatagatcccgctgggaaagctcaaacaaggcattgttggaaatggctgaagagaagacagtgcgcgataaggaactggaaggattgcaggtcaaaatacaaagactggagaaactttgccgcgccctgcaaaccgaacggaatgacctgaacaaaagagtccaggacctgtcggcgggcggccagggatcgctcactgattccggccctgagcgtaggcccgaggggcctggggcgcaggccccctcttctccgcgggtgacagaagccccctgttacccaggagccccttcaaccgaagccagcggccaaacaggtccccaggagcctacatccgcccgagcctag

SEQ ID NO: 5794 - DNA, 1641 bp, synthetic construct
  misc_feature 1..1641: note = source = /note="Description of Artificial Sequence: Synthetic coding sequence"
  source 1..1641: mol_type = other DNA
atgaaaaatcaggataaaaagaatggcgccgccaaacagagtaacccaaagtcttcaccaggccagccggaagctggccctgaaggggcacaagaacgccctagccaagctgcacctgcggttgaggccgaaggtccgggcagctctcaagctccccgcaagcctgaaggggcccaagcgagaacagcacagtctggcgctctgagagatgtgagtgaggagttgtcacgacagctggaagatatcctttctacatactgcgtggacaataatcagggtggacccggtgaagatggcgcacagggcgagcccgcagaaccagaggatgcggagaagtcacgtacatatgtggcaagaaacggagagccggaacccacccccgtcgtaaacggggagaaggaacctagcaagggggatcctaataccgaagaaatccgacagtcagatgaagtgggcgatcgagaccacaggaggcctcaggaaaaaaagaaagcaaaaggactaggaaaagaaattactctgctgatgcagactttaaacacactcagcaccccagaggagaaactcgccgctttgtgtaagaagtacgctgaactgctcgaagagcatagaaacagtcagaagcagatgaagcttttgcagaaaaaacagagtcagttagtgcaggagaaagaccacctccgaggcgagcattcaaaggccgtgctggcccggagcaaactggagagtctgtgtcgcgagttgcagaggcacaacaggtcgttaaaagaagaaggggtgcaacgcgcccgtgaagaggaggaaaaaaggaaggaggttacttcccacttccaggtcaccctaaatgacattcaattgcaaatggaacagcacaatgagcgcaatagcaaactcagacaggaaaacatggagctggcagaaaggctgaagaagttgattgaacagtatgaactcagggaggagcacatcgataaggtctttaaacacaaggatctgcagcaacagctggtcgatgctaagttgcagcaggcacaggagatgctcaaggaggcagaggagagacaccagcgagaaaaggattttttgttgaaagaagccgtagaatcccagagaatgtgcgagctcatgaaacagcaggagactcatctgaagcagcaactcgcattatatacagaaaagtttgaggagtttcagaatacactgagcaagagctcagaagtctttactaccttcaagcaagagatggagaaaatgaccaaaaagatcaaaaagctggagaaagagacgacaatgtatcggtcccgctgggagagctccaataaggccttgctggaaatggctgaggaaaaaacagttcgggataaagagcttgagggactccaggtgaaaattcagcggctggaaaagctttgccgagccctgcagaccgagaggaatgatcttaataagagagtgcaagatctgtcagcaggggggcaggggtctttgactgacagcggtcctgaacgaagacctgaagggccaggagcccaggcccccagttcacctagagtgacggaggcaccctgctaccccggagcgccgtccactgaagcctctggacagacgggtccccaggaaccaacctctgcacgcgcctag

SEQ ID NO: 5795 - DNA, 1392 bp, synthetic construct
  misc_feature 1..1392: note = source = /note="Description of Artificial Sequence: Synthetic coding sequence"
  source 1..1392: mol_type = other DNA
atgcatggttcttgctccttcctgatgctgctcttacctctcctattactgctggtggcaactaccggccccgtgggcgcgctgacagatgaagagaaaagacttatggttgagctgcataatttataccgggcacaggtctcacctactgcctcagacatgctgcacatgcggtgggatgaggagttggccgccttcgcaaaagcttatgcccgccagtgcgtgtgggggcacaacaaggaacggggcagacgcggtgaaaatctatttgctatcacagatgaggggatggacgtgcccctggccatggaggagtggcatcacgagcgggaacattacaatttgagcgcagcaacctgctcacctgggcagatgtgcgggcactacacacaagtggtctgggccaagaccgagaggattggctgcggcagtcacttctgtgagaaattgcagggtgtggaagaaaccaatattgagctgcttgtttgcaattatgagcctccaggtaatgttaaagggaaacgcccgtaccaggagggcactccctgcagccagtgtccaagtgggtaccattgcaagaattctctgtgcgagccgatcggctcccccgaggacgcacaggatctgccatatctcgtgaccgaggctcccagcttcagagcgaccgaagcgtcggactctaggaaaatggggacaccatcttctctggcgactggcattcccgcattcctggtgactgaggtttctgggagcctggcaaccaaagctctacccgctgtggaaacccaggctcctaccagccttgctactaaggatcctccttccatggctacagaagcccccccctgtgttacaaccgaggttccatcaattctggcagcgcacagcctgccttcactggacgaggaaccagtaacgttcccaaagagtacccacgttccaattcccaaaagcgctgacaaggttacagataaaacaaaggtacctagccggtctcctgaaaattcactagatccaaaaatgtctctcaccggagccagggaattgcttccccacgcccaagaggaggccgaagcagaggccgagctgcccccgtctagcgaagtcctagcttctgtctttcctgcacaggacaagcccggcgagctgcaggccactctggaccatacaggccacacatccagcaaatcacttccaaacttcccgaatactagtgccactgcgaatgccactggtggaagggcccttgccctgcagtcctcgctgccaggggcagaaggcccagataagccatcagtagtttccggactgaattccggcccaggacatgtgtgggggccattgctgggtctgctgctattgccaccactggtgctggcaggtatcttctag

SEQ ID NO: 5796 - DNA, 459 bp, synthetic construct
  misc_feature 1..459: note = source = /note="Description of Artificial Sequence: Synthetic coding sequence"
  source 1..459: mol_type = other DNA
atgatgttgccccagtggctgctgctcttgtttttactcttcttctttctgttccttctgacgcgaggtagcctttctccaacgaagtacaatctgctggaactcaaggaatcatgtatccgaaaccaggactgcgaaacaggatgctgccagcgagcccccgataattgcgagagccactgcgctgaaaaaggcagcgaagggtctctctgccagactcaggtcttcttcggccagtatcgcgcctgcccatgcctgagaaatcttacttgcatctattccaaaaacgaaaagtggctgagcatagcttatggtcgatgccagaaaataggcaggcagaaactggctaaaaagatgtttcttgttctcccgccttcctgttgtctgctccttcttcatctgttaagcagtttacctcgagcattatgttccccatgtagcccagagcctcctccctag

SEQ ID NO: 5797 - DNA, 366 bp, synthetic construct
  misc_feature 1..366: note = source = /note="Description of Artificial Sequence: Synthetic coding sequence"
  source 1..366: mol_type = other DNA
atgatgttgccgcagtggttgttactgctcttcctcttattctttttcctttttcttttgacacgggggtcgctttcacctaccaaatacaatctgctggagttgaaagaatcttgcatccgcaatcaggactgcgagactgggtgttgtcagcgcgcacccgacaactgcgaatctcactgtgcggaaaaggggtcagagggttcgttgtgccagacccaggtttttttcggacagtatcgcgcctgcccatgcctgagaaacctcacttgcatctatagtaagaatgagaaatggttgtccattgcttatggtagatgccaaaaaatcggacggcaaaagctggcaaagaagatgttcttttag

SEQ ID NO: 5798 - DNA, 1122 bp, synthetic construct
  misc_feature 1..1122: note = source = /note="Description of Artificial Sequence: Synthetic coding sequence"
  source 1..1122: mol_type = other DNA
atgcgcctcctagcatggttgatattcctcgcaaactggggtggagcgagagccgaacccggtaagttttggcacattgcggatctgcatttggatcccgactacaaagtttcaaaggatccttttcaagtgtgcccaagcgccgggagccagccagtgcccgacgcaggaccatggggagattatttgtgcgattcaccatgggctttgattaactcgtctatttatgcaatgaaagaaatcgagcccgagccggatttcattctttggacaggcgatgatacaccacacgtacctgatgaaaaactcggtgaggctgccgtcctggagattgtcgaacggctgacaaaacttattagggaagtatttccagacaccaaggtttatgccgcattaggcaaccacgactttcatccgaaaaatcaattccccgcaggttctaacaacatttacaatcagatcgcagaactgtggaaaccatggctttctaacgagtctatcgcgctgtttaaaaagggagcattctattgcgagaagttacctggtcccagcggggcaggacgaatagtggtactgaatacaaatctgtactacacttccaatgcccttacagccgatatggcggatccaggacagcagttccagtggctggaggatgtgctgacagatgcgtccaaggctggtgacatggtatatatcgtaggccacgtcccccccggtttctttgagaaaacccagaacaaagcctggttccgtgagggatttaacgagaaatatctcaaggttgtcagaaagcaccatcgcgtgattgctggtcagttcttcggacatcatcatacggatagctttagaatgctgtatgacgacgcgggggtccctatcagcgccatgtttataacccctggcgtaaccccttggaaaacaaccttgcctggagtggtgaatggcgccaacaatcccgccattagggtatttgagtacgatcgggccaccttgagtttgaaggtccggagccccgctgaagcacgcggtggcggctgggagggccttaagtgtatcacaactttccctcactcacagcttatacacctgccactcaccacagaacctcaggagggctag

SEQ ID NO: 5799 - DNA, 810 bp, synthetic construct
  misc_feature 1..810: note = source = /note="Description of Artificial Sequence: Synthetic coding sequence"
  source 1..810: mol_type = other DNA
atgagacttctcgcctggctcatctttttggctaattgggggggagctagagcagaacccgaagaagctcaggggccctgtgcccaggagaagggcaagggccccccgccaacatccatcctagcgtcgctagctcccggcttggaggccgggaagttctggcatatcgccgatctgcacttagaccctgattacaaagtatccaaggatccctttcaagtctgcccttcagccggaagccaacccgtgccagacgccgggccctggggggattatctctgcgacagtccgtgggctctcatcaacagttcaatttatgctatgaaagagattgagcctgagcctgacttcattctgtggaccggggacgacacccctcatgtgcctgatgagaaactgggcgaagcagcagtgcttgaaattgttgaacgtctcaccaaacttatcagagaggtctttccggacactaaggtctatgctgcactgggcaaccatgattttcaccccaaaaaccaatttcctgccggtagcaacaacatttataaccagatcgcagaactctggaaaccttggctttctaacgaatcaatcgctttgtttaagaagggggccttctattgcgaaaagctgccgggtccctccggggccggacgaatcgttgtgctgaacacaaacttgtattacacgagtaacgctctgaccgccgatatggcggaccccggtcagcagtttcagtggttagaggatgttctgacggatgcaagcaaggctggagatatggtgtatatcgtgggtcacgtccccccatag

SEQ ID NO: 5800 - DNA, 1368 bp, synthetic construct
  misc_feature 1..1368: note = source = /note="Description of Artificial Sequence: Synthetic coding sequence"
  source 1..1368: mol_type = other DNA
atgcggcttctcgcatggctgatctttctggccaattggggaggagcccgggccgaacctggtaagttctggcacattgcagatctgcatttggatcccgattacaaagttagtaaagatccctttcaggtttgtccctccgcgggatcacagcctgtgcccgacgcgggcccttggggagactacctgtgcgacagcccatgggccttgatcaacagcagcatctacgctatgaaagagatcgaacctgagcccgatttcatcctgtggaccggggatgatactccccatgttcctgacgagaagttaggcgaggccgccgtcctggaaattgtcgagcgattgacaaagcttatcagggaggtcttccccgataccaaagtgtacgctgcccttggcaaccacgactttcaccctaaaaatcagtttcccgcaggttcgaacaacatctacaatcagattgccgagctctggaaaccttggctgtcaaacgaatcaatagctctgtttaagaaaggagcattttattgcgaaaaattgccaggtccttccggcgcaggcaggatagtcgttctcaacacgaacctttattatacttctaacgccctgactgccgacatggctgaccccggtcaacagtttcagtggcttgaagatgttcttactgatgctagcaaggccggagacatggtgtacatcgtagggcacgtgccccctgggttctttgagaagacacagaacaaagcctggttccgggaggggttcaacgaaaagtacttgaaggtggtgcgcaaacaccaccgcgtgatcgccggccagttcttcggtcaccaccatacggactctttccgcatgctgtacgatgatgccggcgtaccaatcagcgccatgttcattacccccggcgttactccatggaaaacaacactgcccggcgtcgtcaacggggcaaataacccggccatccgcgtcttcgagtacgaccgcgccacactgtccctcaaagatatggttacttattttatgaatctgtcccaggctaacgcacagggcacaccaaggtgggaactcgaatatcagttgaccgaggcctacggagtgccagatgcttcggcccatagtatgcatacagtgctggatcgtatagccggagaccagagtacactgcagaggtactacgtgtacaattctgtctcctattctgccggcgtgtgcgacgaggcctgttccatgcagcatgtatgcgctatgaggcaagtcgacatcgacgcgtacactacctgcctctatgcaagtggcactactcctgttccccaacttcccctcctgctgatggctctactcggcctctgcacccttgttctgtag

SEQ ID NO: 5801 - DNA, 867 bp, synthetic construct
  misc_feature 1..867: note = source = /note="Description of Artificial Sequence: Synthetic coding sequence"
  source 1..867: mol_type = other DNA
atggcccttgcgccgccacctcggggcttgtggcaggcaaaagacattagcccgattgttaaggccgcccggcgagatggggaattactgttatctgcacaattagattctgaggagcgcgatccaggcgtaccgagaccaagtccttacgccccctacattcttgtgtacgcaaatgacttagctatttcagaacccaatagcgtggcagtgacactgcagcggtatgacccgttccccgccggggatccggagcccagggccgcccccaataatagtgcagatcctagggtccggcgcgccgctcaggcgacgggaccactgcaggataacgaattgcctggcctcgatgagcgccccccacgcgctcatgcccagcatttccacaagcaccaactgtggccctccccttttagggcactcaagcctcggcccgggcgcaaggaccgtcggaagaaaggacaggaggtgtttatggccgcttcacaggtgctggattttgacgagaagactatgcagaaagctcggcgaaaacagtgggatgagccgagggtgtgcagccgccggtaccttaaagtcgatttcgcggacatcggatggaacgagtggataatctcccctaagtcatttgacgcttactactgcgctggggcctgtgagttcccgatgccaaaaattgtgaggccttccaaccacgccaccatacagagtatcgtccgggccgttggaatcattcccggtattcccgaaccttgttgcgttcctgataagatgaattcccttggagtgctgttcctcgacgaaaatagaaatgtcgtactaaaggtgtaccccaatatgtcagtggatacatgtgcgtgccggtag

SEQ ID NO: 5802 - DNA, 1626 bp, synthetic construct
  misc_feature 1..1626: note = source = /note="Description of Artificial Sequence: Synthetic coding sequence"
  source 1..1626: mol_type = other DNA
atgccatttaggcttctcattcctctgggactgctgtgcgcactcctgccccagcaccatggcgcgcctggcccagatggtagtgccccagaccccgcgcattattcttttagcctgaccctcattgacgcactagacaccctgctcatactcggcaacgtgtcagagttccagcgggtggtagaagtgcttcaagatagtgtggactttgatatagatgtgaacgcatcagtcttcgagaccaacatcagggtggtcggtggtctgctgtccgcccacctcctgtccaagaaagccggagtagaggtggaggcaggctggccctgctccggacccttgctccggatggcggaagaggccgcccgcaagctgctacccgccttccaaacgcccacaggtatgccttatggaaccgtcaatctccttcacggagtgaacccgggggagactcccgtcacctgtactgctggaatcggtacatttatagtcgaattcgcgaccctctcatcgctgactggcgacccagtatttgaagatgtagctcgtgtcgccctgatgcggttgtgggaatccagatcagatattggattagtcggcaaccatatcgacgtcctgaccgggaagtgggtcgctcaggatgccgggataggggcgggcgttgacagttatttcgagtacttagttaaaggggctatccttctacaggataagaaattaatggccatgtttttagaatacaacaaggccatcagaaactatacacggttcgacgactggtatctctgggtgcaaatgtacaaaggtacagtttccatgcctgtgtttcaatctctggaagcttattggcccggactgcagtctctaatcggcgatatagataatgcaatgcgaaccttccttaattattacaccgtttggaaacagtttggaggcctacctgaattttacaacatacctcaaggttataccgtagaaaagagagagggctaccctttgaggccggagctgatcgaaagcgctatgtatttgtatagagccaccggtgaccccaccctcttagaactggggagggacgctgtggagtctattgagaagatatccaaagtggaatgcggcttcgcaacaataaaagatttgagagatcacaagctggataatcgcatggagtccttcttcctggcggaaactgtgaaatatttatacctgctatttgacccgactaatttcatacacaataatgggtcaacatttgatgccgtgatcactccctacggggaatgcatcctaggcgccggtggttatatattcaatactgaagcacaccccattgacccagccgctttgcactgttgtcagagattgaaggaagagcaatgggaagtggaggacctcatgcgagaattttattccctcaaaagatctagatccaaatttcaaaaaaacacggtatcgagtggcccatgggaacctccagcaagacccggcacactcttttctcccgagaaccatgatcaagccagagagcgcaaaccagctaagcaaaaggttcctttgttgtcatgtcccagccagccgttcaccagcaaactggcccttctgggtcaagtgtttcttgattcatcatag

SEQ ID NO: 5803 - DNA, 1737 bp, synthetic construct
  misc_feature 1..1737: note = source = /note="Description of Artificial Sequence: Synthetic coding sequence"
  source 1..1737: mol_type = other DNA
atgccattccggctcctcatacctctgggactcttgtgcgctttgctgccacagcatcacggcgcgcccggtcctgatggaagcgccccagacccagcacactacagagagcgggtcaaggcgatgttttaccacgcgtacgactcataccttgaaaacgcgttcccattcgatgaactccgccccctgacctgcgatggccatgatacatggggctcattcagcctcaccctgattgacgctcttgatacactacttattctaggcaacgtgagcgaattccaaagggttgtggaggttctccaggattctgtcgacttcgatattgatgtgaatgcgagtgtgtttgagactaatatccgcgttgtgggaggactcttgagtgcccacctcctttctaagaaggccggggtcgaagtcgaagcgggttggccctgctccggaccactcctgcgaatggccgaggaggcggctcgcaagctcctgccagcttttcagacccccaccgggatgccctacggcacagtcaacttactccacggggttaaccccggtgaaacacccgtgacgtgcacagcagggattggcacttttatcgtggaattcgccacactgtcttctctgaccggtgatcctgtatttgaagacgtggcaagggtggccctgatgagactctgggagtctaggtctgacatcggcctggttggcaaccacatagacgtactaaccggaaagtgggtggcccaggacgcgggtatcggcgctggcgtcgattcttactttgaataccttgtcaagggagccattctcctccaggacaaaaagctcatggccatgttcctcgaatataataaagccattcgcaattatacccgctttgatgattggtatttgtgggtgcagatgtacaagggtaccgtctccatgcccgtctttcaatctctggaagcctactggcctgggctgcagagcctaattggggacattgacaacgccatgcgtacttttcttaattactataccgtctggaagcagttcggtggactccctgaattctacaacattccgcagggatacactgtcgagaagcgcgaaggctatcctttgcgaccagagctaatagagtccgccatgtacctatatcgcgccacgggggaccctaccctgctcgaactcgggcgcgacgcagtggagtcaatcgagaaaatctccaaagtggaatgtgggtttgccactatcaaggacctccgcgaccataaactcgacaaccgtatggagagctttttcttggcagagaccgtaaagtacctgtatttgcttttcgaccctactaacttcatacataacaacggcagtactttcgacgccgtaataaccccttatggtgaatgtatcctgggcgcaggcggctacatattcaacaccgaggcacatccaatagacccagcagctctgcactgttgtcagaggctgaaagaagagcaatgggaggtggaggatctcatgagggagttctattctcttaaacggagtagatctaagtttcagaagaatacagtctcctctggaccctgggagcctcccgcgcgccctggcacccttttttctcccgagaaccacgaccaggccagagagagaaagcctgccaagcaaaaagtgccacttttatcctgtccctctcagccatttacatccaagttggcgttgctgggacaggtgttccttgattccagctag

SEQ ID NO: 5804 - DNA, 495 bp, synthetic construct
  misc_feature 1..495: note = source = /note="Description of Artificial Sequence: Synthetic coding sequence"
  source 1..495: mol_type = other DNA
atgaggagctgctatgttgctcaggctggtttaaagttaccagggagcagcgatcctcctgccagcgcatctcagagtacacgcattactgccagcggctacggccctccgtcttcccgaccatcaagtagagtggtgaatggcgaggacgccgtcccatactcctggccatggcaggtcagtctgcaatacgagaaaagcgggtctttttaccacacctgtggtggtagcctgattgctcctgactgggtggtgacggccgggcattgtatctcaagcagccgtacgtatcaggttgtgcttggtgagtacgatcgggccgtgaaagagggtcccgaacaagtgatccctattaatagtggtgatctgttcgtgcatcccctttggaatcgtagctgcgtagcctgcggcaatgatattgcattgatcaagttgtcaaggtctgcacaactcggcgatgccgttcagctcgctagtctccccccggcagggtag

SEQ ID NO: 5805 - DNA, 3663 bp, synthetic construct
  misc_feature 1..3663: note = source = /note="Description of Artificial Sequence: Synthetic coding sequence"
  source 1..3663: mol_type = other DNA
atgcccgggttactcaactggattaccggggcagcgctgcctctgaccgcatccgatgtcacttcttgcgtgtcagggtacgcactgggccttaccgcctctcttacatacgggaatctggaggcccaaccgttccaggggctgtttgtttaccctctggatgaatgcactacagtaattgggtttgaggccgttattgccgatcgcgtggtcactgtgcagatcaaagataaggctaaactcgaatctgggcacttcgacgcatcacacgtcaggtccccaacagtgacagggaatattttacaggacggagtatcaatcgctccgcactcctgtacccccggaaaggttacactcgacgaggacctggaaagaatactgtttgtcgctaaccttgggacaattgctcccatggagaatgtcactatctttatctcaacaagttccgagcttccaactctcccgtcgggagccgtgagagttttgctgcccgccgtgtgtgcacccaccgttccacagttctgtacgaaatctaccggcaccagcaaccagcaggcccaagggaaagatagacactgctttggggcctgggccccaggaagttggaacaaattgtgcttggctaccttattgaacactgaggtgtctaaccccatggaatacgaattcaacttccagctggagattcgcggcccctgtctcctcgccggggtggagagcccaacccacgagatccgggcagacgctgccccatcagctcgcagcgccaaatctattattatcaccctggctaataagcatacctttgaccgcccagtagagattctgattcatccgtccgagccacacatgcctcacgtgctgatcgagaagggtgatatgaccctcggagagtttgatcaacacctgaaaggacgcaccgacttcatcaagggtatgaagaagaagtctagagctgagcgcaaaaccgagatcattcgcaagagactgcataaggatattccacatcatagcgtgatcatgctgaacttttgccccgaccttcagagcgtccagccatgtttaaggaaagcacacggcgaattcatattcctgatagaccgaagctcctctatgtctggcattagtatgcatcgggtgaaggatgccatgctcgtagcgttaaagagcctgatgcctgcctgtctgtttaatatcatcggtttcggctccacctttaaaagtctcttcccaagcagtcaaacatattctgaagacagcctcgccatggcctgcgacgacatccagagaatgaaggctgatatgggcggcaccaacattctctcccctctgaagtgggtgatccggcaacccgtgcatcgcggacatcctcggttactgttcgtcatcacagacggcgcagtgaacaataccggcaaagtcctggagcttgtgcggaaccacgctttctcgacaagatgttactccttcggaatcggccccaacgtctgccaccgccttgttaagggtctggccagtgtcagcgagggttctgccgaactccttatggaaggcgagagactccagccaaagatggtgaaatctcttaaaaaggccatggcccctgtgctgtccgatgtgaccgtggagtggatcttcccggagactactgaggtgcttgtcagtccggtaagcgcctcctctctctttcccggcgaaagactcgtgggatacggaatcgtttgcgacgcctcattgcatatttcgaaccctcgatcagacaagcgtcgtcgatactcaatgctacattctcaggagtctgggtcatcagtattttatcactcccaggatgacgggcccggtctggaggggggcgattgcgccaaaaattcaggagcaccctttatcctcggccaagccaaaaatgcaagactggcttctggagacagcactaccaagcatgacctcaatctgtcacagagaagaagagcatactccaccaatcagataaccaaccataagccgctgccccgagcaactatggcgtctgaccccatgcctgccgccaagcggtatcctttacgaaaggccagactacaggatctgacaaatcaaacgtccctcgacgtccagcggtggcagatcgatctgcagccactcctcaattccggccaggatttgaaccagggtccgaagcttcgggggcctggagcccgcagacccagcttactgccccagggatgccagcccttcctgccgtgggggcaggagacccaagcttggagccccgtgcgggagcggacatcagattccaggtccccaggggacttggagcccagccatcacccctctgcgtttgagaccgagacctctagcgactgggatccccctgcagagtcacaagaaagggcttcaccgagtcgacccgcaaccccagcccctgttctagggaaggccctcgtgaagggtctgcatgactcccaaaggctgcagtgggaagtctccttcgagcttggaacccctggtccagagcgcggcggggcacaggacgcagatctatggtcagaaacatttcatcacctagccgcccgggctatcattcgcgacttcgaacagctggctgaaagagagggagagatcgaacaggggagcaatcggagatatcaggtgtcagccctgcacacaagcaaagcttgcaacatcatttcgaagtacaccgcctttgttcccgtcgacgtctccaaaagtagatacctgccgacagttgtcgaataccctaattctgccgccttgcgaatgttgggatcaagggctctggcccagcaatggcgcggcacctcttcagggtttggtcgtccccaaactatgctgggcgaagacagtgcccccggaaatggaaagttccaagcactaaacatggaagcaagccctacagccctgttctctgaagcaaggtcaccaggccgggaaaaacatggggcctccgaggggcctcaacgaagccttgcaacaaacaccctcagctctatgaaggcctctgaaaatctctttggaagctggttgaaccttaataagagcagactcctcacccgggccgccaaaggctttctcagtaaacccctgattaaagccgtggagagcacttctggaaatcaatcctttgattatatccccctggtttccctgcagctcgcttcaggggcctttttattgaacgaggcattctgtgaagccactcatatccctatggagaagctgaagtggacaagtccctttacatgtcatagagtttccttaactacaaggccctccgaaagtaagactcctagcccacagttgtgtacatcatcgccgccccggcacccttcgtgtgattccttcagcttagagccattggccaaagggaagctgggattggaaccccgtgccgtggtggagcacaccgggaagctttgggccacagttgtcggcctggcctggctggaacactcgagtgccagctacttcacagagtgggagctggttgccgcaaaggctaactcctggcttgagcagcaagaagtccccgaagggcgcactcagggcactctgaaagcagctgccaggcagcttttcgttttgttaaggcactgggatgagaaccttgagtttaacatgctgtgctacaaccctaactacgtgtag

SEQ ID NO: 5806 - DNA, 3051 bp, synthetic construct
  misc_feature 1..3051: note = source = /note="Description of Artificial Sequence: Synthetic coding sequence"
  source 1..3051: mol_type = other DNA
atgcctggactgctgaactggatcaccggagccgcactgccgctgaccgcaagtgacgttacctcctgcgtgtcaggttatgccctgggcctgacagctagtttaacttacggcaacctcgaagcgcagcctttccagggactgtttgtctaccctttagatgaatgtaccactgttatcgggtttgaggccgtgatcgcagatcgagtggtgactgttcagatcaaggataaagccaagctggaaagtgggcactttgatgcctcacatgtcaggtcccccacagttactggtaatattctacaggatggagtgtctattgcgccccatagttgcacccctgggaaggtgacacttgacgaagatctggaacggattttgtttgtcgccaatttaggtacaattgcccccatggagaatgtcaccattttcatctcaaccagttctgagctgcccactctccctagcggggcagtcagggtcctcttaccggctgtgtgtgccccaacggtgccccaattttgtacgaaaagcacaggaacttctaatcaacaagcccaggggaaagaccggcactgtttcggagcttgggctccgggctcctggaacaaactctgcctggcaaccctgctaaacaccgaagtcagcaatcccatggaatacgaatttaactttcagctcgaaattcgtggcccatgtttgctcgctggagttgagtcccccacccacgagatacgggccgacgcggcaccttcagctcggagcgccaagagtatcattatcacgctagccaataagcatactttcgatcggcctgtggagatcctcattcacccctccgagccacacatgcctcatgtgctaatagagaaaggcgacatgactctgggcgaattcgatcaacacctcaaaggccgtactgacttcatcaagggaatgaagaaaaaaagccgcgcagagagaaagaccgagattatcagaaagagactgcataaggatatccctcaccacagcgtcataatgctaaacttctgtcccgaccttcagtcggtgcaaccctgtctcaggaaagcacacggtgagttcatttttctcattgaccggagcagcagcatgagcggcatttcgatgcatagggtgaaggacgccatgctagttgccttgaaaagcctgatgcccgcttgcctgttcaatattatcggattcgggagcacatttaagagcttatttccatcttctcaaacctattccgaagattctctggccatggcgtgcgacgacatacagagaatgaaggccgacatgggcggaaccaacatcctctctccactgaagtgggtgatcagacaacctgtgcacagagggcaccccaggctgctgtttgtaatcactgatggagctgtgaacaataccgggaaagttttggagctggtacggaaccatgccttctctacccgctgctacagtttcggtattggtcccaacgtctgtcacagactggtgaagggactggcctctgtgtctgagggctcagctgagctgttgatggaaggagaacgattgcaaccaaagatggtaaaatcgctgaagaaagccatggcccccgtgctgagcgatgtcacagttgagtggatatttcctgagactaccgaagtcctggtatcccctgtaagcgctagcagccttttcccgggcgagagactagttggatacgggattgtgtgtgatgccagtttgcacatttccaatccaagaagtgacaagcgccgccgctattccatgctgcattctcaggagtccggtagcagtgtattttaccacagtcaggacgacggaccaggcttggaggggggggactgtgctaagaatagcggggccccttttattctgggccaagcgaagaacgcccggctggcctccggcgatagcacaacaaagcacgacctcaatttgtcacagagacggcgggcatacagtacgaatcaaatcacaaaccataagcccctgccccgtgccacaatggcctctgacccgatgccagccgccaagcgctatcctctgcgaaaggccagactccaagatttgaccaatcagacctccttggatgttcaacgttggcaaatcgacttgcagccccttctgaattcgggacaggatctcaaccaggggcccaaacttcgcggtcctggggcccggagacctagcttattgcctcaggggtgtcaaccattccttccttgggggcaggagacccaagcatggtccccggtgcgggagaggacatcagactcaaggtcccccggtgatctcgaaccctcacatcaccccagcgccttcgaaactgagactagctccgattgggatccgccagccgagtctcaggagcgtgcgagcccttctcggccggccaccccagccccagtactcggcaaagcgctggtcaaaggtctgcacgattcccaacgcctgcagtgggaggtctcttttgagctggggacacccggacctgaacgtgggggtgcccaagatgccgatctctggtctgaaaccttccatcaccttgccgctagagcaatcatcagagactttgagcagttggcagaaagagagggggagatcgaacaaggttcaaacagacgctaccaggtatccgccctacacacctctaaggcctgtaacataatctctaagtacacggcctttgtgcctgttgatgtatcaaagagcagatatttgccaaccgttgtcgaataccctaactcagccgctctgcgcatgctgggctcacgagctctcgctcagcagtggcgtggaacttcgtctggcttcggccgccctcaaaccatgctcggagaagactctgcccccggtaatggacctcggaaatgttcgcagaccctgatgggtttcaaaacgaagaccgagactgagcattctgtaaggggatggaaaccgcggggcgcgctgcaaaaccagtctgtccttagcaccagttggtcccactggccccccaaaccacggcggacatcttccacaccagagccttcatag

SEQ ID NO: 5807 - DNA, 3663 bp, synthetic construct
  misc_feature 1..3663: note = source = /note="Description of Artificial Sequence: Synthetic coding sequence"
  source 1..3663: mol_type = other DNA
atgcccggcctgctgaattggatcaccggcgcagctctgccgttgacggcctccgatgtcacttcatgcgtgagtggctatgccctgggactaactgcttcactcacatacgggaatctggaggcccaacctttccaagggctctttgtttaccccctggacgagtgtaccaccgttattggtttcgaggcagttatcgccgacagggtcgtgaccgtgcagatcaaggacaaagccaaactggagtcggggcacttcgacgctagccacgtcaggtcccccaccgttacaggaaatattctccaagatggagtgtctattgccccacacagttgtacccctggcaaagtgaccctcgacgaggatctcgagcggatcctcttcgtggcgaatctggggacaatagcccccatggagaacgtgacaatcttcataagcacatcttccgagctgcccaccctgcctagtggcgccgtgcgggtattgcttccggccgtgtgcgctcccacagtgcctcaattctgtacaaaaagcaccggaacctcaaaccaacaggcccaaggcaaagaccgccattgctttggcgcttgggcacctggtagctggaacaagctgtgcctggctaccctactgaacacagaagtgagcaatcccatggaatacgagtttaactttcagttggaaatccgtggaccttgcctactcgccggcgtcgaatccccaacacacgaaattcgcgctgatgctgcgccctccgcaagaagtgcaaagtcaattattattacacttgccaacaagcacaccttcgatagacctgtggagatactcatacatcccagcgagcctcatatgcctcacgtcttgatcgaaaagggcgatatgacacttggcgaatttgaccagcacctaaaaggccggacagatttcataaagggaatgaagaagaaaagccgggcggagcgcaagacagagattatacggaaaaggctccataaggatatccctcaccacagcgttattatgctgaatttttgccccgacctgcaaagcgtccagccttgcttgcgcaaggcccacggcgaatttatttttttgattgaccggagctcttccatgtctggtatctctatgcacagggtgaaggatgccatgctggtcgccctcaaatctttaatgcccgcctgcttattcaatattattggattcgggtcaacgttcaagtctctgttcccatcttcgcagacgtacagtgaggacagccttgctatggcttgtgatgacattcagagaatgaaggctgacatgggtggaactaatattttatctccactaaagtgggtcatccggcagcctgtgcaccgaggccatcctaggctgttgttcgtcatcacagacggcgctgtcaataacactgggaaagtgcttgagctcgtccgtaaccacgctttcagcactcggtgctacagttttgggattgggccaaacgtgtgccacagattggttaaaggcctggcatcagtctctgaaggaagcgccgagcttttgatggaaggggaaaggctccaaccaaagatggtgaaaagccttaaaaaggccatggccccagtcctctccgacgttactgtggagtggatcttcccggaaaccaccgaggtactcgtctcgccggtgagcgcgtctagtctatttcctggcgagcggctcgtggggtatggtatcgtctgtgacgccagcctgcacatctcaaaccccaggtccgacaagcgtaggaggtatagtatgcttcacagccaggagtccggctcctccgtgttctaccattcacaggacgatggcccgggactggagggaggcgactgtgctaaaaacagcggtgccccctttatccttggccaagctaagaatgctagactggcgtcgggagatagcactacaaaacatgatctgaacctgtcccagcggcggagagcctactcgactaatcagattaccaatcacaaaccactccctcgcgctacaatggctagtgaccccatgcccgccgccaaacgatatcctctaaggaaagcccgacttcaggacctgacgaatcagacctcattagacgtacagagatggcagatcgacctgcaaccattgctgaatagcggccaggacctaaaccaggggcccaaactgagaggcccaggagcccggcgcccttcccttttgccccagggatgccaaccctttttgccatggggccaggaaacccaggcatggtcaccggtccgggagagaacttcagacagcagatctcccggcgacctcgagccttcccaccacccaagtgccttcgagaccgaaacatcaagcgactgggatccacctgccgaatctcaagagcgcgcctccccaagccggcctgcaacgcccgcaccagtcctgggcaaagccttggtgaaagggctgcacgacagccagcggctccagtgggaggtctcattcgaattaggaacacccggacctgaacgtggcggagctcaagatgctgacctgtggagcgaaacatttcaccatttagcagcaagggcaatcattcgcgacttcgagcagctggccgaaagagagggcgaaatagagcagggttccaatagacggtatcaggtatccgcactgcacaccagtaaagcgtgtaacattatttcaaagtatacagccttcgttcctgtggatgtgagtaagtccaggtacttgccaacagtggtggaatatccgaatagtgccgctctccgaatgctcggatcgcgggccctcgctcagcagtggagaggcacgtcctccggattcggcagaccccaaaccatgttaggagaagactcagctcctggcaatggcaaatttcaagcgctaaacatggaagctagccctacagctctctttagcgaggcacggtcgcctggacgggagaagcacggcgccagtgaaggtccacaacgctccctcgcaactaacaccctaagctctatgaaagcatctgagaacctcttcggctcctggctaaacctgaataaaagtcggctactgacccgcgctgccaagggcttcttgtcgaaacctctgatcaaagctgttgagagtacgtcaggtaaccagagtttcgactatatcccactcgtgagcttgcagctagcatccggggccttcctgttaaacgaagctttctgtgaagccacccacatccctatggagaagcttaaatggacatctccatttacctgccaccgcgtgagtctgacaactcgcccctccgaatccaagacaccctcgcctcagctgtgtacatcaagcccaccaaggcatccatcatgcgattcatttagtcttgaaccactagctaaagggaaactcggtttggaaccacgcgcagtagtcgagcatacagggaagctgtgggcgaccgtcgtcggattggcctggctagagcacagctctgcatcttatttcaccgagtgggaactggtcgctgctaaggctaactcctggctcgaacagcaggaagtgcctgagggccggacacagggaacactgaaggctgctgctcgacagctattcgtgctgctgcgtcactgggatgagaacttagagttcaatatgctctgctacaaccctaactatgtgtag

SEQ ID NO: 5808 - DNA, 5235 bp, synthetic construct
  misc_feature 1..5235: note = source = /note="Description of Artificial Sequence: Synthetic coding sequence"
  source 1..5235: mol_type = other DNA
atgagactgctgtggggtttaatatgggccagttccttctttactctgtccctgcaaaaaccgcggcttctcctgtttagccctagcgtcgtgcacctgggagtacccctttctgtgggagttcaactgcaagacgtccctaggggccaagtagtgaaaggatctgttttcctaaggaacccctcccggaacaatgtgccatgtagccctaaggttgattttaccctgagctccgaaagggatttcgcgttgctgagtctccaagtacctctgaaagacgcaaaaagctgcggtttacaccagttgctgcgggggccagaggtacagcttgtcgcacattctccttggctaaaagactctctttctaggaccacaaatatccagggcataaatctgctgtttagttctcgccgaggccacctgttccttcagacagaccagcctatttacaatccaggccagcgggtccgctaccgcgtgtttgcgctggaccagaaaatgagaccctctactgatacgatcaccgtgatggtagagaactcccacgggctccgcgtgcgaaaaaaggaagtttacatgcctagctcaatcttccaggacgatttcgtgattcctgacatttcagagccaggtacttggaaaattagtgcaaggtttagcgacggactggagtctaactcatctacacagtttgaggttaagaagtatgtgctgccgaacttcgaggtgaagattacccccggaaagccctatatcctgaccgtgcctggacaccttgatgaaatgcaacttgacattcaggctcggtatatatatggaaaacctgtccagggtgtagcatatgtccgtttcggtcttctggatgaggacggaaaaaagacttttttccggggccttgagtcccaaacaaaactcgtaaacggacaaagccatatttccctctctaaagcggaattccaggatgcattggaaaaattaaacatggggattacagatctacagggcttaaggctgtacgttgctgctgccattattgagtacccggggggtgaaatggaagaggctgagctgacaagttggtactttgtctcatcacccttttctcttgacctttcgaaaaccaagagacatctcgtgccaggagccccatttcttctgcaggccttggtgagagagatgtcaggatcgccagcaagtggtattccagttaaagtttcagccaccgtctctagccccggatccgtccccgaagtccaggacatccagcaaaacactgacggatccggtcaggtctcgattcccataatcatcccccaaaccatcagcgagttgcagctgtcggtcagtgccgggagcccccacccagctatagctcgtctcacggtggcagcaccccctagcggcggacccggattcctctccattgaaagaccggatagtcgccctccgagggttggagacacgcttaatttgaacctgagggccgtgggatccggagcaactttcagccattactattacatgatcctatcacggggccagatcgtgttcatgaacagggaaccaaagaggacactcacaagcgtgagcgtcttcgttgaccatcacctggcccctagcttttactttgtggcgttctactatcacggcgaccatcccgtggcaaacagcttaagagtggatgtccaagccggagcctgtgaaggtaaattggaattatcagtggatggtgccaagcagtacagaaacggggaaagtgttaaattacacctagagaccgactctttggccctggtggccctgggggcactggacactgccttatacgctgcaggaagtaaatcccataagccactcaacatgggaaaggtgttcgaggccatgaattcctacgatttggggtgtggacccgggggaggcgacagcgccctccaggtttttcaagccgcaggcttggcgttttcagatggagaccagtggactttgagccgtaaacgcctttcgtgccctaaggaaaagacaacaagaaagaaacgcaacgtcaactttcagaaggctattaacgagaagttaggccagtacgccagtccgaccgccaaacggtgttgtcaggacggcgttacaagattgcctatgatgcggagctgtgagcagagagccgcacgtgtccagcaaccagattgcagggagccatttctgtcttgctgtcagttcgccgaaagcctgaggaagaagtcgcgcgacaaaggccaggctggcctacaaagagcactcgaaattctgcaagaagaggatcttatcgacgaagacgacattccagtcaggtccttctttccagagaactggctgtggagagtcgaaacagtcgacaggttccagatcctgactctctggctgccggatagcctcacaacctgggaaatccatggcctctccctgagtaaaaccaagggtctctgcgttgctactcctgttcaactgcgggttttccgcgaatttcacttacaccttcggttgcctatgagcgtcagacggttcgaacaattggagctacggccagttctgtataactaccttgacaaaaacttaacagtgagcgtccacgtctctcccgtggagggtctctgcttggcgggcgggggcggcctggcgcaacaggtgctggtgcccgcaggaagcgcccggcctgtggctttttccgtcgtgccaacagcagctgcggccgtcagccttaaagtagtagcgagggggtccttcgagttccccgtcggagacgcagtttctaaggtgcttcagatcgagaaagagggagcaatccatagagaggagctcgtgtacgagttgaatccgctggaccaccggggccggaccctggagataccaggaaactctgatccgaacatgattcctgacggcgattttaactcttatgtgagggtaaccgcatccgatcccctagatacgctgggtagcgagggtgcactgagtcccggtggggtggccagccttctgcgcctcccaaggggctgtggcgaacaaacaatgatatacctcgcccctacactggccgccagcagatacctggacaaaaccgaacagtggtctactctgccccccgagactaaggatcatgccgtggacctcattcaaaaaggctatatgagaatccaacagtttcggaaggcagatgggagttatgcagcatggctttctagaggctcctccacctggctgaccgcgttcgtcttgaaagtgttatccctcgcccaggagcaggtggggggctcccctgagaagttacaggaaacaagtaactggctgctttctcaacagcaggcagacgggagtttccaggacctaagccctgtgatccatcgcagtatgcagggcggcttggtcggtaacgatgaaactgtagcattaactgcctttgtgaccatcgcactccatcatgggctggcagtgttccaggacgagggcgcggagcccctgaaacagcgggttgaggcctccatttcgaaggcttctagctttctcggggaaaaagcgtctgcaggactgctgggggctcacgccgctgcgatcactgcttacgcactcacattaactaaggcccccgcggaccttcggggagtagctcataacaatttgatggcaatggcccaggagaccggcgacaacctctattggggttccgtgactgggagccagtctaacgctgttagccccactcccgcccctcggaatccatccgatcccatgcctcaagctcctgcactgtggatcgagacgacagcttacgccctcctacacctcctacttcatgaaggcaaggccgaaatggcggatcaggctgcggcctggttgactcgacaggggtccttccaaggaggcttccgatcgactcaggatacagtgattgccttggatgcgctctccgcctactggatagcaagccataccaccgaggaacgtggcttaaacgtcacattgtccagcacagggaggaatgggttcaagtcacatgcccttcagctcaataatagacaaattagaggtctggaagaagagctccagttttccctgggtagtaaaataaacgtcaaggtaggcggaaactctaaaggtacattgaaggttctgcgcacctacaacgttcttgatatgaagaacacgacctgtcaggacctgcagattgaggtcacagttaaaggacacgtcgaatacacaatggaggccaacgaggattacgaggactacgagtatgacgaattacctgccaaagacgatccggatgcacccctccagcctgtaacacctctgcagctgttcgaaggacggcgaaaccgacgaagaagagaggcccccaaggtggtcgaagaacaggagtctcgcgtgcattacacggtgtgtatctggagaaacggcaaagtggggctcagcggaatggctatcgccgacgttaccctccttagtgggtttcacgccctgagggctgacttggaaaaactgaccagcctgagcgatcgctacgtgagtcactttgagactgaagggcctcacgtgttgttgtatttcgactctgtcccaaccagcagagagtgtgtgggcttcgaggccgtgcaggaggttccagttgggctagtgcagccggcttccgccacactgtatgattattataaccccgagcgcagatgctccgtgttttatggagccccctcaaagagtaggcttttggccaccctgtgctccgctgaggtgtgtcagtgtgcggagggtaagtgtccacgtcagagacgagctctggaacggggactgcaggatgaagatggataccgaatgaaattcgcttgttactatcctcgcgtggaatacgggtttcaggtgaaagtcttgcgggaggacagccgcgcagcctttagacttttcgaaaccaagattacccaggtgttgcatttcaccaaagacgtaaaagccgctgcgaatcaaatgaggaatttcctggtgagggcaagctgtaggttaagactcgaacccgggaaagagtacctgatcatgggcctagacggagccacttacgatcttgaaggacacccgcagtatctgctcgatagcaattcctggatagaagagatgcccagcgaaagactgtgcagaagcacaagacaaagggccgcgtgcgctcagctgaatgatttcctccaggaatatggcacccagggatgtcaggtgtag

SEQ ID NO: 5809 - DNA, 1242 bp, synthetic construct
  misc_feature 1..1242: note = source = /note="Description of Artificial Sequence: Synthetic coding sequence"
  source 1..1242: mol_type = other DNA
atgaagggtgccctcggctcaccagtggcagcagccggggccgctatgcaggaaagttttggctgcgtggttgcgaaccggtttcaccagctgttggacgatgagagcgatccatttgatattttgagagaggcagagcgtagacgccagcagcagctgcagcgcaagcgtagagacgaagccgctgccgcagctggggcaggtccacggggcggcagatcacctgcaggcgcatctggtcaccgagccggcgctggaggcagacgagagtctcagaaggagaggaaatcattgccggcaccggtggcacaacgcccagatagtcctggggggggtttacaggctcccgggcaaaagcgcacgccgcgccgcggcgagcaacagggctggaatgatagtaggggtcctgaaggcatgctagagagggcagaaaggcgcagttacagagagtatcggccttacgaaacagaacggcaggcagatttcactgcagagaagtttcccgacgagaagcctggggacaggtttgatagggatcgtccattacgtggtcgggggggaccccgtggcggaatgagagggagaggccggggcggaccaggaaacagagtcttcgatgctttcgaccagcggggcaagcgcgagttcgagagatacgggggcaacgacaagattgcagttcggaccgaagacaacatgggcggatgcggcgtgcgcacttggggcagtggcaaagacacttccgatgtggaaccgacggccccgatggaggaaccgaccgttgtcgaggagagtcagggaactccagaggaagaatccccagccaaggtcccagagctcgaggttgaggaagagactcaggtacaggaaatgaccttggatgagtggaagaacctacaggaacagacgcgaccaaaaccggaattcaacattcggaaacccgaaagtaccgtcccaagcaaggccgtggttattcacaaatccaagtatcgagatgacatggtgaaagatgactacgaagatgactcacatgtctttcgaaagcctgctaacgacatcacctctcagctggaaattaactttggaaacttgccacgccctggacggggagccagaggtgggactagaggtgggcgaggcagaatcaggcgagctgagaactacggaccacgagctgaagttgtcatgcaggatgttgcccctaatcccgacgatccggaagatttccccgccctctcttag

SEQ ID NO: 5810 - DNA, 927 bp, synthetic construct
  misc_feature 1..927: note = source = /note="Description of Artificial Sequence: Synthetic coding sequence"
  source 1..927: mol_type = other DNA
atgaagggagccctgggcagtccagttgccgcagctggagcagctatgcaggagtcgttcgggtgcgtcgtcgccaataggttccaccagcttctcgacgacgagagcgatccgttcgacattttacgggaggccgagcgccgacgacagcagcagctccaacggaagaggagagacgaagctgccgccgctgccggcgcaggcccaagagggggcagatcaccagctggtgcctctgggcaccgagccggggcaggtgggcgacgggaaagtcagaaggagcgaaaatcattacccgcccctgtcgcacagaggccagactcaccaggtggaggtcttcaggctcccgggcagaaacgcacgcctagacgcggggagcagcagggttggaacgattcacgcggccctgagggtatgttggaaagggccgagcgtcgatcctacagggaatatagaccatatgaaactgaaagacaggccgacttcaccgctgaaaaatttccagacgagaaggtgccggagctggaggttgaagaggaaacacaggtacaagagatgactctggacgaatggaagaacctgcaggagcaaacacgccctaagcctgagtttaatatcagaaagcccgaatccaccgtgccctctaaggccgtagtgattcataaatcaaagtaccgagacgacatggtgaaagacgattatgaagacgactctcacgtgtttcggaaacctgcaaacgatattacatctcagttggagataaacttcggaaacttaccacgtcctggccgtggggcgcggggaggaaccaggggaggcagagggcggatacgccgagccgagaactatgggcctcgagctgaagtggtcatgcaggatgtggcacccaatccggatgacccagaagacttccccgccttgtcatag

SEQ ID NO: 5811 - DNA, 1437 bp, synthetic construct
  misc_feature 1..1437: note = source = /note="Description of Artificial Sequence: Synthetic coding sequence"
  source 1..1437: mol_type = other DNA
atgcctagacgcggctactccaagcctgggtcctggggaagtttttgggccatgctgacattagtgggattggtaactcacgcagcccagagggcagacgtgggcggggaggcagctggaacttctatcaatcactcccaagctgtcctccaaagactgcaggaacttttgcggcagggaaacgcatctgacgttgtgctgcgtgttcaggctgctggaaccgatgaagttagagtgttccatgcccacaggctgttgctgggactccattcggaattgttccttgagctgctctccaatcagagcgaagccgtgcttcaggagccgcaggactgtgccgccgtcttcgacaagtttatccgatacctttactgcggggaactgacagtacttctaacccaggctatcccacttcatcggctcgccaccaaatatggggttagcagcctgcaacgcggagtggctgactacatgcgcgcccacctggctggtggggcggggcctgccgtcgggtggtaccactacgctgtggggactggggatgaggccttgagggaatcatgcctgcagtttctagcctggaacctttcagccgttgccgcctccaccgagtggggcgcagtatcaccagaactgctatggcaacttctacagcggagcgacctcgtgttgcaagatgaactggagttgtttcacgctctggaggcgtggcttggtcgggcccgacctcctcctgctgtggccgaaagggcactgagggctattaggtatccaatgattcctccagcgcagttgtttcagctgcaggctcggtccgccgccctcgcgaggcatggacctgcagtagccgacttgctcctgcaggcctaccaatttcacgctgcctccccgttgcactatgctaagttctttgatgttaacggatctgctttcctgccaaggaattatctggccccagcttggggggctccatgggtaattaacaatccagccagggacgaccgctccactagctttcaaacacaacttggtccatctggccacgatgcagggagacgtgttacatggaatgtgctgttctccccccggtggctgcctgtctccttgaggcccgtctacgcggacgctgctgggaccgccctgcctgctgccaggcctgaggatggacgacctagacttgttgtaactcccgcctccagcggaggagacgctgctggcgtcagtttccagaagactgttctcgtgggtgcccgccagcagggcagacttctggtcagacatgcatactcttttcaccaatcttctgaagaggcgggggacttcctcgctcacgccgatctgcaaaggaggaacagtgagtatctggttgaaaatgcactgcatctgcacttaatcgtgaagcctgtgtaccataccctgattaggacccctaaatag

SEQ ID NO: 5812 - DNA, 477 bp, synthetic construct
  misc_feature 1..477: note = source = /note="Description of Artificial Sequence: Synthetic coding sequence"
  source 1..477: mol_type = other DNA
atgtgttgcccaggagggcactacactctgatactccgacgcggcaacaggttccggcgagaaaaaaggccggctaaggtgactggtgcccaaaccgaggttcagcttgccccccccctcccccgggggagggccagacgctcgccatggtccgtaccaattagccttagtatagatcggctcgagttcgacttgctgtatccagctattaagggcgacacaatccagctctacttaggcgcgaagctgctcgatagccagggtaaagttacaaagtggtttaacaattccgccgcatcactcaccatgccgactctcgacaacatccctttcagcctcatcgtgtcgcaggatgttgtgaaagccgctgttgcggccgtgctttcacccgaggaattcatggtcctgctggattccgtgctgcctgagtccgcccacagattgaaatccagcattggactcattaacgagaagtag

SEQ ID NO: 5813 - DNA, 771 bp, synthetic construct
  misc_feature 1..771: note = source = /note="Description of Artificial Sequence: Synthetic coding sequence"
  source 1..771: mol_type = other DNA
atgttccagacgggagggctgattgttttttacggactgcttgctcagaccatggcacagtttggcggactccctgtgcccctcgaccagactctgcctctcaatgttaaccctgctcttcccctgagccccacaggtctggccgggagcttgacgaatgcactcagcaatggtctcttaagcggcggattgttaggaattttggagaaccttcctctcctagacatattgaagccagggggaggtacgtctggggggctgctgggagggctccttgggaaagtgacttctgtcataccaggtctgaacaatatcatcgatatcaaagttacagacccccagttgctggagctaggactggtccagagtcctgacggccaccgcctctatgtcactatcccccttgggatcaaactgcaggtgaacacccccttggtgggggcatccctacttcggctcgccgtgaagttggatatcacagccgaaattctggcagtccgtgacaagcaggaaaggatccacttggtcttaggggactgtacgcattcccctggatctctgcagatctctcttcttgacggcctaggacctctgcccattcaggggctactcgatagtcttactggcatcctcaataaggtcctgccagagctggtgcaagggaatgtgtgccctctggttaatgaagtactgcgggggctagacattaccctggtgcatgatattgttaacatgttgatccacggcctgcagttcgtcatcaaggtttag

SEQ ID NO: 5814 - DNA, 771 bp, synthetic construct
  misc_feature 1..771: note = source = /note="Description of Artificial Sequence: Synthetic coding sequence"
  source 1..771: mol_type = other DNA
atgtttcagaccggcggtctcatcgttttctatggactcttggcccaaacaatggcccaattcggcggacttcctgtacctctggaccagactcttcccctcaatgttaatcctgctttgcccctctcaccaacaggtttggcaggaagtctgaccaacgccctgtctaacggtttgctgtctggcgggctgcttggcatcctggaaaatctgccccttctagacattcttaagcctggaggaggaacatctggcggactcctcggggggcttctgggaaaggtaacctcggtcatcccgggcctgaataatattatagacataaaagttacggatccgcagcttctggagttgggtctcgtgcagagccccgatgggcaccgcctgtatgtaacaatccccctggggatcaaactgcaggtgaatacacctttggtcggggcatcacttttaaggcttgctgttaagcttgatattaccgccgaaattttggcagtcagagacaagcaggaacgaattcacctggtgctgggagattgtacacacagcccaggcagcctccagatttcattgttagacggcctcggcccactgccaatccagggtctcctggattccttgacaggcatcctcaataaggtcttgccagagctggtacagggcaacgtgtgcccccttgtcaatgaggttctcagggggctcgatattaccctcgtgcacgacattgtgaacatgctgatccacggactgcagttcgtgattaaagtttag

SEQ ID NO: 5815 - DNA, 657 bp, synthetic construct
  misc_feature 1..657: note = source = /note="Description of Artificial Sequence: Synthetic coding sequence"
  source 1..657: mol_type = other DNA
atgatgtgtcctctttggcgtctgctcatttttttggggctcctggccttgcccctggcgcctcacaaacagccttggcctggcttagctcaggcccaccgtgataacaagtctacactcgctcgaatcattgctcaggggctcataaagcacaacgcagagtcgagaattcagaatattcactttggggacagactgaatgccagtgctcaggtggcccccgggctcgtaggatggctcatctcgggccgcaagcaccagcaacagcaggagagtaggagtttcgacaacaacatcgttaaaatgtgcgcgcatatgtcgatcgttgtcgaattttggctggaaaaggacgagtttggacggcgagacctcgtcatcgggaagtgtgacgccgaaccatcatctgtgcacgtggcaatacttaccgaagcgatacctccaaagatgaatcaatttctctacaatcttaaggagaaccttcaaaaggtactccctcatatggtagagagccaggtgtgtcccctgatcggggagatcctgggccagcttgacgtcaagcttctgaaaagcctcatagagcaggaagctgctcacgaacctactcaccacgaaactagccagccttcagcgtgtcaggcaggcgaatccccttcttag

SEQ ID NO: 5816 - DNA, 765 bp, synthetic construct
  misc_feature 1..765: note = source = /note="Description of Artificial Sequence: Synthetic coding sequence"
  source 1..765: mol_type = other DNA
atgatgtgcccactctggcgactgctgattttcctggggctgctagccctgccgctagccccacacaaacagccttggcctggcttggctcaggcccatagggacaacaagagtacactggctcgcattattgctcagggtctcattaaacacaacgccgagtccaggatccagaacatccatttcggggacaggctgaacgcctctgcacaggtggcaccaggtcttgttgggtggttgataagtgggcgcaagcaccaacagcagcaggagtccagcatcaacatcactaacattcagctcgactgtggcggcattcaaatctccttccacaaagagtggttctcagccaacatcagcctggaatttgacctggaactgcgcccgtcttttgataacaacattgtcaagatgtgcgctcacatgagcatagtggtggagttctggctggaaaaagatgagtttgggcgtagggatctggttattgggaaatgtgatgccgagccatcatccgtgcacgtagctatacttaccgaggcaatccctcctaaaatgaaccaatttctctacaacctgaaagaaaatctgcagaaggtgctgccccacatggtcgagagtcaggtctgcccgctcattggagagatccttgggcagctagatgtcaaacttctcaagtccctcattgagcaggaagcagcccatgaacccacccaccacgagacttcccagccgtccgcctgccaagccggagagagtccgagttag

SEQ ID NO: 5817 - DNA, 1635 bp, synthetic construct
  misc_feature 1..1635: note = source = /note="Description of Artificial Sequence: Synthetic coding sequence"
  source 1..1635: mol_type = other DNA
atgaagatatctatgatcaactacaagagccttctggccttactgttcatcctcgccagctggatcatcttcaccgtcttccagaattcgacaaaggtttggtcagctctcaacttaagcatttctctccattactggaataactccacgaaatctctcttccctaaaacccctctgataagtctgaaaccactcaccgaaacagaactgagaattaaggagattatcgaaaaactagaccagcagatcccgccacggccgtttacgcatgtgaacaccacaacttccgctactcattctaccgcaacaatcctaaatccaagagacacgtattgtaggggggaccagctgcatatcctccttgaggtgagagatcacctcggtagaaggaagcagtatgggggcgacttcctgcgcgcccgcatgagctccccagcactgatggccggagcaagcgggaaggtgaccgacttcaataatggaacctatctggtgtctttcacactgttctgggaaggccaagtatccttgtctctgctgctcattcacccctcagaaggagttagcgccctgtggtcagcacggaaccagggctatgaccgagtgatcttcacgggtcaatttgtcaatgggacaagccaggttcacagcgagtgcggcctgatcctgaatactaatgctgagctatgccagtacctggacaaccgagaccaggagggattctactgtgtgcggcctcagcatatgccgtgcgcagccctcacacacatgtactcaaaaaacaagaaagtttcctacttatctaaacaggagaagtctctattcgaaagatccaatgtcggtgttgagataatggaaaaatttaacacaataagcgtgtctaagtgcaacaaggagaccgttgccatgaaagagaaatgtaagttcggcatgacctcgacgattccttctggtcatgtctggagaaacacatggaatccagtgtcttgctcactagcgacagtgaaaatgaaggagtgcctccggggcaagctgatttatcttatgggcgattcaaccatacggcaatggatggaatatttcaaagcttcaattaacacactgaagagtgttgatctccatgaatccgggaagctgcagcaccaacttgctgtcgatcttgaccgtaatataaatatacaatggcaaaaatattgctatcctctgatcggaagcatgacatactctgtgaaggaaatggaatatctgacccgggccatcgaccggactggtggggagaagaataccgtgatagttatatctctgggacagcacttccgcccattccccatcgatgttttcatcaggcgagcccttaacgtacacaaggctatccagcaccttctgctgcggtctcccgacaccatggtcattatcaaaaccgaaaacattcgggaaatgtataatgacgcggagcgattttctgattttcacggctacatacaatacctcatcatcaaagacatctttcaggatctttcggtctccatcattgacgcttgggatatcactattgcgtatggtactaacaatgttcaccctccccagcatgtggtaggtaaccaaattaacatcttgcttaattacatttgctag

SEQ ID NO: 5818 - DNA, 1845 bp, synthetic construct
  misc_feature 1..1845: note = source = /note="Description of Artificial Sequence: Synthetic coding sequence"
  source 1..1845: mol_type = other DNA
atgtggatggcttggtgtgtggccgcactaagtgtcgtcgcagtctgtggcactagccacgaaactaatacagtgcttagagtcactaaagatgtgctgtcaaacgctattagcggcatgctgcagcagtccgacgctctacattcagctttgagggaagttccactcggagtgggcgatattccatacaatgattttcacgttcgcggccctccacccgtgtacacaaacggtaagaagttggacggcatttatcagtacgggcacattgagaccaacgacaatacagctcaactggggggcaagtacaggtacggagagatcctcgagtctgaaggttctatccgggatcttcggaactcaggctatcgctccgctgagaacgcatatgggggccaccggggacttggcagataccgcgccgcgccggtgggccgactccaccgaagagagttacaaccgggcgaaattccaccgggcgtggccaccggtgccgtgggtccgggcgggctgctaggtaccggcgggatgctggccgctgatggtatattggccggccaggggggactgctgggcggagggggcctgctgggcgacggaggacttctcgggggaggtggtgtcttgggagtacttggagaaggaggtatcctgtctactgtgcagggtatcactggactgcggattgtcgaactgaccctgcctcgcgtcagcgtgagattacttcctggagtcggggtgtacctgtcactttacacaagggtcgcaattaatggaaaatcattgatcggcttcctcgatattgcagtggaggtcaacattacggcaaaggttcggttgactatggaccgcactggctacccgcggcttgtgatcgagcgttgcgacactctcctgggaggcattaaagttaaactcctccggggcctgctgcccaacctggtcgacaatctggtgaatagagtgttagcagatgtgctaccagatctcctctgtcctatcgtggatgtggtactggggctggtcaatgatcagttgggcttggtggacagtcttataccacttgggatcctgggctcagtccagtataccttttcctccctgccactcgtaaccggcgaattcctcgagctcgatctcaatacacttgtgggggaggccggaggcgggcttatagattacccccttgggtggcccgcagtgtcgccaaagccgatgccagagcttcccccgatgggtgacaatacaaaatcacagctcgccatgtccgctaatttcctggggagtgttttgacgctgttacaaaaacagcacgccctcgacttggatataactaacggcatgttcgaggaacttccccccctgaccaccgccaccctcggcgcactaattcccaaggtattccaacagtatcctgaatcctgcccccttatcattcgcatacaggtgctcaatccacccagcgtcatgttacagaaggataaagcgctggtaaaagttttggccaccgctgaagtgatggtctctcagcccaaggacctagaaaccacgatatgcttgattgacgtggacacagagttcctggcaagcttttctacggagggcgacaagctgatgattgacgccaagctcgaaaagacttctctcaatttgcgaacgagcaacgtggggaattttgatataggtttgatggaggtgctcgtggagaagatcttcgacctggcattcatgcccgcaatgaatgcagtattgggttctggggtgcctctgcctaaaatcctcaatatcgattttagcaatgcagatattgatgtcctcgaagacttgctggtactgagcgcttag

SEQ ID NO: 5819 - DNA, 1431 bp, synthetic construct
  misc_feature 1..1431: note = source = /note="Description of Artificial Sequence: Synthetic coding sequence"
  source 1..1431: mol_type = other DNA
atgcagccagtcatgctggcgctgtggtccttacttctgctctggggattggccactccttgtcaggaacttctggaaacagttggtaccctagcccggattgataaggacgagttagggaaagcaatccagaattcattggtgggggagccaattctgcagaacgttttaggctcggtgacggccgtgaatagaggcctgttgggctctggcgggctattaggcggcggtggccttctaggacatggaggtgtgtttggcgtagtggaggagctttctgggctgaaaatcgaagaactaacactccccaaggtactgcttaaactgctcccaggattcggggtgcagttatctcttcacaccaaggtggggatgcattgctcagggcctcttggggggctccttcaactcgctgccgaggtcaacgtgacaagtcgggtcgctctggcagtctcctctcgtggaacccctatattaattctgaagcgatgtagcacactgcttggccatattagtctatttagtgggctgctgccaaccccattattcggtgtagtagaacaaatgctgtttaaggtgctgcccggactcctgtgtcctgtagtagactcagtcctaggcgtagtgaacgagttgctgggcgctgtgctcgggctcgtcagcctcggcgccctcggctctgtcgaattctcactcgcaactttgcccttaatttccaaccagtacatcgaactcgacatcaatcctatcgtcaagtccgtcgcaggagacattattgactttcccaagagcagggcccctgctaaggtcccgcccaaaaaggaccacaccagtcaggtgatggtgccactttatttgtttaataccacctttggacttctgcagaccaacggagcccttgatatggatatcacccccgagctcgtgccctccgacgtgcctctcaccaccactgacctggcagcgctgctgccagaggcccttggaaaactgcccctgcatcagcagcttcttctgttcctgcgcgtacgcgaggctcccactgtcacactgcacaacaaaaaggcacttgtgtcattacccgctaacattcacgtgctgttttatgtgcctaaaggaacacccgagtcactgtttgaactgaatagtgtcatgaccgtccgcgcccagcttgcaccttccgccaccaaattgcatatctccctttcacttgagagactctctgtgaaagtcgcaagctccttcacacacgcctttgacgggagccgcctcgaggagtggctgtcacacgtagtcggggcggtgtacgcacccaagctgaacgtcgccctggacgtaggcattccactgccaaaggttctgaacattaactttagcaattcggtcctggagattgtcgagaatgccgtagtcctgacagtggccagttag

SEQ ID NO: 5820 - DNA, 585 bp, synthetic construct
  misc_feature 1..585: note = source = /note="Description of Artificial Sequence: Synthetic coding sequence"
  source 1..585: mol_type = other DNA
atgcaggatgcccctcttagctgtttatcaccaacaaaatggagttcggtgtctagtgccgactccaccgaaaagagcgcctccggggctggaaccagaaacctgcccttccagttctgtctgcggcaggctctgaggatgaaagcggcgggaattcttactctgatcggatgtctggtgacaggagcagagtccaagatctatactagatgcaagctggcaaagattttttccagggccggtttagacaactattggggttttagtctggggaattggatctgcatggcttactacgagtctgggtataataccacggctcaaacagtgttggatgatggatccatcgattatggcatcttccagatcaattcctttgcgtggtgccgaaggggtaagctgaaggagaataatcactgccatgtggcttgttcagctctcattaccgatgacttgacggacgccatcatctgtgcaaggaagattgttaaggaaactcagggcatgaactattggcaggggtggaagaaacactgtgaaggccgcgatctgtccgagtggaagaagggatgcgaggtgagttag

SEQ ID NO: 5821 - DNA, 1266 bp, synthetic construct
  misc_feature 1..1266: note = source = /note="Description of Artificial Sequence: Synthetic coding sequence"
  source 1..1266: mol_type = other DNA
atgggttttctgtctccgatctatgtaattttcttctttttcggagttaaggtacattgtcagtacgagacgtatcagtgggacgaagattacgaccaggaacctgacgacgattatcagactgggtttcctttccgccagaatgtggattacggcgtgccattccaccagtacacactaggatgtgtgtccgagtgcttttgccctaccaattttccatcctccatgtactgtgacaatagaaaactgaagacaatcccaaatatcccgatgcacatccaacagctctatctccagttcaacgagattgaagctgttaccgccaattctttcataaacgccacacacctcaaagaaataaacctttcgcacaataagatcaagtcacagaagattgactacggtgtgttcgcgaagctgcccaatttgctacagctacatttggagcataacaatctcgaggagttccctttccccctacctaagagcctggaaagacttcttttgggttataacgaaatcagcaagttacagaccaacgcgatggacgggttggtgaacctgaccatgttggatctctgttacaactatctccatgatagcctgctgaaagataagatattcgcgaagatggaaaagttaatgcaactgaatctgtgcagtaatcggcttgaatcaatgcctcccggtctaccctcttctctgatgtacttatccttggagaataactctatcagcagcatacctgagaaatactttgacaaactccccaagcttcatactctccggatgtcccacaacaaattgcaagacataccgtataatattttcaacttaccgaacatcgtcgaactaagcgtggggcacaataaacttaagcaggctttttacattccacgcaacctcgagcacctatatctacagaataacgaaatcgagaaaatgaacttgaccgtgatgtgcccctccattgacccactgcactaccatcacctgacctatatcagggtggaccaaaataagctgaaggaaccgatttccagctatatattcttttgttttccacatatacacacaatatactatggagagcaacgctctactaatggacagaccattcagctcaaaacacaggtcttcaggagatttcctgacgacgatgacgagtcagaggatcacgacgatccagacaacgcccatgagtcacctgaacaggagggcgccgaggggcatttcgacctgcactattacgagaaccaggagtag

SEQ ID NO: 5822 - DNA, 252 bp, synthetic construct
  misc_feature 1..252: note = source = /note="Description of Artificial Sequence: Synthetic coding sequence"
  source 1..252: mol_type = other DNA
atgctctgttgttgtccccttgctgacgctttgctgatttttctagaaacaggaagctgctttcagcccggccagcagtctgagaccctgtcgcagaaacagaacaagaccaataataagaagtgggcaggcggcgccggatgtcggccattccgcctatggtgggtggggcgtagcaggggggcaggggtccagctttactcaactaagaaaggatggattttacggggaaaaggagggacggaagcctag

SEQ ID NO: 5823 - DNA, 2559 bp, synthetic construct
  misc_feature 1..2559: note = source = /note="Description of Artificial Sequence: Synthetic coding sequence"
  source 1..2559: mol_type = other DNA
atgctccccactgaagtgccccagtctcacccaggtccatcagccttgctcctgctccagcttctgctgccgccaacatccgccttctttccaaatatttggagcctgctagccgctcctgggtcaattacccatcaggacctgacagaggaggctgcactgaatgtgacactgcagctatttctggagcagcctcctccggggcgaccccctctgagactggaagactttctgggccgcacactgcttgctgatgatttgtttgccgcttactttggaccaggctctagtcgaaggtttagagcagctctgggcgaagtgtcccgcgccaatgcagctcaggactttttgcctacctccagaaatgaccccgacctacacttcgacgcagaacggctcgggcaagggcgcgcacgcctggtaggggcgcttcgtgagacagtggtggccgctcgcgcactggatcacacgttagctcgccagcgccttggggccgctttgcatgcgttgcaggacttctacagccactcaaactgggtggaactgggggaacagcagcctcatcctcacctcctgtggcctcgacaggaattacagaacctagcgcaagtcgctgaccctacctgcagcgattgtgaggagctcagctgtccgcgtaattggctgggtttcacattgctgacctctgggtattttggaactcaccctccaaagcctcctggcaaatgttcccatggaggccactttgaccgatcaagctcccagcctcctcgcggcggaataaacaaggattccacgtcaccaggcttctccccccaccatatgctacacctgcaggctgctaagctcgcactcctcgctagtatccaggcttttagcctgctgcgctcgaggctcggcgatcgggactttagtcgtctcctggacattacacccgcctctagtctttcttttgtcctggataccactggctccatgggagaagagatcaacgccgccaagatccaggcacggcacttggtggaacagcgccggggctctcctatggagcctgtgcattatgtgctcgtacccttccatgatcctgggtttggacccgtgttcaccacatctgaccccgattcattctggcaacagctcaacgagatccacgccctgggtggaggcgatgaacctgaaatgtgcctctctgctctgcaactggcacttctgcatacacctcccctctctgatatattcgtgtttactgatgcctctccaaaggacgctttccttacaaatcaggtggagtccttgactcaggagcggcgctgtagggtcacatttttggtgacagaggatacaagccgcgtgcaaggaagagctaggcgagagatcctgagccccttgagattcgaaccttataaagctgtggccctcgcctcaggcggagaagtgatttttaccaaagaccaacatatccgcgacgtggcggccattgtgggagagagcatggccgccctagtaaccctgccgctagatccacctgtagtcgtgccaggccaacctttggtgttctctgttgacgggctgctgcagaaaatcacagttagaattcacggcgacatttcttctttttggatcaaaaaccctgcaggggtttcacagggtcaggaggaaggtggtggacccctgggtcacacacgtcgtttcggccaattttggatggtgactatggacgatcctccgcagactggaacctgggaaatccaagtgacagccgaggacaccccaggcgtgagagtccaggctcagacaagcctggatttcctttttcacttcgggattcctatggaggacggtcctcatcctgggctttatccgctgactcagcctgtggcagggctacagacccaattacttgtcgaggttacgggcctgggctccagggccaaccccggggacccacagccacacttcagccacgtgatcctaagaggggttcccgagggggcagagttgggacaggtcccgctggaacctgtgggcccacccgagcgcgggctcttagcagcaagccttagccccactcttctgtctacaccccggccatttagcttggagctcatagggcaggacgcagccggccgcagactgcacagagccgctcctcaaccatcgacggtagtgcccgttctcttggagctttcaggccctagtgggtttctggctcccggttcaaaagtgccactttctcttcgtattgctagtttcagcggcccgcaggatctcgacctccggacgtttgtaaatcccagcttctcactgacaagtaatctatcccgggcccacctggagctaaatgaatccgcttggggtaggttgtggctggaggtgcccgatagtgccgcgcctgattcagttgtcatggttactgtcactgccggaggcagagaagcaaaccctgtgccacctacacacgctttccttaggttgctggtgtccgcccccgccccacaagtgaggaatcattactttccctcccagggccccgctcatcacccctataggctgatctag

SEQ ID NO: 5824 - DNA, 2676 bp, synthetic construct
  misc_feature 1..2676: note = source = /note="Description of Artificial Sequence: Synthetic coding sequence"
  source 1..2676: mol_type = other DNA
atgctgccaacagaagtgccccagagtcaccccggcccaagcgccctcctccttctgcagttgcttctgcctcccacctccgccttcttccccaatatctggtctctactggcagcccccggatccattacacaccaagaccttacagaggaggcagccctcaatgtcaccttgcagctgtttcttgaacaaccccctccaggaagacctcccctgcgtctcgaagactttctaggacggaccctactggctgatgatctgttcgccgcctattttggccccggcagctctaggagattccgtgctgctctgggagaggtgagcagggctaacgccgcgcaggattttctccccacatctcgcaatgatcccgatctccattttgacgccgaaaggcttggacaaggccgcgcccgattggttggagccttgcgagaaacggtggtagccgcacgggctttagatcacacactggcacgccagagattgggtgccgccttacacgccttacaggacttctactcacatagcaattgggttgagctcggcgagcaacaaccccacccgcaccttctgtggccccggcaggaattacaaaacctcgcccaggtcgcggacccgacctgttccgattgcgaggagctgtcgtgtccccgaaactggttgggatttactctccttaccagcggctattttgggacccatccccctaaacctccagggaaatgttcgcacgggggacactttgatcgcagcagctcccaaccacctcgaggggggattaataaggacagcacctcacccggattcagccctcatcacatgctgcacttgcaggccgccaaacttgccctccttgcctcaatccaagccttctcgttactcaggtcaagactcggcgaccgagattttagccggctgttggacattacacccgctagctctctgtctttcgtgctcgatactactggaagcatgggggaggagatcaacgcagctaaaattcaggccaggcatttggtagaacaacgtagggggtcgccaatggaacctgtgcactacgtgctggttccgttccacgatcccggattcgggccggtgtttaccacctcagatcccgacagtttctggcagcagctgaatgagattcacgcactgggtggcggagacgagccagaaatgtgccttagtgctttgcaactggccttgctccacaccccacctctgtcggacatcttcgtgttcacagatgcaagtcctaaagatgcatttctgaccaaccaagttgaatcactgacccaggagaggcgttgccgggtaaccttcctagtgaccgaggacacctctcgagtgcaggggcgagcccgacgcgagattctgtctccgctgcgtttcgagccatacaaggccgtggccttagctagcggtggtgaggtaattttcactaaagaccagcatatacgagacgtggccgccatagtgggcgaaagtatggccgccctcgtcactctcccgctcgacccccctgttgtcgtccctggccaaccccttgtattctccgtcgacggcctcttacagaagatcactgttcgcatccacggtgatatctccagcttttggatcaagaaccccgcgggggtgtctcaaggccaggaagagggaggcggccccctgggccacactagacggtttgggcagttttggatggtaaccatggatgatccacctcagacaggcacctgggagatccaagtgaccgcggaggatacccccggggtacgtgttcaggctcagacgtctttggattttcttttccacttcggaattccaatggaagacggcccacaccccggtctgtatcctctaacgcaacctgttgcgggcctccagacacagctgttagttgaagtaaccggactgggctctagggccaatccaggggatcctcagccacacttctcacacgtcatcctaagaggcgttcccgaaggggctgagctcgggcaggtgccacttgaaccagtgggccctccagagcgggggcttttggcagcctcactttcccccacattgctgtctactccccggcccttctccctcgagctgatcggtcaagatgctgctggccgacggctccaccgcgccgccccacaaccttccacggtcgtccctgtcctgctcgagctctccgggccctctgggttcctggcccccgggagcaaggtaccactttccttgagaattgcaagtttctccgggcctcaagaccttgacctcaggacgtttgtgaatccatcgttcagccttacttctaatcttagccgcgctcacttggagcttaatgagtccgcatgggggaggctatggctcgaggttcctgacagcgccgcccccgatagcgtagtcatggtgacagttaccgctggcgggagggaagcaaatcccgtccctcccacccatgcatttctgcgtctgctggtttccgcaccagcaccacaagataggcacacaacacccaccgggtcgtccgaccccatactcacaaccgcaacccctgccttttctccgttcacattggtgacacagggacgggccggcgctgggctagctgcagggagcccctggtggggcaccgtgggtggagttctgctcctgctgggactggcatcctggtag

SEQ ID NO: 5825 - DNA, 552 bp, synthetic construct
  misc_feature 1..552: note = source = /note="Description of Artificial Sequence: Synthetic coding sequence"
  source 1..552: mol_type = other DNA
atggttcgaatctggactacaataatgatcgtgttaattctgctgctgaggataggccctaataagccttcactctccggcagacaggctcctgcacaggctcagaccagcgacctcgtgcctagtctgtttcccctcggtttgtgggcacccggcttctgtacctggtcttctcctgatgaggataaaagacccaggaaaccagtcccaggaactggcaacagggattctggtactagacggcgactgcaagatgccacagagcaggatccaagacccgggaacgatgttgctagcgcagaaacagcgggcccgccttcacctagcggtatacgcgctcaggacagggcacccaggcaccgtcgtgcaccccctgcccgaatgcccgtcgcccccgctccaagcgcagatggagaaccactgcaggaacagggcggagggcttttccacaggacacgcagtgtctataatggactcgagttaaacacctggatgaaggtggagcgcctatttgttgaaaaatttcatcagtcctttagtttagataattag

SEQ ID NO: 5826 - DNA, 444 bp, synthetic construct
  misc_feature 1..444: note = source = /note="Description of Artificial Sequence: Synthetic coding sequence"
  source 1..444: mol_type = other DNA
atggcaggccccgccggctctcagtctctgggccccttgtgcttccactcctccccacaggctctgtacacagtgctgctaattgtgctggttatgatgtcactcgttttcggcaaattcgtgccggtgaattgggagccaccacagccgttgccatttcccaaatatctgaggtgctataggtgcctgttggagactaaggagctgggctgcctcctggggtccgacatctgtctgacacctgcaggaagctcttgcatcaccttacataagaagaactctagcggcagcgacgtgatggtgtcagactgccggtctaaagagcagatgtctgactgttccaatacgagaacttcaccggtatcgggtttttggattttctcgcaatactgctttttggacttttgcaacgatccacagaaccgaggcctgtataccccatag

SEQ ID NO: 5827 - DNA, 447 bp, synthetic construct
  misc_feature 1..447: note = source = /note="Description of Artificial Sequence: Synthetic coding sequence"
  source 1..447: mol_type = other DNA
atgcagacgtttccagttgcaggagccttggaccctgctatcctggacaccagcagtccccaagccctctacaccgtactgctcatagtgttggtgatgatgtcattagtcttcggaaagtttgtgcctgtgaactgggaaccaccccagcccctaccattccccaaatatctgcgatgttataggtgtctgctggagactaaagaactgggctgcctgctgggatccgacatctgtctaacccctgccggatcctcctgtattactcttcataaaaaaaactccagtggctccgatgttatggtgtcagactgccggtccaaggaacaaatgtctgactgctctaatacccgaacaagcccagtcagcggattttggatcttctcccagtattgctttctcgatttctgtaacgatccacagaaccgcggcctgtataccccttag

SEQ ID NO: 5828 - DNA, 606 bp, synthetic construct
  misc_feature 1..606: note = source = /note="Description of Artificial Sequence: Synthetic coding sequence"
  source 1..606: mol_type = other DNA
atgaaagttcacatgctggtaggcgtactggtgatggtgggttttactgtgggaaaggtgcctgtgccagatatcaggacatgccacttttgcctggtggaggatccatctgtcggatgtatttctgggtctgaaaaatgtaccataagcagctcgagtttatgcatggtgattaccatttattacgacgtgaaggtgcgattcattgtacgggggtgcgggcagtacatcagctaccgttgtcaagagaagcggaatacgtacttcgctgagtattggtaccaggctcaatgttgccagtatgattactgtaacagttggagttcaccacaactacagtccagcctccctgagccacacgaccggcccctggcactgccactgtcagactcccagatccagtggttctatcaggccctgaatctgtccctcccactccccaacttccacgcggggacagagccagacggtttagacccaatggtgacattgagtcttaatctgggcctgagtttcgcagagctccggcggatgtacctgttccttaacagctccggcttgctggtactccctcaagctggcctgctcacaccacaccctagttag

SEQ ID NO: 5829 - DNA, 345 bp, synthetic construct
  misc_feature 1..345: note = source = /note="Description of Artificial Sequence: Synthetic coding sequence"
  source 1..345: mol_type = other DNA
atgctaggcggcgaagaggctcgcccaaactcttggccctggcaggtgtcgcttcagtatagttccaatggtcaatggtatcacacttgtggtggaagcctgattgcaaatagctgggtgctgacagcggcacattgcattcggcagattatcaaagcccacaaggtgctgcaacggtgtagcctgatattgttcttcgtgcgcgacttatgttctagtcaattagaactgacaggcgtgagtgcaggcagcagcggaatttaccgcgttatgctggggcagcacaatctctatgtagctgagagcggttcactagctgtgagcgttagcaagatcgtagtgtag

SEQ ID NO: 5830 - DNA, 810 bp, synthetic construct
  misc_feature 1..810: note = source = /note="Description of Artificial Sequence: Synthetic coding sequence"
  source 1..810: mol_type = other DNA
atgatacgtactttattgctttctacactggtggctggcgcactgtcgtgcggggtaagcacctacgcccctgatatgtcacggatgcttggcggggaggaggctcggcctaactcatggccatggcaagtgtccctccaatactcttcaaacggacagtggtaccacacctgcggtgggtctctgattgcaaactcctgggtcttgactgcggcacattgcatttcatcttccggaatatacagagtcatgttaggacagcacaacctctatgtcgctgaatcaggttcacttgccgtgagtgtgtctaaaattgtcgtgcataaagattggaacagtgaccaggttagcaaggggaatgatattgcgttacttaagctggctaatccagttagcctgactgataaaattcaactcgcttgcctgcctccagctggcactattctgccaaataactacccctgttatgtcaccggctggggccgccttcagactaatggggccttgccagacgatctgaagcaaggacagctgttggtggttgattacgcaacgtgttcttcatctgggtggtggggtagcacagtcaaaacaaacatgatatgtgcagggggagacggtgttatctgtacgtgcaatggcgattcaggtggccctttgaattgccaggcaagcgacggaaggtgggaagtacacggaattgggagcctcacttcagtactggggtgcaactactactacaagccctccatttttactcgggtgagcaattataatgattggatcaactctgtaatcgccaacaactag

SEQ ID NO: 5831 - DNA, 567 bp, synthetic construct
  misc_feature 1..567: note = source = /note="Description of Artificial Sequence: Synthetic coding sequence"
  source 1..567: mol_type = other DNA
atgttccatcaaatatgggcagcattgttatacttctacggtatcatcctgaacagcatttaccagtgtcccgagcactctcaactgaccactttgggcgttgatggaaaggagtttcctgaggtccatctgggtcagtggtactttatcgcaggcgcggcccccactaaagaagaactggcaacattcgatcctgttgacaacatcgtcttcaacatggcagccggcagcgcccctatgcagttgcacctccgggccacaattcgaatgaaggacggactctgtgtgccacggaagtggatctaccacctgaccgaaggtagcaccgatttaaggacagagggtaggccagatatgaaaacagaactgttttcatccagctgtccgggcgggataatgctgaacgaaaccgggcagggctatcagaggttcttgctgtataacagaagtccccaccccccagagaaatgcgttgaagagtttaaatcccttacatcctgcctggattctaaagcctttctgctcacacctagaaatcaggaagcctgcgaactaagcaataactag

SEQ ID NO: 5832 - DNA, 390 bp, synthetic construct
  misc_feature 1..390: note = source = /note="Description of Artificial Sequence: Synthetic coding sequence"
  source 1..390: mol_type = other DNA
atggctgctggctctgcacccatgcagctacatctgagggctactatccgaatgaaagatggcctttgcgtcccccgcaaatggatctatcacctgacggagggctcgaccgacttacgaactgaaggcaggccagacatgaaaaccgaattgttcagttcctcctgtccaggcgggatcatgctcaatgaaaccggtcagggataccagcggtttttgctatacaatagaagtcctcacccccctgaaaaatgcgtggaggagttcaaatccctgacttcttgcctggattccaaagctttcttgttaacaccgagaaatcagggaaaaggcttgaagtctcacaaaactgggctcgggttgactaagagcagcggagtcacgggttag

SEQ ID NO: 5833 - DNA, 351 bp, synthetic construct
  misc_feature 1..351: note = source = /note="Description of Artificial Sequence: Synthetic coding sequence"
  source 1..351: mol_type = other DNA
atggccgcaggctcggctccaatgcagctgcacctgagggccaccatccgtatgaaggacggactatgcgtacccaggaaatggatctatcacttgacagaagggtccaccgatctccggaccgagggccggccagatatgaaaactgagctcttctcctctagttgtccaggagggataatgttgaacgagaccggacagggctatcaacgctttttactgtataaccggagtccacaccctcctgagaaatgcgtggaggagtttaaatccctcacaagctgcctcgattctaaggcgtttctgctgactccccgcaatcaggaagcatgtgagctgtccaataattag

SEQ ID NO: 5834 - DNA, 435 bp, synthetic construct
  misc_feature 1..435: note = source = /note="Description of Artificial Sequence: Synthetic coding sequence"
  source 1..435: mol_type = other DNA
atgatccggacgcttctcttgtctacacttgtggcaggcgcattgtcttgtggggatcctacctacccaccatatgttactagggtcgtgggaggcgaagaggcccgtccgaattcttggccctggcaggtgtctctgcaatattcttcgaacggaaaatggtatcacacatgcggtgggtccttaatagctaactcttgggttttaaccgctgcccattgtatttctcagagtatggtgcagtgcgcgcacaaagtgctgcagagatgctcgctcatactatttttcgtcagagatctgtgttcctcccagctggagctgactggggtttctgcagggagctctcgaacttaccgagttggcctcggacggcacaacttgtacgtcgcggagtcgggcagtttggcagtttccgtatctaagattgtcgtgtag

SEQ ID NO: 5835 - DNA, 204 bp, synthetic construct
  misc_feature 1..204: note = source = /note="Description of Artificial Sequence: Synthetic coding sequence"
  source 1..204: mol_type = other DNA
atgaagctcctgctgctgacattaacagtgctccttctgttgtctcaactcactcccggtggcacccagcgctgctggaacctatatggaaaatgcaggtaccggtgtagtaaaaaggagcgggtgtacgtgtactgcataaacaacaaaatgtgttgtgtgaagcccaaataccagcctaaggagcgttggtggcccttctag

SEQ ID NO: 5836 - DNA, 231 bp, synthetic construct
  misc_feature 1..231: note = source = /note="Description of Artificial Sequence: Synthetic coding sequence"
  source 1..231: mol_type = other DNA
atgaagttgttgttactgctcctgacagtaaccctgctgctggctcaggttaccccagtgatgaaatgctggggtaagagcggtcgctgccgcacaacatgcaaggaatccgaggtctactacattctgtgcaaaactgaggctaaatgctgtgtggatccaaaatacgtgcctgtaaagccaaagctaaccgacaccaacacaagcctcgagtctacttccgcagtatag

SEQ ID NO: 5837 - DNA, 267 bp, synthetic construct
  misc_feature 1..267: note = source = /note="Description of Artificial Sequence: Synthetic coding sequence"
  source 1..267: mol_type = other DNA
atgaaactcctgtacctcttcctggccatcctgctggctattgaggagccggtgataagtgtggaatgctggatggatggccattgcaggctactctgcaaggatggagaggacagcattatacgttgtcggaacagaaaaaggtgctgtgtgccctcccgttacctgactatccagcccgtgacgattcacgggatcctgggatggactactccccagatgagtacaaccgcgcccaagatgaaaaccaacatcaccaaccggtag

SEQ ID NO: 5838 - DNA, 255 bp, synthetic construct
  misc_feature 1..255: note = source = /note="Description of Artificial Sequence: Synthetic coding sequence"
  source 1..255: mol_type = other DNA
atgaaactgctatacctttttctggccattctgctggctatagaggagcccgtcatttccggaaaaagacatattctgcggtgcatgggaaactctggcatttgcagagcatcctgcaagaaaaatgagcagccctacttgtattgccgaaattgccaatcctgttgcctgcaatcctatatgaggataagcatttccggcaaggaggagaacactgactggtcttacgagaagcagtggcccagactcccctag

SEQ ID NO: 5839 - DNA, 2631 bp, synthetic construct
  misc_feature 1..2631: note = source = /note="Description of Artificial Sequence: Synthetic coding sequence"
  source 1..2631: mol_type = other DNA
atgggcccagaagctctgtcatctctgctcctccttctgctagtggccagtggggatgccgacatgaaaggacattttgatcccgcgaagtgcagatatgcgctaggaatgcaggacagaacaattccagactccgatatctccgcctccagtagctggtctgactctactgcagccagacattctcgcctggaaagtagcgacggcgatggcgcatggtgtcctgcgggctctgtgtttcccaaagaagaggaatatctgcaggtggatctgcaacggttacacttggtcgcactcgtcggaacacaagggcggcatgcggggggtttgggaaaggagttcagccgttcatacagactgcggtacagccgcgacggaaggaggtggatgggctggaaagataggtggggacaggaagttatctccggtaacgaagatccggaaggagtcgtgctcaaagacttggggccgcctatggtcgcccggctcgtccgcttctacccccgggccgaccgggtcatgagcgtttgtctgcgcgtcgagttatacggttgtttgtggcgtgacggcctgctttcttatactgcccctgttgggcagaccatgtatctctctgaagctgtttatctgaacgactccacatatgatggacacactgtcggcggccttcaatacgggggcctcggccaactagctgacggcgtggtcggcttggacgatttcaggaagagtcaggagctgcgcgtttggccaggctacgattacgtgggctggtccaaccacagcttctcaagcggttacgtggagatggaattcgagtttgaccgcctccgcgccttccaggcgatgcaggtccactgtaacaatatgcatacattgggcgcacggctgcctggaggggtggaatgcaggtttaggcggggtccagcaatggcctgggaaggggaacccatgaggcacaatctcggcggcaatctcggggacccccgcgctagagctgtgtccgtgcccttgggcgggcgagttgcccgattcctccagtgtcgctttcttttcgccgggccatggttattgttcagcgaaattagcttcataagcgacgttgtgaacaatagctcaccggccctcggcggcacttttccacctgcaccttggtggccacctggtccccccccaacgaatttcagctccctggagctagagccccgcggccaacagcccgtcgccaaggctgaaggtagtccaaccgccattctcatagggtgcctggtcgctattattctgcttcttttgctgatcattgccttaatgttatggagattacactggcggcggttgctatccaaagcagaaagacgcgtcctcgaggaggagctgacggtgcacttgagtgttccgggtgatactatcttgattaataacagacccggcccccgagagcccccaccctatcaggagcctcggccaaggggcaatcctcctcattctgcaccttgcgtgcccaacggaagtgcttactctggagactacatggaacctgaaaaacctggggctcccctactgccaccgcccccccaaaacagtgtgcctcactatgcagaagcagacattgtgacattgcagggcgtgacaggcgggaacacctatgcggtgcctgcgctacctcctggggcagtcggagacggcccgcccagagtggactttcctagaagccggctaaggttcaaggagaagctcggagagggccagtttggagaggtgcacttatgtgaggttgacagtccgcaggatctcgtaagtctggacttcccccttaacgtaaggaaggggcaccccttgctggtcgcagttaagatcctgcgcccagacgccacaaaaaatgcccggaacgactttttgaaggaagtgaagattatgagcagactaaaagatcctaatattatccggctgctgggagtctgcgtacaagacgaccctttgtgtatgattacggattacatggagaacggcgatcttaaccagttcttatctgcgcaccaattggaggataaagccgccgaaggggcaccgggcgacggacaggcggctcaggggcccaccatttcataccccatgttactccatgtggcagcacagattgcctcgggcatgcggtacctcgcaacacttaactttgttcatcgtgacctcgctacacgaaattgcctggtgggcgagaatttcacgataaaaatcgcagattttggaatgtcccggaacctctacgccggcgactactacagagtgcagggccgcgcagtgttgccaattcgatggatggcttgggaatgcatcctcatgggaaaattcactaccgcttccgacgtttgggcctttggcgtgaccctttgggaagtgctgatgctgtgtcgggcccagccatttggtcaactcaccgatgagcaagtgatcgagaatgccggcgaatttttcagagatcagggcagacaggtatatctctcaaggcccccggcatgcccgcagggactctatgagctgatgctgcggtgttggagcagggagtctgagcaacgcccaccattcagccaattgcacaggttcctcgcagaagacgctttgaacacagtgtag

SEQ ID NO: 5840 - DNA, 2742 bp, synthetic construct
  misc_feature 1..2742: note = source = /note="Description of Artificial Sequence: Synthetic coding sequence"
  source 1..2742: mol_type = other DNA
atgggacctgaggcactctcaagcctgctgctgttgttgctcgtggctagtggggacgctgatatgaagggccacttcgaccccgcgaagtgcaggtacgctctagggatgcaggaccgaaccatccctgactccgatatcagtgcttccagcagctggagcgactcgacggcggcccgccacagtcgcctagagagcagcgacggcgatggcgcctggtgccccgccggcagcgtgtttcccaaggaggaggagtatcttcaggtggacctgcagcggctgcacttggtggcgttggtgggcacacagggccgacacgccggtggattagggaaagagttctcgagatcttatcggctcaggtacagccgcgacggccggagatggatgggatggaaggaccgttggggtcaggaggttatctccgggaatgaggaccccgagggcgtcgtgttaaaggacttgggtcctccaatggtcgcgaggctagtcaggttttatccccgtgcagatcgggtaatgtccgtgtgcctgcgcgtcgaactctacggttgcttgtggcgagatgggctcttgagttacacagcacccgtcggtcagaccatgtatttaagcgaagcagtgtatctgaacgatagtacctatgacggccacacagtgggcgggctgcaatacggcggcctcggtcagcttgctgatggagtggtgggcctcgacgatttccgcaaatctcaggaactgcgagtgtggcccggttacgattacgtgggctggagcaatcatagtttttcatcgggatatgtcgaaatggagtttgagtttgatcgcttacgggcttttcaagctatgcaggtccattgcaacaatatgcataccctcggtgcaagattaccaggtggcgtcgagtgcagattcagaagaggccccgctatggcttgggagggggagccaatgaggcataatctgggcggaaacctgggggaccctagggctcgcgcagtatcggtccctctgggagggagagtagccaggtttctgcagtgccggtttctgtttgccggaccgtggctactgtttagcgagatctcttttatttcagatgttgttaataactcctcgccagcactcgggggcactttcccacccgccccttggtggccaccggggcccccccccactaatttttccagtctcgaactggagccacgtggccagcagcctgttgcgaaagctgaggggtcccctacggctatcttgattggctgtctggttgccattatcttgctgctgctgctgatcattgccctgatgttgtggagattacactggagaagactcttgtccaaggccgagcgccgcgtcttggaggaagaattaactgtccacctgtccgtgccaggggatactattcttatcaataatcggccaggacctcgcgaacctcctccgtaccaggagccacggccgagaggtaaccccccgcactccgctccatgtgtgccaaacgggagtgccctcctcctttctaacccggcctaccgcctactattagccacctacgcccgtcctcctagagggccagggcccccaactcccgcctgggccaagcccacaaatacgcaggcgtactccggggactacatggagcccgagaagcccggtgcaccattgctccctccacccccccagaactctgtgcctcattatgctgaggccgatatcgttacgctgcagggggtcacggggggaaacacttatgcagtacccgctctgccaccaggtgccgtcggagatggtccccctagggtggatttcccccggtctaggttgcggttcaaggagaagttgggggagggccaattcggggaggttcacctctgcgaggtggactctcctcaggatttggtaagcctggacttccccctgaatgtgcggaagggccaccctctactagtggccgtgaagatcctgagacctgacgccaccaaaaacgcccgaaacgatttccttaaggaagtgaaaatcatgtcacggcttaaggacccaaacatcattcgactgcttggcgtctgcgtccaggatgatccactgtgtatgataactgattatatggaaaacggtgacctcaaccagtttctgtccgcccaccaactggaagacaaggccgccgaaggagcccctggcgacgggcaggcagcacaaggacccacgatcagttaccccatgctgctgcacgttgcagcccagatcgcctcgggcatgaggtaccttgcaactctaaatttcgtgcacagagacttagccacgaggaattgtctggttggggagaactttacgatcaaaattgccgacttcggcatgtccagaaacctgtacgctggagactactaccgggttcaggggcgcgctgtgctcccaatccggtggatggcatgggaatgcatcctgatgggcaaattcactaccgccagcgatgtctgggcatttggggtgacactgtgggaggtactaatgctgtgtcgtgcacaaccgttcggccagttaacagatgaacaggtgattgaaaatgccggcgagttcttccgggaccagggtcgtcaggtttacttgagccgccctcccgcctgtccccagggactgtacgagcttatgctgagatgctggtctagagagagcgagcagagacctccattttcacagctgcacagatttctggcggaagacgcccttaataccgtatag

SEQ ID NO: 5841 - DNA, 2631 bp, synthetic construct
  misc_feature 1..2631: note = source = /note="Description of Artificial Sequence: Synthetic coding sequence"
  source 1..2631: mol_type = other DNA
atgggaccagaggccctgtcctctctcttacttctactactcgtggcctcaggagacgcagatatgaagggtcatttcgaccccgctaagtgcaggtacgcattagggatgcaggacaggactattccagattcagatatctctgcctcatcctcctggtcagactcaaccgctgcgaggcattcgaggctggaaagcagcgatggcgacggggcttggtgtccagccggatctgttttcccaaaggaggaagagtaccttcaggttgatctgcagcggctccacttggttgctcttgtgggcacacagggtcgacatgctggcggcttgggaaaagagttcagccgttcctaccgccttcgatacagccgcgatgggcgcaggtggatggggtggaaggaccgctggggacaggaggttatctctggaaacgaagaccctgagggtgtggtgttgaaagaccttggtcctcctatggttgcccgcctggtgcggttctaccctagggctgaccgggtgatgtccgtctgcttacgggtcgaactatacgggtgtctgtggagagacggtctcctgagctacaccgcgcccgtcgggcagacaatgtacctcagtgaggctgtttatttgaatgactctacttacgatggtcacaccgtcggcggtctgcagtatgggggactcggacaactcgccgatggagttgtggggcttgacgacttcaggaagtcacaggagctaagggtctggcctgggtatgactacgtggggtggagcaatcattccttctccagtggttacgtggagatggagtttgagttcgacaggctccgcgcatttcaggccatgcaggtgcactgcaataatatgcacacactaggggctcgactgcccggaggggtggaatgtagatttcgaagagggccggctatggcttgggagggtgaaccaatgcgtcataacctgggtggcaacctgggtgatccacgtgcacgggccgtaagcgtgcctctcggtggccgcgtagccagatttctgcagtgcaggtttctgttcgccggcccctggttactgttcagtgagatctcattcatcagcgatgtagtcaacaacagctcccctgcccttggcggcacctttcccccagccccctggtggcccccaggaccccctcccacaaacttcagttccctagagcttgaaccccgcgggcaacaacccgtcgccaaagctgaagggtccccaaccgccattttgatagggtgcctggtggccattatactattgttattgctgatcatcgccttaatgctgtggaggctccattggagaaggctgctatcaaaggctgaacgcagggttttggaagaggaactgactgtgcacttgtccgtccctggggatactattctgattaataatcggcctggtccacgtgagccccctccgtaccaggagcctagaccgcgaggaaaccccccccacagtgcaccatgtgtgcccaacggcagtgcttacagtggagattatatggaacccgagaagcccggggcacccctgctccctccaccacctcagaattcagtgccgcactatgcggaagcagatatcgtaaccctccagggagtgaccgggggcaacacatatgcagtgcccgctctgccaccaggggccgttggagatggcccccctcgcgtggattttccacgctcccgacttcgtttcaaggaaaagctgggtgagggccagttcggagaggtgcacctgtgcgaggtggatagtccgcaagacctggtgtcgctggatttccccctgaatgtgcgcaaaggacaccccctcctagttgccgttaagatcttgcggcccgatgctactaagaacgcacgtaacgatttccttaaagaagtgaagatcatgtcaagacttaaagacccaaatataatccgcctcctaggcgtgtgcgttcaggacgatccactctgcatgatcaccgattacatggaaaatggagacctcaatcagtttctgagcgcacatcagcttgaggacaaagccgcagagggagcgcctggagatggacaggctgcccaaggtcccactatctcatacccaatgttattgcacgtcgccgcccagatcgccagtggtatgcgatacctggctacattgaactttgtgcaccgagatctggcgactaggaattgcctcgttggcgagaacttcaccatcaaaattgccgactttggcatgtctcgcaatctgtacgccggcgactactatcgcgtgcagggaagggctgtcctacccatccggtggatggcttgggaatgcattctgatgggaaagtttaccacagcctctgacgtttgggcttttggagtcactctctgggaggtgctcatgctgtgtcgcgctcagcccttcggtcagctaactgatgaacaggtaattgagaacgcaggcgagttcttccgggatcagggtagacaggtgtatctgagccgccctcccgcatgcccgcagggactgtatgaattaatgctccggtgttggtctcgggagagtgagcaacgccctcccttctcacagctgcacaggtttctcgccgaggatgccctcaatactgtgtag

SEQ ID NO: 5842 - DNA, 2631 bp, synthetic construct
  misc_feature 1..2631: note = source = /note="Description of Artificial Sequence: Synthetic coding sequence"
  source 1..2631: mol_type = other DNA
atggggccggaagcattgagctccttacttctgctgctgctggtggccagtggagacgctgacatgaaagggcacttcgatcccgctaaatgtaggtatgcattggggatgcaggacagaacaattcccgactcagacatttcagctagttcctcctggagcgactccactgccgccagacacagccggcttgagtcatccgatggtgacggggcgtggtgtccagctgggtccgtttttcctaaggaagaagaatacctgcaggtggacttgcaacggttacacctggtcgcattggttgggactcagggaaggcatgcaggagggttaggaaaggagttttcaaggtcatatcggctcagatattctagagatggtcgcagatggatgggctggaaagatagatggggtcaggaggtgatctccggtaatgaggaccctgagggtgtggtcttgaaagatctcgggcctcctatggttgctcggctggtgcggttttatcctcgggccgatcgggtaatgtcagtgtgtctccgggttgagctctatggatgtctgtggcgggatggattactgtcctataccgcgccggtgggtcagaccatgtacctcagcgaggcagtttatcttaatgactcaacctacgacggccacaccgttggcggactgcagtatggagggttgggacagctggctgacggggttgtcgggttagacgatttccgcaagtcacaggaactccgcgtatggcccgggtacgactatgtcggctggtctaatcactctttctcatcgggttacgtcgaaatggaattcgaattcgaccggctgcgagccttccaggccatgcaggtccattgcaacaacatgcatactctgggcgccaggctccctggcggtgtggagtgtcgctttagacgggggcccgcaatggcctgggagggggaacccatgagacacaatctcggaggtaatttaggagaccctcgtgcaagggcggttagtgtgcctctgggcggtagagttgcccgctttctgcagtgcaggttcctgttcgcagggccttggttattgttctccgaaattagcttcatctctgatgtcgtgaataactccagtcctgctctgggcgggaccttccccccggctccctggtggccaccagggccgccgccaacaaacttcagcagcctcgaattggaacctaggggacaacaaccagtggctaaggcagagggaagccctacagccattctcatcggctgcctggtggcaattatcttgctcctcctgctgatcattgctctcatgctgtggcgcctgcattggaggcgtcttcttagcaaggctgaaagacgggtgctcgaagaggagttgacagtgcacttgtctgtgcccggggacacaattctcatcaataatagaccaggaccccgagaaccccctccttatcaggagccaagaccgagaggcaatccgccccattctgccccgtgcgtgcccaatggaagcgcctattccggcgattacatggaacccgagaaacctggagccccacttctgccacctcccccccagaatagcgtaccacactatgccgaggcagatattgtgacgctgcaaggcgtcactggaggcaacacttatgccgtgcccgcactgccccccggggctgtcggtgatggccccccccgtgtggattttcctaggagcaggctgaggttcaaggagaaactcggggagggccagtttggagaggttcacctatgcgaggtggacagtcctcaggatctagtaagcttggactttccattaaatgtgcgtaaaggacacccactgcttgtggccgtgaagatactcagacccgacgccaccaagaacgcacgaaatgatttcctgaaagaagtgaagatcatgtcccggttgaaggacccaaatataatcagactgctaggagtttgtgtccaggatgaccccttatgtatgatcaccgattacatggagaatggagaccttaatcagtttctgagcgcccaccagctggaggataaagcagcggagggggcccctggagatggacaggccgcacaggggcctactatctcttaccccatgctgctccacgtagccgcccagatagcctctgggatgcgatacctcgccactctcaattttgtgcaccgggatctggcaactaggaattgcctggtgggtgaaaacttcactattaagattgccgatttcgggatgagtaggaacctctacgcaggagactattacagagtgcaggggagggccgtgctgcccatcagatggatggcctgggaatgcattctaatggggaaatttacaacagcctctgatgtctgggccttcggagtgactctctgggaggtattgatgctttgtcgcgctcagcccttcggccagctgacggacgaacaggttattgaaaacgcaggggaattctttagggatcagggacgtcaagtatacctctcccggccccctgcctgcccccagggactttacgagcttatgcttagatgctggagccgagagagtgagcaaaggcccccgttttcccagcttcatagattcttagccgaggatgctctgaacacggtctag

SEQ ID NO: 5843 - DNA, 2760 bp, synthetic construct
  misc_feature 1..2760: note = source = /note="Description of Artificial Sequence: Synthetic coding sequence"
  source 1..2760: mol_type = other DNA
atggggcccgaagccttgagtagcctcctgctgttgctgctggtcgcttctggggatgccgacatgaagggtcactttgatccggcaaaatgtaggtatgcgctcggtatgcaggaccgcacaattcctgattcagatatttcagcgtcatcctcatggtcagattccaccgctgcaaggcactcgagattggaatcatcagacggcgacggagcctggtgccccgcgggcagtgtattcccaaaagaggaggagtacttgcaggtcgacctccaacgcctgcaccttgtggctcttgtcggcacccaaggcaggcatgctggcggactggggaaggagttcagtcgcagttatcggctgagatacagccgcgacgggagacggtggatgggttggaaggaccgatggggccaggaagttattagtggaaacgaagaccccgaaggcgttgttttaaaggacctcgggcctcccatggtagcaaggctggtgagattctatccacgggcggacagggttatgtctgtgtgtctgagggtggagttatatggatgcctctggcgcgacggactgctgtcttatacggcccctgtggggcagaccatgtatctctcggaagccgtgtatctcaacgactctacatacgatgggcatactgtgggcggactccaatacggaggccttggccagctagcagacggcgtcgtggggctggatgatttcagaaagagtcaggaactgagagtgtggcctggatacgattacgtgggctggagcaatcactcattcagcagtggctacgtcgagatggaattcgagttcgacaggctgcgcgcattccaggctatgcaggttcactgcaacaatatgcatactctgggggcgcggctgcctgggggggtggaatgccgtttcagaaggggtccagcgatggcctgggagggagaacccatgaggcacaacctgggtgggaacctgggggaccccagggcccgggccgtttccgttccacttggcggtcgcgtcgcccgtttcttgcaatgccgttttctgttcgcgggcccctggctcttattcagtgaaatctcatttatatcggatgtcgtgaacaacagtagtcccgcccttggtgggacattcccacccgcaccctggtggcccccgggtccaccccctactaactttagtagcctggaacttgagcctcgcggacaacagcctgtagccaaggctgaaggatcccctaccgcaatcttaattggctgtctggtcgccattatcctgctgctcctgctgatcatagctctaatgttatggcgcctgcactggaggcgattgctatccaaagccgaacgtagggtgctcgaggaggagctcactgtccacctgtcagttccaggggacacaatcctgattaacaaccgccccggcccccgcgagcctccaccttatcaggaaccacgccctcggggtaatcctccccacagcgccccgtgtgtgcccaacggcagcgctcttcttctgtccaacccagcctaccggctgctactagccacctatgccaggcctcctcgcggccctggccctccaacgcccgcctgggcgaaaccaacaaacacccaggcatacagtggtgactacatggaaccagagaaaccgggcgcgcctctgctccctccaccgccccagaatagtgtaccacactacgcagaagcagacattgttactctgcagggagtgacgggtgggaatacttacgctgtccccgctctgccacccggggcggtgggcgatggacccccacgagtcgattttccaaggtctcggctgcgtttcaaggaaaaactgggcgagggtcagtttggcgaggtccacctttgtgaagtagattctccgcaggatctggtcagtctggactttccactgaacgtgcgaaagggtcaccctttactggtggccgtcaagattctgcggcctgacgctacgaaaaacgccagcttctccctgtttagcaggaacgattttcttaaagaggtgaaaattatgtccaggctcaaggatccaaatatcatccgtctccttggagtttgtgttcaagacgaccctctctgcatgattactgattacatggagaatggggaccttaatcaatttttatcagcccatcagttggaggataaggccgctgaaggcgcgccgggtgatggccaggccgctcagggacccacgattagttatcctatgcttctgcacgtggcagcgcagatagctagcgggatgcgctacctggcaactctgaacttcgttcacagggacctagccacccgcaactgcctggtgggagaaaattttaccatcaagattgctgacttcgggatgtccagaaacctctacgcgggtgactactatagagtacaggggcgcgctgtgctccccattcgctggatggcgtgggagtgcatccttatgggaaaattcactacggcaagcgacgtgtgggctttcggagtaacgctgtgggaggtactgatgttgtgccgggctcaaccatttggccagctgactgacgaacaggtcatcgagaatgccggggagtttttcagagaccaagggagacaggtgtatctgtctagacctcctgcgtgtcctcagggcctctatgagctgatgctgcggtgttggagccgcgaatccgagcagcgcccccccttctctcagcttcaccgattcctggctgaagacgccctgaacaccgtttag

SEQ ID NO: 5844 - DNA, 1041 bp, synthetic construct
  misc_feature 1..1041: note = source = /note="Description of Artificial Sequence: Synthetic coding sequence"
  source 1..1041: mol_type = other DNA
atgctcaagaaacctctcagcgctgtgacatggctttgcatcttcatcgtagcattcgtctctcacccagcatggctgcagaagttgtctaagcataagacgccagcacaaccacagctaaaagcagcaaattgttgcgaggaggtcaaagagctgaaagcccaggttgctaatttatcctctcttctgagtgaactcaacaagaaacaggaacgggattgggtgtccgtagttatgcaggtcatggagttagagtctaactctaagcggatggagagtagactaaccgatgctgagtcaaaatatagtgaaatgaacaatcagatcgatatcatgcaactgcaggccgcgcaaacagttactcagacatctgcggatgcgatctacgattgctcctcactttaccagaagaattataggatctctggcgtctataaattgcctccagacgattttctgggttccccagaactggaggtattctgtgatatggagacatcaggtggcggctggaccatcattcagcgacgcaagagcgggctggtctcgttctacagagattggaaacagtataaacagggattcggctctattagaggagatttctggctcgggaatgagcacatccataggctgtcacggcagcctacacgccttcgcgttgagatggaagactgggaaggcaatctccgctacgccgaatattcccacttcgtgctggggaatgagctcaatagctaccggctgttcctggggaattacactggaaatgtgggtaacgatgcactccagtaccacaataacaccgctttcagtactaaggataaagacaatgataattgtctagataagtgtgcccaactgagaaaaggcgggtactggtataactgctgtactgacagcaacttgaacggggtctactacagactcggcgagcataacaagcatcttgacggcatcacctggtacggatggcacggatctacatattccctgaaacgtgtggagatgaaaatcagacccgaagacttcaagccatag

SEQ ID NO: 5845 - DNA, 1056 bp, synthetic construct
  misc_feature 1..1056: note = source = /note="Description of Artificial Sequence: Synthetic coding sequence"
  source 1..1056: mol_type = other DNA
atgaagggaagggcagtttcttttgaccctctcgcatgccagggactgaacgcttctcccggctcactcacgagccctttaaggaggatcaggagtctgacaggccgggaagtcttgacaccattcccgggactggggaccgcagccgccccagcacaaggaggtgcccacctaaaaccccatagcctagtccttccaattacagctttgccccccccacctttggcattacgagggagacaggcaactagcaaactgcctccttttttgtcttcccctttccctccaagcctttgtccttgggtgccagatcccgggtttaaggagactgcatttctgtacgctgtttctagtgccgctctaacccataccctggcccgcgcttgctcagccgggcgcatggaacgttgtacctgcgatgattccccaggactcgagtctcggcaagcttggcaatggggcgtttgtggggataatctaaaatattctacaaaatttttaagcaatttcctggggtctaagcgaggcaacaaggatcttcgagcccgtgcagatgctcacaacacgcatgtgggtataaaagccgtgaaaagcgggctgcgaacgacttgtaagtgtcacggcgtgtcaggttcctgcgctgtcagaacatgctggaagcagctgagcccattccgcgaaaccgggcaagtgctgaaacttcgatatgacagcgcagttaaagttagtagcgcaacgaacgaggctcttggccggctcgaactctgggccccagccagacagggctccttgaccaagggactggctcccaggagcggagacctagtgtatatggaagattccccgtctttttgcaggccgtccaaatactcccccggtaccgccggcagagtgtgtagccgcgaggccagttgttcctccctttgttgtggacggggatacgacacacagagccgcctcgtggcctttagctgtcactgtcaggtgcagtggtgctgttacgttgaatgtcagcagtgcgtgcaagaggagctggtctacacctgcaagcactag

SEQ ID NO: 5846 - DNA, 462 bp, synthetic construct
  misc_feature 1..462: note = source = /note="Description of Artificial Sequence: Synthetic coding sequence"
  source 1..462: mol_type = other DNA
atgaagcacctccgcccccaattcccattgatcctggccatttattgcttctgcatgctgcagattcccagcagcgggtttccccagccactcgccgaccctagcgatggacttgatatcgtacagttagaacagctggcctattgcctgtcacaatgggcccctttaagcaggcagcccaaagataatcaggacatttacaagagatttctatttcactacagtcggactcaggaagctacgcaccccgtgaaaaccggtttccctcctgtccaccccctgatgcatctagccgcgaagctcgcgaatcggcgcatgaaacgtatcctgcagcgggggtcggggactgctgccgtcgatttcactaagaaggatcatacggccacctggggcagacccttcttcctgtttcggcccagaaatggccgcaatatcgaggatgaagctcaaattcagtggtag

SEQ ID NO: 5847 - DNA, 765 bp, synthetic construct
  misc_feature 1..765: note = source = /note="Description of Artificial Sequence: Synthetic coding sequence"
  source 1..765: mol_type = other DNA
atggcggcagcaagcgctggcgcaacaagacttctgctgctcctgttgatggcagtggcggcgcccagcagggcaaggggctcaggttgtagggcggggacgggcgcacggggcgccggcgcggagggtagagagggtgaggcctgcggcacagtgggcctcctcctggagcattccttcgaaatcgacgatagcgccaattttagaaaaagaggatcacttctctggaaccagcaagatggtaccctgagcctttcccagcgacagttatcggaggaggagcggggtagactgcgcgacgtggcagcattgaacggactttaccgtgtgcggattccgagaaggcctggagcactggatggcctggaagcgggggggtacgtctctagcttcgtgcccgcttgcagcctcgttgaatctcacctaagcgatcagttgacactgcatgtggacgttgcgggaaacgtggtgggggtgagcgtcgtgactcacccaggaggatgtcgtggacatgaagtcgaggatgttgacctggagctgtttaatacctcagtacaactccagcccccaacgaccgccccggggcctgaaactgctgcattcatcgaaagactggagatggagcaagcccagaaggcaaaaaatcctcaggagcaaaaaagttttttcgccaagtattggcatataatcctgggcggagcagtactgttgacagcactgcgccccgctgcccctggccccgccccccccccccaggaggcctag

SEQ ID NO: 5848 - DNA, 810 bp, synthetic construct
  misc_feature 1..810: note = source = /note="Description of Artificial Sequence: Synthetic coding sequence"
  source 1..810: mol_type = other DNA
atggccgctgctagcgctggcgcaactcgcctcctcttacttctcttgatggctgtggctgctccctcaagagcgcgtggttccggctgtagagccggaacaggcgctagaggagccggcgccgagggtcgagagggggaggcatgcggaactgttggcctgctcctggagcattcattcgagatcgatgactccgccaatttcagaaaacgcggtagcctgctgtggaaccaacaagacgggacactgagcctgtcccagcgtcagctgagcgaggaggaacgcggacgcctaagggacgtcgctgctctcaacggtctctatcgggtgaggatccccagacgccctggggccctggacggtctggaggcaggggggtatgtttcctccttcgtgcctgcatgctccctggtcgaatcccatctctctgatcagctgacgctgcacgtggacgttgcaggtaacgtcgtgggcgtgtccgtggttacccacccaggaggctgcagaggccacgaggtcgaagatgtcgacctggagctgttcaatacctccgttcaattgcagccccccactacggcacccggtcccgaaaccgccgccttcatcgaacggttagaaatggagcaagcccagaaggcaaagaatccccaagagcaaaaatccttcttcgcaaaatactggatgtatatcattcctgtggtgctattcctcatgatgagcggagctcccgacacaggcggtcagggtggcggcggtggcggcggcggaggagggggctctgggagatgctgcgttcctccttcactctag

SEQ ID NO: 5849 - DNA, 480 bp, synthetic construct
  misc_feature 1..480: note = source = /note="Description of Artificial Sequence: Synthetic coding sequence"
  source 1..480: mol_type = other DNA
atgagttccccccagcgacgcaaggccatgccatgggccctttctcttctgctaatgggttttcagcttctcgtgacttacgcctggtgctccgaagaagaaatgggcggtaataataagatagtgcaggaccccatgttcctggccaccgttgagttcgccctaaacaccttcaatgttcaatccaaagaagagcacgcttatcgccttcttcgcgtactgagctcatggagggaggactccatggaccggaaatggcgcggtaaaatggtgttcagtatgaacctacagttgcgacaaaccgtgtgcagaaagttcgaggatgacattgacaattgccccttccaggagagcctggaactgaacaatgtacgccagggcatcagtttcccccaggtacattcctgtggctgctgtatgggctgcggcgtgggtacaggtgcagcagacaaggccatcccccgtgacaaagggaaatag

SEQ ID NO: 5850 - DNA, 1737 bp, synthetic construct
  misc_feature 1..1737: note = source = /note="Description of Artificial Sequence: Synthetic coding sequence"
  source 1..1737: mol_type = other DNA
atgctgctgttgctcttgctcgcgcccctgttcctgagaccgccaggtgccggaggtgcccagactcctaatgccacaagcgagggttgccagataatccatcctccttgggaaggcgggatcagatatcgcggactgacgagggatcaagttaaagcaatcaattttcttccagtggattatgagatcgaatacgtctgcagaggagagagggaggtcgtggggccaaaggtgcggaagtgcctggcaaacgggtcttggaccgacatggatactccctcaagatgtgtgaggatttgctctaaatcctatctgactcttgagaatggtaaagtgtttctcaccggaggggatctccctgccctggacggggctagggtcgacttcaggtgtgaccctgacttccacctggtgggaagtagccgcagcatctgctcacagggacagtggagcactcctaagccccattgtcaggtgaacaggactcctcacagcgaaaggagggccgtctacattggagctctgtttcccatgtccggcggatggcctggaggccaggcgtgccaacctgccgttgaaatggctttggaagatgttaacagccgtcgcgacatcctgcctgactacgagttaaaattaatacaccacgacagcaaatgtgatcctggacaggctaccaaatacctctatgagttactgtacaatgatcctatcaagatcatcttgatgcctggatgctcaagcgtctcaaccctcgtagctgaagccgccaggatgtggaaccttatcgtgctgtcttacggtagttcttcacctgccctgtcaaacaggcaaaggtttcccacattcttcagaacacaccccagcgccacattacacaacccaacacgggtcaaattgttcgaaaagtgggggtggaagaagatcgctactatccagcaaacaactgaagtctttactagcaccttagacgacctggaggagagggtcaaggaagcaggaatcgagattacatttcgacagtcttttttttcagaccctgctgtgcctgtgaaaaacctgaaacgccaagatgcgcggatcattgttggtttgttttacgaaactgaagcacggaaagtcttctgcgaggtgtacaaagaacgcctcttcggaaagaagtacgtctggttcttgattggttggtatgccgataattggttcaaaatctatgatccttctattaactgcaccgtggacgaaatgactgaagcagtggagggccacatcactaccgagatcgtgatgctgaaccccgcaaatacacgcagtatcagtaacatgacatcacaggaatttgtagaaaagctcaccaagcgcctcaaacgacatcccgaagaaaccggtggattccaggaagcacccctcgcttacgatgccatctgggcacttgccttggccttaaacaagaccagcggtggcggtggtagatcaggcgtgcggctcgaggattttaactataataaccaaacaatcacagatcagatctatagagctatgaacagtagttctttcgagggtgtctccggacacgtcgtgtttgacgcctctggttccagaatggcctggacgcttatcgagcagctgcagggaggcagttacaaaaagatcggatactacgactcaacgaaagacgacctgagctggtcaaagacagataaatggatagtcatcagccgtacccacagcccaacctag

SEQ ID NO: 5851 - DNA, 444 bp, synthetic construct
  misc_feature 1..444: note = source = /note="Description of Artificial Sequence: Synthetic coding sequence"
  source 1..444: mol_type = other DNA
atgctcggattgccctggaaaggtggactgagttgggcattacttttgctcctacttggcagccagattctgctcatttacgcatggcacttccatgaacaaagggactgcgacgaacataacgtaatggctcgttatcttccagctacagtagagttcgctgtccacacattcaatcagcagtccaaggactactacgcataccgtctcggtcacattctcaattcctggaaggagcaggtagagtccaagaccgtcttcagtatggaactgcttttagggcggacccgctgtgggaaatttgaagatgatattgacaattgtcacttccaggagtctaccgagctgaacaacacatttacctgctttttcacaatttccacgcggccctggatgacacaattcagtttgctcaacaagacgtgcttagaaggtttccactag

SEQ ID NO: 5852 - DNA, 444 bp, synthetic construct
  misc_feature 1..444: note = source = /note="Description of Artificial Sequence: Synthetic coding sequence"
  source 1..444: mol_type = other DNA
atgtggagtttgccaccatctcgtgcactatcatgcgcccctttactactgcttttctctttccagttcctcgttacatatgcctggagatttcaggaagaggaggagtggaatgaccagaagcagatagctgtttaccttcctccaaccctggagtttgctgtctatacctttaacaaacagagcaaggactggtacgcttacaagctggtccctgtgttagcaagctggaaggaacagggctatgacaaaatgacatttagtatgaacctacagctgggccgaactatgtgcgggaagttcgaagacgacatcgataattgtccttttcaggagagccctgaacttaacaacacatgcacctgtttttttaccattggaattgagccatggagaaccaggttcgatctgtggaacaagacatgtagcggaggtcatagctag

SEQ ID NO: 5853 - DNA, 2535 bp, synthetic construct
  misc_feature 1..2535: note = source = /note="Description of Artificial Sequence: Synthetic coding sequence"
  source 1..2535: mol_type = other DNA
atgggacccggtgctccattcgcacgggttggttggcctctccccttattggtggttatggccgcaggcgtcgcccccgtgtgggcctctcatagccctcatttgccccgcccgcatagccgggtgccgccacatccaagttcagagaggcgcgcagtctatatcggagctctgttccctatgtctggcggttggcccgggggtcaggcttgccaacctgccgtggagatggctttagaggacgtgaattctcggagggacatcctgccagactacgagttaaagctgatccaccatgactccaaatgtgacccaggccaggctaccaagtacctctatgagctgctctataatgacccaatcaagattatcttaatgcctggatgttcaagcgttagcaccctggtcgcagaagctgccaggatgtggaatctcattgtgttatcctacggctccagttcgcccgcactatctaatcgccagagattcccaacatttttcagaacgcacccgagcgccactctgcataaccccacccgcgtcaaactttttgaaaaatggggatggaaaaagatcgctaccatacaacagactacagaggtgttcacctccactttagacgacctcgaagagcgagtgaaagaggctggcatcgagattacatttagacagagcttcttcagtgaccccgccgtgcccgttaaaaacctcaagcggcaagacgcacgaataatagtcggcctgttctatgaaaccgaagcacgcaaggtcttctgtgaggtctacaaggagaggctcttcggcaaaaaatatgtatggtttctgatcggatggtacgctgacaactggtttaaaatctacgaccctagtatcaattgcaccgtggatgagatgacggaagctgtggaaggccatattacaaccgagatagttatgctgaatcccgctaatacccgctctatctcgaacatgacttctcaggagtttgtggagaaattaactaaaaggttgaagaggcaccccgaggaaaccggcggcttccaggaggcacccctggcgtacgatgccatctgggctctggctttggccctgaacaaaacaagcggaggaggcgggcgctctggtgttaggctggaagatttcaactacaataaccagactattaccgaccagatctacagagcaatgaattcttccagctttgaaggggtgtctgggcacgtggttttcgacgcttcaggaagcaggatggcttggactttgattgaacagctgcagggggggtcatacaaaaagataggctactatgacagcacaaaggatgatctttcctggtccaaaacagataaatggataggaggatcacccccagcagaccaaactctggttattaagacatttaggttcttgtcacaaaaactctttatatctgtgtccgtgctttcgagcttgggtattgtactggccgtggtctgcctgtctttcaacatttacaattctcacgtcaggtatatccagaactcccagccgaacctcaataatctcacagcagtgggctgtagcttggctctggctgcagtttttcccttaggattggacggttaccatattggaaggaaccagttcccttttgtctgtcaggcacggctgtggctcctaggtcttgggttctcacttgggtatgggagcatgtttactaagatttggtgggttcacaccgtgtttacaaaaaaggaggagaagaaggagtggagaaaaactctcgaaccttggaaattgtacgccaccgtcggactactagtgggaatggacgttctgacccttgctatttggcagatcgtggatcctttacacaggaccatcgaaacgttcgcaaaggaggaaccaaaggaggatatcgacgtgagcatcctgcctcagcttgagcattgctcttcaaggaagatgaacacatggcttgggattttctacgggtacaaagggctcctgctgctgctcgggatcttcttggcttacgaaactaaatcagtaagcaccgaaaaaataaacgatcacagagccgtcggaatggcaatttacaatgtagctgtcctctgtttgatcacagcaccggtgactatgatccttagttcccagcaggatgctgcgttcgcttttgccagcctggccatcgttttcagttcttacatcactctggtcgtgctgttcgtgccgaaaatgagacgcctcattactcgcggggagtggcagtccgaggctcaggataccatgaagactgggagctctacaaataacaatgaggaggagaaatcccgcctgttggagaaagagaacagagaattggagaagataatcgccgagaaggaagagagagtgagcgaactgcgccatcagctgcagagccgccagcagctgcgttcccgtcgccaccctcccacaccgcctgaacccagcggaggcctccctcgcggtccgccagagccgcctgacaggctctcttgcgacggatctagggtccacttgctgtacaaatag

SEQ ID NO: 5854 - DNA, 2700 bp, synthetic construct
  misc_feature 1..2700: note = source = /note="Description of Artificial Sequence: Synthetic coding sequence"
  source 1..2700: mol_type = other DNA
atgctgcttctacttttactcgcgccactgtttcttcgtcccccaggcgctggaggagcccaaactcccaacgcaacaagtgagggttgccagattatacatccaccttgggaggggggcatccgttaccggggtcttacccgcgaccaggtgaaggccataaatttccttccagtcgattacgagatagaatacgtgtgccgtggggagcgagaagtggtgggtcccaaagtccgcaagtgcctggccaacggcagttggaccgatatggataccccctcacggtgtgtcaaccgtacccctcattccgaacggagggccgtttatatcggtgcccttttccccatgtcgggaggttggccgggtggtcaagcgtgtcagcctgctgtagagatggctctcgaggacgttaactccaggagggacatactgccggattatgagctgaaactgattcaccacgattctaaatgcgatccgggccaagccactaaatatctgtacgaactgctgtataatgaccctatcaagatcatcttgatgcccgggtgcagctccgtgtccacactagtcgcggaggccgcgaggatgtggaatcttatcgtgttatcctacggatcaagctcccctgcgctctccaacaggcagcggttccctactttcttcaggacccacccttctgctacccttcataatcctacacgtgttaagctctttgaaaaatgggggtggaagaaaattgcaacgatacaacagaccacagaggtgtttaccagtaccctcgatgatttagaggaacgcgtgaaagaagcaggcatagaaattacctttagacagagctttttctcagatcctgccgttcccgtaaaaaatctgaaacgtcaggacgcacgcattatcgttgggcttttctatgaaaccgaagctcgcaaggtcttttgcgaggtgtataaggagcgcctttttggtaagaaatacgtctggtttctgattggttggtacgcggacaactggttcaagatctacgatccgtcaatcaactgcactgtggatgaaatgactgaggccgtagaaggccacataactacagagatagtaatgctgaacccagccaatactcggtcaatctccaacatgacctcccaagagttcgtggagaaactgactaagcgtcttaaacggcatcctgaagaaaccggaggcttccaggaggcccccttggcctatgacgcgatttgggctctggccctggcccttaataaaacatccggtggaggtggaagatctggcgttagactagaggacttcaattacaataatcaaaccatcactgaccagatttacagggccatgaacagctcttcttttgagggagtcagcggacacgtggtgttcgacgcctcagggtcgcgaatggcttggaccctcatcgagcagttgcagggcggtagttacaagaaaataggctattacgattccaccaaagacgatctgagttggtctaaaactgataagtggattggcggtagcccaccagcggatcagacgttggtgatcaagacttttcgtttcctctctcaaaaactgtttataagcgtttctgtgctatctagcctaggtatagtgctggccgtggtgtgtctgtccttcaacatctacaacagtcacgtgcgttacattcagaattctcagcccaacctgaataatctgacagctgtgggatgttctctggcactagcagccgtgttccccctgggcttagacggctaccatattggccgaaaccaatttcccttcgtgtgtcaggctcgattgtggcttcttgggctagggttttcgcttggctacggatcgatgtttaccaagatctggtgggtgcacactgtcttcactaaaaaggaagagaaaaaggagtggaggaagaccttagaaccctggaaactgtatgccaccgtgggattgctcgttgggatggatgttctgacactcgcaatttggcaaatcgtggaccctctccaccgcaccattgaaaccttcgcaaaagaggagccgaaggaagacatcgacgtgtcgattctgccccaacttgagcactgctctagcaggaaaatgaatacttggctggggattttctacggctacaagggattgctgctgttattgggcatcttcctcgcctacgaaacaaaaagcgtgtcaacagaaaagatcaatgatcatagggctgtgggaatggcaatctataatgtggcggtcctgtgtctgataactgcgccagtgacgatgattctgagtagtcagcaggatgccgcgtttgctttcgcgtctcttgcaatcgttttcagctcatacataacactggtggtcctctttgtgccaaagatgaggcggctgatcactaggggagaatggcagtcagaagcccaggacactatgaaaaccggctccagtacaaacaataacgaggaggaaaaatcccggcttctggagaaagagaaccgggagctggagaaaatcattgctgagaaggaggagcgcgtgtctgagcttaggcaccagctgcagtcacgacagcagcttaggagtaggagacatcccccaactcctcctgaaccttccgggggcctgccgagaggccccccggagcccccagaccgcctttcttgcgatggaagccgagtgcacctgctgtacaagtag

SEQ ID NO: 5855 - DNA, 2886 bp, synthetic construct
  misc_feature 1..2886: note = source = /note="Description of Artificial Sequence: Synthetic coding sequence"
  source 1..2886: mol_type = other DNA
atgctcctgctcctgttgctggctcccctctttcttaggcccccaggagcaggcggcgcccagactcccaatgccacctctgaaggctgccagatcatacacccaccatgggaggggggtatcagatacagaggtctaacccgagaccaggtaaaggccataaattttctccctgttgactacgagattgagtacgtctgtaggggcgagcgagaggtcgtaggaccaaaggttcgaaaatgtctggctaatgggtcctggacagacatggacactcccagtcgctgcgtacgaatttgcagcaagtcttacttgaccctggagaacggcaaggtttttctcacgggcggcgacttaccagccctggacggggcccgagtggacttcaggtgtgaccctgacttccatctggtcggatcatctcgtagtatatgctcgcaaggtcaatggagcactccgaaaccacactgccaggtgaacaggactcctcactcagagcggagagctgtgtacatcggtgccttattccctatgagtggcgggtggccaggaggacaggcgtgtcaaccagcagtagaaatggccttggaggacgtgaattctcgaagggacatcttgcctgactacgaattgaagcttattcatcacgattctaagtgcgatccaggacaggccacaaagtatctctatgaactcttgtacaatgatcctatcaagataattctgatgcctggttgttcctctgtgagcactctcgtggccgaagccgcaagaatgtggaacctgatcgtgttgtcctacgggtcctcctctcctgccctcagtaatcgccagcgctttccgaccttcttcagaacccacccttcagccactctgcataaccctaccagagtcaagctcttcgaaaaatggggttggaagaagattgccaccatccagcagaccacagaagtttttactagcacactggatgacttagaggaacgcgtaaaagaagccggaattgagataacatttcgacaatccttcttttcagacccagctgtgcctgtaaagaatctgaagcggcaggacgcacgaatcatcgtgggactgttttatgaaaccgaggcgcggaaagtgttttgcgaggtgtacaaggagcgcttgtttggaaagaagtacgtttggttcttaatcggctggtacgcagacaattggttcaaaatttacgatcccagtataaactgtaccgtggacgagatgacagaggctgtggaaggccacattactacagagattgttatgttaaatcctgcgaatacccgttcaatctccaacatgacctctcaggagtttgtcgaaaaattgaccaagcggctgaaacgacatcctgaggaaactggcggcttccaagaggcccccttggcctatgatgctatttgggcactcgcccttgcccttaataagacctctggcggaggcggtcggtcaggcgtgcgtctagaagactttaactacaataaccagactattaccgaccaaatctaccgggccatgaactctagctccttcgagggagtgtcagggcatgtcgtgtttgatgcaagcggctcacggatggcctggaccctcatagagcagctgcagggcggctcttataagaagatcggctactatgacagtacgaaggatgacctgagctggtctaagactgacaagtggatcggggggagccccccagctgatcagactctggtcatcaaaacattccgctttctgagccagaagctattcatctctgtgagtgtgctgtccagcctcgggattgtgctggcagtggtctgtctttcattcaacatatacaacagccacgttaggtacatccagaactcccagccgaacctgaataacttgactgctgtaggatgttctctggcccttgcagccgtgtttccactgggcctggatggatatcacatcggccgcaaccagtttccctttgtatgtcaggctaggctctggctgctgggactagggttctctctcggatatggcagcatgttcacaaagatttggtgggttcacaccgtttttaccaaaaaggaggagaaaaaggagtggagaaaaacactcgagccttggaaactctacgcaactgttgggcttctggtggggatggacgtactaacactcgcaatttggcagattgtcgaccctctccatcgtaccattgaaaccttcgcgaaagaggaacccaaggaagatattgacgtctcaatacttccccagctcgagcattgcagtagcagaaaaatgaatacctggcttggcatcttctacgggtacaaggggctgctacttctgctcgggatttttctcgcctatgagacgaagtccgtctccacagagaagataaatgaccatcgtgctgttggaatggctatttataacgtagccgtgctctgtctcataacagccccggtgacaatgattctgtcttctcagcaggacgcagctttcgcatttgcatctctcgccattgtcttctcgtcctatattaccctcgtggtgttatttgtgccgaagatgaggagacttattacccgaggggagtggcagagcgaggcccaggacaccatgaagacagggagctccaccaacaataacgaagaagaaaagagccgtctgttggaaaaggagaaccgagagctcgagaagatcattgccgaaaaggaagagcgtgttagtgagttgagacaccaactccagtcaagacagcagctaaggtctagaaggcatccaccaaccccccccgagccatctggtggtttaccacgcggcccccctgagccaccagatcgcctgtcctgcgacgggtccagggtgcatctgctttataagtag

SEQ ID NO: 5856 - DNA, 882 bp, synthetic construct
  misc_feature 1..882: note = source = /note="Description of Artificial Sequence: Synthetic coding sequence"
  source 1..882: mol_type = other DNA
atgaacaacttgagttttagtgaactttgttgcttgttttgctgtccaccatgccccgggaagattgcctccaaactcgcctttctcccaccagatcccacgtacaccctaatgtgtgatgaatctgggtcacggtggacgctacacctatccgagcgggccgactggcagtactcttcacgcgaaaaggatgcgattgaatgcttcatgacacggacttctaaaggaaatagaatcgcctgcatgtttgtgcgttgtagtccaaatgctaaatacacactgctatttagtcacgggaacgctgtggacctgggacagatgtcttccttctacatcggtctcggctcacgaattaattgtaacatcttctcctatgactacagcggctacggtgcatctagtgggaagcctacagagaagaatctgtacgcagacattgaggctgcctggttggcactgcgcacgcgttatggtattaggcccgaaaacgtcatcatttatgggcaatctatcgggactgtgccctctgtggatcttgctgctaggtacgagtcggccgcagtcatcctgcatagcccattaacgtcaggtatgcgcgtggccttccctgacactaagaagacatactgttttgacgccttcccaaatattgacaaaatcagcaaaattacctcccctgtcctgatcattcatggtactgaggatgaggtgatcgacttttcacatgggctcgccctgtttgagaggtgtcagagaccggtggaacccttgtgggtggagggtgcaggccacaacgatgtggagctgtacggccagtacctggagaggctgaagcagtttgtctctcaggaactggtccaaaagcataaggagggcaaatag

SEQ ID NO: 5857 - DNA, 1155 bp, synthetic construct
  misc_feature 1..1155: note = source = /note="Description of Artificial Sequence: Synthetic coding sequence"
  source 1..1155: mol_type = other DNA
atgtggtatgtaagcacccggggagtggcccctagagtgaactttgaaggggcactattttctgggtacgcccctgatggaggtctattcatgccggaggagttgccacaattggatcgcggcaccctctgtcagtggtccaccctgagctaccctggactcgttaaagaactctgcgcattgtttatcggttctgagctgttgccaaaggatgagctgaatgatttgatagacagggccttttcccgatttcggcaccgggaggtagtgcacctatcccggctacgaaacggacttaatgtgctggaactctggcacggtgtgacgtacgctttcaaggatttaagtctatcctgcaccacccagtttcttcagtactttctggaaaagagggagaagcacgtaacagtggtcgttggtacgtccggcgacacaggctccgccgctatcgagtcagtccaaggcgcaaaaaacatggatatcatcgtcctgctgccaaagggacactgcacaaagatacaggagctacagatgacaactgtgctcaagcagaacgtgcacgtgttcggtgtcgagggaaactccgatgagctggatgagccaatcaagacggtgttcgctgacgtcgccttcgtgaagaagcacaatcttatgtctttgaattctatcaattggtcacgagtccttgtccaaatggcccaccatttttttgcctatttccagtgcactccttcacttgatacgcaccctctgcccttggtggaggttgtggtgccgacgggcgctgccggtaatctcgcagcggggtatatcgcgcaaaaaatcggtctccctatcaggttggttgtcgccgtgaacagaaacgatataatccaccgcactgtgcagcagggggacttctcactctctgaggccgtgaagtcaacacttgcatcagccatggacatacaggtgccgtataacatggagcgggtgttctggctcttatcaggttcggattcacaggttactcgcgccctgatggagcagttcgaacgtacccagagcgtcaacctccccaaggagctgcattctaagcattcaccagttctgcctagaccctgcctctgctctcaggtccccggttcatgccctggctgttggcccgatccctag

SEQ ID NO: 5858 - DNA, 2889 bp, synthetic construct
  misc_feature 1..2889: note = source = /note="Description of Artificial Sequence: Synthetic coding sequence"
  source 1..2889: mol_type = other DNA
atgctgcggcgtcctgctccggccctcgcgcccgccgcgcggctactcctggctgggctgctgtgcggcggcggtgtatgggctgcaagagtgaataagcataaaccctggttagagcctacctatcacggtattgtaacggaaaatgacaatacagtgctcctcgacccccccctgatcgcactggacaaagatgcccctctaaggttcgccgagagcttcgaagtcaccgtgactaaagaaggagagatttgcggcttcaagatccatgggcaaaatgtgccgtttgatgccgtggtcgtcgacaagtcgaccggagaaggagtcatccgtagcaaagagaaactggattgcgagctgcaaaaggactactcattcacaatccaggcttatgactgtggcaaaggccccgacggtaccaatgttaagaagagtcacaaggctaccgtccatattcaggttaacgatgtcaacgagtatgcacccgtttttaaagaaaagagctacaaagccacagttatagagggcaagcagtacgacagtatcctccgggttgaagcagtggatgctgattgtagccctcagttttcccagatctgttcctacgagattatcactcctgatgtccctttcacagtggataaagacggatatatcaaaaacaccgagaaattgaactatggaaaagaacaccagtataagctgaccgtcaccgcgtacgactgcggaaagaaacgcgcgactgaagacgtgctggttaagatcagtattaaacctacgtgcactcccggatggcagggctggaacaacagaatcgagtatgaacccggaaccggcgccttagccgtatttcctaatatccacttggaaacctgcgacgagccagtggcatctgtgcaagctacagtggagctggagacatctcacatcggtaagggctgtgatcgtgacacatatagcgagaagtcacttcatcgcttatgtggcgccgctgccgggactgctgaactcttgccatcaccatccggttccctcaattggaccatgggcttgcctactgacaatggacatgactcagatcaggtcttcgagttcaatggtacccaggcagtccgtattcccgatggggtggtgagcgttagcccaaaggagcccttcacaatctctgtgtggatgcgccacgggccatttgggcgcaagaaagagacgattctctgttcctctgacaaaaccgacatgaacagacaccactacagcctgtacgttcacggctgcagactgatcttcctgttcagacaggatccttctgaagagaagaagtacagaccggcggagttccactggaaattaaaccaggtctgtgacgaagaatggcaccactatgtgcttaatgtggaattccccagcgtgaccctctacgtggatggtaccagccatgagcccttctccgtgacagaagactaccccttacacccatctaagatcgaaactcagctggtggtgggcgcgtgctggcaaggaggagacctgcacatgacacagtttttccggggtaacctggccggtctgacactgcggtctgggaagctggcagataaaaaagtgatcgattgtctgtatacttgcaaggaaggcctcgatctgcaggtcctcgaagactcaggtcggggggtgcagattcaggctcaccctagccaactggtgcttacgctcgagggagaggatttgggtgaattggataaagccatgcagcacattagctacctgaactcccgacaattccctacaccaggcatcagacgcctgaaaattacatcaacaattaaatgtttcaatgaggccacgtgtatttccgtgccaccagtggatggttacgtgatggtgctgcagcccgaggaaccgaaaatctccctgtcaggcgtacaccatttcgcccgggctgctagcgagtttgagtcatcagagggcgtgttcctcttccctgagctgagaatcatctcaacaattacaagggaggttgaacctgagggcgacggggccgaagatccgacagtccaggagtccctggtcagtgaggagatcgtgcatgatctggacacctgcgaggtgaccgtcgaaggggaagagctcaaccacgaacaggagtctcttgaggtcgatatggcccggcttcagcaaaagggcatcgaggtaagcagtagcgaactggggatgaccttcaccggggtggacaccatggcttcatacgaagaggtcctgcacctgctcagatatcggaactggcacgcgaggagcttgctagacagaaagtttaagctgatctgctcagagctaaacgggcgctatattagcaatgagttcaaggtggaagtcaatgttatacataccgcgaatcccatggagcacgccaaccacatggccgcccagccccagttcgtgcatccagaacatagaagctttgtcgacctctccggccacaacctcgccaaccctcatccttttgccgtggttccttctacggcaaccgttgttattgtagtttgcgtgtcattcctggtattcatgataattttaggagtgtttagaattcgagccgctcatcgcagaacgatgcgcgaccaggacacaggtaaggaaaacgaaatggactgggatgactccgccctcactatcacagtcaatcccatggagacttacgaagaccaacattcctccgaggaggaagaagaggaggaagaggaggaggaaagcgaggatggggaagaggaggatgatataacaagtgccgaaagcgagtcctccgaggaagaagagggggagcagggagaccctcaaaatgcaactcgtcagcaacagctggagtgggatgatagtaccttgtcttactag

SEQ ID NO: 5859 - DNA, 2946 bp, synthetic construct
  misc_feature 1..2946: note = source = /note="Description of Artificial Sequence: Synthetic coding sequence"
  source 1..2946: mol_type = other DNA
atgcttcggagacctgccccagcactcgcccccgcggcccggctcctgcttgctgggctgctctgcggcgggggggtttgggctgcccgcgtgaacaagcataagccatggttggagccaacatatcacggcattgttactgagaatgataataccgttctcttggaccccccattgatcgcgctcgacaaagacgcccccttgagatttgccgagtcgtttgaagtgaccgtgaccaaggaaggagaaatatgcggcttcaaaatacatggccagaacgttccatttgatgcagtggtggtagataaatctacgggggaaggggtgatccgaagcaaagaaaagctggactgtgaacttcagaaggattacagcttcaccatccaggcatacgactgcggcaaagggcctgatggcacaaatgtgaaaaagtcccacaaggcaaccgttcatattcaggtaaacgatgtcaacgaatacgcgcctgtgttcaaagagaaatcttacaaggctactgttattgagggcaagcagtatgactccattctccgggttgaggccgtggatgcagattgcagtccacaattctcccaaatttgtagctacgaaattattactcccgacgtcccattcacagtagataaagatggttacataaagaataccgaaaagttgaactatggaaaagagcatcagtacaagttgaccgtgactgcatatgattgcggtaaaaaacgggccaccgaggatgtgctggtgaaaatttcaatcaaacccacttgcacaccaggctggcagggctggaacaataggatcgagtatgaacccggtaccggcgcgctggctgtgttccccaatatccacttagagacctgcgacgagcccgtggcatctgtccaggccaccgtcgagctagaaacttctcatatcgggaaaggctgtgacagagacacgtactccgagaagtctttgcatagattgtgtggggctgccgctgggacggccgagttgttgccgtcgccctctgggagtcttaactggaccatgggactgcccactgacaacggacacgacagcgatcaggtattcgaattcaatggaacgcaggcagtacgtatacccgacggtgtggtatctgtgtcccctaaagaaccctttaccatcagcgtctggatgcggcacggaccgtttggccgaaagaaggagactattctgtgttcctccgacaaaacagacatgaataggcatcactatagcctgtacgtccatggttgcagactgatatttctgtttagacaggacccctccgaagaaaagaaataccggccggccgaattccattggaagcttaatcaggtatgtgacgaagagtggcatcactacgtacttaatgttgagttcccaagcgtgactctttacgtggatggcaccagccatgaaccattctcagtgactgaggactatccccttcatccaagtaagattgagactcaactcgtggttggtgcatgctggcaagagttttccggagtggagaatgataatgagaccgaaccagtgacagtggcctcggccgggggcgaccttcacatgacacagttcttccgaggtaatttagcagggctaacgttaaggtcaggcaagttggccgacaaaaaagtgatagattgcctctatacctgcaaggagggcttggatctgcaggttctggaagattcagggagaggagtgcaaatccaggcccacccaagtcagttggtcctgactcttgaaggcgaagaccttggtgaactcgacaaggccatgcagcacatttcctatctgaacagccggcaattccccacaccaggaattaggaggctgaaaataacatcgaccatcaagtgttttaacgaggccacttgtattagcgtcccacccgtggacgggtatgtcatggtcctccagccagaggagccgaaaatatccctgtcgggcgtgcaccacttcgcacgagccgcgagcgagttcgaatccagtgaaggggtgtttctgtttccggagctgcgcatcatttccactatcactagagaggtggaacccgagggtgatggggccgaggaccccaccgtgcaagaaagccttgtctctgaagagattgtacatgatctggacacatgtgaagtcacggtagagggcgaggagttgaaccatgaacaagagtctctggaggtcgacatggcccgcctccagcaaaaagggatcgaggtgagcagcagcgaactgggcatgacgttcactggggtggacactatggcatcatacgaagaagttcttcacctcttgaggtacaggaactggcacgcccggagtcttctggataggaagtttaagctaatttgcagcgagttgaacggtagatatatttccaatgagttcaaggtagaggtgaacgttatccacactgctaaccccatggaacacgccaaccacatggcggctcagccccagtttgtccacccagaacacagaagctttgttgacctgtcggggcacaacctcgccaacccacatccctttgccgtggtcccatccactgccacagtcgtgattgtggtatgtgtcagtttcctggtattcatgattatcctgggggtttttaggatcagggctgcacacaggcgcacaatgagggaccaggatacgggaaaggagaacgagatggattgggatgacagtgcactgacaatcacagtgaatccaatggagacctacgaggatcagcattctagtgaggaggaagaggaggaggaggaggaggaagagtctgaagatggcgaggaagaagatgacatcacttcagctgagtcagaaagctcggaggaggaggagggagagcagggagatcctcagaacgccactcgccagcagcagctggaatgggatgactccactctaagctactag

SEQ ID NO: 5860 - DNA, 678 bp, synthetic construct
  misc_feature 1..678: note = source = /note="Description of Artificial Sequence: Synthetic coding sequence"
  source 1..678: mol_type = other DNA
atgtccggatgctccaaacgatgcaaattggggttcgtcaaattcgcccagactatttttaaacttataacgggaacactgtccaaggacaaaatcgaggacgagcttgaaatgaccatggtatgtcatagacccgaggggctcgagcagcttgaggcacaaaccaatttcacgaagagagaactgcaagtactgtatcgcggcttcaagaatgaatgtcctagtggcgtcgtgaacgaagacacattcaagcaaatttatgctcaattttttccacacggcgatgcaagtacgtacgcccactatctgttcaacgcgttcgacacaactcagacaggttctgttaaattcgaggacttcgtgaccgccctcagcattctcctgcgcggcaccgtccacgaaaaactgcgctggacttttaacttgtacgacatcaacaaagatggttatataaataaggaggaaatgatggacatcgtgaaggctatctacgacatgatggggaagtatacctaccccgtactgaaagaagacaccccccgccagcacgtagatgtgtttttccagaagatggataagaataaagatggtatcgtaacactagacgaatttttggaaagttgtcaagaggatgacaatattatgaggtccctgcaactttttcagaatgtgatgtag

SEQ ID NO: 5861 - DNA, 420 bp, synthetic construct
  misc_feature 1..420: note = source = /note="Description of Artificial Sequence: Synthetic coding sequence"
  source 1..420: mol_type = other DNA
atgtataagctggcatcttgctgcctgttattcatcggcttcctgaatcctctgttatcactgcctctgctggatagccgcgagatctcttttcagctttctgccccccacgaagacgcccgcctaacccccgaagagctagagagagccagtctgttgcagattctccccgaaatgctcggcgcggagagaggtgatatccttcggaaagccgatagttcgactaatattttcaatcccaggggaaaccttcgcaagttccaggatttcagcggtcaagaccctaacattctgctgtctcatctcctcgccagaatctggaaaccctacaaaaaacagaggcgcaaacttcgacaggacctgcgtctgtggaaaaaagagccggggctgcgaatatttaagaactacgtgtgggtctag

SEQ ID NO: 5862 - DNA, 879 bp, synthetic construct
  misc_feature 1..879: note = source = /note="Description of Artificial Sequence: Synthetic coding sequence"
  source 1..879: mol_type = other DNA
atggaagtgacagctgtggcaacacagggaggatacggtagttcagactgggtgacctcctatctgctcatgttcagcgacggcgggagaaactggaaacagtacagacgggaagaatccatttgggggttccccggaaacacaaacgctgattccgttgtgcattatagactccagccgccttttgaagcccggttcctcagattcctgcctttagcttggaacccacggggtagaattgggatgcgaatcgaggtgtatggttgcgcctacaagtctgaagttgtctacttcgacggacagtctgccttgctctatagattggataagaagcccttgaaacctatccgggatgtgatctccctgaagtttaaggctatgcaatccaacggaatcctcctgcaccgagaaggacaacatggtaaccatataacactcgagttaataaagggcaagctggttttcttccttaactctggaaatgctaaactgccgtcaacaatcgccccggtaaccctaactcttgggagcctgctagacgatcagcattggcattctgtcctgattgagctgcttgacacgcaggtgaatttcaccgtggacaagcacacacatcacttccaagctaaaggcgactccagctacctggatctaaatttcgaaattagcttcggcggtattcccactccaggacggagcagggcgtttcggcggaaatcttttcacggctgcttggagaacctctactacaatggggtggacgtgaccgagttagctaaaaagcataagccacagattttgatgatggagctcgcacatgggctccaagatcagaatttgaaaatttccttgactgtctgtcaccagactacccagtag

SEQ ID NO: 5863 - DNA, 783 bp, synthetic construct
  misc_feature 1..783: note = source = /note="Description of Artificial Sequence: Synthetic coding sequence"
  source 1..783: mol_type = other DNA
atgaaaacttccgacggattcaccctgaacgccgaaagttatgttagcttcaccaccaaactagacatccctacagcagctaaatatgagtacggggtgcctctccagacctctgacagtttcttgagatttccaagttcattgacctcgtcactgtgtacagacaacaaccctgcagcttttctagttaaccaggctgtcaaatgtacgcgcaagataaatctcgaacagtgcgaggagatcgaagcactcagcatggcgttctacagcagccccgagattctgagagtccctgactccaggaaaaaagtgcccataacagtgcaaagcatcgtgattcaatcgcttaacaaaaccctgacaaggcgtgaggataccgacgtgcttcaacccactctggtgaatgccggacattttagcttgtgtgtaaacgtcgtgttggaggtcaagtacagcctgacttacacagatgccggggaagtgactaaggcggacctgagtttcgttctgggaaccgtgagctcggtggtggtgcctcttcagcagaaatttgaaatccattttctgcagactgattggtcctctccagtgagcgctcgctctaccgaaggagaagaacccgctgtgggacctgggctgccaaggctcagagggccgttctggaaattccctggacctgggcacgccggtcttggcgctcacccactgcatcatccagttattcagcaagagggctttctgccagccccccgcggctttggctacaggtccgaggtcgattag

SEQ ID NO: 5864 - DNA, 3624 bp, synthetic construct
  misc_feature 1..3624: note = source = /note="Description of Artificial Sequence: Synthetic coding sequence"
  source 1..3624: mol_type = other DNA
atggcatcagtggcctgggccgtcctcaaagtgctcctactgctgcctacacaaacttggagcccggtcggggctggtaaccctcccgattgcgacgcgccactggcctctgcactgccccggtctagcttttcttcttcttccgaactgtccagctctcatggaccaggcttctccaggcttaaccgcagagacggcgccggtggttggacccccctggtttctaataaataccagtggctccagatagacctaggggagaggatggaagtgactgcagttgccacccagggcggctacgggtcttccgattgggtcaccagctatctgctgatgttttcggacggcgggaggaactggaagcagtaccggcgcgaggagtcaatttggggcttcccgggcaacactaacgcggattcagtcgtgcattaccgtctgcaacctcccttcgaagcgcgctttcttagatttcttcccctcgcatggaaccccaggggaaggattggaatgcggatagaagtctatgggtgtgcatataagtcagaagtagtgtactttgacggtcagagcgctctcctataccgcttggacaaaaagccgctcaagccaatcagggatgtaatttccctgaagtttaaagcgatgcagagcaatggaatcctcttacatcgggagggacagcacgggaatcacatcaccttagagctgatcaagggtaagctggtgttcttcctcaattccggaaacgccaaactgccatctaccatcgcgccggtcacactcactctcggtagcctcctggatgaccagcactggcactcagtcctcatcgagctgctcgacactcaagtgaatttcacagttgataaacatacccatcacttccaggcaaaaggggacagttcctaccttgacctgaacttcgagatcagcttcggcggcatcccaaccccaggacggtcgagagcctttcggaggaagtcctttcacgggtgtctggaaaacctttattacaacggggttgacgttacagaacttgccaaaaagcataaaccacaaatcctgatgatgggcaacgtatcattctcgtgcccacaaccgcagacagtgcccgtaacgttcctgtcatcgcggagttacctggcactgcccgggaattctggcgaagataaagtaagcgtgaccttccagtttagaacctggaatagggccggacacctgttatttggggaattaagacggggaagcgggagcttcgtcctgtttctgaaagacgggaaactgaagttatctctattccagcccggacagagcccacgaaacgtgactgcaggagctggtctgaacgacggacagtggcactcggttagtttctctgcaaaatggagccacatgaacgtggtggtggatgacgacaccgccgtacagcctttagtggctgtccttattgatagtggggatacctattactttggggggtgtctcgataattcatccggttccggttgcaagagcccgttaggcggatttcaaggatgccttcgactgatcaccatcggcgacaaagcagtggatcccatcctggtccagcaaggcgcacttggatcatttagggacttgcaaatcgactcctgtgggatcacagaccgatgcctgccaagctactgtgaacacggaggcgagtgtagccaatcctgggataccttctcgtgtgactgcctcggtacagggtacaccggcgaaacttgccacagctctctctacgagcagagctgcgaggcccataaacacagaggaaatcctagcgggctatactacatcgatgcagacgggtcagggcccctggggccctttttagtttactgtaatatgacagacgcagcgtggaccgtagtccaacacggaggtccggatgctgtcaccctgagaggcgctcccagcgggcatccgcggtccgcagtatcctttgcctatgccgctggagcgggccagctgaggagcgcagtcaacctagccgaacgttgtgaacagcgccttgcacttcgttgcggtaccgcccggcgccctgattccagggacggtacgcccctatcctggtgggtggggcggaccaacgagacacacacctcctgggggggctcactccccgacgcccagaagtgcacatgcggtctagagggaaattgtatcgactctcagtactattgcaattgtgacgccggcagaaatgagtggacctctgacactatcgtactgtcgcaaaaagagcacctccccgtaacccagattgttatgaccgatgcaggtcgcccacactctgaggctgcctatactctgggacctctactatgcagaggagatcaatccttctggaactctgcttctttcaataccgagacaagctatttgcacttcccagctttccacggtgaattgaccgcggatgtatgtttttttttcaaaactaccgtcagctcgggtgtgtttatggagaatttaggaatcacagattttattaggatcgagctccgcgctcccactgaggtgactttctcgttcgacgtaggtaacggcccctgtgaggtgacggttcagagcccaacgccctttaacgacaatcagtggcaccatgttcgcgctgagcgcaatgtgaagggtgccagtctccaagtggaccagctcccccaaaagatgcagccagccccggcagacggtcatgtgcgcctgcaactgaacagtcagctgttcatcgagatcagtgcctattttgccactggcagttcaatgacataccattttcaggaacactatacactgagtgagaactcctcttcactggtgtcttccctccatagagacgtcaccttgacccgagaaatgattactctgagcttccgaacaacccgtactccctcgcttctgctgtacgtatcctcgttctatgaagagtacctgagcgtgatattagccaataacggctcgctgcagatccgatataagttagaccgccaccagaatcctgacgcatttacttttgattttaaaaatatggcagacggtcaacttcaccaggtcaaaatcaatcgggaggaagctgtggtgatggtggaagtgaaccagtctaccaagaaacaagttattctctcctccggaactgaattcaatgccgtcaagtcactgattttgggaaaagtgctggaagcggcaggcgccgatccagacacccgccgggcagccacgtcagggttcacaggctgcctcagtgctgttaggttcggccgcgcagcaccactcaaagccgctctgagaccatcaggtccatcacgggtgaccgtccggggccatgtcgcccctatggctcgctgcgccgccggtgccgcatcaggatcgcctgctcgggagctcgctccacggctggccggtggggccggccggagcggccctgcagacgaaggtgaacccttagttaacgctgaccgaagggatagtgccgttataggaggggtcattgccgtggtgatttttatccttctctgtatcaccgcaatagccattaggatttatcagcagcgcaagttaagaaaagaaaatgagtccaaagtgagcaaaaaggaagaatgctag

SEQ ID NO: 5865 - DNA, 2238 bp, synthetic construct
  misc_feature 1..2238: note = source = /note="Description of Artificial Sequence: Synthetic coding sequence"
  source 1..2238: mol_type = other DNA
atggccagtgtagcgtgggctgtcctcaaggttctactgctcctaccaacccaaacctggtcaccagtgggagccgggaaccctccagactgcgacgcccccctggcctccgccctgccaaggtcgtcattttccagttcatcagaactttcgtcctcacatggacctggcttcagtcggctaaataggcgggacggcgccggcgggtggactcctttagtctcaaacaagtaccagtggctgcagattgatctcggggagcgcatggaggtgactgccgtggctacacaggggggttacggctcatcagactgggttacctcctatttactgatgttttccgatggtggccggaactggaagcagtatcgccgcgaggagagcatttggggatttcccgggaacacaaacgcagactccgtggttcactacaggctccagcctcccttcgaggcgaggtttctgagattcctgcctctggcctggaatcccagaggccggatcggaatgcgtattgaagtatatggctgtgcttataagtcagaggttgtctactttgacggtcaatccgcactcctgtacaggctggacaagaagccgctgaaacctatacgggacgtgatctctctcaagtttaaggcaatgcaaagtaatggaatcctcctgcatcgcgaaggacaacacggaaatcacataacgctggaactgatcaagggaaagcttgttttttttcttaactcaggcaatgcaaagttgcctagtaccattgccccagtgaccctgactctgggctccctgttggacgaccagcactggcacagcgtgttgattgaacttctggatactcaagtgaattttaccgttgacaagcatacccaccatttccaggccaaaggggacagctcatacctggatttaaacttcgagatcagcttcgggggaattccgacccctgggcgcagccgggccttccggaggaagtcctttcacggatgcttggaaaacctctactataacggggtcgacgtcaccgaactggccaagaagcataaaccccaaatcctaatgatgggtaacgtgtccttttcctgcccccagccacaaacggttcctgtcacattcctcagctcacggtcttatctcgccctgcccggcaacagcggggaggataaggttagtgttacatttcagtttcgaacctggaacagagccgggcacctgctcttcggggagctccgcaggggttcaggtagtttcgtcttgtttctgaaggatggcaagctcaaacttagcctcttccagcccgggcagagcccccgaaacgttaccgccggtgctgggcttaacgatggacagtggcattctgtgtcgttctcggccaagtggagtcacatgaacgttgtcgtagatgatgacactgccgtccagcctcttgtggcggtgcttatcgactcaggtgacacttactacttcggtggttgccttgataattcgtcaggttcaggctgcaagtcgcctctgggtggatttcaaggatgtttgagattgataacgatcggggacaaggcagtggacccaatactggtgcaacaaggtgcactgggaagcttccgcgaccttcagattgactcttgtgggatcacggaccgttgccttccttcctactgtgagcacggaggagaatgcagtcagtcctgggacactttctcttgcgattgtctgggcacaggctacactggcgagacatgccactcttccctgtatgaacagagctgcgaagcccataagcacagaggaaacccctctgggctctattatatcgacgccgacggctcagggcccctgggccctttcttggtctactgtaacatgaccgatgccgcctggacagttgttcagcacggcggacccgacgcagtgacactgcgcggggctcctagtggccaccctaggtctgccgtaagttttgcctacgctgcaggtgcaggtcagctccggtcagccgtcaatctggcggaaaggtgcgagcagcgtctggccttgcgttgcggtactgctaggaggccggatagccgcgatggtacccctctgtcatggtgggtaggacggacaaacgaaacccatactagttgggggggatcgctccctgatgcacaaaaatgcacctgcggcctggagggcaattgtatcgatagccagtattactgtaactgtgatgcaggaaggaatgagtggtag

SEQ ID NO: 5866 - DNA, 549 bp, synthetic construct
  misc_feature 1..549: note = source = /note="Description of Artificial Sequence: Synthetic coding sequence"
  source 1..549: mol_type = other DNA
atggagcctcagctgggacccgaagctgccgcactcagacccgggtggctggccctattactttgggtatctgccctctcctgctcatttagcttgcccgcctcctcgttatcttctttagtcccacaggttcgaacttcatataatttcgggaggacttttctgggcctcgataagtgcaatgcctgtattgggacgtctatttgcaaaaagttctttaaagaggagattaggagcgacaattggttggcgagtcaccttggattgccccccgactccttgttatcctatcccgctaattactctgacgattccaaaatctggcgccccgtggagatctttcggctggtgtccaagtaccagaacgaaatctcggatagacggatctgtgcctcggctagtgcgcccaaaacttgtagcattgagagagttctgagaaagacagagcgttttcagaaatggttacaggcaaagagactgacacctgacctcgtccaagactgtcatcaagggcagcgggaactcaagttcttgtgcatgcttcggtag

SEQ ID NO: 5867 - DNA, 282 bp, synthetic construct
  misc_feature 1..282: note = source = /note="Description of Artificial Sequence: Synthetic coding sequence"
  source 1..282: mol_type = other DNA
atggactccctgagaaagatgttgattagcgttgcgatgttgggtgccggagccggagtgggatacgccctcctagtgattgtgacgccgggagaacgcagaaagcaggagatgctgaaagagatgcccctccaggacccgcgcagtagggaggaagccgcccgaacccagcagcttcttttggcgacattacaggaagcagccacgacccaagagaatgtagcttggcgaaagaattggatggttggaggagagggtggagccggaggccggtctccctag

SEQ ID NO: 5868 - DNA, 387 bp, synthetic construct
  misc_feature 1..387: note = source = /note="Description of Artificial Sequence: Synthetic coding sequence"
  source 1..387: mol_type = other DNA
atgggcaaatctgcctctaagcaatttcacaacgaagtgttaaaagcccacaacgagtacaggcagaaacacggggtccccccattaaagctctgcaagaacctaaacagagaggcccagcaatatagtgaggccttagcttctacaagaatcctgaaacacagccctgaatcgagcaggggccagtgtggcgagaatcttgcctgggcttcctacgaccagacgggccacttcactgccatggtctggaaaaacactaagaagatgggcgtcgggaaagcatctgccagtgatggttcctcctttgtggttgcaagatacttccctgcaggaaacgtggttaatgaagggttctttgaagaaaatgtccttccccctaagaaatag

SEQ ID NO: 5869 - DNA, 465 bp, synthetic construct
  misc_feature 1..465: note = source = /note="Description of Artificial Sequence: Synthetic coding sequence"
  source 1..465: mol_type = other DNA
atgggcaaaagcgcttccaagcagtttcacaatgaagtgctgaaggctcacaatgagtatcgacagaaacacggagtgcctcccctcaagctctgcaagaatctgaatcgggaggctcagcagtattctgaagcactggcctccaccagaatattaaaacattctccagagtcctctagagggcaatgcggggaaaaccttgcctgggcatcttacgatcagacaggcaaggaggtagcagatagatggtactccgaaattaaaaattacaacttccagcagcccggtttcacatccggcaccggtcatttcaccgccatggtgtggaagaacacaaaaaaaatgggagttgggaaggctagtgcttccgatggctcatcattcgtggtggcccgctactttccggccggcaatgtggtcaatgaaggcttcttcgaagagaacgttcttcctccaaagaagtag

SEQ ID NO: 5870 - DNA, 831 bp, synthetic construct
  misc_feature 1..831: note = source = /note="Description of Artificial Sequence: Synthetic coding sequence"
  source 1..831: mol_type = other DNA
atggattcttcacgagaacctacattgggccgacttgacgccgccggtttctggcaggtgtggcagagatttgatgctgatgagaagggatacatcgaggaaaaagagctggacgcctttttcctgcacatgctgatgaaactgggaaccgatgataccgtaatgaaggcaaacctccacaaagtcaagcagcagtttatgaccacacaggacgcctccaaggacggtcgcatccgtatgaaggaacttgcaggcatgttcttatccgaggatgagaatttcctgctcttgtttcgccgcgagaaccccctagactcaagcgtggaatttatgcaaatttggcgtaagtatgatgccgattcttccggtttcatatccgctgctgagcttcgcaactttctgcgagatctctttcttcaccataagaaagcaatttcagaagccaagctagaggaatatacagggaccatgatgaagatctttgatcggaataaggacggtagattagatctaaatgacctggccaggattctggctctccaggagaacttccttctgcagtttaagatggacgcctgctccacagaggagcggaagagggactttgagaaaatctttgcatactacgatgtaagcaaaactggagccttggaaggtcccgaggtggatggttttgtgaaagacatgatggagctggtccagcccagtattagcggggtggaccttgacaagtttcgggagatcttgctccgacactgtgacgtgaataaagatggaaaaatccagaagagtgaacttgctctgtgtttgggcctgaagattaatccatag

SEQ ID NO: 5871 - DNA, 216 bp, synthetic construct
  misc_feature 1..216: note = source = /note="Description of Artificial Sequence: Synthetic coding sequence"
  source 1..216: mol_type = other DNA
atgcctgctggggtccccatgtccacctacctgaaaatgttcgctgcttctttgctcgctatgtgcgccggtgccgaagtggtgcaccgctactaccggccagatttgacaatcccagaaatccccccaaaacgcggtgagttaaaaactgagttgctcggactgaaagaacgtaagcataaaccgcaggtgtcccagcaggaagaactgaagtag

SEQ ID NO: 5872 - DNA, 1287 bp, synthetic construct
  misc_feature 1..1287: note = source = /note="Description of Artificial Sequence: Synthetic coding sequence"
  source 1..1287: mol_type = other DNA
atgaaacctatgctgaaagacttctctaacctgttgttggtcgttctttgtgactatgtgctcggtgaggcggagtatctactattacgggagcccggccatgtggctctgagcaatgacacggtctacgtggattttcagtatttcgatggcgcaaatggcactctgagaaacgtgtccgtgctcctactagaagcaaataccaatcagacggttaccacaaagtatttgctcacaaatcagagccagggcactttgaagttcgaatgtttctacttcaaggaagctggtgactattggttcactatgaccccagaggccactgataactccacaccatttccttggtgggagaagagtgccttcctgaaagtggagtggcccgtgttccacgtagacttaaatagaagcgctaaagcagcggagggcacttttcaggttggactgtttacgtctcaaccgctgtgtccttttcctgtagataagccaaacatagtggtggatgttatcttcacaaatagcttaccagaggctcggcgcaatagcaggcagcccctggagatcagaaccagcaagaggaccgaactggcgcaaggacagtgggtcgaatttggatgtgccccactggggcctgaagcttatgtgacagtcgtactgaaacttttgggtcgagactccgtgattacctccactggcccgatcgacctggcgcaaaagtttgggtacaagcttgtaatggtgccagagttgacttgtgaatcaggcgtggaggtcaccgtgctcccacccccctgcacgttcgtacagggtgtggtgacagtgttcaaggaggcgccacgctatcccggcaaacggaccattcatctcgcagagaattcgttgcctctgggtgagcgtcgtactatctttaactgcactctctttgatatgggaaaaaacaagtattgctttgacttcggtatctcttcaagaagccactttagcgctaaagaagagtgtatgttgatccaacgcaatacagagacttggggtctgtggcaaccatggtcccaatgttccgctacctgtggtgatggcgtgagggaacggcggagggtatgcttgacatcattccctagctcaccagtatgccctggaatgtccttagaggcctccctgtgctctctcgaggaatgcgctggccggtttcggagctgctgtcccggttggtcagcaatggttcgatccaggctgactaactctgcttcacgggtgcaggccattctgctccctcagccccttgcatag

SEQ ID NO: 5873 - DNA, 312 bp, synthetic construct
  misc_feature 1..312: note = source = /note="Description of Artificial Sequence: Synthetic coding sequence"
  source 1..312: mol_type = other DNA
atgaaactctgtgtgacggtcctgtccctacttgtgttggtggctgccttttgcagtctggcgttaagcgcacctatggggagcgacccgcctaccgcctgttgcttttcttatacagctagaaagctacccagaaactttgtggtggattattacgaaactagctcactgtgttctcaacctgcggttgtctacagggagtccgcatcctcggcagcacctggcaggataccgtccacgcgagctgctcctcacggaccctggtccggtcgtggtaggtgcctgccccaggcacgggataaggccagatag

SEQ ID NO: 5874 - DNA, 279 bp, synthetic construct
  misc_feature 1..279: note = source = /note="Description of Artificial Sequence: Synthetic coding sequence"
  source 1..279: mol_type = other DNA
atgaaactgtgcgtgacagtcctcagcctcttagttctcgtcgccgccttttgctcactagcactctcagcgccaatgggctcagacccacccactgcttgctgtttcagctacacagccaggaagctcccccgcaatttcgttgtggattattacgagacatcgagcctatgctcccaaccagctgtgccctgggatagcaacctgggaaagcaggtgtgcgcagatccttcggaaagctgggtacaggagtacgtttatgacctcgagctaaattag

SEQ ID NO: 5875 - DNA, 282 bp, synthetic construct
  misc_feature 1..282: note = source = /note="Description of Artificial Sequence: Synthetic coding sequence"
  source 1..282: mol_type = other DNA
atgcaggtcagcacagcagccctggcagtgctgttatgtacgatggccttgtgcaatcaggttttatctgctccactggctgctgatactccaaccgcttgctgtttctcatatacatctcggcaaatcccacagaactttatagccgattatttcgagaccagttcccaatgtagtaagccttccgtgattttcttaacgaagagagggcgacaagtctgtgcggatcccagtgaggagtgggtgcagaaatatgtgtccgatttggagctgagcgcttag

SEQ ID NO: 5876 - DNA, 1869 bp, synthetic construct
  misc_feature 1..1869: note = source = /note="Description of Artificial Sequence: Synthetic coding sequence"
  source 1..1869: mol_type = other DNA
atgggaaaatccgagggacccgtgggtatggtggaaagcgccggccgcgcgggacaaaaaaggccaggctttttagaggggggcttactcttgctgctgctgctggtcacagccgcgttagtagcactgggagtgctctatgccgatcgccggggaaagcagctgccacggttggcctcacggttatgtttcctgcaggaggaacggacctttgtgaagaggaagcctagaggaatcccggaggcccaggaggtgagcgaagtgtgcacaactccaggttgcgtaatcgcagctgcacgaatactacagaacatggatcccactacagagccatgtgatgacttctaccagttcgcgtgtggtggatggctgagacgccacgtgatcccagagacgaatagccgctactccatctttgacgtgctgcgggatgaactggaagttatactgaaagtggagttagagacccagctagccaaggccactgttccacaggaggagaggcatgatgtaattgccctgtatcataggatgggtctcgaagagctgcaatcacagttcggcctaaagggatttaattggacactgtttatccaaaccgtgttatctagcgtcaaaattaaattactgcccgacgaggaggtggttgtgtatggcatcccctacctgcagaacttggagaacattatcgacacctacagtgctagaaccatacagaattacttagtttggcggctagtactcgaccgcattgggtctctttcccaacgctttaaggatactagggttaactaccgcaaggcccttttcggaaccatggtagaggaggtccgttggagggaatgcgtggggtacgtgaattcaaatatggaaaacgccgtggggtcactgtacgttcgtgaagcattcccgggggactccaaatcgatggtccgggaactcattgataaggtccgcactgtgttcgtggagaccctggacgaactggggtggatggatgaagagtccaagaagaaagcgcaagaaaaggcgatgagtatccgcgagcagattggccacccagattacattctcgaggaaatgaatcggaggctagatgaagagtactctaatctgaatttttcggaggatttgtattttgaaaacagcttgcagaatttaaaggtgggggcacagcgctctctgaggaaactaagggagaaagtcgatcccaacctgtggatcatcggcgccgctgtcgtgaatgccttctactccccaaaccgaaaccagatcgtgtttcccgcagggatacttcagcctccctttttcagcaaggagcagccccaggcactgaactttggcggcatcggtatggtcataggacacgaaatcactcacggcttcgacgataatggaagaaactttgataaaaatggaaatatgatggactggtggtccaatttcagtacacagcattttcgtgaacaatcagagtgcatgatctaccagtacggcaactattcatgggatctcgccgacgagcagaatgtgaatggcttcaataccctaggcgaaaatattgcagataacgggggagtgcgtcaggcctacaaggcttacttgaagtggatggccgaaggcgggaaagatcaacagctgccaggcctagacctcacccatgagcagctgtttttcatcaactacgcacaggtctggtgcggttcctacaggccagaatttgcaattcagagcataaaaactgatgtgcattcgcctttgaaatatcgcgttctcggttctttgcaaaaccttgcggcatttgccgacacattccattgcgcccgggggacccctatgcatccaaaggagcggtgcagagtatggtag

SEQ ID NO: 5877 - DNA, 2340 bp, synthetic construct
  misc_feature 1..2340: note = source = /note="Description of Artificial Sequence: Synthetic coding sequence"
  source 1..2340: mol_type = other DNA
atggggaagtccgaaggacccgtagggatggtggagtcagcagggcgggctggccagaagagaccagggttcttggaaggcggactccttcttctcctgctgctcgtcacagcagccctagtggccctgggggtcctttatgccgacagacggggcaaacagcttcccagactggcgagccggctgtgctttctccaagaggagaggaccttcgtgaaaagaaaaccaagaggcatcccagaggcccaggaggtctccgaggtatgtacaactcctggatgtgtcattgctgcggctcgaatccttcagaacatggacccaaccacagagccctgtgatgacttctatcagtttgcttgcggtggctggctccgtcgtcatgtcatccccgaaaccaatagccgctattccattttcgatgtacttcgcgatgagctggaggtgattctcaaggctgtgttggaaaattctaccgcaaaggacaggccggctgtcgaaaaagcccgcacgctgtaccggtcttgtatgaaccagtccgtgatagaaaagcgtggtagtcagccactgcttgacattctggaggtggtgggcgggtggcccgtagcaatggatagatggaacgaaacagttggtctcgagtgggagctggagagacagttagcccttatgaactctcagtttaaccggagagtgttgatcgacctgttcatatggaatgatgaccagaacagctccagacacatcatctatattgatcaacccacactgggtatgcccagtcgggagtattattttaacggcggtagcaatagaaaagtgcgggaagcttatctgcaattcatggtttctgtcgccacattgctgcgcgaggacgccaatctaccccgggacagctgcctggttcaggaagatatggtacaggtactggaactcgaaacacagcttgccaaagctacagtgcctcaggaggagaggcatgatgtcattgccctctatcataggatgggattggaagagctgcagtctcagtttgggcttaagggcttcaattggaccctgttcatccagacagtactgtcatccgtcaagatcaagctccttcccgatgaagaggtggtggtctatgggataccgtacctacagaatctggaaaacattattgacacctattcagcgcggactattcaaaattacctggtctggcgccttgtgcttgatcggattgggtcccttagtcagagattcaaagacacgcgggtgaactatagaaaagccttgtttggaacgatggtagaggaagttcgctggagggaatgtgttgggtatgtgaattcaaatatggagaatgcagtaggaagcctctatgtcagggaggcatttcctggggatagcaagagtatggtgagggaactgattgacaaagttcgcacggttttcgtggaaactctggacgagttgggctggatggatgaggagagcaaaaagaaggctcaagaaaaagccatgtcaattagggagcagattggacatcccgattacatcctggaagagatgaaccgccggctggatgaagagtactccaatctgaacttttccgaggatctgtacttcgagaactcgttgcaaaatctcaaggtgggtgcccagaggagcctgcgcaagctccgagagaaagtggatccaaatctgtggataattggagcggccgtggtcaatgccttctactctccaaacagaaatcagatagttttccctgccggcatcctgcagccacctttcttttccaaggaacagccccaggcacttaactttgggggcatcggtatggtgataggacacgagataacgcacggattcgacgacaatgggaggaacttcgacaaaaacggaaacatgatggattggtggagcaattttagtacccaacactttagagaacagtcagagtgcatgatctaccagtacggaaactactcttgggatctggccgacgagcagaatgtgaatggctttaatactctgggagagaacattgctgataatggtggagtccgacaggcatataaggcctatttgaagtggatggccgagggcggtaaagaccagcaactgcccggtttggacctgacccacgaacagctgttcttcataaattacgctcaggtgtggtgtggaagctaccggcccgagtttgccatccagagtataaagaccgacgtgcacagtcccctaaaataccgggtgctgggcagccttcagaatctggctgcgtttgctgacacctttcactgcgcccggggaacccctatgcaccctaaggaacggtgtagagtctggtag

SEQ ID NO: 5878 - DNA, 258 bp, synthetic construct
  misc_feature 1..258: note = source = /note="Description of Artificial Sequence: Synthetic coding sequence"
  source 1..258: mol_type = other DNA
atgtccgtacacatgcctgctatgaaaatctgcgagaaactcaaaaagctggattcgcaaatctgtgaacttaagtatgaaaaaacgctggaccttgctagtgtggacctccggaaaatgagagtcgcggagctcaaacagatcctacactcatggggggaagagtgcagggcctgcgccgagaagaccgactacgtaaaccttattcaggagctcgccccaaagtatgctgccacacatcctaaaacagaactgtag

SEQ ID NO: 5879 - DNA, 657 bp, synthetic construct
  misc_feature 1..657: note = source = /note="Description of Artificial Sequence: Synthetic coding sequence"
  source 1..657: mol_type = other DNA
atgggcagggtattcctgacaggcgagaaagccaacagcatcttgaagcggtaccctagagccaatggattttttgaagaaattaggcagggcaatatcgaacgggaatgcaaagaggagttttgcacatttgaggaggcgagagaagctttcgagaacaatgaaaaaactaaagagttctggagcacttatacaaaggcccaacagggagagtccaatcgcggctccgactggttccagttctacctgactttccctctcatatttggactgttcataatcctgctggtgattttcctgatttggcggtgctttctgagaaacaaaaccaggcggcagactgtgaccgagggacacataccctttcctcagcacctgaatatcattacaccgcccccacctcctgatgaggtctttgattccagcggcctgagccccggttttctgggttacgtggtcggccgcagcgacagtgtgtccacgagactgtccaactgtgaccccccacccacctacgaggaggccacaggtcaggtgaatctacaacgctccgagactgaaccacacttggatcctccgcctgagtatgaagacatcgttaatagcaatagcgcttctgccatacctatggttcctgtggtcactactatcaagtag

SEQ ID NO: 5880 - DNA, 1365 bp, synthetic construct
  misc_feature 1..1365: note = source = /note="Description of Artificial Sequence: Synthetic coding sequence"
  source 1..1365: mol_type = other DNA
atggctcggcctaacaaattcctgttgtggttttgctgcttcgcctggctatgctttcccatttctctgggctctcaggcgagtggcggggaagcccagatcgccgcctccgcagaactggagagtggagctatgccatggtcactgttgcagcacatcgatgaacgcgacagagccggcctcctgcctgctctattcaaagtgctgagcgttggacggggtggttctccacgcctgcagccggattcaagggccctacattacatgaagaaattatataagacatatgcaactaaggaaggcatccccaagtcgaatcgaagccatctgtataacactgtcaggctgtttaccccctgcacaagacataaacaggctccaggagaccaagtgacaggtatactcccaagcgtggagttactgttcaatctcgacaggatcacgaccgtggagcaccttttaaaatccgttctgctgtacaatatcaacaacagcgtttccttctcctctgcagtaaaatgtgtgtgtaatctaatgatcaaagagcccaagtctagctcacgcacgctcggacgggctccatactcttttactttcaatagtcaatttgagtttgggaagaagcataaatggatacagatcgacgtgacctctctgttgcagcccctagtcgcaagcaacaagaggtcaattcacatgagtataaactttacatgcatgaaagatcagctcgaacacccgtccgctcagaatggcctcttcaatatgactctagttagtccctctctaatcctttacctgaacgacacgagtgcgcaggcatatcactcctggtattccttgcattataagcgccgccctagccagggcccggaccaggagcgttccctgtccgcttatcctgtcggcgaagaggccgctgaggacggaaggtcatcgcatcatcgacacagacgaggccaggagacggtgagttcagaactgaaaaaacctctgggccccgcctccttcaacctgagcgagtactttaggcagtttttgctgcctcagaatgaatgtgagctgcacgatttccggctgagttttagccagctgaaatgggataattggattgtggccccacaccggtataaccctaggtattgtaagggtgattgtcctagggccgtgggccataggtatggtagtccggttcacactatggtccagaacatcatttacgagaagctagatagctctgtcccccggcccagctgcgtccccgctaagtactctccactcagcgttcttaccatagaaccggatggttcaatcgcctacaaagagtacgaagatatgattgctactaagtgcacctgccggtag

SEQ ID NO: 5881 - DNA, 417 bp, synthetic construct
  misc_feature 1..417: note = source = /note="Description of Artificial Sequence: Synthetic coding sequence"
  source 1..417: mol_type = other DNA
atgacatggaggcaggccgttctgctgtcttgtttctcagcagttgtactactgtccatgctccgagaggggactagtgttagtgtgggtaccatgcagatggctggggaggaggcctcagaggacgcgaaacaaaaaatcttcatgcaggagtcagatgccagcaatttcttaaaaagacgaggtaaaagaagccctaagtcccgtgacgaggtgaatgtggaaaacaggcagaaactgcgggtcgatgagctgaggcgggagtattatgaggaacaaagaaacgaatttgaaaacttcgtcgaggaacaaaacgatgaacaggaagagcgatcaagggaggctgtggaacaatggcgtcagtggcactatgatggcctgcaccccagctatctctacaacaggcaccacacctag

SEQ ID NO: 5882 - DNA, 729 bp, synthetic construct
  misc_feature 1..729: note = source = /note="Description of Artificial Sequence: Synthetic coding sequence"
  source 1..729: mol_type = other DNA
atggctctgaagaacaagtttagctgcctctggattcttggcctgtgtcttgtagccacgacctcgtccaaaattccgagcataactgatccacattttatagacaactgcattgaagctcacaatgagtggcgcggaaaggtaaatcctccagccgcagatatgaaatacatgatctgggacaaaggattagctaagatggcaaaagcttgggccaatcaatgtaaattcgaacacaatgattgcctcgacaagtcctacaagtgctacgcggcctttgaatacgtcggtgaaaatatttggctgggggggattaagagtttcacgccacgccatgctataactgcctggtacaacgaaactcagttttatgatttcgactctctgagctgtagtcgagtttgtggccattatacccagttagtgtgggcgaattcattttacgtaggttgtgccgtggcaatgtgtcccaacttaggcggagcaagcactgcaatttttgtgtgtaactacggccccgcaggcaattttgcgaacatgcccccgtacgtgagaggggaaagctgtagtttgtgctcgaaggaagaaaaatgtgtaaaaaacctgtgtcggactcctcaactcattatccccaatcagaatccttttttaaaaccgaccggcagggccccacagcagactgctttcaacccgtttagcttgggattcctccttctgcgtatcttctag

SEQ ID NO: 5883 - DNA, 813 bp, synthetic construct
  misc_feature 1..813: note = source = /note="Description of Artificial Sequence: Synthetic coding sequence"
  source 1..813: mol_type = other DNA
atgctgaggcaattgctgctcgcagctctctgtttagccggccccccagcacctgctcgtgcttgtcagctgcccagtgagtggcgaccccttagcgaaggctgccgcgccgagctcgctgagactatcgtatacgcacgcgtgctcgcacttcacccagaggctccgggtctctacaaccacctaccctggcagtatcacgctggccagggcgggttattctactccgccgaggtcgagatgttatgcgatcaagcgtggggatctatgctggaagttcccgctggttcacgtcttaatctgacgggtctgggatacttctcatgccattcacatacagtggtgcaggattactcgtatttcttcttcctcaggatggatgagaactataacctcttgcctcatggcgtgaactttcaggacgccatcttcccggatacacaggagaatcgccgcatgttctcctccctgtttcagttttccaattgcagtcagggccagcaacttgcgaccttcagcagcgactgggagatccaggaggattcccgccttatgtgttctagcgtccagaaggctctgtttgaagaagaggatcacgtgaaaaagctccagcaaaaagtcgccaccctggagaagcgaaatcgtcagttacgcgaacgggtcaagaaggtcaagagaagccttagacaggcccgtaagaaaggacggcacctggagttagcaaaccagaagctgtctgagaagcttgcggcaggagcgctgccccacatcaacgccagagggccggtgcgaccaccgtacttgcgcggctag

SEQ ID NO: 5884 - DNA, 438 bp, synthetic construct
  misc_feature 1..438: note = source = /note="Description of Artificial Sequence: Synthetic coding sequence"
  source 1..438: mol_type = other DNA
atggacgagaactacaatctgttaccacacggcgttaactttcaggacgcaattttccccgacactcaggaaaataggcgaatgttttctagtctcttccagttctcgaattgcagccaaggacagcaactagccacctttagttccgactgggaaattcaagaagatagtcggcttatgtgctcatcggtgcagaaagcactgtttgaggaggaagatcacgtgaagaagctgcagcaaaaagtggccactttggagaaacgcaatcggcagctccgtgagagggtcaagaaggtgaagcggtcactgcgccaagcaaggaagaaaggccggcacttggaactggcgaaccagaagctgagcgaaaaactggcagcaggtgcactaccgcatattaacgccagaggtcctgtgaggccaccttatctgcgtggctag

SEQ ID NO: 5885 - DNA, 1830 bp, synthetic construct
  misc_feature 1..1830: note = source = /note="Description of Artificial Sequence: Synthetic coding sequence"
  source 1..1830: mol_type = other DNA
atggagttgggctgctggacacagcttggtctcaccttcctccagctcctgctgatcagctcgctccctagagagtacacagtgataaacgaagcatgccccggggccgagtggaatatcatgtgccgggagtgttgcgaatatgaccaaatcgaatgtgtgtgtcccggaaaacgagaagttgtcggctacacgatcccatgctgccgaaatgaggaaaatgaatgcgacagttgtttgatccacccaggatgcaccatctttgagaattgtaaaagctgtcgtaacgggtcgtggggcggcaccttagacgatttttatgtaaaggggttttattgcgcagaatgccgcgctggatggtatggaggggattgtatgccctgctcttcatctccttgtttccatgacggtacctgtgtcctggacaaagccggcagctataagtgtgcctgcttagccggctacacaggccaacggtgcgagaatctgctggaggagcggaactgcagtgatcccggcggtccagtgaatggctaccaaaaaatcaccggaggtcccggactcattaacgggagacacgcaaaaattggcaccgttgtctcattcttctgtaacaatagttacgttctaagcggaaatgaaaagagaacctgtcagcaaaatggagagtggagcggaaagcagcccatatgtataaaagcgtgtcgcgagcctaaaatttcagacctggtacgacggcgcgttctgccaatgcaggtgcagtccagggagactccgctacaccagctttatagtgccgccttcagcaaacagaaacttcagagcgcccccaccaaaaagcccgccctgcccttcggggatttacctatgggataccaacacctccacacccagctgcaatatgaatgcatttctcccttctaccgcaggctcggctcaagccgcagaacctgcctaaggactggaaaatggagcggcagggctccttcatgcatccccatttgcgggaagatcgaaaatattacagcccctaaaacccagggtctccgatggccttggcaggctgctatctaccgcaggacaagtggcgtgcacgatgggagtctccacaaaggagcctggttccttgtgtgttccggcgcccttgtcaatgaaagaactgtcgtggtcgccgcccattgcgttaccgacctgggcaaggtaacaatgatcaagaccgccgacctgaaggtcgtgttagggaaattttacagagatgatgatcgcgacgagaagaccattcaatccctgcaaatttctgccattatactgcacccaaattatgaccccattctcctcgatgccgacatcgctatcctgaaattgctagacaaggccaggatcagtacaagggtacagccaatttgcctggcagcatcccgcgatctgtcaacctcgttccaggagtcacacatcacagtggccggttggaacgtgctagcagatgtgcgttcacccggcttcaagaacgataccctgcgtagcggagtggtgagcgtggttgacagcctgctctgtgaagagcaacacgaagatcacggtattcccgtatccgtgacagacaatatgttctgcgcctcttgggaacctactgcaccttctgacatctgtactgctgagacaggcggaattgctgcggtgagctttcccggccgcgcttctccggaaccgcggtggcatctgatggggttagtgagctggtcttatgataaaacatgcagccaccgcctcagtaccgcctttacaaaagtcctgcccttcaaggattggatcgagcgcaacatgaagtag

SEQ ID NO: 5886 - DNA, 2163 bp, synthetic construct
  misc_feature 1..2163: note = source = /note="Description of Artificial Sequence: Synthetic coding sequence"
  source 1..2163: mol_type = other DNA
atggaactgggttgctggacacagctgggcctgacctttttgcaactcctgctaatctcatcccttccaagagagtatacagtgatcaatgaagcctgtcctggagccgagtggaatataatgtgccgggaatgttgtgagtacgatcaaatagaatgcgtgtgccccggcaaacgggaagtggttggatacacgataccgtgctgcagaaacgaagaaaatgaatgcgattcatgcctcattcatccaggatgcaccatctttgaaaattgcaagagctgtcggaatggtagttggggcggaacgctggatgatttctatgtgaaggggttctattgcgccgaatgccgcgcaggttggtatggcggtgactgcatgagatgcggacaagtcctccgcgcaccaaagggacagatcctgctcgaaagttatccactgaacgctcactgcgagtggaccatccatgctaagcctggctttgtaatacaactcaggtttgtcatgctttctctggaatttgactacatgtgccaatatgactatgtggaggttcgcgatggagacaatcgggatgggcaaatcatcaagcgggtgtgcggaaacgaaaggcccgctcctatccaatccatcggaagttctctgcacgtgctcttccacagcgacgggtcaaaaaatttcgacggattccacgcgatatacgaagaaattactgcctgctcttcttcaccatgctttcacgacggcacctgtgtgctggacaaagctgggtcttacaaatgtgcctgcttagccggatatacaggccagcggtgcgagaacctccttgaagagaggaattgttctgatcctggcggccctgttaacgggtaccagaagattacggggggccctggattgatcaatggccggcacgcaaagatcggaaccgttgtttcattcttctgcaacaacagctacgtcctgtcaggaaatgagaaaagaacctgccagcaaaacggcgagtggtcaggcaagcagccaatttgcattaaagcatgcagggaacctaagatatcagacctcgtgcggcgcagagtgctcccaatgcaggttcagagccgtgaaacccccctgcaccagttgtactcagctgctttctctaagcaaaagctacagagcgcgccaacaaagaagcccgccctgcctttcggcgatctacctatgggctaccagcacctacatacacagctgcaatacgaatgcatctccccattctacaggcgcttggggtcatcccggaggacctgcctgagaacgggcaagtggtcagggagagctccaagttgtataccaatttgcgggaagattgaaaacatcacagctcctaagacacagggcctgaggtggccctggcaggcagcgatatatagaaggacttccggcgtccatgatggaagcctgcataaaggtgcatggttcctggtgtgctccggcgctctggttaacgaaaggactgtagtagtggccgctcactgtgtaacggaccttggaaaggtcacaatgattaagactgccgacttgaaagtcgtgctcggcaaattctaccgggatgatgatagggacgaaaagactatccaatccctgcaaatctctgccattatcctgcaccctaactacgaccccatcctccttgatgctgacattgcaattttgaagctcctcgataaagctaggatcagcaccagggttcaacccatttgtctggcagctagccgagacttgagtacctccttccaggaaagccacatcaccgtcgctggatggaacgtgctcgccgacgtgcgttcccctggcttcaagaacgatactctacgctctggcgttgtgtccgtggttgactccctcctgtgtgaagaacagcatgaagaccatgggatacctgtgtccgtgaccgataatatgttctgtgccagctgggaaccgaccgccccctctgacatctgtacggctgagacgggcggcatcgccgctgtgtcgttccccggaagagccagccccgaacccaggtggcacttgatgggcctcgtgagttggtcctacgacaagacatgttctcacagactgtctactgcttttaccaaagtccttccctttaaggactggatcgagcggaacatgaagtag

SEQ ID NO: 5887 - DNA, 1134 bp, synthetic construct
  misc_feature 1..1134: note = source = /note="Description of Artificial Sequence: Synthetic coding sequence"
  source 1..1134: mol_type = other DNA
atggaggctctcctcttaggcgccggcttactgttaggggcgtatgtgctggtgtattacaaccttgttaaggctccaccttgcgggggtatgggaaatctgagaggaaggaccgcagtcgtgaccggtgcaaacagtggaatcggtaaaatgactgcgctggagctggccaggcgcggagcgagagtggtactggcttgcagatcacaagagaggggcgaagccgcggcttttgacttacgccaggaaagcggtaacaacgaggtcattttcatggcactggacctggctagcctcgcctctgtgcgagccttcgctacagccttcttaagctccgaacccaggttggatatactaatacataacgcaggcattagtagttgcggacggacccgggaagcttttaacctgcttctgcgcgtcaatcatatcggaccgtttctgctcactcacttgctccttccttgtctcaaagcttgcgcccccagccgggtcgtcgtcgtcgcttctgccgcacattgcaggggccgcttggactttaagagattagaccggcccgttgtgggatggaggcaggagctccgggcttatgctgataccaagctggccaacgtgttgttcgcccgtgaactggctaaccagctggaagccacgggtgtaacctgttacgccgcccatccgggacccgttaatagcgaactcttcctccggcacgtgccagggtggctacggcctttgttaaggcccctggcatggttagtgctgcgggccccaagagggggagcacaaacacccctctattgtgccttgcaagaggggattgagccactctctggtaggtacttcgccaactgccacgttgaagaagtaccccccgctgccagagacgatcgtgccgcccaccgattgtgggaggccagcaagcgtttagccgggctcggacccggggaagatgcggagcccgatgaagatccccagagcgaggatagcgaggcaccaagcagcctgtctacacctcaccctgaggagccgacagtatctcagccctacccatctccccagtcaagtccagatttaagtaagatgacacatcggattcaggcaaaggtagagccagaaattcagttaagttag

SEQ ID NO: 5888 - DNA, 381 bp, synthetic construct
  misc_feature 1..381: note = source = /note="Description of Artificial Sequence: Synthetic coding sequence"
  source 1..381: mol_type = other DNA
atgatcagtttccatgtgatctttctgagcctgggtagagggaagctcttcctacctgtcaacttctgcttcctgaaactgaaaaatagccaggttcggatacctaaagattttacatgcaacttgcacgtcttatttcggaccgtacagggcgaagaccgaaacacaatgttccggggccactggtccatttatagtcggaattttccattggctgtagtgccagcctatgtgaccgaagatgggaagaacacaagtcaccgggcgagcggccaattctgtaatgctttgtcccaaggtgagatacctagcagtctgcagctggtgaatagctacgccctggaaccccgcacggatatgccatgcaatttccttacgtag

SEQ ID NO: 5889 - DNA, 876 bp, synthetic construct
  misc_feature 1..876: note = source = /note="Description of Artificial Sequence: Synthetic coding sequence"
  source 1..876: mol_type = other DNA
atggccgtcacactgtccctattgctggggggccgagtttgtgccgctgttacaagatgcggctttgctacgcggggggtagctggtccaggacctattggcagagaacccgaccctgatagtgattgggaaccggaagagagagaacttcaagaggtggagagtacacttaaacgccagaagcaagccattcgatttcaaaagattcgccgacagatggaggcaccaggggcccccccaagaacactcacctgggaagccatggagcagatccgataccttcatgaggagttcccagagtcatggagtgtcccccgcctggctgagggatttgatgtttcaaccgatgtaattcgaagggttctcaagagtaaatttctaccaacgctagagcagaagctcaaacaggatcagaaagtgctgaagaaggctggtctcgcccactcccttcagcatttgcggggctctggcaatacgagtaaactgttgcccgccggccacagtgtatcgggcagcttgttaatgccgggccacgaagcaagtagtaaagatccaaaccactctaccgccttaaaagtcattgagagtgatacccatcgcaccaatacaccgcgccggcggaagggccggaacaaagaaatccaggacctcgaggagtctttcgtcccagtggccgccccactgggccatccccgagagctccagaaatacagctctgacagcgaatccccacgcggcaccggctccggcgctcttccttcaggtcagaagctggaagagctaaaggccgaggagccagacaacttctcttcgaaagtggttcagcgtgggcgcgaattttttgatagcaacggtaatttcctgtatcggatttag

SEQ ID NO: 5890 - DNA, 2541 bp, synthetic construct
  misc_feature 1..2541: note = source = /note="Description of Artificial Sequence: Synthetic coding sequence"
  source 1..2541: mol_type = other DNA
atgttcaagtgttggagtgtcgtgttggtcttggggttcattttcctggaaagtgagggtagacctactaaggagggcggatacggtctgaaatcttatcaacctctgatgagactacgccataaggagaaaaatcaggaatcttcccgtgtcaagggcttcatgattcaagacggtccattcggaagctgcgagaacaaatattgtggccttgggaggcattgcgtgacttcccgggagaccgggcaggccgagtgtgcttgtatggatctttgtaaacgccactacaagccagtctgcggttcagacggtgaattttacgagaaccactgcgaggtgcatagagctgcctgcctcaagaagcagaagattaccatcgtgcacaatgaggattgtttttttaaaggagacaaatgcaagacaacagaatattccaaaatgaaaaatatgctccttgaccttcagaaccagaaatatattatgcaggaaaacgaaaatccaaatggggatgatatcagtaggaagaagctgctagtggaccagatgtttaagtattttgacgcagatagcaacgggctagtggacattaacgagcttacacaggtgattaagcaggaagagctgggcaaggatctgttcgattgcacgttgtacgttctgctgaagtacgacgattttaatgctgacaaacaccttgccctggaggaattctatagagcatttcaggtgatccaattgtcattgcctgaggaccagaagttgtcaatcacggccgctacagttggccagtcagcagtgctttcctgtgccatccaggggacactccgcccccccataatttggaaacggaacaacatcatcttgaacaacctcgacttagaggatataaatgatttcggcgacgacgggtctctgtatattacaaaagtcaccacgactcatgtgggaaattacacttgttacgctgatggttacgagcaggtttatcaaacacatatcttccaggtgaacgtgccccccgtgatcagagtctatcccgaaagtcaggccagagagcctggcgtgactgccagcttgcgctgtcacgctgaagggattcctaaacctcagctgggctggctgaagaacggcatagatattacaccaaagctgtccaaacaactcaccctgcaggccaatgggtcggaggtccacatttcaaacgtgaggtacgaggatactggggcttacacatgcatcgcaaaaaacgaagccggcgtggatgaggacatctctagtctgttcgtggaggattccgctcggaagacactggcaaacatcctgtggagggaggaaggactgggcatcggtaatatgttttacgtgttttatgaagacggcatcaaagttattcagccaatcgagtgcgaattccaaaggcacatcaagcccagtgagaagctgttgggctttcaggacgaggtgtgtccaaaagctgagggagacgaggtccagaggtgcgtctgggcttctgccgtaaacgtgaaggacaagttcatttacgtagctcagcctaccctggatagagttctgatagtcgacgtgcaatcccaaaaggtcgtgcaggctgtatctactgacccggtcccagttaagctccactacgacaagtcccacgatcaagtgtgggtgctcagctggggcaccctggagaagacctcacctactctgcaggtgatcacactcgcctcaggaaacgtgccacaccacacgattcacacacaaccagtgggcaaacaattcgacagagtagatgatttttttattcccacaacaactctaattatcacccatatgcggttcggatttatattacataaggacgaagcggcacttcaaaagatagatttggagacaatgtcctatattaagacaatcaatctcaaagactataaatgcgtaccgcagtctctggcttacactcatcttggcgggtactacttcatcggctgcaaacctgattccacgggggccgtgagtccccaagtgatggtggatggagtgaccgattccgttatcgggtttaattcagacgttacaggcaccccatatgtcagccccgatgggcactacttagtgtcaattaatgacgtaaaggggctggtgcgtgttcaatacatcactattcggggcgagattcaggaggccttcgacatctacaccaacctgcatatatcggacttagctttccagccatccttcaccgaggcacaccagtataacatctacggctcaagctctactcagactgatgtgctgtttgtggaattgtccagcgggaaagtcaagatgatcaaatctctcaaagagcctctcaaagccgaggagtggccttggaacagaaaaaatcgtcagatccaggatagcggtctctttggacagtacctgatgaccccttctaaagacagcctgttcattctggatggcaggctgaacaagcttaactgtgaaattacggaggtcgagaaaggtaacaccgttatatgggtcggcgatgcttag

SEQ ID NO: 5891 - DNA, 291 bp, synthetic construct
  misc_feature 1..291: note = source = /note="Description of Artificial Sequence: Synthetic coding sequence"
  source 1..291: mol_type = other DNA
atgagggtcaccagcgccacatgtgcattactgttggccctgatatgctcagtgcagctgggggacgcatgcctggacatagacaaactgttagccaacgtggtgttcgacgtgagtcaggacctgctgaaggaggagctcgctcggtataaccccagtcccctcaccgaggaatctttcctgaacgtgcagcagtgcttcgctaatgtctctgtgacggagagattcgcccactcagtagtgattaagaaaatcctacagagtaacgattgtattgaagctgcattctag

SEQ ID NO: 5892 - DNA, 1971 bp, synthetic construct
  misc_feature 1..1971: note = source = /note="Description of Artificial Sequence: Synthetic coding sequence"
  source 1..1971: mol_type = other DNA
atgcgcacagttgtgctgactatgaaggcatctgtgatcgagatgttcctggtgttgcttgttacaggcgtgcactcaaacaaagagacagctaagaagatcaagcgacctaagttcaccgtgccacagattaactgtgatgtgaaagccggaaaaattatcgacccagagttcatcgtgaaatgtcccgcaggctgccaagatcctaagtaccacgtgtatggtacagatgtctatgcctcgtactccagcgtgtgcggcgccgctgtccattccggtgtccttgataactccggtggaaaaattcttgtgcggaaagtggctgggcagagtggatacaagggaagctactctaatggagtgcagagccttagtctgccgagatggcgggagagtttcatcgtcctggagagtaaacccaaaaagggcgtgacttatccatctgcccttacctattcctctagcaagtctccggcggcccaggcaggggagacaaccaaagcctatcagcgcccccccataccaggcacaacggcccagccagtaacccttatgcagctcctcgccgtgactgtagctgtcgcgacaccaacgactctcccaaggccatctccaagtgcggcatcaaccacctccatcccaaggccacagtccgtcggccataggtcccaagagatggacttgtggagcactgcaacttatacctcctctcagaacagacctagggccgaccctggactagtgcccaaagaagaattaagcactcagagtctggagccagtatcactcggtgatccaaattgcaagatcgacctttctttcctgattgacggctctacatcaattggaaagcgcagattcaggatccaaaagcagcttcttgccgatgtggcccaagcactcgacattggaccggccggaccattgatgggagtcgtacagtatggggacaacccagctactcatttcaacttgaaaacacacacgaatagtcgcgacctcaagaccgccatcgagaagattacacagcgcggcggcctctcaaatgtgggccgagcgatttccttcgtaacaaagaactttttctccaaggccaacgggaatcgtagtggagccccaaacgtcgtcgtggtgatggtggacggctggcccacagataaggttgaggaggcttcacggctggcccgcgaatctggcattaatatcttttttataaccatcgaaggagctgcagagaacgaaaagcaatatgtggttgagcctaatttcgccaataaagctgtgtgccgcactaacgggttctatagcttgcatgtgcagtcatggttcggcctccataaaaccctccagccattggtcaagcgggtctgcgacaccgatcggttggcctgtagcaagacgtgtctaaatagcgccgacatcggtttcgtgatcgatggctccagttctgtgggcaccggaaattttaggactgttctgcaattcgtgacgaacctgacgaaagagttcgagatctctgatacagatacccggatcggtgccgttcaatatacgtatgagcagagactggagtttgggtttgacaagtatagtagcaagcctgatatattaaatgccatcaagcgagtcggctactggagtggaggcacgtcgacaggtgcggccattaattttgcgctagagcagctttttaagaagtcgaagccgaacaaacgcaagctgatgatactgattaccgatggtcgctcttacgacgatgtccggatccccgccatggctgcccatctcaagggtgtgattacatatgccattggagtcgcttgggccgcacaggaagaattggaagtgattgctacccaccccgccagggaccattcgttcttcgtcgatgaattcgataatctccaccagtacgtgccacgtattatccagaacatatgcacggagtttaattcacagccacgaaattag

SEQ ID NO: 5893 - DNA, 2082 bp, synthetic construct
  misc_feature 1..2082: note = source = /note="Description of Artificial Sequence: Synthetic coding sequence"
  source 1..2082: mol_type = other DNA
atgcgaaccgtggtcctgactatgaaggcatccgttatcgagatgtttctcgtcctgctggttactggagtccacagtaataaggaaacagctaagaaaattaagcgtcccaaatttactgtgccacagataaattgtgatgttaaagccggcaagattatcgacccggagtttattgttaaatgtccagcaggctgccaggatcctaagtaccacgtttacgggactgacgtctatgctagctactcaagcgtgtgcggggcagccgtgcattcaggcgtgctcgacaattcaggaggaaaaatcttagttcgaaaggtggcgggacaaagtggctataagggttcttacagtaacggcgtccagtcactaagccttccccggtggcgagagagctttattgttctggagtcaaagcctaaaaaaggagttacttatcctagcgctctcacatatagcagctcaaaatctcctgccgcacaggcaggcgagacgaccaaagcttatcaaaggcctcctatacctggtacgacagctcagccagttactttgatgcagctcctggccgtgactgtggccgtagctacaccaactacgctgcctaggcctagcccaagcgctgcgtccacaacctccatcccccgacctcagtcagtgggccatagatcccaagaaatggatctctggagcaccgccacttatacctctagtcaaaaccgtccaagggcagatcccggcatccagcggcaggacccctccggtgccgcgttccagaagccggtcggagccgacgtttctctgggcgaaatggacagctggaagcctggttcagttctgctggatgagggcctggttccaaaagaggagttgtcgacacagtctctcgaaccggtcagccttggtgaccccaattgcaaaatcgatctttcgttcctgatagatggttccactagcataggcaaacgacgatttaggatacaaaaacagcttctggccgacgtggcacaggcactggacataggacctgcaggccctttgatgggcgtcgttcagtacggagacaatcccgctacccattttaatctgaagactcacactaattccagggacctcaagacagccatcgagaagatcacccagcgtggggggttgagcaacgtggggcgcgccattagctttgttacgaaaaattttttttccaaagccaacggcaaccgaagcggagccccaaatgtagtggtggtgatggtggatggctggcccacagataaagtcgaggaggcatctagactggcccgggagtcaggtattaatattttttttattacaattgagggagcagccgagaatgaaaagcagtacgtcgtagaaccgaacttcgcgaataaagccgtgtgcaggaccaacggcttttactcgttacatgtgcagtcctggttcggtttgcacaagactttacagcccctggtgaaacgtgtgtgcgacacagaccgcctggcatgttcaaaaacctgcttgaattctgcagacatcggcttcgttattgacggctcaagctctgtgggcactgggaattttcgcaccgtgctccagttcgtgactaatctgacgaaggagttcgaaatttcggacactgacacgcggatcggagctgtccagtacacgtatgagcagcggctggaatttggcttcgacaagtattctagtaagcccgacatcctgaatgccataaagagagttggatattggtcaggagggactagcaccggagctgccatcaattttgccctggaacagctgttcaaaaaatctaaaccaaacaaacggaaactgatgatcttgatcactgatggaagaagctacgatgacgtccggatcccggctatggcagcgcacctgaagggtgtgattacttatgcaataggtgttgcatgggcagcgcaggaagagctggaggtgattgctacgcatcctgcaagggatcactcttttttcgtcgacgagttcgacaacctccaccagtacgtccctcgaatcatacagaatatttgcaccgaattcaacagccagccgcgaaattag

SEQ ID NO: 5894 - DNA, 555 bp, synthetic construct
  misc_feature 1..555: note = source = /note="Description of Artificial Sequence: Synthetic coding sequence"
  source 1..555: mol_type = other DNA
atgttttgtttactgcatctttgcttctatctcgccaattttgctagcagtatcaagaggacacatgctgtaaatggttgttgcggcttacagatgatagccctctgggcccagtcttcaggaaatgccgacgcacgagttgaggagatactcgccggagaagagcgcaggctggccgcgctcttgggctctcaaggaatgaggttctgggtctgcttggccgcctgccgcgcaatgtggggcctggctgccaggaggggtagagccgaagattcttccagttcccctgtggatgcttcaaaattcccctggaggggcggacaacatagaaccacgatgatgccatgtctgctgcgagtaggggtgtttagaccgtgccatgtcagaccgaccggagatccatcatgtgacgtccagccaccaagactaggatttagtcgggtacctgatacccaggttgccttttatgggagcgggcactgggatcctacgccattctccgtacactcatgcttcttcaactttcaagttcggaaaatcattttcctcctatag

SEQ ID NO: 5895 - DNA, 864 bp, synthetic construct
  misc_feature 1..864: note = source = /note="Description of Artificial Sequence: Synthetic coding sequence"
  source 1..864: mol_type = other DNA
atgactagtgcggcacactattatcctaagctgatgagtataatggggaatgtgctccgattcctcccagcctttgtgcgcatgaagcagctgatagaagaaggttacgtcggcgagccactcgtgtgtgaagttcaagtgcatgggggttcgttactgggtaagaaatataattggagctgcgacgacctcatgggagggggggggctacattctgttggaacatacattatcgatctgctgacatttctgacagggcagaaggctgtcaaggtacatggtctgttgaagaccttcgtgaaacagactgatcacatcaagggaattaggcagataacatccgatgacttttgcacttttcagatggtcctggagggtggcgtatgttgtactgtcactctcaattttaatgttccaggcgagttcaaacaagatgtaacggttgtcggcagcgccggtcgtctgttggctgtcggaacggatctttatggacagcgtaactccgctcccgaacaggaacttctagtgcaggatgcaactccagttagcaacagcctattacctgagaaagcttttagtgacataccgagtccatacctacgcggaactatcaagatgatgcaggccgtcagacaagctttccaggaccaggatgaccgacgaacatgggatgggagacctctgacaatggctgctactttcgacgactgcctttacgccctttgcgttgtggacacgatcaaacggagtagccagacaggcgaatggcagaatattgccattatgaccgaagaaccggaattatcccccgcatatctgatttccgaagcaatgcggcgctccaggatgagtttatactgctag

SEQ ID NO: 5896 - DNA, 1173 bp, synthetic construct
  misc_feature 1..1173: note = source = /note="Description of Artificial Sequence: Synthetic coding sequence"
  source 1..1173: mol_type = other DNA
atgttacccggcgttggcgtgttcgggactagccttacggctagggtgatcattcccctgctgaaagacgaaggcttcgccgtcaaagccctgtggggccgcacccaggaggaagctgaggaactcgccaaagagatgtcagtgcccttttacacctcacggatcgacgaagtgctgctccatcaggacgtcgacctcgtgtgtataaaccttccgcctcctcttacacgtcaaattgccgtcaaaaccctcggcatcggcaagaacgtgatttgtgacaggacggccacgcccttagatgcattccgcatgacaagtgctgcccactactatcccaaattaatgagtatcatgggcaacgtgctacggttcctccctgcattcgtaaggatgaaacaactcatagaggagggatacgtgggggagcctttggtatgtgaagtgcaggtccacggtggtagcttgcttggtaaaaagtacaactggagctgcgacgatttaatgggaggaggtggcctgcatagcgtgggaacatacattatcgatctgcttacgttcctgactggacaaaaagctgttaaagtgcacggtctgcttaaaactttcgtcaagcaaacagaccacatcaaaggaataaggcagataactagcgacgatttctgcacgtttcagatggtcctcgaagggggtgtatgctgcacagtcacattgaatttcaatgtcccgggcgaatttaaacaggacgtgactgtggtggggtccgcaggacgcctgttggccgtgggaaccgacctatatggacaacgtaacagcgcccccgaacaggaactgctcgtgcaggacgccacgccggtctcaaattctctactccctgaaaaggcattctcagacatcccaagcccgtacttgcggggcacaatcaaaatgatgcaggcggtccggcaagcgttccaggatcaagatgaccgcaggacatgggacgggaggccattgaccatggcagcaacattcgacgattgcctatatgccctgtgcgtcgttgacacgattaaaaggagctcccagacaggcgaatggcagaacatagcgattatgaccgaggagcccgaattgtcacccgcctatttaatcagcgaggcaatgagaaggtccaggatgtctctctattgttag

SEQ ID NO: 5897 - DNA, 5718 bp, synthetic construct
  misc_feature 1..5718: note = source = /note="Description of Artificial Sequence: Synthetic coding sequence"
  source 1..5718: mol_type = other DNA
atgcagtctcgcttgctgctcctcggagcacctggaggacacggagggccggcatccagaaggatgcgtctcctgctgagacaggtggtgcagaggagaccaggcggtgaccgacagcggccagaagtccgccttttgcacgcaggtagtggcgcggacactggagacacggtaaatataggggatgtgtcttataagttgaaaatccccaagaaccctgaattggtgccacaaaattatattagcgattcccttgcccaaagcgtagtacagcatctgcggtggatcatgcaaaaagacctgctggggcaggacgttttcttaatcgggcccccaggtcctctccgccgcagcatcgcaatgcaatacttagagctcacaaaacgggaggttgaatatatagccctgtcccgcgataccaccgagacagacctgaagcagcgcagggagatccgagcaggtaccgccttctacatagaccagtgcgctgtgagagccgccaccgagggacggacactgatcctggaggggctcgaaaaggcggagaggaacgttctccctgttctgaataatttattggagaatagagagatgcagctggaagacggacgattcctgatgtctgctgagcgctatgacaaactgctgcgggaccacaccaagaaggaactggattcctggaagatcgtgcgtgtgtcagagaatttcagagtgatcgccttgggcctgcccgtgcctcgctactcaggtaaccccctggatccccctctgagatcacgtttccaggccagggatatttattacttaccatttaaggatcaactcaagctgctgtattcaattggagccaatgtgtctgctgagaaggtttcacagcttcttagttttgcaactactctgtgtagtcaagaaagttcaacactcggcttaccagacttccctctggatagcctggccgccgccgtacagatcttggactcttttcctatgatgccaattaaacacgccatccagtggctgtacccctactctatcctgctcggccacgaggggaagatggctgtagagggtgttctcaaacgattcgagctccaggactcaggctcctcgctcctcccaaaggagatagtgaaggtagagaagatgatggaaaatcatgtctctcaagcttcggtgactattcgtatagccgataaagaagtcacaataaaagtgcccgccggtactcgactgttgtctcagccttgcgcatcagaccgatttatccagactctgagccataaacagctgcaggccgaaatgatgcagagccacatggtgaaggacatctgcctaatcggcggcaaaggatgtggcaaaacggtcattgctaagaacttcgcagatacacttggatataatattgaaccaatcatgttgtatcaggacatgactgcaagagacttactgcagcagcgttatactctcccaaacggagatacagcttggaggagcagcccacttgtgaatgctgccctggaggggaagttggtcctcctcgatggcattcacagggttaatgcgggcaccctggccgttcttcaaagacttatccacgaccgggaactgagtctttatgatgggtcaagactcctgcgtgaggacagatacatgcgtctcaaggaagagctccagctaagcgacgagcaactgcaaaaacgaagcattttcccaattcacccctcgttccgcatcatcgccctggctgaacccccagtgataggaagtacagcgcatcagtggttgggccccgagttcctcaccatgttcttttttcattacatgaagcccttggtaaagtccgaggagatccaggtcattaaggagaaagtgccaaacgtgccccaggaggcgctggacaagttgttgagcttcactcataaactgagggagacacaagatcctactgcccagtctctcgccgcatccctgtcaactagacagttgctcagaatttcacgacgcttaagccagtaccccaatgagaacttgcattccgccgtgacaaaggcctgcctgagtagattcctaccttctctcgctcggtcagccttagagaaaaacctcgcagatgccaccatcgaaattaataccgatgataacttagagcctgagctgaaggactacaaatgcgaggtgacttctgggactctacgcatcggcgccgtgagcgcccctatttataatgcacatgagaaaatgaaagtccctgatgtcctgttttatgataacatccagcacgtaattgtgatggaggacatgctcaaggactttctccttggggaacacctgcttctggttggaaatcagggtgtcggaaagaacaagatcgtggaccgcttcctgcacctgttaaacagacccagggaatacattcaacttcatagagatacaaccgttcagactttgacactccaaccgtctgtcaaggacgggcttatcgtgtacgaagactcaccactggtgaaagctgtgaagctggggcacattttagtcgtagacgaagccgataaagcgcccaccaatgtgacgtgtatccttaaaaccctcgtagaaaatggcgaaatgatccttgctgatggacgtaggatcgtagctaacagcgccaatgtcaatggaagagagaatgttgtcgtgatacaccctgacttccggatgattgtgcttgccaaccgccctggctttcccttcctgggcaacgactttttcggcacactgggggacatatttagctgtcacgcggtggataacccaaagcctcactctgagctggagatgcttaggcagtatggcccaaacgttcccgagccgatactgcagaaattagtggctgcttttggggaactcaggtcactcgctgatcagggtataattaactacccttatagcacaagagaagtggtgaacatagttaagcacttgcagaaatttcctaccgaggggctgagctcagtggtacgtaacgtttttgatttcgactcttataataacgacatgagagaaattctgatcaatacgctccataaatatgggattccaattggtgcgaaacctacgtctgttcagctcgcgaaagagctaacactccccgagcaaacctttatgggttattggaccattggccaggccagaagcggcatgcagaagctcctttgccccgtcgagacacatcacatcgatatcaaaggacccgccctcataaatattcaggagtaccccatcgagaggcacgaagagaggagcctaaacttcactgaggagtgtgcttcttggcgcatcccgttagatgagataaacattatctgtgatattgccacaagccacgaaaacgagcagaataccctttatgtcgttacctgtaaccctgcgtctctctattttatgaatatgacaggaaaaagcggattttttgtggacttctttgacatttttccacggacagccaacggcgtgtggcacccttttgtaaccgtggcccctcttggtagcccacttaagggtcaagtggtgctgcatgagcagcaatccaatgtgatcctgctactcgacactacaggtcgcgcactgcaccgcctgattcttcctagcgagaaattcacctctaagaaaccattttggtggaacaaggaggaggccgagacctacaagatgtgcaaggaattttcacacaagaactggttggtgttctacaaagagaaggggaattccttgacggtactcgatgtcttggagggacgaacacacaccatttccctccccataaacctcaaaaccgtgttccttgttgcggaggacaaatggctcttggttgaaagcaaaaccaatcaaaaatacctgctgactaagccagctcacattgaatccgaggggtcaggagtgtgtcaactgtatgtcctaaaggaggaaccccccagcacgggctttggcgtcacccaggagactgagttcagcatcccgcacaagatctcaagcgatcaactatctagtgagcatctctcaagcgcagtggagcagaaaatcgcctctcccaaccgaatcctttccgacgagaagaattacgccacaattgtcgttggctttcctgacctgatgagccctagcgaagtgtattcttggaaacgccccagctctctacacaagagatccggaacagacacctctttttatcgtggaaaaaagaagaggggcaccccaaaacagtctaactgcgtgacgctgctcgacactaatcaggtggtgcgtatcttgcccccgggcgaagtgccgctgaaggatatctatcctaaggacgttacgccacctcagacaagtggctacattgaagttaccgaccttcagagtaagaagctacgttatattcccatcccgcggagtgagtctttgtcaccctacaccacctggttatctaccatcagtgataccgatgcattacttgctgagtgggacaagtccggggtggtgacagtcgacatgggggggcatatccgcctttgggagacgggcctcgagcggctacaacgatccctaatggagtggcggaacatgatcggacaggacgaccgaaacatgcagattacgatcaatcgggattctggagaagacgtgagttctcccaagcacgggaaagaggaccccgacaatatgcctcatgtcggcgggaacacatgggcaggaggaaccgggggccgggatactgccgggttgggtggcaaaggtggtccgtaccgactcgatgctgggcacactgtctaccaggtcagtcaggctgagaaggacgccgtccctgaggaagtgaaacgcgctgcccgggagatgggacagcgtgcttttcagcagagattgaaggaaatccagatgagtgagtatgatgctgctacctatgagcgattttcaggggctgtgagacgccaggtgcacagtttgcgaatcattctcgataatttgcaggcaaagggcaaggaaaggcaatggcttcgccatcaggccactggagagcttgacgacgcaaaaatcattgatggactgaccggtgagaaggccatctacaagaggcggggcgagctggagccgcagcttggcagcccgcaacagaagcctaagagactcaggttggtggtggatgtcagcggttccatgtataggtttaacagaatggacgggcgactggaaaggactatggaagccgtgtgcatggttatggaggcgttcgagaactatgaggagaaatttcagtacgatatcgtcggccactctggcgatggctacaatatcggactcgttcccatgaacaagattccgaaggataacaagcaaaggttagagatacttaaaactatgcacgcccacagtcaattttgcatgtccggagatcacactttggaaggcaccgagcacgccataaaagagatcgtgaaggaggaagctgacgaatacttcgtgatcgtgctgtctgacgcaaatctcagtcgctatggaatccaccccgcaaagttcgcacagattctcacccgggatccacaggtaaatgccttcgctatctttataggctccctcggcgatcaagctacgcgcctccagagaactctccctgcaggacggtctttcgttgctatggatacaaaagatattcctcagatcctccagcaaattttcacatcgacaatgctgagctccgtgtag

SEQ ID NO: 5898 - DNA, 561 bp, synthetic construct
  misc_feature 1..561: note = source = /note="Description of Artificial Sequence: Synthetic coding sequence"
  source 1..561: mol_type = other DNA
atggaggccctgccacttctggccgccacgactcccgaccacggcaggcatcggcgcctgttactcctgcctcttttgctgttcctcttgccagcaggagcagttcagggctgggaaaccgaggagagaccaaggactcgggaagaggaatgccacttctatgcgggggggcaggtttacccaggcgaagcttctagagttagtgtggccgaccacagtttacacttgtcaaaagccaagatctcgaagccagctccatactgggaggggaccgcggtgatcgatggtgagttcaaggagctgaaactcacagactatcgcggtaaatacctggttttctttttttacccgctagactttaccttcgtctgtccgaccgagataatcgcattcggggaccgattagaagagttccggagcatcaacaccgaggtcgtggcctgctcagtcgacagccagttcacgcacctggcttggagcgtcagctatacctatatacggagaaagaaaagaatggatttactgctgaagcacgggcagataactcttgatatgatttag

SEQ ID NO: 5899 - DNA, 816 bp, synthetic construct
  misc_feature 1..816: note = source = /note="Description of Artificial Sequence: Synthetic coding sequence"
  source 1..816: mol_type = other DNA
atggaagcactgcccttgctggctgccacaacccccgaccacggaaggcacagacgcctgctgcttctgccccttttattgttcttgctccccgccggcgccgttcagggctgggaaacggaggaaaggcccaggactcgcgaggaagaatgtcatttttacgccggtgggcaggtctaccctggggaagctagtagggtcagcgtggctgatcactcccttcatctgagcaaagctaaaatctctaaacccgccccctattgggagggaactgcagtgatcgatggcgaatttaaagagctcaagctcacggattaccgcggcaagtatctggtgttcttcttttaccccttggactttacatttgtttgcccaaccgagatcatcgcttttggcgacaggctggaggagttcaggtccatcaacaccgaggttgtagcctgcagcgtggactcccaatttactcatcttgcgtggattaacactccaagaaggcagggcgggctgggtcctattagaatccctctattgagcgacttaacacaccagatctctaaggactacggcgtttacctggaggacagtggtcataccctgcggggcctgttcattattgacgataaggggattctgcgccaaatcacgctgaatgatctgccagtgggccggtccgttgatgagactctgaggctggttcaggccttccagtacacagacaaacacggggaagtgtgcccagccggctggaaaccaggctcggaaactatcatcccagatccggccggcaaactcaagtattttgataagctaaactag

SEQ ID NO: 5900 - DNA, 558 bp, synthetic construct
  misc_feature 1..558: note = source = /note="Description of Artificial Sequence: Synthetic coding sequence"
  source 1..558: mol_type = other DNA
atggaccacaggtccagactacgaggtacgggactcaaccgtattcccggaactcagtctcgtgccccccgggtaccactcccctttcacgtgcagcaggaggctagggaaggggaggattgggaacgagagcccccgcggcagaggcccccaatctatgaacctccagaatctgaggagcttccagataacgtgatggtgtcaaaaccagccccctactgggagggcacagccgtgatagatggagagtttaaggagttaaaactcacggactaccgtgggaaatacttggtattttttttctatccacttgatttcacatttgtgtgccctactgagataatcgccttcggagaccggctagaagagttcagatccataaatacagaggtggtggcctgttctgtcgacagccagtttacccacctagcctggatcaatacacccaggcggcagggtggtcttgggcccatccgcatccccctactcagcgatctgacccaccaaattagtaaggactatggggtgtacttagaggacagtggacatacattgtag

SEQ ID NO: 5901 - DNA, 843 bp, synthetic construct
  misc_feature 1..843: note = source = /note="Description of Artificial Sequence: Synthetic coding sequence"
  source 1..843: mol_type = other DNA
atggcccggttttgggtgtgcgtggccggggccgggttctttctggcattcctggtgttgcacagcaggttttgtgggtcccccgtgcttcgcaactttacttttgctgtttcatggagaactgaaaaaattctctacagactagatgtgggatggcccaaacaccctgaatacttcaccggcaccactttctgtgttgccgtcgattcacttaacggattggtttatataggacagcgaggagataacattccgaaaatactggtgtttaccgaggacgggtacttcctgagggcctggaattatacagtggacacaccccacgggatcttcgccgccagtactctgtatgaacagtctgtgtggattaccgatgttggtagcgacttcatgattctgtggctgcacggcgaaaatggaaccggtccagcaaaatttaacatcccacactccgtgactctcgattctgctggccgcgtctgggtcgctgacaggggaaacaaaaggattcaggtattcgataaagacacaggtgagtggctgggggcctggaataactgtttcactgaggaaggacctagttccgtacgatttacccccgatgggaaatacctcatagttgcccagttgaatctgagcagactgtccgtggtggctgcccctcctgtcggaagcattggagagtgctcagtgatcagcaccattcagctggccgaccaggttttacctcacctgctggaggtggatcggaagacaggcgccgtctatgtggccgaaattggtgctaaacaagttcaaaagtatgttcctctgaactcctacgtgcccagtttcggaagctag

SEQ ID NO: 5902 - DNA, 1044 bp, synthetic construct
  misc_feature 1..1044: note = source = /note="Description of Artificial Sequence: Synthetic coding sequence"
  source 1..1044: mol_type = other DNA
atggccagattttgggtctgtgtcgccggcgcgggcttttttctggcctttctggtgctgcactcccgcttctgcgggagccccgtgctgagaaacttcacgttcgctgtgagctggcggaccgaaaaaattctttaccggttagacgtggggtggccaaagcaccccgaatatttcactggcaccaccttttgcgtcgctgtggactcactgaatggactagtctatattggccagagaggagataatatcccaaagatcctggtgttcacagaagatgggtacttcttgcgggcttggaactacaccgtcgatacacctcacgggatcttcgctgcgtctaccctctacgaacagagcgtttggatcaccgatgtgggctccggcttctttggacatactgtaaagaaatactcttccttcggcgacctcgtgcaggtccttggcacccctggcaaaaaaggaacatctctaaacccactgcagttcgacaaccccgcagaactgtacgtggaagacacaggtgacatctacatagtcgatggtgatggtggcttaaataaccggctgattaagctcagtcaggattttatgattttatggctgcacggtgagaatggcacgggccctgcaaaattcaatattccccattccgtcacactggactccgccggtcgcgtatgggttgcagaccgtggaaataagcgaattcaagtattcgataaggacaccggagagtggctgggagcctggaacaactgctttactgaagaaggccccagcagcgtgcgattcacacctgatgggaagtaccttatcgtcgctcagcttaaccttagtcgtctgagcgtggtcgcagcaccacccgtcgggtctattggggaatgtagcgtcatctctactattcaactggctgatcaggtcctcccccacctcttagaagtcgacaggaaaaccggagcggtgtatgtggccgagatcggcgccaagcaagtccagaaatacgtcccactcaatagctacgtgccctcctttggaagctag

SEQ ID NO: 5903 - DNA, 1707 bp, synthetic construct
  misc_feature 1..1707: note = source = /note="Description of Artificial Sequence: Synthetic coding sequence"
  source 1..1707: mol_type = other DNA
atggtgcttttgcattggtgtctgctgtggttgctctttccattatccagccggacccagaaacttcctaccagggacgaagagttgtttcagatgcagatacgcgacaaggcatttttccacgactcatccgtgatccctgacggggctgagatctcttcctacctttttagggatactcccaagcgttacttcttcgtggtggaagaagataatacacccctgagtgtgacagtgacaccatgcgacgcccccctggagtggaagctctccctgcaagaattgcctgaggaccgatccggtgagggatctggggacctggagccactcgagcaacagaaacagcagatcataaatgaagagggcacagaacttttctcttataagggcaacgacgtcgagtattttatttcttcttcttcacctagtggcctatatcaactggacctgttaagcacagaaaaagatactcatttcaaagtatacgctaccacgactcctgagagcgaccagccttatccggaattgccatacgacccgcgcgtggacgttacttccctcggtagaactacagtgacacttgcctggaagccgtcgcccacagcctctctactgaaacagcccatccagtattgcgtggtgatcaacaaagaacacaatttcaaaagtctatgtgcagtggaagctaagctatcagccgatgacgccttcatgatggctcctaagcccgggttggactttagcccatttgatttcgcacacttcggctttccctccgataattcaggcaaagaacggagcttccaggctaagccctcccccaagctgggcaggcacgtctactctagacctaaagttgacatacagaaaatctgtatcggtaataaaaacatcttcactgtgagcgatctgaaaccggacacccagtactacttcgatgtgttcgtggtgaatatcaattccaacatgtccactgcttacgttgggacatttgccagaacaaaagaagaggccaagcagaaaactgtggagctcaaggacgggaagatcaccgatgtttttgtcaagcgcaagggagcaaaatttcttcgtttcgctccggtcagttcacatcagaaggtgaccttttttatccacagttgtctggatgccgtgcaaatacaggtgcgaagagatgggaaattgctgttgtcccagaacgtagaggggatccaacagttccaattaaggggcaagcccaaggctaagtacctcgtgcggctcaagggaaataagaagggggcctccatgcttaagatcctagccacgacgaggccaactaaacagtccttccccagcctccccgaagacacccgaattaaagcctttgacaagctacggacttgtagttcagctacagtggcctggctagggacccaagagcgaaacaagttctgcatttataaaaaggaggtggatgacaactacaatgaagaccagaagaaaagagaacagaatcaatgcctgggccccgatattcgcaaaaagtctgagaaggtgctctgtaaatattttcactcgcagaatctgcagaaggccgtgacaacggagacaataaaaggactgcagccaggtaagtcatatctcctggatgtctacgtgattggacacgggggccattctgtcaagtatcagtctaaggttgtgaaaacacggaaattctgttag

SEQ ID NO: 5904 - DNA, 489 bp, synthetic construct
  misc_feature 1..489: note = source = /note="Description of Artificial Sequence: Synthetic coding sequence"
  source 1..489: mol_type = other DNA
atgaagggcttcacagctacattatttctctggaccctgatcttcccatcctgttccggtggaggtggcggcaaagcatggccaacccacgtggtgtgttcagactctggcttggaggtgctctaccagtcatgtgatcctcttcaggactttgggttctcggtcgagaaatgctccaagcagctgaagtccaatattaatatccggttcggcattattttacgggaggatatcaaggagctcttcctggatctcgctttgatgtctcagggatctagtgtcctgaatttcagttatcctatatgcgaagctgctctgcccaaattttcgttttgtgggcggcgcaagggggagcaaatctactacgccggcccggtcaataaccctgagttcactatcccccagggagagtaccaggtgctgttggaactgtataccgaaaaaagatctacagtggcctgtgccaacgcaacgattatgtgcagttag

SEQ ID NO: 5905 - DNA, 1698 bp, synthetic construct
  misc_feature 1..1698: note = source = /note="Description of Artificial Sequence: Synthetic coding sequence"
  source 1..1698: mol_type = other DNA
atggactttctgctcgctctggttctggtgtcatccctgtacctacaggctgccgccgagttcgatggccgctggcccagacagattgtgtcctcgatcggcctgtgccggtacggaggtcggattgattgctgttggggatgggcccgccagagttggggacagtgtcaacctgtctgccagccaaggtgtaaacatggggaatgtattggaccaaataagtgtaagtgccatcctggttacgccgggaagacatgtaatcaagacctgaatgagtgcgggttgaaaccgaggccctgtaagcaccggtgtatgaacacctacggctcttataagtgctactgccttaatggatacatgctgatgccagacggttcatgctcaagcgccctcacatgcagcatggccaattgtcagtacgggtgtgatgttgtgaagggacaaatccggtgccagtgtccttccccaggactgcagctagcacctgacgggagaacatgtgtggatgttgatgaatgtgccacagggagggcatcttgccctcgctttcgccagtgtgtcaataccttcggtagctatatatgtaaatgccacaaggggttcgacctaatgtatatcgggggcaaatatcagtgccacgacattgatgagtgttctctgggacagtatcaatgctcttccttcgcgcgctgctacaacattagaggaagctacaagtgtaaatgcaaggagggttatcagggagatggcctcacctgcgtatacattcctaaggtcatgatcgagccatctgggcctatacatgtgcccaaagggaatgggacaatcttgaagggtgataccgggaacaacaactggatccctgacgttggcagcacttggtggccccccaaaacaccatacatccccccgatcataaccaacaggccgacttccaaaccgactacaagacctactcctaagcctacacctattcccacccctccgccacccccaccactgcctactgaactgcggacccctttgccacccactaccccggagcgccccaccactggcctaacaaccattgcccctgcagcttcgacaccccccggcggtatcacagtggacaatcgagttcagacagatccacagaaaccccggggtgatgtgtttatcccaagacaaccttcaaacgacctgtttgagatctttgaaatcgagagaggagtcagcgctgatgatgaagctaaagatgacccgggagtgcttgtgcactcctgtaattttgaccacggactgtgtgggtggattcgcgaaaaggacaatgacctccattgggagccgatcagggatcccgccggcggacagtacctcactgtaagcgccgcaaaagcacctggtggaaaggccgctcgactggtcctccccttgggccgactgatgcacagcggagacttgtgcctcagctttaggcacaaggtgactggactccacagcggcactctgcaggttttcgtcagaaagcacggcgctcacggcgctgctttatggggccggaacgggggccatgggtggcggcagacacaaatcaccctacgaggtgctgacattaagtcagtagtcttcaaaggagagaagagaagaggtcatacaggggaaattggtctcgacgacgtcagcctaaaaaagggtcattgcagtgaggaaaggtag

SEQ ID NO: 5906 - DNA, 1413 bp, synthetic construct
  misc_feature 1..1413: note = source = /note="Description of Artificial Sequence: Synthetic coding sequence"
  source 1..1413: mol_type = other DNA
atgaaacgaagcgtggctgtctggctcctggtggggttatccctcggagtgccccaattcggaaagggcgatatctgcgaccctaatccttgcgagaatggggggatctgtctgccaggtctggcagatgggtcgttctcttgtgaatgtcctgatggtttcaccgatcccaattgctccagcgtggtggaggtggggccgtgcacaccgaatccatgtcacaacggcgggacttgtgagatctccgaagcgtatcgcggtgatacttttatagggtatgtctgtaaatgccctaggggatttaatgggatccactgccagcacaatatcaatgagtgtgaagtggaaccttgtaaaaatggcggcatctgcactgacctggtggcaaactatagttgcgagtgcccaggagagttcatgggcaggaattgtcagtataagtgtagcggccccctgggaattgagggaggtatcatcagcaaccaacaaataactgcttctagcactcaccgggctttatttggcctgcagaagtggtatccctactacgcccggttaaacaagaaaggactaatcaatgcttggactgcggcagagaacgacaggtggccgtggatccagatcaatctacagcgcaagatgcgggtgaccggggtcattacccaaggagcaaaacggattgggagtccagaatatatcaagtcctataagatagcttactccaacgacggaaaaacatgggcaatgtacaaagtcaaaggcaccaacgaggatatggtgtttcgcggcaacattgataataacaccccttacgcgaatagtttcacacccccaattaaggcacaatacgtccggctttaccctcaggtgtgtaggcggcattgtactctgcgcatggaactgttagggtgcgaactttctgggtgctcagagccattgggaatgaaatcaggccacattcaagattaccagataacagcctcttccatattccggactctcaacatggatatgttcacttgggagccaagaaaggccaggcttgacaagcagggaaaggttaacgcatggacctcgggccacaacgatcagtcacagtggctacaagtagacctccttgtgcccactaaggtaacgggtatcatcacgcagggtgctaaggatttcggtcacgttcagtttgttgggagctacaagctggcctactctaacgacggggaacattggactgtctatcaggatgagaagcagcgcaaggataaggtgtttcaggggaattttgacaatgacacacaccgcaagaatgtcatcgatccccccatatatgccaggcacatcagaatccttccttggagttggtacggtcgtatcacgctgagatccgaactactcgggtgcacggaagaggaatag

SEQ ID NO: 5907 - DNA, 1254 bp, synthetic construct
  misc_feature 1..1254: note = source = /note="Description of Artificial Sequence: Synthetic coding sequence"
  source 1..1254: mol_type = other DNA
atggcctcatatctgtatggggtgttatttgccgtggggttgtgcgcaccgatttattgtgtctctcctgctaacgctcctagtgcttatcctaggcccagctccaccaagagtacccctgcatcacaagtgtacagcctgaatacagactttgcttttagactgtatcgccggctcgtactggagacgccaagccagaacatcttcttttctcctgtgtctgtgagtacgtccttggcgatgctgtccctgggagcacatagtgtcaccaaaacacagattctccaggggctcggtttcaatctaactcatacacctgaaagcgccatccaccagggatttcaacaccttgttcacagtctgacggtgccgtccaaagatcttacgctgaaaatgggctcagctctgttcgtgaaaaaggaactgcagctacaggccaactttctgggcaatgtgaagcggctatatgaggccgaggttttctctactgatttctccaacccgtccatcgcacaagctcggatcaactctcatgttaagaaaaagacacagggtaaagtcgttgatatcattcagggacttgacctactgacggcaatggtcctggtgaaccatattttcttcaaagcgaagtgggaaaagcccttccaccctgaatatactcgaaagaattttcctttcctagtgggcgaacaggtgactgtgcacgtaccaatgatgcaccagaaggaacaatttgccttcggagtagatactgagctgaactgcttcgtgctacagatggattacaaaggggatgctgtcgctttctttgtgttaccctctaaaggtaagatgcggcagttggaacaggctttgtccgcccggaccttgagaaaatggagtcacagtcttcagaagagatggatcgaagtgtttatcccacgcttcagcattagtgcaagctataatctcgagactatcttacccaaaatgggaatccagaacgtgttcgataaaaatgcagattttagcggcatcgcgaagcgcgacagcctgcaggtctctaaggctacacacaaggctgtccttgatgtctcagaagaaggaaccgaggctacagctgcaaccactactaaattcattgtgagatctaaggatggaccaagctattttaccgtttcctttaatcgaacctttctgatgatgattaccaacaaggctactgacggaatactttttctcggaaaagtcgagaatccaacgaagtcctag

SEQ ID NO: 5908 - DNA, 486 bp, synthetic construct
  misc_feature 1..486: note = source = /note="Description of Artificial Sequence: Synthetic coding sequence"
  source 1..486: mol_type = other DNA
atgctaatgcccgtacactttctcttgcttcttctgctcttactagggggccctcgcactgggcttccccataagttttacaaagccaagcctattttctcctgtctcaacactgccctgtccgaagctgaaaagggtcagtgggaagacgcttccttattgagcaagagatcattccattacctgcggtctcgggacgcaagtagcggagaagaggaggaaggcaaagaaaagaaaacctttcctataagtggagcccgtggaggagcccggggcactagatatcggtacgttagccaggcccagcccaggggaaaaccacgccaggataccgccaagtcaccacaccgcacgaagttcaccctctcgctggacgtgccaaccaatatcatgaacctcctgtttaacatcgccaaggccaaaaatcttcgcgctcaggcggccgccaatgcacatttgatggcccagatcggtagaaagaagtag

SEQ ID NO: 5909 - DNA, 2091 bp, synthetic construct
  misc_feature 1..2091: note = source = /note="Description of Artificial Sequence: Synthetic coding sequence"
  source 1..2091: mol_type = other DNA
atggccatggccagacttggcagttggctcggggaagcccagtggttagctttggtgagcttgtttgtggcggccctggccaccgtgggtctgtacctcgcgcagtgggctctggcccgcgcccgccctcagcctcaaagacgcgccgtggagccgggggaaggacctcgtcctgggtctgacgctctcctgagctggattttaactttaggatcttggcgttcccaatggcaagctgcttgggttacagctctcaatgaggaggccgagcgcaaagggggaccgccatttctgagctttgaagaagaccctcgccagcaggctctggaactggtagttcaggaagtttcctccgtccttcgctccgccgaagagaaagtggtcgtctgtcacgtggtgggccaggctatccagtttctcgtgagcgaaacccccgccttaggcgccgggtgccggctctatgacatgcggctcagcccctttcacctgcaactggaatttcacatgaaggaaaaacgggaagatcttcaaatcagctggtcattcatcagcgtcccggagatggctgtcaacatccagccaaaggcactgggcgaggaccaggtggccgaaacatcagctatgtccgacgtgctgaaagacatactcaagcatctggcggggagcgcctcgccttcagtcgtactgatcacaaaaccgaccacggtgaaggaagcgcaaaatctgcagtgcgcggcaagtactgcccaagagagctgcccccccaagccaccacgtgcccacgagctgaagcttcttgttcgaaacatccacgttcttctgttgtctgaacctggggcaagtggacacataaacgccgtgtgcgtcgtgcaactcaacgacccagtgcagcgtttcagctctaccctgactaaaaatacccccgacctcatgtgggaggaggaatttacatttgaattgaacgcaaagtctaaggagctgcatctccagattagcgaggccggtcgaagctcagagggcctgctcgctaccgctaccgtgcctctcgatctgttcaagaagcagcccagcggcccccagtcattcacccttacaagcgggtctgcttgtggatctagcgtgttgggctcagtgaccgccgagttctcttatatggagccaggagagctgaagagttggcctattcctcccccagtccctgccgctaagatcgagaaggaccgtaccgtcatgccttgcgggactgtagtgacaactgttacagccgtaaaaactaagcccagggtcgacgtaggacgggcatctcccctgagttcagatagcccagtaaagaccccaattaaggtaaaagtaatcgagaaggacatcagcgtgcaagcaatcgcttgccgcagtgcccccgtctcaaaaacattatcaagcagcgacaccgagttattggttttgaatggatccgacccggtcgccgaggtagccatccgacagctgtccgagtcctccaaattgaagttgaaatcaccaagaaaaaagtcaaccatcatcatctccggcatctccaagacttcactctctcaggatcacgatgcagctctcatgcagggttacaccgccagtgttgacagcactcatcaggaggatgccccctcacacccagaacgtgctgcggcatcggcgccaccagaagaagccgagagcgctcaagcctcactcgcaccgaagcctcaggaggacgaattggacagctgggacctggaaaaggaaccccaggctgctgcctggagctctcaggtcctccttgatcccgacggggacgagctttcagaatcttccatgtctgtcctggaaccagggaccgcaaaaaagcacaagggcggaatactgcggaagggggccaagctgttcttcaggcggaggcaccagcagaaggatccaggaatgagccagtcccacaatgacctggtctttctagagcagcctgagggatctcgacggaagggcattactctgacacggattctcaacaagaagctcctctccaggcatagaaataaaaacaccatgaatggagccccagttgagccatgtacctag

SEQ ID NO: 5910 - DNA, 669 bp, synthetic construct
  misc_feature 1..669: note = source = /note="Description of Artificial Sequence: Synthetic coding sequence"
  source 1..669: mol_type = other DNA
atgccagcctcatccccctttctcttggctccaaagggaccacccgggaatatgggcggccctgtcagagagcctgccctctccgttgccctgtggttgtcctggggagccgccttgggtgcagtcgcatgtgccatggctctgcttacgcaacagacggagctgcaaagccttcggcgggaggtctctaggctgcagggcaccggtggccccagtcagaatggcgaagggtacccatggcagagcctgcccgagcagcacagcgtgttacacctcgtgccaatcaatgccacttctaaagacgacagtgatgtgaccgaggtaatgtggcaaccagccttacgccgcgggagaggtttgcaggcacaagggtatggggtgcgaatacaggatgctggcgtgtacctgttgtactcccaagtcttatttcaggacgtcacattcaccatgggccaggtggttagcagggaaggacaaggcagacaggaaactttgtttaggtgtatacgatccatgccctcccaccccgaccgcgcatacaattcatgctacagcgccggagtctttcatttgcaccaaggcgacattctgtctgtgatcattccacgcgcccgcgccaagctcaacctgtcgcctcacgggacctttttaggattcgtgaaactctag

SEQ ID NO: 5911 - DNA, 2205 bp, synthetic construct
  misc_feature 1..2205: note = source = /note="Description of Artificial Sequence: Synthetic coding sequence"
  source 1..2205: mol_type = other DNA
atgtggggactgctgctggctcttgccgccttcgccccagcagttggtccagctctgggtgcacccagaaactccgtgctcggattagcgcagcccgggaccacaaaggtgcctggaagtaccccagctttgcatagttccccggcacagccgccggccgagacggccaacggtacatcagagcaacacgtgcggatacgggtcatcaaaaaaaagaaggtgataatgaaaaaacggaaaaagctcacattgactcgcccgacgcctctcgtaactgccggccctcttgtgacccccaccccagccgggactctggaccccgccgagaagcaagagacaggatgtcctcctctcggactggaatctttacgggtcagtgattcccgtcttgaggcaagctcatcccagtcatttgggttgggtccacaccgcggacggctgaacatccagagcgggctggaggatggtgatttatatgatggggcctggtgcgcagaggagcaagacgcagatccttggtttcaagttgacgcaggccatcctacccgcttctctggggtgatcacccaggggagaaactcggtttggcggtacgattgggttacttcttacaaggtgcagttcagcaatgactccaggacttggtggggctctagaaatcatagcagtggtatggatgccgttttccccgcaaattcagaccccgaaactccagtccttaacctgcttcccgaaccacaggtggcacgttttattcgacttcttccccaaacctggctccagggaggggcaccttgtctgagagctgaaattctcgcttgtcctgtatccgacccgaatgacttgtttcttgaagcaccggcgtccggctcaagtgacccccttgattttcagcatcacaattataaggccatgcgcaagctgatgaaacaagtacaggagcagtgtcctaatatcactcgaatctattccatcggcaaaagttaccaaggcctgaaactgtatgtgatggaaatgtccgataagccaggagaacacgagcttggcgagccggaagtacgctatgtggctggcatgcatgggaatgaggctttggggagggagctcctgcttctgctcatgcagttcctctgccacgaatttctgcggggaaaccctagagtcactaggctgctctcagagatgaggatccacctactcccgagtatgaatcccgacggctatgaaattgcctaccatagaggatccgagttggtcgggtgggccgagggccggtggaacaatcagtcaatcgacctgaatcacaactttgccgatctgaacaccccactctgggaggctcaggatgacgggaaggttccgcacatcgtgcctaaccaccacttacccctcccgacttattacaccctaccaaatgccactgtggcgccggagacaagggccgtgattaagtggatgaaacgaattccatttgttctgagtgccaacctccatggcggcgagctggtggtgagttaccctttcgatatgacccgcaccccgtgggccgcacgcgaactaacccccacgcctgacgacgccgtgtttcgatggctgagtacagtgtacgctggttccaacctggctatgcaggacacttctcggagaccatgtcatagccaggacttctccgtgcacggcaatattatcaatggtgctgattggcatacggtccccggtagtatgaacgatttctcctacctgcacacaaattgctttgaagtgaccgtggagctatcttgtgataaattccctcacgagaacgaacttccccaggaatgggagaacaacaaggatgctcttttgacatatctcgagcaggtgaggatgggaatagccggcgtggttcgggacaaagacacggagctgggaatcgcggacgccgtcattgccgtcgatggaattaatcacgatgtcactacagcctggggcggcgactactggcggttgctgaccccaggggactacatggtcacggcatctgcggaagggtaccacagcgtgactcgcaactgtcgcgtgacgtttgaagagggtccattcccgtgcaacttcgttctgacaaagacaccgaagcagaggctgcgcgaactcctggcggcaggcgccaaggtgcctcctgacctcaggcggagattagagcgtctaaggggacagaaagactag

SEQ ID NO: 5912 - DNA, 759 bp, synthetic construct
  misc_feature 1..759: note = source = /note="Description of Artificial Sequence: Synthetic coding sequence"
  source 1..759: mol_type = other DNA
atgcgtgccccactccttccacctgccccggtggttttaagtctgctgatactgggcagtgggcactatgccgccggtcttgatctgaatgacacatactctggaaaaagagagcctttttctggtgaccacagtgcagacgggtttgaggtgactagtcgaagtgagatgtctagtggaagtgagatctcccccgtgtcggagatgccctccagctccgagccatcttctggtgccgattatgactattccgaggagtacgacaacgaaccacaaatccctgggtacatcgtcgacgacagcgtacgcgttgaacaggttgtcaagccccctcagaataaaactgaatccgagaatacgagtgataaaccaaagcggaagaaaaaggggggaaaaaatggcaagaaccggaggaataggaagaagaaaaacccctgcaatgcagagttccagaacttttgtatccatggcgagtgcaaatacatcgagcacttggaagctgtgacatgtaaatgccaacaggagtacttcggggagcgctgcggggaaaaatcaatgaaaacgcactcgatgatcgatagcagcctgtctaagatcgcactagcagccatagcagcctttatgagcgctgttatcctcactgcggtcgctgtgataaccgttcaacttcggaggcagtacgtaagaaagtacgagggtgaagcagaggagagaaaaaaattgcggcaggagaatggtaacgtgcatgctattgcctag

SEQ ID NO: 5913 - DNA, 8487 bp, synthetic construct
  misc_feature 1..8487: note = source = /note="Description of Artificial Sequence: Synthetic coding sequence"
  source 1..8487: mol_type = other DNA
atgcctaaacgagcacactggggcgccttgagtgttgtgcttatactgttatggggccaccccagagtagcactggcctgccctcacccatgcgcgtgttacgttcctagtgaggttcattgtacttttcggagcctagctagcgtgcctgcgggcatagctaaacacgtagagagaatcaacctgggttttaatagtatccaagcactttccgaaacaagctttgccggacttacgaagctcgagctcctgatgatccacggaaacgaaataccctccatccctgacggtgccctgcgagacctgtcatcgcttcaggtctttaagttttcctataataaactgagagtgattactgggcagacgctccagggcctgagcaaccttatgagactccacattgatcacaataagattgagtttatccatccacaggcctttaatgggctcactagtcttaggctcctccacctggaggggaatctgctgcaccagctgcatccttctaccttctcaacatttacgtttctggactatttcagactttctacgattagacacctgtatcttgccgagaacatggtgcggactcttcccgcgtctatgttaagaaacatgccacttctagagaatctctatctgcagggaaacccatggacctgtgactgtgaaatgcggtggttcctggagtgggacgccaaaagccgtggcattctgaaatgtaagaaggataaggcttatgagggggggcaactctgtgcaatgtgttttagccccaagaagctatataagcacgagatccataaacttaaggacatgacgtgtttaaagccttcaatcgagtctcccctgcgacagaatcgaagccgcagcatcgaggaggaacaggaacaggaggaagatggcgggtctcaactcattttggagaagtttcagctgccccagtggtctattagcctgaacatgacagatgagcacggaaacatggttaatctggtctgcgacatcaagaagccaatggacgtctacaagatccatctgaatcagacagatcctcccgacatcgatatcaacgcaacagtggccctcgactttgagtgccccatgacacgtgaaaattacgaaaaactatggaagctcattgcgtattactcggaggtccctgtcaagctccatagagagttaatgctgagtaaggatccccgtgtttcataccaatatcggcaggatgccgatgaggaggctctgtactacacgggcgtaagagctcagattctcgctgagcccgaatgggtcatgcagccatctatcgacattcagctgaatcggcgccagagcacagccaaaaaggtgctgctctcttattacacacagtattctcaaactatttcgaccaaagatactcgacaggcccgcgggcggtcttgggttatgatcgagccttcaggcgccgtccaaagagaccagactgttctcgagggcggtccttgccagctatcatgtaacgtgaaggctagtgagtcccctagtatattttgggtgctccccgatggctccattttaaaagctcctatggacgatcccgacagtaagttttctattctttcctcaggttggctcagaattaaatctatggagccttccgatagtgggctgtaccagtgtatcgcccaagtgcgagatgaaatggatcgcatggtttaccgggttctggtgcaatctccctccacgcagcctgccgagaaggatacggtgaccatcggcaaaaatcctggtgaaagcgtgacattaccttgtaacgccctggccattcctgaagctcacttgtcttggatccttcccaatcgccgtatcataaacgatctggcgaacactagccacgtttatatgctgcccaatggaaccctgtccatccccaaagtacaggtgagcgactctgggtactaccggtgcgtggccgtgaaccaacaaggcgctgatcatttcactgtcggtatcacggtaactaagaaaggaagcggacttccctctaagagggggagaagaccaggggcaaaggctttatcaagggtcagggaggacatagtggaggacgagggaggcagtggaatgggcgacgaagaaaatacttctcggaggttactgcacccgaaggatcaggaggtatttctgaagaccaaagacgatgctatcaacggcgacaagaaggctaagaaaggcagacgaaagctcaagctgtggaagcacagtgagaaggagcccgagaccaacgtcgctgaggggcgccgggtcttcgaatcacgtaggcggataaacatggcaaacaaacagattaaccccgagaggtgggcagatatattggctaaggtcagaggaaaaaatctgcctaaaggtaccgaggtgcctccactcatcaaaactacttcccctccttctctctcactggaagttacgcctcccttccccgctatttcaccgcctagcgcttcgcctgtccagacagtcacctccgcagaggagtccagcgccgatgtgccattattgggagaggaggagcatgtactgggcacaatcagctccgccagtatggggctggagcacaatcacaatggcgtgattctcgttgagccagaggtgacttcaacacccttggaggaagttgttgatgatctcagcgagaagactgaggagatcacatcaactgaaggcgaccttaagggcacggctgccccaaccttaatatctgaaccttatgagcctagccccacccttcacactctggatacagtgtatgaaaagccaacccatgaagagacagcgacagagggctggtccgctgccgatgttgggtccagtccggagccgacatcctcagaatacgagcccccactggatgctgtctctctggctgagagcgagccgatgcaatattttgatccggacttagagacaaaaagccagcccgacgaagataaaatgaaggaagacacctttgcccacctgacgcccactcccacaatctgggtcaatgactcttctacgagccaacttttcgaagactctaccattggcgaaccaggcgtgccaggtcagtcacacctgcagggcctgacagataacatacatctggtgaagtctagcctgtctacccaggacacacttctgatcaaaaagggaatgaaggagatgtctcagacactacagggaggcaatatgctagagggagaccccacacattcacgctcctcagagagcgagggccaggaatccaagagcatcaccctgcctgatagtactctgggcatcatgagttcgatgagcccagtgaagaagcctgcagagactaccgtgggtactcttctggacaaggatactacgaccgctactaccactcctcgccagaaagtggcacccagctccactatgtcgacccatcccagccggcggcgccccaacggaaggaggcgcttgcggcctaacaaattcagacatcggcacaagcaaaccccacctaccacatttgccccctcggagaccttttccacgcaaccaactcaagcccctgatattaagatttccagccaagttgagtcgtccctggtacccacagcatgggtggataatacagttaacactcccaagcagttagaaatggaaaagaacgctgaaccgacgagtaaggggaccccgcgacggaagcacgggaagaggcccaataaacacaggtacacaccaagcacggttagcagcagggcttctggaagcaagccctcgcctagtcccgaaaacaagcataggaatattgtaactccttcctccgagacaatattgctaccaagaaccgttagcttgaaaactgagggcccgtatgacagccttgactacatgacgactacacgaaaaatttactcaagctatcctaaagttcaagagacgctgcccgtgacctataagcctactagtgacggcaaagagattaaggacgacgtggctactaatgtggacaagcataaatccgacatcctcgtgactggtgagtctattaccaatgccattcctacgagtaggtctttggtgtccacgatgggtgagtttaaggaagagagttcacctgtggggttcccaggaacccccacttggaatccctcccggactgcccaacccgggagactgcagactggtattcctgtgacaacatccggagaaaatctgactgatcccccgctgttgaaagaactcgaagacgtagacttcaccagtgagtttttgtcctccctgaccgtttccacaccttttcatcaggaagaagccggatctagcacgaccctttctagcatcaaagtggaagtcgccagcagccaggctgagactacgacactggatcaggaccatttagaaactacggtggcaattctactgtccgaaacccgcccccagaatcatacccctaccgccgcccgtatgaaggaacctgctagctctagcccatcgactatactaatgagcctgggtcaaaccaccaccactaagcctgcattgccctcacctcgaatcagccaggcttcgagggatagcaaggaaaatgtatttctgaactatgtcgggaatcctgaaaccgaagcaaccccagtgaataacgaaggcactcaacatatgagtggtcccaacgaattgtctaccccatctagtgaccaggatgctttcaacctgtctacaaagctggagctcgaaaagcaggtttttggcagtagatcacttccacgtgggccagactctcagaggcaagacggacgagttcatgcctcacaccaactcaccagggttcccgcgaagcctattctgccaactgcgacagttcggctgccagagatgagcacacagagcgcatctaggtacttcgtgacaagccagagtccgcgccactggacaaataagccagagatcacaacatacccgagtggggccctccccgaaaacaagcagtttaccacgccacggctgagtagtaccaccatcccactccccctccacatgtctaagccttcaattcccagcaaattcacagatcgccggaccgatcaattcaatggatattccaaggtctttgggaataacaatatccctgaggctagaaaccccgtgggtaagcccccgtcccccaggatcccacattattccaacgggagactccccttttttaccaacaaaacgctgtcctttccgcagctcggcgtgaccaggcgaccccagatcccaacttcacccgcgcctgtcatgcgtgagagaaaggttattcccgggagttacaaccgcatccacagtcacagcacttttcacctggatttcgggccacctgcaccgccgctgctgcacacaccccagactacagggtcaccgagcacaaacctccaaaacattcctatggtgtcctcaacccagtccagcatcagcttcataacttcttcggtgcagagcagtggtagctttcaccaaagctcatcaaagttttttgcaggcggaccacctgcatcaaaattttggtccctgggagagaagccccagatcctcaccaagagccctcagaccgtgtctgtgacagcagaaacagacactgtcttcccatgcgaggccactggtaagcccaagccattcgttacctggacaaaagtttcgactggggcactcatgacgcctaatacacgcatccaacgcttcgaagtcctaaaaaatggtaccctagtgattcgcaaggtacaagtgcaagatcgcggccagtatatgtgtaccgcctcaaatctgcatggcctcgatcgcatggtcgtcctgctttccgtgacagtccagcagcctcagatcctggcctcccattaccaggatgtgacagtgtatttaggcgacactatagccatggaatgcctcgctaaagggacccccgccccgcagatatcatggatcttcccggataggagagtgtggcaaactgtgtctcccgtggagggaagaattaccctacacgagaataggacgctctcgatcaaagaagcctctttcagcgacagaggggtctacaaatgcgtggcgagcaatgcagccggcgccgactcactggctatccgattgcacgtggcggccctgccaccagttattcatcaagaaaaactggaaaacatttccctgcctcctggcctgagcatccacatacattgcactgccaaagccgctcctttgccttcagtccggtgggtactgggagatgggacccaaattcggccttctcagtttttgcatggtaatcttttcgtgttcccaaatggaactttatacatccgaaatctggctccaaaggattcaggacgttacgaatgcgtcgctgccaatctggtagggtcagctagacgcacagtccagctcaatgtgcagagagcagctgccaacgcacgcatcacaggcacttcccctaggcgaacggacgtccgttacggcgggactctgaaactggactgttccgccagcggcgacccgtggccaaggatcctatggcgcctgcccagcaaacgcatgattgacgccttgttctctttcgactcacgaatcaaagtctttgctaacggcacactcgtcgtgaaatccgtgacagacaaagatgcaggagactacttatgcgtcgccaggaataaggttggtgatgattacgttgtcttgaaggtggatgtggtcatgaaacctgccaagatagaacataaagaggaaaacgatcacaaggtgttttatgggggggacctgaaagtcgattgcgtggccaccggcctccccaatccagaaatctcctggtccttgccagatggttcactggtgaactcctttatgcagagcgacgactctggcggccgaacaaaacggtacgttgttttcaacaacggcacactatacttcaatgaggtgggaatgagggaggaaggcgactatacctgcttcgccgagaatcaggtaggcaaggacgaaatgcgggtcagagtgaaagttgtcaccgcccctgccacgattaggaacaagacttatctggccgtccaagtgccctatggagatgtggtcaccgtagcttgtgaagccaagggggagcctatgcctaaggtgacctggctgtctcctaccaataaggttattcccaccagctcggagaaataccagatctaccaagatgggaccctgttgatccagaaggctcagcgctcagactcaggaaactatacatgtttggtgaggaattctgcaggagaagacagaaagacagtgtggatccacgtcaatgttcaaccacccaaaataaatgggaacccgaacccaattaccaccgtgcgagagattgcagctggggggtcacggaagctcattgactgtaaggccgaaggaatccctacacctagggtgctgtgggccttccccgagggggtggtgctgccagctccatactacggcaatcgaatcacagtgcacggcaacgggtcactagacatccggagcttgcgtaagtcggactctgtacagctggtctgtatggcacgcaatgaagggggggaggcccgactgattttgcagctgacggtcctggagcccatggaaaaacccatctttcacgatcctatatcggaaaagatcaccgctatggccggtcatactataagtcttaattgttccgccgctggcaccccgacaccttcactggtatgggtccttccaaatggtaccgacctgcagagtggccagcagcttcagagattctaccacaaggcagacggtatgttgcacatcagtggactgtcctcagtggatgccggcgcctatcgctgcgtcgccagaaatgctgccggacacacagagaggctggtctctttaaaggttggactcaaacccgaggcgaacaagcagtaccataatttagtctccattatcaacggagagaccctgaaactgccttgtaccccaccaggggctgggcagggtcgtttttcctggaccctgccaaatggtatgcatttagaggggccacagaccctggggagggtgtcacttctggacaacggcaccctgacagtacgcgaagccagcgtgtttgaccgcggaacatatgtttgtagaatggagaccgagtacggccctagtgtgaccagcattcccgtgatcgtgatcgcttatcctcccaggataacaagtgagccaactccagttatttacacacgccccgggaatacggttaagctgaactgtatggctatggggattccaaaagccgatattacatgggaacttccggacaaatctcatttaaaagctggagtacaggcaagactgtatggaaaccggttcctacatccccagggctcgctgaccatacagcatgccacacagcgtgacgctggcttctataagtgtatggctaaaaacatactgggctcagattccaagacgacgtacatccacgtgttttag

SEQ ID NO: 5914 - DNA, 3330 bp, synthetic construct
  misc_feature 1..3330: note = source = /note="Description of Artificial Sequence: Synthetic coding sequence"
  source 1..3330: mol_type = other DNA
atgaggttgctgttattagttccacttctgctagcccctgcacctgggtcaagtgccccgaaggtacggcggcaatcagatacttggggcccttggtcgcagtggtctccatgtagccgcacttgcggagggggagtgagctttcgggagagaccatgctatagccagcggcgagatggcggaagcagctgcgtgggtcctgctaggagccatcgctcctgcagaacggaaagctgccctgacggcgcccgtgatttccgggctgagcagtgtgcagaattcgatggagccgagttccagggccggcggtacagatggctcccctactattccgccccaaataagtgtgaactgaactgcatccccaaaggcgagaacttctactacaagcacagggaagctgttgtggatggcacaccatgcgagcccggaaaacgggacgtgtgcgtcgatggttcctgtcgggttgttggctgcgatcacgaacttgatagttccaaacaggaggataagtgcttgaggtgcggcggtgacgggaccacctgctatcccgttgccggaacattcgatgcaaatgatctgtccaggggatataaccagatattgattgtccccatgggcgccacttcaatcctcattgatgaggctgctgcttcacgtaacttcctagcggttaaaaatgtcaggggggaatactacctaaacggccactggactatcgaagctgccagagctctgcctgctgcgtctaccattctgcactatgaaaggggggccgagggtgatttagcgccggagcggctgcatgcgaggggccccacttcagagcccttggtaattgagctcatcagtcaagagccgaacccgggcgtccattacgagtatcatctccccctgcgaagaccgtctcccggattctcttggtcccacggcagttggagcgactgctccgcagagtgcggcggcggacatcagtcccgactggtattctgtacaattgaccacgaggcctaccccgatcacatgtgccagcgtcaaccgaggcccgccgatcgtcgctcctgcaatctccatccatgccccgagaccaagagatggaaagccggcccgtgggctccatgcagtgcttcttgtgggggagggtcccagtctcggtctgtgtactgcatctctagcgatggagccggcattcaagaagccgtggaggaggccgagtgtgctggtctgccaggcaagccgcctgcgatccaggcctgcaacctacagcggtgcgcagcctggagccctgaaccatggggtgagtgtagtgtttcctgtggggtgggagtgagaaaacgaagcgtcacatgcagaggcgaaaggggaagcctgctgcacacagccgcatgctccctggaagatcgccctccactgacagaaccttgtgttcacgaggactgtcccctgctgtcagaccaggcatggcacgtaggtacttggggcctttgctctaagtcatgctcctctgggacaaggaggagacaggtgatttgtgccattgggcccccatcacactgcggctctcttcagcactcgaagcccgtggacgtggaaccctgtaacacacagccatgccaccttccgcaagaagtcccttctatgcaggatgtgcataccccggcatccaacccttggatgcccctcggcccacaggagtcccctgccagtgactcgcgaggccagtggtgggctgcgcaggagcatccatccgcaagaggcgatcataggggcgagagaggggacccaagaggcgaccagggaacacatctcagtgccctcggaccagcccctagcctccagcagccaccgtaccaacaacccctccgttccggctcaggacctcacgattgtcggcacagcccacacggctgttgtcccgacggacacaccgcctctcttggcccccagtggcagggatgtcccggcgcgccttgtcagcagtccaggtacggctgttgtccagatcgggtgtccgtggccgaagggccacatcatgccggatgtacaaagagctacgggggcgacagtaccggcggaatgccaagaagtagagccgttgcatcgaccgtgcacaacacccaccaacctcaggctcagcagaacgagccttctgaatgccgcgggtcccagttcggctgctgctatgacaatgtcgctactgctgcaggacccctcggcgagggttgtgtgggccagcccagccacgcctaccccgtgcggtgtctcctgcccagtgcacacgggtcttgtgccgactgggcagcccggtggtactttgtcgctagtgttggtcagtgcaatagattttggtatggaggttgtcatgggaacgcaaacaatttcgcatccgaacaggaatgtatgtcatcctgtcaggggtccctgcacggcccccgaagaccgcagcccggcgcgtccgggagatccacccacactgacgggggaggcagttcccctgccggtgagcaggaacccagccagcacagaactggcgctgctgtccagcgaaaaccgtggccctcaggcggactctggcggcaagaccagcagccaggacctggggaagcaccacatactcaggctttcggcgagtggccatgggggcaggagctgggtagtcgcgctcctggactcggcggtgatgccggctcccccgcccccccctttcacagcagttcctatcggatctccttggctggagtggaacctagcctggtacaggcggcgctggggcagttagtgcgtttaagttgctcagatgatactgccccagagagtcaggccgcttggcagaaagatggacaacctatatcttctgataggcacagactgcagtttgacggcagcttgattatacaccctctacaggccgaggatgctggcacatacagctgcgggagtactagaccgggccgggattcccagaagatacagttacgcataattggtggtgatatggccgtgctctcggaagcagagctgtctcggtttccccagccccgcgaccccgctcaggattttggacaggccggggccgccggtcctttgggtgctatcccaagctcacaccctcagcccgctaaccggctgaggctcgaccagaaccagccaagagtggtagacgcctcccccggccaaagaatacggatgacttgcagagccgagggcttcccgccccccgcaattgagtggcagcgggacgggcaaccagtaagctcccctagcactcaccgtcccgcccaaggaccatggcagggactgcgacgaccagcaagagctggtcaactttag

SEQ ID NO: 5915 - DNA, 405 bp, synthetic construct
  misc_feature 1..405: note = source = /note="Description of Artificial Sequence: Synthetic coding sequence"
  source 1..405: mol_type = other DNA
atgaagagcgtgctgttgttgacaaccctgctggtcccggcacacctggtggctgcatggagcaacaactatgcagttgactgcccgcagcactgtgactcgtcggaatgcaagtcaagtcctcgctgcaaaagaacggtgttggacgactgcgggtgctgtcgggtgtgcgctgctgggcggggagagacttgttataggacggtgtccggaatggacggcatgaaatgtggacctggactcaggtgccagccgagtaacggagaagatcctttcggggaagaatttggcatctgcaaggagcatgacatggcctctggggacggaaacatcgttagggaggaggttgttaaggaaaatgccgccggctctccggtcatgagaaagtggctgaatcctcgctag

SEQ ID NO: 5916 - DNA, 555 bp, synthetic construct
  misc_feature 1..555: note = source = /note="Description of Artificial Sequence: Synthetic coding sequence"
  source 1..555: mol_type = other DNA
atgaagagtgtgctcctcctcactacactcctggtgcccgcgcatttggtcgccgcctggtccaacaactacgctgtggattgcccccaacactgtgatagctctgaatgtaagagctccccaagatgcaagaggaccgttctcgatgactgcggctgttgtagggtctgcgctgctggccgtggggaaacctgttatcggactgtctcagggatggacggaatgaaatgcgggccggggctaaggtgtcaaccctccaacggcgaagacccctttggggaagagtttggtatttgcaaagactgcccatatgggactttcgggatggattgcagggagacgtgcaattgtcagtccggcatatgcgaccgaggcacggggaagtgcttgaaattcccattcttccagtatagtgttactaaatcttccaatcgcttcgtgagcctgaccgagcatgatatggccagcggagatggaaatattgttcgggaagaggtagtgaaggaaaatgcggctgggtcacctgtcatgagaaagtggctgaacccccgctag

SEQ ID NO: 5917 - DNA, 597 bp, synthetic construct
  misc_feature 1..597: note = source = /note="Description of Artificial Sequence: Synthetic coding sequence"
  source 1..597: mol_type = other DNA
atgcccatacctgcttctcctctgcatccacccctcccctctctcctgttatacctgctcttggaactcgcaggcgtcactcatgttttccacgtacagcaaacagagatgagccagaccgtttccacaggagagtctatcattctgtcctgctcggtgccgaacacgcttcccaacggacccgtgctgtggtttaaaggaaccggacctaacagaaagctgatctacaacttcaagcagggaaactttccaagggtcaaggagattggcgataccaccaaacctggcaacacagatttttctaccagaataagggagataagcctcgccgatgcaggcacctactattgtgtgaagttcattaaaggccgagcaattaaagaataccagtctggtagaggcacccaggtatttgtaaccgccgagcagaatcccagacccccgaagaaccggccagctggaagagccggaagcagagcgcaccacgatgcccatacgtgcctgtctgccctgcccgagaggaacagcaccaactattttgtgcaaccatgttgttgccttagactcttggggcttacaggtctgctgtcaaagtag

SEQ ID NO: 5918 - DNA, 594 bp, synthetic construct
  misc_feature 1..594: note = source = /note="Description of Artificial Sequence: Synthetic coding sequence"
  source 1..594: mol_type = other DNA
atgccgatccctgcctcacccctgcaccctccccttcctagcctgctgttatacctgctgctcgagttagctggagtgacgcacgtattccacgtccagcaaacagagatgtcacagaccgtgagtactggcgagtctataatcctctcttgctctgtgcctaatacactccctaatgggccggtgttgtggttcaaaggtaccggcccaaaccgcaagctaatctacaattttaagcagggaaactttcccagagtaaaggaaattggcgataccacaaagcctggtaataccgacttcagcacccgcatccgcgagatatctctggcagacgccggaacttactactgcgtgaagttcatcaagggaagggccatcaaggagtaccagtctggacgcggcacgcaggtcttcgttaccgagcagaatccacgacctcccaagaaccgtccagctggcagggctgggtcccgtgcccaccatgacgcacatacttgcctgtcagcgcttccagagaggaatagtacaaactatttcgtccagccctgttgttgcctgcgtcttcttggattgaccggactcctgagtaagtag

SEQ ID NO: 5919 - DNA, 1563 bp, synthetic construct
  misc_feature 1..1563: note = source = /note="Description of Artificial Sequence: Synthetic coding sequence"
  source 1..1563: mol_type = other DNA
atgaccacggatgataccgaggtgcccgcgatgacgcttgcacccggacatgcagctctggaaacacagactctctctgcggagacttcctcgagagccagtaccccagccggtccaatcccggaggctgagacccggggtgctaaaaggatctcgcccgcccgtgaaactcgatctttcaccaagacatctcctaacttcatggttctgattgctacatccgtggaaacttctgctgccagcggatcccccgagggagccggtatgacaacagtacagaccatcacggggtccgatccccgagaggcgatcttcgatacactctgcaccgacgacatatcagaagaggcaaaaaccctgacgatggatattctgacactggcacatacctccacagaggcaaagggcctttctagcgaatcttctgctagcagtgacggcccccacccagttattactccatcaagagcttccgagtctagtgcaagttccgacggaccccaccccgttattacgccttctcgcgccagcgagtccagtgcttcaagtgatggtccccatcccgttatcacgccttcgagggcctcagagtctagcgcttcatccgatggtccgcacccagttattacgccatcctggtccccgggatccgacgtcaccctcctggccgaggccctggtgacagtcacaaatattgaagtcatcaactgctcaattaccgagatcgaaaccactacaagcagcattccgggcgcttcagatacagatttgatccctaccgagggcgtcaaggcttcctcaacttcagacccgcccgcactccctgactctactaatactaaacctcacattactgaagtcaccgctagcgccgagacactctctactgcaggcacaaccgaatccgccgctccagacgcgacaatcggcacgcccctaccaactaattcaacaatagagcgcgaagtcactgcaccaggtgccactacattgagcggagccctggccaccggcaacccacttgaagagacctctgctctttctgttgaaactccctcctatgtcaaggtgtccggggccgcgccagtctcaattgaggcaggctccgcagtagggaaaaccacatcttttgccggctctagtgcttcctcgtactccccactcgaggcagcccttaaaaactttaccccctcagagacactcaccaccgacatcgccaccaaaggacctttccccacttctcgtgatcccctgccctctgttccccccactaccacaaactcctcgcgcggcacaaactctacccttgccaagataactacgtccgccaagaccactatgaagccccccactgccacacccaccaccgcccgaactcggcctactacggacgtttcggccggggaaaatgggggatttttattacttcggctctcagtagcctcccccgaggatttgacagaccctcgggtggctgagagactcatgcagcagttacatcgggaactgcacgctcacgcgccacattttcaggtcagcctgctgcgggttaggcgaggctag

SEQ ID NO: 5920 - DNA, 600 bp, synthetic construct
  misc_feature 1..600: note = source = /note="Description of Artificial Sequence: Synthetic coding sequence"
  source 1..600: mol_type = other DNA
atgctctggaggcaactgatttactggcagcttctggccctcttctttctgcctttctgcctttgccaagatgagtacatggagtccccgcagacgggtggcctgccgcccgattgcagcaagtgctgccatcatggcaataacggcaataatggcgcgacaggccataagggagaaaagggctatccagggatcccgcccgaactacaaatcgcctttatggccagcctggctacacactttagcaaccagaattccgggattatcttcagttccgttgagactaatatcggcaatttttttgacgtgatgacaggtcggttcggcgcccccgtgtcaggggtatattttttcacgttcagcatgatgaaacacgaagacgtggaggaggtgtacgtgtacttgatgcacaacggcaacaccgtcttttccatgtacagctacgagatgaagggcaagtccgatacttcttctaatcacgcagtcctcaaactggcaaaaggagacgaagtgtggctgcggatgggaaacggggcccttcatggtgatcatcagcgttttagcaccttcgccggatttctcttatttgagactaagtag

SEQ ID NO: 5921 - DNA, 960 bp, synthetic construct
  misc_feature 1..960: note = source = /note="Description of Artificial Sequence: Synthetic coding sequence"
  source 1..960: mol_type = other DNA
atgctgtggcgccaactgatctactggcagctccttgccttgttttttctgcccttttgcctctgccaggatgagtatatggaggtctccggtcgaacaaataaggtagtagcccgcattgtccaaagtcaccaacagacaggacgttccgggtcccgtcgtgagaaggtgagggagaggagccatcccaagactggtaccgtcgacaataatacaagcacagatctgaaaagcctcagaccagatgagctacctcacccagaggtcgatgatctggcgcagatcacgacattctggggccaaagtccacagaccggcggactgccacctgattgctccaaatgctgtcacggtgactacagttttagaggctaccagggtcctccagggccacctgggccacccggcattcctggcaatcatgggaataacgggaacaacggagcaacaggtcacgagggagctaaaggagaaaagggagacaaaggagatcttgggccaaggggagagcggggccagcatggacccaagggcgaaaaaggataccctggaattcctccagaattgcagatcgccttcatggctagcttagcaacacacttcagcaaccagaacagtggaatcatctttagcagtgttgaaacaaacatcggaaatttctttgatgtcatgacaggccgtttcggcgcgcccgtctctggggtttattttttcacgtttagcatgatgaaacatgaagacgtggaagaggtttacgtgtacttgatgcataatggtaacaccgtgttcagtatgtactcctatgagatgaagggcaagtctgatacctcatcaaatcatgcagtactgaagctggcaaagggagacgaggtttggcttcggatgggtaacggcgctcttcatggggatcatcagaggttcagcacctttgctgggttccttctgtttgagactaaatag

SEQ ID NO: 5922 - DNA, 855 bp, synthetic construct
  misc_feature 1..855: note = source = /note="Description of Artificial Sequence: Synthetic coding sequence"
  source 1..855: mol_type = other DNA
atgacaaagtcctctcttaggccgttgcagaagcagtccccacagaccggaggtcttcccccagactgttcaaaatgctgccatggcgactacagctttcgcggatatcagggacctcccgggccacctggaccgcccgggataccagggaaccatggtaataatggaaacaatggcgccactggccacgaaggggcaaagggagagaagggcgacaagggtgacctgggcccaagaggagaacgcggacagcacggccctaagggtgagaaggggtaccccggaattcctcctgaattgcagattgctttcatggccagcctcgcgacacacttcagtaaccagaatagcggcattattttcagctccgtcgagacaaacatcggcaatttcttcgacgtcatgacaggcaggttcggggctcccgtgtcaggagtgtatttcttcactttctcgatgatgaaacacgaagatgtcgaggaagtttacgtgtacctgatgcacaacgggaacactgtttttagcatgtattcctatgagatgaaaggaaagtccgatacgagctccaaccacgctgtcctaaagttagccaaaggggacgaagtgtggctgaggatgggaaacggcgcactgcacggcgaccaccagcgttttagcacttttgcagggttcctactattcgaaacaaagtgccacggggagaccccggccggaccgcgggattctgcagccggaaagtccaaagcttacctctgccaagccgaatggatctggcctgttagaaaactgcttcctgtgagctggcccaggtaccagctctttggctttgtgcggtggaaggaacaacacatatag

SEQ ID NO: 5923 - DNA, 234 bp, synthetic construct
  misc_feature 1..234: note = source = /note="Description of Artificial Sequence: Synthetic coding sequence"
  source 1..234: mol_type = other DNA
atggccaccaggagcgtccttcttgccctagtggtccttaacctgcttttctacgtcccccctggccggagtggacctaatgtctatattcaaaagattttcgcaagttgttggaggctccagggaacttgcaggccaaaatgtctgaagaatgagcaatacagaatcctttgtgataccatccacctctgctgcgttaatccaaaatatttgcccatactcacaggcaaatag

SEQ ID NO: 5924 - DNA, 237 bp, synthetic construct
  misc_feature 1..237: note = source = /note="Description of Artificial Sequence: Synthetic coding sequence"
  source 1..237: mol_type = other DNA
atgaatctttgtctgtctgcccttctctttttcctagtgatccttctgccatctggtaaagggatgttcggaaatgatggcgttaaggtacgtacctgcacttcccagaaagcagtctgttttttcggctgcccccccggctatcgttggatcgcattctgtcacaatatcctgagctgttgcaagaacatgactaggtttcaaccgccgcaggccaaggatccttgggtccactag

SEQ ID NO: 5925 - DNA, 627 bp, synthetic construct
  misc_feature 1..627: note = source = /note="Description of Artificial Sequence: Synthetic coding sequence"
  source 1..627: mol_type = other DNA
atgggggctcagggcgctcaggaatctatcaaggccatgtggcgagtgccggggaccacacggcgccctgtgacaggcgagagtccaggaatgcatcgacccgaagcgatgttgctgttgctcacactggctctcctgggcgggcctacctgggcgggaaaaatgtacggaccgggcggcgggaagtactttagcacaactgaggattacgatcacgaaattaccgggctcagggtgtccgtgggcctacttctggtgaaatccgtgcaggtgaagctaggagactcctgggacgtgaagctcggggccttgggcggaaacacgcaggaagtcaccctgcagccaggcgagtatatcactaaggtgttcgtcgccttccaggctttcctccgggggatggtcatgtatacaagtaaggatcgatatttctattttggcaagctggatggccagatatcatctgcttacccctctcaagagggtcaggtgctggttggcatctacggacagtaccagctgctcggtatcaaaagcattgggttcgaatggaattatcccctggaggaacctactacagagccgccagttaatctcacttattccgctaatagtcccgtcggcagatag

SEQ ID NO: 5926 - DNA, 288 bp, synthetic construct
  misc_feature 1..288: note = source = /note="Description of Artificial Sequence: Synthetic coding sequence"
  source 1..288: mol_type = other DNA
atgaaattcctcctactggtgctcgcagctctgggatttctcacacaggtcatccctgcatctgctggggggagtaagtgcgtcagcaatactccaggctattgccgtacttgttgccactggggcgagacagcactgtttatgtgtaatgcctcgcgaaaatgctgtatctcatatagctttctgcctaagccggatcttccacaactgatcggtaatcactggcagtcacggcgccggaacacccagcgaaaggataagaaacagcagacgacagtcacttcctag

SEQ ID NO: 5927 - DNA, 339 bp, synthetic construct
  misc_feature 1..339: note = source = /note="Description of Artificial Sequence: Synthetic coding sequence"
  source 1..339: mol_type = other DNA
atgttcgtgttgctgtatgtcacttccttcgccatttgtgcctcaggccagcccagaggaaatcaactcaagggagagaattactctccccggtatatctgtagcattccaggcctgcctggtcctccaggaccaccgggtgctaatgggtcaccgggtccgcacggccgcatcggcttacccggtcgtgacgggagagatgggcgaaagggtgaaaaaggagaaaagggtaccgctggtctgcgaggaaaaacgggtcccctgggactggcgggcgagaagggtgatcagggagaaacaggaaaaaaaggtccgatcgggcccgaaggggagaagtag

SEQ ID NO: 5928 - DNA, 300 bp, synthetic construct
  misc_feature 1..300: note = source = /note="Description of Artificial Sequence: Synthetic coding sequence"
  source 1..300: mol_type = other DNA
atgggattatttatgattattgcaatactgctgttccagaaaccaaccgtgacagagcagctcaaaaagtgttggaacaactatgtgcaggggcattgtcgaaaaatctgcagagtgaacgaggtgcctgaggctctttgcgagaacggtaggtattgctgtctgaacattaaagagcttgaggcctgcaaaaaaattactaaacccccacgaccaaagcctgccactttggcactgacgctccaggactatgtcaccattattgagaattttccaagcctgaagacccagtctacttag

SEQ ID NO: 5929 - DNA, 336 bp, synthetic construct
  misc_feature 1..336: note = source = /note="Description of Artificial Sequence: Synthetic coding sequence"
  source 1..336: mol_type = other DNA
atgaagagcctgctttttacgctagccgtctttatgcttctggcgcagctggtatcaggcaactggtacgtgaaaaagtgcttaaacgatgtgggaatctgcaaaaagaagtgtaagcccgaggagatgcatgtcaagaatgggtgggccatgtgcggcaagcagcgggactgctgcgtgccggcagataggcgggctaattacccggtgttttgtgttcagacaaaaaccacccgaatcagtaccgtcacagcgacaactgccacaaccaccttgatgatgacaacagcctcaatgtcaagcatggcccctacccctgtttcccccacagggtag

SEQ ID NO: 5930 - DNA, 1698 bp, synthetic construct
  misc_feature 1..1698: note = source = /note="Description of Artificial Sequence: Synthetic coding sequence"
  source 1..1698: mol_type = other DNA
atggaggactccgactcagccgctaagcagctcggtcttgccgaggccgcagccgttgctgcagctgcggccgttgccgccgcggccgccgcagctgctggaggggaggcagaagagccagttctgagtagggacgaggatagcgaggaagatgccgacagtgaggccgagcgggaaaccccccgtgttacagcagtggccgtgatggcggccgagcccggacatatggacatgggggcggaagccttacctggtcctgacgaggccgcggcagccgccgcatttgccgaggtaaccactgtcaccgtggccaacgttggggccgctgccgacaatgtattcactaccagcgtggcgaatgcggcgtccatttcaggccatgtcctgtccggtcgaacggctttgcagattggagattcactgaataccgaaaaagcaaccctcatcgtggtgcacacagacggctctattgtggagaccaccggactgaagggacccgctgcacctttgacaccaggacctcaatccccaccgacacctttggctcctgggcaggaaaagggaggcacaaaatataactgggacccatccgtgtacgacagtgaactgccagtaagatgccgaaatatttccgggacgctttacaaaaacaggctcgggtccggaggcagggggcgttgcattaagcagggcgaaaactggtacagccctaccgagttcgaggcaatggcagggcgcgccagtagcaaggactggaagcggtctattcgctatgccggaaggccacttcagtgcttgattcaggacggtatcctcaatccacatgctgctagctgtacttgcgctgcatgttgcgatgatatgactttgtcagggcccgtgaggctgttcgtgccttacaagcggcggaagaaggaaaacgagctgccaaccactcccgtgaaaaaggatagccctaaaaacatcacgctgctgcctgctaccgcggcgacgacgtttaccgttactcccagcggccagattaccacttccggggcattgacatttgaccgcgcaagtactgtggaagctaccgcagtgatctctgagagtccagctcagggagatgtttttgccggtgctactgtccaggaggccagcgttcaacctccttgccgcgctagccaccctgaaccccactaccccggctatcaagactcatgccagatcgcacccttcccggaagcggccctgccaacctctcacccaaagattgtgcttacatcattaccagccctggctgtcccacccccgactccgactaaggctgcaccacccgccttggtgaatggcctggagctctccgagccccgctcctggctatacttagaggaaatggtgaattctctgctgaatacagcgcaacagctgaagacgctctttgaacaggcaaaacatgcctcaacatatagagaggctgccacaaatcaagctaaaatacatgccgacgcggagcgcaaagaacagagttgtgtgaattgtggccgggaggccatgagcgagtgtacaggatgtcacaaggtgaactactgcagtacattttgtcagcggaaggattggaaagatcatcagcatatctgtgggcaatcagccgcagttaccgtgcaggcggacgaggtgcatgtcgccgagtccgtgatggaaaaagtgacagtttag

SEQ ID NO: 5931 - DNA, 471 bp, synthetic construct
  misc_feature 1..471: note = source = /note="Description of Artificial Sequence: Synthetic coding sequence"
  source 1..471: mol_type = other DNA
atgaacatcttaatgctgaccttcatcatctgtggcttactgacacgcgtgactaaagggtccttcgagcctcagaagtgctggaaaaacaacgttggccattgccgaaggcgctgcctggacactgaacggtacatactgttgtgccgaaacaaactctcttgttgtatatcgattatctcccatgagtatacgcgccggcccgctttcccagtgatacacctagaggatattactcttgattactcagacgtggattcctttaccggttcacccgtgtccatgctgaacgacctcatcacattcgacacaaccaaatttggggaaacgatgacccccgagactaatacacccgagactaccatgccccccagtgaggccacaacgccggagaccacaatgccacctagtgagaccgcgacttccgaaactatgccaccaccatctcagaccgccctgacccacaattag

SEQ ID NO: 5932 - DNA, 837 bp, synthetic construct
  misc_feature 1..837: note = source = /note="Description of Artificial Sequence: Synthetic coding sequence"
  source 1..837: mol_type = other DNA
atgggtggacccagagccctattggcggccttgtgggctctggaagctgccggcacagctgccctgcgcatcggagctttcaacatccagtcttttggcgatagcaaagtcagcgacccagcgtgtggcagcattattgccaaaatacttgctggctacgacctggctctggttcaggaggtgcgagacccggatctcagcgcagtctccgccctgatggagcagatcaattcagttagtgagcacgagtattcgttcgtgtcctcccaacccctgggccgggaccagtacaaagagatgtacctcttcgtatatagaaaagatgctgtgtcagtcgtggacacatacctgtacccagaccccgaagacgttttttcccgggagccctttgtggtgaagttctccgctcccggcaccgctcaaaacctggtactgattccactgcatgccgctcctcaccaagctgttgccgaaattgatgcactgtatgacgtttacttggacgtgattgacaagtggggcaccgatgacatgcttttcctaggcgattttaacgcagactgttcctacgtgagagcccaggactgggcagctattcgtctgagaagcagcgaggtgtttaagtggctgataccagattcagcggatacaacagttggtaattcagattgcgcctatgacagaattgtagcatgcggggccagactgcgaaggtccctgaagccccagtccgccaccgtgcacgactttcaggaagaatttggtctggaccagacccaagccctcgccatttccgatcacttccccgtggaggtgaccctgaaatttcatcgatag

SEQ ID NO: 5933 - DNA, 3039 bp, synthetic construct
  misc_feature 1..3039: note = source = /note="Description of Artificial Sequence: Synthetic coding sequence"
  source 1..3039: mol_type = other DNA
atggccgaagccgcactcgaagcggttcgtagcgagctgagagaatttcccgccgccgcgagggaattatgcgtgccactggctgtgccttaccttgataagccacctacgccattacatttttatcgtgattgggtgtgcccaaatagaccttgcataataaggaacgcactgcagcactggcccgcgctgcagaaatggagtctgccttacttcagggcaacagtggggtcaaccgaagtcagtgtggccgttacccccgacggctacgctgacgccgtgcgcggggacagattcatgatgccagcagaaagacggctgcctctaagtttcgtgctggacgtgttggaaggacgggcccagcacccaggcgttctgtacgtacagaagcagtgtagcaacctaccaagtgagctcccccagcttctgccggaccttgaaagccatgttccctgggcaagcgaggctctgggaaagatgccagacgccgttaatttttggctgggagaagccgccgctgtgacctcgctgcataaagatcattatgaaaacttatactgtgttgtcagtggagagaaacatttcctgttccacccaccttctgatcgtccctttattccttatgaattgtatactcctgcgacctaccaacttactgaggagggcacctttaaggttgtggacgaggaagctatggaaaaagctgaggtcagccggacctgcctgctgacagtccgcgtgctgcaggcacatcggctcccatccaaggaccttgtgaccccttctgattgttacgtgacgctgtggctccctacagcatgtagtcatcgcctgcagacgcggacggtcaagaactcttcgtccccagtgtggaatcagagttttcattttaggatacatcgtcagcttaagaacgtaatggagctgaaggtatttgatcaagatcttgtgacaggcgatgaccctgtacttagcgttctcttcgacgccggaacattacgggcgggcgagtttagaagggaatctttctccttatcacctcagggtgagggaaggcttgaggtggagttccgacttcagagcttggcggacagaggggaatggttagtgtcaaacggtgtcctcgtcgcccgtgagctcagttgcctgcatgtgcagttggaggaaactggagaccagaagagtagtgagcatcgggtacaattggtggtgcctggctcgtgtgagggcccacaggaagcctctgttggtacaggtacgttcaggttccattgtcctgcatgctgggaacaggaactaagtatccggctgcaggacgcccccgaggaacagcttaaagcgccattgtccgccctgcccagcgggcaggtggtgaggctggtttttccaacttcccaggagcctcttatgagagtggaactgaaaaaggaggctggattgcgggagctggcagtgagactggggtttggcccctgcgctgaagaacaggcgttcctgagcagacgaaagcaggtggtcgcagcggcgttaagacaggctctgcagctagacggagacctacaggaagatgaaatccccgtggttgcaattatggctactgggggaggaatccgggccatgacctccctatacggccagctggctggtctgaaagagctgggtctgctcgactgtgtgagctatatcaccggcgctagtggatctacatgggctctggctaatctgtacgaagaccctgaatggtcccagaaggacttagcaggacccactgagctgctcaagacacaggtaacaaaaaataagttaggagtgttggcaccctcacagctgcagaggtacagacaagagctggccgaaagagctcgtttgggctatccaagctgcttcactaacttgtgggcactgatcaacgaagccttgctgcatgatgagccgcacgaccacaaactgtcggaccagagggaagccctgtcccatggccagaaccctctgccgatctattgcgcacttaataccaagggacagtccctaactacatttgaatttggtgaatggtgtgaatttagcccatacgaagttgggttccctaaatacggcgcctttatcccttcagaattgtttggctcagaattcttcatgggccaactgatgaagcgattgccagaatcgcggatctgtttcctagaagggatttggtccaatctttatgcagccaacctgcaagactccctgtattgggcatctgaacctagccagttctgggatcgttgggtgaggaaccaagccaacttagacaaggagcaagtgcctctactgaagatagaggagccgcccagcaccgccggacgcattgccgaatttttcaccgacttattgacatggcgccctctggcccaagccacacacaatttcctgaggggcttacatttccataaagattattttcagcaccctcacttctctacctggaaggcaactacactggatggcctgcctaatcagcttacaccatccgagccccacctgtgtttgctggacgtgggctacctgattaatactagctgccttcccttattgcagcccacgcgggacgtagacttaatcctcagcctggactacaatcttcatggggcgtttcagcagctccagctgctagggcggttctgccaagaacagggaatcccctttcctcccatttcaccatctcccgaggagcagctgcagccacgtgaatgccatacgttcagcgatccaacatgtccaggcgctccagccgtgctccactttcctctggtgagtgattctttccgtgagtacagtgctcccggcgtgcggcgtacaccggaggaggcagctgccggggaagtgaacctgagttcctctgactccccgtaccactacaccaaagttacctactctcaggaggacgtggataaactgctgcacctgacgcactacaatgtctgcaacaaccaggagcagctgctggaggcgctgcgccaggcggtgcagcgtcgtcggcagcggcgcccccattag

SEQ ID NO: 5934 - DNA, 1548 bp, synthetic construct
  misc_feature 1..1548: note = source = /note="Description of Artificial Sequence: Synthetic coding sequence"
  source 1..1548: mol_type = other DNA
atggcatggccatattttctggactgccacaggtactttactagagaagacgaaggatgttacgacccgctggaaaaactgcgcggcgggctcgaggcagacgaggctctgccatccgggctgccacctaccttcatacgatttagccaccatagttatgcacagatggtgcgagtcctcagacgcactgcaagtcgctgtgctcacgtggcccgaacctattccattggccgttcttttgacggtagggagctcctcgttattgaattttcaagtcgacccggtcagcatgagctgatggaacccgaagtcaaactaatcgggaatatccacggcaacgaagtcgcaggacgggagatgctgatctatttggcgcaatatttatgttccgaatacctgctgggcaacccacggatacagcgcctgttgaacacgactcggattcacctgctgcccagcatgaacccggatggatacgaggtggctgcagccgaaggcgcagggtacaacggctggacgtcaggccgacaaaacgctcaaaatctggatctcaataggaattttcccgatcttacctcagagtattatcggttggccgaaacccgaggtgcacggagtgaccatatacccatcccacagcactattggtggggcaaagttgccccggaaactaaggccatcatgaagtggatgcagacaatcccattcgtgttgtctgcgtccctgcatgggggggatctggttgtctcgtatccattcgatttttccaagcatcctcaagaggaaaagatgttttcccctacgcctgacgagaaaatgtttaagctgctgtcccgggcttacgcagacgttcatcccatgatgatggaccgctctgagaatagatgcggggggaactttctaaagaggggatctataatcaacggagccgactggtatagctttaccggggggatgagcgattttaattacctgcatacgaactgcttcgaaatcaccgtggaacttgggtgtgtgaagtttccacctgaggaggccctgtatattttgtggcaacacaataaggaaagtctgctcaactttgttgaaactgtgcacagaggaatcaaaggcgttgtcaccgacaagtttggaaagcccgtgaagaacgccaggatatcagttaaaggcattagacatgatattaccacagccccagacggtgactattggaggctcctgcctcccggaatccacatcgtgatagcccaagcacctggatacgctaaggttattaagaaggttatcatcccagccagaatgaaaagagccgggcgtgtggacttcattctgcagcccctgggaatgggccctaagaacttcatacacggccttaggagaacaggtcctcatgaccccttgggcggtgcctctagtctgggcgaagcaacagagcctgacccactccgggctagacgacagccatcggctgatggaagtaagccctggtggtggtcctattttactagcttatccacacaccgaccacgatggctgcttaaatactag

SEQ ID NO: 5935 - DNA, 285 bp, synthetic construct
  misc_feature 1..285: note = source = /note="Description of Artificial Sequence: Synthetic coding sequence"
  source 1..285: mol_type = other DNA
atgcggacgttagcaattctggctgcaatcttgctggtagcactgcaggcccaagcagagccattacaggcccgagccgatgaggttgccgctgcaccagaacagatcgctgcggatatccctgaggtggtggttagtctggcctgggacgaatcactggcaccaaagcaccccggatcccgaaaaaatatggcctgctactgtcgaattcctgcatgcatcgctggcgaaaggcgttatggcacatgcatctaccagggcagactatgggccttttgctgttag

SEQ ID NO: 5936 - DNA, 420 bp, synthetic construct
  misc_feature 1..420: note = source = /note="Description of Artificial Sequence: Synthetic coding sequence"
  source 1..420: mol_type = other DNA
atgggaaaccctggcggggttggatctgaaaggatgagggtcgcacggcgtacccggaatgtttgccgctgcccaagggctgctgggcccggggtaccggagccaagggccgcgcccttacccttgctcgcgatggcccctccacctgcctgtaggagccccatgtctcccccaccgccacctctgttactgctgctgctcagcctggccttgctgggcgctcgggctcgggctgaacccgccgggtccgctgtacctgcccagagtcggccctgcgtggactgtcatgcgttcgagtttatgcagagggctctgcaggacctgagaaagacagcgtgctcattagatgcaagaactgagactttattgcttcaggctgaaaggcgcgctctgtgcgcttgctggccagctggccattag

SEQ ID NO: 5937 - DNA, 471 bp, synthetic construct
  misc_feature 1..471: note = source = /note="Description of Artificial Sequence: Synthetic coding sequence"
  source 1..471: mol_type = other DNA
atggcacctgccgtgaccagactcttgtttctgcagttagtcctgggaccaactcttgtgatggatattaagatgcaaatcggatcccgaaacttttacactttgtcaatcgactacccccgagtaaattacccaaagggctttcgagggtactgcaatggtcttatgtcttatatgcgtggaaagatgcagaacagcgactgcccaaaaatccattacgtgatccacgctccgtggaaggccatccagaagttttgcaaatacagcgatagcttctgtgagaactacaacgagtactgcactctgacccaggactctcttccaatcaccgtctgctctctgtctcaccagcagccaccgacctcttgctattataacagcactctgaccaaccagaagctttacctgctctgctccagaaagtacgaagccgacccaatcggaattgctggattgtattccggcatctag

SEQ ID NO: 5938 - DNA, 444 bp, synthetic construct
  misc_feature 1..444: note = source = /note="Description of Artificial Sequence: Synthetic coding sequence"
  source 1..444: mol_type = other DNA
atgataatcatggtaataattttccttgtgctgctgttctgggaaaatgaggtcaacgacgaggcagtgatgtcgaccctggaacacttgcacgtcgactatccccagaacgacgttccggtccccgctagatactgcaaccacatgataatccaaagggtgatcagggaaccagatcacacttgcaagaaggagcatgtcttcattcacgaacggccccgcaagatcaatggaatctgcatttctcctaagaaagtagcatgccaaaaccttagcgcaatattctgttttcagtctgagacaaaatttaaaatgacggtctgccaactgatagagggcacacgctaccccgcctgccgatatcactatagtcccaccgaaggtttcgtgctggtgacctgcgatgatctgcggcccgacagtttcctgggctatgtgaaatag

SEQ ID NO: 5939 - DNA, 453 bp, synthetic construct
  misc_feature 1..453: note = source = /note="Description of Artificial Sequence: Synthetic coding sequence"
  source 1..453: mol_type = other DNA
atgagatttatggctggcccagccggatcccaatctttaggccctctctgcttccatagtagcccccaggcactttatacagtcctcctgattgtactggtgatgatgtctctggtttttgggaaattcgtgccagtcaactgggaaccaccccagccactcccattccctaaatatctcaggtgttatcgctgtctgctggagacaaaggaactagggtgcctgctgggatcagacatctgccttactcccgccggttcaagttgtatcacactgcacaaaaaaaattcgagtggcagcgacgtgatggtgagcgattgtaggagcaaggaacagatgagcgattgtagtaacacacgcaccagtcctgtgagtgggttttggattttctctcagtattgctttcttgacttctgcaatgatcctcagaataggggcctgtatacaccctag

SEQ ID NO: 5940 - DNA, 2742 bp, synthetic construct
  misc_feature 1..2742: note = source = /note="Description of Artificial Sequence: Synthetic coding sequence"
  source 1..2742: mol_type = other DNA
atgggaccagaggccctaagttcactgctccttctactactagtggcctcgggggacgctgacatgaagggtcatttcgatccggctaagtgtaggtatgcattaggcatgcaagaccgcactatccccgactctgatatcagcgcttcctcatcctggagcgatagtactgctgcaagacactccagactcgagagctccgacggtgatggtgcttggtgccccgcaggcagcgtgttcccgaaagaggaggagtaccttcaggtggacctccagcgtctgcacttggtggctctggtgggcactcaggggcggcatgccggaggtctgggcaaggaattttctcgatcgtataggcttcgatattcacgtgacggccgcagatggatgggatggaaggaccggtgggggcaggaagtaatttcagggaatgaggacccggaaggcgttgtgttgaaggaccttggcccccctatggtcgcacggctcgtgagattttatcctagggcggatcgggtgatgtccgtatgccttagggttgagctgtacggctgcttgtggcgagacggacttttgtcctacaccgctcccgtagggcagacaatgtatctgagcgaagccgtctacctcaacgactctacatacgacggccatactgttgggggcctacagtacgggggtctcggccaactcgcagacggggtggtggggttagacgacttccgcaaatcacaggagctgcgggtctggccgggatatgactacgtggggtggtcaaaccacagcttctcaagcgggtatgtggaaatggagttcgagtttgaccgcctcagggcattccaggcaatgcaggtgcactgcaacaacatgcatactctcggggctcgcctcccaggtggcgtagaatgtcgcttcagacgagggcccgcaatggcctgggagggagaaccaatgcgccataatctgggaggcaacctcggggacccgcgtgccagggcggtgtcagtccctcttggcggacgggttgctcgcttcctgcagtgccgcttcctattcgccggaccctggcttctcttttccgaaatttcctttatcagcgatgtggtgaataattcttcaccagcccttggcggtactttcccgccagctccctggtggccacctggacccccacctaccaacttcagcagcctggaactggaaccccggggacagcagcctgtcgccaaggcagagggcagccctacggctatactcatagggtgcctagtggccatcattcttctcctgctgctgatcattgccctgatgctttggagattacattggagaagactgctgtcaaaggctgaacgtagggtgctggaggaagagttgactgttcatctttcagtgcccggcgacaccattctcatcaacaaccgtccaggcccccgcgaaccgccaccataccaggagccaaggccacgaggtaacccaccacattcagccccatgcgtacccaatggcagcgctctcctgttgtcaaacccggcataccgcctcctcctggccacatacgcaaggcctccccgcgggcccggtcccccaacacccgcttgggctaagccaaccaacactcaggcctactccggtgattacatggagccagagaaacccggggcaccgctactgccaccccccccccagaattcagtgccccattatgctgaggccgatattgtcaccttacagggtgtgaccggcgggaatacctacgccgtacctgcccttccccctggggctgtgggcgacggacctccccgggtcgattttccacgctcccgtctgagatttaaagagaagctcggcgagggccagttcggagaggtacacctgtgcgaagtggattctccccaggacctggtttccctcgacttccccttgaatgttcggaaaggccatccgctgctggtggccgtgaaaattttgaggcccgacgcgacaaagaacgctcggaatgacttcctgaaggaggtgaagatcatgtctagattgaaagaccctaatatcatacggttgctgggggtgtgcgtccaggatgatccgctgtgtatgattacggactacatggagaatggtgacctgaatcagttcttgagcgctcaccagctggaagataaggcagctgagggtgcgccgggcgatggccaagccgctcaggggcctacaattagttaccccatgctcctccatgttgccgctcagattgcctctggcatgcgatatctggccacacttaactttgtccatcgcgatctcgctactaggaactgcctggtaggggagaactttacaattaagatcgcagactttggcatgtcccgcaatctctatgcaggggattattacagggtgcagggacgggccgtcctgcctattaggtggatggcttgggaatgtatattgatggggaagtttaccacggcgagcgacgtgtgggcatttggcgtaacgttatgggaagttctgatgctctgccgggctcagcccttcgggcagctgacagacgagcaagtaattgaaaatgcgggggagttcttccgtgatcagggaaggcaggtttacctttctcgccctcccgcttgtccgcaggggctttacgaactgatgcttaggtgctggtcccgagagtcagagcagcgcccacccttctcccagctccatcggtttctcgccgaagacgcgctgaacaccgtgtag

SEQ ID NO: 5941 - DNA, 453 bp, synthetic construct
  misc_feature 1..453: note = source = /note="Description of Artificial Sequence: Synthetic coding sequence"
  source 1..453: mol_type = other DNA
atgcgcttcatggctggccccgccggcagccagagcctagggcctctctgctttcattcttctccccaggccctgtacacagtactcctgattgtgctcgtcatgatgtcccttgtttttggaaagttcgttccggtgaactgggagcccccgcaacctttaccattccccaagtacctgcggtgttatcgctgcctgctagagaccaaagaactcggatgcttgttgggctctgacatttgtttaactcccgccgggtcttcttgcattacactgcacaaaaagaactcctctgggtccgatgtgatggtgtctgattgtcggtcgaaagaacagatgtccgattgctcaaatacaagaacctctcctgtcagtggattttggatcttctctcagtattgtttcctggacttttgcaacgacccacagaaccgcgggttgtacactccctag

SEQ ID NO: 5942 - DNA, 567 bp, synthetic construct
  misc_feature 1..567: note = source = /note="Description of Artificial Sequence: Synthetic coding sequence"
  source 1..567: mol_type = other DNA
atgtttcaccagatttgggccgcactgctgtacttttatggcatcattctaaattctatttaccagtgtcctgaacactctcagctgaccactctcggcgtggatgggaaggagttcccagaagtacatctcggccaatggtacttcatcgccggggcagccccaacaaaagaagaactcgctaccttcgatcccgttgataatatcgtattcaatatggccgcaggatctgctcccatgcagctccatctgagagcaactatcagaatgaaagacggcctgtgtgtccccagaaagtggatctaccaccttactgagggaagtaccgatttgcgtaccgaggggcggcctgacatgaagaccgaactcttttcttcctcctgccctggcggtataatgttgaacgagactggccagggatatcaacgttttctcttgtacaacaggagtccacacccccctgagaaatgtgtggaggagttcaagtctctgaccagctgcctggactctaaagccttcctgctgaccccccggaaccaggaggcctgtgaattgagcaacaactag

SEQ ID NO: 5943 - DNA, 2535 bp, synthetic construct
  misc_feature 1..2535: note = source = /note="Description of Artificial Sequence: Synthetic coding sequence"
  source 1..2535: mol_type = other DNA
atgggacctggagccccctttgcacgagtgggatggcctctccccttacttgtggtaatggccgctggggtggccccggtatgggcaagccattcgccacacctaccacggccccatagtcgtgtccctccccacccatcaagcgagaggcgcgcagtgtacatcggtgctctctttcctatgtcggggggctggccgggcggccaggcgtgccaacccgccgttgaaatggcactggaagacgttaattctcgcagagacattcttcccgattacgagttgaagctcatccaccacgattccaagtgcgatccggggcaggccacgaaatacctttacgaattgctctacaacgatcccatcaagatcatcctcatgcccggctgttcatcagtgtccacactggtggctgaagctgctagaatgtggaatttaatcgtgctatcctacggtagctcttctcccgccctgtcaaatagacagaggttcccaaccttctttcggacgcatccctccgcgaccttgcacaacccaactagagtcaaactattcgagaaatggggttggaaaaagattgctacaattcaacagaccactgaggtctttacgtctaccctggatgacctggaagaacgcgtaaaggaggccggcatcgaaattacctttagacaaagttttttctccgatcctgccgtgcccgtcaagaatctgaagcggcaggacgcaagaattattgtgggactcttctatgaaacagaagcaaggaaggttttttgtgaggtttacaaagagcgattgtttggcaaaaaatatgtttggttcctgatcggatggtatgcagacaactggttcaaaatctatgacccttccattaattgcacagtcgatgaaatgactgaagccgtggaaggtcacatcacaaccgaaatcgtgatgctcaatccagccaatacgcgtagtatctctaacatgacctctcaagaatttgtagaaaagctgactaaaagactgaaaaggcatcctgaagaaaccgggggttttcaagaggccccactggcctatgatgccatatgggcattggccctggccctcaataagactagcggcggagggggacggtcaggcgtgcggcttgaagattttaactataacaaccagaccataacagaccaaatctaccgcgctatgaatagctcatctttcgagggtgtgagtggccatgtggttttcgatgctagcggttccagaatggcctggacgttgattgaacagctgcaaggcggctcctacaagaaaatcggctattacgatagtaccaaagatgacctgtcttggtcaaaaaccgacaaatggatcggaggatcgcctccagcagatcagactctggtgatcaagacattcagattcctgtcacaaaagctctttatatccgtctcagtgctttcgtccttgggtatcgtcctcgctgtggtctgcctgtcattcaacatctacaattctcatgtgcgatacattcaaaatagccagccgaacctgaacaacctcaccgccgtcggttgttccctggcacttgcggcagttttccccctgggtctagatggttaccacatagggaggaatcagttcccattcgtctgtcaagcccggctgtggctactggggctgggctttagtttgggatatggcagcatgttcactaagatctggtgggtccatacagtctttacaaagaaggaggagaagaaggagtggcggaaaacgctggaaccctggaagctgtacgctaccgtgggcctcctcgtgggaatggacgtgctgacacttgcaatttggcagatagtggatcctctgcatcgaaccatcgagacttttgctaaagaggaaccaaaggaggatattgatgtgagtattcttccccagctggagcactgctccagccgtaaaatgaacacatggctggggattttttatggctataagggactcctgctgctcctgggcattttcctagcatacgagactaagagcgtcagtaccgagaaaatcaacgaccatcgcgccgtgggcatggcaatttacaacgtggccgtgctgtgtctcataacagcaccggtgacaatgattcttagtagccagcaggatgccgcctttgcctttgcatcactcgccattgtgtttagttcttacatcaccctcgtagtcctgttcgtgcccaaaatgcggcggttgatcaccagaggggaatggcagtccgaagcacaggataccatgaaaacgggcagctctacaaataataacgaggaagagaaatcccgtctgctggaaaaagaaaaccgagaacttgagaaaataatagcagaaaaggaagaacgggtgtccgagttacgacatcaactccagtctagacagcagctgcgatcacgaagacatccccccacaccacccgaaccttctggcgggctgcccagagggccacctgaacccccagacaggctgagttgtgacggcagcagagtgcacctgctatataaatag

SEQ ID NO: 5944 - DNA, 237 bp, synthetic construct
  misc_feature 1..237: note = source = /note="Description of Artificial Sequence: Synthetic coding sequence"
  source 1..237: mol_type = other DNA
atgggatctgggctgcccttagtgttgctcctcactctgctcgggtcttcacacggcactggaccaggaatgacccttcagttgaaactgaaagaaagcttcctgacgaactcaagttatgagtcaagctttctggagctgctggaaaaactgtgccttctgctgcacctcccgagcggcacttctgtcaccctgcatcacgctaggagtcagcaccatgtagtatgcaacacctag

SEQ ID NO: 5945 - DNA, 2700 bp, synthetic construct
  misc_feature 1..2700: note = source = /note="Description of Artificial Sequence: Synthetic coding sequence"
  source 1..2700: mol_type = other DNA
atgcttcttctgctcctgttagctcctcttttcctgcggccacctggggctgggggcgctcagacgcctaatgcgacaagcgagggctgtcagatcattcacccgccctgggaaggcggaattcggtaccgaggattaactagggatcaggtcaaggccatcaatttcctgccagtggactacgaaatcgagtacgtgtgtaggggtgaaagggaggtggtaggccctaaggttcgcaaatgcttggctaatggatcttggacagatatggataccccaagtaggtgtgtgaaccggaccccccactcagagcgcagggcggtgtatataggagccctctttcccatgtcaggtggatggccaggcggacaggcctgccaaccagcagtggaaatggcgttggaagatgtgaactcacgacgagacattctgcccgattacgagctgaagctcattcaccacgactcgaagtgcgaccccggacaagccaccaagtacttgtatgagttgttgtataacgatcccattaaaattatcctgatgccaggttgttccagcgtaagcacactcgtcgccgaggcagccagaatgtggaatcttatcgttctgagttacggatccagctcccccgcactgtccaatagacaacgttttcctaccttcttcaggacacaccctagcgctacccttcataatcctactcgggtgaagttgtttgagaaatggggctggaagaaaatcgcaacaatccagcagaccaccgaggtcttcacttccacccttgatgatcttgaagagcgagtgaaggaggcaggtattgaaatcactttccgacaatcatttttctctgatcccgccgttccggttaaaaacctgaagaggcaggacgcacgaattatcgtcgggctgttctacgagacagaagcccgtaaggtgttctgcgaggtctataaagagcgccttttcgggaagaagtacgtgtggttcctcatcggatggtacgctgacaattggttcaagatttacgacccgagcatcaattgtactgtagacgaaatgaccgaggcagtagagggacacattacgaccgagattgtcatgctgaatccggctaatacacgaagcatctcaaacatgacgtctcaggaattcgtggagaagctcaccaagcgtttaaaacgtcatcccgaggagacaggaggattccaggaggcacccctcgcttatgacgcaatatgggcccttgcattggccctcaacaagaccagcggagggggcggtcgcagtggagtgaggttagaagactttaactacaacaaccagacaatcacagatcagatctatagggccatgaactcgtcttctttcgaaggtgtatccggacatgtggtgtttgacgcgtctggcagccgaatggcgtggaccctgattgagcagttacagggtgggtcctataagaaaataggctattatgatagcaccaaggatgacctgtcatggtcaaaaacagacaaatggatcggcggttccccacccgcagatcaaaccctggtcattaaaacgttccggttcctctcacagaaactgtttatcagtgtcagcgtgttatcctctcttggtatcgtgcttgcagtggtgtgtctctcattcaatatttacaattctcacgttaggtacatacagaactcccaacctaatctgaataatctcaccgcagtgggatgctcactggcactcgcggcagtctttccacttggattagatggttaccacattggtcggaatcagtttcctttcgtgtgccaggcacggctttggttactggggctggggtttagcttaggctacgggtccatgtttaccaaaatttggtgggtgcataccgtgttcacaaagaaagaagagaagaaagagtggcgcaaaacactggagccttggaagctgtatgctaccgtaggactccttgtggggatggacgttctgaccctagctatttggcagatagttgatcctctgcatagaactattgagaccttcgccaaagaggagccgaaggaggatatcgacgtgtctatattgccccagctggagcactgttctagcagaaaaatgaatacatggctcggcattttctatgggtacaaaggccttctgttgctgcttggcatctttctcgcgtatgagaccaagtctgtgtctaccgagaagatcaacgaccaccgggccgtagggatggcgatctacaacgtcgcagtattgtgccttatcacagcgcctgtgaccatgatcctctccagccaacaggatgccgcctttgctttcgctagcctcgctattgttttctcgtcctatataaccttggtcgttctgttcgtgcccaaaatgaggcggttaataacaaggggtgaatggcagtcagaggctcaggatactatgaaaactggatcttccactaataataacgaggaagagaaaagtcgcctgcttgaaaaggagaacagggaactcgagaaaattattgccgaaaaggaggagcgggtcagcgaactgcgccaccagctacagagcagacagcagctccgaagccgacggcacccaccgacaccaccagagccgtccgggggtctgcctagagggccacccgaacctccagacaggctgagttgcgacggtagccgcgtccacctgctttataaatag

SEQ ID NO: 5946 - DNA, 2886 bp, synthetic construct
  misc_feature 1..2886: note = source = /note="Description of Artificial Sequence: Synthetic coding sequence"
  source 1..2886: mol_type = other DNA
atgttactgctgctgctcctggcacctctcttccttagaccaccaggagcgggcggcgctcagaccccaaacgctaccagcgaggggtgtcagattattcaccctccttgggagggaggcattcggtaccgagggctgacacgcgatcaggtgaaagcaattaactttctgcccgtagattatgagattgaatatgtctgccgcggtgagcgcgaggtggtcggccctaaagtcagaaaatgtttggctaatgggagttggactgacatggatacgcctagccggtgcgtgcgaatctgctccaagtcctatctgacattggaaaacgggaaagttttcctgaccggcggagatctgcccgccctggacggtgccagagtagattttaggtgtgaccccgatttccaccttgtcggcagttctcgctctatctgttcccagggtcagtggagtacccccaagccccattgccaggtgaatcggacaccccactccgaacgtagagccgtgtatatcggagctttgttcccaatgtccggaggctggcccggtggtcaagcatgccagcccgctgtggaaatggcgctggaggacgtaaacagccgcagagacattctacctgactacgagctcaagttgatccatcacgactcaaaatgcgacccaggccaggccacaaagtacctttatgaactgctctacaatgaccctattaagattatacttatgccggggtgtagcagcgtgagtacactggtggccgaggccgcacggatgtggaatttgatcgtgttgtcgtatggttcatcctctcccgcactgtctaaccgccaaaggtttccaaccttctttagaactcaccctagcgccactcttcataaccctaccagggtgaaactctttgaaaagtggggctggaagaagattgctactatccagcagacaacagaggtgttcacttcaaccctggacgatctggaggagcgagtcaaggaagctggcattgaaatcacattccgacagtcctttttttctgacccagcagtgccggtgaagaatctgaagaggcaagacgcccgcatcatcgtagggttgttctatgagactgaggcgagaaaagtgttttgcgaggtgtataaggagcggctgttcgggaaaaagtatgtgtggttcctgattggctggtacgctgacaactggttcaagatctatgatccaagcattaactgcacagtggacgagatgacagaagctgtggagggccatattaccacggagatcgtcatgctgaatccagcaaatacacgctccatatcaaatatgacaagtcaagagttcgttgaaaagcttacgaagagactgaagcggcatcctgaggaaactggtggctttcaagaagcaccgttggcatacgatgccatttgggctctcgctctggcactgaataagacaagtggaggaggcggccggtccggcgtgaggctggaggatttcaattataataaccagacaattaccgaccagatctatcgggccatgaattccagtagcttcgagggcgtgagtggccatgtggtctttgatgccagtggttcccgcatggcctggaccctgatcgagcagttacaagggggtagctacaaaaagatcggctattacgattccaccaaggacgacctgtcctggtccaaaacagataagtggatcggtggttcacctccggctgatcagacgctcgtcatcaagacattcaggttcttgtcgcaaaaactgttcatttcagtctccgtcctatcctcattgggaattgtactagcagtggtgtgtcttagctttaatatttataatagccacgtgcgatacatacagaattcgcagcctaacctcaacaatctgaccgctgtaggctgctctctggccctggctgcagtgtttccactcggtctggacggttaccatattggcaggaaccagttccctttcgtgtgtcaggcacgtctgtggttactcggtttgggcttttctctcggatatgggtccatgttcaccaagatatggtgggtgcacaccgtgttcacgaagaaagaggagaaaaaggaatggcggaaaactctggaaccatggaagctctatgctaccgtcggtctattggtgggtatggatgtactgactctggctatctggcaaatagtcgacccattgcatcgcaccatcgagacgtttgccaaggaagagcccaaggaggacatcgatgttagcattctgccacagctggaacactgttctagtcgcaagatgaacacttggctcggaatattttacggctacaaaggcctcctcctactgctgggcatttttctggcctatgaaacgaaatccgttagtacagagaagattaatgaccacagagccgttggcatggcgatatataatgtggcagttctttgcctgattactgcacctgtcaccatgatcctgagctcacaacaggatgctgccttcgcgtttgcctcccttgctatcgtgtttagctcttatatcaccttagtggtgctgtttgtccccaaaatgcggcgtcttatcactcggggtgagtggcaatccgaagcccaggacacgatgaagacggggagctctacaaataataacgaagaagagaagagtcggctcctcgagaaagaaaatagggaactggaaaaaattattgcagagaaagaagaaagggtgtccgagctgcggcaccagctgcagagccgccagcaattgcggagccggagacatccacctaccccacctgaaccatccggaggtctcccacgcgggccgcctgaacctccggaccgactttcttgcgatgggtctagggtacatctcctgtacaaatag

SEQ ID NO: 5947 - DNA, 2535 bp, synthetic construct
  misc_feature 1..2535: note = source = /note="Description of Artificial Sequence: Synthetic coding sequence"
  source 1..2535: mol_type = other DNA
atgggccctggggccccgtttgccagagtgggttggcctctccctctgttggtggtgatggcagcgggtgtggcgcccgtctgggcctctcacagccctcacctgcctagacctcattcacgcgtgccaccccaccctagctctgagagaagggcagtgtacattggcgctttgttccccatgagcggagggtggccgggcggccaggcatgccaaccagccgtcgaaatggctctggaggatgtgaatagcagacgcgatattttgccagattacgaactcaagctgatccatcatgactcaaaatgcgaccccggacaggctacgaaatacctgtacgaacttctatataacgaccccataaagatcattctgatgccgggttgctccagcgtatcaaccttagtggcggaggcagcgcgcatgtggaacttaattgtgctaagttatggttcctcttcccctgctctctccaaccgccagaggttccctactttttttagaactcacccctccgccactctgcacaaccctacaagagttaagctgtttgagaaatggggatggaagaaaatcgccactatccaacagacaaccgaggttttcacgtcaactctggatgatctcgaggaacgcgtcaaagaagcaggcatcgagataacctttaggcaatctttctttagcgatcctgcggtgccggtgaaaaatctgaaacgccaagacgccagaatcatcgtggggctgttttacgaaaccgaggcacggaaggttttctgtgaggtgtacaaggaaaggctttttggcaagaaatatgtttggttcctgattgggtggtatgcggataattggtttaagatctatgaccctagcattaactgtacagtcgacgagatgacggaagcggtggaagggcatattacaacagaaattgttatgctcaaccctgccaacacccgctccattagcaacatgaccagtcaggaatttgtggaaaaactcaccaaacgtctgaagcggcaccccgaggaaactggagggttccaagaggctcccttggcatatgatgccatttgggcccttgctctggcgctgaacaaaacttctggaggtggtgggcggtcaggcgtcagactggaggactttaattacaataaccagaccattacggatcagatctaccgcgcaatgaatagtagctccttcgagggggtttccggacacgtcgtgttcgatgcttctgggagccgaatggcctggactttgatcgaacagttgcagggcggctcttacaagaagatcggatattacgatagtaccaaagacgacctgagctggtccaaaactgataaatggattggggggagccctccagccgaccagacgctggttataaaaacattccggttcttgtcccagaaattatttatctcggtctccgtgttgtcaagtctgggaattgtactcgccgttgtctgcctttccttcaacatctacaattcccacgtgagatacatacagaactctcaacccaacctgaacaatttaacagccgtaggatgtagcctagctcttgcggctgttttcccactcggcttggacggctatcacattggtaggaaccagttccccttcgtgtgccaggctcgtctatggctcctgggacttggattttctctgggatacgggagcatgttcacaaagatatggtgggtgcatactgtgttcaccaagaaggaagagaaaaaagagtggcggaaaaccctggagccgtggaagctgtacgccacagtcggcctgctagttggtatggatgtgctgacccttgcgatatggcaaatcgtcgatcctttacataggaccatagaaacattcgctaaggaggaaccaaaagaggacattgatgtgagcattctgccacaattggaacattgttcttctaggaaaatgaacacctggttgggcattttttatgggtataagggactgctgctacttttggggatttttttagcctatgaaaccaagtctgtgagcaccgagaaaatcaatgatcacagagcagtgggtatggccatttacaatgtggccgtcctgtgcctgatcactgcgcctgtgactatgatactgagctcacagcaggacgctgcgttcgcgttcgcaagtctagccattgtgttctcgtcttacattactttagtggtactgttcgtgcccaagatgagaagactgatcaccaggggcgaatggcagtctgaggcccaagatactatgaagaccggttcttctactaacaataatgaagaggagaagtcccggctactggagaaagagaatagggagctggaaaaaattatcgcagagaaggaggaacgggtgtcagagttgcggcaccagctccaatcacgacagcaactccggtcaaggaggcacccaccaacgccccctgaaccatccggaggcctgcctcgcggtccccccgagccccctgataggttgagttgtgatggcagcagggttcatctgctatataaatag

SEQ ID NO: 5948 - DNA, 2535 bp, synthetic construct
  misc_feature 1..2535: note = source = /note="Description of Artificial Sequence: Synthetic coding sequence"
  source 1..2535: mol_type = other DNA
atgggccccggagcacctttcgcgagagtagggtggcccttgccactcctggtggtgatggccgccggcgtggcaccagtgtgggccagccacagccctcatcttccacggccccactctcgggtgcccccacacccctctagcgagcgacgggccgtctatataggcgcactgtttcccatgagcggtgggtggcccggaggtcaggcttgtcagccagccgttgagatggccctggaggatgtgaacagcaggagagatattttacccgactacgaactcaaactgatacatcatgactcaaagtgcgaccccgggcaggctaccaagtatctgtatgagttactttacaacgaccctatcaaaattattctcatgcccggatgcagcagtgtctcaaccttggtggccgaagcagcccggatgtggaacctgatagtgctcagttacggatcgagcagcccagcactgagtaatcggcagcggtttcctacctttttcagaacacacccctctgccacactgcacaaccctacccgagttaagctgtttgagaagtggggttggaagaaaattgccacaatccagcagactacagaagtgttcacttcaacgcttgatgatctagaggaaagggttaaagaggctggtatcgaaatcactttccgccagtcttttttcagcgacccggcggtccccgtgaagaatctcaagcggcaggacgcccgcattatcgtaggactcttctatgaaacagaggcacggaaggtgttttgcgaggtctacaaggagcgcctgtttggcaaaaagtatgtatggtttctgatcgggtggtacgcggacaactggttcaagatttatgatccttctattaactgtaccgtggacgagatgacagaagcggtggagggacacatcacaactgaaatagtaatgttgaaccctgccaatacccggtccataagtaacatgacatcacaggaattcgtggaaaagctaacaaagcggcttaagaggcacccggaggagacgggaggcttccaggaggcccccttagcttatgatgctatatgggccctggcactggcccttaacaagaccagtggagggggcggaagatctggggtcaggctcgaagacttcaactataataatcaaacaattaccgatcaaatataccgggcaatgaacagttcttcctttgagggcgtaagtggccacgtcgtgtttgacgcgagcggttcacgcatggcctggacactgatcgagcaactgcaagggggcagttataagaagattgggtactacgattctaccaaagacgacttgtcctggtccaaaacagacaagtggatcgggggttcaccgccggctgaccaaactttggtgataaaaacctttcgattcctgtcccagaagttgtttatttccgtgagtgtcctgagttcccttggtatcgtcctggcagtggtgtgtctgtcattcaacatatataattctcatgtgaggtacatccagaacagtcagcctaatctgaataatttgactgccgtgggctgcagtctggccctggcagctgtgttccctcttggtctggacgggtatcatattggtcggaaccagttcccttttgtctgtcaggcccggctgtggttgcttgggctcggtttctccctcggctacggcagtatgttcacaaagatatggtgggtgcataccgtgtttacaaaaaaggaagagaagaaggaatggcgcaaaaccctcgagccttggaagctctatgccacagttggacttctcgtgggcatggacgtgctgaccctcgctatctggcagattgtggaccccttgcatcgtactatcgaaacatttgcaaaagaagaaccaaaagaggacatcgatgtgtctattctaccccaactggagcattgtagttcacgaaagatgaatacttggttggggattttctatggttacaaggggcttcttctccttctgggaatattcttggcctacgagacaaaaagtgtatctactgaaaaaataaatgatcatagggcagtcggcatggcgatatataatgttgcagtgctgtgtttaattaccgccccagtgactatgatcctgagctcgcagcaggacgccgcgtttgcatttgcctctttggccatagttttttcgtcttacattaccctcgttgtgctctttgtgccaaagatgaggagacttattaccaggggcgaatggcagagcgaggcccaggacacaatgaagacaggctcttctacaaacaacaacgaggaggaaaagtctagactgctggagaaggaaaaccgggaactcgaaaaaatcatagccgagaaggaagagagggtatctgaacttaggcaccagctgcagtctcggcagcagctgagatcaaggcgccatccaccaacgccccctgagccatcaggaggactgccacggggcccaccggagcctcccgatcgactgagttgtgacggaagcagggtgcatctcctgtacaagtag

SEQ ID NO: 5949 - DNA, 2700 bp, synthetic construct
  misc_feature 1..2700: note = source = /note="Description of Artificial Sequence: Synthetic coding sequence"
  source 1..2700: mol_type = other DNA
atgctcctgcttttgctgctagcccctctattcctcagaccgcccggggcagggggggcccaaaccccaaatgcgacctctgaaggctgtcaaatcattcacccaccatgggaaggggggattaggtaccggggactgacccgcgaccaggtgaaggctatcaactttctgccagtagattatgaaatcgaatacgtctgccgtggggagagagaagtggtaggaccaaaggtacgtaagtgcctcgccaacggaagttggactgatatggataccccatcccgctgcgttaacaggaccccccactctgagaggcgggctgtgtacatcggggcactgtttccgatgtctggcgggtggcctggcggccaggcttgccagccagcggtggaaatggctttggaggacgtcaattctaggagagatattctgcccgactatgagttgaaactcatccaccacgattctaagtgtgaccctggccaggctactaagtacctctacgagttgttatataatgatcctatcaagattattttaatgccgggatgctcctccgtgtccaccctggtggcggaagccgcccgcatgtggaacctcatagtgctcagctatggtagtagctccccagcactctccaaccgacagcgatttcccaccttctttagaacccatccctccgcaaccctgcacaatcccaccagagtaaaattattcgagaagtggggatggaaaaaaatagctactatccagcagactactgaggtattcacgagtaccctcgacgatctggaagagcgcgtgaaagaggcaggtattgagattacctttcgtcaaagcttcttttcagatccagcggtaccagtaaagaacctgaagaggcaggatgcacggatcatagtgggactgttttacgagaccgaagctaggaaagtcttttgtgaggtatataaggagcggctgttcgggaagaagtatgtgtggtttctgatcggatggtatgccgataactggttcaaaatttatgatccctcaatcaattgcacagtcgacgagatgacagaggcagtggaggggcatattaccaccgagatcgtcatgctgaaccctgcaaatacccgtagcatcagtaatatgacctctcaagaatttgtggaaaaactcacgaagagactaaagcgacaccccgaagaaaccggagggttccaagaggcccccctagcatatgatgcaatctgggccttggcgctcgcacttaataagacgtccggtgggggtggtaggagcggcgtaaggctcgaggatttcaactacaacaaccagaccattactgaccagatctatagagccatgaattcctcctcatttgagggtgtgtctggacacgtggtttttgacgcctccggatcacggatggcgtggactctgattgagcagctacagggcggctcatataaaaaaattggctattatgattcaaccaaagacgacctctcctggtccaaaaccgataagtggattggagggtctccgccagccgatcagacactggtaattaagaccttccggtttttatcccagaaactcttcatcagcgtgtccgtgcttagcagcttaggaatcgttcttgccgtcgtgtgcctttctttcaatatctataacagccatgtccgctacattcagaactcccagccgaacctaaataatctgactgcagttggatgctcgttagccctggctgcggtgtttcccctggggctggatggataccacataggacgcaatcagtttcccttcgtgtgtcaagcacggttatggctactcggcctgggattttcccttggttacggctcaatgttcaccaaaatctggtgggtgcatactgtcttcacgaagaaagaggagaagaaggagtggagaaagacactcgaaccctggaagctgtacgccacagtgggcctgctggtgggcatggatgtactaaccctggcaatctggcagatcgtggatcctcttcaccgcacaatcgaaacatttgccaaagaggagccaaaagaggacatcgacgtctccatattgccgcagctggagcactgtagctccagaaagatgaacacttggctgggaatcttctacggctataaaggactcctgctgttgctggggatcttcctggcttatgaaacaaagtctgtgagcaccgagaaaatcaatgatcaccgtgcggtcgggatggccatttataatgtggctgtactttgccttatcactgcccctgtaactatgatcctgtcaagccagcaggatgcagcttttgccttcgccagcttagcgatcgtgtttagtagttacatcacccttgtcgtgctgtttgttccaaagatgagacgcctcatcacccgcggcgagtggcagagtgaggcccaagatacaatgaaaactggttcgagcaccaataacaacgaggaggaaaaatcaaggctcctcgaaaaggagaacagagagctagagaagatcatcgccgagaaggaagagagagtatcagagctccggcatcaactgcagtctagacagcagctgcggagtcgtcgccaccccccaactcccccggagccctccggggggctgcctagaggaccaccagagccaccagatcgactctcctgtgacggaagtcgcgttcacctattgtacaagtag

SEQ ID NO: 5950 - DNA, 2886 bp, synthetic construct
  misc_feature 1..2886: note = source = /note="Description of Artificial Sequence: Synthetic coding sequence"
  source 1..2886: mol_type = other DNA
atgctgcttttgttgctgttggcgccattatttctcaggcctcccggagccgggggggcacaaaccccgaatgctacatctgaaggatgtcagatcatccaccctccatgggaagggggcataagatatcgggggctcacccgggatcaggtaaaggccatcaatttcctgcccgtagattatgagatcgagtacgtgtgtcgcggtgaacgggaggtggtggggccaaaggtcaggaagtgtctcgcaaacggcagctggaccgatatggatacgccgagccgctgtgtgcgcatctgcagcaagtcctacttaactcttgagaacggcaaggtcttcttgaccgggggcgaccttcctgcactcgatggagctagagtggacttcagatgtgatccggactttcacctcgtgggtagctcaaggtctatctgcagccagggacagtggagcacaccaaaacctcattgccaagtgaataggacccctcactctgaacggagagccgtgtacattggagctctgttccctatgtctggcgggtggccaggggggcaggcctgccagccagcagtggaaatggctctggaagatgtgaattcgagacgggacatcctgccagattacgaacttaaactgattcatcatgatagcaagtgtgatccggggcaggccaccaagtatctgtatgaattattgtacaacgatcctatcaaaatcattttaatgcctggctgtagttcagtcagcactctcgttgctgaggctgcccggatgtggaacctgattgtgctttcatacgggtcttcatcaccggctctttctaacagacagaggttcccaacattctttcgcacccatcccagcgccaccttgcacaatcctactcgtgtgaaactgttcgagaagtggggttggaagaagattgcgaccattcaacagaccaccgaggtcttcacgtccaccctggacgacttggaggagagggtgaaggaagccggaatcgagatcacgtttcgtcagagctttttcagcgaccccgctgttcctgtaaaaaaccttaaaaggcaggatgctagaataatcgttgggttattctacgaaaccgaggctcgaaaggtcttctgcgaggtttataaagagcggctttttggcaagaaatacgtttggtttttgatagggtggtatgcagataactggtttaaaatttacgatccctccatcaattgtacggtggacgaaatgacagaggcagtggaaggtcatatcacgacagagatcgttatgctcaaccccgccaacactcgctccatatcaaacatgacttcgcaggagtttgtggaaaagttgaccaaacgcttaaagcggcaccctgaagaaaccggaggattccaggaagcacccctggcctacgatgccatatgggcattggcacttgccttaaacaagacatctggaggaggcgggagaagcggcgtccgcctggaagactttaactataataatcagacaatcaccgaccagatttatcgagctatgaatagcagctcgttcgaaggcgttagtggtcacgtggtgttcgatgcatcagggtcccggatggcctggacactaatcgagcagttgcaaggggggtcctataagaagattggatattacgatagcactaaggatgatttgtcttggagtaaaacggataagtggatagggggctccccaccggctgatcagactttagtgattaaaaccttcaggttcctttcccagaaacttttcatcagtgtctccgtcctatccagtcttggaatcgttttagcagtcgtgtgcctctcctttaatatttacaactcacacgtccggtatatccagaacagtcagcctaatctgaacaatctcacggccgtgggctgctccctggctctggcggctgtttttccattaggactcgacggctaccacatcgggcggaatcagttcccgtttgtttgccaggcacgcctatggttactcgggctcgggttcagtctagggtatggttctatgttcaccaaaatctggtgggtgcataccgtgttcaccaagaaagaggaaaaaaaagagtggaggaagaccctcgaaccatggaaactgtatgccacagtggggttactggtgggcatggatgttctcacccttgctatatggcaaatcgtggatcccctgcacagaactatcgagacttttgccaaggaagagcctaaagaagacatcgacgtgagtatactcccccagctggaacactgctcctccaggaagatgaatacttggttggggattttttacggatataaagggctgctcctgctcctaggtatcttcctggcctatgaaactaaaagtgtgagcaccgagaaaatcaacgaccacagggccgtgggtatggctatatataatgtggcggtcctgtgtctgatcaccgctccggtcacaatgattctttcttcacagcaggacgccgctttcgcctttgcctccctggccatagtcttcagttcttacataaccctggtggttttatttgtgcccaagatgagaagactgatcactcgcggggagtggcaaagtgaagctcaggacactatgaaaaccgggtcttctactaataataacgaggaggaaaagtccaggcttctagaaaaggaaaaccgtgaactggagaagatcattgccgagaaggaagagagggtgtctgaattgcgtcaccagctacagtcccgacagcaactgcggtcgcggaggcacccacccacgcctcccgaacctagtgggggactgccccgggggcccccagagcctcctgatcgactctcctgtgatggttcccgtgttcaccttctctacaaatag

SEQ ID NO: 5951 - DNA, 2535 bp, synthetic construct
  misc_feature 1..2535: note = source = /note="Description of Artificial Sequence: Synthetic coding sequence"
  source 1..2535: mol_type = other DNA
atgggcccgggcgcgccgttcgcgcgcgttggctggccacttcctctgttggtggttatggctgccggagtcgcacctgtgtgggcctcacactcaccccatcttccacggccccacagtagagtcccgccgcatccctcctctgaaaggagggccgtctacataggggcactgttccccatgtctggggggtggcccggagggcaggcctgtcagccagcggtggagatggcacttgaggacgtgaatagccgacgcgacatccttccggattatgaactgaaactcattcaccacgattctaagtgtgaccccggtcaagctaccaaatatctttacgagctcctttacaatgaccccatcaaaatcatactcatgcctggctgcagttctgtttcaactcttgttgctgaagcggctcggatgtggaatttaatcgtcttgtcatatggcagttcttcacctgcactctcaaataggcagcgttttcccacattcttccgcactcacccaagcgcaactcttcacaaccccacccgcgtgaagttgtttgaaaagtggggctggaaaaagatcgccacaatacagcagactaccgaggtgtttaccagcacgctggatgatctcgaagagagagtgaaggaagccggaatcgaaatcacatttcgccagagcttcttctccgacccggccgttccggtaaagaacttgaagagacaggacgcccgcattatcgtgggactcttttacgagacagaggccaggaaggttttctgcgaagtttacaaagagcgcctcttcgggaaaaaatacgtttggtttcttatcggttggtacgcagacaattggtttaaaatttatgatcctagcattaactgcaccgttgatgagatgaccgaagccgtagagggtcatattacaaccgagattgttatgttgaatcccgctaataccaggtctatcagtaatatgacttcccaggaatttgttgagaagctaactaagcggttaaagcgacatccagaggagacagggggatttcaggaggctccactcgcttacgatgccatttgggcactggccctggcactgaataaaacatcaggtggagggggacggtctggcgttcggcttgaagacttcaactacaataaccaaaccattaccgatcaaatttatagggcaatgaacagctcgagcttcgaaggagtgagcgggcacgttgtctttgacgccagcggctcgaggatggcttggactcttatcgaacagctgcaaggcggatcttataagaagattggatactatgattctacaaaggatgacctgagttggagcaaaaccgataagtggattggagggtctccacctgccgaccagacattggtaatcaagacatttcggtttctgtctcagaagctctttatcagcgtctctgttctcagcagcctgggcatagtgctggcggtagtatgccttagcttcaatatctacaactcccacgtcagatacatccagaacagtcagccaaatctgaataacctcacagctgtcggttgttccctggctttagccgctgtgtttccgcttggcctggatggataccacatcggtcgaaaccagttccccttcgtgtgccaggcccggctctggttattgggactggggttttccctgggctatggcagtatgtttacgaagatctggtgggtccacacagtcttcaccaaaaaagaggagaaaaaagaatggcgtaaaactttggaaccgtggaaactgtacgccacagtgggactgcttgttggaatggatgtgctgaccctcgcaatctggcaaatagtcgatccactccatcgaaccatcgagacattcgccaaagaggagccaaaggaagatattgatgttagtattcttccacagctggagcattgcagtagccggaagatgaacacgtggctaggtattttttatggctacaagggattgctgctccttttgggtatatttttagcctatgaaacaaaatcagtttctaccgagaaaatcaacgaccacagagccgtaggcatggccatttacaatgtagcagttctatgtctcataacagcccccgttaccatgatcctgagttcccaacaggacgctgcctttgcatttgccagtctggccattgtctttagtagctatataaccctagtggtgttatttgtccccaaaatgcggcgcttgattactaggggcgaatggcagtccgaagcccaggacaccatgaagaccggcagctcaacaaataacaatgaggaggagaagtcccgactgctcgaaaaggagaatagggaattagagaagataatagctgagaaggaggagcgcgtcagcgaattgcgacaccagctgcaaagtaggcagcagcttagatccaggcgacatccccccaccccccccgagccttctggcggtctgccaagaggccccccagaaccccctgatcgtttgtcctgcgacgggtccagagtccacctcctttataaatag

SEQ ID NO: 5952 - DNA, 3090 bp, synthetic construct
  misc_feature 1..3090: note = source = /note="Description of Artificial Sequence: Synthetic coding sequence"
  source 1..3090: mol_type = other DNA
atgccgccgaccaagtccgtttccgagcctgtccccttcgaaactgaagcgccaagtatgacaatagttcctactactgacatcgagcccgtgaccgtcagaactgaggcaaccgttactaccttggcacctaagacttcgcagagaaccagaactcgcagacccagacccaaacacaagaccacaccccggcctgagaccctgcaaaccaagcttgatttcgggcctatcaccccggggactagctcagcccctactaccactacaaagagaaccagacgcccgcatcctaagcctaagacgaccccccaccctgaggtacctcagaccaaactggttcctgctactattctcgaaccagtgctgcgaaccgaggccagcggcaccaccgccgtgcccgcaaccatcttcgagccggtctcccctattaaggaggcccccggaaccacttttgttccggtcacagatcttgaacctgtcactttccgtactgagatccccgccaccactctcgccaccaagacgtcaaagcgcacccgtccgcctcgcccgagacccaaaaccaccccatcgcctcaggctccagagacaaagccagtacccgccacagtcctggaacctgtgaccctgaggcctgaggccagcactacattggcctcgaagacaagtcagcggaccaggcggccgcgtttgcgtactaagacgaccccccggccagaggctcccgaatccaaacccgtccctacagcggaactgaaacctgtgacgctgaggactgaaacctgggtcacaacacaggctcccaagacaagccagaggacacggagacctcgcccgaaaacaaagaccacaccgtcccctgaggtgccacagacaaagctcgtacccagtacagatctggaaccggggacgctccggactgaggccccaaagactatggttgtcacaaccgtattggagcctgatactttcaggacaaaattccctgagacaacactcgcgccaaaaacacagagaacccgacgaccacgtccacgacctaagaccacttcctcacctgaagtaccgcagaataaatcagtttcagttaccggcttcgaaccggtggttcactccactgatgctccaggcactaccttcgctcttaccgaactacagaccctcattctgaagcccgtgacctcgcccagtttggagatgacagaatctcagcccgtctctgacgtcctcgaatccgtgacactcagcactgagagtcctaaggagaccatcgctcccgccaagactgattatgtatacccaaccgccaaagcaccactctggcccgaagaaccaaaaacggaggtggtcgagagtatcacgtacgtgtcagagccgcccgaaaccaccttggagaccagcccacttccttcccagagcatcacattaccctcaccggatgagcctcaaacggagcccgccccaaagcagacacccagagcaccacctaaaccaaagacctccccacgcccccgcatacctcagacccagccggtgccaaaagttccccagcgagtcacagcgaagcctaagacctcccctagccccgaggtcagctatacaacacccgccccaaaggacgtactgttgcctcacaagccgtaccccgaagttagccagagtgaacctgcgcccctggaaacccgcggaattcccttcattcctatgataagcccctctcccagccaggaagagctacagactactctggaggagaccgatcaatctacccaagagccttttacaaccaaaataccccgcacaactgaacttgcgaagaccacacaggcacctcaccggttctataccacagtgcggccccggacaagcgacaagccccacatcaggcccggggtcaaacaggcacccaggccaagtggtgccgataggaacgtgtctgtggattctactcaccctacaaagaagccaggtaccagacgccctccgctcccaccacggcctactcatccgcgccggaagccccttccgcccaataatgtgactggaaagccgggatctgccggaattatctcctctggaccaattacaactccccctctgagatcaactcccagacccacaggaacacccctggaaagaattgagaccgacattaagcagcccacggtgcctgcctcgggcgaggaactggaaaatattacagactttagtagctctcctactagagagacagacccccttggcaagcctcggttcaaaggcccacacgttagatatatccaaaaaccagataattccccttgcagcatcacagactccgttaagagattcccaaaggaggaagccactgagggtaatgcaacctcgcctcctcagaatcctcctacgaaccttaccgtcgtgacagtcgaaggctgccctagtttcgtcatcttggattgggagaaaccattaaatgacaccgtgaccgagtacgaggtgatatctcgtgagaacggaagtttctctggaaagaataagtctatccagatgactaatcagacgttctccaccgtcgagaatctgaaaccaaacacttcatatgaatttcaggtgaagcccaagaaccctctcggggagggccccgtctctaacaccgtggccttttccaccgaaagcgccgacccacgtgtgagtgagccagtttccgctggaagggatgcaatctggacagaacgccctttcaactctgattcttacagtgaatgcaaaggcaagcaatatgtaaaacgaacctggtataagaagttcgtcggtgtgcagctctgtaattccctgaggtacaagatatatctgagtgacagtctaaccggtaagttttacaatattggtgatcagagaggtcacggagaggatcattgccagtttgtggacagttttctggacggcaggacagggcagcaactgacatccgaccagcttccaatcaaggaggggtatttccgcgctgtgaggcaggagcccgtgcagttcggagagattggcggccatacacagattaactatgtccagtggtatgagtgtggcaccacaatccctgggaagtggtag

SEQ ID NO: 5953 - DNA, 2355 bp, synthetic construct
  misc_feature 1..2355: note = source = /note="Description of Artificial Sequence: Synthetic coding sequence"
  source 1..2355: mol_type = other DNA
atgacaatcgtgcctaccacggatattgaaccagtaactgtgcgtactgaagctacggtgacaacattagccccgaagacgagccagcgcacacgcacccggcgacccaggccaaagcacaaaacaaccccccggccagagacactccagactaagctggactttggtcctatcacccctgggacctcttccgctcccactacaaccacaaagcgaacccggcggccacaccctaaaccaaaaaccaccccacatcccgaggtgccacaaaccaaacttgctccaaaggtgcctcagaggactcacagacctcatccaaagcctaaaaccacgctctccccagaagaattacagaccgagctggtgcctgtcacagatctggagccagtgacctttcgaactgaaatcccggcaaccacactggcaacaaaaacttccaaacgcacacgtccaccaaggccccgcccgaaaacaaccccatcgcctcaggccccagaaactaagcctgttcctgctaccgtgctggagcctgtaaccctgaggccagaagcctccacaacactcgcttctaagacctctcagcgtaccagacgcccccgactgaggaccaaaacaacgcctcggccagaagcgcctgaaagtaagccggccccaaagcagaccccccgggcacccccaaaaccaaagacatcccccaggccccgaattccccagacacagcccgtgccaaaagtgccccagagggtcacggccaaacccaaaacaagccctagccccgaagtctcctataccacccctgctcctaaggatgtcctactcccacataagccctaccccgaagtgtctcagagcgaacccgcgcccttagagactcgcgggatccccttcattccaatgattagtccctcccccagccaggaggaactccaaaccacactggaggaaaccgatcagtccactcaggagccctttacaacaaagatcccccgaaccactgaactcgctaagacgacacaagcccctcaccgcttctatacaaccgtgcggcctcgcacaagcgataagccccatatccgacctgtgctaaatcggacgaccaccagaccgacgcgccctaaacctagtgggatgccctcaggaaatggagttgggacgggagtgaaacaggcacctcgtcctagcggggcagatcgcaatgtgagcgttgattcaacccacccaaccaagaaaccgggtacgaggagaccacctctgccgcctcgccccacgcacccacggcgaaagcccctgcctcctaataatgtgaccggcaagccaggaagcgccggcatcattagtagcggacccataactacaccccccctgaggtctactccaagacctacaggtacccctctcgagcggatagagacagacataaagcaacccaccgtgcccgcatcaggagaagagttggagaacatcaccgatttcagttcctctcccactcgcgagacagatcccctcggcaaacctcggttcaagggcccacacgttcgctatatccagaaacctgataacagcccatgttctatcaccgattccgtcaaaaggttccccaaggaggaggccaccgaaggaaacgcaacatcaccgccccagaaccccccaacaaacctgactgtcgtgaccgtagaggggtgcccctcattcgtgattctggactgggagaaacctctcaatgataccgtaactgagtacgaggtgataagtcgggaaaatggcagtttctcaggcaaaaataagagtatccagatgaccaaccagaccttcagcacagtggaaaacttgaaaccaaacacaagctatgaattccaggtgaagcctaagaatcctcttggcgaaggccccgtgtccaacaccgtcgcattctccaccgagagtgccgacccccgagtatccgagcctgtgagcgccggcagggatgctatctggacggagaggccttttaactcggacagctatagcgagtgtaaaggcaagcagtacgtgaaacgcacttggtataagaaatttgttggggtgcagctatgcaattccctgcgatacaagatctatctctcagactccctcaccgggaagttttataacatcggagaccagcgggggcatggagaagaccattgtcagtttgtcgatagttttctggatggccgaacgggccagcaactgacctccgatcagcttcccataaaggagggttacttcagagcagtccgacaggagcctgtgcaattcggcgaaatcgggggacacacccaaattaactatgttcagtggtacgaatgtgggactactatccctggaaaatggtag

SEQ ID NO: 5954 - DNA, 1584 bp, synthetic construct
  misc_feature 1..1584: note = source = /note="Description of Artificial Sequence: Synthetic coding sequence"
  source 1..1584: mol_type = other DNA
atgcttatgctgtttgtgtttggtgtcctgttacatgaagttagcctatcaggtcagaatgaggctccgccaaacacccacagcattccaggcgagcccctctacaactatgcaagcatccggttgccagaagagcatattcccttcttccttcataataatcggcacatcgcaacggtttgccggaaagattccctctgtccatataagaaacacttggagaagctgaagtactgctggggctatgaaaagtcttgcaaaccagagttcagattcggttacccagtgtgtagctacgtcgacatgggatggacagataccctagaatctgctgaggacatcttttggaagcaagccgactttggatacgctagggaacgattagaagagatgcacgtcctatgtcagccaaaggagacctctgattcttccctggtttgctctcgctacctacaatactgccgcgcaaccaacctgtaccttgacctgagaaatattaagagaaaccacgacagattcaaagaagacttttttcagtccggagagatcgggggccactgcaaactggacatcagaacactgactagtgaggggcagcggaagtcacctctgcagtcatggtttgccgaactgcagtcctacacgcaacttaacttcaggccaatcgaagacgctaagtgtgacatagtaatagaaaagcccacctactttatgaagctcgacgcgggggtgaatatgtatcaccacttctgcgactttatcaacttgtacatcacgcaacacgtcaacaactctttctccaccgacgtttacatagtgatgtgggatacaagctcatatggctatggagatctcttttcagacacatggaacgcgtttacagattatgatgtcatccacctgaaaacctacgactctaagcgcgtgtgcttcaaggaggctgttttcagcctactgccccgaatgaggtacggtttgttttacaatacccccctgataagtggttgccaaaataccggcctctttcgagccttcgctcaacacgtgctccacagattgaatattacacaggagggccctaaggacggcaaaattcgtgtgaccattctcgctcgctcaaccgaataccgcaagatcctgaatcaaaacgaacttgtaaatgccctgaaaactgtttctacattcgaggtgcaaatcgtggattataaatatcgggagctaggtttcctggaccagttgagaatcacacacaacaccgacatttttattgggatgcatggagctggcctcacccatcttctcttcctgcctgattgggccgctgtgtttgaactgtacaactgcgaagatgaacgttgttatttggatttggcccgcctgaggggagtgcattacattacctggaggcggcagaacaaggtctttccccaggataaaggtcaccaccccactttgggggagcaccccaagttcaccaattatagcttcgatgttgaggagttcatgtatctcgtgcttcaggcagccgaccacgtccttcagcatccaaagtggcctttcaaaaaaaagcacgatgaattatag

SEQ ID NO: 5955 - DNA, 2004 bp, synthetic construct
  misc_feature 1..2004: note = source = /note="Description of Artificial Sequence: Synthetic coding sequence"
  source 1..2004: mol_type = other DNA
atggggtccagccgcctcgccgccttattacttccactgttgctgattgtgatcgatttaagcgatagcgccggcatcggcttccgccacctgccacattggaacacaaggtgtcccctggccagccataccgatgactcttttactggctcttctgcatacattccctgtaggacgtggtgggccttgtttagcactaaaccctggtgcgttcgcgtgtggcactgtagtcgttgtctttgtcagcacctcctgtctggaggcagtggattacagcgcggcctattccatttgctggtccagaaatccaaaaaaagcagcacttttaagttctatcgtaggcacaagatgcccgcacctgcccagcgcaaacttttaccaagaaggcacctgagcgagaagtctcaccacatatccattcccagccctgatatctcacataaaggactccgatcaaagaggacacagccttcagacccagagacttgggagtccctgccaaggttagatagccagcggcacggcggcccagagttttccttcgatctgctacccgaggcaagggctatcagggttactatttcttccggaccagaagtatctgtcaggctgtgtcaccaatgggctctcgagtgtgaggaactgagctcaccctatgatgtgcaaaagatcgtgagcggggggcacacagttgaactcccctatgagtttttactgccatgtctctgcatcgaggcgtcctatctgcaggaagacaccgtgcggcggaagaagtgcccttttcaaagctggcctgaggcctacggctctgatttctggaaatccgtgcatttcactgattattcacagcatacacagatggttatggctctcacgttaaggtgccctctgaagctcgaagccgcactttgccagaggcacgactggcataccttatgcaaggaccttccaaacgcaaccgccagagaatccgatggctggtacgtgcttgaaaaggtcgacctgcatcctcagctgtgcttcaagtttagctttggcaactcatcacacgtggaatgtccccatcagactggaagcctaacaagctggaacgtgagcatggacacccaagctcagcagctcattttacacttctcgtccaggatgcacgccacattcagcgccgcttggtccctgccgggcctgggacaggacacgctggtgcctccagtgtataccgtcagccaggcacggggcagctctcccgtgtccctcgatcttattattcctttcctaaggcccggctgctgcgtgctggtctggagatctgacgtgcagtttgcctggaagcacctactctgtccagatgtgagctaccggcacctcggcctcctgattcttgccctgctggctctactgaccctccttggggtcgtcctagccttaacttgtcggagaccccagagcggcccaggacccgctaggccggtgctactgcttcatgcagctgactccgaagctcagcgacgcttggtgggagcattggcggagctgttacgtgccgcgctggggggcggcagggacgtgatcgttgatctgtgggaaggaagacatgttgccagagtggggccattaccttggctgtgggccgcccgaacgcgggtggcccgggagcagggaacagtactgctcttgtggagcggtgccgatctgcgccccgtgagcggccccgacccccgggcagcaccactgctcgcccttctgcatgccgcaccccggccccttcttcttttggcttattttagccgcctttgtgccaaaggtgacatccccccccctctcagagccctgccgaggtaccgcctcttgagagatctgccacgcttgctacgggcactggacgcacgtccgtttgcggaggcaactagctggggccgccttggggcacggcagagaaggcagtcaaggctggaactgtgttctagactggaaagggaagccgccaggctagctgacctcgggtag

SEQ ID NO: 5956 - DNA, 1101 bp, synthetic construct
  misc_feature 1..1101: note = source = /note="Description of Artificial Sequence: Synthetic coding sequence"
  source 1..1101: mol_type = other DNA
atgcccatgattagtgttctggggaaaatgttcctctggcagcgagaagggcccggtggtaggtggacgtgtcagacatccaggagggtgtcctccgacccagcctgggcagtcgagtggatcgagctgccccgtggacttagcctgtcaagcctagggtccgccaggaccctgcgaggatggagccgcagttctagaccctcttcagtggactcccaggatctacccgaggttaatgtcggcgataccgtcgctatgttgcccaagtcgaggcgcgcgttgacgattcaggaaatcgcggcgctggctaggtcatccctacatgggatctctcaagtggtgaaggatcacgtgaccaagcccacagctatggctcaaggaagggtggcccatctgatcgagtggaagggctggtcaaagccatccgactctccagctgccttggaaagcgctttctctagctattctgatctgtcagagggcgaacaggaagctaggttcgctgcgggggtcgcggagcagtttgcgatcgctgaggcaaagctgagggcctggagcagcgtagacggcgaggacagcaccgatgacagctacgatgaggatttcgcgggtggtatggatacagacatggctggccagcttcctctgggacctcatctgcaggacctctttaccggccacagatttagtaggcctgttcggcaggggtctgtagagcccgagagtgactgctcccagaccgtttcacctgacacactgtgttcctccctgtgctctctggaggatggcctgttgggcagtcccgcccgactggctagccaactgctaggtgatgagcttctgcttgcaaaactccctccgagtagagagtcagcctttcgtagcctgggacctctggaagctcaagacagcctgtacaactcccccttgaccgagtcttgtcttagtccggccgaggaagagcccgccccctgcaaagactgccaacctctgtgccctcctctaacaggatcctgggagaggcaacggcaggcatctgacttggcgagttccggggtcgtgtcactcgatgaggatgaggcagagcccgaggagcagtag

SEQ ID NO: 5957 - DNA, 5172 bp, synthetic construct
  misc_feature 1..5172: note = source = /note="Description of Artificial Sequence: Synthetic coding sequence"
  source 1..5172: mol_type = other DNA
atgcagttccaacttactctgtttcttcatctcggctggctatcttacagcaaggctcaggatgattgtaatagaggcgcctgccaccccacgaccggagacctcctggttgggcgcaatactcaacttatggcaagttcgacatgcggcttgtccagggcacagaagtattgtattctttcctatcttgaaggagagcaaaaatgctttatatgcgactccaggtttccctacgatccatacgatcagcctaactcccataccattgagaatgtaatcgtgagttttgagcctgaccgcgagaagaaatggtggcagtctgaaaacggtctcgatcacgtgtcaatcagattggatctggaggcactctttcggttttcccacctcatcctaacttttaaaacatttagacctgcagccatgctcgtggagagaagtacggactatggacataactggaaggtatttaaatactttgcaaaggattgtgcaactagcttcccaaacattacctcaggccaggctcagggggtgggcgacatcgtgtgtgacagcaaatactctgatattgaaccttctacaggaggtgaagttgtgctgaaggtgcttgacccttccttcgaaatagagaacccttacagtccatacattcaggacttagtgacactcactaacctgaggatcaattttaccaagcttcacaccctgggcgatgctttgctggggcgtcggcaaaacgactccctcgataagtactactatgctctttatgaaatgatcgtgcgcggcagctgcttctgtaatggccacgccagtgaatgccgccctatgcaaaagatgagaggtgatgtcttttcacctcccgggatggtgcacggacagtgtgtgtgtcagcataatacagacggccctaactgtgagagatgcaaggacttctttcaggatgccccttggcgtcccgccgcagacctacaggacaatgcttgtcggagttgctcatgtaactcacactcatcccggtgccattttgacatgaccacctatttggcaagcggcggacttagtggcggggtttgtgaagattgtcagcataataccgagggacagcattgcgaccgatgcaggccccttttttatcgcgatcccttaaagaccatttctgacccctatgcctgcattccttgtgagtgtgaccccgacggcaccatcagcgggggaatatgcgtttctcattctgacccggccttgggttcagtggcaggccagtgtctgtgcaaagagaatgtggagggggcaaaatgcgaccagtgtaaaccaaatcactatgggctgagcgcaacggacccattaggttgccaaccatgtgattgtaatcctttggggtccctgcccttcctgacatgtgacgtggacacgggccagtgcctttgcctcagctacgtgaccggggctcactgtgaggaatgtaccgttggatactggggattgggaaatcatttacatgggtgctctccttgtgattgcgacattggtggagcatactcaaacgtctgtagcccaaaaaatgggcagtgtgagtgccgccctcacgtcacaggccggtcttgcagcgagccagcaccgggctacttctttgcccccctgaatttttacctctacgaagccgaggaggccacaacactgcagggccttgcacctcttgggtccgagacattcggacaaagcccagccgtccacgtcgtgctcggggaaccagttccaggaaatcctgttacctggactggacccgggttcgcgcgcgtcctgccaggtgcgggccttcggttcgccgtgaacaatatcccgtttcccgtcgacttcaccatagccatacattatgaaactcaatcagcagccgattggaccgtccaaatagtggtcaacccaccaggtggatcagaacactgcatacctaaaactctccagagcaaaccacagagcttcgctctgccagctgcgactaggatcatgttacttcctactcccatctgcctggaaccagatgtgcagtactcaattgatgtgtattttagccagccactccagggagagtctcatgcacactcacacgtattagttgattccctgggattgattcctcagattaacagcttggaaaacttctgctccaaacaagacttagatgagtaccagctccacaattgcgtggagattgccagcgctatgggcccgcaggtcttaccaggcgcatgtgaaagactcatcatttctatgagcgccaaactccacgacggtgcagtggcatgtaagtgccaccctcaaggaagcgtgggcagtagctgcagcaggctcggtggacagtgccagtgcaaacctctcgtcgtcggccggtgctgtgatagatgctcaactggctcttacgacctcggtcaccatgggtgccatccttgccattgccacccacagggatccaaagacacagtctgtgatcaggttacaggtcagtgcccgtgtcatggggaagtctccggcaggagatgtgatcgttgccttgctggttattttggatttccatcctgtcacccttgcccttgtaaccggtttgctgagctgtgtgatcccgagacaggttcctgctttaattgtggaggttttacaaccggccgaaattgcgagcgctgtattgatggttactatgggaatccttcaagtggacagccatgtaggccgtgcctctgtcctgatgatcctagctccaatcagtatttcgcccattcctgttaccagaatctttggtcttccgacgtgatttgtaattgcctccagggctataccgggacacagtgtggggaatgttctacagggttttacggcaacccccggatcagtggggctccatgccagccctgcgcttgcaacaataacatcgacgttaccgaccctgaatcctgtagccgtgttaccggtgagtgcttacggtgtcttcataatacacagggtgccaattgtcagctgtgtaagcccgggcactacgggtccgcccttaaccaaacatgccgccgttgtagctgtcatgccagtggagtgtcaccaatggaatgccctcctgggggcggagcatgcctgtgtgaccccgtcacaggcgcttgtccatgcttgcctaacgtgacgggcttagcttgcgatagatgcgctgacggctattggaacctggtgccaggtcgtggatgtcagtcctgcgactgtgacccacggacgtcccagtcttcccactgcgaccagttgacagggcagtgtccatgtaaattggggtacggcggtaagcgttgtagtgaatgtcaagaaaactactacggcgatccccctggccgctgcataccctgcgactgcaatcgggccggcacccagaaacctatttgcgatccggacacggggatgtgtagatgccgggaaggcgtaagcgggcagagatgcgatcggtgcgcccgtgggcactcccaggagtttcctacgtgcctgcaatgccatctgtgcttcgaccaatgggaccacacaatttcttcattgtccaaagcagttcagggacttatgcgtctggctgccaatatggaggacaaacgtgaaactctgccagtatgcgaggccgacttcaaggacctgcgggggaacgtctccgaaatcgagcgaattcttaagcatccagtgttcccatctggaaaattccttaaggttaaagactaccacgattcagtgcggaggcaaatcatgcagctgaatgagcagctcaaagccgtttacgagttccaggacctgaaagacaccatcgaaagggcgaagaacgaggcagatttgctgctcgaagacctgcaagaggagattgacttacaaagttcagtcctcaatgcctccatagcggactcttctgagaacatcaaaaagtactaccacatttcctcttccgccgaaaagaagatcaatgagacatctagcaccattaacacctcagccaatactaggaacgatctgctgaccatcctggacacactgacctctaaaggcaacttgtctctggagcggctgaagcaaatcaagattccagatatccagatactgaacgagaaggtctgcggcgaccccggaaacgtcccctgcgtgccccttccatgcggaggggctttgtgtaccggacggaagggacatcgcaagtgtcgtggcccaggctgtcacggctctctgaccctgtctactaacgcactccaaaaggcccaggaggccaagtctatcatccgcaatcttgataaacaggtcaggggcttgaagaaccagatcgagagcatcagtgagcaggcagaggtgagcaaaaataatgcactccagctgagagagaaactgggtaatatcaggaatcagtccgacagcgaagaagaaaatatcaacttatttattaaaaaagtcaagaatttcctccttgaggagaacgtgcctcccgaggatattgagaaggtggctaatggggtcttagacattcatttgcctataccctcacagaacttgactgacgagctggtcaaaattcagaagcacatgcagctgtgcgaagactaccggactgacgagaatcgcttgaatgaagaggccgatggtgctcagaagctgctggttaaagccaaagcggctgaaaaggctgccaacatcctgttgaacctcgataagactctgaatcagctccaacaggcccagataactcaaggtagagctaattctaccatcacacaactgacagccaacattacaaagatcaagaaaaatgtgctccaggcggagaaccagacgcgcgaaatgaagtccgaattagaactagccaagcagcgctccggactggaagatgggctgagtttgctgcagacgaagctgcagcgacatcaggaccacgctgttaacgccaaagtgcaggccgagagcgcccagcatcaagcaggcagcctcgagaaggagtttgttgaattgaagaagcaatatgcaatcctgcagcggaaaacatccacaacaggattaactaaagaaacgctgggcaaagttaagcagttaaaggacgctgcggagaagctggcaggtgatacagaggctaaaataagacgcataaccgggtgctttcagaacagcgctaggtag

SEQ ID NO: 5958 - DNA, 5286 bp, synthetic construct
  misc_feature 1..5286: note = source = /note="Description of Artificial Sequence: Synthetic coding sequence"
  source 1..5286: mol_type = other DNA
atgcagttccaactcacgctgttcttacacctgggatggctgagttactcaaaggctcaagacgactgcaatcgaggcgcgtgtcaccccaccacaggcgacttgctggtcggtcgcaacactcagcttatggcgagttccacgtgcgggctcagccgcgctcagaagtattgtatcctgtcgtacttggagggcgaacagaagtgctttatttgcgattcacgctttccctatgacccatacgaccagccgaatagccacactatcgagaatgtcatcgttagttttgaaccggatcgagagaaaaaatggtggcagtcagagaacggtctcgatcacgtgagcattcgtctggatctcgaggccctattccgcttctcacacttaatcctaacgttcaagacgttccgccccgcagcaatgctagtggaacgcagcacagattatggacataactggaaggtcttcaagtacttcgctaaggactgtgcaacatctttccctaacattacttccgggcaggcccagggcgttggagacatcgtctgcgactccaaatacagtgacattgaaccatccaccgggggagaggtcgtgctgaaggtcctcgatcctagctttgagattgagaatccatactctccttacatccaggatcttgtcactctcaccaacctgcgcatcaactttaccaaactccacacgttgggagacgcactgctaggtagacgacagaacgacagtctcgacaagtactactatgcactgtatgaaatgatcgtacgggggagctgcttctgtaacgggcacgcatcagagtgtcggccaatgcagaagatgaggggcgatgtgttctctccacctggcatggtacacggccagtgcgtctgccagcacaacactgacgggcccaactgtgagcgctgtaaagacttttttcaagatgcaccgtggcgccccgcggcagatctgcaggataacgcttgccggagttgttcatgcaactctcactcctcgcgatgtcatttcgacatgaccacctaccttgctagtggcggcttgtccggcggcgtgtgtgaggactgccagcataacactgaaggacagcactgcgatcgctgtcggcccctcttttaccgcgaccccctgaaaaccatctccgacccctatgcttgtattccctgcgaatgtgatcccgatggtactatatctgggggcatttgtgtgagtcatagcgatccagccttgggcagtgtagccgggcaatgcctctgtaaggagaatgtcgagggcgctaagtgcgatcaatgtaagccgaaccactacggcctgagcgccaccgatccacttgggtgtcaaccctgtgattgcaatccgctcggatctctgccattccttacctgcgacgtggacactggccagtgcttgtgtctcagttatgtcacaggagcccattgcgaagagtgcacagttggctactggggtcttggaaatcacctgcacggctgtagtccgtgtgactgtgatataggaggcgcgtattctaatgtctgttcgcccaagaatggccagtgtgagtgtcgccctcacgtcactgggcgctcttgctccgagcccgccccaggctattttttcgcccctctcaacttttacctatacgaggccgaggaagccacgacattgcaaggactcgcccccctagggtctgaaacctttggccagagtcctgcagttcacgtggtgttgggcgagccagtcccaggaaaccctgtgacatggaccggccctggcttcgctcgggtcctgccgggggcaggactccgatttgcggtaaataatatcccatttcccgtggacttcacaatcgccattcattatgagacacagtccgccgccgattggactgtgcagatcgtcgtgaacccaccaggcgggagcgagcattgcatacctaagaccttacagtccaagccccaatcctttgccttgcctgctgccaccagaatcatgctgctgcccactcctatatgcctggaacccgatgtgcagtattccattgacgtctacttttcccagcccctacagggggagagtcacgcacactcgcatgtgcttgtggactccctgggactgatcccccagattaactccttggaaaatttctgcagcaaacaagatctggatgagtaccaattacacaactgtgtggagatagcctcagctatgggcccacaggtactcccaggtgcctgcgaaaggctaattatttctatgagcgcaaaattgcatgacggagccgtggcctgcaagtgccacccacaaggctcggtaggctccagttgcagtcggctgggcggccagtgccagtgcaagcccctcgttgtcggccgctgttgtgaccggtgcagcaccggctcatatgatttgggccatcatggttgccatccttgtcactgtcatccacagggaagcaaagacacagtctgtgaccaggtgactggccagtgtccctgtcatggtgaagttagtggccggcggtgcgacaggtgcctcgctggatactttggatttcctagttgtcatccctgcccctgtaatcgctttgccgaactgtgcgacccggagactgggtcttgctttaactgcggtggttttacaacaggccggaattgcgaacgatgtatagatggctattatgggaatccgtctagtggacagccttgcaggccctgcctatgccctgatgatccatcttctaatcagtattttgcccattcttgctaccagaatctgtggagcagcgacgtgatctgcaattgcctccaaggctacaccggcacacagtgcggcgaatgttcgacaggcttctatggcaatccgaggatttcaggagcaccctgtcagccttgcgcttgtaacaataatatcgacgtgaccgaccccgagtcatgctcccgagtgactggcgagtgcctgcgctgtctgcataacacgcagggcgcaaattgtcaactgtgtaaacctggacactacggaagcgcgctgaaccagacttgccggagatgctcttgccacgcttccggcgtgagccccatggagtgtccaccgggcggaggcgcctgtctgtgtgacccagtgactggggcctgcccatgcctccctaatgtcacgggacttgcttgtgatagatgtgctgatggctactggaacctggttcccggtcgcggctgtcagtcttgcgactgcgaccctcgcacaagccagtcttcacactgcgatcagctcactggccaatgcccgtgcaagctcggctacggaggcaagaggtgttctgagtgtcaggagaactactatggagatcctcccggccgctgcatcccgtgtgactgtaaccgggccgggacccagaaaccaatatgcgacccggacacaggcatgtgtcgatgccgcgaaggtgtttccggccaacgttgtgatcggtgcgccaggggacacagtcaggaatttcccacatgccttcaatgccacttgtgcttcgaccagtgggaccacacaatcagttccctcagcaaagctgtgcaggggctgatgcgactggccgcaaacatggaagataagcgggagactctcccagtctgtgaggctgactttaaggacctgcgaggaaacgtgtcagaaattgagcgcatcctgaagcaccccgtgtttccctccgggaagtttctcaaggtaaaggactaccacgactcagtacgtcgccagatcatgcagctaaatgagcagttgaaggctgtgtacgagttccaggacctgaaggacaccatcgaaagagcgaagaacgaggcagacctcctgctggaggacctgcaggaggaaattgacctccagtcctctgtgttgaacgctagcattgctgattcaagcgagaacataaaaaagtattatcacatctcctcatctgctgaaaagaagattaacgagaccagctcgacgataaacacctccgccaacactagaaacgacctgctgaccatccttgacacccttacctccaagggcaacttaagcctggagcgcttgaaacaaataaagataccagacattcagattctgaatgagaaagtatgcggtgaccccggcaacgtgccctgcgtccctctgccatgcggcggagcattgtgtaccggccggaaaggccatcggaagtgcagaggaccgggttgtcacgggagcttgaccctgtcgaccaacgccctccaaaaagcacaggaagctaagtccattatcaggaacttagataagcaggtgcgcggtttgaagaatcaaatcgaaagtatttccgaacaggctgaggtaagcaagaacaatgccctgcagctccgtgaaaagctcgggaatattcgtaaccaaagcgactctgaggaggagaacatcaatctgttcataaaaaaggtaaagaactttctactcgaggagaatgtgccccctgaagatatagaaaaagtggcgaatggtgtcttggacatccatttgcccattccttcacagaaccttactgatgaactggtaaagatacagaaacacatgcagctatgcgaggactatagaaccgatgaaaaccggctcaacgaagaggccgacggggcccaaaagctcctggtaaaggctaaggctgctgagaaggccgctaatatcctactaaacctagacaagacgctgaatcagctgcagcaggcccagattacccagggtcgggccaatagtaccataacacaattaacagccaacatcactaaaattaagaagaatgtgttgcaggctgaaaatcaaaccagggagatgaagtccgagctggaactggcgaaacagcggtcaggattggaagacggtctgagcctgctacagaccaaacttcagcgccaccaggatcacgctgtgaacgccaaggtgcaggccgagtcagcacagcatcaggccggcagtctcgaaaaggaattcgtcgaactgaagaagcagtacgccattctgcaaaggaagacgtcaaccaccggtctcactaaggaaacgctcggaaaagttaagcagctgaaagacgccgcagagaagctagctggagacactgaggccaagataaggcgcataacagatcttgagagaaaaatccaggatctgaacctcagtcggcaggcaaaggccgatcagttgaggattttagaagatcaagtagtggccattaaaaacgagattgtggaacaggaaaagaaatacgctaggtgctattcttag

SEQ ID NO: 5959 - DNA, 1455 bp, synthetic construct
  misc_feature 1..1455: note = source = /note="Description of Artificial Sequence: Synthetic coding sequence"
  source 1..1455: mol_type = other DNA
atgggggctgaagccctccctggaccggacgaagcagccgccgccgctgcatttgctgaagtcactactgtgacagttgccaacgtgggcgcagcggccgacaacgtgtttaccacgtcggtggccaatgcagcctcaatttccggacatgtgttgtccggccgtaccgcactccagatcggtgactccctaaatacggaaaaggcaactctgattgtggttcacaccgacggctcaatcgtggagaccacaggactaaaaggacccgctgcaccgttgactccgggtcctcagagtcctccgacacccctcgctcccggccaggagaaaggcgggactaagtataactgggaccccagcgtctatgacagcgagcttccagtgagatgccggaacatttccggaacactgtacaagaacagactgggaagtggcgggcgtggtaggtgtattaaacagggcgagaactggtactcacccaccgaattcgaagcaatggctggacgtgcttcctccaaagattggaagcgttctatcaggtatgccggaagaccattgcagtgtctgatccaagatgggattctgaacccacacgcagcctcctgtacatgtgcggcctgttgtgacgatatgaccctgtccggtccggtgcggttgttcgtcccctataagagacgcaagaaagaaaacgagttgcccacaacgcccgttaagaaagatagtccaaaaaatattactcttcttcccgccactgctgcaaccacctttacagtgaccccaagcggtcagatcacgacctccggcgccctgacattcgacagggcgtcaacggtggaggccacggcagttatttcagaaagcccagcccagggagacgtgtttgcaggcgccacagtgcaggaggcgagcgtccagcccccatgccgggcttcccacccagagccgcattacccggggtaccaagatagctgccaaatagctccctttcccgaagccgcacttcccacttctcaccccaagatcgtgttgacgtctctaccggctctggccgttcccccaccaacacctacaaaagccgcccctcctgccctagtcaatggactggagttgtcagagcccagatcttggctgtacttggaggagatggtgaacagtttgctgaacaccgcccagcagttgaagacactgtttgaacaagcaaaacacgcaagcacatatcgtgaggctgccacaaaccaggccaagatccatgctgacgcggagagaaaagaacagagctgcgtgaattgcggtcgagaggctatgtccgagtgtaccggctgtcacaaagtaaactactgttctaccttctgtcagcgtaaacgctggagcctgacaatgcttactagcctggtaagtatctcctggttaagggccattctcccctgtcagcctccaaaggtgctgggcttatag

SEQ ID NO: 5960 - DNA, 1512 bp, synthetic construct
  misc_feature 1..1512: note = source = /note="Description of Artificial Sequence: Synthetic coding sequence"
  source 1..1512: mol_type = other DNA
atgtctggtgctctactgtggcctctcctgcctcttctgctgctccttctttcagcccgggatggggtgagggcagcccaacctcaagctccaggctatcttatagcggctccgtcagtattcagggccggtgtagaggaagtaattagcgtgaccatctttaattctcctagagaagtgacagtccaggcccaactggtggcccagggtgagccggtagtgcagtcacagggagcaattctggataaaggaacgatcaagctgaaagtgccaacgggcctgcgtggacaggcactactgaaggtgtgggggcgaggctggcaggccgaagaaggacccctattccataatcagactagtgtgacagtagacgggcgaggagccagcgtttttattcagaccgacaagccggtgtataggccccagcatcgagtgttgatttccatctttacggtttcaccaaatctaaggccagtgaacgaaaaactcgaggcctacatacttgatccccgaggctcccgcatgattgagtggaggcatctcaagcctttttgctgcggcatcaccaacatgtcttttcctctgtcagaccagccagtcctgggtgagtggttcatttttgtcgaaatgcagggccatgcttacaataagtcctttgaggtacaaaaatatgtcctgcccaagtttgagctgctcatcgatcccccacgctatatacaagatctagatgcctgcgagacagggacagtgagggcccgctatacttttgggaagcccgttgctggcgcgctgatgataaacatgacggtcaatggggtaggctactacagccatgaggttgggcggccagtgctcagaaccaccaagattcttggctctagggatttcgacatttgcgttcgggatatgattccagcggacgtgcccgagcattttcggggccgtgtctcaatatgggccatggtgacaagcgtcgatggctcccagcaagtcgccttcgacgattctacccccgtgcaaagacagttggttgatatccgctacagtaaggatacgcgtaagcaattcaagcctgggttggcctacgtggggaaggtggaactgtcctatccagatggctccccagccgagggagtgaccgttcagataaaggccgagctcacccccaaagacaatatctacacctccgaagttgtgtcccagcgtggactcgtggggttcgagattcccagtatcccgacgtcggcccagcatgtatggctggaggtgttccaagagctggaagactacgacgtctcagatagtttcggcgtgtcgcgggaggatggaccattttggtgggcgggcctcaccgcccagaggagacggcggagtagtgtgttcccttggccatggggcataacgaaagattccgggttcgcgttcacagtcaggcggggtaacggaacggggggcgacgatagaccctcagagccggaaccccccgctggtcgatggcccctccatcgctag

SEQ ID NO: 5961 - DNA, 144 bp, synthetic construct
  misc_feature 1..144: note = source = /note="Description of Artificial Sequence: Synthetic coding sequence"
  source 1..144: mol_type = other DNA
atgaaactgtgtgtaactgtgttatctctcctggttctcgtggccgcattttgttcactagcattgagtgctcccaaagcatccaagtctgccctcacacccgttagccccggctcaaggtcgacatgtatgacttggaactag

SEQ ID NO: 5962 - DNA, 861 bp, synthetic construct
  misc_feature 1..861: note = source = /note="Description of Artificial Sequence: Synthetic coding sequence"
  source 1..861: mol_type = other DNA
atggaagtgtatattcggcatttggagaaggtacttaggagatatgtgcagagacttcagtggctccttagcggccctgttctgtgctcgagaacttggtaccgacagagtatggataggggtgtgatgatgacagccgcatccggcagcaggcggctctttggcaccgtgcttgaaagtaaggtatgcattctcctcgacacctccggttcaatgggaccctaccttcagcaggtcaagaccgaactggtcttattgatttgggaacagctccgcaaatgctgtgatagcttcaacctcttatcatttgctgaatcatttcaaagctggcaggacacacttgtggagactactgacgcagcctgtcacgaagctatgcaatgggtcacccacctgcaggcccaaggtagtacatctatcctccaggccctactaaaggccttttctttccacgacctggaagggctttatcttctgaccgatggcaaacctgacacaagttgttcattagtcctcaatgaggtgcaaaagttgcgtgaaaagcgcgacgtcaaagtacacacaatcagcctcaactgtagtgacagagccgcagtggaatttctgcgcaagctggcaagtttcaccgggggacggtaccactgcccagtgggagaggacaccctgtccaaaatccactcgctcctgaccaagggattcataaacgaaaaggatcccacgctcccacccttcgagggagacgatctgcgcatcctcgcgcaggaaatcacaaaagcccgatcctttctgtggcaggcacagtctttccggtctcagttgcagaagaaaaatgacgccgagcctaaggtgacgctgtcctag

SEQ ID NO: 5963 - DNA, 3555 bp, synthetic construct
  misc_feature 1..3555: note = source = /note="Description of Artificial Sequence: Synthetic coding sequence"
  source 1..3555: mol_type = other DNA
atgaaaaagtatagaaaaatttctatcgggtgctttgcaatggccactcagaccagccacgtatttcacggccaggaaaatatgttcctcgaaaaccactgtatccgcaggaacaccggtagagattctaagaaacctttgaagcaaaagaacatgaacggcctcggccaaaactctgataacggactgcttgtgactcacgtgaatcagacgcaggacttactgaggctccaaggctctgaaacccaaagttctgattgggaagactctgaagattggttgagcgcgcactcattaaagtgccagaagctcaccctcgccgacctcatttcccaaggtactgaagttcttgaagaggggaccaatgtggtccagaagatctgtttcagcacccagatcatcaggcatttcgaatccaagttgtctgatactatcgaggtctatcaggagcgtatccagtggctgacagagaatagcaaaaaggcctttggattaattaagggagccagagtgtcaattctcatcgacgttagcgctatttcaagtgggccacagaaggaggaattccagaaggatctgatgtcgcttatcgacgagcagctgtcccacaaggagaaactcttcgttctctccttcggaacaaatgcaggatctctctggcctgatcctatggaggtgtctgcaagtactctgcaagagctcaaactgtgggtcaaaaccttgcagcctgatggagggagtaaccttttgcaagcattgaaaaagatttttacactgaaagggttggacagtcttgtggccatcatgagaagttgccctgatcagccatctgagatcctctctgactacatccagcagtccaccatgggtagagatttaattatccacttcattacatatcggtgtgacgatcagatgccacctgcggtgctgaaaaatctcgccgaggctgtcagagggtattatcactgctactcccccaaaatggagcattatactagtcgagatatggacgagcttctcgcagaaatacagaaggcacaaagtctgctgtcgcatgtgcaggccttacagcattcctccccatgtgaagccctgacgtgtaccatggaggaaatcagcacggagattacaaatggacctctcattagcttgttaccgaagccgccaaagcacgatgcacctctgaccatcgagttccccaacctggacaaaaccagcgcggagtggttaaaagtaaacgggctgaaggctaagaagctttcgctctatcaggtgctcgctcctaatgctttctctcctgtcgaagagttcgtgccaattctccagaagactgtgtcaagcactatccatgaaaaagcgatgatccaattcgagtggcacgacgggacggtgaagaatattcacgttgaccccccatttctatataagtatcagcagcagctgtcccgtgcaatgaggatgtatgagcgtcgcatcgaatggctgagtctcgccagtagaagaatttgggggaccgtgtgcgagaaacgcgtggtcgtgctgctcgacatcagcgctaccaactccatgtacatcattcacatccaacatagcttgcggctcctgctggaggaacagttgtcaaataaagactgctttaatctgattgctttcggctccaccattgaaagttggcggccagagatggtccccgtgtcccacaataacctccagtccgcatggcgatgggctctaaacctgaggtgccgtggctctcggaacgttttgtctgctttacgaaaggccgtggaggtggacttcaaggataaggataaacaccagtcccaagggatttatctttttacaggaggcataccggatcaggatatgccgacgctcagtgcctacatggctgaagcatgcggcgggtgcgacttgcagctaaacgtttgtctgttttacgttggcgaacccaaaatggacactacccctccagcccgatacgctagccacacagacacagctgctgcctacaaagaagtgacgagggcagccggaggtcgatttcattggttcggcgatacaggcatctatgaaagcgatgatatcaattcaataatgtcggagatggaaaaagctctgaactactcgcagaagtgtgcattcctcatggcctccctcaagaatcattccgggaaggtactcggaagttctgctctccctaaagaaaagccaaagactctccagttgcgaagtcagcccaaaaaattgtgtcctcccaggccaaccgtcccacttggcgcacgaatgtcaatcaaagacgatcctgaccgcgaaaaaagtccgcccttaaagagcctgaagtggcgccctctgagttctagagtgggaatcagccccgccgcagcccagccgactaaggaggggatgatggaactacgtcgcaagaccaaaagccgcgaggcagagacaagtctactgttgttctataccgaaaagggtaacgacgtggggagcgtctacaaaaagtaccctcagggtcgcggtctcagacgtacctccagtagcatcgacctgccaagaaaagatacagtgtgtagctcacaggagtgggtggcgaagtatggcttgaaaaagcttaaactggagatctccagatgtatgggcccaaactgcacccatcagaagtccggccaacggtccgccagcgctaaacattgttccatcttcccctccgtagaaattcacggtgtagtgagacatatacaatggacccctcgcgagatggaagtgtatatacgccatctcgaaaaggtcctgcgacgctatgttcagcggctgcaatggctattgagcgggagcaggcggctatttggcaccgttttggagtctaaggtgtgtattctgttggacacctctggcagtatggggccttatctccagcaggtaaaaactgagctcgtcctgctgatctgggagcagctccgcaaatgctgtgactcattcaacctgttatcctttgctgaatcgttccaaagctggcaggacactcttgttgagaccaccgacgcagcctgccatgaggctatgcaatgggtgacccaccttcaggcacaagggagcacgtcgattctgcaggcattactgaaagctttctcttttcacgatctcgaaggtctatacttactgacggacggcaaacccgataccagctgcagcctggttcttaacgaagtgcagaagttacgcgagaaacgcgatgtgaaggtgcataccatatcactaaattgcagcgaccgcgctgctgtggagtttcttcgcaagctggccagcttcaccggaggaagataccactgtcccgtgggcgaggacaccctctccaagatccactccctcctgacaaagggattcattaatgaaaaggatcccacactacctccttttgaaggagatgacctcaggatactcgctcaggaaatcaccaaggctaggtcatttctttggcaggcacaaagtttcagatcacagttacagaaaaaaaacgacgctgaacctaaagtaacgttgtcttag

SEQ ID NO: 5964 - DNA, 906 bp, synthetic construct
  misc_feature 1..906: note = source = /note="Description of Artificial Sequence: Synthetic coding sequence"
  source 1..906: mol_type = other DNA
atgcttcccttaacaatgactgtcctgattctgttacttttgcctacaggccaggccgcgcctaaagatggggtgactcggccggacagcgaagtgcagcatcagctgctccccaaccccttccaacccgggcaagaacagttgggattgttgcagagttacctgaaaggtctgggcaggacggaggtgcaactagaacacctctcgcgggagcaggtgctgttgtacttatttgcactccatgactatgaccagtcggggcagctggacggccttgaactgctgtccatgctcacagctgctctcgctcccggagccgccaatagcccgactacaaatcccgtgattcttattgtggacaaggtgcttgaaacccaggacctgaacggtgacgggctgatgactcctgctgaattgatcaacttccctggagtggcgttaaggcatgtggaacctggcgaacccctcgcgccctcacctcaggagccccaggccgtgggtcggcaatcgcttcttgccaagtcccccttgcggcaagaaacccaggaagcccccgggcccagagaagaggcaaaaggccaagttgaagctcgccgagagtcactggaccctgtacaggagcctggcggccaggccgaagcagatggagacgtccccggcccccgaggagaggctgagggccaggccgaggctaaaggagatgctccagggcctagaggcgaagctgggggacaggctgaggccgaaggcgatgcacctggccccagaggcgaagctggaggacaggcagaagctagggaaaacggcgaggaagcgaaggaactgccaggggaaacacttgagtcgaaaaacacccagaacgatttcgaggtgcatatagttcaggtggagaacgatgaaatctag

SEQ ID NO: 5965 - DNA, 4722 bp, synthetic construct
  misc_feature 1..4722: note = source = /note="Description of Artificial Sequence: Synthetic coding sequence"
  source 1..4722: mol_type = other DNA
atgagagtactggcctgcttactggccgcactcgttggtatacaggcagtggagcgcctgagattggccgacggcccccacgggtgtgccggacggctcgaggtgtggcatggtggtcgctggggaacggtgtgtgatgatggttgggacctcagagatgctgcagtggcctgccgacaattgggatgtggaggcgccttggctgcccccggcggcgcattctttggtgaaggagctggccctgtatggctttcagagctcgcgtgtcgcggtaatgaaggccagttgggtctttgccaccaccgtgggtggaaggcacacatctgctcgcacgaggaggacgccggagtggtatgtgcgggccagcgcgtcgccaactcgcgtgacgattctacatcccctctggacggcgcgccctggccgggactgctgctcgagctgtcaccctccaccgaagaacccctggtaacacacgcaccacggcctgcaggaaatccacagaacgcatcccggaaaaagagccccagacccaaacaggccaaaagtaccagggcgcccttgctgaccaccggtgctccaagacaggaaaggctgcgactggtgagtggaccccatcggtgcgcgggacggctggaagtctggcacggggggaggtggggcacagtgtgcgacgatggctgggacctccgcgatgccgccgtcgcatgcagggagctcggctgtggaggcgccctggcagcccccggcggcgcacgcttcggaccgggggctggaccagtgtggatggacgatgtggggtgtggaggcggtgagcaggccctcagggactgtccacgcagcccttggggacggagtaactgtgaccacagcgaagatgccgggctggtatgtacaggccccgcccccagacttcgcctggccgacggacctcatggatgtgctggcaggctggaggtgtggcacggagggagatggggctcagtgtgtgatgatgcctgggacctgagagatgcagcagtggcgtgtcgcgagctcgggtgtggcggcgcactagccgcccctggtggggccttcttcggcgagggaagcggtcctatcatactggacgaccttcgatgtcggggcaacgagacagcgttacgcttttgtcccgcgcgcccctggggccagcacgactgccaccatcgggaagatgctggggctgtgtgtgacggtatgccgcttggatacgtgcctccaaccgcacctaccgattctaacaactccactccacgagaggcggcatctagacccccgagtaccatgaccagtcaggccccagggacagctggtgtgagtcctccgccagccagccctacagtcctgtgggagccaggacctgaagcaggctcccctcagctacgcctggtggctggaccttccaagtgctccggacggctggaggtgtggcatgatcagcgctggggtactgtctgtgatgacagttgggatatgagagacagcgcggtcgtttgtcgggaactcggctgcgggggtccccagcagccagaccctgccgcggggcggttcggctggggagccggacctatctggctggatgatgtcggatgtgtgggcacagaggcaagcttaagcgattgcccagcagcaccatgggggaaacataactgcgcccacaatgaagatgtgggagtcacgtgtacagggccaccagggctggactcaatttcggaccctttttcatggagctggatcccaggactcggaagggaccgggacgcttggttaccgggtgagcttgctacaaagcccagtgcctccgtgacagcttcagtgttggagaagactacaacaaaggctcccggaaaaatgcccaagagtaccaaaaagtgggtgaccaaaaatgcaaaacggcccacaacccagcccccggtgatgcctaccaccaagcactctcgcgcccaaagcccccctgacttaacctctcagaccacagcagccctgaccacagaggcctccaggcgacctacaagcgaattcactcgacgaccaactacagaggctcctcagcgctggacaagtcatacaactgccacccttacgccccaggcccctagagagaggactaccaagaccatggccatgctcacaacccaaggtcctcaggaaatgacatcggaatctactataaaatccatccctcaagctagcctggagccatccgcggagatccccgagggctcaccagagtcccccaaagaccctgccccttcgccttcggttagtacaactggggagtccgggcttttccgggtgaggttggccgatggccctaaccggtgcgctggccgtctggaggtctggcacgcggggcggtggggtaccgtctgtgatgataactgggatcttagagatgcaacagtggcctgctgggaactagggtgcggcaaggtaaggcccagagtgggcaagactcactatggcccaggaacgggcccgatttggctcgacgacatgggctgcaagggaagtgaggcatctcttagtgattgccccagcggcgcatggggaaagcacaactgtgatcatgaggaagatgtcgggctgacctgcaccgggtacacagactatgacgattaccccccatggacatgggaccctacctcaagggaggacctcgctaagggaaccacaactgcgggggtgcccggacataccttgccatggcgtacgactagacgaccagggtcctcttctccggctattagacgcctgcccgacactgggagtaaggacggttataaacttccatggacttgggataccccatcaggacgcggcctggccgaaggaacacccaccgcagggaagcttggacctaccttgggcgccgggactactcgcagccccggcagtcctcctacgctgcgcgtccacggagatacaggctccccaagaaaaccttggcctgaaaggagacctcccagaccagcagccaccagaaccgctcctcctacccccagcccaggcccaagtgcttcccccggcccaccgggaccagccctcacatccgacagcagccgggaacttaccccccactcagccctgacctcagaggccacctccgacgctcctgacactagcccacctactccggatcctgcatctcgcaccaatcccgacttaatcctgacatccccggacttcgcgctgtccaccccggactccagtgtggtccccgcactgactcccgagccatcaccaacccctcttcccactctgccgaaagaactaacctcagacccatccaccccctccgaagtgacaagtctgtcccctacaagcgaacaggtcccagagtctgacactactccagacctggacacgaccccgtactcttccactgtgtcagagtatagcagatccccagaccccagccccagtcctcatccaaccaccactcctgaccctacgatggctccagatccaatcaccaccctgaaccctaccgtgactccacattttcccacaacaccccatcccacaacaacgcctcatcccactacaattacccactccactatgatcccggaccccacgactacaccccagcccttcactactatcacacactcaacaatgattcctgaccctaccactactcctcagccatttacaaccatgcaacctaccacaacccctcattcaactacccctcaccctactactactccccaccccaccacaataacccatagcacaatgattccggatcccaccacgacgcctcagccctttaccacgatgcagcctaccacaatgccacaccccacaacaacaccccatcctacaacgaccccccaccccaccactaccccccaccccacgaccactccgcacccaacaatgacaccggatcctacaacaaccccctatcccacgacaacacctgatccaacaacgacacctcaccctacgactcctgatccttcgagcactccagtgatcactacggtgtcattgcccacttctttgggcaccgaactcagttcgccaactctggcacccactgtgaaaccgtctttacaccctcagctgacatttaccgctccggcgccacacacttctacgtcccagatccctacactggaaccttccccggccctggagagtagtccatcacggagttcgacagctaccagcatggacccgctgtccacagaagatttcaagccaccacggtcccagagcccgaacttaacgccccccccaacccatactccacattctgccagcgacctgacagtttcccccgatcccctcctcagccccaccgcccatcctctggatcatccaccactagatcctctcacccttggacctactcccgggcaatccccaggaccacacgggccttgtgtggcacccacaccccctgtaagggtgatggcatgcgagcctcccgccctcgtggagttagttgccgccgtgcgggatgtgggcggccagttacagcggctcacccaggtggtcgaacaggaaaggcaggagcggcaggcactgctgctgggactcacccaactcgtagaggcagcccgcgggctgggtcagctgggcgaggccgttaagcgccttgccgagatggcatggacaacaagcatgcccgcccccaccaccacaaccccagaagaagaggagagaccactgcgcggggacgtctag

SEQ ID NO: 5966 - DNA, 1911 bp, synthetic construct
  misc_feature 1..1911: note = source = /note="Description of Artificial Sequence: Synthetic coding sequence"
  source 1..1911: mol_type = other DNA
atgacgacatggagcctcaggcgtcgccctgcacggactcttgggctgctgctgctggtggttcttggtttccttgtactgcgacgtctggactggtccacgttggtaccgctccgactgcggcacaggcaactgggactgcaggcgaagggatggaattttatgcttgaggatagtaccttctggattttcggaggtagtatccactatttccgcgtaccacgtgaatattggagagaccggctgttaaagatgaaagcctgcggcctgaacaccctgaccacgtacgttccatggaatctgcacgaacccgaacggggcaaattcgactttagcggcaacctagatctggaagcattcgttctgatggccgctgaaatagggctttgggtcattctccgcccaggaccctatatttgcagcgaaatggacttgggcggactcccctcgtggctcctgcaggatccaggtatgcgtcttcggacaacctacaaaggcttcaccgaagcggttgatctgtattttgaccacctcatgagcagggttgtgcctttacaatataagagaggagggcctataatcgccgtgcaggtagagaacgagtacggctcctacaacaaagacccggcatatatgccatatgtcaagaaggcactcgaagacagaggcatcgtagagctcctgctgacttccgataacaaggacggcctgtcgaaggggattgttcagggcgtgctagctacaatcaacctgcagtccacccacgagctgcagcttctgacaacgtttctgttcaacgtgcaggggacacagccaaaaatggtgatggaatactggacaggctggttcgatagctggggcggcccacacaatatcctggattcttctgaggtcctcaaaaccgtgtccgcaatagtcgacgccggatcaagcataaacctgtacatgtttcatggtggaactaacttcgggtttatgaacggcgccatgcactttcacgactataagagcgatgttacaagctatgactatgacgccgtcctcactgaagccggagattatacagccaagtatatgaagctgagggatttttttggatccatctcaggtattcctctcccaccaccgcctgacctcctacctaagatgccttatgagcccctgacccctgtcctgtatttgtccctgtgggatgccctgaaatacctcggcgagccgatcaagagcgaaaaacccattaacatggagaacttgcctgtgaacggggggaatgggcaaagttttgggtatattctgtacgagacctccatcacatcgagtgggattctctccggacacgttcatgacagagggcaggtgtttgttaacaccgtctcgataggcttcctggattataaaactactaaaatcgcagtacccttgattcaaggctatactgtactccggattttggtggagaatcgaggtagagtaaattacggggaaaatatcgacgatcagaggaaaggccttatcggtaacttatatttgaatgacagcccactgaagaacttccgcatttattccttggatatgaaaaaatccttttttcagaggttcggccttgataaatggtcgtcgctgcctgaaactcccaccctccctgcatttttcctgggatctctgagcatatcttccaccccttgtgatacgttcctgaagctggaaggctgggaaaaaggagttgtattcatcaacgggcagaacctgggccgttattggaatattggtcctcaaaagaccctctatctccccggaccatggttatcctcaggtatcaaccaggtcatagtcttcgaagaaacaatggctggccctgcattgcagtttaccgagactccccatctgggcaggaaccagtacattaagtag

SEQ ID NO: 5967 - DNA, 2037 bp, synthetic construct
  misc_feature 1..2037: note = source = /note="Description of Artificial Sequence: Synthetic coding sequence"
  source 1..2037: mol_type = other DNA
atgcgtacagtggtcctaacaatgaaagctagtgtgatcgagatgttcctggtgctgctcgtgaccggggtccactctaataaggaaaccgctaaaaaaattaaacgccccaaattcactgtgccacagataaattgtgatgtaaaagcgggtaagataatcgatcccgaatttatcgtcaagtgtcccgcagggtgtcaggacccgaagtatcatgtttacggcaccgacgtgtacgccagctactctagcgtatgtggtgccgccgtgcacagcggggtcctcgacaacagcggtgggaagatccttgtcaggaaagtggctgggcagtccggatacaaaggctcttactctaatggtgtccagtccttatccttacctaggtggagggagtcatttattgtgttagagagcaagccgaagaagggcgtgacttatccatccgcactgacctattccagcagcaaaagccccgcagcccaggccggggaaacaacaaaggcctaccagagaccacctatacccgggacaacggctcagcccgtcacactgatgcagctgcttgcagttacggtggccgttgcaactcctaccacgctaccacgccccagcccgtcggcagcctcaaccacctctattccgcgtccccagtcagtgggacaccgatcccaggaaatggatttgtggagcaccgcaacctatacgtcatcccaaaaccgccccagggccgaccccggaattcagagacaggacccatccggagccgcctttcagaagccggtgggagccgacgtttcccttggactggtccccaaagaggagctgtccacccagtcattggaacctgtgagtttgggggatccgaactgtaagattgacctgtcgttcttaatcgatggttccacctcgattggaaaaagaaggttccgaattcagaaacaactgctggctgacgtggcccaggccttggacattggcccagccggacccctgatgggtgtcgtgcagtatggggacaatcccgcaactcacttcaatctaaagacccacactaactccagagacctgaagaccgcaatcgagaagattacccaacgtggcgggctgtcaaacgtcggacgggccattagcttcgtcacaaaaaactttttcagtaaggcgaacggaaatagatccggtgcccctaacgtggtagtcgtgatggtagatgggtggccaacagacaaggtcgaggaggcgagtagattggcacgcgagagtggcattaatatcttttttattacgatcgagggggctgcggaaaacgaaaaacaatacgtcgtggagcctaacttcgccaataaagccgtgtgtaggacaaacggattctactccctgcacgtgcaatcctggtttgggctgcacaagacccttcagccactcgtgaagagagtctgcgacaccgatagactcgcttgcagtaagacttgcctcaattctgccgatatcgggtttgttatcgatggaagctcttcagtagggacgggtaactttaggacagtgctgcagttcgtgaccaacctgacgaaagagtttgaaatcagcgatactgacaccaggatcggagctgttcagtatacgtatgagcaacggctagagttcggcttcgacaagtactccagtaagcctgatatcctaaatgcgattaagagagtgggctactggtcaggaggcacgtccaccggggcagccataaatttcgcactggaacagctctttaaaaaatctaaaccaaataagaggaagttgatgattctgatcactgatgggcgctcatacgatgacgtcagaatcccggccatggctgcccacctgaagggggtaataacctacgcaatcggggtggcctgggccgcccaggaggaattagaagtgatcgccacccacccagcccgagaccatagttttttcgtggacgagtttgacaatctacaccagtacgtgcctagaataatacaaaatatctgcaccgaatttaatagccagccacggaattag

SEQ ID NO: 5968 - DNA, 324 bp, synthetic construct
  misc_feature 1..324: note = source = /note="Description of Artificial Sequence: Synthetic coding sequence"
  source 1..324: mol_type = other DNA
taaactgtagctgctccttcagtctttatattcccaccttctgatgagcagctcaagtccgggacggctagtgtggtgtgccttttgaacaatttctacccccgtgaggctaaggtgcagtggaaagtcgataatgcccttcagtcaggcaacagccaagagtctgtcactgaacaagattctaaagacagtacctacagcctgtccagcacactcaccctcagtaaggcggactacgaaaaacacaaagtctatgcttgcgaagtaacgcaccagggcctgtcttctcctgtgaccaagtcatttaaccggggagagtgttag

SEQ ID NO: 5969 - DNA, 366 bp, synthetic construct
  misc_feature 1..366: note = source = /note="Description of Artificial Sequence: Synthetic coding sequence"
  source 1..366: mol_type = other DNA
atggtgctccagacccaggtgttcatttcattgcttctttggatatcaggagcctatggcgacattgtcatgactcagtcccccgatagcctagccgttagcctgggtgaacgtgctaccatcaactgtaaaagtagccaaagcgtcctgtattcttctaacaacaaaaattacttggcttggtaccagcagaagcctggccagccgcccaaactactgatctattgggcatctactagagagtcgggggtacccgatcgattcagcgggagtggctccggcaccgatttcactctcacaatctccagcctacaggccgaggatgtggcggtctattattgccagcaatactatagtaccccctag

SEQ ID NO: 5970 - DNA, 984 bp, synthetic construct
  misc_feature 1..984: note = source = /note="Description of Artificial Sequence: Synthetic coding sequence"
  source 1..984: mol_type = other DNA
gctagcactaaggggcctagcgtctttccgcttgctccctgttcccggtccacttcagagagtaccgccgctctgggctgtcttgtgaaggattactttccggagcccgtcacagtatcttggaattcaggtgcgctcacatctggagtccacactttccctgccgtgctccagtcctcaggactgtattccctctcctctgtggtgaccgtcccgtctagcagcttgggaaccaagacgtacacatgcaatgtggaccataaacctagcaatactaaagtggataaacgtgtggaatctaagtacggcccgccatgtccttcatgtcccgccccagagtttctcggcggcccatctgtgttccttttcccaccaaaaccaaaagatactctaatgatctcacggacccctgaggtgacttgtgtggtagtggatgtgtcacaggaagacccggaagttcagtttaactggtacgtggacggggtggaggtgcacaacgctaaaaccaaacctagggaggagcagtttaattctacatatagggtagtaagcgtgctcacagtgttgcaccaagactggctgaatggaaaggaatataaatgcaaagtgagcaataagggcctgccatcttctatcgagaaaaccatctcgaaagccaaaggacaaccacgcgagccccaggtgtacaccttacctccgtcacaggaagagatgacaaaaaaccaggtcagcctgacctgtcttgtgaagggtttctatccctccgacatcgcagttgaatgggagtctaatgggcagccagagaataattacaagaccacccccccggtactggactcagacggctctttcttcctttattcacggttgaccgtggataaaagtagatggcaggaaggcaatgtgttcagctgctctgtgatgcacgaagcattacacaaccactacacgcagaagagccttagcctcagcctcgggaagtag

SEQ ID NO: 5971 - DNA, 981 bp, synthetic construct
  misc_feature 1..981: note = source = /note="Description of Artificial Sequence: Synthetic coding sequence"
  source 1..981: mol_type = other DNA
gcctcaactaagggcccaagtgtcttccctctggcgccttgctcaaggtctaccagcgaatccactgcggctctgggctgtctggtgaaagattattttcccgaaccagtaacggtgtcttggaacagcggggccctgaccagcggggtgcacacttttcccgctgtgctgcaatcttctggcctctactcgctgagttccgttgtgacagtgccgagttccaacttcggaacacagacctatacatgcaatgtagaccacaaaccgtctaataccaaagtggataagactgttgagagaaagtgctgcgtcgagtgccccccatgccccgctccccccgtagccggcccttccgtgtttctgttcccccctaaaccaaaagacaccctgatgatttcaagaacacccgaggtcacctgtgtcgtggtggatgtctctcatgaggaccctgaggtgcagttcaattggtatgtggatggcgtagaagttcataacgcaaagaccaaaccgagagaagaacaatttaattccacctttagggtggtcagtgtactgaccgttgtacaccaggactggctgaatggtaaggagtacaagtgtaaggtttcaaataaaggccttcccgctcccatcgaaaagacaatctcgaaaacgaagggacagcccagggagccccaggtctacactcttccgccgtctagagaggaaatgacaaagaaccaggttagccttacctgtctggttaagggcttttatccctctgacatctctgttgagtgggagtcgaacggccagcctgaaaacaattacaaaactactcccccaatgctggacagtgacggcagtttcttcctctactccaaactgaccgtggacaaaagccgttggcaacaggggaacgtatttagttgctccgtgatgcatgaagccctccacaaccactatacacaaaaatcactctcactgtccccaggcaagtag

SEQ ID NO: 5972 - DNA, 993 bp, synthetic construct
  misc_feature 1..993: note = source = /note="Description of Artificial Sequence: Synthetic coding sequence"
  source 1..993: mol_type = other DNA
gcatcaaccaaaggcccttctgtctttccactcgctccctcgtcaaagtcgacaagcggcggcaccgctgccctcggttgtctggttaaagactatttcccagagccggtgaccgtttcttggaactcaggcgctcttacctccggtgtccacaccttcccagccgttcttcagtcttccggtctgtacagcttgagtagcgtggtgactgtgccttctagcagcctcggtacgcaaacgtacatctgcaatgttaaccataaaccttcaaatacaaaagtggataagaaggtagagcccaaatcatgcgataagacacacacttgccccccttgtcctgccccagaactactcggtggcccatcggttttcttattccctcctaagcccaaagacacactcatgattagccgaacacccgaggtgacatgcgtggtggtggacgtgtcccacgaggatccagaagtaaagttcaactggtacgtggacggggttgaagtccacaatgccaagactaaacctagggaagagcagtacaatagcacctatagggtggtctccgtgctgactgttcttcatcaggactggctgaatggcaaggaatataagtgtaaggtcagtaacaaagcgcttcccgcccctatagagaaaactatatctaaagccaaaggccagcctagggaaccccaggtctacactctccccccaagcagggacgagctaacaaagaatcaggtgtccctgacctgcttggtgaaaggattctacccttccgacattgctgtggaatgggaaagcaacggccagcctgagaacaactataagacgaccccgcctgtgttagatagcgatgggtctttttttctttactccaagctgacggtggataagagtcggtggcagcaaggcaacgtcttttcctgctccgtgatgcacgaagcacttcacaatcactatacacagaagtcactatccctatctcccggaaagtag

SEQ ID NO: 5973 - DNA, 651 bp, synthetic construct
  misc_feature 1..651: note = source = /note="Description of Artificial Sequence: Synthetic coding sequence"
  source 1..651: mol_type = other DNA
atgggtgctgtgatggggacctttagttcattgcaaaccaaacagagacgcccatccaaggacaagatagaagatgaacttgagatgacaatggtgtgccatcgccctgaggggcttgagcagctggaagctcaaacgaatttcacaaaacgtgagttacaggtgttgtacagaggttttaagaacgagtgtcctagtggcgttgtaaatgaggatacgttcaaacagatctatgcacaattttttccacacggggacgcaagtacctacgcccactatctgtttaatgcttttgatacgacacagactggatctgtcaagtttgaggatttcgtgacagccttaagcatcctgctgaggggaacagtgcacgagaagttgcgctggacttttaacttatacgatattaacaaagacggttacatcaataaggaagagatgatggatattgtcaaagccatctacgatatgatgggaaagtacacatacccagttctgaaggaggatacccctcgtcagcacgtcgacgttttcttccagaagatggacaaaaataaggacggaatagtgactctcgacgagttcctggaatcttgtcaggaggacgacaatataatgcggagcctgcaactcttccaaaatgtcatgtag

SEQ ID NO: 5974 - DNA, 762 bp, synthetic construct
  misc_feature 1..762: note = source = /note="Description of Artificial Sequence: Synthetic coding sequence"
  source 1..762: mol_type = other DNA
atggcccgcagccttctactacccttgcagatccttctactatcactggccttagagacagctggggaggaagcgcagggtgacaaaattattgacggggccccctgtgcgaggggaagtcacccatggcaggtggcccttctgagcggcaatcagctgcattgcggcggggtgctggtaaatgaacggtgggtgctgacagctgctcattgcaaaatgaatgaatatacggtgcacctgggttcagacacccttggcgaccgccgagcccagagaatcaaggcttccaaatctttcagacatcccggctatagcacacagactcatgtcaatgatctcatgttggtgaaactcaattctcaggcgcgcttgtctagcatggtgaaaaaagttcgcctgccctctaggtgcgaaccgcccggaacaacgtgcaccgtctctggatggggaaccactacgagcccagacgttaccttcccatcagacctgatgtgtgtggacgtcaaattaatcagcccccaggattgcacaaaggtctacaaggatctcctggagaacagcatgctttgcgccggcattcccgatagcaagaagaatgcgtgcaacggcgactcaggagggccccttgtatgtagggggacattgcagggtttagttagttggggtactttcccctgtggtcagccaaacgacccaggggtgtatacccaagtctgtaaatttactaagtggattaatgacacgatgaagaaacataggtag

SEQ ID NO: 5975 - DNA, 468 bp, synthetic construct
  misc_feature 1..468: note = source = /note="Description of Artificial Sequence: Synthetic coding sequence"
  source 1..468: mol_type = other DNA
atgtttcagcgcctcctgctgctgctgttgctatccatggggggcacttgggcctcgaaagagcctcttagaccaaggtgtcggcctatcaacgccaccttggctgtggagaaagagggctgcccagtctgtataaccgtgaatactaccatctgtgcgggctattgccctactatgacacgtgtattgcagggtgttttgcctgcacttccccaggtagtgtgtaattacagggatgtaagattcgagtctataagactgccaggatgcccaagaggcgtcaaccccgtggtgagttacgcagtagccctaagctgccaatgtgcgctgtgccgaagaagcacaactgactgcggcgggccaaaggaccatcccctgacttgcgatgatcctcgcttccaggacagcagcagcagtaaggccccgcccccttctctgccatctccgtcacgactccccggaccttag

SEQ ID NO: 5976 - DNA, 1554 bp, synthetic construct
  misc_feature 1..1554: note = source = /note="Description of Artificial Sequence: Synthetic coding sequence"
  source 1..1554: mol_type = other DNA
atggccgtttctagaaaggattggtcagctctgagctcacttgctcgtcagcggacactggaagatgaagaagaacaggagcgagagagaaggcgaagacatcgcaacctatcctcgacaacagatgacgaggccccgaggctctcccagaacggggaccggcaggcaagcgcttcagaaaggctgccatccgtcgaggaggccgaggtgcctaagccgctgcctcccgcctcaaaggacgaggatgaagatattcagtccatcctgagaacaagacaagaaagacgccagaggcgacaggtggtggaggcagcccaagcacccatccaggagaggcttgaggctgaggaagggcggaacagtctgagtccagtgcaggcaactcagaaaccgctggtgagcaagaaggagctggagattcctcctcgtcgcaggctgtctcgcgagcagagagggccttgggctctggaagaagaaagcctggtgggcagagaacccgaggaacggaagaagggcgtcccggagaagtcccccgttctggagaagtccagtatgccaaagaagacagctcctgagaagtctctcgtgtctgacaaaacttcaatctcagagaaagtactggcctccgaaaagacctctctatccgagaaaatcgcagtcagcgagaagagaaactctagtgagaaaaagagtgtactagaaaaaacctcagtgtccgagaagtctctggcgccagggatggccctcgggagcggcaggcggctcgttagcgagaaagctagcatcttcgagaaagcattagcctcagagaaatcccctaccgcggacgcgaaacctgcgcctaagcgtgccaccgcatccgagcagccactcgcccaggaacctccagcatctggaggctccccggccacaactaaagagcaacgtgggagggcactccctggcaaaaatttgccaagcctcgcaaaacagggcgccagtgacccacccaccgtggcctctcgactgccacctgttacactacaggtgaagatcccaagcaaagaggaggaagcagatatgagctcccccactcaacgcacatactcttccagcctgaagagaagctccccaagaacaataagtttccgaatgaaaccgaagaaagagaacagcgagaccactcttactcgcagcgcctccatgaaactgcccgacaacaccgtgaagttaggggagaagctggaacggtaccacaccgctattaggagaagtgagtcggtcaagagtcggggactgccttgcacagagctgtttgtggcacccgttggcgtagcctcgaagcgccatctttttgaaaaagagttggcagggcagagccgggctgaacctgcaagctcacgcaaggagaacctcagactgtctggggtcgttacttcacgcctgaacctgtggatctctcgaacccaggaatccggagatcaggaccctcaagaagcccagaaggcctcctcagcaactgaaaggacacagtggggacagaagtcagatagtagcctcgatgcagaagtgtag

SEQ ID NO: 5977 - DNA, 270 bp, synthetic construct
  misc_feature 1..270: note = source = /note="Description of Artificial Sequence: Synthetic coding sequence"
  source 1..270: mol_type = other DNA
atgcaggcgtgcatggtgcccggcctggccctgtgtctcctgctgggccccctcgcgggagcaaagcctgtacaggaagaaggcgacccttacgcagagctcccggcaatgccctattggcccttctccactagcgatttctggaactatgtgcaacatttccaggcactgggcgcctacccgcaaatcgaggacatggctcgcaccttttttgcccattttccattgggatcaaccctcgggttccatgtcccttaccaggaagattag

SEQ ID NO: 5978 - DNA, 1302 bp, synthetic construct
  misc_feature 1..1302: note = source = /note="Description of Artificial Sequence: Synthetic coding sequence"
  source 1..1302: mol_type = other DNA
atgggaaatgcttgttgggagctgtactgcttggaacacggcattcagccagacggtcagatgccaagtgacaagaccattggggggggggatgattctttcaccacatttttctgtgagaccggcgcaggcaagcacgtgcctcgggctgtgtttgttgatctcgagcctacagtgatcgatgagatccggaacggcccctatcgccagctgttccatcccgagcagctcataactggcaaagaggacgccgccaataactacgcaaggggtcactacaccattggtaaggagatcattgatccagtcctggacagaatccggaaattgtccgaccaatgtaccggactgcaaggctttctggtctttcatagctttggcggcgggacaggctcaggcttcacgtcgcttctgatggagaggctctctgtggactatgggaaaaagagtaaattggagttttctatttaccctgctccacaggtgagcaccgcagtcgtggagccctacaacagtatccttaccacccacactacactggaacattccgattgcgccttcatggtggacaatgaggccatttatgacatctgcaggcggaatctggacattgagcgccctacatacaccaacctgaaccggctcatttcccagatcgtgtcctccatcactgccagcctgcgcttcgatggcgccctgaacgttgacctcaccgagtttcagactaacctggtcccatacccgaggatccatttccctttggcgacctacgctcccgtaatttcagccgaaaaagcttatcacgagcagctctcggtggctgaaataacaaatgcctgcttcgaacccgctaatcagatggtgaagtgcgacccccggcacggaaaatacatggcatgctgcctgctttaccgtggggatgtagtcccaaaagacgtcaacgcagcgatagccgccataaagacaaaaaggagcatccagttcgtcgactggtgccccacagggttcaaggtggggatcaattatcagccaccaaccgtagtgcctgggggagatctcgctaaagtacagagggcggtttgcatgctgtcgaacacgactgcaatcgctgaagcgtgggcccgtctcgaccacaagttcgatctgatgtacgctaagcgagcttttgtgcactggtacgtgggggaagggatggaggaaggcgaattttcagaggcacgggaggacatggccgctcttgaaaaagactatgaggaggtagggatcgatagttatgaggacgaggatgaaggcgaagagtag

SEQ ID NO: 5979 - DNA, 1965 bp, synthetic construct
  misc_feature 1..1965: note = source = /note="Description of Artificial Sequence: Synthetic coding sequence"
  source 1..1965: mol_type = other DNA
atggcccccaagaaactcagctgtttgcgttccctgctcctgcccctcagcctgacactgttactgccacaagccgatactaggtccttcgtggttgaccgcggccacgaccgttttcttctggatggagctccattcaggtacgtttcaggctcgcttcactattttagggttccacgcgttctgtgggccgatagactgctgaagatgaggtggtcaggactgaatgcaatacagttctacgtcccatggaattaccatgaaccccagcctggggtctacaacttcaacggttcccgcgatctgatagcttttctcaacgaggccgctcttgcgaatttgctggtgatactcaggcctggtccttacatttgtgctgaatgggagatgggcggcctcccaagttggttgctacggaagcccgagatacatctccggacatccgaccctgactttcttgcagccgtcgatagctggttcaaggtgctacttccgaaaatatatccgtggctctaccataacggagggaatatcatatccatacaagtagagaacgagtacgggagctatagggcttgtgacttcagttacatgcgccacctcgccggactctttcgggcactcctaggagagaaaattttgctgtttacaactgacggtcccgagggtcttaaatgtggcagcttgcgtggactctacactacagtggacttcggtcccgccgacaacatgacaaaaatttttactctgctgagaaagtatgaaccgcatggaccactggtaaatagcgaatattatacgggttggctggattactggggtcaaaatcactcgacaagatccgtttccgccgttaccaaaggcctcgaaaacatgcttaagctgggtgctagcgtaaatatgtacatgtttcacggaggtaccaactttggatactggaatggagcggataagaaaggaagattcctgcccattaccaccagctatgactatgatgcaccaattagcgaggcgggcgatcccactccgaagctcttcgctttacgggacgtaatatctaaatttcaggaggtgccactcggcccgttgccaccaccttctcccaaaatgatgctcggacccgtgaccctccacctggtcggccatttgcttgcttttcttgatttactttgcccacgagggcccattcactctattttgcccatgacatttgaagcggtgaaacaagaccacgggttcatgctctatagaacttacatgactcacactatcttcgagccgaccccattttgggtgccaaacaatggagtccacgaccgcgcgtacgtaatggtagacggcgtttttcagggagtagtggagcgaaatatgagagataaactgtttctgactggtaagttaggctctaagctggacattctagtggagaacatggggcgtctctcctttggcagcaattcctcagacttcaaagggctcctcaagccgccaatccttggtcagacaattctgacacagtggatgatgtttcctctgaagattgataatctcgtgaagtggtggttccctctgcaattgcctaagtggccatatccccaggcacctagcggcccaacattttattctaaaacgttccctattctgggctctgtgggagatacttttctgtacctgccaggctggacaaaaggacaggtatggattaacgggttcaacttaggccggtattggacaaaacagggtccccagcagacgctctatgtgccccgattcctcctcttcccacgcggagccctcaataagatcacactgctggaacttgaggatgtgccactgcagcctcaggtccagtttttggacaaacccattctgaacagcacttcgaccttgcaccgaacacacattaatagcctttcggcagatacgctgtccgcttctgagccgatggagctgagcggacactag

SEQ ID NO: 5980 - DNA, 1173 bp, synthetic construct
  misc_feature 1..1173: note = source = /note="Description of Artificial Sequence: Synthetic coding sequence"
  source 1..1173: mol_type = other DNA
atgaaattccaggggccactggcatgcctgcttctggctctttgtcttgggtctggcgaagctggcccactccaaagcggggaggagtccaccggcaccaacatcggagaggcccttggtcacggcctgggtgatgcactgtcagagggcgtcggcaaggccatcggcaaggaagcaggcggagcagcgggaagtaaggtatccgaggccctgggccagggtacacgagaggccgtcggcaccggggtgcgtcaggttcccgggttcggcgtggccgacgcattgggcaaccgtgttggcgaggccgcccacgctctgggcaatactggccatgagatcggcaggcaggccgaagacgtgatccgccacggcgccgacgcagttcgcggcagctggcagggagttcctggacacaacggagcatgggaaacgagcggtgggcacggtatatttgggtcacagggcggacttggcggccagggacaaggcaatccagggggtctgggcactccttgggtgcatggctaccctggtaattctgcgggcagcttcggtatgaacccccaaggggccccgtggggacaaggggggaacggcggtcccccgaacttcggtacgaatactcagggcgccgttgcccaacccggctacggaagcgtgcgcgcctctaatcagaatgaaggttgtactaacccacccccctctggaagtggaggtggcagctctaactctggcggcggttcgggaagccaatctgggtcgagcggttcaggatctaacggagataataataacgggtcatcttccggggggtctagctccgggagcagttctggaggtagttccggaggttcttctggaggatcgtccggaaattcaggcggctcgcggggtgatagtggctcagagtcctcctggggctcctctacgggctcctcttcaggcaatcatggaggtagtgggggtggtaacggacacaagcctggctgcgagaaacctggcaatgaagccagggggtctggagagtctggaatccaaggattccgagggcagggcgtcagctctaatatgcgcaacagtgagacgtctccaggaatgtttaacttcgatactttctggaagaactttaagtcaaagctgggatttatcaactgggatgccatcaataaatag

SEQ ID NO: 5981 - DNA, 846 bp, synthetic construct
  misc_feature 1..846: note = source = /note="Description of Artificial Sequence: Synthetic coding sequence"
  source 1..846: mol_type = other DNA
atggggagccgggggcaggggctgctgcttgcttactgcctcctgttagccttcgcctccggacttgtgctctcacgcgtgcctcatgtccagggcgaacagcaggagtgggagggcactgaagaactgccatccccacccgatcacgctgaacgcgctgaagagcaacatgaaaaatatcgtcctagccaagaccaggggcttcccgctagcaggtgtctgcggtgttgcgatcccggtaccagtatgtatccagctacagccgtcccccagataaatattaccatattgaaaggggagaagggcgaccgtggggaccggggattgcagggaaaatacggcaagaccgggtccgccggggctagaggccacacgggaccaaagggtcagaaaggctctatgggggcccctggagagcgatgcaagagccactacgctgctttttcagtgggtcgaaagaagcctatgcattcaaatcactactatcagacggttatattcgacacagaatttgtaaacctgtatgatcactttaatatgtttacaggaaaattttactgttacgttccaggcctgtatttcttcagtctaaacgttcacacctggaatcaaaaagagacttatctacatattatgaagaacgaggaggaggtggtgatactatttgcccaggtgggagacaggagtatcatgcagagtcaatctttgatgctagaactgcgagagcaggatcaggtgtgggttcgactttacaagggcgagcgggaaaacgccatatttagcgaggaacttgacacatatatcactttttccgggtatctggtgaagcacgccacagagccatag

SEQ ID NO: 5982 - DNA, 876 bp, synthetic construct
  misc_feature 1..876: note = source = /note="Description of Artificial Sequence: Synthetic coding sequence"
  source 1..876: mol_type = other DNA
gtgttgtcggcttcaggcccggggagaaagatggggtcccggggtcagggcctgctgttggcctattgccttcttttagccttcgcatccggacttgtgttaagtagagtgccgcacgtacagggcgagcagcaggaatgggaggggacagaggagctaccgtccccccctgaccacgccgagcgggctgaagagcagcatgagaaataccgcccaagccaggatcagggattaccagcatcacggtgtctgagatgttgtgaccccggaacttcaatgtatccagccactgctgtgcctcagattaatatcacaatactgaaaggcgaaaaaggagacaggggggaccgtggtttgcagggaaagtatggaaaaacaggctctgccggcgcccgtggacacaccggacccaagggccaaaaaggctcgatgggggcccccggcgaaaggtgcaagagtcactatgccgctttctctgtgggccgaaagaaaccaatgcattcaaaccactattaccagaccgtcatctttgacacagaattcgtgaacctctacgaccatttcaatatgttcaccggaaagttctactgctatgtccctggtctgtattttttttcgctcaacgttcatacttggaaccaaaaggaaacatatctgcatatcatgaagaatgaagaggaggtggttatcctgtttgctcaagtgggcgacagatccataatgcagtcacagtcactgatgctggaattaagggaacaggaccaggtgtgggtgagactctataaaggtgagagagaaaacgctatattctctgaggagctcgacacgtacattaccttcagtgggtacctcgtcaaacatgcaacagagccctag

SEQ ID NO: 5983 - DNA, 1002 bp, synthetic construct
  misc_feature 1..1002: note = source = /note="Description of Artificial Sequence: Synthetic coding sequence"
  source 1..1002: mol_type = other DNA
atggtgagtaaatcgcgttggaaacttctggctatgctggcactggtgttggtggtaatggtgtggtatagcatctcacgggaggataggtatatcgaactcttttactttcctatacctgaaaagaaggaaccctgtctccaaggggaagcagaaagcaaagcttcaaaactgtttggaaattatagccgcgaccaaccgatattcctccgtctggaggactacttctgggttaaaacacctagcgcatacgaacttccttacggaacgaagggatctgaagatctcttgctccgggtcttggccatcacttcttcgagtatccccaagaacatccagagtcttcgttgccgccgctgtgtggtggtgggaaatggacaccgccttcggaattccagcctcggcgatgctatcaataagtatgatgttgtgattcgtctgaacaatgctccggtcgccggttacgagggggacgtggggtccaagaccactatgaggttattctatccagagtcagcccattttgatcctaaggtcgagaacaatccggacactctcttagtgttggtcgctttcaaagctatggactttcattggatcgagactatactcagcgataagaaaagagttcggaaagggttttggaagcagccgcctctaatatgggatgtcaaccctaagcagatccgcatcttaaatcccttctttatggagatcgcagccgacaaactactgagcctgcccatgcagcagccccgcaaaatcaagcagaagccgacgacaggcctgcttgccataaccctcgctctccatctgtgtgacctggtgcacatcgctggctttggatatccagatgcatataacaagaagcagaccatccactactatgaacagattacactgaaatcaatggcaggaagtggacataatgtttcacaggaagccctcgctatcaagcgtatgttagaaatgggtgcgattaagaatctgacaagtttttag

SEQ ID NO: 5984 - DNA, 312 bp, synthetic construct
  misc_feature 1..312: note = source = /note="Description of Artificial Sequence: Synthetic coding sequence"
  source 1..312: mol_type = other DNA
atgtcaggccgtggtaagggtggaaaggggctcgggaagggaggtgctaagcgtcaccgcaaagttctgcgcgataacatccaaggcattaccaaacctgccatccgcagactggcccgacgtggcggggtaaaaaggatttcgggactaatctatgaggaaacaaggggcgtgcttaaagtgttcttagaaaatgttattcgcgatgcagtgacgtacacagagcacgcgaagagaaaaacagtgactgccatggacgtggtctatgcccttaagcgtcagggcaggacgctttacgggttcgggggatag

SEQ ID NO: 5985 - DNA, 312 bp, synthetic construct
  misc_feature 1..312: note = source = /note="Description of Artificial Sequence: Synthetic coding sequence"
  source 1..312: mol_type = other DNA
atgtctggcagaggtaaaggtgggaaaggactgggtaagggaggcgccaaaaggcacagaaaggttctcagggacaatattcaggggataacgaagcccgccatacggcgtttagctcggcgaggaggtgttaaaagaatctctgggctaatctatgaggagacaagaggcgttctcaaggtctttctggagaacgtgatacgggacgcggtgacatacactgagcatgctaagcgtaagactgttacggctatggacgtggtgtatgcactgaagagacagggccgtacactttatgggtttggaggatag

SEQ ID NO: 5986 - DNA, 312 bp, synthetic construct
  misc_feature 1..312: note = source = /note="Description of Artificial Sequence: Synthetic coding sequence"
  source 1..312: mol_type = other DNA
atgtccggccgtgggaaaggaggaaaagggctgggcaaaggtggtgccaaacgccacagaaaggtactgcgggataatatccagggtatcaccaagccagcaattcgccggctggcaagacggggtggcgtgaaacggatttccggcctaatatatgaggagactagaggagtgttgaaagtgttcctggaaaacgtgattagagacgcagtgacctacacggagcacgcaaaacgaaaaacagtcacagccatggatgtggtgtatgctctgaaaagacagggtaggaccctatatgggttcgggggctag

SEQ ID NO: 5987 - DNA, 312 bp, synthetic construct
  misc_feature 1..312: note = source = /note="Description of Artificial Sequence: Synthetic coding sequence"
  source 1..312: mol_type = other DNA
atgtctggcagagggaaaggcggtaagggtttggggaagggaggagccaagagacacagaaaggtgctgagagacaatattcaaggcattactaaaccagccatccggcgcctcgcccggcgcggcggagtcaaacgtatatctggactgatctacgaagagacccggggagtgctgaaagttttcctcgaaaacgtcatccgcgacgccgtaacttatactgagcacgcaaaacgcaagactgtaactgcaatggacgttgtatatgctttgaagaggcagggaaggaccctgtacggatttggcggttag

SEQ ID NO: 5988 - DNA, 2268 bp, synthetic construct
  misc_feature 1..2268: note = source = /note="Description of Artificial Sequence: Synthetic coding sequence"
  source 1..2268: mol_type = other DNA
atgcccccctttctgctgctggaagcggtttgcgtgttcctgttctcccgggtccccccctcgttgccccttcaggaggtgcacgtgtctaaggaaacgatcgggaaaatctctgcagccagcaaaatgatgtggtgttctgcagctgtcgacatcatgttcctgctcgatgggagcaacagcgttgggaaaggaagtttcgaacggtccaagcatttcgcaattactgtctgcgatggactggacatttctcccgagagagttcgggttggggccttccagttttcatctactccgcacctagaatttcccctggactcctttagcactcagcaagaggtgaaagctcggataaagcgcatggtgttcaaggggggacggacagagactgagttagccctgaagtatctgctgcaccggggcctacccggagggaggaatgctagcgtcccacagatcctgattatcgtgacggacggaaaaagtcaaggagacgtggctcttccctccaagcagctcaaggagcgaggagtaactgtgtttgccgtgggagtacgctttccgcggtgggaggagcttcacgccctggcaagcgagcctcggggccaacatgtcctgctggccgagcaagtcgaggacgcaaccaacggactgttctccacattatcctccagcgctatctgtagctccgctactcctgactgtagagtcgaagcgcatccttgcgagcacaggaccctggaaatggtcagagaatttgcgggcaacgctccctgttggagggggtcgcgccgtaccctggcagttctcgccgcccactgccctttctactcctggaaacgggtttttcttacacaccctgccacttgttacaggacaacatgccccgggccttgtgatagccagccttgtcagaatggcggcacatgcgtgcctgagggtttggatggataccagtgcctgtgtcctctggccttcgggggggaggccaactgcgccctgaagctgagccttgaatgtagggttgatctgttattcctgcttgactctagtgctggcactaccctagacggtttcctgcgggccaaagtattcgtgaagagattcgtgcgcgccgtgctcagcgaggattcgcgcgcccgcgtcggcgtggccacttattcacgggaactcctggtcgctgtgcccgtgggcgaataccaggatgtgccagacctggtctggtccctggacggcataccctttagaggcggaccaactttaacaggttccgcattgagacaagccgcagagcgcggatttggttcagcaacaagaacagggcaggacaggcccaggcgggtagtggtattgctgaccgagtctcactccgaggacgaagttgctggtcctgctcgccatgccagagcccgtgagctcctgctgttgggggtagggtccgaagctgttcgtgcagagcttgaagagataaccggctctccgaaacacgtgatggtgtattccgaccctcaagatctgtttaaccaaatccctgaactgcagggaaaactgtgttccaggcagaggcctggctgtagaacacaggccttggatctcgtcttcatgctcgacaccagcgcctcagtggggcctgagaattttgcacagatgcagagcttcgtacgatcttgtgccctgcagttcgaggtaaatcccgatgtaacccaggtgggccttgtagtatacggatctcaagtgcagacagcattcggtttggatactaaacccacccgggcggcgatgctgcgggcgatcagccaggctccttacttaggcggcgtggggtccgccgggacagccttgttacacatctatgataaagttatgaccgttcagaggggtgcccgacctggtgtgcccaaggcagtggtggtgctaaccggcggacgcggagcagaggacgccgcggtccctgctcagaaactaaggaacaatggcatcagcgttttggtggttggagttggtccggtgctgtctgagggacttcggaggcttgccggtcccagagacagtctgatccacgttgctgcctatgctgatctgaggtaccaccaagacgtactgatagaatggctgtgcggcgaagcgaaacagcctgtgaacctgtgcaaaccatctccatgcatgaacgaaggaagttgtgtcttacagaatggaagttacaggtgcaagtgtcgggatggatgggaggggccacattgtgaaaaccgattcctgcggcgtccgtag

SEQ ID NO: 5989 - DNA, 816 bp, synthetic construct
  misc_feature 1..816: note = source = /note="Description of Artificial Sequence: Synthetic coding sequence"
  source 1..816: mol_type = other DNA
atgataactggtgtcttcagtatgaggttgtggacacccgtcggcgtcctgacctctctcgcctattgtctgcaccagcgaagggtggctcttgctgaactgcaagaggcagacggacagtgcccagtcgacaggagtctgctaaagctcaaaatggtgcaggtcgtcttccgacatggggcacggtcgcctctgaagccactcccgctcgaggagcaggttgagtggaatcctcagctattggaggtgcctccacagactcagttcgactatacagtgacgaatctggctggtggcccaaagccatatagtccttacgactctcagtaccacgagacgaccctgaaaggcgggatgttcgcaggccaacttacgaaggtcggcatgcagcaaatgtttgctttgggtgagcgcctaaggaagaactatgtcgaggacatcccatttctttccccaactttcaacccacaagaggtgtttatccgctcaaccaacatttttcgaaaccttgaaagtactagatgtctccttgccggcctcttccagtgccagaaggagggtcccatcattattcacactgatgaggcagacagcgaagtcctctaccctaactaccaatcttgttggtcactgcgtcagcggactaggggcaggaggcagacagcttccctgcagccaggcattagcgaagatctaaagaaagttaaggaccgaatgggtatcgactctagcgacaaagtggatttttttattctgctggacaacgttgctgcagagcaggaaaaaatgggatcttgcaggttccacgggtcttag

SEQ ID NO: 5990 - DNA, 1395 bp, synthetic construct
  misc_feature 1..1395: note = source = /note="Description of Artificial Sequence: Synthetic coding sequence"
  source 1..1395: mol_type = other DNA
atggagcattccgtctgtccatccagcgcagtgcatctgatccctgtgtcaactccgaaaaacggcatgagttccaagagcaggaagcggattatgcctgatccggtgactgagcccccagtgacagacccagtgtacgaggctctcctgtattgtaatatcccttcagtggcagaaaggtctatggagggccatgcacctcatcattttaagcttgttagcgtacatgtattcatccgccacggggatagataccccttatacgtgattccaaagaccaagcgaccggagatcgactgtaccttggtggcgaaccggaaaccctaccaccccaaactggaagccttcatatctcacatgagcaagggcagcggcgccagcttcgaaagtccgctcaatagcctcccactgtaccctaatcatccactgtgcgaaatgggggagctgactcagaccggagtggtgcagcacctccaaaatggccagctcctaagagatatttatcttaaaaagcacaagttactgcctaacgactggtcggctgatcagctctaccttgaaacaacaggcaagtccagaaccctgcagagtgggttagctctgctttatggattccttcccgatttcgattggaaaaagatttactttagacaccagcctagcgctctgttttgctctggctcatgttactgccctgtgcgcaatcagtatctagagaaagagcagcggagacagtatctgttacggttgaaaaactcgcagttagaaaaaacatacggggaaatggctaagattgttgatgtaccaacaaagcagcttagagctgccaacccaatcgactctatgttgtgtcatttctgtcataacgtgtcctttccatgtacaagaaacgggtgtgtggatatggagcacttcaaggtgatcaagacccatcaaatcgaggacgagagagagcgacgagagaaaaaactatactttgggtactccttgttgggagcccaccctattctgaaccagactattggccgcatgcaaagggctaccgagggccgcaaagaggaactttttgctctgtattctgctcatgatgtgactctctctcccgtcctgagtgcacttggcttgtctgaggcccgctttccccgcttcgctgctagattgatcttcgagctctggcaggatcgagaaaaacccagtgagcattcagtcagaatcctgtacaatggggtcgacgttacgttccacacctctttttgtcaggaccaccataagcgctcacctaagcctatgtgtcctctcgaaaaccttgtgcggtttgtcaagagggacatgttcgttgccctaggtgggtctggcaccaactactatgacgcctgtcaccgtgaggggttctag

SEQ ID NO: 5991 - DNA, 1443 bp, synthetic construct
  misc_feature 1..1443: note = source = /note="Description of Artificial Sequence: Synthetic coding sequence"
  source 1..1443: mol_type = other DNA
atgctcttccgaaatcgattcctgttgttactggctctggctgctctgttggcctttgtgtccttaagccttcagttcttccatctaattcccgtaagcacgcccaaaaacggcatgagctccaagagtcggaagcggataatgcccgatccagtgactgagccacccgtgaccgatcccgtgtatgaggctctgctgtactgtaacattccaagcgttgcagaacgtagcatggaagggcacgcgccacatcatttcaagctggtgagcgtccatgtattcatcagacacggggatcggtaccctctctacgtaatccccaagactaaaagaccagagattgattgcactctagtcgctaaccgaaagccctaccatccaaagcttgaagcattcattagccacatgagcaagggttcgggcgcgtcttttgaatctcccttgaactcactcccactctatcctaatcaccccttgtgcgagatgggcgagttaactcagaccggcgtggttcagcaccttcagaacggccagctgctgagggatatctatctgaaaaagcacaagctcctgccaaatgactggtcagctgaccaactgtacttagagacaacagggaaatcacgtaccctgcagtctggactcgccctcctctatggcttcctcccagactttgactggaaaaaaatttatttcagacaccagccatcagctcttttctgtagcggatcttgttactgccctgttcggaaccagtacctcgaaaaggaacagcgccggcagtatttattacgcttgaaaaacagtcaactggaaaaaacgtacggggaaatggcaaagatcgtcgacgtgccaaccaagcagttaagggctgccaatcctatagactcaatgctctgtcacttttgccataacgtatcctttccttgcactagaaatgggtgcgtcgacatggagcattttaaggtcattaagacccatcaaatagaagacgagcgcgagaggagagagaagaaactgtactttgggtactcactcttaggtgcacacccaattctaaaccaaacaataggcagaatgcagagggcgaccgaagggcggaaagaggagctgtttgcattgtacagtgcccacgatgtaaccctttccccagtgctttccgctctgggactatcggaggcacgattccctcggtttgctgctcggctcatttttgaattgtggcaggacagagaaaagcccagcgagcatagcgtccggattctatacaatggcgtggacgtgacttttcacacctccttctgccaagatcaccataagcgctcgcctaagcccatgtgcccgctcgagaacttggtgagattcgtcaagagagatatgtttgtggcacttggcgggtccggtacaaactactacgacgcttgccaccgtgaaggattttag

SEQ ID NO: 5992 - DNA, 1311 bp, synthetic construct
  misc_feature 1..1311: note = source = /note="Description of Artificial Sequence: Synthetic coding sequence"
  source 1..1311: mol_type = other DNA
atgcaggggacccctggcgggggcactcggccagggccgtcccctgtagacagacgaaccctcctggtcttctcattcattctcgccgccgctctcggacaaatgaatttcactggagaccaggtccttagagtgttggctaaggacgaaaagcaattatctctgctcggggatctggaaggcctcaagcctcagaaagtggacttctggcgcggtccagctcggcccagcctccctgtagatatgcgcgtgcctttttccgagctgaaggacattaaagcttatctcgaatcgcacggactggcctacagtataatgattaaagacattcaggttctgttggacgaggaaaggcaggcaatggcaaagagtcgcagattagagaggagtactaattctttttcatatagctcctatcatactctggaggagatttatagctggattgacaatttcgtcatggagcactctgatattgtgagcaaaatccagatcggaaacagtttcgaaaatcaatcgatcctggtgctaaaattctccacaggtggttctcggcatccagccatctggatcgatacgggcatccactctagagagtggataactcatgccactggcatctggaccgctaacaagatagtctcggactatggcaaggatagagtgctaacagacatactgaatgctatggatatcttcatcgagctggtaactaaccccgacggattcgctttcacccacagcatgaatcgtttgtggcgcaagaacaaaagcatccggcccggaatattctgcatcggagtagatcttaatcgcaactggaagtccggtttcggaggcaatgggagcaactcaaatccatgcagtgagacataccacggtccctcccctcagagcgaacctgaagtagccgcaattgtcaattttatcacagcacacggcaactttaaagccttgatttctattcacagctactctcagatgctgatgtatccttacggacgcctcttggaacctgtgtctaaccagagggaactctacgatctggctaaagacgccgtcgaggctctgtataaggtgcacgggatcgaatacatttttggcagcatctcaactacactctacgtggcctcaggaattaccgtggactgggcttacgatagtggaatcaagtacgcattcagtttcgagctgcgtgacaccggtcagtacggatttctgcttcccgctacacagataattcccacggcgcaggagacctggatggctctgagaactattatggaacatacactgaatcacccatactag

SEQ ID NO: 5993 - DNA, 1161 bp, synthetic construct
  misc_feature 1..1161: note = source = /note="Description of Artificial Sequence: Synthetic coding sequence"
  source 1..1161: mol_type = other DNA
atggcccagtggcactgctcccagagaacacaggcagggggtcacggggtgggcgagagattagcccagtgtcaagaccagagcagtcggcatgcagccgaactgagggatttcaagaataaaatgttaccccttcttgaggtggcagagaaagaacgcgaagcattgcggacagaagccgatactatcagtggtcgggtcgataggctggagcgcgaggtcgattatctagagacccagaaccccgcactcccttgcgtggaatttgatgagaaggtaaccggaggccctggcacaaaaggaaaaggaagacgcaacgagaagtatgacatggtcacggattgcgggtatactattagccaggtccgcagcatgaagatcctcaaaagattcgggggtcccgctgggttatggactaaagatccattgggccagacagaaaagatctacgtgctggacgggactcaaaatgataccgcgttcgttttccctaggttgagagacttcactttggcaatggcagctaggaaagcatcacgggtgagagtgccttttccatgggtcggcactggacagctggtgtatggcggtttcttgtactttgcccggcggcccccaggacgtcctggcggcggcggtgaaatggaaaacactctccagctgatcaaattccacctggcaaataggaccgtggttgattccagtgtgttccccgctgagggtctcattcctccctatggcttaaccgcagacacatacattgatttagctgctgatgaggagggtctgtgggcagtatacgctaccagggaagacgaccggcacctgtgcctggccaagctcgatcctcaaaccttggatacggaacagcagtgggacaccccgtgcccacgcgagaacgcggaagcagctttcgtcatttgtgggaccttatacgttgtatacaatacaagacccgcctctagagcccgcatccagtgttcatttgacgcaagcggaactctaacccctgaaagagccgccctcccttacttcccccgcagatatggggcccatgcttcgctccggtacaacccccgggaacggcagctctacgcatgggacgatggataccagattgtgtacaagctcgaaatgcgaaagaaagaggaagaagtctag

SEQ ID NO: 5994 - DNA, 990 bp, synthetic construct
  misc_feature 1..990: note = source = /note="Description of Artificial Sequence: Synthetic coding sequence"
  source 1..990: mol_type = other DNA
atgcgtccccccccggccctggcattagctggtctgtgtcttctggccctgccagcagctgctgcttcgtacttcggtctcaccggcagagaagtgctgaccccattcccaggcctgggaactgccgcagccccagctcaaggcggggcccatctcaagcagtgtgatcttttgaaactgtcccgccggcagaaacagctctgtcgacgggagccaggtctggctgagacattaagagacgctgcgcacctgggcctgctggagtgtcaatttcagttcaggcacgaaaggtggaattgtagtctggagggcagaatgggcctgctaaagcggggcttcaaggagaccgccttcctgtatgctgtctcctccgccgccctcacccacactctcgcaagggcatgctcagcaggtaggatggagaggtgcacctgtgacgattcgccaggcctggaatcccggcaggcttggcaatggggcgtgtgcggcgacaacttgaagtattctaccaagttcctgagtaactttcttggaagtaagcgaggaaacaaagacctgagagcgagggccgacgcacacaatactcacgtgggcatcaaagccgtgaaatctgggcttagaaccacgtgcaagtgtcatggcgtgagcggctcctgtgccgtgaggacttgttggaagcagttgtccccattcagggagaccgggcaagtcctgaaactccgctatgacagcgcagtcaaggtctcctcagcaacaaacgaggccctggggcggcttgaactgtgggcaccggcgcggcagggcagtctgaccaaaggactagctccccgtagcggagacctagtctacatggaggacagtccgtctttctgtagaccctcgaaatatagccccggtacagcagggtggtccgccgtggctcggagccagctgatcaccaccagtacgagtcgcattcaagccattctgccgagccagctgcccgagtag

SEQ ID NO: 5995 - DNA, 579 bp, synthetic construct
  misc_feature 1..579: note = source = /note="Description of Artificial Sequence: Synthetic coding sequence"
  source 1..579: mol_type = other DNA
atgaggctggccggtcccgagtcctccgtgacggcagctcccagggcacggaagtacaagtgcgggctgccacagccatgcccggaagagcacttagcctttagggttgtgtctggggcggcaaacgttattggccctaaaatatgcctcgaggataaaatgctcatgtctagtgttaaggacaatgtgggacggggactcaatatcgcgctggtcaacggtgtttctggggaattgatcgaggcccgggcattcgatatgtgggcgggcgatgtgaatgatcttctgaaatttatccggccactccatgaagggactctggtgttcgtagcctcctatgatgatccagctactaaaatgaatgaggaaactcgaaaactgtttagcgaacttggctctcggaacgccaaagaactcgcctttcgggacagctgggtgttcgttggagcaaaaggtgtccagaacaagtccccatttgaacaacacgtaaaaaatagcaaacactccaataagtatgaggggtggccagaggcccttgaaatggaggggtgtatcccacggcgaagcacagcctcatag

SEQ ID NO: 5996 - DNA, 1053 bp, synthetic construct
  misc_feature 1..1053: note = source = /note="Description of Artificial Sequence: Synthetic coding sequence"
  source 1..1053: mol_type = other DNA
atgaagtgttccctgcgggtatggtttcttagtgtcgcatttcttcttgtcttcattatgtccctgctgttcacgtactcacaccactcaatggcgacccttccctatctagactctggtgctctggacgggacacatcgggtgaagctggtgcctgggtacgccggactccaacggctgagtaaagagagactctccggcaagagttgcgcctgccgccgttgcatgggtgacgccggcgcctcggattggttcgattcacattttgatgggaacatcagtcctgtctggacccgggaaaatatggacctgccccccgatgtgcagagatggtggatgatgcttcagcctcagtttaaaagccataataccaatgaagttctggagaagctgtttcaaattgtcccaggtgaaaatccttaccggttccgggatccccaccagtgccggcgctgtgccgtcgttggtaactcaggtaatctcaggggatcaggatacggacaagacgttgacggacacaattttataatgagaatgaaccaagcccctactgtgggttttgaacaggacgtgggtagtaggactacacatcatttcatgtaccctgaaagcgccaagaacctccctgccaacgtcagtttcgtactggtgcccttcaaggtccttgacctcttatggatcgcatccgccctgagcacagggcagataagatttacttacgccccagtgaagtctttcctgcgcgttgataaagagaaagtgcagatttacaatcccgcgttctttaaatacatccatgacagatggaccgaacaccatgggcgctacccttctaccgggatgctggttctcttcttcgcactgcacgtgtgtgacgaggtcaatgtctacggtttcggtgcagacagtagaggcaactggcatcattattgggagaataaccgatatgccggagagtttaggaagacaggcgtacacgatgccgacttcgaggcccacattattgatatgctcgccaaagcgtctaaaatagaggtgtatagaggaaattag

SEQ ID NO: 5997 - DNA, 189 bp, synthetic construct
  misc_feature 1..189: note = source = /note="Description of Artificial Sequence: Synthetic coding sequence"
  source 1..189: mol_type = other DNA
atgaagattcagctttttttcttcatactgcacttctgggtgactatcctgccagctcgtagcaattttgagcccaaatatcggttcgagcgttgtgaaaaggttcgcggcatctgcaaaacattctgtgatgatgtagaatacgactacggctattgtatcaagtggaggagccagtgttgcgtgtag

SEQ ID NO: 5998 - DNA, 738 bp, synthetic construct
  misc_feature 1..738: note = source = /note="Description of Artificial Sequence: Synthetic coding sequence"
  source 1..738: mol_type = other DNA
atgacgctattccccgtattactcttcctcgtagccgggttgctgccatctttccccgccaatgaagacaaagaccctgctttcacagcactactgactacccagactcaggtccagcgcgagatagttaacaagcataacgagctgcgtagggctgtcagcccacccgcaaggaacatgcttaagatggaatggaacaaagaagccgctgctaatgcccagaaatgggcaaaccagtgcaactataggcattcaaatcccaaagataggatgacgagtctgaaatgcggcgaaaatttgtatatgtcctcagcaagctcctcctggtcccaggccatccagtcatggttcgacgaatacaacgattttgatttcggtgtcggacccaagactcctaatgctgtggtgggccactatacccaggtagtctggtattcgagctatttagtggggtgtggcaatgcctactgtcccaatcaaaaagtgctgaaatactactacgtgtgccagtattgccccgcggggaactgggcaaatcggttgtatgtcccttatgagcagggagccccatgcgcaagttgcccggacaactgtgatgatggcctgtgtacaaatggatgcaaatatgaggacctctatagcaattgcaagtccctgaagctgaccctgacatgtaagcatcagctggttcgagactcctgtaaggcatcctgcaactgcagcaatagcatctactag

SEQ ID NO: 5999 - DNA, 1341 bp, synthetic construct
  misc_feature 1..1341: note = source = /note="Description of Artificial Sequence: Synthetic coding sequence"
  source 1..1341: mol_type = other DNA
atgctgcatccagaaacttcacccgggagggggcacttgctcgccgtcttactcgccctgctggggacggcgtgggctgaagtgtggcccccccagctccaggagcaggccccgatggcaggcgctctcaaccgcaaggagagtttcctccttctgtctctacataacagattgcgctcatgggttcagccgcccgctgcagacatgagacgccttgactggagcgattcattagctcagctggcccaggcccgagccgcgctgtgtgggacccccacccctagtctggcatctggattatggcgcacattacaggttggctggaatatgcagctgctgcctgctggtctggtgagttttgtggaagttgttagcctctggttcgccgagggacagcgttacagccatgctgccggggaatgtgcaagaaatgctacttgcacacattatactcagctggtctgggctaccagctctcagctcggatgtggccgccacctgtgtagtgctggccaagctgcaatcgaagcatttgtctgtgcctattccccaagaggcaactgggaggtgaatgggaaaaccattgtgccctataagaagggcgcgtggtgctcgttgtgtacagccagcgtaagtggctgtttcaaggcttgggatcacgcgggcggcctgtgtgaggtgccaaggaatccttgtcggatgtcttgtcaaaatcatggaaggttgaacatttcaacttgccactgtcattgccccccaggctataccggtcgctactgccaagtgcggtgttccctacagtgcgttcatggtagattccgagaagaagagtgctcttgcgtatgcgacatcggctacgggggcgcccagtgcgcaacaaaagtgcacttcccattccacacatgcgatctgcgcattgatggggattgcttcatggtgtcctcggaagctgacacttactacagggcacggatgaagtgtcagaggaagggcggggtcctagctcagatcaagtctcagaaggtccaggacatccttgccttttatctgggtagactcgagacgacaaatgaggtgattgattccgatttcgagactaggaacttctggattggtctgacttataagactgccaaggacagttttcggtgggccactggggaacaccaggctttcacatccttcgcttttggtcaaccagataaccatggatttggcaactgtgtggagctgcaggcgtcagctgccttcaactggaatgatcagagatgcaagacacgtaataggtatatctgccaatttgcacaggagcatatatctcgctggggccccggtagctag

SEQ ID NO: 6000 - DNA, 585 bp, synthetic construct
  misc_feature 1..585: note = source = /note="Description of Artificial Sequence: Synthetic coding sequence"
  source 1..585: mol_type = other DNA
atgacaatgaggcacaattggactcctgatttgagtccgctttgggtgctcctcctgtgcgcccacgtcgtcacactgctggtgagagccacaccagtctcccaaacaaccactgccgccaccgctagtgtcagatctaccaaagacccatgcccatctcagccacctgtgttcccggccgccaagcaatgcccagcactggaggtcacatggcccgaagtagaagtgccacttaacggcacactctcgcttagctgtgtggcctgtagcagatttcctaatttcagcatactttactggctcgggaatggatctttcatcgaacatctgccaggacgcctgtgggagggatcaacgagcagggaacgtggttcgaccggcacacagctgtgcaaggctctggttctggaacaactgactccggccttgcatagcactaacttttcatgtgtgttggtggatcctgagcaggtggtgcagaggcatgtggtgttagcacaactctgggctgggctgagggccaccttaccccctacacaggaggccttaccttcgtctcactcctccccgcagcaacaaggatag

SEQ ID NO: 6001 - DNA, 585 bp, synthetic construct
  misc_feature 1..585: note = source = /note="Description of Artificial Sequence: Synthetic coding sequence"
  source 1..585: mol_type = other DNA
atgaccatgcgccacaattggacgcccgacctgagcccactttgggtccttcttctgtgtgcccacgtcgttaccctgctggttagagccacacctgtaagtcagactaccacagcggccacagccagcgtccggagtaccaaagatccctgcccttcccagccccctgtgtttccagccgcgaaacagtgtcctgcgctagaggtgacctggcccgaagtagaggtcccacttaacggaactctaagcctgtcatgtgttgcctgcagccggttcccgaattttagtattctttattggctgggtaacggcagctttatcgagcaccttcccgggcgactttgggagggatccacgagccgggagaggggctctactggcacacaactgtgtaaggctctggttctggagcaactgactccggctctccatagcacaaatttctcatgtgtgttagtcgacccggagcaggtggtccaacgacatgtcgtgttggcccaactgtgggcaggtctaagagcaacgttgccccctactcaggaagcattgccctcatcccattctagtccccagcaacagggatag

SEQ ID NO: 6002 - DNA, 348 bp, synthetic construct
  misc_feature 1..348: note = source = /note="Description of Artificial Sequence: Synthetic coding sequence"
  source 1..348: mol_type = other DNA
atgactatgcgccataactggacaccagatttgagtccattgtgggtgctgctgttatgcgcgcacgtcgtgaccctgctcgtgagagctacaccggtcagtcaaacaaccaccgcagctactgccagcgtacggagtactaaagacccatgtccttcccagccccccgttttccctgcggctaaacagtgtcccgctctggaagtgacctggcccgaggtggaggtgccactgtcctgggccgaaggtaacctggcgcctcaccccaggtctcccgccctgcagccgcaacagagcacggccgcagggctaagactctcaaccggccctgccgcagcccaaccctag

SEQ ID NO: 6003 - DNA, 528 bp, synthetic construct
  misc_feature 1..528: note = source = /note="Description of Artificial Sequence: Synthetic coding sequence"
  source 1..528: mol_type = other DNA
atgctacctccaatggcactgccatccgttagctggatgttactgagctgtctcatgctgctgtcccaagtccaaggagaagagcctcagagggaactgccaagcgctagaatcagatgtccaaaaggatcaaaagcatatggcagccactgttacgccctgtttctttcaccaaagtcctggaccgacgccgaccttgcatgccagaagagaccgtccgggaatcttgtgtccgtgctgagcggggccgaggggagcttcgtgtcctcactggtgaagtccattggtaattcttacagttatgtctggattgggctacacgaccctacgcagggtactgaacccaacggggaaggctgggagtggagttctagcgatgtgatgaactacttcgcttgggagaggaacccgtcaacaatcagttctcctggtcactgcgcctccctgtctcggtcaactgcatttttgcgctggaaggactataactgtaatgtgagactcccctatgtgtgtaaattcacagattag

SEQ ID NO: 6004 - DNA, 993 bp, synthetic construct
  misc_feature 1..993: note = source = /note="Description of Artificial Sequence: Synthetic coding sequence"
  source 1..993: mol_type = other DNA
atggggaagctctgtctgggaccaaccctctgtcctgccgccgccgctgaggagtctcgagatgcagaacctaggagggagctcctctgttctggtagaccttggacatggagggccgcagctagagtgaccacaatgatcccatgggtcctgctggcctgtgcactgccttgcgcagctgatcctctgctcggagcattcgcccgccgagactttaggaaagggtcccctcaactggtgtgctccctgcccggccctcagggcccaccgggtcctcccggggccccgggcccgtcgggcatgatggggcgaatgggattcccagggaaagatggtcaagacggacatgatggagaccgcggagactcaggtgaggaagggcccccagggcggactggtaataggggaaagcctgggcctaagggcaaagccggtgctatcgggcgagccgggcctagggggcccaagggcgtgaacggcacgccagggaagcatgggacccctgggaaaaagggaccaaaggggaaaaagggagaacctgggctccccggaccatgtagctgtggcagcggacacacgaagtccgcattcagtgtggccgtcacaaagtcatatcccagagagcggctccccatcaagttcgacaagatcctcatgaacgaaggcggacactataacgcaagcagcgggaagtttgtgtgtggcgtgccgggcatttactatttcacgtatgacattacattggcaaataaacacttagccatcggtctagtgcacaacgggcagtacaggattaggacattcgatgcgaacactggcaatcatgacgtcgctagtgggagcaccatacttgcgctcaagcagggtgatgaagtttggctacagatcttttatagcgagcagaacggtctcttttacgatccttactggacggacagcttgtttacaggctttctgatatatgccgatcaagacgatcccaatgaggtgtag

SEQ ID NO: 6005 - DNA, 390 bp, synthetic construct
  misc_feature 1..390: note = source = /note="Description of Artificial Sequence: Synthetic coding sequence"
  source 1..390: mol_type = other DNA
atgaggctgcttcttctagttccattactgttggcaccagccccaggaagcagcgctccaaaggtccgtcgtcagtcggatacctgggggccgtggagccaatggtccccctgctcccgcacttgcggtggtggtgtctcctttcgtgagcgaccttgctattctcaaagaagagatggggggtcttcctgcgtggggcccgcaaggtctcatcgttcttgtaggacagaatcatgcccagatggtgctagggacttcagagctgaacagtgcgcagaattcgacggcgcagagttccaagggcgcaggtatagatggctcccttattactcagccccgaataagtgtgaattgaactgcatccctaaaggcctcgggctccagggctag

SEQ ID NO: 6006 - DNA, 1227 bp, synthetic construct
  misc_feature 1..1227: note = source = /note="Description of Artificial Sequence: Synthetic coding sequence"
  source 1..1227: mol_type = other DNA
atgttcagtaacgcaaacagccggagcaagatgtggctgttgcttactatggcaagcctaatctctgttctcgggaccacacatggactctttggcaaactgcatcccgggagccccgaagtgaccatgaatattagccagatgatcacttactggggttaccctaatgaggaatatgaagtggttaccgaggatggatacattcttgaagttaataggatcccgtacggaaagaagaattccggcaataccgggcaaaggcccgtggtgtttctgcagcatgggctgctagcttcagctaccaattggatctccaacctgcctaacaactccctcgccttcatactggccgacgcaggatatgatgtctggctggggaactctagggggaacacatgggctagaaggaacctgtattatagccctgactccgtcgaattctgggccttctcatttgatgaaatggccaagtatgacttgccggcaactatcgattttatcgtaaagaaaactggacagaagcagctgcattacgtggggcacagccagggcaccaccataggctttattgccttcagtaccaacccgagcttggctaaacgaattaagaccttctatgctttagcacccgtggctaccgtgaaatatacaaagtctctgattaataaactcagattcgtgccccagtcactgtttaagtttatcttcggggataagatcttttatccccacaactttttcgatcagttcttagcgaccgaggtatgtagtagagaaatgctgaacctgctgtgttccaatgccctgtttataatatgtggctttgactccaagaacttcaatacgtcaaggcttgacgtttatctctcccacaatcctgctggcactagcgtgcaaaacatgtttcactggacgcaggctgttaaatctggtaagtttcaggcatacgattgggggtctcctgtgcaaaataggatgcattacgaccagagtcaaccaccatactacaacgtgacagcaatgaatgtgccaatcgcagtatggaacggcggtaaggatctcctggctgacccacaggacgttgggcttctgctgccgaaactgcccaacctcatataccacaaggagattccattctataaccacctcgacttcatctgggcgatggatgcgccacaggaggtctataacgatatcgtgtctatgatcagcgaggataaaaaatag

SEQ ID NO: 6007 - DNA, 393 bp, synthetic construct
  misc_feature 1..393: note = source = /note="Description of Artificial Sequence: Synthetic coding sequence"
  source 1..393: mol_type = other DNA
atggcctcagatctgatacgcactatcctagcagtagctcttatatcgaaactgggcactgcagtggacgctgaattgatgcccagcggagccatactacaaaacaaaagggagaacctaccacgcgtttgccacgcactcgcctttctgggcatggctagatgccaggatttgttcctggtccgcctacagggctggaaactgggcacaagatttcaggatggaccccgcagcacccctcaggaggagggggggtccccccaacggaaaaggggtatgcccgtgcaaattcactttctgctgaagtctttcctgtcttcccctatcacgttcgcctttatatcgcttgcgcgcacagtctctctggctacagcgatctgcaagattgtttag

SEQ ID NO: 6008 - DNA, 393 bp, synthetic construct
  misc_feature 1..393: note = source = /note="Description of Artificial Sequence: Synthetic coding sequence"
  source 1..393: mol_type = other DNA
atggccagcgacctcatccgcactattctggccgttgctctgatcagtaagctggggactgccgtcgacgcagagctgatgcccagcggagccatcctgcagaacaagcgtgagaatttgccaagagtctgtcatgccttagccttcttggggatggcccgctgtcaggatcttttcctggtcagactccagggctggaagctgggcacaagattccaggacggcccccggtccactccccaggaagaaggtgggtccccccaaaggaagagaggaatgcccgtgcaaattcactttctcctgaagagcttccttagttctcccataaccttcgcctttatttctttggctagaacagtgtccctggcaaccgcaatctgtaagatcgtgtag

SEQ ID NO: 6009 - DNA, 1731 bp, synthetic construct
  misc_feature 1..1731: note = source = /note="Description of Artificial Sequence: Synthetic coding sequence"
  source 1..1731: mol_type = other DNA
atgatagttttcggatgggctgttttcctggcctcgcggagtctcggccaggggttgcttctgactctcgaggagcacatcgcccatttcctcggaactggtggagctgcgaccacaatgggaaactcttgcatctgtcgagatgactccggtacagacgacagtgttgacacacagcagcagcaagctgaaaactccgccgtccccacagcagatactcgatcacagcctagggatcccgtgcgccctcctagacgggggcgtggaccccatgagcctcgaaggaagaagcagaatgtggatggactagttttggataccttggctgtcattcgaaccctggttgacaatgaccaggaacctccttactctatgatcactcttcatgaaatggcggagacagatgaaggatggttagatgtggtccagagcctaatccgggtgataccactcgaagacccgctgggaccagccgtgattaccctgttgctggacgagtgcccactgcccacgaaggacgcactgcaaaagttaactgaaattctcaatcttaatggcgaagtggcttgtcaggacagcagtcacccggctaaacacaggaacacaagtgctgtccttggttgcctcgctgagaaattagccggacctgcctcaatcggactcctttcgcctggaattctcgaatatttgctacagtgcctcaagcttcaatcccacccaacagtcatgctgtttgcactgatcgcgctcgagaagtttgcgcagacatccgagaataaattgacaatctctgaaagctccatctccgatcgactggtaacactcgaaagctgggcgaatgatccagactaccttaagcggcaggtgggtttctgcgcccaatggtctctcgacaacttgtttctcaaggaggggcggcaactcacctacgaaaaagtaaacctttcatccatccgggccatgctgaatagcaatgatgttagtgaatatctcaagataagcccgcacggcttggaagctcggtgcgacgccagctcatttgagagcgtacgctgtacattctgcgttgacgccggggtctggtactacgaggttactgtggtgacctcaggcgtgatgcagattggttgggcgaccagggattccaaattcctaaatcacgagggatatggcataggggacgacgagtattcatgcgcatacgacggatgcagacagctaatatggtacaacgcaagatccaaacctcatattcacccttgctggaaagaaggcgatacggtcggattcctgctagacctgaatgaaaaacagatgattttttttctcaatgggaaccagctgcctccagaaaaacaggtgttctccagcactgtcagcggttttttcgctgctgcctcatttatgtcataccagcagtgtgaatttaattttggcgcaaagccgttcaagtaccctccaagtatgaagttctctactttcaacgattacgcttttctcactgccgaagagaagattatcctgccgcggcatagacggctggcactcctgaagcaggtcagtatacgggagaattgctgctcattgtgttgcgatgaggtggctgatacgcagctgaagccatgcggccattccgatttgtgcatggattgtgcgcttcaactggagacctgtccgctatgtcggaaagagattgttagcagaattagacagatcagtcacatctcatag

SEQ ID NO: 6010 - DNA, 360 bp, synthetic construct
  misc_feature 1..360: note = source = /note="Description of Artificial Sequence: Synthetic coding sequence"
  source 1..360: mol_type = other DNA
atggcacggcctgggatggaacgctggagagatcgtctcgctctggtaacaggggcaagcgggggcatcggtgcagccgtcgctcgggcccttgtccagcaagggctgaaagtggttggctgtgcaagaacagtgggcaatattgaggagctggctgccgaatgcaagagtgcaggctatcccggaactctcattccgtataggtgcgatctgtccaacgaggaggatatattgagcatgtttagcgcaataagatcccagcattcaggcgtcgatatttgcattaataatgccggacttgccagaccggatacgctgctaagtggatcaacatccggctggaaggatatgtttaattag

SEQ ID NO: 6011 - DNA, 144 bp, synthetic construct
  misc_feature 1..144: note = source = /note="Description of Artificial Sequence: Synthetic coding sequence"
  source 1..144: mol_type = other DNA
atgcaggtctcaactgccgcattggccgtgttactatgtacgatggccctttgtaaccaggtcctttccgccccacaggccggccggtcagttctcacccccgtgcgcagtggttcacgcaacacgagtgttacttggagctag

SEQ ID NO: 6012 - DNA, 159 bp, synthetic construct
  misc_feature 1..159: note = source = /note="Description of Artificial Sequence: Synthetic coding sequence"
  source 1..159: mol_type = other DNA
atgcaggtgtctacagctgccttagctgtcctgctgtgtaccatggccctgtgtaaccaggtactctccgctccactgtcacggccgagggaagcaggacgttctgtactcacacccgtgaggagtgggtccaggaatactagcgtgacctggtcttag

SEQ ID NO: 6013 - DNA, 1272 bp, synthetic construct
  misc_feature 1..1272: note = source = /note="Description of Artificial Sequence: Synthetic coding sequence"
  source 1..1272: mol_type = other DNA
atggaactcgagctgatgccatttaacgtgcttcttcgtaccacattggatctactgcaggagaaggatcccgctcatatctttgcagagccggtgaatttgtccgaggtgccagattacctcgagtttatttctaagcctatggacttctctacaatgaggcgaaagctggagtcccacctgtaccgcacgctcgaagaatttgaggaagattttaacctcattgtaaccaattgtatgaagtacaatgctaaagatacaatctttcacagggcagccgtgcggcttagagacctcggcggggctattttgcggcacgccaggcggcaggcggagaatataggatatgatcctgaacgcggtacccacctgccagaatcacctaaactcgaggacttctaccggttttcctgggaggatgtcgacaacattctcataccagaaaatagggcacacctgtcccctgaagtgcagctgaaagagctcctagagaaactggacctggtatctgccatgcggagctcaggggctcgaacaaggcgggtgagacttctgcggcgggagattaatgccctgcgacagaagctagcacagcccccccccccgcagccaccgagccttaataaaaccgttagcaacggcgagttaccagctggaccacagggcgatgctgcagtcctggaacaggcactacaagaggagccagaagatgacggcgaccgtgatgattctaaactgccacccccccctaccctcgaaccaaccggacccgccccgtccctgtccgagcaagaaagtccaccggagccacctaccctgaagccaatcaatgactctaaaccgccatctcgcttcctgaaaccccggaaagtggaggaggacgagctgctagaaaagagcccactgcagctggggaatgagccactgcagaggctcctgtctgataacggtatcaatcgcctttcccttatggctccggacacacccgccggtactcctctgtccggggtcgggcggcggacctcggtgttatttaaaaaagccaagaatggggttaagctgcagaggagtcctgatcgggtgcttgagaacggcgaagaccatggggtcgccggttcccccgcaagcccagccagtatcgaggaagaaagacactctcgcaaaagaccgaggtctcggtcgtgctcagagagcgagggcgaaagaagcccccagcaagaggaagagacgggcatgactaatggatttggaaagcaccgcaagcgagtatag

SEQ ID NO: 6014 - DNA, 3030 bp, synthetic construct
  misc_feature 1..3030: note = source = /note="Description of Artificial Sequence: Synthetic coding sequence"
  source 1..3030: mol_type = other DNA
atgggttcagggcgggtacctggactctgccttctggtcttgcttgtccatgcaagggcagctcaatatagtaaagccgcccaggacgtggatgagtgcgtagaagggacagacaattgtcacatagacgccatttgtcagaataccccccggtcatacaagtgtatctgtaaaagcggatatactggcgacgggaagcactgtaaggacgtcgacgaatgtgaaagagaggataatgctgggtgtgtgcatgactgcgtgaacataccgggcaattatcgctgcacctgctatgacggcttccatctggcacatgacggacataactgtcttgatgtggacgaatgtgcggagggcaacggtggctgtcaacagtcatgtgtgaacatgatgggctcttatgagtgtcactgccgcgaggggttcttcctttccgataaccaacatacatgtatccagcgccccgaggaggggatgaattgcatgaacaaaaatcatgggtgcgcccatatctgcagagagacacccaagggtggaattgcttgtgagtgtaggccaggattcgaacttacaaagaatcagcgcgactgcaaactgacatgtaattatgggaacggcggttgtcagcacacttgtgatgacactgaacagggcccccgttgcgggtgtcacattaagttcgtgctgcatacagatggcaaaacctgcatcggagaacggcgcttagagcagcacatcccaacgcaggcagtgagcaacgaaacgtgtgccgtgaacaacggcggttgtgatagcaagtgccacgacgcggccaccggtgtgcattgtacgtgtcccgtggggtttatgctccagccagatcggaagacatgcaaggacatagacgagtgtaggctcaacaacggcggttgcgatcatatttgccgtaataccgtaggcagtttcgaatgcagctgtaagaaggggtataagctcctcattaacgaaaggaattgccaggacatcgatgaatgctcttttgacaggacatgtgatcatatttgcgtgaatacacccgggagtttccagtgtctgtgccaccggggatatctactgtacggcatcacgcactgcggtgacgtggacgaatgtagcataaaccggggaggctgtagattcggctgtatcaacactccaggcagctatcagtgcacctgcccagctgggcaggggcgtctgcactggaatgggaaagactgcacagaacctctaaaatgccaagggagcccaggcgcctctaaagctatgctttcatgtaatagatctggcaagaaggacacatgcgcactgacttgtccttcccgagctagattcctgcctgagtccgaaaacgggttcactgtttcctgtgggaccccttccccacgggctgcccccgcgcgggctgggcacaacggcaattccaccaatagcaaccattgtcacgaagctgcagtgttatccattaaacaacgcgcatccttcaaaattaaagacgccaagtgccggctgcacctaagaaacaaaggaaagacggaggaggcaggtaggatcactggcccgggcggcgccccttgcagcgagtgccaggtgacattcattcacctgaagtgcgactcaagccggaaagggaaagggcgccgagcccgcacaccccccgggaaggaagtgactcgtctgactctcgaattagaggcggaggtacgggccgaagagacaactgcatcttgtggtctcccgtgcctacggcaacggatggagcggcgcctgaaggggagtctcaaaatgctgagaaagtcgatcaatcaggatcgctttctcctcaggctcgcaggtctggactatgagctggcacataagcctgggttggtggctggcgaaagagctgaacctatggagagctgtaggcccgggcagcatcgggccgggacaaaatgcgtaagctgtccgcagggtacctactatcacggacagaccgaacagtgtgtaccgtgtcccgcggggacgttccaggagcgcgaagggcagctgagctgtgacctatgccccggctctgacgctcatggccctctgggtgccacaaacgtcacaacgtgcgctggccagtgtccaccaggacagcattctgtagatggcttcaagccttgtcagccctgccctcgcgggacatatcaacctgaagccgggaggaccctgtgctttccatgtggaggaggactcaccacaaagcatgaaggcgcaatcagttttcaggattgtgacacaaaagtccaatgctctccgggccactattataatacttcaatccatcgatgtattaggtgcgccatgggaagttatcaaccagacttccggcagaatttctgctcccgctgtcccggcaacacttccacggactttgacggtagcactagcgtcgcccagtgtaagaacaggcagtgtggtggggagcttggtgaatttacaggctatattgaaagcccaaattaccctggcaactatcccgctggcgtggagtgcatctggaatatcaacccaccccccaagcgcaaaatactgattgtggtgcccgaaattttcttgccatccgaggacgaatgtggcgatgtccttgtgatgcggaaaaactcatctccctcctccatcactacatatgaaacctgccaaacttatgagagacctattgcgttcacagcccgcagccgcaagctgtggatcaatttcaaaacatctgaggcaaacagtgcccgcggcttccagattccctatgtcacctacgacgaggattacgaacagctggttgaggacatcgtgagggatggtaggctatacgcctccgaaaatcatcaagaaatcctaaaggataagaagctaattaaagccttcttcgaggtgctagctcacccccagaactacttcaagtatactgaaaaacacaaggaaatgcttcctaagagctttataaagttgttaaggtcgaaggtgagctcctttcttcgcccatacaagtag

SEQ ID NO: 6015 - DNA, 984 bp, synthetic construct
  misc_feature 1..984: note = source = /note="Description of Artificial Sequence: Synthetic coding sequence"
  source 1..984: mol_type = other DNA
atgaccgctttggaacttgcaaggaggggggccagggtggtactagcgtgcagatcccaagagcgaggagaagccgcggcgttcgatctgagacaggaaagcggtaacaatgaagtaatctttatggccctcgacctggcttctctggcctcggtgagggcttttgccacggccttcctgtctagtgaacctagactcgacattttgattcacaacgctggcatctcctcttgcggtcggacaagggaggcctttaacctcctcctccgcgtgaatcacattggcccatttctcttgacacatctcctgctaccatgtctgaaggcttgtgcaccctcaagggtggtggtcgtcgcctccgcagctcattgccgcgggcgtctggattttaaacgcctagataggccagtggtgggctggcgccaggagctgcgtgcttatgccgacacaaagctcgccaatgtgctgtttgcacgggagctcgcaaaccaattagaagctacaggcgtcacatgctacgccgctcatcctggtccggtgaacagtgaattgttcctgcgccacgtgcccggctggcttcggcccttactgagacccctcgcctggctggtcctgagggcaccacgcggaggcgcgcagacccccctttactgtgccctgcaggaaggaattgagccactgagcggcaggtatttcgccaattgccatgtcgaggaagtgccacctgccgcccgagatgatcgggctgcccaccggctgtgggaagcttcaaaaagacttgctgggctcggccctggtgaggacgccgagcctgatgaggacccacagagcgaagattctgaagcccctagcagcctcagtacccctcacccggaggaacctaccgtgagccagccgtatccatccccacagagctcacccgacctgagcaagatgacccataggattcaggcaaaggttgagccagagatccagctttcatag

SEQ ID NO: 6016 - DNA, 1320 bp, synthetic construct
  misc_feature 1..1320: note = source = /note="Description of Artificial Sequence: Synthetic coding sequence"
  source 1..1320: mol_type = other DNA
atgcccgcaattgcggtgctggcagcagccgctgctgcctggtgctttctccaggtggaaagtagacacttggacgctcttgcggggggcgcaggcccgaaccacggaaattttttggacaatgaccagtggctctcaaccgtgagccagtacgaccgggataagtattggaataggttcagggatgacgactactttcgaaactggaaccccaataaacccttcgatcaggcactggatccatcaaaagacccttgcttgaaggtcaagtgcagccctcacaaagtgtgcgtgactcaggactaccaaacagcactctgtgtttcacggaagcacctacttcctcgccagaagaaaggcaacgtggcacagaaacactgggtgggaccaagtaatctcgttaagtgcaaaccttgtcctgtggctcagagcgcaatggtgtgcggcagtgacggtcatagctacacctctaagtgtaaattagaatttcacgcctgtagtaccggaaagagtctcgcgaccctctgcgatggcccttgtccctgcttaccggagccagagcctcccaagcacaaggccgaaagatccgcatgtaccgacaaggagcttaggaacctcgcttcccgattaaaggattggttcggcgcattacacgaagatgccaatcgcgtgatcaaacctacgtcttctaatactgcacagggcagattcgacacctcgatcttaccaatttgtaaggattctctgggctggatgtttaataaactggacatgaattatgacctgctattagatccttccgagattaatgctatttatcttgacaaatatgagccatgcatcaagccgctgtttaattcctgtgattccttcaaggacggcaagctctccaacaatgagtggtgctattgttttcaaaaacctggggggttgccctgccagaatgagatgaatagaatccagaagctaagtaagggaaagtctctactgggtgccttcatccctcgttgtaacgaggagggttactacaaggccactcagtgccatggatccaccggtcagtgttggtgcgtggataaatacggcaacgagctggctgggtcacgcaagcagggcgccgttagctgcgaggaagaacaagagacttcaggggattttggcagtggaggttcagtcgtgttattggatgatttggaatacgagcgagagctggggcccaaggacaaagagggaaagctccgggtgcacactagagccgtcacagaggatgacgaagacgaggatgatgacaaagaggatgaggtcggttacatctggtag

SEQ ID NO: 6017 - DNA, 3687 bp, synthetic construct
  misc_feature 1..3687: note = source = /note="Description of Artificial Sequence: Synthetic coding sequence"
  source 1..3687: mol_type = other DNA
atgaaaggtgcgagacttttcgtcctgctctccagcctctggagcggcggtattggcttaaacaacagtaaacattcatggaccatacccgaagacggtaattctcagaaaacaatgccgtctgcctcagtgcctcctaataaaattcagtctctccaaatcctgcctaccacgcgggtcatgtctgccgaaatcgccaccactcccgaggcacgcacctcagaggactcactgcttaaaagcaccctcccaccttccgagacgtcagccccagccgaaggagttcgtaaccagaccttaaccagcactgagaaagctgaaggagtcgtcaagttgcagaacttgactctacctacaaatgcatccatcaagttcaacccaggcgcggaatccgtggtgttgtctaacagcactttgaaattcctgcagagctttgctcgcaagtcaaacgagcaggcaacttccctcaatacagtgggcggcactggagggatcgggggcgtaggagggacaggtggagtgggcaacagggcaccacgcgaaacatacctgagccgaggtgactccagtagctcccaacgcacagactatcagaaatccaattttgaaactaccaggggtaaaaactggtgtgcctatgtgcacacacgtcttagcccaacagtcatccttgataaccaggtcacttacgtgcctggcgggaaagggccgtgcgggtggacaggcggaagttgtcctcagagatctcagaaaatcagcaatccagtgtataggatgcagcataagatcgtgacttccctggattggcggtgctgccccgggtattcaggccccaagtgtcagctcagggctcaggagcagcaaagcctgatccacaccaaccaggctgaatcccataccgctgtgggccgaggtgtggctgaacaacagcaacagcaaggatgcggagacccggaggtcatgcagaaaatgaccgaccaggtgaattaccaggcgatgaagctcacactgctccagaagaaaatcgataatatctcactgacagtaaatgacgtcagaaatacttactcatctctcgagggaaaggtgagtgaggacaaatcccgggagtttcagtcgctcctgaaggggctgaagagtaagagcattaacgttcttatcagggatattgtgagggagcaattcaagatttttcagaatgatatgcaggaaacggtcgcacagctgtttaaaactgtgagctccttgtccgaggatcttgaaagcacaaggcaaatcattcagaaagtcaacgagtccgtcgtatcaatcgccgcccaacagaagttcgttctggtccaggagaacaggccgaccctgacggacattgtcgagctgcgtaatcacatcgtaaatgtcagacaggaaatgacactaacgtgcgagaagccaattaaggagctggaggtcaaacagacccacctagaaggggctttggaacaggaacattcccgctcaatactctactacgagagtctgaacaaaaccctctccaaactgaaggaagtccacgagcaacttctctctactgagcaggtcagcgatcaaaagaatgctccggcagccgaatcggtgtctaacaacgttactgagtatatgagcacactccatgagaacataaagaagcaatccttaatgatgctgcagatgtttgaggatctccatattcaagagagtaagatcaacaacctgactgtaagtttagagatggagaaggaatcgctgaggggtgaatgtgaagatatgctgtctaagtgtagaaacgactttaaattccaactgaaggacaccgaagagaaccttcacgtgctcaaccaaactttagcagaagttttgtttccaatggacaataaaatggataagatgagtgagcaactgaacgatctaacatacgacatggagatactgcagcctctcctggaacagggcgcctcactgagacaaacaatgacgtacgaacagcccaaagaggccattgtcatccgcaagaaaatcgagaacttgacatccgcggtaaattctctcaatttcatcatcaaggagctgaccaaaagacataacctgcttcgaaacgaggtgcaaggccgcgacgatgccctggaacgaagaattaatgagtacgccctagagatggaagatggcttgaacaaaacaatgacaatcataaataatgctattgactttatacaggataactacgccttgaaagaaaccctgtctaccatcaaggataattccgagattcatcataagtgtacctctgatatggagacaatattaaccttcatacctcaattccaccggctgaatgattctatccagaccctggtaaacgacaaccagcggtacaacttcgttctgcaagtggcgaaaactctggctggcattccgcgggacgaaaagctgaatcagtcaaatttccagaagatgtatcaaatgttcaatgagacaacaagccaggtccgtaagtatcaacagaacatgtcccacctcgaagagaaactgctgctgacaactaagatttctaagaattttgaaacacggcttcaagatatagaatcaaaggtgacacaaacactgatcccatactatatcagcgtaaagaaggggtcagtggtgacaaatgaacgagaccaggccctgcagctgcaggtactgaactctaggtttaaagcactagaggcaaagagcatccatctatctatcaacttcttctcactgaacaagaccctgcacgaggttcttaccatgtgccacaacgcctcgacttcggtgagcgaactcaatgccacaatacctaagtggatcaagcactccttgcccgacatccaactcctgcaaaagggattaacagaatttgttgagcctatcatccagatcaagacgcaagctgctctgtccaatctcacctgctgtatcgaccgcagtctgccaggatcattggccaacgtggttaaaagtcagaaacaggtgaagtcactccctaagaagataaacgctctcaagaagcctacggtaaacttaactacagtcctgataggccggacccagcggaacactgataacatcatttatcctgaggagtactcatcctgttccagacacccctgtcagaatgggggtacgtgtattaatggacggaccagctttacttgcgcgtgtcggcaccccttcactggtgacaactgcacaatcaaattggtcgaagagaacgccctggcacccgacttctcaaagggcagttacagatacgcccctatggtggcatttttcgccagtcacacttacggtatgaccatccctggtccaatcttatttaataacctcgatgtgaattacggcgcttcttatacccctcggactgggaagtttaggataccttaccttggggtgtacgtgttcaaatataccatagagtcattctcagcgcatatctccgggttcctggtcgtggacggtattgacaagctggccttcgagtccgagaacatcaatagcgaaattcattgtgatcgggttcttacgggggacgccctcctagagctgaattatgggcaggaggtttggttgcgcctggcgaaaggaaccatccccgccaagtttcctcctgtgacaacattcagtggttaccttctgtatcgaacctag

SEQ ID NO: 6018 - DNA, 1596 bp, synthetic construct
  misc_feature 1..1596: note = source = /note="Description of Artificial Sequence: Synthetic coding sequence"
  source 1..1596: mol_type = other DNA
atgaaaggagcccggttgtttgtgctgctatcatccctctggtccgggggaattggccttaacaactccaaacattcctggaccatacctgaagatgggaattcccagaaaacgatgccctccgcgtcagtgccacccaataaaatccaatctctgcaaattctccccacaactcgggtgatgagcgctgagattgccactacccctgagaaggctgagggtgtagtgaagctgcaaaacttgacactgccgactaatgccagtataaagttcaatcccggtgctgagtctgtggtgctctccaactcgactctgaagttcctgcagagtttcgcacgaaaaagtaacgagcaagcaacctcgctcaatactgtgggcggaactggggggattggaggggtcggtgggaccggaggcgttggtaaccgagcaccccgtgagacttacctatccaggggagactcttctagctcccaacgtacagactatcagaaaagcaacttcgaaactactcgcggaaagaattggtgcgcatatgtacacactagattgtcacccaccgtcatcctggataatcaggtgacttacgtaccaggaggaaagggaccttgtgggtggaccgggggcagttgtcctcagcggtcccaaaagattagcaatcccgtgtataggatgcagcataagatcgtgacctctctggactggcggtgctgccccggctacagcgggcccaagtgccagttgagggcccaggaacagcagtctcttatccataccaaccaggctgagagccataccgcggtgggccgaggtgtcgcagagcagcagcagcagcaaggctgtggggaccctgaggtgatgcagaagatgactgaccaagtgaactatcaggctatgaagctgactctcctccagaagaagatagacaatattagtctcaccgttaacgatgtcagaaacacctactccagtctagaaggcaaagtctccgaagataagtcacgggaattccagagtcttcttaaggaggagtacagtagctgttccaggcacccctgtcaaaatggtggtacctgcataaacggacgtaccagttttacctgtgcctgtagacatccttttacaggggacaactgtacgatcaagttggttgaggagaatgccctggcacccgactttagcaagggctcatacaggtacgcccctatggtggctttcttcgccagtcacacctatggtatgacaatcccggggcctattctgttcaacaacctggacgtgaattacggggcatcttatacccctcgaactgggaagtttaggataccctacttaggtgtgtatgtgttcaagtatacaatcgaatccttctccgcccatatttctgggttcctcgttgtcgacggaattgacaagttggcttttgaaagcgagaatattaacagcgagatccattgtgatagggtgctcacaggcgacgcactgcttgaactgaattatggtcaggaggtctggctacgccttgcaaagggcaccattcctgcgaagttccctccagtgacgaccttctcgggttatctgctgtatagaacctag

SEQ ID NO: 6019 - DNA, 942 bp, synthetic construct
  misc_feature 1..942: note = source = /note="Description of Artificial Sequence: Synthetic coding sequence"
  source 1..942: mol_type = other DNA
atgtccgatttactcctcttaggattgatcgggggcttgaccctgttgctgctgctgacactcctggcgtttgctggctactctggattgcttgccggtgtggaagtctctgcgggaagcccgcctattcggaacgtcactgttgcttataagtttcatatgggactgtacggggagactggtcgcctgtttacagagtcttgttccatcagtcccaaactcaggtcaatcgctgtctactacgataaccctcacatggtgcctccagacaagtgtagatgtgctgtaggcagcatcttatccgaaggggaagaaagtccctcaccggaactcattgatttgtaccagaagtttggattcaaggtattcagcttccccgcaccttctcacgtggtgactgcaactttcccctatacgacaatcctgtccatatggctggcaactcggcgggtgcacccggctctcgacacatacattaaagaacggaagctttgtgcataccctaggctcgaaatctatcaggaggatcaaatacacttcatgtgcccactggcgagacagggggatttttacgtccctgaaatgaaagagacagagtggaaatggcgggggctggttgaggctattgacacacaggtcgatggaactggcgcagacaccatgagtgatacctcaagcgtgagcctggaggtgtctccggggagtcgagagacctccgccgcaacactctcacccggagcatcctctagaggctgggacgatggggacaccagatctgaacattcttattctgagagcggcgcctctgggtcctcttttgaagagctggacttggaaggtgagggaccgctgggggagtctcgtcttgatccggggaccgagcccctcggaaccactaagtggttgtgggagccaaccgctcctgagaagggaaaggagtag

SEQ ID NO: 6020 - DNA, 834 bp, synthetic construct
  misc_feature 1..834: note = source = /note="Description of Artificial Sequence: Synthetic coding sequence"
  source 1..834: mol_type = other DNA
atgtgcactgtcgtagacccccgaattgttcgccgatatcttctcagacgtcagctgggccaaggagcctacggcatagtgtggaaagcagtcgatcgtaggacaggagaggtcgtcgccatcaaaaaaatctttgacgccttcagagacaaaaccgatgcccagagaacttttagagaaatcaccctcctgcaggagttcggagatcaccccaacatcatcagcttacttgatgttatcagagcagagaatgaccgggatatctatctagtgtttgagttcatggggtgcccgccatctccccctccaccaaccgctgtgaggacactctctgccgacactgatttgaacgcagtcataaggaaagggggactgctccaggatgtacatgtacgctcaatcttctaccaactgcttcgagccacccgtttcctgcatagcggtcacgtggtgcaccgcgatcaaaaaccatcaaacgtgttgctggatgctaactgcaccgtgaagctgtgtgatttcggattagccagaagcttaggcgatctgccagagggcccagaagatcaggcggtcaccgaatacgtcgccactcgctggtatcgcgcacccgaggtgctgctgtccagccatcggtacacactgggcgtggacatgtggtcacttggctgtatactcggggaaatgctgcgaggcagacccctgttcccagggactagtacattgcatcagcttgagctcattctggaaacaatacctccacccagcgaggaagatctgctggccttgggtagcggctgcagggccagcgtgctccatcagctcgggtcacggtag

SEQ ID NO: 6021 - DNA, 765 bp, synthetic construct
  misc_feature 1..765: note = source = /note="Description of Artificial Sequence: Synthetic coding sequence"
  source 1..765: mol_type = other DNA
atgtgcacggttgtcgacccacgcatcgtgcgtcgctatcttcttagacggcagctaggacagggtgcctacggtattgtgtggaaggcagtggatcgacggacaggcgaagttgtggccattaaaaagatattcgatgccttccgtgacaagaccgatgcgcagagaacattccgggagattactttgctgcaggaattcggggaccacccaaatattatcagcttactcgacgttattagggcagagaatgatagggacatttacttggtgtttgaattcatggacactgacctgaacgcagtcatcaggaagggagggctcctgcaggacgtgcacgtgcgctccattttttatcagctcctgagggcgaccagattcttgcattcagggcacgtggtacacagagaccaaaagccctccaatgtgctgttagacgcaaactgtacagtgaagctgtgcgattttggtctggctcggtcactgggagatctcccagaggggcccgaggaccaggccgttaccgaatatgttgctacacgctggtatcgcgccccggaagtgcttctttcttctcacagatacactcttggtgtggacatgtggagcctgggctgcattttgggcgagatgcttcgcggtagacctctatttccgggtacttctacgttgcaccaactcgaactgatccttgaaacaatcccacccccctcagaggaaggagctcaaacggcctgtcgaagtggaactggagctagcacctag

SEQ ID NO: 6022 - DNA, 474 bp, synthetic construct
  misc_feature 1..474: note = source = /note="Description of Artificial Sequence: Synthetic coding sequence"
  source 1..474: mol_type = other DNA
atggcccttctcttatgtctcgtgtgtttgacagccgccctggcacacggttgtctacactgtcattcgaacttctctaagaagtttagcttttatcggcatcacgtcaattttaagagctggtgggtgggggacattcctgtcagcggcgctcttctgaccgattggtccgatgacacgatgaaggaacttcaccttgccattcccgccaaaatcaccagggaaaagctcgatcaggtggccactgccgtgtaccaaatgatggaccagttataccagggcaaaatgtactttcctggctattttccaaatgagttaagaaatatctttcgtgaacaggtgcacctgattcagaatgctatcattgaacgtcatctcgcgccaggctcctggggaggggggcaattgagtagggaaggtccctccttggcccccgaagggagcatgccatcacctcgcggagacctcccgtag

SEQ ID NO: 6023 - DNA, 699 bp, synthetic construct
  misc_feature 1..699: note = source = /note="Description of Artificial Sequence: Synthetic coding sequence"
  source 1..699: mol_type = other DNA
atggccctgctactctgtctcgtgtgcctgaccgcagccctggcccacggctgcctccactgccactctaattttagcaaaaaatttagcttctaccgtcaccacgtgaacttcaaaagctggtgggtgggagacatccctgtgtccggcgcgctgctgaccgactggagtgatgatacgatgaaggaattacaccttgcaatccctgccaagatcactcgggaaaagttagaccaagttgctaccgctgtttatcagatgatggaccagctgtatcaaggtaagatgtatttccctggctactttccaaacgagttgagaaacatcttcagggagcaggttcacctgatccagaacgccatcattgaatccaggatcgattgccaacaccgttgcggtatctttcagtacgaaacgatctcttgtaacaattgtacagattcccatgttgcttgttttgggtataactgtgagtcctctgcccaatggaagtctgccgttcagggtctgctcaactacattaacaattggcataagcaggacacctcaatgaggcctaggagctcagctttctcctggcctggcacccacagagctactcctgcttttcttgtttctcctgctttgaggtgtctggaacctcctcacctggcgaacctgactcttgaagacgccgctgaatgtcttaagcaacactag

SEQ ID NO: 6024 - DNA, 396 bp, synthetic construct
  misc_feature 1..396: note = source = /note="Description of Artificial Sequence: Synthetic coding sequence"
  source 1..396: mol_type = other DNA
atgggcggcgacggacgttacgtgcttaacggacactgggtggtaagtcctcccgggacttacgaagctgctggcactcacgtggtgtacacacgggataccggcccacaggagaccctgcaagccgcgggcccgaccagccatgacctgctgctgcaggtcctgctccaggaacccaatccagggatcgagttcgagttctggttacctcgcgagagatactccccttttcaggcgagagtgcaggcattgggttggcctctgcgccagcctcaacccagaggggtggagccgcagccccccgcggcgcccgccgtcacaccagctcagacacctactctcgctcccggaccatccgccggccctccgccaccaggaccaggggaccccttatag

SEQ ID NO: 6025 - DNA, 447 bp, synthetic construct
  misc_feature 1..447: note = source = /note="Description of Artificial Sequence: Synthetic coding sequence"
  source 1..447: mol_type = other DNA
atggctcggatcccaaccgccgccctgggttgcatcagccttctttgtcttcagctccccggctcactgtcaagatcgctcggcggtgatccaagaccagtcaagccccgggaacccccagccagatccccctcatcatcccttcagcctcgccatccagcccctaggcccgtggtgtggaagcttcacagggccttgcaagcccaaaggggcgcaggcctggccccagtgatgggacaacccctacgcgatggcggcagacaacatagcggcccaaggagacactctgggcctaggcggactcaggcacagttgctccgtgtgggatgcgttttgggtacttgccaggttcaaaatctgtcccacaggctctggcagctgatgggacccgctggacggcaggattcagcacctgtcgatcctagctcccctcactcttacggctag

SEQ ID NO: 6026 - DNA, 447 bp, synthetic construct
  misc_feature 1..447: note = source = /note="Description of Artificial Sequence: Synthetic coding sequence"
  source 1..447: mol_type = other DNA
atggcacggattccaactgcagccctgggatgtatctctctgctgtgtctgcagttgcctggaagtctcagcagatctctgggcggggaccccaggcctgtaaagccccgggagccacctgccagaagcccctcatcatcgctgcaaccacggcacccagccccccgccccgtggtgtggaaattgcatagggctctgcaggcccagagaggggcgggactcgcccccgtgatgggacagccactacgcgacgggggccgccaacattccgggccacggcggcactctggaccccgcagaactcaggcccagttgctacgcgttggatgcgtgctggggacctgccaggttcaaaacctgtctcatcggctttggcagttgatggggcctgctggccgacaggacagtgcacctgtggaccccagctctcctcattcttacgggtag

SEQ ID NO: 6027 - DNA, 537 bp, synthetic construct
  misc_feature 1..537: note = source = /note="Description of Artificial Sequence: Synthetic coding sequence"
  source 1..537: mol_type = other DNA
atggaccgcgccgctcgctgttcgggggcgtcttcgcttcccttacttttggccttagctctcggactggtcatacttcactgtgtggtggccgacggaaattccacaagaagcccggaaaccaacggccttctttgcggtgacccagaggaaaattgcgcggccaccaccacacaatcaaaacgaaaaggccacttttcccgatgccctaagcagtataagcactattgtattaaaggtcggtgccgcttcgtcgtggccgagcagacaccttcttgtgtttgcgatgaggggtacatcggcgctcggtgtgaaagggtggacttgttctatctgcgcggcgacagaggacagattttggtgatctgcctcatagccgtaatggtggtgttcatcattcttgtaattggcgtctgtacatgttgtcaccctctgcgcaagcgccggaagaggaaaaagaaagaggaagagatggagacgttgggaaaggacattacaccaatcaacgaggacatcgaggaaacaaacatcgcttag

SEQ ID NO: 6028 - DNA, 1251 bp, synthetic construct
  misc_feature 1..1251: note = source = /note="Description of Artificial Sequence: Synthetic coding sequence"
  source 1..1251: mol_type = other DNA
atgtccattagccttagctcactcattctgctgcccatctggatcaatatggcgcagattcagcagggaggcccagatgagaaggagaagacaaccgcacttaaagatctgctctcccgcatcgacctggacgagctcatgaagaaggacgaaccaccgctcgactttcccgacacccttgaaggcttcgagtacgcttttaatgaaaaagggcagctgagacatattaagacgggagagcccttcgttttcaactacagggaggaccttcatcgttggaaccaaaaacggtatgaagccctgggcgaaattatcaccaaatacgtgtatgaactgttggagaaagattgcaacctgaagaaggtgagtatcccggtggacgcgacggaatccgagccgaagtctttcatttttatgagcgaggatgccctgacaaacccacaaaaattgatggtgctgattcacggctctggggtcgttcgggccggccagtgggctcgcaggctgattattaacgaggatctagattccggaacccagattccttttataaagagggcagtggcagagggttacggggtgatcgttctgaaccctaatgaaaattacatagaagtggaaaagcctaagatccacgtgcagtccagttctgattcctctgacgaaccagctgaaaagcgcgagcggaaagacaaagtaagcaaggaaactaaaaagaggcgggacttttatgagaaatataggaatccacagagagagaaggagatgatgcagctctatattcgggaaaatggctcacccgaagaacacgccatttacgtttgggaccacttcattgcccaggccgcggcggagaatgttttctttgtcgcgcatagctacgggggactggccttcgttgagctcatgattcagcgggaggccgacgtgaaaaataaggtaaccgctgtggcactgactgatagcgtgcacaacgtgtggcatcaggaggctggcaagacaatcagggagtggatgcgagagaactgttgtaattgggtgtcatcaagcgagcccctcgacacgtctgtggaaagcatgctgccagattgccctcgagtgagcgccggaaccgataggcacgaactcacatcttggaagagcttccccagtatcttcaaatttttcacagaggcatccgaagctaaaaccagctctttaaaaccagcggtgactagacgaagccatcggattaagcacgaggaactgtag

SEQ ID NO: 6029 - DNA, 840 bp, synthetic construct
  misc_feature 1..840: note = source = /note="Description of Artificial Sequence: Synthetic coding sequence"
  source 1..840: mol_type = other DNA
atgaagataatcatacttttgggatttcttggagccactttgtccgccccattgattccccagaggcttatgtccgcctctaattcaaatgaactactgcttaatctgaacaatgggcaacttctgcctctgcaactgcagggcccactgaattcttggatccctccgttctccggcattctccaacagcagcagcaggcccagattcctggcctttcccagttttccctgtctgcactggatcagttcgcaggattgctaccaaaccaaattcccctgacaggcgaggcgtcgttcgcgcagggcgcccaggctgggcaggtggaccccctgcagctccagacccccccccagactcagcccggtcccagccacgtgatgccctacgtctttagtttcaagatgccgcaggaacagggtcaaatgtttcagtactaccctgtgtacatggttcttccatgggaacagccacagcagactgttcctagatcaccgcagcaaacccgccaacagcaatacgaggaacagatcccattttacgcacaatttggttacatcccacagctggccgaaccagccatctcaggcgggcagcagcagctggctttcgatcctcagttgggcacagcgcctgaaatagcggtgatgtcaactggggaggagattccatacctacagaaagaagctattaacttccgacacgatagtgctggcgtgtttatgccatccacctcaccgaaaccatccactacgaatgtatttacgagcgccgtcgaccagacaatcacacccgagttgccggaggagaaggataagaccgacagcctccgggaaccatag

SEQ ID NO: 6030 - DNA, 444 bp, synthetic construct
  misc_feature 1..444: note = source = /note="Description of Artificial Sequence: Synthetic coding sequence"
  source 1..444: mol_type = other DNA
atgggcccagaggcactctcctcgctcctccttctactgctggtcgctagtggggacgcggatatgaaggggcattttgatcctgctaagtgtcgttatgctttgggcatgcaggaccggactattcccgacagcgacattagcgcctcttcctcctggagcgactctactgccgctcggcactcgaggcttgagtcgtctgatggagacggcgcttggtgtcccgccgggagcgtcttccccaaagaagaggaatacctgcaagtggacttacagaggctgcacctggtagcattggtaggcactcagggacggcacgctggaggccttggaaaggaattcagtcggagctatcgactgcgctacagtcgcgacggaagaagatggatggggtggaaggatcgctggggtcaagaagtgatctccggaaatgaggacccctag

SEQ ID NO: 6031 - DNA, 618 bp, synthetic construct
  misc_feature 1..618: note = source = /note="Description of Artificial Sequence: Synthetic coding sequence"
  source 1..618: mol_type = other DNA
atgggcggacccgttagagagcctgccctttccgtggccctttggctgtcatggggagccgcactcggcgccgtggcttgtgctatggctttgttgacgcagcagacagagcttcagtctctgcgtcgcgaggtgagtcggctgcaggggaccgggggaccctctcagaatggcgaagggtacccctggcaatctctgccggagcagcactccgttcttcatttggttccaataaacgctaccagtaaggacgattcagacgtaaccgaggtgatgtggcagcctgcattgaggagaggtcgaggcctccaggcccagggctatggagtcagaattcaagatgcaggggtctatctgctctattcacaggtactcttccaagacgtaacttttacaatgggccaggtagtgagcagagagggtcagggaagacaagagactctgttcaggtgtatccggagcatgcccagccaccctgacagagcgtataattcctgttactctgccggcgttttccacctgcaccagggcgacatcctttccgtgatcattccaagggcgagggctaaactgaatttgtcccctcatggtaccttcctgggatttgtgaaactctag

SEQ ID NO: 6032 - DNA, 744 bp, synthetic construct
  misc_feature 1..744: note = source = /note="Description of Artificial Sequence: Synthetic coding sequence"
  source 1..744: mol_type = other DNA
atgccagctagctccccgtttctgctcgctcccaagggaccaccagggaacatgggggggccagtcagggaacctgcactctccgttgctctctggctgagctggggcgcagctttgggcgctgtcgcctgcgcgatggcactgttgacccagcagaccgaactgcagtcattgagacgggaggtatctcgtcttcagggcaccggggggccctcccagaatggggagggctatccctggcagtctctgcctgaacaaagtagcgatgccctggaggcatgggagaacggggaaaggtctcgcaagcggagggctgtactgactcagaagcagaagaagcaacactccgtactacatctggtgcccatcaacgccacttcgaaagatgactccgatgtaacagaagttatgtggcagccagcactgaggcgcggaagagggctccaggcacagggatacggagtacgcatacaagatgcaggagtgtacctgctgtattctcaagtcctgttccaggacgtgacctttacaatgggacaggtggttagtcgcgaagggcaggggcgacaagagaccctgttcaggtgcatccgctccatgccgtcccacccagatagggcttataattcatgttattccgcaggcgtattccacctgcaccagggcgatattctgtcggtcattattccaagagccagggccaaactaaacctgtccccccacggaacattcctgggattgtag

SEQ ID NO: 6033 - DNA, 39 bp, synthetic construct
  misc_feature 1..39: note = source = /note="Description of Artificial Sequence: Synthetic coding sequence"
  source 1..39: mol_type = other DNA
atgggcaagtccgagtcactccagtcgcttcagcgatag

SEQ ID NO: 6034 - DNA, 4266 bp, synthetic construct
  misc_feature 1..4266: note = source = /note="Description of Artificial Sequence: Synthetic coding sequence"
  source 1..4266: mol_type = other DNA
atgatgctgccccaaaacagctggcatatcgatttcggacggtgttgttgtcatcagaatctgttttccgcagtggtgacttgtatcctgctgttaaactcctgcttcctaatcagttcctttaacggaacagaccttgagctcaggcttgttaacggagacgggccgtgtagtggtacagtagaagtgaagttccagggacagtggggtactgtgtgcgacgacggatggaatacaaccgcctctacagttgtgtgcaaacagttgggatgtcctttttcgttcgcgatgttcaggttcggacaggcggtaacacggcacggtaagatctggctcgatgatgtgagctgctatggcaacgagtctgcgctgtgggaatgccagcaccgagagtggggttcacataattgctaccacggtgaagacgtcggggtgaactgctacggcgaggccaatctggggctgaggctggttgacggaaacaactcctgttccgggagggttgaagtcaagttccaggaacggtggggaacgatctgtgatgatgggtggaatcttaatactgctgctgtagtatgtcgccagctgggctgtcctagttcctttatttctagcggagtagttaactcacctgccgtcctgagacctatctggctagacgacattctttgccagggcaatgagctggctctctggaactgccggcaccgaggctggggtaatcatgactgctcccataacgaggatgtgacgctaacctgctacgactcgtccgatcttgagttgagactagttggaggtacaaacaggtgcatgggaagagtcgagctcaagatccagggcagatggggtaccgtctgtcaccataagtggaataacgctgctgccgacgtcgtgtgtaagcagcttggctgcggcacggccctccacttcgccggtctgccacatttgcagagtggctctgacgtagtgtggttggacggtgtcagctgcagcgggaatgagtcgtttctttgggactgtaggcactcaggcacggtgaatttcgattgcttgcatcagaacgacgtgagtgtcatctgcagcgatggggctgatctagaactacgcctcgccgacgggagcaacaattgctctggacgagttgaggtgcgaattcatgagcagtggtggacaatctgtgaccagaattggaagaatgagcaggcattagtcgtttgcaaacagcttggctgtccattctccgtgtttggaagtaggcgggcaaaaccttccaatgaggcccgcgatatatggattaatagtataagttgtactggcaacgagtccgcattatgggactgtacctacgatggcaaggcaaagcgcacgtgcttcagaaggtccgatgccggcgttatttgcagcgataaagctgacctcgaccttcgcttggtcggcgcacactcaccatgctacggtcggctcgaagtgaagtatcagggggaatggggcactgtgtgtcatgatcgttggagcactaggaacgcagctgtcgtctgtaagcaactggggtgtggcaaaccactacacgtattcggtatgacctatttcaaggaagctagcggacctatttggctggacgacgtctcatgtattggaaacgagtccaacatctgggactgcgagcacagcggttggggaaagcacaactgcgtgcatagagaagatgtgatcgtaacctgcagcggcgatgctacgtggggattgcgtttagtcgggggctccaacagatgcagcggaaggctggaagtgtattttcagggacgttgggggaccgtgtgtgacgatggatggaattccaaagccgcagctgtggtttgttcacagctggattgcccaagctctataatcggaatgggtttggggaacgcttcaacggggtatggcaagatttggttggacgatgtttcatgtgatggtgacgagtcagatctgtggagctgtagaaattccggatggggtaataatgactgtagccactctgaagacgtcggggtgatatgttctgatgctagcgatatggaactccgactcgtgggtggaagttcccggtgcgccggcaaagtagaggtcaacgtccagggtgccgttgggatcctctgcgcgaatggatggggcatgaatatcgcagaagtggtctgcagacagttggagtgtgggtccgctatccgggtgagtagagaacctcacttcacagaaagaactctccacattctgatgtctaattctggctgcactggcggcgaagcatccctgtgggactgtattcgttgggaatggaaacagacagcttgtcatctaaatatggaagcgtccctgatttgctccgcccatagacagcctcgcttggtcggagcagatatgccctgcagcgggcgtgtcgaggtgaaacatgctgacacatggaggtccgtatgtgacagtgatttcagccttcacgcagcaaatgtcctgtgccgggagttaaactgtggagatgcaatctccttgagcgttggggaccactttggaaaaggcaacgggctaacatgggccgaaaaatttcagtgcgagggatcggagacacacctggccctgtgtccaatagtgcagcatcccgaagacacctgtattcacagcagggaagtgggcgtggtgtgttcaaggtacactgatgtaaggttagttaatggaaagtcccagtgtgatggacaggtggaaatcaacgtgctgggacattgggggagcctctgtgacacacactgggatcctgaagatgcccgagtcctgtgtcggcagctgagctgcggaaccgccctgagtaccactggtggaaaatacatcggtgagagatctgtgcgcgtctggggccacagatttcactgccttggcaacgaatcactgctggacaattgccaaatgacagtccttggtgccccgccctgtatacacgggaacaccgtctctgtgatttgtacaggatctctcacccagcccctgtttccctgcctggctaatgtttccgacccttatctcagtgctgtgcccgaaggctcagcgctgatctgtctagaggacaaaagactgaggctggtcgatggagacagccggtgtgcaggccgagtggagatctaccacgacgggttctgggggaccatctgcgatgatggctgggacctgtcagatgctcacgtggtgtgccaaaaactcggatgcggggtggcttttaatgctactgtgtctgcccattttggcgaagggagtgggcccatttggttagacgatcttaattgcactggcatggagtcccatttgtggcagtgtccttcccgcggatggggccagcacgactgtcgacacaaggaggacgcaggagtcatctgctcagaatttacagccctccgcttatacagcgagaccgagactgagtcttgcgccgggcggctggaggtgttttacaacgggacatggggctctgtgggtcgacggaatattactaccgcaatcgcggggattgtatgccggcaattagggtgcggcgaaaacggcgtcgtaagtctggcccctctgagcaagacaggatctggattcatgtgggtggatgatattcagtgccccaaaacccatatttctatttggcagtgcctttcagccccctgggagaggagaatctccagccccgctgaggagacctggattacctgtgaagacaggatccgggttaggggcggagacaccgagtgttcggggcgcgtggagatctggcacgcgggatcttggggtacagtgtgcgatgattcctgggacctagccgaagccgaagtggtgtgccagcagctgggttgcggcagtgctctcgcagccctgcgggatgcttctttcggacagggcaccggcacaatttggctggacgatatgagatgtaaaggcaatgaaagtttcctctgggattgtcatgccaaaccctgggggcagagcgattgcgggcataaggaggacgctggagtgcggtgtagcggacagtccctaaagagccttaacgctagtagcggacacctcgctctgatactgtcttcaatttttggcctgctgttactggttctgtttattcttttcctaacttggtgcagggtgcagaagcagaaacacctgccactgcgggacgatactccaaaccacggatgcgaggatgccagtgacacgtctcttttgggcgtgttgccagctagcgaagccactaaatag

SEQ ID NO: 6035 - DNA, 1410 bp, synthetic construct
  misc_feature 1..1410: note = source = /note="Description of Artificial Sequence: Synthetic coding sequence"
  source 1..1410: mol_type = other DNA
atgatcaccgagggagcacaggcgcctagactgctgctccctcctttactcctactgcttactctgcctgctacggggtccgacccagttttatgttttacacagtatgaagaatcctctggcaaatgtaaaggtctactgggaggcggggtgtccgtggaggactgttgccttaacacagcttttgcctaccagaaaaggtcaggggggctctgccagccctgcaggtccccccgttggtctctgtggagtacttgggctccctgctccgtgacctgtagtgaaggatctcaactgagataccgtcgctgcgtcggttggaacgggcagtgcagcggaaaagtggcacctgggacattagagtggcaactacaggcatgcgaggatcagcaatgctgtccagaaatgggcggctggtccggctggggaccttgggagccgtgcagcgttacatgcagcaagggcaccaggaccagacggagagcctgcaatcacccggcccctaagtgtggcggacactgcccgggacaggcgcaggagtctgaggcatgtgacactcagcaggtttgccccactcatggcgcctgggcaacttggggaccgtggacaccatgctctgcatcatgtcatgggggcccacacgagcctaaagaaacccgctcacgtaagtgctctgcccctgaaccctcgcagaagccaccaggaaaaccctgtccaggcctggcatacgagcagaggcggtgcacagggctgcctccctgtccagtggctgggggatggggcccctggggccctgtttctccatgtcccgtgacatgtggattgggccagacaatggagcagcgtacatgcaaccaccctgttccacagcacggaggacccttttgtgccggtgatgcaacaaggacgcatatctgtaacaccgcagtcccctgtcccgtggacggggaatgggattcttggggagaatggagtccttgcattcggcgcaacatgaaatcgataagctgccaggaaattcccggccagcaatcccgaggcagaacatgcaggggccggaagttcgacggccaccgctgcgccggccagcaacaagatatacggcattgctattccatccaacactgccctctcaagggatcctggagcgagtggagcacctggggactgtgtatgcccccatgtggaccaaacccgacgagagcgcgtcaacggctgtgcaccccactgcttcccaaatatcctcccacagttagcatggttgagggccagggtgaaaagaatgttaccttttggggacgtcccctccccagatgtgaggagctacaggggcagaagctggtcgtggaggagaaacggccctgcttacacgtcccagcttgtaaggaccctgaggaggaagagctgtag

SEQ ID NO: 6036 - DNA, 837 bp, synthetic construct
  misc_feature 1..837: note = source = /note="Description of Artificial Sequence: Synthetic coding sequence"
  source 1..837: mol_type = other DNA
atgcagtggctgcgagtgcgggaaagcccgggagaggcaacggggcaccgggtcactatgggcaccgcggccttgggccctgtgtgggctgccctccttctttttctcctcatgtgcgagatccctatggtcgaactcacatttgaccgcgctgtcgcttccggctgccagagatgctgcgactctgaagaccctctagaccctgcccatgtgtcttcagcctcatcgagcgggcgtccacacgcacttccagagatccgcccttatatcaacatcacaatactgaagggcgacaagggtgaccccggccctatgggactgccgggatacatggggagagaaggtccccagggtgagcccggaccccagggatcgaaaggcgacaaaggtgagatggggtctcctggtgccccgtgccagaaaaggttcttcgcattttcagtggggcggaaaactgccctgcacagcggagaggactttcaaactctgctgttcgaaagagtgtttgtcaatctcgacgggtgcttcgacatggctaccggacagttcgcagccccgctacggggaatttacttcttctctcttaacgtgcactcctggaattataaggagacatatgtccacatcatgcacaatcagaaggaggccgtgattctctacgcacagcctagtgagcgctcaatcatgcagtcgcagagtgtgatgctcgatctcgcctacggcgatcgggtgtgggtgcgcctctttaagagacagagggagaatgccatctactcaaacgacttcgatacctatattacattcagtgggcatctgataaaggcagaagacgattag

SEQ ID NO: 6037 - DNA, 1128 bp, synthetic construct
  misc_feature 1..1128: note = source = /note="Description of Artificial Sequence: Synthetic coding sequence"
  source 1..1128: mol_type = other DNA
atggagtttgagatcactttccgcccggattctggcgacggcgtgttattatatagctatgataccggctctaaagatttcctctcgatcaacctggctgggggccacgtggaatttcgctttgattgtgggagtggaaccggtgtgctgcggtctgaggatcccttgacactggggaattggcacgaactcagagtctcccggacggctaaaaatggcatacttcaggttgataagcagaaaatagttgagggtatggcagaaggaggtttcacacagatcaagtgtaacaccgatatctttatcgggggtgtacccaactatgacgatgtgaagaaaaatagtggcgtactaaagcctttttctggctcaatccagaaaataatcttaaacgaccgtactatccacgttaagcacgatttcacctctggcgtgaatgttgagaacgccgcccatccctgtgtgcgggctccctgtgctcatggcgggtcctgcaggccacggaaagagggttatgactgcgactgtcccctgggattcgagggcttgcattgtcaaaaagccatcatagaggccatcgagatccctcaattcatcggaagatcctaccttacatacgacaatcccgacatcctgaaaagggtgtccggaagcagatcaaatgtttttatgcggtttaaaaccactgcaaaggacggcctgcttctgtggagaggtgatagccctatgcgccccaacagtgacttcatcagtctgggcctgagagacggcgctcttgttttctcctacaaccttggcagtggcgtggcatctatcatggtgaacggttctttcaacgatggtagatggcacagagtaaaagccgtgcgtgatggacagagcggaaagatcacagtggatgactatggtgcaaggacgggcaaatcacccggaatgatgaggcagctgaacatcaatggcgcattgtatgtcgggggaatgaaagaaatcgcgcttcacactaacaggcagtatatgcgggggctggtggggtgcatttcgcactttactctgtccacagactaccatatttcactagtcgaggatgctgtggacggtaaaaatataaacacttgcggggcgaaatag

SEQ ID NO: 6038 - DNA, 459 bp, synthetic construct
  misc_feature 1..459: note = source = /note="Description of Artificial Sequence: Synthetic coding sequence"
  source 1..459: mol_type = other DNA
atgcggtttaagactacagccaaggatgggttgctcctgtggcgaggcgactctcccatgcggcctaactccgacttcatcagtttggggcttcgtgatggggcactggtgttttcctacaacctaggctccggtgttgcttccattatggtgaatggttcttttaacgatggacgttggcatagagtgaaagcagtgagggatggccaatccggcaaaatcaccgtggatgattacggggccagaactggcaaatctcctggaatgatgcggcaactgaacataaacggtgccctgtatgtcggcggtatgaaggagatcgccctgcacacaaataggcagtacatgcgcggccttgtcgggtgcattagccactttaccttatcaacagactaccatatctccttggttgaggacgcagtggatgggaagaatataaacacctgtggagccaagtag

SEQ ID NO: 6039 - DNA, 1050 bp, synthetic construct
  misc_feature 1..1050: note = source = /note="Description of Artificial Sequence: Synthetic coding sequence"
  source 1..1050: mol_type = other DNA
atgaccgctttaccaggccctctttggctgctgggtcttgctctgtgtgccctaggcggcggggggccgggactgaggcccccccctgggtgtccccaacgtcgattaggggccagggaacggagagatgttcagcgggaaatactggccgttctgggattgcctggcaggccgcgtcctagggcgcctcccgctgcctctaggctcccagcctccgcccccctgtttatgctcgatctgtaccatgctatggccggcgatgatgacgaagacggggccccggccgaacgcaggctgggcagagcagatttggttatgtccttcgtgaacatggtggagagagatagggcacttgggcatcaggaacctcattggaaggagtttcgctttgacttgacccagatccctgccggcgaagcggttaccgctgctgagttcaggatatacaaagttccatcgattcatttgttgaataggactttgcacgtgagcatgttccaggtagtacaagagcaatcaaaccgggagagcgatctcttttttctggacctccagactctaagggcaggcgatgaaggttggttggtgctggacgttacagcagctagcgactgttggctgctcaaaagacacaaggaccttggactgcgactttacgttgagactgaagatggagagacatggaccgggtggggatggacaaaggacagccgtctgcaaatgtggaagttacgcctctctcggaccccatgggttttgtccttgcatgccccagggccagcccaggctcctgctgaacgtccactgctgtgcctgttacaggggcactgtcctgccagcccttcacccataaggaccccaagagcggtcagaccactgcgtaggaggcagcccaagaaaagcaacgagctgcctcaggccaaccggctgccaggaattttcgatgacgtccatggaagccatggccgccaggtttgcaggcgccacgaactgtacgtgtccttccaagatctgggatggctggtaatcgcagatagctcctgtttttag

SEQ ID NO: 6040 - DNA, 1617 bp, synthetic construct
  misc_feature 1..1617: note = source = /note="Description of Artificial Sequence: Synthetic coding sequence"
  source 1..1617: mol_type = other DNA
atgagcttctctgccactattctgtttagtccgcctagcggaagtgaagctagatgttgctgttgtgcctgtaaaagtgagaccaacggtggcaatactggctctcagggaggtaaccctccgccttcgacaccaatcaccgtgaccggacatggcctggccgtccaatcctcagagcagttgctgcatgttatctaccagagggtggataaggcagtcgggttggccgaagcagcccttgggctagcacgcgccaacaatgagcttcttaagcggcttcaggaggaggtgggggacctgcgccagggaaaggtgagcattcctgacgaagacggtgaaagccgcgcccactcctcaccccctgaggaacccggccctctcaaggaatcaccaggcgaggccttcaaagccctgagtgctgtcgaggaggaatgcgactccgtaggttccggggtgcaggtcgtgatcgaagagctgcgccagctcggtgctgcatcagtgggccctggccccctgggcttccccgccacccagcgtgacatgaggcttccaggttgtaccctcgcagcttctgaggcggcccccttgctcaaccccctggtggatgactatgtggcgagtgagggcgctgttcagcgcgtcctggtgcccgcctacgccaagcagctgagccctgccacccagctggccattcaacgcgctactccagagactggacccgagaatggcaccaagctccccccccctcggcccgaagatatgctgaacgctgcggcagccctcgacagtgcattggaggagtcaggtccaggctcgacgggcgagcttagacactctcttggactaaccgtctctccgtgcaggactagaggctctggacagaagaatagcaggaggaagagggatttggtgttatctaaacttgtccataacgtgcacaatcatattactaatgataaacgatttaatgggtctgagagcattaagtcaagctggaatatttccgtggtaaagtttttacttgagaaactgaaacaggagctggttaccagcccacataactacacagataaagaactgaaaggggcctgtgtggcttactttcttaccaaacggagagagtaccgaaactccctcaaccccttcaagggtctgaaagagaaagaagagaagaaactgagatcacggcgatatcgtctctttgccaatagatcctcaattatgaggcacttcgggcccgaagatcagagattatggaacgacgtaacggaggaattaatgtcagatgaggaagattcgcttaatgagcctggagtgtgggtcgcgcgacccccacgcttcagggctcaaaggctgaccgaactgtgctaccacttggatgccaattcaaaacacggtaccaaggctaatcgggtctatggaccaccctccgatcgtttgccctctgccgaagctcagctgctaccacctgaactgtacaacccaaacttccaagaagaggaggacgagggcggggatgaaaacgctccaggttccccttccttcgatcagccgcataaaacttgctgccccgacctgaacagcttcatagagattaaggtggagaaagatgagtag

SEQ ID NO: 6041 - DNA, 630 bp, synthetic construct
  misc_feature 1..630: note = source = /note="Description of Artificial Sequence: Synthetic coding sequence"
  source 1..630: mol_type = other DNA
atgtcgttcagtgctacaatcttgttctctccaccctctggatcggaggcccgctgctgttgctgtgcttgcaagagcgaaacaaatggtggcaatacaggttcacaggggggaaatcctccaccctccactcctatcacagttacgggacacggacttgccgtgcagagctcggagcagctgctgcatgtgatctaccagcgcgtagacaaggccgtagggttggcggaagccgccctgggccttgcccgggcgaataacgagctgctcaagagacttcaggaggaagtgggagatcttcgccaggggaaagtttctatccccgatgaggacggagaaagccgggctcactcctcccccccagaagaacccggccctctcaaagaatctcctggcgaagcttttaaggccttgagcgcagtcgaagaagaatgcgattcagtgggctctggcgtgcaggtggtgatcgaggagcttagacagctcggcgcggcctctgtgggccccggcccactgggctttccagcaactcaaagagacatgcggctgccaggttgcacccttgcggctagcgaggccgctccactgcttaaccccctggtggacgactatgtagcgagcgaggggtag

SEQ ID NO: 6042 - DNA, 1617 bp, synthetic construct
  misc_feature 1..1617: note = source = /note="Description of Artificial Sequence: Synthetic coding sequence"
  source 1..1617: mol_type = other DNA
atgagtttcagcgcaacgatccttttcagtccaccttctggctctgaggcccggtgttgttgttgcgcctgcaagtccgaaaccaacggaggcaatactggctctcaaggcggcaatccccccccaagcacgccaatcactgttacaggacacggtctggctgttcagagcagtgaacagctgcttcacgtcatttatcagagggtggacaaggcagtggggttggctgaggctgctctagggctggcgagagccaacaatgaattacttaagcgtctccaggaggaagtgggcgacctgagacagggaaaggtgtccataccggacgaagacggggaaagccgagctcactcttcacctcccgaagagcctggccctttgaaggaaagcccaggagaggcctttaaagctctttccgccgttgaggaggaatgcgacagtgtgggcagtggcgtgcaagtagtgatcgaggaactgcgtcagctgggtgccgcaagcgttggcccagggcccctgggatttcctgcgacgcaacgcgacatgcgtctccccgggtgcactctggcagcctccgaggccgcccccctgctgaatcctttggtggacgactatgtggcctctgagggagccgttcaaagggtgctggtgccagcttacgccaaacagctgagtcccgcaacccagttggcaatacagcgagctaccccagagaccgggcccgaaaatggcacaaaactgccgccacctcgcccagaagacatgcttaacgcagctgctgccttggacagcgccttggaggagagcggccctggttccacaggcgagttgagacacagtttaggtctcaccgtttctccatgcaggacccgcggtagcgggcagaaaaattccagacggaagcgcgacctggtcctctccaagctggtgcacaatgtgcacaaccacattacgaatgataaacggttcaatggtagcgaatcaataaagagctcatggaacatttcggtagtaaagttcttactggagaagctgaaacaggagctggtcacgtcccctcacaattataccgacaaagagctcaaaggcgcgtgtgtcgcctactttctgaccaagcgcagggaatacaggaattcgctgaatccatttaaaggactgaaggagaaggaggagaagaagctgaggagcagaagatacaggttattcgctaatcggtcgtccataatgagacatttcgggccggaagaccagagactgtggaacgacgtgacagaggaactgatgtcagatgaggaggacagtctgaacgagcccggcgtttgggttgcacgcccccctaggtttcgggcacagaggttgactgaactgtgttaccacttagacgccaacagcaagcacggtactaaagccaaccgcgtttatggccccccctcagataggttacccagtgccgaagcccagctccttcctccggaactttacaaccctaatttccaggaggaagaggacgagggaggcgacgagaacgccccaggcagcccgtccttcgatcagccccataagacctgttgtccagatttgaattctttcatcgaaattaaagtggagaaggatgaatag

SEQ ID NO: 6043 - DNA, 1524 bp, synthetic construct
  misc_feature 1..1524: note = source = /note="Description of Artificial Sequence: Synthetic coding sequence"
  source 1..1524: mol_type = other DNA
atgtgtactaaaaccatcccagttctgtggggctgtttcctgttgtggaacctttatgtcagtagcagccagactatataccccgggattaaagctagaattactcagcgagctctcgattacggggtgcaggcgggcatgaagatgatcgagcaaatgctcaaagaaaagaaactccctgatctctcaggaagtgagagcctggagttcttaaaagtggattacgtaaactacaactttagcaacattaaaataagtgcattttcctttcctaacaccagcttggcctttgttcctggagtgggaattaaagctcttacaaatcacggcacggcaaatatctccacggattgggggttcgagagccctctttttcaggacactggcggggccgatttatttctcagcggagtgtactttaccggcattatcattctaaccaggaatgattttgggcatccaacattgaagttgcaggactgttacgcgcaactgtcccatgcacatgtgtcattctcaggagagctgtcggttctctataactcattcgccgaaccaatggagaaacctatactgaaaaacctgaatgagatgctctgtcctataattgcctccgaagtgaaggccctcaatgccaatttgtcaactcttgaggtactgaccaagattgataactatactctcttggactacagccttattagcagtcccgaaatcacggaaaattacctggacctgaatctgaaaggagtgttttatccactcgagaatttgacggatccccctttcagcccagttcctttcgtgctgccggaacgttcaaattccatgctttatattgggattgctgaatatttcttcaaaagcgccagttttgcgcatttcaccgccggggttttcaatgtcaccttgagcactgaagagatctccaaccatttcgtgcaaaatagccaggggcttgggaatgtgctgtctcgcattgcggagatctacatcttatcgcaaccattcatggtccgtattatggcaaccgaaccccctatcattaacctgcaacccggaaatttcaccctcgacattcctgcctcaatcatgatgctgacacagcccaagaattccacggtagagacgatagtttctatggactttgtggctagtacgagtgtgggtcttgtgatcctcgggcaacggttggtctgctccttgagcctgaaccgcttcagattagcattgccggaatccaacagaagcaatatcgaggtgctccgctttgagaatattctgtcatccattctccacttcggtgtgcttccgctagccaatgctaagctccagcagggctttcccctgtccaatccccataagttcctgttcgtcaacagcgacattgaggtcctggaaggattcctcctgattagcaccgacttaaagtacgaaacctcatctaaacagcaaccctctttccatgtgtgggagggactcaatctgatcagtcggcagtggcgcggaaaatcggccccctag

SEQ ID NO: 6044 - DNA, 753 bp, synthetic construct
  misc_feature 1..753: note = source = /note="Description of Artificial Sequence: Synthetic coding sequence"
  source 1..753: mol_type = other DNA
atggcctctgagaggcttccaaaccggcccgcctgtttactcgttgcttcgggcgccgctgagggggtcagcgctcagtctttcttacactgctttacgatggcctccactgcttttaaccttcaggtcgccacacctggcggcaaggctatggagttcgtcgatgtgaccgaatccaacgccagatgggttcaggatttccgcctcaaggcctacgccagtccagcgaagctcgaaagcattgatggtgccaggtatcatgcgctgctaatacctagctgtcccggagccctaacggatctagcgagctctggatcattggctaggatcctccaacatttccactcggagagcaagcctatctgtgcagtgggtcatggggtcgcagccctctgctgcgcgaccaacgaggacagatcatgggtcttcgattcgtactccttgactgggccttctgtgtgcgaacttgtccgggctcccgggttcgctcggttgcctctcgtggtggaagacttcgtgaaggactcaggggcctgcttctccggagctgcagcgtcttgtccaaaggctgatagacattggcagcattttcctgtcgaggaaatcttcctggcatgtggcttcaaagttgccggcttgggagcggccccaggctggggacgcggcgggaagcaggaggacaggccacctgaggagcagcgacgtgcaggggaggactttcctatctatcagtgtgttttcatttatccgtag

SEQ ID NO: 6045 - DNA, 1386 bp, synthetic construct
  misc_feature 1..1386: note = source = /note="Description of Artificial Sequence: Synthetic coding sequence"
  source 1..1386: mol_type = other DNA
atgtcattggacatccaatctcttgacatccagtgcgaagaactgtctgatgccagatgggccgagctgctgcctttattacagcagtgccaggtcgtacggctcgacgactgcgggctgaccgaggcgagatgcaaagatatctccagtgcgctcagggtaaatcctgccttagccgaactcaacttacggtcaaatgaacttggagacgtcggagtccactgtgtgttgcagggattgcaaactccctcttgtaaaattcagaagctgagtctgcaaaactgctgcctcactggagctggatgcggtgttctcagctccacccttcggactctgccaactctgcaagaactgcacctgagcgataacctactcggcgatgctggtctccaattattgtgcgagggtctgctggatccacaatgtcgactcgagaaattgcagctagaatattgtagtctgtccgcggcttcatgtgagccattagcatctgtcctcagagcaaaacccgattttaaagaattaacagtgtccaataacgacatcaacgaagccggcgtaagagtgctgtgccaagggcttaaggatagtccctgccaactggaagctctgaaattggagagctgtggcgtgaccagtgataattgtcgtgatctatgcggaatcgtcgcgagtaaagcctccctcagggagctggcacttggcagtaacaaactgggcgacgtgggcatggccgagctctgtccaggactgctccatcctagctctcggttgcgcacattatggatctgggaatgtggaattaccgccaaaggttgcggcgatctgtgcagagttcttagggccaaagagtctctcaaggagctttctcttgctggcaacgagctcggagatgaaggcgcaaggctgttgtgtgagacactgcttgaacccggctgccagctagaatccctgtgggtaaaatcttgctcatttacagccgcttgctgcagtcacttcagctcagtcttggctcagaacaggtttcttcttgagctccagattagtaacaataggctagaggatgctggggtgcgggaactgtgccaggggctcggccagcccggctctgtactgagagtgctgtggctggccgattgcgacgtttcggatagctcttgctcatccttggcagccacactcttagcaaatcacagcctacgtgaactcgatctgtctaacaattgcctgggcgatgctggtattctacaactggttgagagtgtgcggcagccagggtgccttctggaacagcttgtactgtacgatatttattggtccgaagagatggaggaccggctgcaggctcttgagaaggataagcctagcctccgcgtcatcagttag

SEQ ID NO: 6046 - DNA, 1386 bp, synthetic construct
  misc_feature 1..1386: note = source = /note="Description of Artificial Sequence: Synthetic coding sequence"
  source 1..1386: mol_type = other DNA
atgtccttggatatccagtccctcgatatccagtgtgaggagctgagtgacgctcggtgggccgaattgctgcctctgctgcagcaatgtcaagtcgtacgattagatgattgcggccttaccgaagcacggtgtaaagatatttctagcgctctcagagtgaaccctgccctggctgaactgaaccttagatcaaatgagctcggcgatgtaggagttcactgtgtactacaaggacttcagaccccatcttgcaagatccagaagctgtcactacaaaactgttgtctgaccggcgccggttgtggtgtactgtcctccacccttcgcacattacctacactacaagagcttcacctgagtgataacctgcttggtgacgccggcctgcaactgctgtgcgagggattgttggatccccagtgtcgcctcgagaaactccaacttgaatactgcagcctgagcgccgccagttgtgaacctctggctagcgtcctgagagctaaaccagatttcaaagagttaacagtgtccaacaacgatatcaatgaagccggcgtaagggtactctgtcagggattgaaggattcaccctgtcagctcgaagccctgaagcttgagtcctgtggcgtgacatccgacaactgccgtgatctctgcggcatcgtagccagcaaggcctcactccgtgagctggcacttgggagcaacaagctcggggatgttggcatggcagagttgtgtcccggcttgctgcacccttcctccaggctgcgcaccctatggatctgggagtgcggaataaccgctaagggctgtggcgacctctgtcgggtcctgagagcaaaagagtcactgaaagagctgagcctcgccggaaatgagctcggggacgaaggcgctcgcctgctgtgcgaaactctacttgaaccgggctgccagctagaatctttgtgggtgaaaagctgttctttcactgccgcctgttgcagtcatttctctagtgttctagcccagaatagatttctcctcgagctgcagatctcaaacaacagactggaggatgccggagtgagggaactttgccagggtctcggccagcccggatctgtgctgcgtgttctctggctcgctgactgcgacgtatctgatagtagctgttcctccctggctgcgaccctcctggcgaaccactctctgagagagctcgacctctctaataattgccttggagacgccggcattcttcagctggtggaatctgtgcgacagccgggttgtctgttagagcaactcgtgctctacgacatttactggagcgaagagatggaagatagactgcaggccctagaaaaggacaaaccatcgctcagggtgatctcttag

SEQ ID NO: 6047 - DNA, 1386 bp, synthetic construct
  misc_feature 1..1386: note = source = /note="Description of Artificial Sequence: Synthetic coding sequence"
  source 1..1386: mol_type = other DNA
atgagtctggatatccaatctctcgatatacagtgtgaggagttaagtgatgcaagatgggcagagctgcttcctctcctgcagcagtgccaagtagtgaggctcgatgattgcggcctgactgaagctcgctgtaaggatatttcatcggcgctgcgtgtcaatcccgcactggccgagctcaacctgcgcagcaatgaactcggcgacgtcggagttcactgcgtgttgcaggggctgcagaccccatcttgtaagatccagaaattgtccctgcaaaattgttgcctcactggtgccggatgtggggttcttagtagcacgctcagaaccttgcccacactccaagagctgcacttgagcgacaacctactgggcgacgcgggtctccaactgctgtgcgagggactcctggatcctcagtgtagactggagaaactgcaattggagtattgtagcctctcagccgctagctgtgaacccctggcatctgtgcttcgcgctaaaccggactttaaggaactgaccgtctccaacaacgacatcaatgaagccggagtaagggttttgtgccagggtttaaaggattctccttgccaactcgaagcactcaagctggaatcgtgtggggtcacatcagataactgccgcgatctttgtgggatcgttgcttccaaggcctctctgcgtgaactagcactcggatctaacaaactcggcgacgtcggaatggctgagctgtgtcctgggttattgcatccgtcatcacgtttgaggacactctggatctgggagtgtgggatcaccgctaagggatgtggcgatttgtgtcgggtattgagagcgaaagaatcactgaaggagctgtctctggccgggaacgaattaggagatgagggggcccgtctgctgtgtgagactctgctagaacccggttgccagcttgagtctttgtgggttaagagctgcagcttcacagctgcctgctgtagccatttcagctctgtactggcccaaaatcggttcttgctggagttgcagatttccaataacagattagaagacgctggagtgcgggagctatgccagggactgggtcagcctggcagcgtcttaagagtgctctggctggccgactgtgatgtgtctgattctagctgtagcagccttgccgccaccttactggctaatcactcattacgcgagctggacctgagtaataactgcctcggtgacgccggtatactgcagctcgtcgaaagcgtgcgccaaccaggatgccttttagagcagctggtactgtatgacatctattggtcggaggagatggaggaccgtttgcaagctctggaaaaggataaaccatccctgcgggtaatcagttag

SEQ ID NO: 6048 - DNA, 1452 bp, synthetic construct
  misc_feature 1..1452: note = source = /note="Description of Artificial Sequence: Synthetic coding sequence"
  source 1..1452: mol_type = other DNA
atgattacagcccactgttcactcgatttactgggaagcgttgcagtactgtgtgtgtgcgacctgagccccgctcaatgcgatatcaactgttgctgcgaccccgactgtagcagcgtggacttttccgtgttctcagcttgttcggtgccagtggttacaggtgactctcaattttgctctcagaaagcagtaatctacagtctgaacttcaccgcaaatcccccccagcgtgttttcgagctggttgatcagatcaatccctctattttttgtattcacatcactaactacaaaccagcgctgtcgttcatcaatcccgaagtgccggatgaaaataatttcgacacgttgatgaagaccagcgatggattcacactgaatgccgagtcctacgtgtccttcactaccaaactcgatataccaactgctgccaagtatgaatatggtgtgcctttgcagacttctgacagcttcttaagatttccgtcttcgttaacaagcagcctgtgtaccgacaataacccagccgcttttctcgtgaatcaggctgtcaaatgcactagaaagattaatctcgaacagtgtgaagaaatcgaagcccttagtatggcgttttacagttccccagaaattctgcgggtccccgactctcgtaaaaaagtgccaatcactgtgcagtctatcgtgatccagtctctgaacaagaccctgacacggagagaagacactgacgtgctgcagcctacgcttgtgaatgcggggcacttcagcctctgcgtgaacgttgtgctggaggtaaaatactctctgacatacacagatgcaggggaggtgacgaaggccgaccttagttttgtacttggcactgtctcatctgtggtggtgccacttcagcagaaattcgaaatacacttcttacaggaaaatacccagcctgtacctttgtcaggaaatccaggttatgtggtgggtctacccctggccgctgggttccagcctcacaaaaccggggccctcccatgccaactggtggcacagaaggtgaagtccctgctctggggccaaggttttcccgactacgtagcccctttcggcaactcacaggctcaagatatgctggattgggtgccaatccacttcatcacacagtcctttaatcggaaacattttgttttgcaagactcctgtcagcttccaggcgccctcgtgatcgaagtgaagtggactaagtacggcagcctgttgaacccccaagctaagatcgttaatgtgaccgccaatttgataagttctagttttcctgaggcaaactcaggaaacgaaagaacaattctaatctcaactgcagtaactttcgtcgatgtatccgccccagccgaagcgggcttccgcgctcctccagccatcaacgccaggctgcctttcaactttttctttccctttgtatag

SEQ ID NO: 6049 - DNA, 1596 bp, synthetic construct
  misc_feature 1..1596: note = source = /note="Description of Artificial Sequence: Synthetic coding sequence"
  source 1..1596: mol_type = other DNA
atgtgtcagcttctcgagagtacggtcattcaaccccagggagacagcccagtggccgtgctgtgcgtttgcgatctgtctcctgcccagtgcgacatcaactgttgctgtgacccggattgtagtagtgtagacttctccgtgtttagtgcatgttcggtgccggtggtgacaggcgatagccagttttgtagccaaaaggccgttatctactcgctgaattttaccgccaacccacctcagcgtgtttttgaactggtggatcagataaatccttctatcttctgcattcacatcacaaactataaaccagccctgtcatttattaatcccgaggttccggacgaaaataattttgatacccttatgaaaactagcgacggctttacactcaatgctgagagctacgtcagcttcacaacaaaactggacattccgactgcagccaagtatgagtacggggtcccattgcagacttccgatagctttttaaggttccctagctctctgacctcatccctgtgtaccgataacaacccggccgcatttctggtcaatcaggctgtgaagtgtaccagaaagattaatctggagcagtgtgaagaaatagaagcacttagcatggccttttacagttctccggaaattctgcgtgtgccagatagtagaaagaaagtccccattacagtgcagagtatcgtaatacaaagcctgaataagacgctcacgcgtcgggaagatacagatgtgctacagcccactctggtaaacgcgggccacttttcattatgcgtgaacgttgtgctcgaagtaaaatactcattgacctacactgatgcaggggaagtgactaaggccgatctgtcattcgtgcttggcactgtatcttctgtagtggtacctctgcagcagaaattcgaaatacattttttacaagagaacacccagccagtgccgttgtccggcaaccccggctacgtggtcggcttacccctcgcagcgggctttcagccacataagatgagtggcatcatccagactacaaacagatatggccagctgacaattctacatagcacaacagagcaggattgcctggcgttagaaggcgtgaggacacccgtgttgttcggctacacaatgcaatctggctgtaaactcaggcttacaggagcccttccatgccagctggtggctcagaaggtgaaaagtttactttggggccagggcttcccagattatgttgcacctttcggcaatagtcaggcccaggacatgttggattgggtgccaatccacttcatcactcagtcttttaacagaaaagactcctgccaacttcccggtgccctcgtgattgaggtaaagtggacaaaatatggcagcttattgaacccacaggcgaagatcgtcaacgtcaccgcaaaccttatctcatcttcctttccagaggccaattctggcaatgaacgcacaatcctcatcagtacagccgtaacatttgtcgacgtgtccgcaccagcggaagctggattcagagccccacccgccattaacgctagacttcctttcaatttttttttcccctttgtgtag

SEQ ID NO: 6050 - DNA, 1722 bp, synthetic construct
  misc_feature 1..1722: note = source = /note="Description of Artificial Sequence: Synthetic coding sequence"
  source 1..1722: mol_type = other DNA
atgagacctcgcggcctgccccccctgctggtggtgcttttagggtgctgggcatcggtcagcgcgcagacggatgcaaccccagccgtgaccacagaaggcctgaactcaacagaggcagccctggccacattcgggacattcccatcgactcgccccccgggtacgcctcgagctccagggcctagttcaggccctaggcccacacccgtgactgatgtcgccgtattgtgtgtctgcgatttgtcccccgcacagtgtgatataaactgctgttgtgatcccgactgttcctccgtggatttcagtgttttctctgcctgtagtgtcccagttgttactggagactctcagttctgttcccagaaggcggtcatttattccttgaactttactgcgaaccccccccaacgtgtatttgagctggtggaccaaatcaacccatccattttttgtatccatataacgaactacaagcccgctctgagcttcatcaatccggaggtcccggatgagaacaactttgatacactaatgaaaacgtctgatggttttaccctgaatgcagaaagctacgtgagttttacaaccaaactagatatcccaacggctgccaaatacgagtacggcgtccccttacagactagtgattcttttctgcgcttcccatcgtcactcacttccagtctgtgcacagataataaccccgcgggtcaggcatattggttcacccccgtaattccagcactgtgggaggctgaagcacgtggatcactcgaggtgccggattcgagaaaaaaggtacccatcaccgtgcaatccatcgttatccaatctttgaacaagacactgaccagaagagaggacactgacgtcctgcagccaaccctggtcaacgccgggcacttcagcctgtgtgtgaatgtagttttggaagtgaagtactcgctcacctataccgacgccggcgaagtgactaaggcggatttgtcattcgttctgggaaccgtctcatcagttgtggtacctttgcagcagaaattcgaaatccactttttacaggaaaacacgcagccagtgccactgagcggtaatccaggctacgtggtgggcctgcctctggccgccgggttccagccacacaagggaagtggcatcatccagaccactaatcgatatgggcagctcactattcttcattctaccacagagcaggattgccttgctcttgagggcgtcaggactcctgtgctgtttgggtataccatgcagagcgggtgtaaactgcggttgaccggggcacttccatgtcaactggtggcccagaaggtgaaatcattactctgggggcagggttttccagattacgtggcaccgtttggtaatagccaggctcaggatatgctagactgggtccccatccatttcatcacgcagagctttaatcggaaggattcttgtcaactgcccggggccctcgtaatcgaagtgaagtggactaaatacggcagtcttctaaacccacaggccaagattgttaatgtgacagctaacctgattagcagttcttttcccgaggcaaattccgggaacgagcggaccatcctgatctcaaccgctgtgactttcgtggatgtgtcagctcccgccgaggccggctttagagcccccccggccattaatgcgcgattgccctttaattttttctttcctttcgtgtag

SEQ ID NO: 6051 - DNA, 1230 bp, synthetic construct
  misc_feature 1..1230: note = source = /note="Description of Artificial Sequence: Synthetic coding sequence"
  source 1..1230: mol_type = other DNA
atgaagacctccgacggcttcacattaaacgccgaatcttacgtctcctttactactaagctcgatatacctactgcggccaaatacgagtatggggtgcctttgcagacatcagattcgttcttacgctttccatcttcactcactagcagcctttgtaccgataacaatcccgctgctttcctagtcaatcaggccgttaaatgcacgcgtaagatcaacttggagcagtgcgaagagattgaggctttgagcatggccttttacagctctcctgagattctgagggtcccagactcccggaagaaagtccctattacagtccagagtattgtcatacagtctctgaacaagaccctgacccggagagaggacaccgatgtcctgcagcctaccctcgtaaatgccggtcatttctcactctgtgtgaacgtcgtcttagaggtcaaatatagtctgacatacacagacgctggggaggtcaccaaagcagatctttcgttcgttctggggacagtatcatcagtcgtggtgcccttgcaacagaagtttgagatacatttcctccaggagaacactcagcctgtccccctgtccggtaaccccggctatgtggtgggattgcccttggcagcagggtttcagccccacaagggatcgggaattattcagactacgaaccgctacggccagttaactatactgcactccacaacagagcaggactgtctcgccctggagggcgtgcgtaccccggtgctgttcggttatactatgcagtcaggctgcaagctgcgactgaccggggcgctgccgtgccagctcgtggcacagaaggtgaaatccctgctctgggggcagggattccccgactacgtggcaccattcggcaatagtcaggcgcaggacatgctcgactgggttccgatccatttcattactcagagttttaatagaaaggattcctgccagctccccggtgcactcgtgattgaagtgaagtggactaaatacgggtcccttctgaatcctcaagcgaaaatagtaaatgtcacagcgaatctgatttctagcagttttccagaggccaattctggaaacgagagaaccattctgatctcaacggctgtcacgttcgtggacgtgagcgccccagctgaggctggatttcgagccccacctgcaattaatgccaggttaccatttaatttctttttcccctttgtctag

SEQ ID NO: 6052 - DNA, 1779 bp, synthetic construct
  misc_feature 1..1779: note = source = /note="Description of Artificial Sequence: Synthetic coding sequence"
  source 1..1779: mol_type = other DNA
atgaggccaaggggactgccccctcttcttgttgtattgctcgggtgctgggcctcagtgtccgcccaaacagatgcaaccccggccgtcaccacagaggggctgaacagcacagaagccgcgctagctacatttggcacttttccatccaccaggcctccagggactccacgcgcacccggtccttcttctgggccgaggcccacaccagtaactgacgtggccgttttatgtgtctgcgacctaagccctgcccagtgtgacatcaactgctgttgcgatccagactgctcatccgttgattttagcgttttcagcgcatgcagtgtgccagtggtcacaggagacagccagttctgtagtcagaaagcagttatatacagtttgaacttcaccgcaaatccgcctcagcgtgtgttcgagctggttgaccaaattaacccttccatcttttgcatacatatcaccaactacaagcctgcactcagcttcatcaatccagaagtgcctgatgaaaataattttgatactctcatgaagacatctgacggatttacgctgaacgctgagagttacgtgagctttacaactaagttggacatacccacagcggcaaagtacgaatacggggtgcccctgcagacaagcgactccttcttgaggttcccatcaagcctcacaagctccctgtgcacagataacaatccggccgcatttctcgtcaatcaagctgtgaagtgcacgcgtaagattaatctagagcagtgtgaagagatcgaggctctgtcaatggccttttattcttcacccgaaatacttcgcgttcccgattcaaggaagaaagtccccatcacagtgcagagcatagttatacagtcgctgaataaaaccttaacacgcagagaagacaccgacgttttgcagcccaccctcgtcaatgccggtcattttagcctctgtgtgaatgtcgtgctagaggttaagtattctctgacttacaccgatgcgggagaggtgacaaaggccgacctgtctttcgtcctggggacagtatccagtgtggtggtgcccctgcagcaaaaatttgaaatacattttctgcaggagaacacccagccagtgccattgtccggtaatccggggtacgtagtggggttgcccctcgctgcagggttccagccacacaaaggctctggaattattcagacaacaaaccgttacggccaacttacaatactgcattccaccacagaacaagattgcttagccctggaaggtgtgcggacccccgtgttgttcggttacacaatgcagtcaggctgcaaattgagactgaccggtgcattaccatgtcagctggttgcgcagaaggttaagtccttgctgtgggggcagggattccctgattacgtagctccgtttgggaatagtcaggcccaggacatgcttgattgggtgcccatccactttattacccagtcttttaatcgtaagcactttgtgcttcaggatagctgccagcttcctggggctctggtgattgaagtaaaatggacgaaatacggatctctgctaaacccacaggctaagattgttaacgtgaccgccaatctgatcagtagctccttcccagaagcaaatagcggcaatgagcgaacaattctcattagcacggctgtaactttcgtggatgtgtcagctcctgcggaggcaggcttccgcgcgccgcccgccatcaatgctcgcctgccctttaacttcttcttcccattcgtctag

SEQ ID NO: 6053 - DNA, 552 bp, synthetic construct
  misc_feature 1..552: note = source = /note="Description of Artificial Sequence: Synthetic coding sequence"
  source 1..552: mol_type = other DNA
atgatcttcctgctgctcatgctcagcctggagctacaattgcaccaaatcgcggcgttgttcaccgtgaccgtacccaaagaactgtacatcatcgagcatgggtccaatgtaactcttgagtgcaacttcgacaccggctcacacgtaaacttgggcgccataaccgcttccctgcagaaagtagaaaatgacacttctcctcatcgggaacgtgcaactctcctggaggagcagttaccacttggcaaagcttcctttcacatcccacaagtgcaggttcgtgacgagggtcagtatcaatgtatcatcatctatggcgtagcctgggactacaaatacttgacgcttaaggtcaaaggacagatggagcctagaacacaccccacttggctcctgcatatcttcatccccttctgtattatcgcttttatctttatcgcaacagtaattgccctgagaaagcaactgtgtcagaagctgtacagctctaaggacaccactaagagacccgtgaccaccacaaaaagagaggtgaactccgccatttag

SEQ ID NO: 6054 - DNA, 822 bp, synthetic construct
  misc_feature 1..822: note = source = /note="Description of Artificial Sequence: Synthetic coding sequence"
  source 1..822: mol_type = other DNA
atgatcttcttgctgctcatgctctcactagaactgcaactgcatcaaattgccgctttattcacagtcacagtgcctaaggagctttatattatagagcatggaagtaacgtgaccctggagtgcaactttgacactggttctcacgttaatctcggggcaatcacagccagcttgcagaaggtggagaacgacacctctccgcacagggaacgcgccacattactcgaggaacagctaccgctgggtaaggcaagcttccatataccccaggttcaggtcagagacgaaggacagtaccagtgcattattatctatggggtcgcttgggactacaagtaccttacactgaaggtaaaagcgtcctaccggaagataaacacgcatatccttaaagtgccagaaaccgatgaggtggagctgacttgtcaggccaccggctacccactggccgaagtctcttggcccaatgtatcagtgccagccaatacgagccactcgcgcaccccagaaggcttgtaccaggtgacaagcgtgcttagacttaaaccgccgcctggaagaaatttctcctgtgtcttctggaacactcatgtgagggagcttactctggcaagcatcgatttgcaatcacaaatggaaccgcgcacccatccgacgtggctgctgcatatttttatccctttctgcatcatcgcttttatctttattgctacggtgattgccctgagaaaacagctgtgtcaaaagttatatagctctaaggatactacaaaaagacccgtgaccactacgaagagagaggtgaactctgcgatctag

SEQ ID NO: 6055 - DNA, 372 bp, synthetic construct
  misc_feature 1..372: note = source = /note="Description of Artificial Sequence: Synthetic coding sequence"
  source 1..372: mol_type = other DNA
ctgggagacaggcggggccgtagctccggcgcccgcgctgcggccgtgggcagtaccggcgagcgtttggagatggaggaagatatactgcagctgcaagcggaggccactgctgaggttcttggagaagtggcacaggcacagaaagtgctgagggactccgtccagaggcttgaggttcagctcagaagcgcctggcttggccctgcttaccgggaatttgaggtccttaaggctcacgccgataaacagtcccacattctctgggccctaactgggcacgtccaacggcagcgccgggaaatggtcgcccagcagcacagactgcgtcaaattcaggaaagattacatacagctgctctccctgcgtag

SEQ ID NO: 6056 - DNA, 345 bp, synthetic construct
  misc_feature 1..345: note = source = /note="Description of Artificial Sequence: Synthetic coding sequence"
  source 1..345: mol_type = other DNA
atggcttcatttaagctggccgattccgtgtgggaggacagtttgtctaagcgacagaggaaccagggccgcatgaaaacgttgcctgtgctggttctcagtttgacactcctgaccgtgtttagcgaaacttcacctattttaaccgagaagcaggctaaacaactactaagaagtcgaaggcaagaccgccctagcaagccaggatttccagacgaaccaatgcgggaatatatgcatcacttgcttgcgttagagcatagggcggaggaacagtttctggagcattggctgaatcctcactgcaagccccactgcgacaggaatcggatacaccccgtctag

SEQ ID NO: 6057 - DNA, 345 bp, synthetic construct
  misc_feature 1..345: note = source = /note="Description of Artificial Sequence: Synthetic coding sequence"
  source 1..345: mol_type = other DNA
atggctagctttaaactagcagatagcgtgtgggaagacagtctcagcaagcggcagcggaatcaggggaggatgaaaactctgccagtgctggtcttatctctgaccttactaaccgtgttctcggagacgtctcccatcctgaccgaaaaacaggccaaacagcttctgagatcccggcgacaggatcggcccagtaagcccgggtttcctgacgagcccatgagggaatatatgcaccatctcctggctttagagcatcgcgctgaggagcagtttctcgagcactggctgaatccacactgtaagccacactgtgaccgaaatcgaattcaccccgtctag

SEQ ID NO: 6058 - DNA, 444 bp, synthetic construct
  misc_feature 1..444: note = source = /note="Description of Artificial Sequence: Synthetic coding sequence"
  source 1..444: mol_type = other DNA
atggccttacaacggacacatagcttgctactccttttgctcctcacgcttctgggtctcggcctggtacagcctagctatggacaggacggaatgtaccaacgattccttcgccagcatgtgcatcctgaggagaccggcggcagcgataggtactgtaacctaatgatgcagcgcagaaagatgacactttatcactgcaagaggttcaacacttttatccatgaagacatttggaacataaggtctatctgttcaacaaccaacatccagtgtaaaaacgggaagatgaactgccacgagggagtggtgaaggtcaccgattgcagggatacaggtagcagtcgcgccccaaactgtcggtacagagctatcgcctctacaaggcgagtggttatcgcatgcgaaggtaacccccaggtgcctgtccacttcgacggctag

SEQ ID NO: 6059 - DNA, 1302 bp, synthetic construct
  misc_feature 1..1302: note = source = /note="Description of Artificial Sequence: Synthetic coding sequence"
  source 1..1302: mol_type = other DNA
atggaaccgcaactgggtcccgaagctgctgctttaagaccagggtggctagcacttctactgtgggttagtgccctgtcctgtagcttttcattacctgcctcctccctgtctagcctagttccccaggtacgcacctcctacaacttcggccggacctttctcggactggataaatgcaatgcatgtattggaacatctatatgtaagaagtttttcaaagaagagattcgctctgacaattggctggcttcccatctcggcctgccaccggacagcttacttagttatccggccaattactccgatgactccaagatatggcgaccagtggaaatctttcgactagtaagcaaatatcaaaacgagatttcagacagacggatctgcgcctctgcctccgcgcccaaaacctgcagcattgagagagtgctgagaaagaccgagcgcttccagaaatggctgcaggctaagaggctgacgcctgacttggtgcagggcttagcctcccctctgttgaggtgcccctcccaaaggctgctggatcgtgtagttagacggtacgccgaggttgctgacgctggttccatcttcatggatcactttaccgatagggacaagctccggctgttgtatactcttgcagttaacagccacccaatcctgctgcaaatttttcctggcgccgagggatggcctctcccaaagtacctaggcagttgcggcagattccttgtgagtacgtctacccgcccactgcaggaattctacgatgctcctccagaccaggcagccgatctggcctaccagctgctgggagtccttgaaagcttgcgaagcaatgacctaaattactttttctacttcacccatatcgacgccgggatgtttggcgtgttcaataacgggcacctattcatcagggatgccagcgccgttggcgtgattgacaaacaggagggaagccaggaagctaatcgcgccggagagaataaggacatatttagctgccttgtgtccggatgccaagcacagctcccctcttgtgagtccatctccgagaaacagtcactggtccttgtctgtcaaaaactcctgccaagactgctgcaggggcggttccctagccccgtgcaggacgatatcgactctatactggtgcagtgcggcgatagtataagacccgacccagaggtgttaggggccgcgagccagttgaaggatatccttcgccctttacgtacctgcgacagccggttcgcataccggtacccagactgtaaatataacgataaattctag

SEQ ID NO: 6060 - DNA, 600 bp, synthetic construct
  misc_feature 1..600: note = source = /note="Description of Artificial Sequence: Synthetic coding sequence"
  source 1..600: mol_type = other DNA
atggaaactttcccactgcttctgctgagtctgggactggtgctggcagaagcctccgaatcgactatgaagataatcaaggaggaattcaccgatgaggagatgcagtacgacatggcgaagagcggtcaggaaaaacagacgatcgaaattctgatgaacccgatattactcgtcaagaatacgagcctttccatgtctaaagatgacatgtcctctaccctgcttacatttcgctccctgcattacaacgaccccaaagggaacagctcaggtaacgataaagaatgttgcaacgacatgaccgtctggagaaaggtgtccgaagctaacggaagctgcaagtggagtaacaactttattcgtagcagcacagaagtgatgagaagagtgcacagagcgcctagctgcaagttcgtgcagaaccctggtatcagctgttgtgaaagcctggagctggaaaacaccgtttgccagtttacaaccgggaagcagttcccgcgctgtcagtaccattcagtgacttcactggagaagatcctgacagttctgacgggacactctttaatgagctggttggtgtgcggtagtaagttgtag

SEQ ID NO: 6061 - DNA, 600 bp, synthetic construct
  misc_feature 1..600: note = source = /note="Description of Artificial Sequence: Synthetic coding sequence"
  source 1..600: mol_type = other DNA
atggaaactttccccctccttcttctgtcgttagggctggtgctggctgaggcctcagagtcaactatgaaaatcatcaaggaggagtttacagacgaagagatgcagtatgacatggctaagagtggccaggaaaagcaaactattgaaattctgatgaacccgattttgctagtcaagaatactagcctgtcaatgagtaaagatgacatgtccagcacccttctcaccttccgctcattgcactataacgaccccaaaggcaactcatctggcaatgacaaggagtgctgcaacgatatgacagtgtggagaaaagtctcagaggctaatggttcgtgcaaatggtcaaacaactttatacggagttccaccgaggtgatgaggcgcgtgcaccgtgcccccagttgcaagttcgttcaaaatccaggaatatcctgctgtgaatccctggagcttgagaatacggtttgtcagtttaccaccggtaaacaattcccccgctgccaataccactctgtgacaagtctggagaagatcctgacagtattaacgggtcactctcttatgtcatggctcgtgtgtggttccaagctctag

SEQ ID NO: 6062 - DNA, 291 bp, synthetic construct
  misc_feature 1..291: note = source = /note="Description of Artificial Sequence: Synthetic coding sequence"
  source 1..291: mol_type = other DNA
atgttgccctgtctggccctcctcctcttaatggaactgagtgtgtgcaccgtcgccggagacgggggggaggagcagaccctgagcaccgaggcggaaacatgggagggtgcaggaccaagcatccagcttcagctacaggaagtaaagacgggcaaggctagtcagttctttggcctgatgggtaaacgagtcggggcgtatcagctcgaacatacattccaggggcttctggggaagcgtagcctgtttacagaaggaagggaggacgaagcccaaggatccgaatag

SEQ ID NO: 6063 - DNA, 981 bp, synthetic construct
  misc_feature 1..981: note = source = /note="Description of Artificial Sequence: Synthetic coding sequence"
  source 1..981: mol_type = other DNA
atgaccggcctgtgcggctactctgctccagacatgcgcggcttgagacttattatgatccccgtcgagctcctgctgtgctatctcctgttgcatcccgttgacgctacttcatatggaaaacagactaacgtactaatgcattttccactgagcctggaatcccagacacctagttctgatccattgagctgccagttcctgcaccccaaatcactgccgggttttagtcatatggctcctctccccaagtttctggtaagcctagccctgcgaaatgcactcgaagaggcaggttgccaagccgatgtgtgggccctgcaactgcagctatacagacagggaggggtgaacgctactcaagtcctgatccagcacctgcgcggcctgcagaaaggccgcagtaccgaacgaaacgtgtccgtggaggcattggcaagcgctcttcagctgctcgccagggaacagcagtccactgggagggtaggaaggtccttgccgacagaagactgcgagaatgagaaggagcaggccgttcataacgttgtccagttattgcccggagtgggtacattctacaacctcggaactgctctttattatgctacacagaattgtttggggaaagcccgggaacgaggccgcgacggagcaatcgacttaggatacgacctgctgatgactatggccgggatgagcggggggcccatggggctcgctataagcgcggctctcaagcccgcccttaggagtggagtgcaacaactaatacaatactatcaagatcagaaggacgctaatatctcgcagccagaaaccacaaaagaggggctgagagccatcagcgatgtgtcggacctggaggagacgacaaccctcgcttcctttatttctgaggtggtgtctagtgctccatactggggatgggccattataaagtcatacgatcttgaccccggcgcaggtagcctggagatctag

SEQ ID NO: 6064 - DNA, 1476 bp, synthetic construct
  misc_feature 1..1476: note = source = /note="Description of Artificial Sequence: Synthetic coding sequence"
  source 1..1476: mol_type = other DNA
atgaggtggatactctgctggtctttgactttgtgtctgatggcgcaaacggccctgggcgccttacacacaaagcgaccacaggtcgtgacaaagtacggtacgctccagggtaagcagatgcatgtgggaaagactcccatccaagtgttcctgggcgtgccattctctagacctccgctgggcatacttcggtttgctccacccgagccccccgagccatggaaggggatccgggacgctacaacataccccccagggtgcctgcaagagtcctggggacagctggcctcaatgtacgtaagcactagagagcggtacaagtggctgcggttctccgaagactgtctttaccttaatgtgtatgcaccggccagggctcctggcgacccacaattgcctgtgatggtgtggtttccaggcggcgccttcattgtgggtgcggcctcctcttacgaggggtctgatctagctgctagagaaaaagttgtgctggtatttctgcagcaccgactgggtattttcggctttttatcaacagacgattcgcacgctagaggtaactggggcctgttagaccagatggcagcattacgttgggttcaggagaacattgcggcatttgggggcgaccccggaaatgtcaccttgttcggccagtctgccggcgcaatgtcaatctcgggcctaatgatgagccctctggcaagcggactgtttcaccgtgctatcagccagagcggcaccgctttgtttcgtttgtttatcacctccaacccacttaaggtggctaaaaaagtggctcatctcgctgggtgcaatcacaattcaacccaaattttggtgaactgtctcagagccctgtctgggactaaagtgatgagagtctcaaacaagatgcggtttctgcagctcaatttccagagggacccagaggagattatatggtcaatgagccctgttgtagatggagtcgtgattccagacgatccattggtgttattaacgcaggggaaggtttcttctgtgccttatctcctgggggtaaataacttagagttcaactggcttctgccctacaatattaccaaggaacaggtgcccttggttgtggaggagtatctggataacgtgaacgagcacgattggaaaatgctgcgcaaccggatgatggacatcgtgcaggacgcgaccttcgtctatgcgactctgcaaacggctcattaccaccgggggctgagcatgggaaaagaaaaggcactgagccttcagatgatgaagtactgggctaattttgctagaactggtaaccccaatgatggcaatctgccttgctggccacgttacaataaggatgaaaagtatctccagctggacttcaccacaagggtaggtatgaagctcaaggagaaaaaaatggccttttggatgtccttgtatcagtcgcagcggccagagaagcagcggcagttttag

SEQ ID NO: 6065 - DNA, 285 bp, synthetic construct
  misc_feature 1..285: note = source = /note="Description of Artificial Sequence: Synthetic coding sequence"
  source 1..285: mol_type = other DNA
atggcagccttcccacataaaatcatattttttctggtgtgttctaccctgactcatgttgccttcagcggaatttttaacaagcgggacttcacaaggtggccaaagccccgctgtaagatgtacatccctcttgatccagattataatgccgattgtccgaacgtgacagcgccagtttgtgcttctaacggacacacatttcagaacgaatgctttttctgtgtggaacaacgggagttccactaccgcatcaaattcgaaaagtacggcaagtgtgattag

SEQ ID NO: 6066 - DNA, 402 bp, synthetic construct
  misc_feature 1..402: note = source = /note="Description of Artificial Sequence: Synthetic coding sequence"
  source 1..402: mol_type = other DNA
atgcgacagcggctgctccccagcgtcacaagcttgctgctagtggcactgcttttcccaggctcatcccaggctaggcatgtcaatcactctgccaccgaggccctcggggagttacgcgaaagggctcccggacagggcacgaatggatttcagttgttacggcatgcagttaagcgggatcttctgccaccaagaacccccccctaccaaggagacgttcctccgggaattcggaacaccatctgccacatgcaacagggaatttgcaggctctttttctgtcatagtggcgagaaaaagcgagacatttgctctgacccatggaacagatgttgcgtaagcaacactgatgaagaaggaaaagagaaacccgaaatggatggtcggtcgggcatttag

SEQ ID NO: 6067 - DNA, 564 bp, synthetic construct
  misc_feature 1..564: note = source = /note="Description of Artificial Sequence: Synthetic coding sequence"
  source 1..564: mol_type = other DNA
atggggtgctgcggctgctcaggtggctgcggctctggctgcggcggatgcgggagcggctgcggtgggtgtggcagttcatgctgtgtgcctatctgttgctgcaaacccgtctgctgttgcgtgcccgcctgcagctgctcgtcctgtgggtcctgcggagggtcaaagggaggccggggatcatgtggggggtcaaaaggggactgtggcagctgcggcggaagcaagggtggctgtggctcctgcggttgttcacagtgcagctgctataaaccatgctgttgcagctcaggatgcggaagctcttgctgtcagagttcatgctgcaaaccatgctgctctcaatcctcctgttgcaaaccttgcagctgtagctctggctgcggcagttcttgctgtcagtcatcttgttgcaagccgtgttgctcgcagtccagctgctgcaagccatgctgttgttcatccggctgcgggtcctcatgttgccagagtagttgctgtaagccctgctgctcacaaagtagctgttgtgtgcctatctgctgtcaatgtaaaatttag

SEQ ID NO: 6068 - DNA, 564 bp, synthetic construct
  misc_feature 1..564: note = source = /note="Description of Artificial Sequence: Synthetic coding sequence"
  source 1..564: mol_type = other DNA
atgaggccactagccggtgccccggtgcctaagcgccagaaatgtgatcactggaccccttgcccctccgacacttacgcctacagactgctgtccgggggcggccgttccaagtacgctaagatctgctttgaagacaacttgctcatgggtgaacaactgggaaacgttgctcgcgggataaacattgccattgtgaattacgtgaccgggaacgtcaccgctacccggtgcttcgacatgtacgagggcgataactctggcccaatgacaaagtttatccagtccgccgctcctaaatcactattgtttatggtgacgtatgacgacggttccactaggctgaataatgacgccaagaatgcaatcgaggctcttggttccaaggaaattagaaatatgaaatttcggtcatcctgggtctttatcgccgccaaagggttggagttgccctctgagattcagagagaaaagataaaccacagtgatgcaaaaaataacagatatagcgggtggccagctgagattcaaatcgagggttgtatccctaaggagcgctcttag

SEQ ID NO: 6069 - DNA, 249 bp, synthetic construct
  misc_feature 1..249: note = source = /note="Description of Artificial Sequence: Synthetic coding sequence"
  source 1..249: mol_type = other DNA
atgaaaattctatgtatctttctcacatttgtcttcaccgtgtcctgcggccctagtgtgccacagaagaagactcgggaggttgcagagcgcaaacgcgagtgtcagctggtgcggggggcatgcaagcccgaatgcaactcctgggagtacgtatattactactgtaacgtgaatccgtgctgtgctgtgtgggagtaccaaaaaccaatcataaacaagattacctctaagttacaccagaagtag

SEQ ID NO: 6070 - DNA, 186 bp, synthetic construct
  misc_feature 1..186: note = source = /note="Description of Artificial Sequence: Synthetic coding sequence"
  source 1..186: mol_type = other DNA
atgaaaatccatgtgtttctatttgtgctgttcttttttctagttccaatcgcaactagagtgaaatgcgcggtgaaagacacttactcatgcttcataatgcgcggcaagtgcagacacgaatgccatgattttgaaaagcccatcggattctgcactaagttgaatgcaaattgttacatgtag

SEQ ID NO: 6071 - DNA, 1056 bp, synthetic construct
  misc_feature 1..1056: note = source = /note="Description of Artificial Sequence: Synthetic coding sequence"
  source 1..1056: mol_type = other DNA
atggggaatctgttcatgctatgggcagccctggggatctgttgtgctgcattttctgcgtcggcatggagcgtcaataactttttaataaccggccccaaagcctacctgacctacactacctcagtcgcgctcggggcccaatccggaatcgaagaatgtaagtttcagtttgcttgggaaagatggaattgcccggaaaatgccctgcagctttcgacacataaccggctcagatcggcaacacgcgaaacctcctttatacatgccataagctccgcaggcgtgatgtatatcattaccaaaaattgtagcatgggcgacttcgagaattgtggctgcgacggttccaataacggcaagacgggcggtcatggatggatttggggaggctgctctgacaatgtcgaatttggggagcgcattagtaagctgttcgtcgactcactcgagaagggcaaagatgcaagagctctgatgaacctccacaacaaccgtgccggccgtttagccgtgagagctacaatgaagcgcacctgtaagtgccatggcatttcaggctcctgttctatacagacatgctggttgcagctggcagaatttcgtgaaatgggagactaccttaaagcgaagtatgaccaggccctgaaaatcgaaatggataagcggcagctcagggctggtaactcagcggagggacattgggtccccgccgaagcgttcctcccttccgccgaagcagagctcatctttctcgaggagtcgcccgattattgtacctgcaattctagcctgggaatatatggtaccgaggggcgcgaatgtctacagaatagtcacaataccagtaggtgggagaggaggtcttgcggacggttgtgcaccgagtgcggcctccaggtggaagaaaggaagactgaagtgatctccagctgcaattgtaagtttcagtggtgttgcactgtgaagtgcgatcagtgtcggcatgtggtctccaaatattattgcgcccggtcccccggctcagcacagagcttggggaaggggtctgcctag

SEQ ID NO: 6072 - DNA, 1446 bp, synthetic construct
  misc_feature 1..1446: note = source = /note="Description of Artificial Sequence: Synthetic coding sequence"
  source 1..1446: mol_type = other DNA
atgcaaagcaggctgctgctcctgggcgcgccaggaggacatggtggtcctgcttcccgcaggatgcgtttattattgcgccaagtggtgcagcgccggccgggcggcgaccgacagaggccagaagttcgcctcctgcacgccggctcaggtgccgacacaggcgatactgtgaacattggtgatgtgtcttacaaactcaagattcctaaaaaccccgagctcgtgccccaaaactacatttccgactccctggctcagtcagtggttcaacacttgaggtggatcatgcaaaaagacctgctcggacaagacgtgttccttatagggcctccagggccactgcgcagatcaattgcaatgcagtatctggagctcacgaaacgggaggtcgagtatattgccctcagccgcgataccacggagaccgacttgaaacaacgcagagaaattagggccgggactgccttttatatcgatcagtgcgcggttagggctgccaccgagggccggactctcatcctggaggggttggagaaggctgagcgaaatgtcctgccagtcctcaataacctgcttgagaatcgcgagatgcagctggaggatggcagatttctgatgagcgcagagcggtacgacaagctccttagagatcatactaaaaaggagctcgactcatggaagatagtgagagtgtctgaaaattttcgagtgattgccctaggcctacccgtgcctcggtatagcggcaatcccctggacccgcccctccggagtcgctttcaagctcgggatatctactatttgcccttcaaggatcagcttaaactgctgtacagcataggcgcaaatgttagtgcagaaaaggtcagccagttgctgtcatttgcaactactctctgttctcaggagagcagtaccctcggtcttccggacttccctctagactcactcgccgccgcggtgcagattttggactccttcccgatgatgccaataaaacacgccattcagtggttatacccctacagcatactcctgggccatgaaggtaagatggcggtggaaggggttctgaagcgttttgaactgcaggacagcggctcttccctgctgccaaaagagatcgtcaaggtcgagaagatgatggagaatcatgtgtcccaggcctcggtgacgatccgcattgccgataaagaagtgacgatcaaagttcccgccggtaccagactcctgtctcaaccctgcgccagcgacagatttatccagacattgtcgcataaacagctgcaggctgagatgatgcagagtcacatggtgaaggacatttgtctaattgggggcaaggggtgcggtaagaccgtgatagcgaagaactttgcagatacgctcggctacaacatcgaacccattatgttgtatcagcacaaagtgccccacatctag

SEQ ID NO: 6073 - DNA, 786 bp, synthetic construct
  misc_feature 1..786: note = source = /note="Description of Artificial Sequence: Synthetic coding sequence"
  source 1..786: mol_type = other DNA
atggcaagtctcgccgtgagcaactggcctaagcccatgcccctgataccatgtctgtcttggtctaccgccagtggtgtgtttaccacaggcgtgctgagcaaatcaatcaactggcgggagctggaaaagcagtattatacccaaacggtttatgaagaagaaattattcacatgcttgagtactgcggcactgacagctttaagatgggtcaggaatttgtgaaacattttacatcttccgctgacaaactgacaaatctcaacttggtatcgcggacattaaatttagatatttccaatcaggttgtgagccagaagcccgccgattgtcacaacagctccaagacctccgtgagcgccacgtctgagggccttctccttcaagacacaagcaaaatgaagagatttaaccagaccctgagtaccaacaaaagtggctatacatctcgtaatccccagtcctatcatctgttaagtaaagagcagtcacgtaattcactgaggaaagagagtctgatcttcatgaaaggcgttatggacgaatgcacccacgtggccaacttcagcgtccccgtggaccctagtcttatcattgtggtgcaagccaaagaggatgcgtatattcctagaactggcgtccgcagcctgcaggaaatttggcccggttgtgagattaggtatttagaaggtggccatattagcgcttatcttttcaaacagggcctctttaggcaggcaatctatgatgcttttgatagattcctccataagtacgccaactag

SEQ ID NO: 6074 - DNA, 1245 bp, synthetic construct
  misc_feature 1..1245: note = source = /note="Description of Artificial Sequence: Synthetic coding sequence"
  source 1..1245: mol_type = other DNA
atgggagtatccaaacttgacatcctgtatcgtcggctgttgctcaccaagctgtttattcgcggctggggccggcccgaagacctgaagagactgttcgagtttcgaaagatgatcggtaatcgggagaggtgccagaatttggtctcttccgactacccggtccatatcgataagatcgaggagcagtctgactgtaagatcctagatggtcattttgtcagccccatggctcactacgtaccagacattatgccaatcgaaagcgtcatcgctcgatttcagtttatcgtacctaaggagtggaacagcaaatataggccagtttgcatccatttagcagggactggcgatcaccactattggcggagaagaaccctgatggccaggccaatgattaaggaagctcggatggcaagcctgctcttagaaaacccctattacggatgtaggaaacctaaagatcaagtcagatccagcctgaagaacgtgagcgatctgttcgtgatgggcggcgccttggttctcgagtccgcagctttactacactggcttgaaagggagggatacggccctttgggaatgaccggcatcagcatgggaggccacatggcgtcactggctgtttctaactggcctaaaccaatgccacttataccctgtctaagttggagcactgcctcaggcgtgtttaccaccaccgatagcttcaaaatgggtcaggaatttgtaaaacacttcacatctagcgctgacaagttaacaaacctgaacctggtatccaggactcttaatctcgatatttccaatcaagtcgtgtcccagaaaccagccgattgtcataactcatcaaagactagtgtgtctgccactagtgagggattgctgctccaagacacatctaaaatgaagcgctttaaccagactctgtccaccaataagagcggctataccagtcggaatcctcagagctaccatctgttaagcaaggagcagagcaggaatagtcttcgtaaggagtctctgatttttatgaagggtgtgatggatgaatgtactcacgtggccaacttctcagtgccagtagacccttccctcattatcgtggtccaggccaaagaagatgcctacattcccaggacaggcgtccggtccctgcaggagatctggcccggctgtgagatccggtatctcgaggggggacatatatcagcatacctgtttaagcagggcttatttaggtag

SEQ ID NO: 6075 - DNA, 747 bp, synthetic construct
  misc_feature 1..747: note = source = /note="Description of Artificial Sequence: Synthetic coding sequence"
  source 1..747: mol_type = other DNA
atgaaactgacgttttttcttggactgctcgctctaatctcctgcttcacaccctcagaaagccagcgcttcagccgaagaccctacttaccaggccagctgccacccccccccctttatcggccacgttgggtgccgccaagcccacctccaccatacgactcgcgcctgaatagccccctttcactgccatttgttcccggccgtgtgccgccaagctcattcagtcggttctcccaggcagttattctctctcaactctttcctctcgagagcatccggcagcctagattgtttcctgggtaccccaacctgcatttccctctcagaccctactatgtaggtcctattcggattctgaaaccaccttttcctcctattcctttctttctggccatatacttgcccatctccaatccagaaccccaaattaacatcactacagctgacactacgataacaacaaacccaccgaccactgctacagctaccacctcgaccagcactaagcccaccatgaccatctccagcagcacggtgcctattagttcaactcccgagccggctacgtcaatctctgccgccacccccgccgctagtacagagaacaccacgcagatactggcaaatcggccccatacagtcctgctcaacgctacagtgcaagtgactactagcaatcagactattctcagttctcccgctttcaaaagcttttggcagaagttattcgctatttttggatag

SEQ ID NO: 6076 - DNA, 231 bp, synthetic construct
  misc_feature 1..231: note = source = /note="Description of Artificial Sequence: Synthetic coding sequence"
  source 1..231: mol_type = other DNA
atgggagccgccatctctcagggagcgttgatcgccattgtgtgtaatggactggtgggctttctactcctgctgctttgggtcatcctgtgctgggcttgccatagtaggagtgctgacgtcgactccctgagtgaatccagtccgaactcttcacccggaccatgcccagaaaaggccccacccccccaaaagccaagtcacgagggaagctatctgctacagccctag

SEQ ID NO: 6077 - DNA, 1536 bp, synthetic construct
  misc_feature 1..1536: note = source = /note="Description of Artificial Sequence: Synthetic coding sequence"
  source 1..1536: mol_type = other DNA
atgttagttgacgggcctagcgaaaggccggccttgtgttttctgctcctcgcagtggccatgagtttctttggtagcgccttatccatagatgagacccgagcccacctcctgctcaaggagaagatgatgcggctgggcggcaggttagtactaaacacaaaggaagagttggcaaatgagaggctaatgaccctgaaaattgcagaaatgaaggaagccatgaggaccttgattttcccacccagcatgcacttttttcaagccaagcacctgatcgagaggtcacaggtgtttaatatcctaaggatgatgccaaaaggtgcagcattgcatctgcacgatatcggcatcgttacaatggattggctggtccgaaacgtgacgtatcgcccacattgtcatatctgcttcacccctagaggtataatgcaattcaggttcgctcatcctaccccccgcccctcagaaaagtgttctaagtggatacttctggaagactatcgcaagagggtccagaacgttaccgaatttgacgattcactgctgagaaatttcacacttgtgacacagcacccagaagttatctacaccaatcagaacgtagtctggtcgaaatttgagaccatattttttactatctccggcctcatccattacgccccggtgttccgggactacgtgttcagatcgatgcaggagttctatgaggacaatgtgttgtatatggaaatcagggcccggctccttccagtgtacgaactcagcggagagcaccatgatgaggagtggagtgtaaagacctatcaggaggtggctcagaagtttgttgagactcatccagagtttattggcattaagataatctattctgatcataggagtaaagacgtggccgtaatcgccgagtcaattcgtatggccatgggcttgcggattaagtttccaaccgtcgtggctggtttcgacttagtaggccatgaggacactgggcactccctgcatgattataaggaggctctgatgatccctgcaaaggacggcgtgaaactcccctatttttttcatgccggcgagaccgattggcagggtactagcattgatagaaacattttagatgccctgatgttgaatacaacacgaattgggcatgggtttgctctgagcaagcacccagcagtccgtacttactcctggaagaaagacatacccatcgaggtctgcccaatctccaaccaagttctgaaactggtttctgatctcagaaatcaccccgttgcaaccctgatggccacaggccatccgatggttatcagtagcgacgaccccgccatgtttggagcgaagggtctctcttacgacttctacgaggtttttatgggtattggcggcatgaaggccgatctccgcacccttaaacaattggcgatgaattcaataaagtacagcacactgctggaatccgagaaaaacacattcatggaaatttggaagaaacgctgggacaaattcatcgccgacgtcgccaccaagtag

SEQ ID NO: 6078 - DNA, 1536 bp, synthetic construct
  misc_feature 1..1536: note = source = /note="Description of Artificial Sequence: Synthetic coding sequence"
  source 1..1536: mol_type = other DNA
atgctggttgacgggccttctgagagacccgccctgtgcttccttctgctggccgtggcaatgtccttttttgggagcgcactgtcaattgatgagacccgggcacatctcctgctgaaagagaaaatgatgcgtctcgggggtaggttggtactcaacacaaaggaagaactagcaaacgagcggctgatgaccctgaagatcgctgaaatgaaagaggctatgcggactctaatcttccctccctccatgcatttctttcaggctaaacatcttatcgaacggtcccaggtgtttaatattctgcgcatgatgcctaaaggcgccgcactgcacctacacgacataggcatcgttactatggactggctggtgagaaacgtcacctataggcctcattgccatatctgcttcactcccaggggcataatgcaattccgatttgcccaccccacaccaaggcccagtgaaaagtgttccaaatggattctgctggaagactaccgtaaaagagtccagaacgtgactgaattcgacgactctttattacgcaactttaccttggtgactcaacatcccgaggtgatttatacaaatcagaatgtagtgtggtccaagttcgagacaatcttcttcactatctctggcctgattcactacgcgcccgtgtttagggactatgtcttccgctcgatgcaggaattttacgaggacaatgtcctgtacatggagattcgtgctcggctcctcccggtgtatgagctaagcggcgaacatcacgatgaagaatggagcgtgaaaacctaccaagaagtcgcccaaaaattcgtcgagactcatccggagtttattggtattaagattatctactcagaccaccggtccaaggatgtagcagtgatagctgaatcaatccgtatggccatgggtttgcgtatcaagtttcctacagtcgtcgccggcttcgacttggttggacatgaagacacaggacattctctgcacgactataaggaggccctgatgattcctgccaaagatggtgtgaagctcccctacttcttccacgctggcgaaaccgactggcagggcacgtcgattgatagaaatatcctcgacgccctgatgctcaacacaactcggatcggtcatggatttgccctgtccaagcacccagccgtgcggacctattcatggaagaaggacatcccaatcgaggtttgtcctataagtaaccaagtcctgaagttggtgagtgacttaaggaaccacccagtcgcaacattgatggcgacaggtcaccctatggttatctcaagcgatgacccagctatgttcggcgctaaaggcttatcctacgatttttacgaagtgttcatgggaataggcggaatgaaggcagaccttcgtactctaaagcagctcgccatgaactcaatcaagtacagtacgctcctggagtcagagaaaaatacatttatggaaatttggaagaagagatgggacaaattcatcgcggatgttgccacgaagtag

SEQ ID NO: 6079 - DNA, 240 bp, synthetic construct
  misc_feature 1..240: note = source = /note="Description of Artificial Sequence: Synthetic coding sequence"
  source 1..240: mol_type = other DNA
atgaagctgcactccttaatctccgtcctcctactgtttgtcacgttaatcccaaaagggaagactggcgtcataccaggccagaaacagtgcattgctctgaagggcgtgtgcagggacaaactgtgctccaccctggacgacacgatcggaatttgtaatgagggaaagaaatgttgccgcaggtggtggattcttgaaccctatcctacgccagtgcccaaaggtaaaagcccctag

SEQ ID NO: 6080 - DNA, 351 bp, synthetic construct
  misc_feature 1..351: note = source = /note="Description of Artificial Sequence: Synthetic coding sequence"
  source 1..351: mol_type = other DNA
atggcagctggatctgcacctatgcaactgcacttgcgcgccaccataaggatgaaggacggcctatgcgtccccaggaagtggatttaccatctcaccgaaggaagcactgatttgagaaccgagggcaggccagacatgaaaactgaactcttcagctccagttgccccgggggtatcatgctgaacgaaaccggacagggataccaaagattcttactgtataaccgctcccctcatccaccagagaagtgcgtcgaagagttcaagtctctgacttcctgtctggattccaaagcttttctgctgacgccccgcaatcaagaagcttgtgagctctctaataactag

SEQ ID NO: 6081 - DNA, 543 bp, synthetic construct
  misc_feature 1..543: note = source = /note="Description of Artificial Sequence: Synthetic coding sequence"
  source 1..543: mol_type = other DNA
caagtcattccaattaactccggggatctgtttgtacatcccctttggaatcggtcctgcgttgcgtgtggaaacgatatagcacttataaagctgagccgatcagcccagctgggcgacgcagtgcagctggcatccctcccgcctgctggagacattctgcccaatgaaacaccctgttatatcaccggctggggacgactctacaccaacggacccctccctgataaactccaggaagccctgctacccgtagtggactacgagcactgcagccgttggaactggtggggatctagtgtcaagaagactatggtctgcgccggcggcgatataaggtcaggctgtaacggtgattctggagggcccctaaactgtcctaccgaggacggagggtggcaagttcacggtgtcacgtccttcgtgtccgcctttgggtgcaatactcggcgcaagcctacagtgttcactcgcgtgtcagctttcatagactggatcgaggagaaactccagggcaacaaagcacccgaatccagaacatag

SEQ ID NO: 6082 - DNA, 1215 bp, synthetic construct
  misc_feature 1..1215: note = source = /note="Description of Artificial Sequence: Synthetic coding sequence"
  source 1..1215: mol_type = other DNA
atgccccccttcttgatcactctgttcttatttcacagttgttgcctcagagccaatggccacctgagggagggcatgaccttgctaaaaaccgagtttgcgctacacttgtaccagtcggtagccgcatgccggaatgaaacaaacttcgtgatcagcccagccggagtctccctgccgcttgagatcctccagtttggggcagagggctccaccggtcagcagttggccgatgctctcggatacacggtccatgataagagagtgaaagactttcttcatgccgtgtacgccacactgccaacctcaagtcaaggtactgagatggaactggcatgctcgctctttgtccaagttggcacacccctgtctccctgttttgtggaacacgtttcatggtgggccaactcctctcttgagcctgctgacctgtccgagcctaactcaactgcaatccagaccagtgagggcgcctctcgtgaaacagcagggggcgggccctccgagggtccagggggttggccttgggaacaggtgtcagctgcctttgcccagctggtgttagttagcaccatgtcattccaaggcacatggcgaaagcgcttttcctcaacagacactcaaatccttccattcacctgcgcatatggccttgttttgcaggtccccatgatgcaccagacaactgaggttaattatggacagttccaggacacagccgggcaccaggttggtgtgctggaattaccctatctgggctcagccgtctccctgtttctcgtgctaccccgggacaaggacaccccattgtcccacattgagcctcacctgacagcctccacaatccacctttggactacttccctgcgcagagcccgcatggacgtttttcttccacggttcaggattcagaaccagttcaacctgaaaagtatcctgaactcttggggtgtgactgacctcttcgaccccctgaaggcaaacttgaaaggaattagtgggcaagacggattctacgtgagtgaagcaatacataaggcaaagatcgaggtgttggaagagggcactaaagcctcaggtgccacagccctgctgctgcttaagcgctcaagaattcccatttttaaggccgaccgtccctttatatactttctgcgcgagcccaatactggattcgtcttttctattggacgcgtgagcaacccgctagattag

SEQ ID NO: 6083 - DNA, 444 bp, synthetic construct
  misc_feature 1..444: note = source = /note="Description of Artificial Sequence: Synthetic coding sequence"
  source 1..444: mol_type = other DNA
atggggcccgaggccctttctagtttgctgctacttctgttggtggctagcggcgacgcagatatgaagggacacttcgatcctgccaagtgtcgctatgcacttggtatgcaagatcggacaatcccagactcggacatctcagccagctcctcttggagcgacagcactgccgccaggcatagtcggttggagtcaagcgacggtgacggggcctggtgccccgccggtagcgtgttccccaaagaggaagaatacctgcaggtggacttacagagactgcacctggtcgcactggttgggactcaggggcggcacgcaggtggcctgggcaaggagttcagtcgctcctacaggctgcgatattctcgggacggccgtcggtggatgggctggaaagaccgctggggccaggaggtcattagtgggaacgaagacccatag

SEQ ID NO: 6084 - DNA, 2631 bp, synthetic construct
  misc_feature 1..2631: note = source = /note="Description of Artificial Sequence: Synthetic coding sequence"
  source 1..2631: mol_type = other DNA
atgggcccagaggcactgtcaagccttctgctcctcctcctcgtggcctcgggggatgcagacatgaaagggcatttcgaccctgcaaagtgtcgctacgcactgggcatgcaggaccggaccattcctgatagtgacattagtgcttcctcttcatggtcggattctaccgccgcccgccacagccgactagaaagtagcgacggagatggagcttggtgtcccgccggctctgtcttcccaaaggaagaagaatatttgcaggtcgatctccagcggctgcatctggtcgcacttgtggggacacagggcagacatgccggagggctgggtaaggagttttcaagaagctaccgcctccgctactcgcgggatggtcgccggtggatgggttggaaggatcgttggggccaggaggtaatctccggaaacgaggaccctgaaggggttgtcctcaaagatctcggccctcccatggtggctcgcctggtaagattctacccacgggccgaccgtgtgatgagcgtttgcctgagggtggaactctacggttgcctctggagagacggattgctgtcctacactgctcccgttggccagacaatgtacctgtcagaggctgtttacctgaacgattctacttatgatggccacacagtgggaggacttcagtacggagggctgggccagctggctgacggggtagttggacttgatgattttcgtaagtcccaggaactgagggtgtggccagggtacgactacgtgggctggagcaaccatagtttttctagtggatacgtggagatggagtttgaattcgaccggttgcgagccttccaggccatgcaggtgcactgcaataatatgcacaccctgggagcgagacttccagggggggtcgagtgtcgctttcgccggggaccggccatggcatgggaaggtgagcctatgcgccacaatctaggtggcaacctgggcgatcccagagcccgggctgtgtccgtgccgttaggtgggcgggtggccagatttctgcaatgccggttcctgtttgctggcccctggctgctgttcagcgagatcagctttatttctgatgtcgtgaacaatagctcccctgcactcggcgggacatttccccctgcaccctggtggcctcccggtcccccacccacgaatttcagctccctggagctggaacccagaggacagcaaccggtggccaaggctgaaggttcaccaactgcgatcctcatcggttgccttgtcgcgattattcttctactcttactgattatcgccctgatgctttggagactgcactggagaaggctcctcagcaaggcagagagacgtgtgttggaggaggaactcaccgttcacctgagtgttcccggcgacacaatcctgataaacaacagacccggccctcgggagcccccaccttaccaggaaccgcggccgcgaggcaatccaccccattccgcgccctgtgtacctaacgggtccgcttactcaggtgactatatggagccagaaaagcccggcgctcccttgctcccaccccctcctcagaacagcgtgccgcactatgccgaggccgacattgtaacattgcaaggggtcaccggaggcaacacatatgctgtgcctgcattgcctcctggagctgtgggcgatggacctccacgcgtcgactttcctcggtcaaggctccgatttaaagaaaaactcggtgaggggcagtttggcgaggtccacctatgtgaggtggacagcccgcaggacctggtatctttagactttccacttaatgttcgaaaaggccatcctctgttggttgccgtgaagattctaaggcctgatgccacaaagaatgctcgtaacgactttctgaaagaagtgaaaataatgtcgcgtctcaaagatcctaacatcatacgcctactaggggtgtgcgtgcaggacgaccccctgtgcatgatcactgattacatggagaacggcgatctgaaccagtttctcagtgcccatcaactagaggacaaggccgcagagggcgctccaggagacggccaggccgctcagggtccaacaatcagctatcccatgctgttgcatgttgcagcccagatcgcttccggtatgcgctatctggcgacactgaactttgtgcatcgagatctcgccactcgtaattgcctggtgggggagaactttaccattaagatcgcagatttcggaatgagccgcaatctctacgcaggggattattatcgcgttcagggaagggccgtactgcccatacggtggatggcttgggagtgtatcctcatggggaagttcactacggcttccgatgtgtgggccttcggggtcacattgtgggaggtactaatgctctgtagggcacagcctttcggacagctgaccgacgagcaggtgatagagaatgctggggagttcttcagagatcagggaaggcaggtgtatctgtccagaccccctgcatgtccacaggggttatatgagttgatgctgcgttgctggtccagggagagtgaacagcgtccacctttctctcagctgcaccgattcctggccgaagacgctctgaatactgtgtag

SEQ ID NO: 6085 - DNA, 2631 bp, synthetic construct
  misc_feature 1..2631: note = source = /note="Description of Artificial Sequence: Synthetic coding sequence"
  source 1..2631: mol_type = other DNA
atgggccctgaagctcttagctccctgctgctgctgctgctggtagctagcggagacgctgacatgaaaggccactttgatcctgcgaagtgccgctatgcactggggatgcaggatcgcaccatccctgatagcgatatttctgcctccagttcctggagcgacagcaccgcggccagacattcacggctggagtcatccgatggcgatggagcttggtgcccagcaggaagcgtgtttccaaaggaagaagaatatttgcaggtggatctgcagcgcttgcacctcgtggctctagtcggcactcaaggcaggcatgccggaggcctcggcaaggagttctcgagatcttatagattgcgctatagccgcgatggcagaagatggatgggctggaaggacaggtgggggcaggaagtcatatccggtaatgaagatcctgaaggtgtggttttaaaggacctcggaccacctatggttgcccgtctcgtgcgtttctacccccgcgctgatcgggtaatgtcagtgtgtctgagagtcgagctctatggatgcctctggagagatggactgttatcgtatacagctcccgtcggacaaacaatgtacctctccgaagcagtttatctcaacgactcaacctatgacgggcataccgtcgggggtctgcaatacgggggcctcgggcagttggccgacggcgttgtgggcctcgacgacttccgaaaatcacaggagctcagggtctggccagggtatgactacgtgggatggtccaatcactccttttcatctgggtatgtggaaatggaatttgagtttgacaggcttcgggcctttcaagcaatgcaggtgcattgcaacaatatgcataccctcggggccagactcccggggggcgtggagtgcaggtttagacgcggacctgccatggcctgggagggagaacccatgaggcacaatctggggggaaacctgggagaccctagggcccgggcagtctccgtacctttgggtggccgcgttgcccgtttcctgcagtgccgctttctgttcgcaggtccgtggctcctcttctctgagatcagtttcatcagcgacgtggtgaacaacagctctcccgccttgggcggcacgtttcctcccgccccatggtggcccccagggcctccaccgaccaatttctcatccttggaattggaaccaaggggacagcaacctgtggctaaagctgagggcagtcccactgctattctgattggatgtctggtcgcgataattttattactactactgatcattgccctgatgctttggagattacactggagacgcctcctgtcaaaagccgaacgacgcgtcctcgaggaggaattaacggttcacctgtccgtacccggcgacaccatacttattaacaacaggcccggtcctagagagccgcccccttaccaggaacctagaccaagggggaatccccctcattccgccccctgcgtacccaatggtagcgcatatagcggcgattatatggaacctgaaaaacccggcgcaccactgctgcccccaccaccccagaactcggtgcctcattatgctgaagctgatatagtaacgttgcaaggcgtcactggtggcaacacctacgccgtgcctgccctccctccaggtgctgtcggggacggaccgcccagggttgatttcccgcgctcacggcttagattcaaggaaaaactaggagaaggccagttcggggaggtgcacctgtgtgaggttgactcaccacaagacttagtatctctagactttcccctgaacgtgcgcaagggccatcctctgcttgtcgcggtcaagatccttcgccctgacgccactaagaacgcccggaatgatttcctgaaagaggtcaaaataatgtctagactgaaggaccctaatataattcgacttctaggagtgtgtgtgcaggatgacccactgtgtatgatcacagattacatggagaatggggacctgaaccaattcctgtcagcgcaccagcttgaggacaaggctgctgagggggctcccggagatggacaagccgctcagggcccaactataagctatccgatgttgctgcatgtggccgcacaaattgcctccggcatgcgatatcttgctacccttaattttgtacatagagatctggcaaccaggaattgcctcgtcggcgagaactttaccatcaagattgcagattttggcatgagccgaaacctctatgccggggactattatcgggtccaggggagagccgtgctgcccatccgatggatggcatgggagtgtatcctcatgggaaagttcaccactgctagcgacgtgtgggcattcggcgttactctatgggaagttctgatgctctgtagagctcagcccttcggacagcttacagacgaacaagtgatcgagaacgcaggggagttctttcgagaccaaggtcggcaggtgtacctcagcaggcctcctgcgtgtcctcaaggcctgtacgaactgatgcttcgttgctggagcagagagagtgagcaacgaccccccttctcacagctccatcgctttctggcggaggacgcccttaacactgtgtag

SEQ ID NO: 6086 - DNA, 2742 bp, synthetic construct
  misc_feature 1..2742: note = source = /note="Description of Artificial Sequence: Synthetic coding sequence"
  source 1..2742: mol_type = other DNA
atgggtccagaggccctcagcagcctgctgctcctgttattggtcgcatctggtgatgccgatatgaaaggccacttcgacccagcaaaatgccgctacgcactgggcatgcaggataggactatccctgactccgacatctcagcttcctcctcctggtcggactcaacagccgcccgccactcccgccttgaatcgtcggatggagacggcgcctggtgccccgctggtagtgtgtttccgaaggaggaagaatacctccaagtggatctgcagcgcctgcacttggtcgctcttgtcgggactcagggccggcatgccggaggacttgggaaggagttctctaggagctatcgccttcgctacagccgggacggaagaaggtggatggggtggaaggatcgctggggtcaggaagttatctctgggaacgaggatcctgagggtgttgtcctgaaagacctagggccacctatggtggccaggcttgtaagattctaccctagagctgacagagttatgtcagtatgcctgcgcgtggaattgtatgggtgcctctggcgggacggattactttcctacacagccccagtggggcaaacaatgtacctgagcgaggcagtgtatctcaacgactccacatatgatggccataccgtgggcgggctgcaatacggggggctcggccagctggccgatggcgtagtgggacttgacgatttccgaaagtcccaagagctgagggtgtggccaggttacgattacgtgggatggagtaatcattcgttctccagcggatatgtagagatggagtttgagtttgaccggctaagggctttccaggccatgcaggtacactgtaataacatgcataccctcggtgcacgtcttccgggcggggtggaatgcagattcaggagaggtccagcaatggcgtgggagggcgaacccatgcgtcataatctgggcgggaatctcggcgatccaagggctagggctgtgagcgttcccttaggcggacgcgttgcccggtttttacagtgcagattcctgtttgcaggcccctggctgctatttagcgagatcagctttatttcagatgtggtgaacaactcatcaccggcgctgggtggcacgtttcctcctgcaccttggtggccgcccggtcctccgcccacgaacttttcaagtctagagctggaacccaggggccagcagccggtggctaaagctgaaggcagcccgactgccatcctgattggttgcctagtggcaataatactcttgctactccttatcatagccctgatgctgtggaggctgcactggcgcaggttactgtcaaaggcggagcgcagagtgctggaggaagagttgactgttcatctgtctgtgccaggcgacaccatcctgataaataatcggcccggtcccagggagcctccgccttatcaggaaccacgcccaagaggcaaccctccacacagcgctccctgcgtgcctaatggatcagctctcctgttgtcaaacccagcttacaggttgctgctagccacttacgctcgaccccccagagggcccggcccccccacacccgcctgggctaagcccaccaatactcaggcctatagcggagactacatggaacccgagaagcccggggcccctttgctgccacctccgcctcagaattccgtgcctcactatgccgaggctgatatcgtgaccctgcagggggtcaccggtggaaacacctacgcagtgccagctcttcctccaggcgcagttggagacggccctcctcgggtggattttccacgttctcggctgcgatttaaggagaaactaggcgaaggccagttcggggaggtccacctctgtgaggttgactccccacaggatcttgtgtccctcgacttcccgctgaacgttcggaagggacatccccttctcgtggctgtaaaaatcctaagacctgacgcaacaaagaacgcccggaatgacttcctgaaggaagtgaagattatgtcacgattgaaggatcctaacataatacgcctgctgggcgtttgcgttcaagatgatccactatgcatgattactgactacatggagaacggagatctgaaccaattcttatcggcgcatcagcttgaggacaaggccgcagaaggcgccccaggcgatggccaggccgcccaggggcccacaatctcttaccccatgctactccatgtggccgcgcagatagcttctggtatgcggtaccttgccacactcaatttcgttcacagggacctagcaacacggaactgcctcgtaggagaaaacttcacaatcaaaattgccgatttcggtatgagcaggaacctttacgcaggcgactactaccgggttcaggggagagcggtcttgcccattaggtggatggcttgggagtgtatccttatgggcaaattcacaactgccagcgacgtttgggcattcggcgttaccctttgggaagtgctgatgctttgccgggcccagccgttcggacaactcactgacgagcaagtaattgagaacgcaggagaattttttcgggatcagggccgccaggtctatctgtctcggccccccgcgtgcccacagggcctgtacgagctgatgctccggtgttggtctagggagtctgaacagcgaccccccttttcccagcttcaccgctttctcgctgaggacgcactcaataccgtctag

SEQ ID NO: 6087 - DNA, 444 bp, synthetic construct
  misc_feature 1..444: note = source = /note="Description of Artificial Sequence: Synthetic coding sequence"
  source 1..444: mol_type = other DNA
atgggacctgaagccctgtcaagtctgcttctgctactcctggtagcctcgggagatgcagatatgaagggccatttcgatccagcaaagtgccggtacgccctcggtatgcaggacagaacaattcccgactctgatatcagtgcctcaagcagctggtccgattccacagcggctcgtcactcaaggctggaatcttccgatggcgatggcgcttggtgtcccgccgggagcgtcttccccaaagaggaagagtacctccaggtggacctacagcgtctccacctcgtcgcactcgttggaacacaaggcaggcatgctggcggcttgggtaaggaattctctcggagttatcggctccgatactcacgggatggaagacgatggatgggctggaaggacagatggggtcaagaagtgatatctggcaacgaagacccatag

SEQ ID NO: 6088 - DNA, 2631 bp, synthetic construct
  misc_feature 1..2631: note = source = /note="Description of Artificial Sequence: Synthetic coding sequence"
  source 1..2631: mol_type = other DNA
atgggcccagaagctctgtccagtttgctgcttctgcttttggtcgcttccggagacgctgacatgaaagggcacttcgatcctgccaagtgcaggtatgcattgggtatgcaggaccgtacgatccccgactcggacattagcgcctctagctcttggtctgattcaaccgccgcccgccactcgcgcttagagtcatctgacggcgatggagcctggtgtccagccggttcggtttttcctaaggaagaagaatacttgcaggttgaccttcaacgcttgcacctcgttgccctggtgggtacgcaaggtaggcacgctggtggcttagggaaggaattctcaaggagctacaggctccgttactcacgcgatggtcgccggtggatgggctggaaagaccgttggggccaggaggtaatctctggaaatgaggatccggaaggtgttgtattaaaggacctggggcctcccatggtcgctagactagtgaggttctacccccgggccgatcgtgtcatgagcgtgtgcctgagggtggagttgtacggctgcctgtggagagatggactgctgtcgtatacagcccccgtggggcaaaccatgtacttgagcgaagccgtgtacctgaatgactcaacttatgatgggcataccgtcggagggctacagtatggagggctcgggcaacttgctgatggcgtggtggggctcgacgatttcaggaagagccaagaattgcgggtctggccgggatatgattatgtcggatggtccaatcatagcttttcttcaggttacgtcgagatggaattcgagtttgatcggcttagggcttttcaagccatgcaagtacattgtaataacatgcatacgctaggtgctaggctgcccgggggggtcgagtgcaggtttcggagaggccccgcgatggcctgggaaggagagcctatgcgccataacttgggcggaaatctcggagatcctagggcccgggccgtgagtgtgcctctcggaggacgggtcgccagattcctgcaatgccgcttcctgttcgccgggccttggctgttgttctctgagatctcattcatctctgacgtggtcaacaactcctcccccgccctgggaggtacattcccacccgcaccatggtggccccccggtcctccgccaaccaatttctcatcattggagttagagccgcggggccagcagccagttgctaaggccgagggatctcctacggccatcctgataggctgcctggttgctataatccttttactcctcttaataatcgcccttatgctttggaggctgcattggagaagactgctatcaaaggctgagcggagggtcctggaggaagaactgacagtgcatttaagcgttccaggcgacacaatattgattaacaatagaccaggtccccgggagcctcccccataccaggagccgcgacctagaggcaatccaccacatagtgccccatgcgttccaaacggcagcgcctattcaggtgactacatggaacccgagaaacctggcgcccctctgcttcctcctcctccccaaaattccgtgccccattatgctgaggcagacatcgttacgctccagggcgtgacgggcggcaatacatacgccgtcccggccctcccaccgggcgcggtcggggacggtcctccaagagtggacttccctagatcacggctgcgttttaaggaaaaactgggtgaaggtcaatttggagaagttcacctgtgtgaagttgattctccccaagacctggtttctttggacttcccgttaaatgtccgaaaggggcaccctctgctagtagcagtcaagattctgcgtccagatgccactaagaacgccaggaatgactttctgaaagaggtaaagatcatgagtagactaaaggaccctaatatcatccggctgttaggggtctgtgtgcaagacgatcccctctgcatgattactgactacatggagaatggcgatctgaatcagttcctctccgcccatcaactggaagataaggcagccgaaggggccccaggtgatgggcaagctgcccaggggcccaccatctcgtacccaatgttactgcacgtggccgcccagattgcctctgggatgcggtacctcgcaaccttaaattttgtgcatagagatcttgccacaaggaactgtctcgtgggagagaactttactatcaagattgccgacttcggcatgagcaggaatctttacgccggggattactacagagtgcagggtcgcgccgttcttcctatcaggtggatggcatgggaatgcatcctgatgggcaaattcactacagcttccgacgtttgggcattcggcgtgacactgtgggaggttcttatgttatgcagggctcagccttttggccagttaactgacgaacaggtgatcgaaaacgctggggagtttttccgggaccagggtcgacaagtctacctgtcccggcctcccgcatgcccgcaggggctttatgaattgatgctccgctgttggtccagagagtcagagcaacgtccccctttcagccagctgcaccggtttctggctgaggacgctttaaacacggtctag

SEQ ID NO: 6089 - DNA, 2631 bp, synthetic construct
  misc_feature 1..2631: note = source = /note="Description of Artificial Sequence: Synthetic coding sequence"
  source 1..2631: mol_type = other DNA
atgggaccagaggctctttcctctcttctcctcctactgcttgtagccagtggagatgcagacatgaagggccactttgatccagccaagtgtcgatatgccctcggaatgcaagatagaacaattcctgattcggacatatctgccagcagcagctggagcgactctacggctgcgagacactctcggctggaatcaagcgatggagatggagcatggtgtcctgccgggtccgtttttcctaaggaggaagagtatctgcaggtggacctccagagactccatttggtagccttggtcgggacccaggggcgccacgctgggggccttggcaaagaattttctcggagttacaggttgcggtatagtcgtgacggacgaagatggatgggctggaaagatcgatggggccaagaggtgattagcggaaatgaggaccctgaaggagtcgtcctaaaagatctgggtccccccatggttgcgagacttgtgcgcttctatccgagagccgatcgtgtgatgagtgtttgccttagggtcgagctatatggctgcctttggagagatggtttgctgagttatacagcccccgtgggccagacgatgtacctttctgaggccgtgtatttaaatgactcgacttatgacgggcacaccgtgggcggactgcagtacggaggattggggcagctcgctgatggggtcgtgggcctcgacgacttccgaaaatctcaggagcttcgagtgtggcctggctacgattatgtcgggtggtctaatcactcgtttagttccggatatgtggaaatggagtttgagttcgatagactgcgggcttttcaggcgatgcaggtacattgcaacaatatgcatacgctgggtgccagactaccaggaggggtagagtgtaggttccgaagagggcctgccatggcctgggagggcgagccgatgagacataacttaggcgggaacttgggggatccccgtgcacgggccgtgagtgtgcctctcggcggcagggtggcgcgcttcctgcagtgccggttcctgtttgcaggtccttggctcttgttcagtgagattagcttcatatccgacgtcgtaaacaattcctcaccagcactgggtggtacctttccacccgctccttggtggccccctggcccaccccccacgaattttagcagtctggaattggaaccaagagggcagcagcctgttgccaaagctgagggctcaccgactgcgatcctcatcgggtgcttagtcgctataatcctcctgctgctgttgattatagcactgatgctgtggcgtttacactggaggcgattgctgagcaaagcagaacgccgggtgttggaggaggaactgaccgtgcatcttagcgtccctggcgacactatcctgattaacaatagaccaggcccccgggagcctcccccataccaggagcccagacctcgaggcaatcctccacactccgcgccatgtgtgcctaatggctctgcctactccggcgattacatggaacctgaaaaacccggtgccccactgctgcctccccccccccagaactccgtgcctcactacgccgaggccgacatcgtaactctgcagggcgtaacgggcggaaacacgtatgccgtgccagctctgccacccggcgcagtcggtgatggtcctccccgggtagacttcccacggagtcggttgcgcttcaaggaaaaactgggagaggggcagttcggtgaggtgcacctgtgcgaagttgacagccctcaagatttggtgtccttggatttccctctcaatgtcaggaaaggccacccgcttctcgtagccgtgaagatactgcggcccgacgccaccaaaaatgcccgcaacgattttctgaaggaggtcaaaataatgtcacgcctgaaggacccaaacatcatacgcctgttgggagtgtgcgtccaggatgaccctctctgcatgatcacagactacatggagaatggagacctgaaccagtttctcagcgcccatcagctggaggacaaggcagcggagggagctccaggggacgggcaggctgcacaagggccaaccatttcttaccccatgctactgcatgtagctgctcagatcgcgtctgggatgagatatttggctacactgaacttcgttcatcgcgatctggccacacggaactgccttgtaggagagaattttacgatcaagatcgccgatttcggcatgagtaggaacctgtatgccggcgattattatagggtccagggcagagcggtcctgcctatccgatggatggcttgggaatgtatccttatgggaaaatttactacagcaagcgatgtttgggcgttcggcgtcactctgtgggaagtgcttatgctgtgtagggctcagcctttcggtcagctgactgatgaacaggtcatcgagaacgcgggtgagttctttagagaccaaggacggcaggtctatctgagtcgcccccccgcatgccctcaaggcctttatgagctcatgctccgatgctggtcacgagagtcagaacaaaggccgcccttctcacaactacacaggtttttggccgaggatgctctgaacaccgtgtag

SEQ ID NO: 6090 - DNA, 2631 bp, synthetic construct
  misc_feature 1..2631: note = source = /note="Description of Artificial Sequence: Synthetic coding sequence"
  source 1..2631: mol_type = other DNA
atgggccctgaagcgctctcatcgctcctgctgctcctgctagtggctagtggcgacgccgacatgaaaggacattttgacccagccaaatgccggtatgccctaggcatgcaagatagaactattcccgactctgacatcagtgcctcatcctcctggtccgacagcactgctgcacgtcatagtcgattggaaagttcagacggtgatggcgcctggtgccctgcaggcagcgtattccccaaagaggaggaatatctgcaggttgaccttcagcgcctccacctagttgcattggtgggcacacagggtcggcacgcagggggccttggtaaggagtttagtcgctcctacagactccgctactcacgggatggacggcggtggatgggctggaaagatagatggggtcaggaggtaatctctggcaacgaagaccctgagggagtcgtgcttaaggatctgggcccaccaatggtagcgcggttggttcggttctaccctcgggccgacagggtcatgtcagtatgtctgagggtggagctttacggttgcctatggcgagatggcctgttgtcatatacagcccccgtggggcaaacgatgtatctgtctgaggccgtgtatcttaacgattccacatacgatggccatacagtcggcggcctccagtacggtggcctgggacagcttgcagacggagtggtgggtctggacgactttcgtaagtctcaggagctccgtgtctggcctggttacgactatgtgggatggtcaaatcacagcttttccagcgggtacgtagaaatggaattcgagtttgacaggctaagagcctttcaggctatgcaggttcattgcaacaacatgcacacactcggcgccagactgcctgggggcgtcgaatgtaggttccgacgtgggccggctatggcttgggagggagagccaatgcgccacaacctcgggggcaacctgggtgaccctagagcacgagctgtgtccgtgccgctcggcgggcgcgtggctcgatttctacagtgcaggtttctttttgccgggccgtggctcctgttttccgagatctcttttatcagcgacgtggtgaataactcttcacctgccctgggggggacatttcccccagccccttggtggcccccaggtcctcctcctaccaattttagcagtctggaattggaacctagaggccaacagcccgtggctaaagccgaaggcagtcccactgcgatcctcatcgggtgtctggtcgctatcatactcctgctcttgcttatcatagctctcatgctatggcgattacattggagaaggctcttgagcaaggctgagcggcgcgtgttggaagaggagttgaccgtccatctgtcagttcctggggacactattctgatcaacaatcggccaggaccaagggagccaccaccataccaggaaccccggcctcgggggaatccaccgcactccgccccatgcgtgccgaatggtagcgcctattctggggattacatggagcctgaaaaacctggagcccctctgctaccaccaccgccacaaaacagcgtgccccactacgcggaggccgacatagtgaccctgcaaggcgtgaccggcggcaatacatacgcagttcctgccctccccccgggagcagttggcgacggacccccaagagttgacttcccacgttctagactgcgattcaaggaaaaactgggagaaggacaattcggtgaagtgcatctctgcgaggttgattcgccgcaggatctcgtgtcattagatttccccctgaacgtgagaaaaggtcatcccctgctggtggcggtcaagatcttgaggccagatgcaacaaagaacgcccggaacgacttcctgaaggaggtgaagataatgtcaaggctgaaggatccgaatattatacgcctgctgggggtgtgtgtgcaggatgaccctctgtgcatgattaccgactatatggagaatggcgatttgaatcaattcctctctgcgcatcagcttgaggataaggctgccgaaggggctcctggcgatggacaagctgcgcagggtcctaccatatcctacccaatgttgcttcatgtggccgcccagattgccagcggcatgaggtacctggccaccctcaacttcgtgcacagagatctagcaacgaggaactgtctggtaggggagaacttcacaataaagattgcagactttggaatgtctagaaatctgtacgcaggtgactactaccgcgtgcagggtcgggcagtgttacccatccggtggatggcttgggaatgtattttaatgggtaaatttacgacagcatcagacgtgtgggctttcggggttaccctatgggaggtcctgatgctgtgtcgagcacaacctttcggacagctgaccgatgagcaggtgattgagaatgctggcgagttctttagagatcagggccgtcaggtgtatctgtctaggcctccagcgtgtcctcaggggctgtacgagttgatgttacgctgttggtctcgggaatccgagcagagacctccattttcacagcttcataggttcctggctgaagatgccctgaacaccgtctag

SEQ ID NO: 6091 - DNA, 2742 bp, synthetic construct
  misc_feature 1..2742: note = source = /note="Description of Artificial Sequence: Synthetic coding sequence"
  source 1..2742: mol_type = other DNA
atgggccccgaggccctcagctctcttctgctgctgctgctggtcgcttctggagatgccgacatgaaaggacattttgaccctgcaaaatgcaggtatgccttggggatgcaggaccgcactattccagactctgatatcagcgcctcctcctcctggtctgattcaacagccgcacggcacagtcgcctggagtcttccgatggagacggcgcttggtgccccgcaggcagcgtgtttccaaaagaggaggaatatctccaggtggatttgcaacggctgcacctcgtggctctggttggcacccagggacggcatgctggggggctgggcaaggagttcagcaggagttacagactaaggtattctcgcgatggccggaggtggatgggctggaaggacaggtggggccaggaggttatctccgggaacgaagatcccgagggggtggttctgaaggatctgggtccccctatggtggcaagactggtgcgattttaccctcgcgcggacagggtgatgagcgtgtgcctgcgggtcgaactgtacggatgtctctggagggatggattattaagctataccgcccccgttgggcagacgatgtacctctctgaagccgtgtacctcaacgacagtacttatgacggccatactgtgggtggcctgcagtacggaggactgggacagttagcagatggcgtcgtggggctagatgattttaggaagtcccaggagctccgcgtttggccagggtacgattatgtcggctggagcaatcattcatttagctccgggtacgtggaaatggagtttgagttcgaccgcctgcgggcattccaggccatgcaagtgcactgtaataacatgcacacactaggcgcccgcctcccagggggagtggagtgcagattcagaagggggcccgctatggcgtgggagggtgaaccaatgcgacataacctcggtggaaatctcggagaccccagagccagggctgtgtcggtccccctgggtggaagggtggcacgtttcttacagtgtcgctttctgtttgccgggccttggttactgttcagtgagataagctttatcagtgatgttgttaacaattcctccccagcacttggaggcacgtttccgccagccccttggtggccccccggtcctccacccactaattttagttcactggaactggagcctcgtggccagcaacctgttgccaaagccgaaggttccccaacggccatactcatcggttgtttggtggcaattattttgcttctgctgctcattatcgcactgatgttgtggagacttcactggagacgcctccttagcaaagctgaacgacgggtactggaggaagagctgacagttcacctgtcagtgcccggcgatactatcttgataaacaaccggcctggcccgagagagcctccgccatatcaggagccacgcccccgggggaacccacctcattcagctccttgtgtgccgaatggaagcgcattacttctctcgaaccccgcctatcggctgctccttgccacgtatgcgcggccacctaggggccccggtccaccaacacccgcttgggcaaagccaacaaacacccaggcatacagtggcgattatatggaacctgagaagccgggcgccccacttctaccacctccgccgcaaaacagcgtgccccattatgccgaagccgacatagtgactttacaaggtgtcacaggtggaaatacttacgcagtgcccgcattgcctccaggcgctgtgggcgacgggccgccaagggtggactttccaaggagcaggctgcggttcaaggagaagctgggcgaaggccagttcggagaggtccatctgtgcgaagttgattctccacaggacctggtgtccttagacttcccactcaatgttagaaagggccacccccttctcgtagccgttaaaattctgcgcccggacgccacaaaaaatgccagaaatgatttcttgaaagaagtgaagattatgagccgactcaaggaccccaatataattagactgctgggggtgtgtgttcaggatgaccctctctgcatgattactgactatatggagaatggtgatctaaatcaatttctgtctgcgcatcagcttgaagataaagcggcagagggcgcacccggagatggacaggccgcccaaggtcccacaatctcctatccaatgttgctgcatgtagccgcccagatagcctcggggatgcggtaccttgccactctgaacttcgttcatcgggatctcgcaacccgaaattgcttggtaggggagaactttacaattaagatagctgatttcgggatgtccagaaatctctacgctggcgattactaccgggtgcagggaagggcggtactccccatcaggtggatggcttgggagtgcatcctgatgggcaagttcactacagcctcagatgtgtgggcttttggtgtgactctctgggaggtcctgatgctgtgtagagctcaacctttcggccagctgactgacgagcaagtgattgaaaatgccggagagttctttcgcgatcagggacggcaagtgtacttatctaggccgccagcatgtcctcaaggtctgtatgagctgatgcttagatgctggagccgcgaatctgaacaacgcccacctttctcccagctccaccgctttctcgccgaagatgcgcttaataccgtttag

SEQ ID NO: 6092 - DNA, 2742 bp, synthetic construct
  misc_feature 1..2742: note = source = /note="Description of Artificial Sequence: Synthetic coding sequence"
  source 1..2742: mol_type = other DNA
atgggccccgaggctctctcttccctacttctgttacttcttgtagcttctggtgatgccgacatgaaaggccacttcgacccagctaagtgcaggtatgccctgggtatgcaggatagaacaatccccgatagcgatatctccgcttcgagcagttggtccgattcgaccgccgctaggcactctcggcttgaatcctccgatggcgacggagcttggtgtccagccggaagcgtctttccaaaggaggaggaatacctgcaggtcgatctacagcgcctgcacctagttgcactcgttggtacacagggacgccacgctggcggtctgggcaaagagttttcacgctcctacaggcttaggtattcccgagacggcaggcgttggatgggctggaaggatagatgggggcaagaggtcatctctggtaacgaagacccagagggcgtggtgcttaaggacctaggtccaccaatggttgcacgtctcgtgagattctatccccgtgccgaccgagtgatgagcgtctgtcttagggtggagctttacgggtgcctgtggcgggatggtttgctctcatacactgcccccgtcggccaaaccatgtacctgagcgaagctgtttacctgaatgacagcacttacgatggacacaccgtggggggcctgcagtacggtggactcggccaactcgcagacggcgtggtggggctggatgattttcgaaagtcgcaagaactcagagtttggcctgggtatgactatgtaggatggtccaaccactcattttcatctggttatgtggaaatggagttcgaatttgatcggctcagagcattccaggctatgcaggtgcattgcaataacatgcataccttgggtgcccgactgccaggcggtgtggagtgccgctttagacggggtcctgctatggcgtgggaaggtgaacccatgcggcataatttggggggaaacctgggagatcctcgggcgcgcgctgtcagcgtgcctctgggggggagagtggctcgctttctgcagtgccggtttctgtttgcaggcccatggttgctgttctccgagatcagcttcatctccgatgtggttaataacagttctccggccctggggggaacatttccccccgctccatggtggccaccaggccctccgccgactaacttttcatcccttgagcttgagcctcgcggccagcagccagtggctaaagccgaagggtcccctacagcaatattgatcggctgcctggtggctattatcctccttctgctgttgattattgccctgatgttatggagactgcactggcgcaggttactcagtaaggccgaaagaagggtgttagaggaggagctgacagtgcatctatccgtaccaggggatacaatactcattaacaaccggcctggtccacgggagccaccaccttaccaggaaccaaggcccagaggcaacccaccacacagcgctccctgcgtgcctaatgggtctgccttgctgctcagcaatcccgcttacaggctgctgctggcaacttatgctcggcctccacgggggccagggccacccactcccgcctgggcaaaacctactaacacacaggcttatagcggagactatatggaacctgagaagccaggcgccccactgctgccacctccaccccagaactccgtgcctcactatgctgaggcggacatagtcacactccagggcgtgactggcggaaatacatacgccgtgccagcacttccaccaggcgcggtgggtgacggccccccccgagtcgactttccaagaagccggttacggtttaaggaaaaattgggggaggggcagttcggagaggtgcacctttgcgaagtcgattctccccaggatctggtgagcttggacttccctttgaatgtgcgcaaaggccatcccctgcttgtggccgttaagattcttcgaccggatgccacgaaaaatgcccggaacgatttccttaaggaggttaagattatgtcaaggctgaaagatcccaacattatcagactgctaggagtctgcgttcaagacgaccccctgtgcatgatcaccgattacatggaaaacggagatttgaatcagtttctgagcgcccatcagctggaggataaagcagctgagggagcaccaggcgacgggcaagcagcccaggggcccaccataagttaccccatgctcctccatgttgcagcccagatcgcgagcggaatgagatatcttgcaacccttaacttcgtccacagggacctggctacccgcaattgtttagtcggtgagaactttaccataaagattgcggattttggaatgtcgaggaacctctacgcgggagactactaccgtgtgcagggcagagccgtgctacccattaggtggatggcatgggagtgtattctgatggggaagttcaccacagcctcagatgtgtgggcttttggggtcactctatgggaggtgttgatgttatgccgcgcccagcccttcggccagctgaccgatgagcaggtaatagaaaacgccggggagttctttagagaccaggggagacaggtatatctgtcccgtccaccagcttgtcctcagggcctctacgaattaatgcttaggtgctggtcacgggaaagcgagcagcgtcccccattttcgcaactccacagatttttagccgaggacgcattgaatacagtttag

SEQ ID NO: 6093 - DNA, 309 bp, synthetic construct
  misc_feature 1..309: note = source = /note="Description of Artificial Sequence: Synthetic coding sequence"
  source 1..309: mol_type = other DNA
atgtccgtgatgaaaccttgccttatgaccatcgccattctcatgatactggctcagaagactcccggaggcctgttcaggtcacataacggcaaaagtcgagaaccatggaatccttgtgaactttaccaggggatgtgtcggaatgcatgtagggaatatgagatccaatacctgacatgccccaacgaccagaaatgctgcttgaagctaagcgtaaagatcacatccagcaaaaatgtgaaagaggattacgactctaattctaatctaagcgtcactaactcttctagttattctcatatctag

SEQ ID NO: 6094 - DNA, 267 bp, synthetic construct
  misc_feature 1..267: note = source = /note="Description of Artificial Sequence: Synthetic coding sequence"
  source 1..267: mol_type = other DNA
atgctgccagaccacttttccccactctcgggtgatataaagcttagcgtactggctcttgtcgtgctggtagtcctcgcccagacagcgcccgacggatggattagacgctgttattatgggaccggcaggtgcagaaagagctgcaaggagatcgaaagaaagaaagaaaagtgcggtgaaaagcatatttgctgcgtgccaaaagaaaaggacaagctgagtcatatccatgaccagaaagagacctctgaactgtacatatag

SEQ ID NO: 6095 - DNA, 1401 bp, synthetic construct
  misc_feature 1..1401: note = source = /note="Description of Artificial Sequence: Synthetic coding sequence"
  source 1..1401: mol_type = other DNA
atgaaaccaccactgctggtgttcattgtttgtcttctgtggttgaaagattctcattgcgcccctacatggaaagataagacggcaatcagtgaaaatctcaagtccttctctgaggtgggggagattgatgctgacgaggaggtgaagaaggctcttacgggtataaagcagatgaaaattatgatggaaaggaaagagaaggagcatactaatttgatgtccaccctgaaaaagtgcagggaagagaagcaggaggcactgaagctgctcaatgaagtgcaggagcacctggaggaagaagaaaggttatgtcgggaaagtctggcggatagctggggagagtgcaggtcatgtttggagaataattgcatgcggatatatactacctgtcaaccctcttggagctccgttaaaaacaagattgagaggttcttcagaaaaatctaccagtttctattcccttttcacgaggataacgagaaagacctgccaatcagcgagaaacttattgaagaggacgcacaactgacacaaatggaggatgtgttcagccaactaaccgtggacgttaacagtctgttcaacaggtcctttaacgtgtttaggcaaatgcagcaagaattcgatcagacttttcaatctcattttatctctgatactgacctcaccgagccctattttttcccagcattctctaaggaaccaatgacgaaagccgatctggagcagtgctgggacatacccaatttctttcagcttttctgtaatttttcagtgagtatttatgagtctgtctctgaaactattacaaagatgctgaaggctatagaggatctgccaaagcaggacaaggcccccgaccatggtgggctgatatctaagatgctcccaggacaggatagagggctgtgcggagaactcgatcaaaatctatcgaggtgctttaagttccacgagaagtgtcagaagtgtcaagctcacctttcagaggattgcccagacgtccccgccctgcacaccgagctggacgaggccatccggctggtaaatgtgtccaatcagcaatatggccaaatcctgcagatgacaaggaagcacctggaggacactgcttacctagtcgagaaaatgcgtggtcagtttggttgggtgtccgagttagccaaccaggcccctgagactgagatcattttcaactctatccaggtggttccacggatccacgaggggaacatctccaaacaggacgaaacgatgatgacagatctgagcattttgccgtcgagcaactttaccctgaagatcccgcttgaggagagcgccgaaagctctaactttataggctatgtcgtggccaaagcacttcagcactttaaagaacattttaaaacatggtag

SEQ ID NO: 6096 - DNA, 207 bp, synthetic construct
  misc_feature 1..207: note = source = /note="Description of Artificial Sequence: Synthetic coding sequence"
  source 1..207: mol_type = other DNA
atgaaactctgcgtaactgtcctgagcctgctcgtccttgtggccgctttctgctctctggctttgtcagctcctactaaatcatcagagtggaaactacagggggtgtgcttccagtgttgcagtggaaaagaccccatccatcaaagctgtccaacgtggacaatggtgcgccagaggaagatgcccacaaccggaaagggctag

SEQ ID NO: 6097 - DNA, 420 bp, synthetic construct
  misc_feature 1..420: note = source = /note="Description of Artificial Sequence: Synthetic coding sequence"
  source 1..420: mol_type = other DNA
atgtataaactcgccagttgttgcttgctgtttattggcttcctcaaccccttactatctctgccactgctggattccagggaaatttctttccagttgagcgctccccacgaagacgcacgtctgaccccagaggagcttgagagagcctcacttctgcagatactgccggaaatgctgggagctgagcggggagatattttacggaaggccgacagctcgacgaacatctttaacccaagaggaaacttacgtaagttccaggatttctcaggccaagatcctaacatcttgctgagccaccttctggctaggatatggaagccctacaaaaagcagcggcgaaagcttcggcaggacctgcggctttggaagaaggaacccgggctccgtatatttaaaaactacgtttacatatag

SEQ ID NO: 6098 - DNA, 1974 bp, synthetic construct
  misc_feature 1..1974: note = source = /note="Description of Artificial Sequence: Synthetic coding sequence"
  source 1..1974: mol_type = other DNA
atgagaaccgtagttctcacgatgaaagcatcagtgatcgaaatgttcctcgtcctcctcgtcactggagtgcattctaacaaagagacggcgaaaaaaataaaacgcccgaagttcacggttcctcagatcaactgtgatgtaaaggcgggcaaaatcatcgaccccgagttcatagtcaaatgtcctgcaggctgtcaggaccccaaatatcacgtatatggcacagatgtgtacgcaagctacagttctgtgtgtggcgcggcagtgcatagtggggtcctggacaactctggggggaagatcctcgtgcggaaagtcgcaggccagtcaggctataagggtagttactcaaacggcgtacagtctctatcattgccaaggtggagggagtctttcatagtgctcgagtctaaaccaaagaagggcgtcacctatccatccgctctgacatactcatctagtaagtccccagcagcccaggcaggggaaacgaccaaagcgtatcagagacccccaatcccagggaccacagcccagcctgtaacattgatgcagcttctagcagtgacagtggccgtcgccacacccactactcttccacgacctagcccatcagcagcaagcactacttcgatcccacgccctcagtcagttgggcaccgctcccaagaaatggatctgtggagtaccgccacctatacctcttcccagaatcggcctcgcgcagatcctggcattcagaggcaggacccttccggtgccgcttttcagaagcccgtgggcgctgatgtgagcctggactgcaagatcgacttatcgttccttattgatggcagtacttcaataggcaaacggagatttcgaattcagaagcagttgttggccgatgtggcgcaggccctggatatcggacctgctgggcctctcatgggggttgtgcagtacggagataatcctgcgacccacttcaatctgaagacgcatacaaatagtcgggatctgaagactgccattgagaaaataacgcaaagaggcggtctatcaaatgtgggcagagcaattagtttcgtgactaagaatttcttcagcaaggcaaacgggaatagatctggggcacccaacgtcgtagtggtgatggtggatggctggcccacagataaggtcgaggaggcgagccgcctggccagagagtccgggatcaacattttttttattacaattgagggcgcggctgagaacgaaaagcagtacgtggtagaaccgaacttcgccaacaaggctgtgtgccggaccaatggcttttactccctgcacgtgcagtcctggtttggactgcacaagacattacagcccctagtcaagagggtgtgcgacacggatagattagcttgtagtaagacgtgtttgaacagcgcagacatagggttcgtcatcgatggctcgtcatccgttggcacggggaactttcgcacagtactgcagttcgtgaccaatctcacaaaggaattcgaaattagcgataccgatactagaattggagccgtccaatacacatacgagcaacgtttagaattcgggttcgacaagtactcttccaaaccggacattctcaacgcaatcaaacgcgtgggatactggagcggggggacatcaactggagcggcgattaatttcgctctcgagcagctgtttaaaaagagcaaacccaataagagaaagctgatgatcctaattaccgatggaagaagttacgatgacgttcggatacctgcaatggccgcacacctgaagggtgtcattacgtacgccatcggcgtcgcatgggccgcccaggaagaactggaagtcatagccacccaccctgctagagaccactcatttttcgtcgacgagttcgacaacctgcaccagtacgtgcctcgtatcattcagaacatctgcactgaatttaattcccaaccccggaactag

SEQ ID NO: 6099 - DNA, 3975 bp, synthetic construct
  misc_feature 1..3975: note = source = /note="Description of Artificial Sequence: Synthetic coding sequence"
  source 1..3975: mol_type = other DNA
atgcggcacggagtggcgtgggctctcctcgtcgctgcagctctaggccttggagccaggggcgtcagaggcgcagtcgcattggctgatttctatcctttcggagctgagcggggagacgctgttactccgaaacaggatgacggaggcagcggtcttagacccctttcagtgccctttcccttcttcggtgctgaacactctggtttatatgttaataacaacggcatcattagcttccttaaggaggtctcccagtttacgcctgttgcatttcctatagcaaaagatcgttgcgtagtggccgccttttgggctgatgtggataatcgccgcgccggcgatgtgtactatagggaggcaaccgatcccgcgatgcttcggagagctaccgaagatgtaaggcattacttcccggagttactggacttcaacgctacctgggtctttgttgccacctggtatagggtcacatttttcggaggttcatcctcttccccagtcaataccttccagaccgtgcttattacagatggaaagttgagctttaccatttttaactatgaaagtatcgtctggactacgggtacgcacgcctcgagcgggggaaacgctaccggactaggcggcatcgcagctcaggccggctttaatgccggcgacggacagaggtatttcagtattcctggaagtcggactgcagacatggccgaggtggagactaccactaatgttggggttccgggtcgctgggccttccggattgatgacgctcaggtcagggttgggggttgcggtcacaccacctcagtgtgtctcgcactacgaccctgcttgaacggtggcaagtgtatcgatgactgcgtaacgggaaatccatcatatacatgcagctgcctgtcaggctttacagggaggagatgtcacctggatgtcaacgagtgtgccagtcaaccctgccagaacgggggaacatgcacccacggtataaatagctttagatgccagtgccctgcgggattcggcgggccaacttgcgaaaccgcacagagtccatgtgacaccaaagagtgccagcatggagggcagtgtcaggtcgaaaacggatccgcagtttgcgtctgtcaggccggatacacaggtgcagcctgcgagatggacgttgatgactgttctcctgatccatgcttgaacggaggatcttgcgtggatttggttggaaactatacatgcctatgcgccgagccttttaagggccttagatgtgaaactggcgaccacccggtgcccgacgcttgcctgagcgccccctgtcataatggcggcacttgcgttgatgctgatcagggatacgtgtgcgaatgtcctgagggatttatggggcttgattgtagagagagggtccctgacgactgtgaatgccggaacggagggagatgcctgggcgctaacactaccttgtgtcagtgcccactcggctttttcggtttactttgtgagtttgaaatcacggcgatgccctgcaacatgaacacgcagtgcccggacggcggatactgcatggagcacggaggctcctacctgtgcgtatgccataccgatcataacgcctcccacagtcttccttcaccatgtgactccgatccgtgtttcaatggcggatcatgtgacgcccacgacgattcttatacatgcgaatgcccgcgtggattccatgggaagcattgtgagaaggcacgtccccacctgtgtagctctgggccctgcaggaatggagggacctgcaaagaggcagggggagaatatcattgctcatgtccctatcggtttacaggacgccactgtgagattgggaagcctgattcatgcgcatctggaccctgccacaacggcggcacttgtttccactacatcgggaaatacaaatgtgactgcccgcccggcttcagtggccgacattgtgaaatcgcccccagcccctgcttcagatccccatgtgtgaacggaggtacatgtgaggaccgagacacagactttttctgtcactgccaagctggctacatgggccgacggtgtcaggccgaagtggattgtggcccacccgaggaggttaagcacgccactttaagattcaatggaactcggttaggagctgttgccctctacgcctgcgaccggggttactcactttctgccccttcccgtatcagggtctgccagcctcatggggtgtggagcgagccccctcagtgcctggaaattgacgagtgtcggtcccaaccttgtctgcatggaggcagttgccaagaccgggttgcaggatatctctgtctgtgctccacgggatatgagggcgcccactgcgagttagagcgcgacgaatgccgggcccacccttgtaggaatggtgggtcgtgcagaaatctgccaggcgcgtatgtttgtagatgccccgctggcttcgtgggcgtgcactgcgagactgaagttgacgcttgtgattcctctccttgtcaacacggcggtagatgtgagtctggcgggggggcatatctgtgtgtgtgtccagaaagtttctttggctaccactgcgagaccgtgtcagatccatgcttctcttccccgtgtggcggccgaggctattgtctagccagcaacggatcccactcgtgtacttgcaaagtcggctacacaggggaggattgcgccaaggaactgtttcctcccactgctctgaagatggaaagagttgaagagtctggggtctccatctcttggaacccacctaacgggcccgccgcgcgccagatgctcgatggatatgcagtcacctacgtttcatcagacgggtcatacaggcgcaccgactttgttgatcgcacccgctccagccaccaattgcaggccctggctgcaggtagagcgtacaacattagcgttttcagcgttaagagaaactctaataacaagaacgatatctcccgcccagccgtcttacttgcaagaacacgcccccgccctgtggaggggttcgaagtgactaatgtgacagcaagtacaatctctgtgcaatgggctttgcatcggatccgccacgccaccgtctctggcgtgcgcgttagcattcgccaccccgaggcactgcgggaccaggcaaccgacgtagaccggagcgttgataggttcacctttcgcgccctgctgcctggaaaacgttacacaatccagctgaccaccttaagcggattacgaggagaagagcatcccactgagagcctggctaccgctccaacacacgtttggactaggcctctccctcctgccaatctgactgccgccagagtcacagccacctctgcccatgtggtctgggatgcgcctacaccagggagcttgctggaggcctacgtgatcaatgttactacaagccagagtaccaaatccaggtatgtgccgaatggcaaattggccagttacacagtccgtgatttactccccgggcgaaggtaccagctttcagtgatcgccgtccagagcaccgaattgggtccacagcattccgagccggcccatctgtacattattacttccccgagagatggtgccgacagacgttggcatcaggggggtcaccaccctcgggtcctgaagaacaggcccccacctgcccggttgcccgagctcagacttctgaatgaccacagcgcgcctgagactccaactcagcctccccgcttctctgagttggtggatggccgcggacgagtttccgcccgcttcggcggatctccctccaaggctgcaactgtcaggtctcaacctactgcgagcgcccagctggagaacatggaggaggcacctaagcgggtgagcctagcacttcagctgccggaacacgggagcaaagacatcggctctgaaagtgccgctctagtaggtaccctgggattgaccgactgctcccagggaccatag

SEQ ID NO: 6100 - DNA, 732 bp, synthetic construct
  misc_feature 1..732: note = source = /note="Description of Artificial Sequence: Synthetic coding sequence"
  source 1..732: mol_type = other DNA
atggggatcttcctggtttacgtgggtttcgtgtttttcagtgtgctgtatgtacaacagggattatcatcccaggccaagttcacagagtttccccggaatgtcacggccacagagggccagaacgttgaaatgtcttgcgccttccagagcggatcagcatcggtttatctcgagatccagtggtggtttctgcggggtccagaggatcttgatcctggcgccgagggcgccggcgcacaagtagaactcctgccagaccgggatccagactctgatggtaccaagatatctacggtgaaggttcagggcaatgatatttctcataagctgcaaatcagcaaggtgcggaaaaaggatgagggactctatgagtgtagggtgaccgacgccaattacggggagctccaggagcataaagctcaggcctatttgaaagttaacgcaaactcccacgcccgacgcatgcaggctttcgaagcgagtccaatgtggctgcaggacatgaagccaagaaagaacgtgtccgccgcaattccaagcagcatccacggtagtgccaatcagcgaactcactccaccagcagcccgcaggtggtggccaaaatccctaagcagagcccccagtctggtatggaaacgcattttgagccttttatccttcccctgacaaatgcaccgcagaagggacagtcttaccgcgtggatagattcatgaatggtgatttttag

SEQ ID NO: 6101 - DNA, 1218 bp, synthetic construct
  misc_feature 1..1218: note = source = /note="Description of Artificial Sequence: Synthetic coding sequence"
  source 1..1218: mol_type = other DNA
atgtggtatgtgtccaccagaggggttgctccaagagtgaatttcgaaggcgcccttttttccggctatgccccggacggtgggctgtttatgcctgaggagttgccccagctggataggggcaccctttgccaatggtcaaccctctcttatccgggcctggttaaagaattatgtgcccttttcattggttccgagcttctcccgaaagacgagttgaatgacctaattgatcgcgccttttcccgctttagacatagagaggtggtgcatctctctcgccttcgcaacggtctcaacgttctcgagctatggcatggagtcacatacgcctttaaggatctgtctctttcatgcacaacccagtttctgcagtacttcctggagaaaagggagaagcacgtgacggtagtcgtgggcaccagcggagacaccggatccgcagcgatcgagtctgtgcagggggccaaaaacatggatatcattgtcctgctgcctaagggccattgcacaaagattcaagaactccagatgactactgttctcaaacagaacgtgcatgtcttcggagtggaaggcaattcggatgagctggatgaacctatcaagacagtgtttgctgacgtggccttcgtgaagaagcacaacctcatgtccttaaactctatcaactggagtcgggtactggttcaaatggcacaccacttcttcgcctactttcagtgcactccctctctcgacacgcatcccttaccacttgttgaggtggttgttccaaccggcgcagcaggaaacctagcggccggctacatcgcacaaaagattgggctaccaatcagactcgtggtcgctgtgaaccgcaatgacattattcacagaacagtccaacagggcgatttctccctttccgaagctgtgaagtcaaccctcgccagtgctatggatattcaggttccctacaacatggagcgagtattctggctcctttcagggtctgacagccaagtcacaagggcactgatggaacagttcgaaagaacacaatccgtcaatctacctaaggagctccattcgaagtgggagcgccaggattacgaaaaaatggccgtgatggagtgtgatgggtgctgcgtggagctctgcctaggcaattgcggccctaggagaggaagcgttaccgacatcccgggtaccgcaatggtaagaggagggggatag

SEQ ID NO: 6102 - DNA, 573 bp, synthetic construct
  misc_feature 1..573: note = source = /note="Description of Artificial Sequence: Synthetic coding sequence"
  source 1..573: mol_type = other DNA
atgcggacagtggtcttgacaatgaaggcctctgttatagaaatgtttctcgtgctgctggtgacgggagtgcacagcaacaaggagacggccaaaaagatcaagaggccgaagtttacagtaccccaaattaactgcgatgtcaaggcagggaaaattatcgacccagagttcattgtgaagtgtcctgcaggatgtcaggaccccaaataccacgtctacgggaccgatgtgtacgcctcatatagttcagtctgtggagcagccgttcactccggagtgcttgataactccggtggtaaaattctcgtacgtaaggtggcagggcagtcaggctacaaaggtagctattcaaacggtgtgcaaagcctgagcctgcctaggtggcgcgagagttttatcgtgctggaatccaaacctaagaagggcgtaacatatccttctgccttaacttacagctcatctaagagccctgccgcccaggcggacctttggagtacagctacatacacctcatcccaaaataggccgagagccgaccccgtgcagcggcaaccgtgttactccctgtag

SEQ ID NO: 6103 - DNA, 399 bp, synthetic construct
  misc_feature 1..399: note = source = /note="Description of Artificial Sequence: Synthetic coding sequence"
  source 1..399: mol_type = other DNA
atggcaccctcaccgcggactggctcccgacaggacgcgaccgcccttcccagcatgagctctacgttctgggcctttatgattctcgcttccctgttgattgcgtactgctcacagctggccgcaggaacttgcgaaattgtgacgctggatagagactcatcccagccacggaggactattgctagacagacagctaggtgtgcatgccgaaagggccagatcgccggaaccactagagcccggcccgcttgcgtcgacgcaagaataattaagacaaaacagtggtgcgacatgcttccatgcctcgaaggcgaaggttgcgacctcctgatcaaccgaagcgggtggacctgtacgcagccaggtggcagaatcaagaccacgacagtctcctag

SEQ ID NO: 6104 - DNA, 957 bp, synthetic construct
  misc_feature 1..957: note = source = /note="Description of Artificial Sequence: Synthetic coding sequence"
  source 1..957: mol_type = other DNA
atgctcccccttaccatgacagttctcattctgcttctgctgcccacgggacaggctgcaccgaaggacggagtcactagacctgacagtgaggtacagcaccaacttctgcccaacccctttcaaccgggccaggaacaactggggctcctgcagagttatctgaaaggccttgggcgtacagaggtgcagctggagcacttgtcacgcgagcaggtcctactgtatctgttcgctcttcacgattacgaccagtcagggcagctcgatggcctagaactgctgagtatgcttaccgccgctctcgctcccggggccgctaatagcccaaccaccaaccccgtaatcctaatagtggacaaagtgctcgaaactcaggacctaaacggagatggtcttatgacccccgccgaactcataaacttcccaggcgttgccctcaggcatgtcgaaccaggggagcctttggccccatctcctcaggaaccccaggccgtgggtcgtcaatctttacttgctaaatctcctctcagacaggagacacaggaggcacccggacctcgcgaggaggccaaagggcaggtcgaagctcggagggagtccctcgacccagtgcaagagcctggagggcaggccgaggccgatggcgacgtgccaggcccccggggagaggccgaggggcaagccgaggctaagggggatgcacccggcccacggggcgaagcaggaggtcaggcagaggcagagggcgatgctcctgggccacggggagaagccggcggccaggccgaagccgagggcgacgcacctggtcctagaggagaggccggcggacaggcagaggcgagagaaaatggtgaagaagctaaagagctgcccggtgagactttggaatcaaaaaatacacaaaatgattttgaggtgcacatcgtgcaggtcgagaatgacgagatctag

SEQ ID NO: 6105 - DNA, 399 bp, synthetic construct
  misc_feature 1..399: note = source = /note="Description of Artificial Sequence: Synthetic coding sequence"
  source 1..399: mol_type = other DNA
atgctgcccctaaccatgaccgtgctcatccttttgctgttgccgaccggtcaggcagccccaaaagacggagtcacacgcccagacagcgaagtgcagcatcagctccttcctaacccttttcagccaggtcaggaacagctgggcttgctgcagtcttatctgaaggggctgggtcggacagaggtacagctggagcacctatcgcgcgagcaagtgcttctctatttgtttgcccttcacgactacgaccaatctggccagctcgacggactggagttattgagcatgcttacggccgctctggctcccggggcagcgaacagccccactacaaaccctggaaatttggatgccaggttggatggaggtgagaaagcgatgcagccacagtggtag

SEQ ID NO: 6106 - DNA, 732 bp, synthetic construct
  misc_feature 1..732: note = source = /note="Description of Artificial Sequence: Synthetic coding sequence"
  source 1..732: mol_type = other DNA
atgcttctaagtctcctaggcgcatgcgcggtggtcggccctttccacggccccgagtgggaacccgtccaaggcctgctcagtcaaaatcatagttgtagagacccccaatgctgcggcaatctcctcgttttatgcctcttcctggtctggcaggtgagacattgttggcaccaggtaacgcgcacccgattctctacacgcaatgtgatcaaagtgcccctacagaaaagagctgtgccgagcatgagatgcgagaccgtattcaagcttacacccgaatttttttctcccggcaagagtcggggtctggattcacagcaatgtgcccaaagacagcggtggggttacagaaggtccctgcaggagagttgggcccaaaacctgctgagccctcagcatccctgccctgggccccccagtggggtacacacacacagtgaacccattttctgtaccacgtctatttccaacacatgcctgttgccccagaattcaagttggaaggcctggcaggtgccttggtgcctacacgatggacagactagaccagcactcgacatgtgtcaggagatggagcagctgttactacactcccaggagcgtctggtctcactggaacccgtcatatccgttcgtagccgcccgacgagtatgactcttactacaagcttacccaacctgttgtctgctgaacgattgcagttttgcccgcaacgggcaccagcctag

SEQ ID NO: 6107 - DNA, 2505 bp, synthetic construct
  misc_feature 1..2505: note = source = /note="Description of Artificial Sequence: Synthetic coding sequence"
  source 1..2505: mol_type = other DNA
atgaagcacaccttggccctgctggcccctctccttggtctggggctgggtctggcactatcccagttagcagcgggtgcaacagactgtaagttcttgggcccggccgagcacctgactttcactcctgccgctagagcccgatggctggcccccagagtgcgagctccaggtcttctggattccttatatgggacagtgagaagattcctgagcgtggtccagctaaacccttttccttctgaactcgtaaaggctctgctgaacgaacttgccagcgtgaaggtaaatgaggtggtgaggtatgaagccggctacgtggtgtgtgccgtgatcgcgggcctttacttactgctagttccaaccgcaggtttgtgcttctgctgttgcaggtgccataggaggtgcggtggaagggtaaaaaccgagcacaaggcactcgcctgtgaaagagctgccctgatggtgttcttgctcctgaccacactcttactgctgatcggcgtcgtctgcgccttcgtcaccaaccagcgcactcatgaacagatgggtccctccatcgaggccatgccggaaacgttgttatccttatgggggcttgtgagtgacgtcccccaggaactgcaagcagttgcccagcagttcagtctacctcaggagcaggtgtctgaggagttagatggcgttggcgtctccataggaagtgcaatccacacccagctacggtcctcagtgtatcctctgttggcagccgtggggagccttggccaggtgctgcaagttagtgtgcaccatctgcagaccctcaatgcgacagtggtagagctgcaagccggccaacaggatctggaaccggcgatcagggagcatcgggaccggctgctggaacttctccaggaagcgcgttgtcaaggtgactgtgccggcgcactctcttgggcgaggacactggagctgggagctgacttttctcaggtgccaagcgttgaccacgtgctacatcagttaaagggcgtgccagaagccaatttttcctcaatggtacaagaggagaatagcacttttaacgcactgcctgctttggccgctatgcagacatccagcgttgttcaggaactgaagaaggcggtggctcaacagcccgagggagttcggacattggcggaaggatttccaggcctggaagcagcaagccggtgggcacaggccctccaggaggtcgaagagagttcaagaccctacctgcaggaggttcagagatacgaaacttatcggtggattgttggttgtgtgctatgttccgtcgtgctttttgtggtgctttgcaacctcctgggtctgaacctcggtatctggggactctccgcccgagacgatccgtcccaccctgaagcaaagggagaagccggggcaagatttctgatggcgggagtcggactttctttcctgttcgcagcccccctaatactgctcgtgtttgcaacctttcttgtcggtggaaacgttcagacgctagtgtgccagagttgggagaatggcgaactcttcgaattcgctgacacgcctggcaaccttcccccgagtatgaacctgtcccagctgctgggcctgagaaaaaacatcagtatccatcaggcataccaacagtgcaaggagggagccgccctgtggacagttctgcagctgaacgactcctacgatctagaggaacatctagacataaaccagtatacaaacaagctgaggcaggagctgcagtctcttaaagtggacacgcagtcactagatctgctgtccagcgccgctcgacgcgacttagaagccctacaatcgtctggccttcagagaattcattatcccgacttcctcgtgcagattcagagacccgtggttaagactagcatggaacaactcgcccaagaactgcaaggcctagctcaagcacaggacaattccgtactcggccaacggctccaggaagaggctcagggactgcgtaacctgcatcaggagaaggttgtgccccaacagtctctcgtggcgaaactgaacctgagcgtccgtgccctggaaagctcagctccgaacttgcagttagagacctccgatgtactcgccaatgtgacatacttaaagggggaactcccagcatgggcagctcggatcctccgcaacgtctcagaatgtttcctagccagggaaatggggtatttttcgcagtacgtggcatgggtccgtgaagaagtcactcagcgcatcgctacctgccagccactgagtggggcactggataatagccgggttattctctgcgacatgatggcggacccttggaatgcattctggttttgcctagcttggtgtacctttttcctgatcccatccatcatttttgccgtgaaaacgtcaaagtacttccggcctatccgcaaacgactgagttcaaccagcagtgaggagacccagcttttccatatcccacgcgtgacatccctcaaactctag

SEQ ID NO: 6108 - DNA, 1185 bp, synthetic construct
  misc_feature 1..1185: note = source = /note="Description of Artificial Sequence: Synthetic coding sequence"
  source 1..1185: mol_type = other DNA
atgtggaggtgtccactcgggttattgctcttactgcccctcgctggccatctggccctaggtgcacaacagggacggggtcggagggaactggccccgggcctgcacctccgcggaatccgcgacgcgggcggccgatactgtcaagagcaggacctctgttgcaggggccgggctgacgactgcgcactgccctatctgggagccatatgttactgtgatctgttctgcaatcgcactgtcagcgattgctgccctttccctcccatccagggctgcatgcatggaggccgtatttacccagtgctcggcacttactgggacaactgcaacagatgtacctgccaagaaaatagacagtggcagtgtgaccaggaaccatgcttggtcgatccagatatgattaaggccattaaccagggcaattacgggtggcaagccgggaatcatagtgctttctggggaatgacgcttgatgaagggatcaggtatcgactgggcaccatacgtcccagctccagcgttatgaacatgcacgaaatttacactgttctaaatcccggcgaggtcctgccaacggcattcgaggcaagtgaaaaatggccaaatctaatccacgaaccattggatcagggcaactgcgcaggcagctgggctttctccactgccgcagtggcttccgaccgggtctccatccactcactcggccacatgaccccggtcctgagtcctcagaacctgctctcatgcgacacccaccaacaacagggatgcaggggcggtagactggatggcgcctggtggtttttgaggcgacggggagtggtctctgatcactgttacccatttagcgggagagagcgcgacgaggctggtcctgctcccccttgtatgatgcattccagggcaatgggaaggggcaagagacaggctacagcccattgtccaaactcgtatgtgaataataacgatatttaccaggtgacgccagtatatcgcctcggctccaacgataaggagattatgaaggaactgatggagaatggaccagtccaggcactgatggaggtccatgaggatttcttcctttataagggcgggatttacagccacaccccagtaagtctgggccgccctgagcgctataggagacacggtacacattcagtgaagatcaccggctag

SEQ ID NO: 6109 - DNA, 303 bp, synthetic construct
  misc_feature 1..303: note = source = /note="Description of Artificial Sequence: Synthetic coding sequence"
  source 1..303: mol_type = other DNA
atggctgcagcgctggcactcgtcgcaggggtgctctccggggccgtcctgccactctggagcgcactcccccagtacaaaaaaaagatcaccgaccgttgttttcaccatagcgaatgctacagcgggtgttgcctcatggacctggattccgggggtgccttttgtgccccacgtgcccgaatcactatgatttgcttgccacagaccaaaggagctacgaatattatttgtccatgtaggatgggccttacctgcatcagtaaagatctgatgtgttcaagaagatgccacatgatttag

SEQ ID NO: 6110 - DNA, 978 bp, synthetic construct
  misc_feature 1..978: note = source = /note="Description of Artificial Sequence: Synthetic coding sequence"
  source 1..978: mol_type = other DNA
atgagattaccaagacgcgccgccctcggccttcttccccttcttctcctgctgcctccagcgcccgaggctgcgaaaaaacctacgccgtgtcatcggtgccggggcctggtcgataagttcaatcaggggatggtggataccgccaagaaaaacttcggtggtgggaatacggcttgggaggaaaagactctgtctaaatacgagtccagcgaaatcagactgctggaaatactagagggcctatgcgaatcatcagactttgagtgcaatcaaatgctggaggcccaggaagagcacttggaagcttggtggctccagctcaaatccgaatacccggacctgtttgagtggttttgcgttaaaactctgaaggtctgctgcagtcccggaacatatgggccagattgcctggcttgtcaaggagggagtcagagaccatgcagtggcaacggtcattgttcaggtgacggttcgcgccagggggacggatcatgtaggtgtcacatgggctatcaggggcccttatgtactgactgcatggacggatatttcagctcgctgaggaatgagactcactccatctgtactgcctgtgatgagagttgcaaaacttgttctggcctgactaacagggactgtggtgaatgtgaggtgggctgggtcctcgatgaaggagcctgtgtcgaatgcgacagcagttgcgtgggttgcaccggtgaaggaccaggcaactgtaaggaatgcatttccggctatgccagggaacacgggcagtgcgctgatgttgacgagtgctccttggcagagaaaacttgcgttcgaaaaaatgaaaattgttataacaccccggggtcatacgtatgtgtgtgtccagacggattcgaggaaaccgaggatgcttgtgtgccaccagctgaggctgaggccaccgagggtgagagtcccacccagcttcctagtagggaggatctgtag

SEQ ID NO: 6111 - DNA, 459 bp, synthetic construct
  misc_feature 1..459: note = source = /note="Description of Artificial Sequence: Synthetic coding sequence"
  source 1..459: mol_type = other DNA
atgcgtggtcctgggcatcctttgcttctcggtctcctgctcgtgcttggggctgctggccgcgggcggggtggggctgagcctcgggaaccagcagacggtcaggcccttctgagactggtcgtggaactggtccaggaattgaggaaacaccactcagccgaacacaagggcttgcagctgctggggagagactgtgcgctcggccgggccgaagccgcaggcctcggcccgtcaccagagcagcgagtggagattgtgcccagagacttgaggatgaaggataagtttttgaagcatctgacagggcccctgtacttctctccaaagtgtagcaagcatttccataggctttatcacaataccagggactgcacaattcctgcctactacaagaggtgcgcccggctgctgactcgcttagctgtttcaccagtctgtatggaggataaacaatag

SEQ ID NO: 6112 - DNA, 411 bp, synthetic construct
  misc_feature 1..411: note = source = /note="Description of Artificial Sequence: Synthetic coding sequence"
  source 1..411: mol_type = other DNA
atggctaggacaaaacaaacagcccggaaatccaccgggggcaaggctccgcggaaacagcttgcaaccaaggccgcccgcaaatcagcacccgctaccgggggcgtcaaaaagcctcaccggtaccgaccgggcacagtggccctccgagaaatacgtcgctaccagaagtctaccgaactcctgatccgtaagctgccgttccagcgcttggtgcgcgagatagcgcaagacttcaagacagacttgaggttccagagtagtgctgttatggcacttcaagaggcgtctgaggcatatttggtgggcctgttcgaggataccaacctgtgcgcgatacacgctaagcgggtgacaatcatgccaaaggatattcagctggctaggagaatcaggggcgagcgcgcttag

SEQ ID NO: 6113 - DNA, 1209 bp, synthetic construct
  misc_feature 1..1209: note = source = /note="Description of Artificial Sequence: Synthetic coding sequence"
  source 1..1209: mol_type = other DNA
atgagattacctcggagagcggccctgggcctgctcccactgctgttattgctcccacctgctccagaagctgctaaaaagcctaccccatgccaccgctgcagggggttagtggacaagtttaaccaggggatggttgacacagccaagaagaatttcggcgggggcaatacggcatgggaggagaagaccctgtcgaaatacgaatcctccgagatcaggctgctggaaatcctagagggactgtgtgagagttctgacttcgagtgcaatcagatgctcgaggcacaggaggagcatttagaagcttggtggctgcagttgaagtctgagtatcccgatctgtttgagtggttctgcgtaaagaccctcaaggtgtgctgttctcccggaacgtacggcccggattgtttggcatgccaaggtgggtcacagcgcccgtgttccggcaatggtcattgttctggggacggcagcaggcagggagacggatcatgtcgctgccacatgggctatcagggacccctgtgtactgactgcatggatggctattttagttccctgcgaaacgaaacacattctatatgcaccgtgaggacgggtctaagtgactcctacccgccttgctgcctatctcttggttgctggagaggggtgggacacgcttggatccggggacgcaatacacatactcagcccggctacagctcaagagtttggatcgctgccttcagtccggcctgcgacgagtcctgcaagacatgctccggactaactaaccgggactgtggagagtgtgaggttggttgggtgcttgatgagggtgcctgtgtagacgtggacgagtgtgcagccgagccacctccctgtagtgctgcgcagttctgcaagaacgcgaatgggtcctatacatgcgaagagtgcgactctagctgtgtgggctgcactggagagggaccgggaaattgtaaagagtgcatttccggctatgcaagggagcacggtcagtgcgccgatgtggacgagtgctccttggccgaaaaaacatgtgtgcggaagaatgagaactgctataataccccgggtagctatgtttgtgtgtgccctgatggattcgaagagactgaggacgcatgcgtgccccccgctgaagccgaggccactgaaggggagagtccaacccaactgccttcccgcgaagatttatag

SEQ ID NO: 6114 - DNA, 633 bp, synthetic construct
  misc_feature 1..633: note = source = /note="Description of Artificial Sequence: Synthetic coding sequence"
  source 1..633: mol_type = other DNA
atgtcagccggcaagatgatgaggaccctcatcacaacacaccccttacctcttcttttgctgccccagcagctgctccagctggtgcaatttcaagaagttgacaccgactttgattttccagaggaagataaaaaagaggagttcgaggagtgcttagaaaagttcttctcgacggggcccgcccgtccacctaccaaggaaaaagttaagcggcgagttctgattgagccaggcatgccccttaaccatatagagtactgcaaccatgagatcatgggtaagaacgtatattataagcacaggtgggtggctgaacactacttccttctgatgcagtatgacgaattgcaaaagatctgctataacagattcgttccttgcaagaacggcatccgcaagtgtaatagatctaaaggtctggttgaaggagtgtattgtaatctcaccgaggccttcgagatcccagcttgcaagtacgagagcctttataggaaagggtatgtattgattacttgcagctggcagaacgaaatgcagaagaggatcccgcatactataaacgacttggtagagccgcccgaacacagaagcttcctgtcagaggatggggtcttcgttatcagcccttag

SEQ ID NO: 6115 - DNA, 585 bp, synthetic construct
  misc_feature 1..585: note = source = /note="Description of Artificial Sequence: Synthetic coding sequence"
  source 1..585: mol_type = other DNA
atgaccatgcgccataattggacaccagacctgagtccattatgggtgctactcctgtgcgctcacgtcgtgaccctccttgtgcgcgccacacctgtgtcccagactacaacggccgccacagcctctgtacggagcaccaaagacccttgcccctcccagcctccagtgttcccagcagctaagcaatgcccagcactggaagtgacttggcctgaagtcgaggtcccactgaacggtacactctccctgtcgtgtgtggcatgctctcggttccccaatttctccatcctatattggttagggaatggtagcttcatcgaacacctgcccggcagattatgggagggctctaccagcagggagagaggatctacgggaactcaactgtgcaaagccctggtgctagagcagctaacccctgctctgcactctacaaacttttcttgcgtgctggtggatcctgagcaggtggtacagcgacatgttgtgctggcccagctatgggccggcctgagggctacactgccccccacccaggaagccctcccatccagtcacagctccccacaacagcaaggatag

SEQ ID NO: 6116 - DNA, 4059 bp, synthetic construct
  misc_feature 1..4059: note = source = /note="Description of Artificial Sequence: Synthetic coding sequence"
  source 1..4059: mol_type = other DNA
atgcgccatggtgtagcttgggccctacttgtcgctgccgctcttggcttgggagcaagaggcgttcgcggagccgtggcgctcgctgacttctacccatttggcgccgaacggggcgatgccgtcacgccaaaacaagatgacgggggctcagggctgaggccgttaagcgtcccattccccttcttcggtgccgagcattccggactgtatgttaataataacgggataatttcctttcttaaagaagtctcccagtttacacccgttgcattccctatcgcgaaggatcggtgtgtagttgcggcgttctgggctgatgtggataataggcgcgcgggagacgtgtattacagggaagctaccgacccagctatgctgcggcgggccactgaggatgtgaggcactactttccggagctgctcgacttcaacgccacgtgggtattcgtggcgacctggtatagggtaaccttttttggagggagcagctcctcccccgtaaacacattccaaacagtacttattaccgatggcaagctgtcattcaccatttttaactacgagtctatcgtgtggaccactggaactcatgctagcagcggcgggaatgctactgggctgggcggcatcgccgcccaagcaggcttcaatgctggggacgggcagagatatttctcgatccctgggtcccgaacggctgatatggccgaagtcgagacaactaccaacgtcggggtccctggccggtgggcctttcgcatagacgacgcgcaagtcagggtgggtgggtgtggacataccacctcagtatgtctggcattgcgcccatgtctgaacggcgggaagtgtattgatgattgcgttaccgggaatccatcatatacttgtagttgcctgagtggctttaccggaagaagatgccacctggatgttaatgaatgtgcctcccagccatgccagaacggtggaacctgcacacatgggatcaacagttttaggtgccagtgcccggctggctttggagggcccacctgcgaaacagctcagtcaccctgcgacactaaggagtgtcaacatgggggccagtgtcaggtggagaacggttcggctgtctgtgtatgccaggctggctatacaggcgcggcctgtgagatggatgtggatgattgcagcccagatccctgccttaacggtggatcatgcgtagacctagtgggcaactacacttgcctatgcgcggagcccttcaaggggctccgttgtgagactggtgaccaccctgtgcccgacgcctgtttgtcggcaccctgccataacggcggtacatgcgtcgatgctgatcaagggtacgtctgtgaatgccccgagggcttcatgggcctcgattgtcgggaacgggtgccagacgactgcgagtgtagaaatggcggtcgctgtctgggtgccaataccactctgtgccaatgcccgctcgggtttttcggcctgctttgtgaatttgagatcacagctatgccgtgtaacatgaacactcagtgccccgacggcggttactgcatggagcatgggggatcttacctctgtgtctgtcataccgaccacaatgctagccattcactgccttccccctgcgatagcgacccatgtttcaacggcgggtcatgtgacgcacatgatgattcatatacttgcgaatgccctcgaggatttcatggcaagcactgtgaaaaggcccgtccccacctctgctccagtggcccttgtaggaacggggggacatgtaaggaggccggcggtgagtatcactgctcatgcccctatcgctttacagggagacattgcgaaattgggaagcctgatagctgcgcctcagggccatgtcacaatgggggcacatgttttcattacatcgggaagtataagtgcgactgcccacctggcttctccgggcgccactgtgaaatcgctccatctccttgcttccggtctccttgtgtcaatggcggcacttgcgaagacagagataccgactttttctgtcattgtcaggcaggttatatgggaagacggtgccaggctgaagtggactgcggacctcccgaggaagttaaacacgccactttacgcttcaacggcacgagattaggtgcggtcgccctctacgcatgtgatcggggatactctttgtccgccccttcgaggatccgggtgtgtcaaccccatggcgtgtggtcagagccccctcagtgcttagaaatcgacgaatgccgaagtcagccgtgtctgcatggtggatcttgtcaagatagggtcgcggggtacctgtgcctctgttccaccggctatgagggggctcattgcgagctagagagagacgaatgtcgcgcccacccttgccgaaatggcgggagctgcagaaacttgcctggggcgtatgtttgtcgctgtcctgctggattcgtcggggtgcactgcgagaccgaggtcgacgcctgcgactcttctccgtgccagcacggagggaggtgtgagagcggaggcggggcctatctgtgcgtttgccctgagagtttctttggttaccattgcgagacagtcagcgatccatgcttcagttccccctgtggtggccggggatattgcttggcctcgaacgggtctcatagctgtacatgcaaggttgggtacaccggagaagattgcgcaaaggaacttttccctccaactgccctgaaaatggagagggtcgaggagtcaggtgttagcatctcctggaatcctccgaacgggcccgccgcacgtcaaatgttggatggttacgcagtcacatacgtgtcaagcgacggctcatatagacgtaccgatttcgtagaccggacgagatcaagtcatcagttacaagcactcgcagccggacgcgcatacaacatctccgtgttcagtgtgaagagaaatagtaacaataaaaatgacataagtcgtccggctgtccttcttgcaaggacccgacccaggcctgtggagggtttcgaagttactaacgttaccgcctctaccatctccgtccagtgggccctccatcgaatcagacacgccacggtgtcaggggtgagagtgtccattagacaccctgaggcgctgcgggaccaggctacggacgttgaccggtccgtggatcgctttaccttcagggcactgcttccgggcaaacgctataccattcaactcaccacactgtcaggcctgcgtggtgaggagcatccaactgaatccctggccactgctccaacgcacgtttggaccagacctctccctcccgcaaacctaaccgccgcccgggtgactgctacttcggctcacgtagtgtgggatgcgcccactccagggtctcttttggaagcttacgtgataaacgtaactacctcccagtcaacgaaaagcagatatgtacccaatggcaaactcgcttcctacacagtgcgcgatcttttgcccgggagaagataccagctttcagtaatcgccgtgcaaagtactgagctgggtccgcaacattccgagccggcgcacttgtacataatcacttcccctcgcgatggtgccgatcgccgctggcaccagggaggacatcacccgagggtactgaagaaccggcccccacctgcaaggctgcctgagctccgtttactcaatgaccattcagcacccgaaacccccacccagccccccagatttagtgaattggtcgatggcaggggccgggtatctgccagatttggaggttctccatcaaaggcggccaccgtgcgatcccacgtgcctggtaattgcagtgagaacccttgtcagaatggcggaacatgcgtgcctggagccgacgcacacagctgcgactgcggtccgggctttaagggccgaaggtgtgagctggcgtgcatcaaggtgagcagaccgtgtacgcgccttttcagtgaaaccaaggcttttcctgtgtgggaaggcggcgtctgtcaccacgtgaaacagagcaaatcgcagaccctggagaagtcttag

SEQ ID NO: 6117 - DNA, 957 bp, synthetic construct
  misc_feature 1..957: note = source = /note="Description of Artificial Sequence: Synthetic coding sequence"
  source 1..957: mol_type = other DNA
atgctcccactgactatgaccgtgcttatcttgctcctgctccctacagggcaagctgctcctaaagacggcgtgacacgtcctgattctgaggtgcagcaccagctgctgcctaatcccttccagcctggacaggagcaactgggactcctgcagagttacctcaaggggctgggccggacggaggtacagttagaacacctaagtagagaacaggtcttactgtacttgtttgctttacatgactatgaccagtccgggcagctggatggccttgagttgctgagtatgctgacagccgctttagcacccggtgctgctaactctccaacaacaaacccagtgatcctgatcgtggataaagttctcgaaactcaggatctgaatggcgacggtcttatgacaccagccgagctcatcaacttcccaggtgtggcacttcggcacgtcgagcccggtgagcccctggcccctagtccccaggagcctcaggctgtaggccgccagtctttgctcgcaaaaagcccactcaggcaagaaacacaggaagcccctgggccgcgcgaagaggctaaaggccaggttgaagcccgtcgggagtccctggaccccgttcaggagcccgggggacaggccgaagctgatggggacgtgccaggcccaagaggcgaggccgagggacaggccgaggccaaaggcgatgctcctggccccagaggcgaagcagggggtcaggctgaggctgagggcgacgccccaggccctagaggggaggccggaggacaggcagaagctgagggtgatgctcccggccctcggggcgaagcaggggggcaggccgaagcacgcgagaatggagaagaggcaaaggagctgcctggtgaaacactggagtctaagaacactcaaaacgacttcgaggtgcatatcgtgcaggtcgaaaatgacgagatttag

SEQ ID NO: 6118 - DNA, 816 bp, synthetic construct
  misc_feature 1..816: note = source = /note="Description of Artificial Sequence: Synthetic coding sequence"
  source 1..816: mol_type = other DNA
atgcaggcggcatgttggtacgttctgtttctgctccaaccgactgtgtaccttgtgacctgcgcaaatctgacaaacggtggcaagtccgaactgctgaagtcagggtcaagcaagagtaccttaaaacatatttggactgagagctcaaaggatctttctattagtagattacttagccagaccttccgtggtaaggagaacgacactgatctggatctgagatatgacaccccagagccctatagtgaacaggatttgtgggattggctcagaaacagcactgatctgcaggagccccgaccacgcgccaaacggcggccaatcgtgaaaaccggcaagttcaagaaaatgttcggctggggagatttccactcaaatattaagactgtgaagctgaatctgctgatcacaggcaagatcgtggaccacggaaatggaacgtttagtgtgtatttcagacacaacagtaccggtcagggtaacgtctctgttagtctggtcccaccaacgaagattgtagagttcgacctagcacaacaaactgtaatcgacgcgaaggattccaagagttttaattgtcgtattgagtacgagaaggtggacaaagccacaaaaaacaccctttgtaactacgatccaagtaaaacttgttaccaggagcaaacccagagtcacgtgtcgtggctgtgtagtaaaccgttcaaggtgatttgcatttacatatcattctattctaccgactataagctggttcagaaagtatgtcctgactataattatcatagcgacactccatatttcccctccgggtag

SEQ ID NO: 6119 - DNA, 999 bp, synthetic construct
  misc_feature 1..999: note = source = /note="Description of Artificial Sequence: Synthetic coding sequence"
  source 1..999: mol_type = other DNA
atgttgttgctggctgctgctttcctggttgcattcgttttgttgctgtatatggtgtcccctctgattagcccaaagccactagctttaccaggcgcacacgttgttgttaccggaggatcatcggggatcggaaagtgtattgccatcgaatgttataaacagggcgcctttatcactttggtggctcgcaacgaagataaacttcttcaggctaagaaggagatcgaaatgcactcaattaacgataagcaggtggtgttgtgcatttcagttgatgtgtcacaggattataaccaggtggagaatgtcatcaaacaggctcaggagaaactgggcccagtcgatatgctcgtcaactgtgctgggatggccgtgtcaggcaaattcgaggacctggaagtctcgaccttcgagaggctgatgagcataaattacctggggtccgtgtatccatcgagggccgtgatcaccaccatgaaggagagaagggtcggacgcatcgtcttcgtgtcctcacaagccggtcagctcggcctgttcggatttacagcgtatagtgcctcaaagttcgccatcagaggactcgccgaggcactgcagatggaggtgaagccttacaacgtctatataaccgttgcctatccgcctgacaccgacacccccgggttcgcagaagaaaaccggaccaaacctctcgaaactaggctcatcagcgagacgaccagcgtgtgcaagcctgagcaggtggcgaaacaaattgttaaggatgctattcagggcaacttcaactcgtcactgggctcagatgggtacatgctgagcgcactcacttgcggcatggctccagtgacctccatcactgaaggactgcagcaagtggtgaccatggggctgtttcgtaccatcgccctcttctacctcggttcattcgacagtatagtcaggcgctgtatgatgcagagggagaaatccgagaatgccgataagacggcatag

SEQ ID NO: 6120 - DNA, 1497 bp, synthetic construct
  misc_feature 1..1497: note = source = /note="Description of Artificial Sequence: Synthetic coding sequence"
  source 1..1497: mol_type = other DNA
atgtcattctccgccacgatactgttttctcccccgagcggatccgaagccaggtgttgttgctgcgcatgtaaatctgagaccaacggcgggaacacaggctcccagggcggaaatcccccgccctctacacccatcaccgtaacaggacacgggctggcagttcagtcctccgaacagctcctccacgttatataccagagagtggacaaagcagtgggcctggcagaggccgcactgggactcgcacgcgctaataacgaacttctgaagcggttgcaagaagaagttggcgatctgagacaggggaaggtctcgatcccagacgaggacggcgagtcgcgcgcccattcatctccaccagaggaaccaggtccgctgaaggaatctccaggcgaggcattcaaagcgctttcagccgtggaagaagaatgcgatagcgtgggtagcggtgtacaggtggtgatcgaggaactccgacaactgggtgctgccagtgttgggcctggccctctgggtttccctgccactcagcgtgatatgagattgcccggttgtacactggcagcgtccgaggcggccccactcctgaaccctttggttgacgattacgtagccagtgagggggctgttcagcgcgtgctagtgcccgcctacgccaagcaactatcacccgcaactcaactggctatccagagggccactcccgagacgggacctgaaaacggcacaaaattacctccaccacggccagaagacatgttgaatgccgctgctgcgcttgactctgcactggaggagtctggccccgggtccactggggagcttcggcactctctcggcctgactgtgtcaccctgtcgcaccagagggtctggtcagaagaactctaggcggaagagggatctagtactcagtaagctggttcataatgtgcataaccacattacaaacgacaaacggttcaacggatcagagtccataaagtcatcttggaacatttccgtggtcaaatttctgttggaaaaactgaagcaggaactagtgacatccccgcacaattataccgataaagagctgaagggggcatgcgtggcttacttcctgactaagcgaagggaataccgtaacagcttaaacccttttaaaggattgaaggaaaaggaggagaagaaactacggtctcggagataccgcctttttgccaataggagctcgatcatgcggcattttggacccgaggatcagcgcctgtggaacgatgttaccgaagagttaatgtctgacgaggaggactcactgaacgaaccagacagactgccttcggctgaggctcagttgctgccaccagagctttacaaccccaactttcaggaagaggaggacgaaggtggagatgagaacgcccccgggagcccaagtttcgatcagccccacaagacctgctgtcccgatctgaactcgtttatagaaataaaagtggaaaaagacgagtag

SEQ ID NO: 6121 - DNA, 966 bp, synthetic construct
  misc_feature 1..966: note = source = /note="Description of Artificial Sequence: Synthetic coding sequence"
  source 1..966: mol_type = other DNA
atgcgcctgccccgtcgggctgccctgggcctgcttcccctgttgctcttattgccacctgcgcccgaagcggccaaaaaaccaaccccatgtcataggtgtcgtgggctggtggataagttcaatcagggcatggtggacacagccaagaagaattttggcggtggcaacactgcatgggaagagaagactctgtcaaagtatgagtcaagcgagattcgactgctggagatactagagggcctctgcgaaagttctgattttgagtgtaatcaaatgctggaagcccaggaagagcatctagaggcctggtggttacagttaaaaagtgagtatcctgatctttttgaatggttttgtgtgaagactctgaaagtgtgttgttctccggggacttacggacccgactgtttagcctgtcagggtggctcacagagaccgtgtagcgggaacgggcattgcagcggggacggttctagacagggcgacgggtcatgcaggtgtcatatgggctatcaaggacctctgtgcactgattgtatggatgggtacttcagctcgctccgtaatgagacgcactcaatctgcactgcctgcgatgagagttgtaagacctgtagcggactgacaaatcgggattgtggcgaatgcgaggttggatgggtgctcgacgagggagcctgcgtggatgtggacgagtgtgccgcggagcctcctccctgcagtgccgcccagttctgtaaaaatgccaacggcagttacacttgcgaagatgttgacgagtgttctcttgccgagaagacatgcgttcgcaaaaatgagaactgctacaatacccccgggagctacgtatgcgtgtgccctgacggattcgaggagacagaggacgcatgtgtcccgcccgccgaggccgaagcaacagagggtgaaagccccacccaattaccaagccgtgaagacctgtag

SEQ ID NO: 6122 - DNA, 711 bp, synthetic construct
  misc_feature 1..711: note = source = /note="Description of Artificial Sequence: Synthetic coding sequence"
  source 1..711: mol_type = other DNA
atgatgggtatttttttagtctatgtaggatttgtgtttttctccgtgctgtatgtccagcaagggctgtcgagccaggctaaatttacagagttccctaggaatgtgaccgcaactgaagggcaaaatgtggagatgtcttgcgcattccagtcaggctctgcctcagtgtacttggagatccaatggtggtttttgcgtggccctgaagatttagaccccggtgccgagggggctggtgcgcaagttgagctcctcccggatcgagatcccgattccgacgggacaaaaatcagtactgtaaaggttcaggggaacgacatttcccataagctgcaaatctcgaaagttcggaagaaagacgagggtttgtacgaatgtcgagtaaccgacgccaactacggtgagctccaggagcacaaagcccaggcttatttaaaggtaaatgcgaatagtcatgctcgtcgaatgcaggcatttgaggcaagccccatgtggcttcaggatatgaaaccacgcaaaaatgtcagcgctgcaataccctctagtattcacgggtcggccaaccagcggacccactccacctccagccctcaggtggtcgccaaaattcccaagcaaagtccacagtctggagctcgcattgccacctcccatggcctaagtgtcctcttgctagtctgtgggtttgtaaagggagcgttactgtag

SEQ ID NO: 6123 - DNA, 273 bp, synthetic construct
  misc_feature 1..273: note = source = /note="Description of Artificial Sequence: Synthetic coding sequence"
  source 1..273: mol_type = other DNA
atgaacatgaaacccgcaacagcgtctgctctgctgctgctgctgttgggacttgcatggacacagggatcccatggctggggagccgatgccagcagccttcaaaaacgagcgggaagggacgaccagaattataactacaaccagcacgcataccccacagcatacggaggaaagtacagcgtcaaaaccccagctaagggaggcgtctccccgagctcatcggccagtcgcgtacagccgggcctgttacagtgggtaaagttctggtag

SEQ ID NO: 6124 - DNA, 360 bp, synthetic construct
  misc_feature 1..360: note = source = /note="Description of Artificial Sequence: Synthetic coding sequence"
  source 1..360: mol_type = other DNA
atgcctgccgttttcatgcttgctagctccagcgccctgcaatgcgggcggggtgtaccacgcttccctagaaccgaggttggcgccggtcattcagtgaacgaagaaactaaagccgagaaagtcggaaaccaaacttccgtcattccagccacaagccgccaggccgccctgggtacatcctggacccagcgaaggacccaacccctgcaggagcgcagccactggcacccccgtggtaataacgctagtggtatgggaggtcaccgcatgtttcctggccccctacgagggcccgcagctcaggttctcgagaacgaatgcgggtccctgggacgggctgcagaaggcagatcttag

SEQ ID NO: 6125 - DNA, 639 bp, synthetic construct
  misc_feature 1..639: note = source = /note="Description of Artificial Sequence: Synthetic coding sequence"
  source 1..639: mol_type = other DNA
atgctatcctccgtcgttttttggggactcatcgccttgattgggacttccaggggtagttatcctttcagccacagcatgaaaccacacctccacccaaggctgtatcacggctgctatggagacatcatgaccatgaagaccagcggagccacgtgtgatgctaacagcgtgatgaactgtggcataaggggcagcgaaatgtttgccgagatggacctcagggctatcaagccttaccaaacgctaataaaagaggtcgggcagcggcattgcgtggaccctgcggtgattgccgcaatcattagccgcgagtcgcacggcggctccgtgcttcaagatgggtgggatcatagaggcctcaagtttgggctgatgcagcttgataagcagacgtatcatccagtgggcgcttgggattcaaaagagcatttgtcgcaggctaccggcatcctgacggagcgcatcaaagcaatccagaaaaaatttccgacctggagcgtcgcccaacacctgaaaggtgggctgtccgccttcaagagtggcatagaagctatcgccacacccagcgatatagacaacgattttgtgaacgacatcatagctcgggctaaattctacaaacgacaatctttctag

SEQ ID NO: 6126 - DNA, 387 bp, synthetic construct
  misc_feature 1..387: note = source = /note="Description of Artificial Sequence: Synthetic coding sequence"
  source 1..387: mol_type = other DNA
atgcgtgttgctcggagaacccggaatgtgtgcagatgcccaagggcggccggccccggcgtccctgaaccaagagcagctccgctgcccctcctggctatggccccacctcctgcttgtagatcaccaatgtcccctccgcccccgccactgcttctactgctgctgtctctggctctcctgggcgcccgcgctcgtgccgagccggcggggagtgccgtccctgcacagtctaggccttgcgtggattgtcatgcctttgagtttatgcaaagggctctccaagatctcagaaaaaccgcctgttctcttgatgcccggaccgaaacactgctgcttcaagccgaacgccgagcgctgtgcgcctgttggccagcaggccattag

SEQ ID NO: 6127 - DNA, 399 bp, synthetic construct
  misc_feature 1..399: note = source = /note="Description of Artificial Sequence: Synthetic coding sequence"
  source 1..399: mol_type = other DNA
atgggtccccgcgtactgcagccccctcttctgctgttgctgttggcactgttgctggccgctcttccgtgtggcgcggaagaagcttcacccctccgccctgcacaggtgaccttgtccccgccacctgctgtaaccaacggctctcagccaggggccccacacaattccacacacactaggccacccggagccagcggtagtgcgcttacgcggtccttttacgttatcctgggattctgcggactaactgcgctctattttttaattagagcttttagactcaagaaaccgcagagaagaaggtacgggctactggccaatacagaagatcccacggagatggcttcactggacagtgatgaggagaccgtcttcgaaagccgaaatctgcgctag

SEQ ID NO: 6128 - DNA, 585 bp, synthetic construct
  misc_feature 1..585: note = source = /note="Description of Artificial Sequence: Synthetic coding sequence"
  source 1..585: mol_type = other DNA
atgtccgcgctgtggctgttgctcggactgcttgccctgatggatctgtctgagagtagtaactggggctgttatggcaatatccagtcacttgatactccgggcgcttcttgtggcataggcagacgccacgggctgaactactgcggtgtgcgggcaagcgagcggcttgctgaaatcgacatgccttacctcttaaagtaccagccaatgatgcaaactatcggtcagaagtactgcatggacccggcagttatcgctggagtgctctcccgcaagtcccctggtgacaaaattctagtcaatatgggcgacagaacctcaatggttcaggaccctggctctcaggctccaaccagctggatctctgaatcccaagtttcacagaccacagaggttttaacaaccagaattaaagaaatccagagacgtttcccaacatggaccccagatcagtatttacggggtggcttgtgtgcatactcgggaggggccggttacgtgcgcagctctcaggacctcagctgtgatttctgcaacgatgtactggcccgcgctaaatatctgaagcggcatggattctag

SEQ ID NO: 6129 - DNA, 441 bp, synthetic construct
  misc_feature 1..441: note = source = /note="Description of Artificial Sequence: Synthetic coding sequence"
  source 1..441: mol_type = other DNA
atggtaattaccatttattatgatgtgaaagtccgctttattgttcggggctgtggacagtacatttcctaccgctgtcaggaaaagaggaacacatatttcgccgagtattggtatcaagcacagtgttgccagtacgactactgcaacagttggagctctcctcagcttcaaagctccctaccagagccacacgacaggcccctggccctgcccctgagtgatagccagatacaatggttctaccaggctctcaatctctcactgcctctccctaactttcacgccggaactgaaccagatggtctggatccaatggtgactctgtccttgaacctggggctctcatttgctgaattgcgaagaatgtatctattcttaaacagcagcggattactggtgctgccccaggcagggctcctaacccctcatccatcctag

SEQ ID NO: 6130 - DNA, 234 bp, synthetic construct
  misc_feature 1..234: note = source = /note="Description of Artificial Sequence: Synthetic coding sequence"
  source 1..234: mol_type = other DNA
atgggatcgagcggccttctgtccctgctcgtgttgttcgttctccttgctaatgtacagggccccgggctgactgactggctcttcccccgccgatgtccaaagatccgcgaggaatgcgagtttcaggaacgcgacgtatgcacaaaagaccgccagtgtcaagacaataagaaatgctgcgtgttctcctgtggcaagaagtgcctggatctgaagcaaggcaaacagtag

SEQ ID NO: 6131 - DNA, 444 bp, synthetic construct
  misc_feature 1..444: note = source = /note="Description of Artificial Sequence: Synthetic coding sequence"
  source 1..444: mol_type = other DNA
atggggcaggaggtccacggcagttgttgggccttgggagccggcggtggccaaagacagtgggttggccggagtatgcctcccctggcaccccagctctgtcgagctgtttttctggtgcccattctcctgcttctccaagttaagcctttgaacgggtccccaggtcccaaagatgggagtcagactgaaaaaacgcccagtgccgaccaaaaccaggagcagttcgaagagcacttcgtggctagctctgtaggggagatgtggcaagtggtcgacatggctcagcaggaagaagatcagtcatcaaagaccgccgcggtccacaagcacagctttcacctgagcttttgtttttcactggctagcgtgatggtcttctctggtggccctttgaggcgcacttttcctaacatccaactgtgtttcatgctgacccactag

SEQ ID NO: 6132 - DNA, 1695 bp, synthetic construct
  misc_feature 1..1695: note = source = /note="Description of Artificial Sequence: Synthetic coding sequence"
  source 1..1695: mol_type = other DNA
atggcgcccaagaagctatcctgcctgcggagcctgctacttcccctgagcctgacactgctcctgcctcaggctgacaccaggtccttcgtagttgataggggtcacgacaggttcttgctagacggagcacccttccgctatgtatctggcagtctacactatttccgggtgccgagggtgctttgggcagatcgactcttgaaaatgagatggtctggcctcaacgctatccagttttatgtgccgtggaactaccatgagccccagcccggagtgtacaactttaatggctctcgcgaccttattgcctttctgaacgaggccgccctggccaacttactagttattttgagacccggcccctacatttgtgcagaatgggaaatgggaggccttccatcctggctcctacggaaaccggagattcacctacggacctctgatcctgcagacaatatgacaaagatctttacgctgctgcgtaagtatgagcctcacggtcctctcgtaaattccgaatattacaccggctggctcgattattggggacagaatcacagcacccgttcggttagtgcagtgactaagggcctggaaaatatgcttaaactcggcgccagcgttaatatgtatatgttccacggtgggactaatttcgggtattggaatggcgctgataaaaagggcaggttccttccaataactacctcatatgattacgacgctcccatatctgaggccggcgaccccacccctaaactgttcgctctgagggacgtaatatctaaatttcaggaagttcctctgggccccctgccaccaccctctcccaagatgatgctcggacctgtgactctgcacctggttggacaccttctggcctttctggacctcctgtgtcctaggggcccgatccacagcattctcccaatgaccttcgaggctgttaaacaggatcacggattcatgctttatcggacgtacatgacacataccattttcgagccgacccctttttgggtacctaacaacggcgtgcacgatcgcgcatacgtgatggttgatggtgtctttcagggcgtagtcgagcgcaatatgcgcgacaagttattccttactggtaaactcgggagcaaacttgacatcctggtagagaacatggggaggctatcattcggctccaacagctccgactttaagggactgttaaagcccccaatcctggggcaaaccatcctgactcagtggatgatgttcccgctgaagattgataatttggtgaagtggtggtttcccttgcagctccctaaatggccttatcctcaggcgccctctggacccactttttatagtaagaccttccctatccttgggagcgtcggagataccttcctgtaccttccaggatggaccaaggggcaagtttggatcaacggttttaatttaggaagatactggactaaacagggaccacaacagacactgtatgtaccacgatttctgctgttccccagaggagctctcaataaaattactcttttggagctcgaggacgtgccactccagccacaggttcagttcctcgacaagcctatccttaattccacttctacactgcaccgcacccacattaactctctctctgctgacactctgtctgcttccgagccaatggaactgtcgggacactag

SEQ ID NO: 6133 - DNA, 423 bp, synthetic construct
  misc_feature 1..423: note = source = /note="Description of Artificial Sequence: Synthetic coding sequence"
  source 1..423: mol_type = other DNA
atgtttttcacgatttctcgaaagaacatgtcgcaaaaactatcgctgctccttctggtgtttgggctgatctgggggcttatgctgctgcactatacttttcagcaacccaggcaccagagcagcgtgaaactgagggagcagatcctagacttgagcaagcggtatgtgaaagcgcttgctgaggagaacaagaacactgtggacgtagagaatggagctagcatggcagggtacgccgatctgaagagaactattgccgtgctcttagacgatatcttgcaacggttagttaaacttgaaaataaggtggattacatcgtagttaatggatcagccgccaatactacaaacggtacctctggcaaccttgtgccggtgactacgaacaagaggactaacgtgagcgggagcatcagatag

SEQ ID NO: 6134 - DNA, 528 bp, synthetic construct
  misc_feature 1..528: note = source = /note="Description of Artificial Sequence: Synthetic coding sequence"
  source 1..528: mol_type = other DNA
atgctgccccccatggcactgccttccgtgtcctggatgctgctgagctgcctgatgctcctgtctcaggtgcaaggcgaggagccgcagcgcgagttgccttctgctcgaatccgctgcccaaaaggctcaaaggcctatgggtctcattgctatgcactgtttctgagcccaaagagctggacagacgccgatttggcttgtcagaagcgacccagtgggaaccttgttagcgtcctgagcggagccgagggatcatttgtaagctctttggtgaagtcaatcggtaactcttatagctacgtgtggatcggtcttcacgatcctactcagggaacggagccaaacggggagggctgggaatggtctagcagtgatgtgatgaactactttgcctgggagcgaaatccctccactattagttctccagggcattgcgcctctctatcgcgaagtacggcgtttcttaggtggaaagactataattgcaatgtgcgcttaccatatgtatgcaaattcacagattag

SEQ ID NO: 6135 - DNA, 381 bp, synthetic construct
  misc_feature 1..381: note = source = /note="Description of Artificial Sequence: Synthetic coding sequence"
  source 1..381: mol_type = other DNA
atgcacctttcccagctgctggcttgtgcacttctgctgactctgctctctctcagaccctccgaggccaaaccaggcgcgccacccaaggtccccagaaccccccctgccgaggaactggctgaaccccaggccgctggggggggccagaaaaagggtgataaggcccctgggggtggtggggctaacctgaagggcgatcgaagccgtctgttgagagatttgagggtcgacacgaagtccagggcagcgtgggccaggctcctccaggagcacccaaacgctcggaagtacaagggagctaataaaaaggggctgagcaagggctgcttcggacttaagttagataggatcgggtctatgagcggcttgggttgttag

SEQ ID NO: 6136 - DNA, 288 bp, synthetic construct
  misc_feature 1..288: note = source = /note="Description of Artificial Sequence: Synthetic coding sequence"
  source 1..288: mol_type = other DNA
atggcaccccctcccgcctgtagaagcccaatgtcacctccacctcctcccctgctactgctattgttatcccttgctctcttaggggctcgcgcaagagccgaaccagctggatccgccgtgcctgcccagagcagaccttgcgtcgactgccacgctttcgagtttatgcagcgggccttgcaggatttgagaaaaacagcatgttctttggacgcccgcaccgagacactgcttctgcaagcggaacgccgcgccctatgtgcttgttggcctgccggtcactag

SEQ ID NO: 6137 - DNA, 423 bp, synthetic construct
  misc_feature 1..423: note = source = /note="Description of Artificial Sequence: Synthetic coding sequence"
  source 1..423: mol_type = other DNA
atgttctttaccatcagccggaagaacatgtctcagaaactatccttgctgttgttggtatttgggttgatctggggactaatgctgctgcactacacattccagcagcctagacaccagagttctgttaagctgagggaacagattctcgacttgtccaagaggtatgttaaggctctggctgaggagaataagaacaccgtcgacgtggaaaacggcgcctcgatggctggttacgccgacctgaagcgtaccatagcagttctgctcgatgacatcctgcagagattagttaaacttgagaataaggttgactatatcgttgtcaacggttcagctgcgaacactactaatggtacttccggaaatctcgttcctgtgaccactaataaacgtacgaacgtaagcgggagtattagatag

SEQ ID NO: 6138 - DNA, 291 bp, synthetic construct
  misc_feature 1..291: note = source = /note="Description of Artificial Sequence: Synthetic coding sequence"
  source 1..291: mol_type = other DNA
atggaacataaggaggtggtactattgctgctcttgttcctcaaatccgggcagggcgaacctctggatgactacgttaatacgcaaggcccatccctctttagcgtgactaaaaagcagttgggagcggggtcgagagaagagtgcgccgcaaaatgcgaagaggacaaagagtttacctgtagggcatttcaataccacagcaaagagcaacaatgtgttatcatggctgaaaacagaaaatctagcattatcattcgcatgcgggatgctgtcctatttgaaaagtag

SEQ ID NO: 6139 - DNA, 678 bp, synthetic construct
  misc_feature 1..678: note = source = /note="Description of Artificial Sequence: Synthetic coding sequence"
  source 1..678: mol_type = other DNA
taagctgaccttccatcttgttggggggccggtccctgttacactggacataaggttggcgcactgcggagagataccgtcatttgctgctgtcggcacggcgattacagcactccttgcctgttcaccccaggaaagccatcacggaaccctagtccctggaagcgtacgctgtggacgctgtcagccccatgggcagggcccgctggctggacaggcgaggagcagaatgccactaaaactggcttaattacccgcaggcctcggccgctgcgccgtcggcctcaccctgcgcccgcctctcccctcccagaaatcatcaggggcaatatccccaggatgcttggaaagtttgtccccgttaattgggagcctccacagccgctgccctttcctaagtacttgagatgctataggtgtcttctagaaaccaaggagctcgggtgcttattagggagcgacatctgtttgactccagccggctcaagttgtattaccctgcacaaaaaaaattcttccggcagcgatgtgatggtatccgactgcagaagcaaagagcagatgagcgactgttcaaacacccgaacatcccccgtgtctggtttttggatcttcagtcagtactgctttctggatttctgtaacgacccccagaatcgcggcttgtataccccgtag

SEQ ID NO: 6140 - DNA, 684 bp, synthetic construct
  misc_feature 1..684: note = source = /note="Description of Artificial Sequence: Synthetic coding sequence"
  source 1..684: mol_type = other DNA
atgggcgcagtcatgggaacattctcgtcacttcagaccaaacagcgcagaccatcaaaagatattgcttggtggtattatcaataccaacgtgataagatagaagatgaattggagatgactatggtctgtcatcggcccgagggattagaacaacttgaggcacagaccaatttcacaaagcgtgaactgcaggttctctaccggggttttaagaacgagtgtccttcgggtgtggtcaatgaggatactttcaagcagatctacgcccagttcttcccgcatggggacgcctcgacttacgctcactatttgtttaatgcttttgataccacacaaactgggagcgtgaagttcgaggattttgtgacagctctaagcattctgctaagggggaccgtccacgagaagttgcgatggacattcaatttgtacgacattaataaggacggctacatcaataaggaagagatgatggatatcgtgaaggcgatctacgacatgatgggaaagtacacctatccagttctaaaggaagatactccaagacagcacgtcgatgtgttctttcagaaaatggataagaataaggacgggattgttactttggatgaatttcttgaaagttgccaagaagatgataatattatgagatcactgcagctatttcagaacgtgatgtag

SEQ ID NO: 6141 - DNA, 546 bp, synthetic construct
  misc_feature 1..546: note = source = /note="Description of Artificial Sequence: Synthetic coding sequence"
  source 1..546: mol_type = other DNA
atgcaggtgaacttcgtttcatatgtgcagttgacaagccgtgcgttgcctagtctgacggatagtaagggcagcttagttgtggtaagtagcttgctaggccgagtgccgacctctttctccaccccctatagcgccgccaaattcgcactggacgggttttttggttcattgaggcgcgaactagatgtgcaggatgtgaatgtggctattactatgtgcgtcttgggactgagggatagggcaagcgcggcggaagccgtgaggtcctccacatcacggccacggcagcccgaacatagaggtgtgccattacagagtcaaacagctatgtttctgcccccaacagtgcccggcgctaggacactgactgaaactccattacggggctggccccagccaaagatgaagtcttcccgccaaaagagtaagacagaaaagaatgatgggcacctggagcccgtgaccgcctgggaggtacaggtaccgagagtaaggcggctttgccgcggcctggcccgaccacatctgttcggtcacgattag

SEQ ID NO: 6142 - DNA, 423 bp, synthetic construct
  misc_feature 1..423: note = source = /note="Description of Artificial Sequence: Synthetic coding sequence"
  source 1..423: mol_type = other DNA
atgagtgatcttctcttgctgggtctgatcggaggcctgactttgctcctgctactgaccctgctggccttcgcaggatactccggactgctggcaggagtcgaggtaagtgcagggtcgcctccaataaggaatgtgacagtggcctacaaattccatatggggctttacggcgagacgggcaggctgttcacagaatcctgtagtatatctcctaaattaaggagcattgccgtttactacgacaacccccatatggtacctccagacaagtgcagatgcgcagtcggttctatcctcagtgaaggcgaggagtcaccttcgcccgaactgattgatctctatcagaaatttggcttcaaagtgttctcattcccagccccatcacacgtggtaacagcaacattcccctacactacatag

SEQ ID NO: 6143 - DNA, 177 bp, synthetic construct
  misc_feature 1..177: note = source = /note="Description of Artificial Sequence: Synthetic coding sequence"
  source 1..177: mol_type = other DNA
atgggccccgaggccctgagcagcctactgctgttattgctcgtcgcctctggcgacgctgacatgaaaggccactttgatccagcaaaatgccgttatgctttgggcatgcaggatcgcacaatacccgatagcgatattagcgcctcatcctcatggtcagattcaacagcttag

SEQ ID NO: 6144 - DNA, 2742 bp, synthetic construct
  misc_feature 1..2742: note = source = /note="Description of Artificial Sequence: Synthetic coding sequence"
  source 1..2742: mol_type = other DNA
atgggcccagaggccctatcctccttactgcttctcctgctggtggcttccggtgacgcagacatgaaggggcatttcgacccagccaaatgccggtacgctctggggatgcaggatagaaccatccccgactcagatatatccgcaagcagttcctggagtgacagcactgcagctcgccactctcgcctagagtccagcgatggggacggcgcgtggtgccccgcaggctctgtgtttcccaaggaggaggagtatctgcaggtcgacctacagcgtctgcacctggtcgctctggtgggaactcagggaagacacgccgggggtttggggaaagagttcagccgatcctaccggcttcggtatagccgcgacggacgacggtggatgggctggaaagacaggtggggccaggaagtgatcagtggcaacgaggatcccgagggggtggtgctcaaagatctaggcccaccaatggtcgcgcgtctggtgaggttttaccctcgggccgaccgtgtgatgagcgtgtgccttcgtgtcgaactgtacggctgtttatggcgagacggcctgctgagttacacagctcccgtgggccaaaccatgtacctttccgaagctgtatatctgaacgatagcacctacgatggacacacagtaggtgggcttcaatatggcggcctagggcagctggcagatggtgtcgtcggccttgacgattttaggaagagtcaggaactaagggtttggcctgggtacgactacgtcggatggagcaatcattcatttagctccggctatgtggaaatggagttcgagttcgataggctcagagcttttcaggcaatgcaggtacactgcaacaacatgcatactctcggtgctaggctgcctgggggtgtggagtgccggtttcgtaggggccccgccatggcgtgggagggggagcccatgcggcataatctgggaggaaacctcggtgatccaagggcgcgagctgtatcagtgcctctgggaggacgcgtggcacgcttcctgcagtgcaggtttctctttgcagggccttggctgctcttctctgaaatatcctttatctctgatgtcgttaacaattcctcccccgccttgggcggcacctttccccccgcaccttggtggcccccgggccctccccctactaatttcagcagccttgaactggaaccccgggggcaacagcccgtcgctaaggccgaaggatccccaactgctatcttaatcggttgtctggtggccattatcctactgctcctgctgattatcgcactgatgctctggcggctgcactggcgtcggctcctttcaaaagctgagaggagagtgttagaggaggaactgacggttcacctgagcgtacccggcgacaccatactgatcaacaacagacctgggcctcgagaacctcccccctaccaggagccacgacccaggggaaatccaccgcactccgcaccctgtgttccaaatgggtccgccttgctgttaagtaatcctgcgtatcggttgttgttagcgacctatgccaggccacctcgtgggccggggccacccacccctgcttgggcgaagcctaccaatacccaggcttactcgggagactatatggagcccgagaagccaggtgctcccctgttgccacccccacctcaaaatagcgtgccgcactacgcagaagccgatattgtcactctgcaaggagttaccggaggcaatacctacgctgtacccgccttgcccccgggcgcggtgggcgatggtccccctcgggtggatttccctcgaagtaggctgcgttttaaagaaaagctgggtgagggacaatttggcgaagtgcacttgtgcgaagtcgattctccccaagatctcgtgtctttagactttccactgaacgtaagaaagggacaccccctcctcgtggccgtcaagattctgcgcccagacgccacgaagaacgctcgcaatgacttccttaaagaagttaagatcatgagccgcctcaaggatcccaatattattaggctcttgggtgtctgtgtccaggacgaccctctgtgtatgatcaccgactacatggaaaatggggacctgaatcagtttctctctgcacaccagctggaagacaaggcagctgaaggggcaccaggagacggccaggccgcccaagggccaacgattagctaccctatgttgctacacgtggccgcccaaattgcgtctggaatgcgttatctggcgacactgaatttcgtccatcgggacttggccacaaggaattgtctggtgggggagaattttacgatcaagattgcggatttcggaatgagccgcaatctatatgcaggagactactacagggtgcaggggagggccgttctacctatccgctggatggcatgggaatgtatcctaatgggcaagttcaccacggcatccgacgtgtgggctttcggtgtgactctatgggaagtgctgatgctgtgcagagcacaacccttcgggcaattgacagacgagcaggtgatcgaaaatgccggagaattcttccgtgaccagggcaggcaggtgtatttgtctagacctcctgcatgtccacagggcttgtatgagctgatgcttcgttgctggagccgggagtcagaacagcgccctcccttctctcagttgcaccgtttcctagccgaagacgccctgaataccgtgtag

SEQ ID NO: 6145 - DNA, 1146 bp, synthetic construct
  misc_feature 1..1146: note = source = /note="Description of Artificial Sequence: Synthetic coding sequence"
  source 1..1146: mol_type = other DNA
atgcgccttctagcttggctcatttttctggccaactgggggggggctcgggcggagcccgggaaattctggcacatcgccgatctgcatctggatccggactataaagtgtctaaagatccttttcaagtttgcccctcggctggaagccagcctgtccccgacgctggcccctggggtgattacctatgcgatagtccgtgggcactaattaactcctcgatatatgccatgaaggagatcgagcctgagcctgatttcattctctggaccggagatgatactccccacgtccccgacgaaaaactgggggaagccgccgtactcgaaattgtcgaaaggttaacaaagctgatacgagaggtgttccccggcgcgttctattgcgaaaagctccccgggccgtcgggagcagggcggatcgtagtgttaaatacaaatctgtactataccagtaacgccctgacggctgatatggcagacccagggcagcagtttcagtggcttgaggacgtattgactgatgctagcaaagctggggatatggtctacatagtggggcacgtgccaccaggattttttgagaaaacccagaataaggcttggtttcgagaaggctttaacgagaagtacctcaaagtagtccgcaagcatcatcgagttattgcgggacagttctttggtcatcaccacaccgattccttcaggatgctttacgatgacgctggcgtccccatatctgcgatgttcatcacaccaggcgtaactccatggaaaactacattgccgggggtggtgaatggcgcaaataaccctgccatccgcgtgttcgagtatgacagggccacgctgagcctgaaggacatggtgacatactttatgaatctttcccaggctaacgcgcagggtacaccacgatgggagctggagtatcagtctaccctgcagcggtactatgtgtacaattcagttagttatagcgcgggtgtctgtgacgaggcctgcagtatgcaacatgtttgtgcgatgaggcaggtcgacattgacgcctacaccacctgcctgtatgcttctggaaccactcccgtaccacagctgccactcctgctaatggctctgctgggtctgtgtacgcttgtgctatag

SEQ ID NO: 6146 - DNA, 456 bp, synthetic construct
  misc_feature 1..456: note = source = /note="Description of Artificial Sequence: Synthetic coding sequence"
  source 1..456: mol_type = other DNA
atgcgagtagctggagcggcaaagcttgtggtggcagtcgctgtgttcttgcttactttctacgtaatctcccaggtcttcgaaattaagatggacgctagcctgggtaaccttttcgcccggtccgctctagacaccgccgcccgtagtacgaagcctcccagatataaatgcggaatcagcaaagcctgcccagagaaacacttcgcatttaagatggcctctggggccgcaaacgtcgtcggaccaaaaatttgcctggaggataatgttctaatgtcgggagtgaaaaataatgtggggagagggatcaacgtggccctggccaatgggaaaaccggggaagttctggacaccaaatatttcgacatgtggggtggagatgtggccccctttatcgagtttctgaaagcaatacaggacgggaccatcgtgttgatggggacgtacgactag

SEQ ID NO: 6147 - DNA, 936 bp, synthetic construct
  misc_feature 1..936: note = source = /note="Description of Artificial Sequence: Synthetic coding sequence"
  source 1..936: mol_type = other DNA
tgagcacccagtccctgttctcacttcaactgtgggagtcaggtaaccgacggaggcaccattaagcagaagatcttcacattcgacgctatgttctctaccaactacagccacatggagaactacagaaaacgcgaagatctggtctaccagagcacagtgaggttacccgaggtgaggataagtgataatgggccatatgagtgtcacgtgggaatctatgacagagcgaccagagagaaagttgttctggcttcaggtaacatcttcttaaatgtaatggcacctcctacatcaattgaggtggtagccgcagacactccagcgcctttcagtcgatatcaagcccaaaacttcacactggtgtgcatcgtgtcaggcggcaaaccagctcccatggtatattttaagagagacggcgaacccatcgatgcggtgcctctgtccgaacctcctgccgccagtagcggtcctttacaagactcaagaccattccggtcactgcttcaccgggatctggatgacacaaagatgcagaagagcctgtcactcctggacgccgaaaatagggggggcaggccctatacggagaggcccagccgaggtttgacaccggacccaaacattctactacagccaaccacagagaacataccagaaaccgtagttagtcgcgagttcccgagatgggtgcactccgcagagcctacctattttcttagacacagtcgcacaccgtctagtgacggcacagtcgaagtgcgggccttactcacatggactttgaatcctcaaattgataatgaagctctgttctcctgtgaggtcaaacaccctgctctttcaatgcccatgcaggccgaggtgacgctggtggccccgaaaggcccaaagattgtgatgaccccttctagagcccgcgttggtgacacgtag

SEQ ID NO: 6148 - DNA, 978 bp, synthetic construct
  misc_feature 1..978: note = source = /note="Description of Artificial Sequence: Synthetic coding sequence"
  source 1..978: mol_type = other DNA
atgcagggcagagttgcagggagctgtgcacccttggggctactcctcgtatgtctccatctcccaggactttttgcccgcagtattggcgtggtggaagaaaaggtgagccaaaacttaggcacaaaccttccccagttaggacagccctctagtacgggaccatcaaactccgaacatccgcagcctgctttggacccacggagcaacgacctagcacgggtgcctctcaagttatccgtccccgcaagtgatggttttccaccagctggcgggtctgccgttcagcgctggcctccctcctggggtctccccgccatggacagctggcccccggaggatccgtggcaaatgatggccgccgcagccgaggataggctcggggaggccctgccagaggaactgtcatatctaagttctgccgctgccttggctccagggagtggtccgctgcctggggagagtagccccgacgctacagggctctcgccaaaagcctccctgctgcaccaggattccgaatcccggcgccttcccaggagtaactcactcggcgcgggcggtaagattttaagtcagaggcccccttggtcactgatacacagggtccttcccgaccacccatggggtactctgaacccctcagtgtcatggggaggaggcggacctggaaccggctggggaactcgacctatgcctcaccccgaggggatctggggcattaacaatcaaccgcccggcactagctggggaaacatcaatcggtatccgggtggaagctggggtaacatcaatcgctaccccgggggcagctggggaaatatcaatagatacccaggaggatcctggggcaatatccatctgtatccaggaatcaacaacccctttcctcctggcgtgctcaggccaccaggaagcagttggaatatcccagccggcttcccgaaccctcccagcccccgtctgcagtggggctag

SEQ ID NO: 6149 - DNA, 957 bp, synthetic construct
  misc_feature 1..957: note = source = /note="Description of Artificial Sequence: Synthetic coding sequence"
  source 1..957: mol_type = other DNA
atgggcctgcacttgcgcccctacagagtcggactactgccagacggcttgttatttttactgctgctgctcatgctcctggccgatccagctctccccgcaggtagacaccctcccgtagtcctgggctggttcacaacaaagcatccaggccccccctcatttttgatggtctggatgtatgtaagcctcgcgctgggccgaccctctcactggtctagctggaccccagctaaagctgcctgggtacctattagcactccttggtggcgggccctgtgggctggagccacccatggagtcagaatgtcggagggactccctatgaccggggcggaacctcagagacagccccaagcatggaaggacaagtatatccgcgcttttgtctcgctcggcgcgccctgggggggggtcgctaaaaccttacgcgtgctggcctctggagacaataaccgcattccagtgattggtcctttaaaaatcagagagcagcagcgctccgcagtatctacctcgtggctgcttccctataactatacatggtccccagagaaagtgtttgttcagacccccaccatcaactacaccctgagggattatcggaaattcttccaggatattgggttcgaagacggttggctcatgcgccaggacacggagggactggtggaggccactatgccccctggagtgcagttgcactgcctttatggcacgggcgtccctacccccgacagcttttactatgagagcttccctgaccgcgacccaaagatctgttttggagatggcgatggcaccgtgaacttgaaatctgcactgcaatgtcaggcgtggcagagcagacaagagcaccaagtcctcctgcaggaactgccgggaagcgaacacatcgagatgctcgcgaacgccacaacactcgcttatcttaagcgtgtgctactaggcccatag

SEQ ID NO: 6150 - DNA, 1575 bp, synthetic construct
  misc_feature 1..1575: note = source = /note="Description of Artificial Sequence: Synthetic coding sequence"
  source 1..1575: mol_type = other DNA
tatgccctgagggataggcagggaaatgcaattggagtaacggcttgtgatatcgatggggatggacgggaggaaatctacttcctcaacactaacaatgcgttctccggtgtcgcgacctataccgacaaattgttcaaatttcggaataacaggtgggaggatatattgtcagacgaggtgaatgtcgctcgcggagttgcttctctgttcgctggacggagcgtggcctgtgtggaccgaaagggcagcggccggtatagcatatacatcgctaactacgcctacggaaacgttggcccagacgcgttgatcgaaatggaccctgaggcgagcgatctctcccgaggtatactcgccctgcgggatgtagccgctgaagctggcgtcagcaagtacacaggaggcaggggcgtgtccgtgggtcccatactctcttctagcgcttccgatattttttgtgacaacgagaatggacctaacttcctgttccataatcggggcgatgggacattcgtggatgcagccgcatcagcaggtgtggacgatccccaccagcacggtcgaggggtcgccctcgctgacttcaaccgagacggtaaggttgacatcgtttatggcaattggaacgggcctcatcggttataccttcaaatgtcaacacacggtaaagtacgcttccgggacattgcttcgcccaagttcagcatgcctagtcccgtgcggacagtaatcacagctgattttgataacgaccaggagctagagattttctttaataatattgcataccgctcatcatccgccaaccgtttattcagggttatccgcagggagcacggtgaccccctgatagaggagttgaatcctggcgacgcactcgagccagagggacgaggcaccgggggcgtagttactgattttgacggagatggcatgctggatctgatcctgtctcatggcgagtcaatggcccagccgctaagcgtatttagaggaaaccagggcttcaacaacaactggctgagggtggttccaaggacgaggttcggagccttcgcacggggagccaaagtggtattgtacactaaaaagtccggggcccatcttcgcatcattgatggcggctctggctatttgtgcgagatggaaccagttgctcacttcggcctggggaaggacgaggcctcatccgtggaagtgacatggccggacgggaaaatggtgagccgcaatgttgccagcggtgaaatgaatagcgtgctagaaattctgtatccccgggatgaagatacactgcaggaccctgcaccactcgagacccccatgaatgcgtcatcgagccatagctgcgccctggaaacatctccgtatgtgtcaacacctatggaggccacaggggctgggccgacgcggagcgctgtaggtgccaccagtcctacaaggatggcacaaccggcctgggggctgtcggcatctcacagagcaccagcgcccccccctccaccgttactgctccctctcccactactgcttccactgctcgaattgccgcttctgcaccggtccagctag

SEQ ID NO: 6151 - DNA, 636 bp, synthetic construct
  misc_feature 1..636: note = source = /note="Description of Artificial Sequence: Synthetic coding sequence"
  source 1..636: mol_type = other DNA
atggtgtcgagaatggtgagtaccatgcttagcggcctcctcttctggctggcctctggttggactccagcctttgcgtattccccgcggactcccgatagggtctccgaagccgacatccagcgcctccttcacggcgtcatggaacagctcggaatcgcgaggccccgagtcgagtatcccgcgcaccaagctatgaatctagtcggcccacagtccatcgaaggcggagctcacgaaggacttcagcacctaggtcctttcggcaacattcccaatatcgttgctgaattgaccggcgacaacattccaaaggatttcagtgaggatcagggttatcccgacccgccaaatccctgtcctgtgggaaaaacagatgatggatgcctcgaaaacacaccggacactgccgagttttctcgggaatttcaactccaccagcatctgtttgatcccgaacacgactatcccgggcttgggaagtggaacaagaaactgctttatgagaaaatgaaggggggggagaggcggaaacggcgctcggtcaatccctatttgcagggccagaggctggataatgttgtggccaagaagagcgtgccccacttctccgatgaggacaaagatccagaatag

SEQ ID NO: 6152 - DNA, 465 bp, synthetic construct
  misc_feature 1..465: note = source = /note="Description of Artificial Sequence: Synthetic coding sequence"
  source 1..465: mol_type = other DNA
atggcattaggagttcccatcagcgtgtatctgctttttaatgccatgacggcactgaccgaggaagctgccgtgaccgtgactcctccaattacagcacagcagggaaattggaccgtgaacaagaccgaggcagataacattgaggggcccattgcgcttaaattcagtcatctgtgccttgaggatcacaacagctattgtattaacggagcttgtgccttccatcacgaactggagaaagcaatctgccgatgttttactggttataccggggaaagatgtgagcacttaaccctgacgagttacgctgtggactcgtacgagaaatatattgctatcggcattggcgtaggcctcttattatccggctttctggtgatattctattgttacatcaggaagcggtgtctaaaactaaaaagtccctacaatgtctgctctggcgagcggagaccgctgtag

SEQ ID NO: 6153 - DNA, 1446 bp, synthetic construct
  misc_feature 1..1446: note = source = /note="Description of Artificial Sequence: Synthetic coding sequence"
  source 1..1446: mol_type = other DNA
atgggcaagttgaggccgggcagggtggagtggctagccagcggccatacagaacggccgcatttattccagaacttgttgctgttcctgtgggcactgctgaactgtggtcttggcgtgtccgctcagggtcccggtgagtggaccccatgggtcagctggacacgctgttcatctagttgtggccggggtgtctccgttaggagccgacgatgcctcagactccccggcgaggaaccatgctggggggacagccacgaataccgcctctgccaactcccagattgccctcccggcgccgttccttttcgcgacttacagtgtgccttgtacaatggtcgacccgtgctggggacgcagaagacatatcagtgggtaccattccacggtgcccccaaccagtgtgaccttaactgtctagccgagggccacgcgttctaccactcattcgggagagtgctcgatggaaccgcctgctcgccaggcgctcagggcgtctgtgttgcgggacgttgtttgagcgccggctgcgacgggctgttgggcagcggcgctctggaggaccgctgcggtagatgcggcggcgccaacgacagttgtttatttgtgcagagggttttccgagatgccggcgcgttcgccggctattggaacgtgactcttatccctgaaggagcacgacacattagagttgagcatcgttcacgaaaccacttagcccttatgggtggcgacgggagatatgttctgaacggacattgggtggttagcccacctggtacctacgaagctgcaggtactcatgtggtatataccagagatactggccctcaggagactcttcaggcagctggacctaccagtcacgatctgctccttcaggttcttctgcaggaaccaaaccccggcattgaatttgaattctggcttccccgcgagaggtattcccctttccaggctagggtgcaggcattgggatggccactgaggcagccccagcccagaggcgtggagcctcagcccccagcggctccggccgtgacaccagcgcagacacccacactagcaccggatccttgccctccctgccccgataccaggggcagagcccaccggctccttcactactgcggatcagacttcgtgtttcaggctagggttctgggccaccaccaccaggcccaagagacccgctatgaggtacgcatccagctagtgtataaaaacagaagcccactcagggcccgcgagtacgtgtgggcccctggccattgcccctgtcctatgctggccccccaccgggactacctcatggccgtccagcgcctggtttcccccgacggtacgcaggaccagcttctgctgccgcatgcaggctatgctagaccatggtcacctgccgaagatagtagaatccggcttacggcacgccggtgcccaggctag

SEQ ID NO: 6154 - DNA, 627 bp, synthetic construct
  misc_feature 1..627: note = source = /note="Description of Artificial Sequence: Synthetic coding sequence"
  source 1..627: mol_type = other DNA
atggccgacatgcagaacctggttgagagactggaacgcgccgtagggaggctcgaggctgtgtcacatacttccgacatgcatcgaggatatgcggactccccgtccaaagctggggcagcaccctatgttcaagctttcgacagtctactcgccggcccagtcgctgaatacctgaaaatttcaaaagaaattggaggtgacgtgcagaaacatgccgagatggtacataccggcctgaagctagagagggcactcttggttactgcttctcagtgtcagcagcctgcggaaaataagctttccgatctgctggcacctatcagcgagcagatcaaagaggtaattaccttcagggaaaagaaccggggatcaaagctgttcaatcatctttccgctgtctctgagtctattcaggcactaggctgggtcgcgatggcaccaaaacccgggccgtacgttaaggaaatgaatgacgcggccatgttttacacaaatcgcgtgctgaaggaatataaagacgtcgataagaagcacgtggattgggttaaggcctacttgagtatttggaccgaattgcaggcctacatcaaggaatttcacactacagggctcgcctggtcctag

SEQ ID NO: 6155 - DNA, 1482 bp, synthetic construct
  misc_feature 1..1482: note = source = /note="Description of Artificial Sequence: Synthetic coding sequence"
  source 1..1482: mol_type = other DNA
tccgaagctgtctatctgaatgattcaacatacgacgggcatacggtgggggggttgcagtacgggggcctcggacagctggcagatggtgtcgtggggctggacgatttccgcaagtcacaggagttgcgggtttggccagggtacgactatgttggctggagcaaccatagcttctccagcggttacgtggaaatggaatttgagttcgatcggctccgggcatttcaggccatgcaagtccattgcaacaacatgcacaccctgggggcccgacttccagggggcgtcgagtgcagattccggaggggcccagctatggcgtgggaaggggagccaatgaggcacaatctcgggggcaatctcggcgatccccgagcgcgagcagtaagcgtgcctctgggaggtagggtggctcggtttctacagtgtcggtttctgttcgctggcccctggctccttttcagcgaaatctcatttatcagcgacgttgtgaacaatagctcccccgcgctgggtggtacatttccccctgcaccatggtggcctccagggcctccgccaaccaatttctcttcacttgagctcgaacctcgaggccagcagcccgtagcgaaagcggaagggagtcctaccgccatcctcatcgggtgtttggtagccatcatactattgttattgctgatcatcgccctgatgctgtggcgcctgcattggcgccgactgctgagcaaggtgctcgagagccaccctcgaacccgttccccagggcttgtcgggattagacccacacctctccccgtgtcacccatggccctgcgctgttgcagtcctatacagccaacagcctcgttttggcctctaacccccgtgccactcgaagctcgggctccccctcatccccctggacccaatccgcctacccctaggggcgtgaccggcgggaatacctacgccgtacccgcactgcccccaggagccgtgggcgatggtccaccccgcgtcgacttccccagatcccgcctgcggttcaaagagaagctcggggaggggcaattcggagaagtccacctgtgcgaagtggacagcccacaggatctggtgtctctggacttccccttgaatgtgagaaaaggtcatcccctgctcgtcgccgtgaagatcttgcgccctgatgcaaccaaaaatgcccgcaatgacttcttgaaagaggtgaagattatgtcaagactgaaggacccaaatattatacgactgctcggagtttgtgtacaagacgaccctttgtgcatgatcacggactacatggagaacggagatctaaaccagttcctgtctgcacaccagctagaggataaagcagccgagggcgcccctggggacggtcaggctgcacaaggtcctacaatcagttatccgatgttactgcacgtagctgcccaaatcgcgagcggcatgagatacctagccaccctcaactag

SEQ ID NO: 6156 - DNA, 2319 bp, synthetic construct
  misc_feature 1..2319: note = source = /note="Description of Artificial Sequence: Synthetic coding sequence"
  source 1..2319: mol_type = other DNA
atgcaattccagttgaccttattcctccaccttgggtggcttagctactcgaaggctcaggacgattgtaaccggggggcgtgtcatcccactactggggacctgcttgtcggtcgtaatactcagttgatggcctccagcacgtgcggcctgtctcgtgcacagaagtactgcatactttcttacctggagggcgagcagaaatgctttatttgcgattcccgctttccctatgatccctatgatcagcctaactcgcacacgattgaaaacgtgatcgttagttttgaacccgacagagaaaaaaaatggtggcagagcgagaacgggctcgatcacgtgtccataagattagacctggaagctctgttccgtttcagccatctcatattgacgttcaagacatttcgccccgcagcaatgttggtggagcggagcacagactatggtcacaactggaaagtgtttaaatatttcgcaaaggattgtgctactagttttcctaatatcacctccggccaggcacagggtgttggtgacatcgtctgtgattcaaaatatagtgatatcgagccgtctactggaggagaggttgttctgaaggtgctggatccaagcttcgaaattgaaaacccatactcgccttacatccaggatctagtgacattgacaaatttgagaatcaattttacaaagctgcacacccttggtgacgcccttctggggaggcgccagaacgactctcttgacaaatattattacgccttgtatgaaatgatcgtgagggggtcttgtttctgtaacgggcacgctagtgaatgccgtcccatgcagaaaatgcggggggacgtgtttagccccccaggcatggtgcatggtcaatgtgtttgccagcacaacacggacggcccaaattgtgagcgctgtaaggatttcttccaagacgccccatggagacctgctgcagacctgcaggataatgcctgccgctcttgttcctgtaacagccacagttcccgatgccacttcgatatgaccacttacctggcctctggcggcctgagcggcggagtgtgcgaggattgtcagcataacacggaaggacagcattgcgaccgctgtcgtcccctgttctatcgggaccctctgaaaacaatcagtgatccgtatgcatgtatcccttgtgaatgtgaccctgatggaactatttccgggggaatttgcgtctcccactctgatccagcgctcggctccgtggccggacagtgtttatgtaaggaaaacgtggagggcgcaaagtgcgatcagtgcaagccaaatcactacggtctgtccgcaacagaccctctgggatgtcagccctgtgattgtaatcccctgggctcactgccgttcctcacctgcgatgtcgacacaggccagtgtctatgcctttcctatgtgacaggggcccattgcgaagagtgcaccgttgggtattggggtctaggcaaccatctgcacggttgttccccctgcgactgtgatatcggaggcgcatactccaatgtgtgtagtcccaagaacggccagtgcgagtgtagaccgcacgtcaccggccgcagttgctccgagccagccccagggtacttttttgcccctttgaacttctacctctacgaagccgaggaggccacaaccctccaggggctggcgcctctcgggtccgagacttttggacagtctccagccgtgcatgtcgtcctcggagagccggttcctgggaatcctgtgacatggaccgggcccgggtttgccagagtcctgcccggagcaggccttaggttcgcagtgaataatatcccctttccggtcgatttcaccatcgccattcactatgagacacagagcgccgcggattggactgttcaaatcgtggtgaatcctcccgggggttcggagcattgtatacccaaaaccctacaaagtaagccccagtcattcgctcttccagcagctacacgaatcatgcttcttcccactcctatttgtctggaaccagacgtccagtactctatcgacgtgtatttttctcagccacttcagggcgagagccatgctcatagccacgttctggtcgactcagctgccgtccagtggcacaatctgggctccttacagccccctcctccggagtgcaagcagttcagctgtttctccttcccaagctcgtgggactaccgccatccgccgccccacctggccaacttctgcatatttagtagagatggcgtcagcccccattggccgggatggtcacagacaccagatctcagatag

SEQ ID NO: 6157 - DNA, 1371 bp, synthetic construct
  misc_feature 1..1371: note = source = /note="Description of Artificial Sequence: Synthetic coding sequence"
  source 1..1371: mol_type = other DNA
atgggtagagcaggggccgccgcagtcatccccggacttgcgttactttgggccgtggggcttggtagcgcagcccctagtccccatctaaggctgtcctttcaggagctgcaggcctggcatgggctgcagaccttctctctagaaagaacatgctgttatcaggctctgctagttgatgaggaacgaggacgcctgttcgtgggcgccgagaaccacgtcgccagtctgaatttagataatattagtaaacgagcgaagaagttggcctggccagcaccagtcgagtggagagaagagtgcaactgggccgggaaagacattggaaccgagtgtatgaactttgttaaacttttgcacgcctacaatcgcacccacctcctcgcttgtgggactggagctttccatcccacatgcgcctttgtggaagtcgggcatagagcagaagaacccgttctgcgcctggaccccggaaggattgaagatggtaagggaaagtccccctacgatcctagacaccgcgcagccagcgtgctggttggagaagaactgtacagcggggtggcggctgacttgatgggccgagatttcacgatttttagatcactggggcagcgaccgagcctgcgaaccgaaccccatgattccagatggttaaacgagcctaagttcgtgaaagtgttctggatcccagaaagcgagaatcccgatgacgacaaaatttacttcttctttagggaaaccgccgtcgaggctgccccagcactcggccgcttatccgtgagtcgggtggggcagatctgtcgtaatgatgtagggggacaaaggtctctggtaaacaagtggaccactttccttaaggcacggctagtctgctcagttccaggtgtagagggtgacacacacttcgaccagctccaggacgtgtttctcctgagtagccgagaccatagaactcccctgctctacgctgtgttcagcacgtctagctccatcttccagggttcggccgtgtgcgtttattctatgaatgacgtccggagggcctttcttggcccctttgcccacaaagagggaccaatgcaccagtgggtgtcttaccagggccgggtcccctatcccagacaggcatgtgcacccgcgagaccactcgcaccatctgtaccccctcgaacatctcagaccatgtcttcttctctcagaggtaccaccccaagctgcaccactctcagctgccccctgggtggtgccctgttcagttataaactggagcctataaccccctctctgaagttaccacggacggggttgcagcccttgacagatacaatgacctcatccagcttagctcagactctggccagatgttag

SEQ ID NO: 6158 - DNA, 333 bp, synthetic construct
  misc_feature 1..333: note = source = /note="Description of Artificial Sequence: Synthetic coding sequence"
  source 1..333: mol_type = other DNA
ctcttcatgctgcacaaaattgtccaggtctacaacagtgacgtcattgacaagcagtccgcttctatgacatccgacaatgcggacgacaaggccgtgatcatccttgtcccggtgagactgggcggagaacggaccaacaccgattacctggaattcgtaaaaggtatcctatcattggaatactgcgttggaatcattggcggaaagccaaagcagtcgtattattttgcgggattccaagacgatagcttgatctacatggacccccattactgtcagtcatttgttgatgtcagcattaaggatttcccgttggaagtgatcctgtag

SEQ ID NO: 6159 - DNA, 420 bp, synthetic construct
  misc_feature 1..420: note = source = /note="Description of Artificial Sequence: Synthetic coding sequence"
  source 1..420: mol_type = other DNA
atgggacctgaagctctgtcaagcttattactccttcttctagtggcgtcaggggacgcagatatgaaagggcattttgatccggccaagtgccgttatgccctgggaatgcaggatagaaccatcccggattcagacatctccgcctcttcaagttggtctgatagcacagccgcaagacactctcgcttagaaagctctgatggtgacggtgcttggtgtcctgctgggtcggtattccccaaggaggaggagtacctgcaggttgacctgcagaggttgcacctcgtcgcactcgttggtacacagggcagacatgctggcggactgggcaaggaatttagccgctcgtatcgcctgcgatatagccgggacggcaggaggtggatggggtggaaggatcgctgggggcaagaatag

SEQ ID NO: 6160 - DNA, 570 bp, synthetic construct
  misc_feature 1..570: note = source = /note="Description of Artificial Sequence: Synthetic coding sequence"
  source 1..570: mol_type = other DNA
atgcttggcatcaccagttgtagcgaccagcaagccaaggagggagaaggcttagaagggagttccaccggctcttcgtcaggcaatcacggaggcagcggcggaggaaatggccacaagccaggctgcgagaagccagggaatgaagcccgtggctccggggaatctggcatccagaattcagagacatctccaggcatgtttaacttcgatacattttggaagaactttaagagcaaacttggctttataaactgggacgccataaacaaaaaccaggtccctccgcctagtactcgcgccttgttgtatttctccaggctttgggaggacttcaaacagaacacaccgttccttaattggaaggcaatcatcgagggagccgacgcttcaagtctgcagaaaagagctgggcgcgacgatcaaaactacaactataatcagcatgcctaccccacagcttatggtgggaaatattctgttaaaactccagccaagggaggggtctctccatcatcatcggcctcgagagtacaacccggtctgctgcagtgggtgaaattctggtag

SEQ ID NO: 6161 - DNA, 438 bp, synthetic construct
  misc_feature 1..438: note = source = /note="Description of Artificial Sequence: Synthetic coding sequence"
  source 1..438: mol_type = other DNA
atggctgatatgcagaacctggtggagcgcctggaaagggccgtaggccggctcgaggccgtaagccacaccagtgatatgcaccgcgggtacgcggacagcccaagtaaggccggcgcggctccatacgtgcaggcctatatcaaggagttccatacgacaggccttgcctggtccaagaccgggcctgtggctaaagagctaagtggtcttccttccggaccctcagccgggtcatgtcccccgccacccccgccatgtccacctccacctcccgtctctacgatttcgtgctcttatgaatctgcatccaggagctcacttttcgcccagatcaatcaaggtgagagcatcacacacgcccttaagcatgtgtcggatgatatgaaaacacacaaaaaccctgccctgaaggcccagagcggccctgtgcgctag

SEQ ID NO: 6162 - DNA, 264 bp, synthetic construct
  misc_feature 1..264: note = source = /note="Description of Artificial Sequence: Synthetic coding sequence"
  source 1..264: mol_type = other DNA
tgcaaacgaaaaccttatctcctgcccagcatcagagagggagcgcgcctgggaatacaagaatgcggcagtcaatttagacacgagcgttggaactgcatgatcactgcagccgcaaccactgcacccatgggagcatcccccctcttcgggtatgaattgagttccggatgcagacaggtagacgtctctcggctgccacttccacgaagctttcgcctgttgtgttgcgagaatatgctggagaatcacgtatttttttag

SEQ ID NO: 6163 - DNA, 2535 bp, synthetic construct
  misc_feature 1..2535: note = source = /note="Description of Artificial Sequence: Synthetic coding sequence"
  source 1..2535: mol_type = other DNA
atggggcccggcgctccattcgccagggtcggctggcctcttcctctcctggtcgtgatggccgccggcgtcgcccccgtgtgggcaagccactctccccacctgccccggccccacagcagagtgccgccccatccctcctccgaacgcagggccgtttatattggggcactgtttcctatgtctggcggttggccagggggacaggcatgccaacccgcagtcgaaatggcgctcgaggatgtgaacagtaggcgtgacatcttgccggactacgagttgaaactgattcaccacgattcgaagtgtgaccccggccaagcgactaaatatctgtacgaactcctgtacaacgatcccatcaagattattctgatgccaggatgttcttccgtgtccacacttgtggcagaggcagcgcggatgtggaacctgatcgtgttaagttatggaagctcttcccctgccttatcgaaccgtcagagatttcctacatttttcagaacgcatccctctgctacgctgcataatcctactagagtgaagctttttgaaaagtggggctggaagaagatcgcgacaattcagcagacaaccgaggtcttcacaagtacgctggacgacttggaggaacgcgtgaaggaggcgggaattgagatcacattcaggcagagttttttctccgatccagccgttcccgtgaagaaccttaagcgccaggacgccaggatcatcgtgggactgttctacgagaccgaagcaagaaaagtcttttgtgaggtttataaggaaaggctatttggcaagaagtacgtgtggttcctgattggatggtacgcggacaattggttcaagatctacgacccctccattaactgcacagttgacgaaatgaccgaagccgttgagggccacataactaccgaaattgtgatgcttaatccagctaatacaaggagtatctccaatatgacgagccaggaattcgttgagaagctgacaaaaagactgaagaggcacccagaagagaccggtggcttccaagaggcccccctcgcttacgacgcaatctgggccctggctcttgcacttaacaaaacctccggaggggggggaaggtcaggagtccgcttagaagacttcaactacaacaatcagacaattacggaccagatttaccgggccatgaattcatcctcctttgagggagtctctggccatgtggtgttcgatgccagcggtagtcggatggcgtggaccctgatcgaacagctgcagggggggtcatataaaaagattggctactatgattcaactaaggacgacctaagttggtctaagactgacaagtggattgggggatcgccacctgcagatcagaccctggttatcaaaacctttcggtttcttagccagaaactgttcatatccgttagcgtactgtcctccctgggtatcgtcttggcagtggtgtgcttgtcttttaacatctataattcccacgtcaggtacatacaaaattctcagcccaatttgaacaatcttacagcggtggggtgcagccttgcactcgccgctgtattccctctcggacttgacggataccacatagggcgaaatcaattcccatttgtttgtcaagccaggctgtggctgctgggattagggtttagcctgggatacgggagtatgttcaccaaaatctggtgggtgcatacggtcttcaccaagaaagaagagaaaaaggagtggcgaaagacacttgagccttggaagctctatgctactgtcggactcctggttgggatggatgttttgacgcttgccatttggcagattgtcgatccactacaccgcacaatagagacctttgctaaggaggaacccaaggaggacatcgacgtgtccatcctaccccagctggagcactgtagcagcagaaagatgaacacctggctgggaatcttctatggatataaaggattgctgctgttgctaggaatcttcttggcatatgagacaaagtctgtgtcaacggagaagataaacgatcaccgtgcagtgggcatggcgatctacaacgtggcagtgttatgccttatcaccgcccctgtaaccatgattttatctagccaacaggatgcagcctttgcttttgcttctttagctatcgttttttcttcctatattacattggttgtcctctttgttccaaagatgaggcgcctgatcacacgcggggagtggcagagtgaggcgcaagataccatgaagaccgggagtagcacaaacaataacgaggaggaaaagagtaggctgctcgaaaaggagaacagagagttagagaaaattattgcagagaaagaagagagggtgtctgaactgaggcatcagctacagtctcgccagcaattacgctcaagacgtcaccctccaaccccacctgagcctagtggcggtctgccacgaggtcctccagagccaccagaccggctctcctgcgacggtagtagggtgcatcttctctataagtag

SEQ ID NO: 6164 - DNA, 2631 bp, synthetic construct
  misc_feature 1..2631: note = source = /note="Description of Artificial Sequence: Synthetic coding sequence"
  source 1..2631: mol_type = other DNA
atgggcccagaggccctatcgtcgctgttgctgctcttgctggtcgctagcggagatgcggacatgaagggccactttgatcccgctaaatgcagatacgctctcggtatgcaggaccgaaccatcccagattctgatatttcagcctccagcagttggagtgactctactgcggccagacattccaggctggaatcctccgacggcgatggagcctggtgccctgcaggctcagtcttcccaaaagaggaagaatatcttcaggtggacttgcagagactgcacttggtggctctcgtgggaacgcagggaagacacgcaggggggctgggaaaagagttttcaagatcctatcgcttgcgctacagccgggacggaaggaggtggatggggtggaaggatcggtgggggcaggaggtgatatctggtaacgaggatccagaaggcgttgtcttgaaggatctgggcccacccatggtcgcccgtctagtgcggttctatcctagggccgaccgggtcatgtcagtctgtctcagggttgaactctacggatgcctctggagagacggccttttatcttatactgcccccgtcgggcaaaccatgtatctgtccgaggccgtgtacctcaacgactcgacctacgacgggcacaccgtgggaggattacaatatgggggtctgggacagctggcagacggagtggttggtctagacgactttcggaaatctcaggagcttagggtctggcccggctacgactatgtcggctggagcaatcattcattttcaagcgggtacgtggaaatggaatttgagtttgatcgactgcgcgcctttcaggccatgcaagtgcactgcaacaacatgcacacgttaggtgcacgtctgccaggcggtgttgaatgccggtttaggagggggccagcaatggcctgggaaggcgaaccaatgcggcacaacctcggtggtaatctaggcgacccccgagcccgggcggtttcagtgccgttaggaggtagagtggccagatttctccagtgccggtttctgttcgctgggccctggctgctgttttctgagatctcattcatctctgacgttgtgaataactcttcccccgcactgggcgggacctttccccctgccccctggtggccccccggtccccctcccactaatttctcttcactcgaactggagcctcgtggccagcaacccgtcgcaaaggcagagggaagtccaacagctatcctaattggttgtctggtagcaatcattctgctcctccttctcataatagcacttatgctctggcgcctgcattggcgaagacttctgtcgaaagccgaacgcagggtgttggaagaagaactcactgtgcatctaagtgttcctggagacactatcctgatcaacaaccggcctggtccacgtgagccacctccctatcaggaaccacgtccaaggggcaatccaccgcattctgctccgtgcgtgcctaatggtagtgcttacagcggggactatatggagccagagaaacccggtgctccactgctgccaccacccccccagaattccgtcccccactacgctgaggccgatatagtcacccttcagggagttaccggcgggaacacctatgccgtacctgctctcccacctggggccgttggggatggacctcctcgcgtcgatttcccccgaagccggctacgctttaaggaaaagctgggggagggccaattcggcgaggtgcacctttgcgaggtggattcaccccaggatttggtgagcttggattttccactgaatgtgagaaaggggcaccctctgctggtggccgtgaaaattttacgacctgatgccacaaagaatgcccgtaacgactttctcaaggaggtcaaaatcatgtcccgccttaaagatccgaacatcatccgattactgggagtctgcgtacaggacgatcccctttgcatgatcactgattatatggaaaacggggatctcaatcaatttctgtccgcccaccagctggaggacaaggctgcagagggggcgcccggcgacggacaagcggcccaggggccaaccatcagttacccgatgcttttgcacgtcgcagcacaaattgcgagtggtatgcgctacctagcaaccttaaatttcgttcacagggacctggctacccgcaattgcctagtaggagaaaactttacaatcaaaatcgcagatttcggtatgtccaggaacttgtatgctggggactactatagggttcaggggcgagctgttttgcccattcggtggatggcctgggagtgcatattgatgggaaaatttactactgcaagtgatgtctgggccttcggggtcaccctgtgggaagtccttatgctctgtcgcgcgcaaccattcgggcagctcacagacgagcaggtgatcgagaatgcgggagaatttttcagggatcagggtagacaagtgtatctgtcacgcccccccgcgtgtccgcaagggctgtatgagctgatgttgcgttgttggtccagggaatcggagcagcgccccccgttctcacaactgcataggttcctcgctgaggacgcacttaataccgtgtag

SEQ ID NO: 6165 - DNA, 942 bp, synthetic construct
  misc_feature 1..942: note = source = /note="Description of Artificial Sequence: Synthetic coding sequence"
  source 1..942: mol_type = other DNA
atgagcgatttacttctcctggggctaataggtggcctcactttgttgcttctgctgactcttctggcatttgccggctatagcgggctcctcgcaggtgtagaggtatccgcagggtcccctcccattagaaatgtgactgtcgcgtacaagtttcacatgggtctatacggggagaccggtaggctcttcactgagagttgttccatctctcctaagctgaggagtattgccgtgtactatgacaacccacacatggtgcctcctgataaatgccgttgcgccgttggctctatcctgtcagaaggagaggagtccccctctccagaactaattgacttatatcagaaattcggtttcaaggtcttcagctttccagcccccagccacgtggtcaccgcaacttttccctacactactatcctttccatctggctggccacccgccgagtacatccagccctggacacgtatataaaagagcgtaagctctgtgcctaccccaggctggaaatatatcaggaggaccaaatccactttatgtgtcccctagcgaggcagggagatttctacgtgccagagatgaaggagaccgaatggaaatggagaggacttgtcgaagccatagatacccaggtggacggaacaggggccgacaccatgtctgatacttcctcggtgtcactcgaggtatcccccggtagccgagagacatccgccgccactctgagcccgggcgcaagctcacgggggtgggatgacggagacactcggtccgagcattcctattccgaatcaggggcctccgggtcatctttcgaggagctggacctggagggcgagggacctttaggagaatcccggctcgatcccggtaccgaacccctagggacaacaaaatggctttgggaaccaacggcccccgaaaagggcaaagaatag

SEQ ID NO: 6166 - DNA, 843 bp, synthetic construct
  misc_feature 1..843: note = source = /note="Description of Artificial Sequence: Synthetic coding sequence"
  source 1..843: mol_type = other DNA
atgaaaacatttacttggaccctcggcgtgctattcttcctcctggtggatactggacactgtcggggcggccaatttaagatcaaaaaaatcaatcagagaagatacccaaggacaataaaggatatgattacacgtatggatctcgaaaacttgaaggacgtgcttagtcgtcagaagagggaaatcgatgtgctgcagctcgtagtcgacgtggacgggaatatcgtcaacgaagtgaaactcctacgtaaggaaagtaggaacatgaactctcgggtgacacaattgtatatgcaattactgcacgagattattaggaagcgagataacagcttggagctgtctcaactggagaacaagattttaaacgtcaccaccgaaatgcttaagatggctacacgctatagggagctggaagttaagtatgcatccctaaccgatcttgttaacaatcagagtgttatgatcaccttgctggaagaacagtgcctccggatcttctctagacaagatactcatgtctccccccctctagtccaggttgtgccacagcatattcctaactcacagcagtacacacctgggttactgggcggaaatgagatacagcgagatcccggatatcccagggatttaatgccaccccccgacttagccacaagtcccacgaaatctccatttaaaattcctcctgtgacattcattaacgaaggaccatttaaggactgccagcaggccaaggaggctgggcatagtgtgaatggaattttctgggcggagtacagaggggggagctactcattgcgtgcagttcagatgatgattaagcccatagactag

SEQ ID NO: 6167 - DNA, 522 bp, synthetic construct
  misc_feature 1..522: note = source = /note="Description of Artificial Sequence: Synthetic coding sequence"
  source 1..522: mol_type = other DNA
atgcactggaagatgctgctgctgctgctgttgtactataatgctgaagcctctatgtgtcaccggtggtcgagggccgtgctgttccccgccgctcatagacccaaaagatccagctcgcttccactcaatcccgtactccagacttccctggaggaggtggagctcctgtacgaattcttactcgctgaactggaaatctcaccagacctgcagatttcaataaaagacgaagaactggcatccttgcgcaaggcaagcgactttaggactgtctgcaataacgtgattcctaaaagcattccggatatccgccgcttgtccgccagcctgagctcccatccagggatcctgaagaaagaggacttcgaaaggactgtcctgaccttagcgtatacagcttaccgaaccgctctgagtcatggacatcagaaggacatctgggcgcagtccctggtgagcctgttccaagctctccgccacgatctgatgcgctcaagccagcccggcgttccaccctag

SEQ ID NO: 6168 - DNA, 309 bp, synthetic construct
  misc_feature 1..309: note = source = /note="Description of Artificial Sequence: Synthetic coding sequence"
  source 1..309: mol_type = other DNA
atggaacggggagcaggcgccaaactgttacctttgcttctgttattgagagcaacgggattcacatgcgcacagaccgacggccgcaacggctataccgccgtcatagaggtcacaagcggtggcccctggggggactgggcctggcccgaaatgtgccccgatggctttttcgcatccgggtttagcttaaaagtggagcccccacaaggaattcctggggacgatacggctctgaatggaatcaggctgcactgcgcaaggggcaacgtcctaggcaatacccatgtgctcgggagaatggagtag

SEQ ID NO: 6169 - DNA, 351 bp, synthetic construct
  misc_feature 1..351: note = source = /note="Description of Artificial Sequence: Synthetic coding sequence"
  source 1..351: mol_type = other DNA
atggcagctggctccgctccaatgcaactgcacctgagagctaccatcaggatgaaagatgggctgtgtgtcccccgcaagtggatttaccatctcacagaggggagtaccgacctccggacggagggacgaccggacatgaagacagagctcttttccagctcatgtcctggcggcattatgctgaacgagaccggccaggggtatcagcggtttctgctctacaaccgcagcccacacccgccagagaaatgcgtggaagaatttaagtctctcacctcatgtctggatagcaaagccttccttcttactccacggaatcaggaggcctgcgaactgtcaaataactag

SEQ ID NO: 6170 - DNA, 1137 bp, synthetic construct
  misc_feature 1..1137: note = source = /note="Description of Artificial Sequence: Synthetic coding sequence"
  source 1..1137: mol_type = other DNA
tgatattctggtgactacatggagcccgagaaacctggcgccccccttctccctcctcccccccagaacagcgtgcctcattacgccgaggcggatatagtgaccctgcagggggtgacaggcggcaatacctatgctgttcccgcactcccccccggcgcagttggagacggcccgcccagagtggactttcccagatcccgacttaggttcaaggaaaagctgggagagggacagttcggggaagttcacctgtgtgaagtagattcccctcaggacctggtgagcctcgacttccctctcaacgtgagaaaaggacaccctctcctggtggctgtgaaaattctcaggccagacgccaccaagaacgcatctttctcactgttctcccgcaatgatttcctaaaggaggtaaagataatgtcaagactcaaagaccccaacataattaggctcctgggcgtgtgcgttcaggacgaccctctgtgtatgataaccgattatatggagaacggtgacttgaatcagtttttgtccgcacatcagcttgaggataaagccgccgagggcgctcccggcgacgggcaagctgcccaaggccctactatttcgtatcctatgctgctacacgtggcagcgcagattgcttcgggcatgcgatatctagctactctgaattttgttcatcgagacctcgccactcgcaactgcctggtgggcgagaattttacaatcaaaattgctgattttggtatgtcaaggaacttatatgccggggattattacagagtgcagggaagggcagtgctgcctattcggtggatggcctgggagtgcattctgatgggcaagttcacaaccgccagcgacgtgtgggccttcggcgtgacactatgggaagtgctgatgctttgtagagctcagccttttggccagttaactgacgaacaggtgattgagaacgcaggtgaattctttcgagatcaagggaggcaagtctaccttagcaggccgcctgcttgcccacaaggtctgtatgagctgatgctgagatgttggtctcgggagtccgaacagaggccacctttttcccagctgcataggtttcttgccgaggacgctttgaacaccgtatag

SEQ ID NO: 6171 - DNA, 942 bp, synthetic construct
  misc_feature 1..942: note = source = /note="Description of Artificial Sequence: Synthetic coding sequence"
  source 1..942: mol_type = other DNA
atgagtgatcttctgcttctcgggctgatcggcggccttactctcctgctgttattgacactgcttgcctttgccggttatagtggtcttctggctggtgttgaggtgagcgcagggagtccacccatcagaaatgtgactgtggcctataaatttcacatgggcctgtatggagaaacaggtcgcctgttcacagagtcatgctcgatttcgcccaaactccgatctatcgcagtatactacgacaatccgcacatggtccccccagacaagtgcaggtgcgccgtcggcagcattttgagtgagggcgaggagtcaccatcccccgaactaatcgacctgtatcaaaaatttggcttcaaagtgttctccttccccgccccctcacacgtcgtcacagctacctttccatatactacgatcctgagtatatggctcgccacaaggcgcgtgcatcccgctctcgacacatatataaaggaacggaaattatgtgcctatccgaggttggaaatctatcaggaagaccaaatccattttatgtgcccactggctcgccaaggagacttttacgtccccgagatgaaggagacagaatggaaatggcgcggcttagtcgaggccattgacacgcaagttgatggcactggggcagacaccatgtctgacacgtcatcagtgtccctggaagtatctccagggtctcgcgagacctccgccgccaccctctcccccggcgcttcctcaaggggatgggacgacggcgacactcggagtgagcactcttactcagagagtggggccagcgggtcctcattcgaagaactagaccttgaaggtgaagggccgctgggcgagtctaggctggaccctggaaccgagccactgggaaccactaagtggctgtgggaacctaccgctccggagaagggcaaggagtag

SEQ ID NO: 6172 - DNA, 420 bp, synthetic construct
  misc_feature 1..420: note = source = /note="Description of Artificial Sequence: Synthetic coding sequence"
  source 1..420: mol_type = other DNA
atgggccctgaagcactctctagtctactgctcctgcttctggttgcgtcgggtgatgccgacatgaaggggcactttgatccagcaaagtgtcggtacgccttggggatgcaggaccggaccatccctgactctgatatatcggccagtagttcttggtcagattcgactgcagctaggcatagccggctggagtccagcgatggggatggtgcatggtgcccagccggctctgtgttccccaaggaggaggaataccttcaggtggatttacagagattacacctcgtagctctcgtgggaacacagggcaggcatgccggcgggttgggaaaggaattttcccgcagctatcgactgcgctacagtcgagatggtcgaagatggatggggtggaaggaccgatggggccaggagtag

SEQ ID NO: 6173 - DNA, 342 bp, synthetic construct
  misc_feature 1..342: note = source = /note="Description of Artificial Sequence: Synthetic coding sequence"
  source 1..342: mol_type = other DNA
atggataacgtccagcccaaaataaaacataggccattctgtttctcagtcaagggacacgtaaagatgctgcggctggcgctaaccgttactagcatgacttttttcattatcgcgcaagcacccgaaccctacattgtcattactggcttcgaggtgactgtgatcctcttttttatattactctacgtgctgaggctcgacaggctaatgaagtggttgttctggcccctgttggacatcatcaacagtttggtgacgacggtctttatgcttatcgtcagcgttctcgctctcatcccagaaacaacaacattgactgttgggggtgggctgttttag

SEQ ID NO: 6174 - DNA, 465 bp, synthetic construct
  misc_feature 1..465: note = source = /note="Description of Artificial Sequence: Synthetic coding sequence"
  source 1..465: mol_type = other DNA
atgtttggctggggtgatttccacagcaacattaagaccgtgaagctgaacctgttgattacagggaaaatcgtggatcacgggaacggcacattctctgtatactttagacataacagcaccgggcagggcaatgtcagtgtgtccctggtccctcccacaaagatcgtcgagtttgatcttgcacagcaaacagtaatcgatgccaaggatagcaaatcttttaattgtcgtatcgagtacgaaaaggtggacaaggctaccaagaatacgctatgcaactatgacccttccaagacctgctatcaagagcagacacagagccatgtgtcctggctgtgctccaaaccttttaaagtaatctgtatctatatttctttttattctactgactataagctcgttcagaaagtttgtcctgactacaactatcactctgatacgccttatttcccgtccggatag

SEQ ID NO: 6175 - DNA, 531 bp, synthetic construct
  misc_feature 1..531: note = source = /note="Description of Artificial Sequence: Synthetic coding sequence"
  source 1..531: mol_type = other DNA
atggctgacatgcagaatttagtggagcggcttgaacgagccgtaggccgcctcgaggctgtgagtcatacgtccgacatgcatcgggggtatgccgacagccctagtaaggctggggccgccccttacgtgcaggccttcgacagcctgttggccgggcccgtggcggaatatcttaagatctccaaggaaatcgggggggatgtccagaaacacgcagagatggtgcataccgggttgaagctagaacgggctctgcttgtgactgcatctcagtgccagcagcccgctgaaaataagctctctgatctgctagcccctatctctgaacagataaaggaagttatcacattcagggagaaaaacagaggaagcaagctgtttaatcatctaagcgctgtctctgaaagcattcaagcattaggctgggtcgccatggcacccaagccaggaccatacgtaaaggaaatgaatgatgcagcaatgttctacactaaccgcgtcctgaaggagtataaggatgtggattag

SEQ ID NO: 6176 - DNA, 2535 bp, synthetic construct
  misc_feature 1..2535: note = source = /note="Description of Artificial Sequence: Synthetic coding sequence"
  source 1..2535: mol_type = other DNA
atgggaccaggagcaccattcgccagagtgggatggcccctgccccttctggtggtgatggccgctggcgtggctcccgtgtgggcatcgcactcccctcacctaccaagacctcacagcagagtcccaccccacccatcatccgagaggagagctgtatacatcggcgcactgttccccatgagtgggggttggcctggcgggcaagcatgccaaccagcagtggaaatggccttggaggacgtcaactcacgccgtgatattctgccagactacgaactcaagcttatccatcatgattccaaatgtgacccagggcaagctaccaagtatctgtatgagctattatacaacgatcccatcaaaattatccttatgcccggttgttcttcagtctccacattggtggccgaagcggcacgcatgtggaatctaatcgttttatcttacggtagcagctcacccgccctctccaataggcaaagattccctacctttttccggacccacccatcagcgacattgcacaacccgacacgagtgaagctgtttgaaaagtggggctggaaaaaaattgcaaccatccagcagacaactgaggtttttacgagtacactggatgatctggaagagagagtcaaagaggcaggtatcgaaatcactttccgacaatcatttttttctgatccggccgtgcctgtgaagaacctgaaaaggcaagatgctaggatcatcgttgggttattctacgagacagaggcgaggaaagtgttttgtgaagtgtacaaagaacgattgttcgggaaaaagtacgtatggttcctcatcggttggtacgcggataactggttcaagatctacgatcccagtatcaattgtaccgtagatgagatgaccgaagctgtggaagggcacattactaccgaaattgtaatgctcaaccccgcaaacacgagatcaatctcgaacatgaccagccaagaattcgtagagaagctcactaagcggctgaagcggcaccccgaggaaacaggaggctttcaggaagcgcctctggcatatgatgccatctgggcattggccctggccctgaataaaacctctggaggcggtggaaggagtggtgtgcgactggaggactttaactataacaatcagacgattacggatcaaatctacagggcaatgaattctagctcctttgagggagtctccggtcacgtcgtgttcgacgcatcgggcagccgaatggcatggactctaattgagcagttgcaagggggttcgtacaagaaaatcgggtactatgattcaacgaaggatgacctgtcttggtcgaagactgataaatggattggaggatccccccccgccgatcagacgcttgtgattaagaccttcaggttcttgagtcagaagttgttcatctccgttagcgtactaagttcgttaggcatcgttctcgcggttgtgtgtctgagctttaatatttacaactctcatgtgcggtatattcagaactcccagccgaatctgaataacctcacagctgttggctgtagtctggctctggctgcggtgtttccacttggcctggacggataccacatcggacgcaatcagttccctttcgtctgccaggcacgactgtggctcctggggttagggttttctctgggctacggatcgatgttcaccaaaatctggtgggtgcacacagtctttacgaaaaaggaggagaagaaggagtggcgcaagaccttggaaccgtggaagctgtatgctaccgtggggctgctggtgggaatggacgtgttgaccctggccatatggcagatcgtcgacccactacaccgcaccattgaaacctttgctaaggaggagcctaaggaagatattgatgtcagcattctgccacaacttgaacactgttcctccaggaagatgaatacttggcttgggatcttctacggctacaagggtttattgctgctactcggtatctttttggcctatgagacgaagtctgtgtccaccgaaaaaataaacgaccatcgggcagtagggatggcaatctacaatgtggcagtcctgtgcctcatcactgcacctgttacaatgatcctctcgtcccagcaggacgcagccttcgcgtttgccagtttagccatcgtgtttagtagttacattaccctggtagtactgttcgtgcctaagatgaggcgcctgattaccaggggggagtggcaatcggaggcccaggataccatgaaaaccggctcctccaccaataataatgaagaagaaaagagtcggctcctcgaaaaggagaaccgggaactggaaaagattattgctgagaaggaagaacgcgtgagtgaactgcgccatcagttgcagtctcgacagcagctacgttctcgacgccacccaccaacaccacctgagcctagtggtgggttgcctagaggaccccctgagccacctgaccgccttagctgtgatggatcgcgggtccatcttctctacaaatag

SEQ ID NO: 6177 - DNA, 2055 bp, synthetic construct
  misc_feature 1..2055: note = source = /note="Description of Artificial Sequence: Synthetic coding sequence"
  source 1..2055: mol_type = other DNA
taaccgagatctagcactcatgtgccccttgtcctgcctttacttgtgctcctattgcttgctcccgccagacaggctgctgcacagcggtgcccacaggcatgcatttgtgataactccaggcggcacgttgcatgcaggtatcagaacttgaccgaagttcctgacgccatccctgagctaactcaaaggttggatctgcaggggaacttactgaaagtcattccagcagccgcttttcagggggtccctcacttgacccacctggatttacgtcattgcgaagtggaactggtcgcagaaggggcttttcgcggcctcggtaggttgttgctcctgaatcttgcttcaaatcatttacgcgagttaccacaagaggccctggacggcttaggcagtctccggcgcctggagctcgaaggcaacgcgcttgaggagcttcggcctggtaccttcggcgccttgggagccctcgccacactgaatctggcacataatgcgttggtttacctgcctgcaatggcgttccagggtctcctgagggtccgctggttgcggctctctcataacgctctatctgtcttggccccggaagcattggcaggacttccggctctcagacgactctccctccatcacaatgagctgcaggctctgccaggcccggtcctctctcaggcacggggacttgctcgactggagctgggtcacaatccactcacttatgctggggaggaggacgggctggccctgccgggattgagggaactccttctcgacggcggtgctctgcaggcactcggacctcgagcctttgcccactgcccccggcttcacactttggatctgagagggaatcagctagataccctgcctccactgcaaggccctggacaattacggagactccggctgcagggaaatcctctctggtgcggctgtcaggcgcggcccctcctcgagtggctcgccagggcacgagtccggagtgacggcgcatgccagggtcccaggcgactgaggggtgaagctctggacgcactgcgtccttgggacctgcgctgccccggcgatgctgctcaagaagaagaggaactggaggaacgagcagtggccggaccacgggccccacctcgcggtccaccacgcggacctggtgaagagagagcagtcgcaccgtgtccacgggcttgtgtttgtgtgcctgagagtcgacatagctcctgcgagggatgtggtctgcaggccgtgccaaggggctttcccagcgatacccagcttctggacctccgcagaaatcactttccaagcgtccccagggccgccttcccaggcctgggccatttagtgtctctccacttgcagcattgtggaatcgctgagcttgaggccggcgccctggccggcctgggccggctgatctacttgtacctgtctgacaatcagctagcgggcctgtcagccgctgcgttggagggggcccctcgcctggggtacctttacttggagcggaatagattcctgcaagttccaggagccgccctgcgcgcccttccatctctgttctcactgcatctccaggacaacgccgtggaccgcttggctcccggggatctcggcaggacccgagcccttcgatgggtgtacctgagcggtaacagaattaccgaggtgtccttgggggccctgggccccgcccgagagctcgagaagctccatctggataggaaccagctacgggaagtcccaacaggagccctggagggcctgcctgcactcttggagctccagctgagcggaaaccctctccgggcactgcgcgatggggccttccagcccgtgggaaggagtctacaacatttgtttctcaactcttccggcctggaacagatctgcccaggcgctttctcggggctggggccgggattacagagcctgcatctgcagaaaaatcagttgagggccttgccagcattaccatccgcacggcgaaccccgattaaaggaaggcagtgtggggccgacaaagtgggcaaagagaaggggaggctctag

SEQ ID NO: 6178 - DNA, 2259 bp, synthetic construct
  misc_feature 1..2259: note = source = /note="Description of Artificial Sequence: Synthetic coding sequence"
  source 1..2259: mol_type = other DNA
atggcccgtcacttgctgctgcccctggtgatgctggtaatcagccccattcctggggccttccaggactcagccctcagtccaacccaggaagaacctgaggacctggattgcggccgccccgagccctccgcccgcatagtcggcggatctaatgcacagcctgggacgtggccctggcaggtgtcactccatcatggaggggggcacatctgtggcggctctctgatcgcaccctcctgggtgctctccgccgcccactgcttcatgaccaatggcactctcgagcctgcagccgagtggagcgtcctactgggagtacattcacaggatggccccctggatggcgcacacacccgggctgtggccgcaatagtggtccctgcaaattattctcaggtcgagctcggcgccgatctggcactgttgcggttggcctcgccggcgtctctgggcccagccgtttggcctgtgtgcttgcctcgggcctcccaccgcttcgtgcatggaacggcctgttgggccaccggatggggcgatgtccaggaggcagacccacttccattgccttgggtactgcaggaggtcgagttgaggttacttggggaggcaacctgtcagtgtctttatagccaaccaggaccattcaatttgacactgcagatccttcccggcatgctgtgtgctggttatccagaagggcggagagatacctgccagggtgactccgggggcccccttgtgtgcgaagaaggggggcggtggttccaagcgggcatcacctcattcggatttggatgtggaaggaggaaccgccctggggtgttcaccgccgtcgctacttatgaggcatggattcgcgaacaggtcatgggtagcgagccgggacccgccttcccaacccagccccagaagactcagagtgatccccaggagccacgtgaagagaactgtaccattgcacttccagagtgcggcaaggccccgcggccgggtgcatggccatgggaagcacaggtcatggtccccggctcacgcccatgtcacggggctctggttagtgaatcatgggttctggcccccgcctcctgttttttagacccgaattcaagtgactctcctcctcgcgacctcgacgcttggcgcgtgctcttaccttcacgccccagggccgagagagtagctcggctggtgcaacatgagaatgctagctgggacaacgctagcgatttggccttgctgcaactacgaacacccgtgaatctcagcgctgcgtctcggcccgtgtgcctgccacatcctgaacactatttccttcctggctccagatgccgcctggcgagatggggtagaggtgaacccgcgctaggaccaggagccttgttggaggctgaacttctgggcggatggtggtgccactgcctgtatggccgacaaggagcagccgtgccactgcctggcgatcctccgcacgcattatgtcccgcctatcaggaaaaagaagaagtaggctcatgttggaatgactcgaggtggtccctcttgtgccaggaggaggggacctggttcctagccggcattagagattttccatccggatgcctacgaccacgcgcattttttccactccaaacccacgggccttggatcagtcatgtgacccgtggtgcctacctggaagaccagctggcctgggattggggacccgacggcgaggagaccgagacgcaaacctgccctcctcacactgagcacggcgcctgtggactgcgcctcgaggccgcacccgtcggagtgttatggccttggctcgctgaggtccatgttgcaggcgatcgggtctgtaccgggatcctgcttgccccgggctgggtgttagccgcgacacattgcgtgcttcggcccggttccaccacagttccctacatcgaagtctatttggggcgtgccggagcaagtagcttaccccagggccatcagatgacctccgctcccccgctactgtgccaaatgacagagggtagctggattctcgtggggatggccgtccaggggtcgagggagcttttcgccgccatcggtccagaggaagcctggataagccagacagtgggtgaggctaatttcctccctccttcaggctcgccacactggccaaccggtggatccaacctctgtccccctgaactcgctaaagcctcagggagccctcatgctgtgtacttcttattgctcctcactctgcttatccagtcctag

SEQ ID NO: 6179 - DNA, 453 bp, synthetic construct
  misc_feature 1..453: note = source = /note="Description of Artificial Sequence: Synthetic coding sequence"
  source 1..453: mol_type = other DNA
atgagatttatggctggtccagccggcagtcagagtctgggtcctctatgttttcacagcagccctcaggctctatacactgtgctcctcattgtcctggtcatgatgtccttggtattcggcaaatttgtgcccgtcaactgggaaccaccacagcctcttcctttccctaaataccttagatgctatcgctgtctattggagaccaaagaactgggttgtctgcttggaagtgatatttgcctcacgccggctggaagcagctgcatcacgctgcataagaaaaacagcagtgggtctgacgtaatggttagcgactgtcgtagtaaggagcagatgagtgattgctcaaacactaggacaagccctgtaagtgggttctggatatttagccaatactgcttcctagatttctgcaatgatccacagaatcgagggctttacaccccctag

SEQ ID NO: 6180 - DNA, 1161 bp, synthetic construct
  misc_feature 1..1161: note = source = /note="Description of Artificial Sequence: Synthetic coding sequence"
  source 1..1161: mol_type = other DNA
atgaaatttcaaggcccattagcttgcctgctgttggctctgtgtcttggatcaggagaggccgggcccctgcaaagtggcgaggagagtacgggaactaatatcggcgaggctctgggccatgggcttggcgatgctctgagcgaaggcgttgggaaggcaatcggaaaagaggccggaggtgccgccgggagtaaagtctccgaagcccttggacagggcacgagagaagctgtcggcaccggcgtacgacaggtgccgggatttggagtcgcggacgctcttggcaatagagtcggggaggcagcccatgccctaggaaatacggggcacgagatcggacggcaggccgaggacgtgatcagacatggcgccgatgctgtgcgtggcagctggcagggcgtaccagggcataatggggcttgggaaaccagtggaggtcatggcattttcggtagccaaggagggctcgggggccagggccaaggtaaccctggggggctcggcacaccttgggtgcacgggtatcccggtaattcagcaggatctttcggtatgaatccgcagggagcaccttggggccaaggcggtaacggcggccctcccaacttcggcaccaatacccagggcgctgtagctcagcctggatatgggtccgtgcgcgcctctaaccaaaacgagggttgcaccaatccccccccgtccggctcaggaggtggcagctccaactcgggcggggggtcaggttctcagagcggatctagcggctccgggtctaatggagataacaacaacggcagtagttccggtggcagcagctcaggttcatcatccgggggctcatctggcggaagctccggcgggtcatccggcaattccgggggctcgcggggggattcagggagcgagtcttcctggggatcgagcactgggtccagctccggaaatcatggagggagcggcggcggtaatggtcacaaaccaggctgcgaaaagcctggcaacgaagcccgcggtagcggggaatccgggattcaaaattctgagacatcacctggcatgtttaacttcgacacattctggaagaacttcaagtctaaactggggttcattaactgggacgccatcaataaggaccagcggtcttcacgaatcccttag

SEQ ID NO: 6181 - DNA, 1995 bp, synthetic construct
  misc_feature 1..1995: note = source = /note="Description of Artificial Sequence: Synthetic coding sequence"
  source 1..1995: mol_type = other DNA
atgaagacggggctctttttcctttgcctgctgggtactgctgccgcaatccccaccaatgcccgattactatccgaccattccaagccgacggctgagaccgtcgctcctgataataccgccattccgtctctgagagccgaagcagaagagaacgaaaaagagactgccgtgtctaccgaggatgactcccaccataaggccgagaaatccagtgtcttgaagtcaaaagaagagtcgcatgagcagagtgccgagcagggcaagtcctctagccaggaactcggactgaaggaccaagaggattcagatggtcacctctctgtcaaccttgaatacgccccaacagagggtacattggacatcaaggaggatatgagcgaacctcaggagaagaagctgagcgaaaatacagacttcctcgcacctggcgttagctcgtttacagattccaaccagcaggagtctattaccaaacgcgaagagaaccaggagcagcctagaaattatagccaccaccaactcaacaggtcctcgaagcactcccagggtttgagggatcaggggaaccaggagcaggaccccaacatctccaacggggaggaggaagaggaaaaggagccgggcgaagtgggaacacacaacgataatcaggagcgcaaaacggagctaccaagggaacacgccaattccaagcaggaagaggacaacacgcagagcgatgacatcctggaagagtcagaccagccaacgcaagtaagcaagatgcaggaggatgagtttgatcagggtaaccaggagcaggaggacaattcaaatgcagagatggaagaggaaaatgcttccaatgtgaacaaacacatccaggagactgagtggcagtcacaggaaggtaaaacagggctggaagccatctccaaccacaaagaaacggaagaaaaaactgtgagcgaggcgttgcttatggagcctacggatgacggcaatacaaccccgcggaaccatggggtggatgacgatggcgacgacgacggagacgacggaggtaccgatggaccccgacactcagcctcggacgattatttcattccctcacaggccttcctggaagccgaacgcgctcagagcatagcttatcatcttaaaatagaagagcagcgagagaaggtccacgaaaacgaaaacatcgggactacggagcctggagaacaccaagaggcaaagaaggctgagaatagttccaacgaggaggaaacttccagtgaaggtaatatgagagtccatgctgtggactcatgcatgagcttccagtgcaagaggggccacatttgcaaagccgaccaacaggggaagccacactgcgtatgtcaggatccggtaacatgtccgcccactaaaccactggatcaagtctgtggcaccgataaccagacgtacgcaagttcatgccacctcttcgccaccaagtgtaggcttgaagggactaagaagggccaccaactccagttagactacttcggagcttgcaagtccattccaacttgcactgacttcgaggtgattcagtttcccttgcggatgcgcgattggctcaaaaatattctgatgcagttgtatgaggcaaacagtgagcacgctggttatttaaatgagaaacagcgtaataaggtgaagaagatctatctggacgaaaaaagattgctggcaggagaccacccaattgacctcctcctgagagattttaagaagaattaccatatgtacgtgtatccggttcactggcagttttccgaactggatcagcaccccatggacagagtgcttacccacagcgagctggctccactgcgggcctccctggtgccgatggagcattgcattacaaggttctttgaggagtgcgatccaaacaaggacaagcacattaccctcaaggaatggggccactgctttggtattaaggaggaagacattgatgagaacctgctcttctag

SEQ ID NO: 6182 - DNA, 420 bp, synthetic construct
  misc_feature 1..420: note = source = /note="Description of Artificial Sequence: Synthetic coding sequence"
  source 1..420: mol_type = other DNA
atggggcctgaggcactgagctccctgctcctgcttctgctcgtggcatcgggcgatgccgacatgaaggggcactttgaccctgccaagtgcaggtatgcactgggcatgcaggatcggactatccctgatagcgacataagcgcaagtagttcttggagcgactctaccgccgctcgacactcgagactggagtcatctgatggggacggagcttggtgtccggccggctctgtgtttcccaaggaagaggaatatctgcaggttgacctgcaaagactgcacctggtggcactggtcggaacccaggggagacacgctggcggcctggggaaggaattttctagaagctaccgactgagatactcacgtgatggccgtcggtggatgggatggaaagatcgatggggacaggaatag

SEQ ID NO: 6183 - DNA, 285 bp, synthetic construct
  misc_feature 1..285: note = source = /note="Description of Artificial Sequence: Synthetic coding sequence"
  source 1..285: mol_type = other DNA
atgcaacatagcctcgtgttttttttcgctgtgatcctgcacctgtcccacctcctgcatctggatgcaagtattcaccctttcagactgcccttttcctctaaacccttcttactgatcccgatgtcgaataccacattaccccacacagcttggcctctgtctttcctccaccagacggtgagcaccctcaaagctgtggccgtcacacacagcctttggcatctgcagattccagtggactgtcaagcttgtaacagaaagtccaagaaaatatattgttag

SEQ ID NO: 6184 - DNA, 699 bp, synthetic construct
  misc_feature 1..699: note = source = /note="Description of Artificial Sequence: Synthetic coding sequence"
  source 1..699: mol_type = other DNA
atgttgcctaagagtcgccgtgcgctcactatacaggaaatcgccgcgctggcccgttcaagtctccatggcatctcacaagtcgtgaaagaccatgtaaccaagcctacagcgatggcccaaggtcgggtggcccacctgattgaatggaagggttggtctaaaccttccgatagtcccgccgccctggagtccgcttttagcagttactcagatttatccgaaggtgaacaagaagcgcggttcgccgccggggttgctgagcagtttgccatcgcagaggctaagctaagagcttggtcctcagttgatggtgaagatagcacagacgattcctacgatgaagactttgctggaggaatggacaccgacatggccggtcaattacccttgggcccccatctgcaagacctgttcacagggcaccgtttctcaaggcccgtgcgacagggttcagttgaaccggagtccgattgtagccaaaccgtgtcacctgacacactgtgctctagtctgtgctccctggaagacggcctcttaggctccccggccaggctggcttcacagcttctgggtgacgagctgctgcttgcaaaactcccaccttcccgggaaagtgcctttcgctctctcggccctctcgaagctcaggactccctttacaacagtcctttaactgaaagctgcctgtcaccatag

SEQ ID NO: 6185 - DNA, 2631 bp, synthetic construct
  misc_feature 1..2631: note = source = /note="Description of Artificial Sequence: Synthetic coding sequence"
  source 1..2631: mol_type = other DNA
atgggccctgaggccctgtcaagcctgctgctgctgctgctggtcgcctctggggacgcagatatgaagggacacttcgaccccgccaagtgtaggtacgctcttggtatgcaagataggactatccctgacagcgatatttcagcatcttcctcctggtccgattcaaccgcagccaggcacagcaggttggaaagttcggacggggacggcgcctggtgccctgccggaagcgtcttccctaaggaggaggagtaccttcaggtagatcttcaaaggctgcatcttgtggctctggtggggacccagggccggcacgctggggggttggggaaggagttttcacggagctatcgcctccggtactcaagagacgggcgtagatggatgggatggaaggaccgttggggtcaggaggtgatctctgggaatgaggaccccgagggagtcgtgctgaaagacctcggacctcctatggttgccagacttgttagattttacccgagggctgacagggtgatgtcggtctgcctcagagtcgaactgtatggatgcctttggagagatggcttgctctcttacacagcccccgtgggtcagacgatgtatctgtccgaggcggtctacctgaatgattccacctatgacggccacaccgtcggcggactgcagtacggtgggctcggacagctagcagatggggtggtggggctggacgactttaggaaatcccaggagctgcgtgtgtggcccgggtacgactacgtcggatggagtaaccattccttctcatccgggtatgtggagatggaatttgaattcgacagacttcgcgcctttcaggcaatgcaggtccattgcaacaacatgcacaccctcggcgcccgcctgcccgggggcgtcgaatgcaggtttcggcgtgggcctgcaatggcttgggaaggcgaacccatgcgccacaaccttggcggcaatctgggggacccaagggcccgtgctgtgtctgttcctctgggtggccgcgtcgccaggtttctgcagtgcagattcctctttgccggtccatggttgctcttctccgaaatctcatttatttcagatgtggttaataattcttcgccagcgctggggggaaccttccctccagcgccctggtggcctccaggaccacccccaacaaacttcagcagtctggaactcgaaccgcgaggacagcagcccgtcgccaaggccgagggttcccctaccgcaattctcatcggttgtttggttgccatcatcttactactgctcctgattattgcgcttatgctgtggcggctgcattggagaagactgctgagcaaggccgagcgccgggtgcttgaggaggagctaaccgtccacctgtcagtgcctggggacacaattctgattaacaataggccagggccacgggaacctcctccctaccaggagccaaggccccgtggaaacccaccccattccgctccttgcgtgccaaatggctcggcgtatagcggggattacatggagcctgagaaaccaggggctccactgctgcctccacccccccagaacagcgtccctcactacgccgaagcggatatcgtcacattgcagggggtgacaggtggtaacacttatgctgtgccagccctgcctcccggggctgtaggggacggaccccctcgagtggatttccctaggagcaggctgcgattcaaggagaaattaggcgaaggtcagttcggcgaggtgcacttgtgcgaggtggacagtcctcaggacctggtttcacttgacttccctctgaatgttcggaagggccaccctctgctggtcgcagtgaagatcctgaggcctgacgcaactaaaaacgcgcggaatgattttctgaaggaagtgaaaattatgagccgcctcaaggaccctaacattatcagactactcggagtctgcgtccaagacgacccactgtgcatgattacagattacatggagaatggggacctgaatcaattcctgagcgcacatcagcttgaggacaaggcggctgagggagctcccggagatggtcaggctgctcagggcccaacaattagctaccctatgctgctgcacgtcgccgcccagattgcctctggaatgaggtacttagcaactctgaattttgtccacagggatttggctacacgcaactgcctcgtgggagagaattttactataaagatcgccgattttggcatgagccgaaacctgtacgccggtgactactatcgggtccaggggcgagcggtcttgcctatacgctggatggcatgggagtgcatactgatggggaaattcactaccgctagcgatgtgtgggcctttggggttaccctctgggaggtcctgatgctttgtcgagcacaaccgtttgggcagctcactgatgaacaagttattgaaaacgccggggagttttttagggaccagggccgccaagtctatcttagccgccctccagcatgtcctcaggggttgtacgagctcatgctgaggtgttggtcacgggaatctgaacagaggcctcctttcagtcagctgcatcgctttcttgccgaggatgccctcaatacagtgtag

SEQ ID NO: 6186 - DNA, 165 bp, synthetic construct
  misc_feature 1..165: note = source = /note="Description of Artificial Sequence: Synthetic coding sequence"
  source 1..165: mol_type = other DNA
atgtgtagggaaacggccgggtacggctggctgctggcatcaaccgaactgctttctcttttggagcccctgagcccacagcttttgaaggaacatatctcctgtacctcgcaggttgccgccggcgcaaaagtcacacctgatagtgcagtctgggctccctag

SEQ ID NO: 6187 - DNA, 2256 bp, synthetic construct
  misc_feature 1..2256: note = source = /note="Description of Artificial Sequence: Synthetic coding sequence"
  source 1..2256: mol_type = other DNA
atggcgtttcgcacaatttgcgtgctggtgggggtttttatctgttcaatatgtgttaaaggcagtagtcagccccaggcccgagtgtatctgacatttgacgaacttcgagagaccaaaacgtctgaatatttttcccttagccatcatccgcttgattacagaatcttgttgatggatgaagatcaagatcgtatctacgtcggctctaaggaccacatcctgtcactgaatattaacaacatcagccaagaggcactgtcagtcttctggccagcatccaccattaaagtagaagaatgcaagatggcagggaaggatcctacccacggatgcggaaactttgtccgcgtaatccagacgtttaacagaacacacctgtatgtgtgtggctcaggcgctttttccccagtgtgtacctacttgaaccgcggtagaaggagtgaggaccaggtcttcatgattgattctaagtgcgaatccggaaaaggcaggtgctccttcaaccccaacgtgaacacagtctccgttatgatcaacgaggaactgttcagcgggatgtatatcgactttatggggaccgatgcagcgatcttccgtagcctgaccaaaagaaatgctgttagaacagaccagcacaacagcaagtggcttagcgaaccgatgtttgtcgatgcccacgtgattcccgatgggactgaccccaatgacgccaaggtgtacttcttttttaaggagaagctgactgataacaatcggtcaacaaagcagatccatagcatgatcgcgcgtatttgccccaacgacacggggggacttaggtccctcgtgaataaatggacaacattcttaaaggctagactggtgtgttctgtcacagatgaggatggccctgagacccatttcgacgagctggaggatgtgttccttttggaaactgacaatccacgaaccaccttagtttacggcattttcacaacctcctcgagcgtgttcaaggggtctgctgtgtgcgtgtaccatctttcggacattcaaacagttttcaacggcccgtttgcacataaggagggcccgaaccatcagttgatctcttatcagggccgtataccctatcctcgacccggaacatgcccaggaggagccttcacccctaacatgagaacaactaaggaatttccggatgatgtggtcacattcattaggaaccatcctcttatgtataattctatttacccgattcacaaacggccattgattgtccggattggaaccgactataagtacactaaaattgccgtggatagagttaatgccgctgatggcaggtatcacgtcttgttcctgggaacggacagagggaccgtacagaaagtagtagtactgcccacaaacaattcagtttccggggaattaatcctcgaagaattggaggtattcaagaaccatgcccctattactaccatgaaaatctctagcaaaaagcagcagctctacgtatcttcaaacgagggggtgagccaggtctcactacataggtgccacatctacggaaccgcctgtgcagattgctgtctagcacgggatccttactgcgcatgggacggacatagttgctctcggttttaccctaccggcaagcggcgtagtagacgacaagatgtgaggcacggtaacccactcactcagtgccggggctttaacctgaaggcctatagaaatgccgctgagattgttcagtacggcgtgaaaaataatacaacatttctcgagtgcgctcccaagagtccgcaagctagtatcaaatggcttcttcaaaaagataaggacagacggaaggaagttaagctgaatgaaaggatcattgccacctcgcaaggtctcctgatcagatccgtccaaggatcagatcagggtctctaccattgtatagccacggagaatagtttcaagcagacaatcgcaaagatcaatttcaaggtgctggatagtgagatggtggcagtggtgactgacaaatggagcccatggacttgggctagctccgttagggccttgccttttcaccccaaagacatcatgggcgctttctctcactcagagatgcaaatgataaaccagtactgcaaggacacccgacagcagcatcagcagggtgacgaatcccagaagatgcggggagactatggaaaacttaaggccctgatcaactcacgtaagagccgcaacaggcggaaccagctgcctgagtcatag

SEQ ID NO: 6188 - DNA, 630 bp, synthetic construct
  misc_feature 1..630: note = source = /note="Description of Artificial Sequence: Synthetic coding sequence"
  source 1..630: mol_type = other DNA
atggggcccgaggctctgtcgtctctattgctcttattgctggtggcttccggcgacgccgatatgaaaggccatttcgatcccgccaaatgcagatacgccctcggaatgcaagataggacaattcctgactcagatatttcagcgtccagttcatggtccgactccactgcagcccgccactccagactagaaagctccgacggagacggagcctggtgcccggctgggtcagttttccccaaagaagaagagtatctccaggtggatctgcagaggcttcaccttgttgccctggtgggcacgcaagggcgccacgctggcggcctgggaaaggagttctccagatcctaccgcttgcgatactcccgcgacggccggaggtggatgggctggaaggatagatggggccaggaagtcatctccggaaacgaggatccagagggggtcgtactcaaagacctgggccctcctatggttgcgcggctggtgcggttctatccccgcgcagacagggtgatgagcgtctgtctgcgggttgagctttacggatgtctgtggagggatggactgctgagctatacagcgcccgtggggcagacgatgtacttgtctgaagcagtctactag

SEQ ID NO: 6189 - DNA, 315 bp, synthetic construct
  misc_feature 1..315: note = source = /note="Description of Artificial Sequence: Synthetic coding sequence"
  source 1..315: mol_type = other DNA
atgagcgatctcttactgctcggccttatcggaggcttgacgttattactgttgttaactcttctcgcatttgcaggatactccggcctcttggcgggcgtggaagtgagtgcaggaagtccaccaatcagaaatgttaccgtggcctacaagttccacatgggactgtacggggagactggcagacttttcacagagagctgttccattagccccaagctgcggtctatcgcagtgtactacgacaacccgcacatggtccctccagataaatgtcgctgtgcagtgggctctatcctgtccgagggggaatag

SEQ ID NO: 6190 - DNA, 2631 bp, synthetic construct
  misc_feature 1..2631: note = source = /note="Description of Artificial Sequence: Synthetic coding sequence"
  source 1..2631: mol_type = other DNA
atgggtccagaggccctgtcatctctactgcttctcctgctcgtcgcctcgggagatgccgatatgaagggccactttgaccccgccaaatgccggtacgccctgggaatgcaggatcgcacaatccccgacagcgacatctcagcgtcatccagctggagcgactccacagctgcccgacatagtcggctcgaaagttcagacggagacggtgcctggtgtccagctggatcagtatttcccaaagaagaagagtacctgcaagtagaccttcagaggctgcatttagtcgccctggtcggaacccaaggcagacacgccggaggacttggaaaggaattctctcgtagctatagacttcggtatagcagggatgggcgaagatggatgggatggaaggaccgatggggtcaggaggtaataagtggaaacgaggaccccgaaggtgtggtgcttaaggatctcggaccaccaatggtggctaggttggtgcggttttatccaagagctgaccgtgtgatgagtgtgtgtcttagagtggagctttatggctgtctgtggcgggatgggctgctcagttacaccgcaccagtggggcaaaccatgtatttgagcgaggcagtgtatctgaacgattctacatatgacgggcataccgtcggggggctgcagtatggtggactaggtcagctagcagacggagtcgtgggactggacgacttcagaaagtctcaggagctcagagtctggccaggatatgactacgtggggtggtcaaatcatagcttttccagtggctatgtcgaaatggagttcgagtttgatagactgagggcttttcaggccatgcaggtacattgtaacaatatgcataccctcggggctagactacccggcggagtcgaatgtagattccgccggggaccagctatggcctgggagggtgaacctatgcgccacaatcttggcgggaatcttggcgaccctagagcacgtgccgtttcggtgcctctggggggtcgtgtcgcgaggtttcttcagtgcagatttctttttgccgggccctggcttcttttcagcgaaatcagctttatttctgacgttgtgaataactcatcccctgcactcgggggcactttcccacccgctccctggtggcctccgggaccacctccaacaaacttctcatcacttgaactggagcctcggggtcaacagcccgtcgctaaagctgaagggtctcctactgcaatactcatcggctgtcttgtggcaattatcctgctgctcttgttgatcattgcactgatgctgtggcgcctgcactggcggcgactactttctaaagctgagcgccgggtactcgaggaagaactgacagtgcacctctcagttcccggcgataccattctcatcaacaatcggcctggccccagagagcctcccccataccaagaacccaggcctagaggaaaccctccgcattctgccccctgcgtgccaaatggctcagcatattcaggagactacatggagccagaaaagccaggcgccccactcctgcccccacctcctcaaaattcagtgccgcactatgctgaagccgatattgtcaccttgcaaggtgtcacagggggcaacacttacgcagttcctgcgctgcccccgggcgcggtcggggacggcccaccccgagtggattttcctcggagtcggctgcgattcaaggagaaacttggggaaggacagtttggcgaggtgcatttgtgtgaagtggactcgccacaggatctggtgtcgttagacttccccctgaatgtcagaaagggacatccattactggtcgccgtaaagatcctccgaccagacgcaaccaagaacgccaggaacgatttccttaaagaagtgaagatcatgtcaaggctgaaagacccaaacataattcggttgttgggagtctgcgtgcaggatgaccctctgtgcatgattacagattacatggaaaacggggaccttaaccagtttctctcggcccaccagttagaggacaaagccgctgagggggcccccggcgatggacaggccgcacagggacccacaatctcatatcccatgctattacatgttgctgcacaaatcgcttccgggatgagatatcttgccacactgaatttcgtgcacagagacctggccaccaggaactgcctggtaggggagaattttacgattaaaatcgccgattttggaatgtcccgaaacctatacgcaggcgattattaccgagtccaggggagagccgtgttacctattaggtggatggcctgggaatgtatcctcatgggaaaattcactactgcatctgacgtttgggccttcggggttaccttgtgggaggtactgatgctctgccgggcccagcccttcggtcagctgacagatgagcaggtaatagagaacgccggcgagttttttagggatcaaggccggcaagtgtatctcagtagaccacccgcatgcccgcagggtctctacgagctcatgctcaggtgctggtctagagagtccgaacagcggcctccgttcagccagctacacaggtttctggccgaggatgccctcaataccgtctag

SEQ ID NO: 6191 - DNA, 1053 bp, synthetic construct
  misc_feature 1..1053: note = source = /note="Description of Artificial Sequence: Synthetic coding sequence"
  source 1..1053: mol_type = other DNA
atggaagcattcgctctcggaccagcacgccgcgggagacgtaggaccagggccgccgggtctctattaagtcgggccgcaatccttctctttataagcgcttttcttgtcagagtcccctcatctgtggggcacttggtccgactgcctcgcgcattccgcttgaccaaggacagtgttaaaatcgtgggaagtacaagttttccagtgaaagcctatgtcatgctgcaccagaagagccctcatgtgctctgtgtgactcagcagctacggaatgctgagcttattgacccgagttttcagtggtacggccctaagggaaaggtcgtgagtgagaatcgtacagcacagattacctccaccggctcactcgtctttcaaaatttcgaggagagcatgtcgggaatctacacatgtttcctagagtataaaccgactgtggaggagatcgtaaaaaggctccagctgaagtacgcgatatatgcgtatagagagccccactactactaccaatttaccgcacggtaccatgccgccccctgcaattctatctacaatatcagttttgagaagaagctgctgcaaatcctctcaaagcttttgctcgatctcagttgtgaaatttccctgctcaagtccgagtgccaccgcgtgaagatgcagcgggctggcttgcagaacgagctatttttcgcgttctctgttagctcactggacacggaaaaggggcctaagagatgcacagatcacaactgcgaaccctacaagaggctattcaaggcaaaaaatctgatagaaaggttctttaaccaacaggtggaaatactgggccgtcgggcagagcagctgcctcaaatctactacatcgaaggcactctgcagatggtctggatcaatcggtgctttcccggatacggcatgaatgtgcagcagcaccccaagtgcccagagtgttgcgtgatctgttctcccggctcttataatcctcgggacggtatccactgtctgcagtgtaattctagtttggtgtatggtgctaagacctgtctgtag

SEQ ID NO: 6192 - DNA, 1392 bp, synthetic construct
  misc_feature 1..1392: note = source = /note="Description of Artificial Sequence: Synthetic coding sequence"
  source 1..1392: mol_type = other DNA
taattagcactggttctgtgtaccgttgacagtcggccccccgcacagctggcactgtcacatgctggccggctgttagctagttctacagccgccagcgtacccaacactctgcgcttagaacttaggggtccccagccaagggacgaaggattctactcttgctccgctagaagccccctaggtcaggcaaacaccagtctggaactaaggctggagggcgtgcgagtgatactagccccagaggcggccgtaccagaaggggcccctattacggtgacgtgcgctgatcctgctgctcacgcgcccacgttatacacttggtaccacaacgggaggtggctgcaggaagggccggctgcctcactgtcattcctggtagccacgcgggctcatgccggcgcatactcttgccaagcccaggatgcacagggcacaaggtcttcccgccccgcagcacttcaggtgctctatgcaccacaggacgcggtcttatcttcatttcgggactcgcgagcgaggagcatggctgtgatacagtgtactgttgattctgagccgccagccgagctcgctctctcccacgatgggaaagtcctcgcaacaagttctggggtgcattcgctggcaagcggaacagggcatgtgcaggtggctagaaatgccctacgtttgcaggtgcaggatgtaccagccggggacgacacatacgtgtgcacagcccagaatctgctgggttctatctcaaccatcggacggcttcaggtggagggggcacgggtcgtggccgaacctgggctggacgtacctgaaggagctgcactcaatctctcctgtcgcctgttggggggcccaggcccggttggcaacagcactttcgcttggttttggaacgataggcggttgcatgccgagcctgtgcccactctggcattcacacatgtggctcgtgcgcaggctgggatgtatcactgtctcgccgaactgccaaccggcgctgcagccagcgcacctgtgatgttgagggtcctctatcctccaaagaccccaactatgatggtctttgttgaacctgagggcgggctgcggggaatcttagactgcagggtggactcagagccgttggccagccttacattacacctgggatctagactggtggcgtcctcacagccccagggggcgcccgccgagccacatattcacgtgctggcttccccgaacgccttaagagtggatatcgaggcgttgcggccaagtgaccagggcgaatacatttgttcagcctctaacgttctgggatcagcttctacatcaacttatttcggcgtaaggggcgaaggacgcgggcttcacctacccgggcatagcgctcagaaaccctcttcttag

SEQ ID NO: 6193 - DNA, 1398 bp, synthetic construct
  misc_feature 1..1398: note = source = /note="Description of Artificial Sequence: Synthetic coding sequence"
  source 1..1398: mol_type = other DNA
atgaaattccaaggccccttagcgtgcttgttgttggccctttgcttaggttccggggaagcggggcctctacagtccggcgaagagtctacaggcacaaacataggggaagctctgggacatggtttgggcgatgctctgagcgaaggcgttggcaaggccatcggaaaggaagccggtggtgctgccggatccaaagtgagcgaagctctcggacaagggacacgggaagctgtgggaaccggcgtgagacaagtacccggctttggggttgctgatgcgctcgggaaccgcgtgggcgaagctgcccacgccctcgggaatactggccatgagatcggccgtcaggccgaggatgtcattagacacggggccgacgcagtccgcggttcttggcagggagtgcccgggcacaacggtgcctgggagacctccggaggccacgggatttttggctcacaggggggattgggtggacagggacaaggaaaccctggggggctcgggacaccttgggtacatggatatcccggaaatagtgccggttcgttcggaatgaacccacagggtgccccatggggacaggggggcaacggtgggcctccaaatttcggaacaaacacccagggagcggtggcccagcctggctacggctctgtgcgagcatccaatcagaatgagggatgcacgaacccaccaccaagcggatccggaggtggttcgtcaaattccggaggctcctccacagggagcagctccgggaaccacggaggctccggcggcgggaacgggcataagcctggctgtgagaaaccgggtaacgaagcgcggggatccggcgaatcagggatccaggggtttagaggacagggtgtgtctagtaatatgagagagatttctaaagaaggcaatcgactcttgggggggagcggggacaattaccgaggccaggggagttcttggggcagcggtggaggcgacgctgtgggaggggtgaacactgttaactccgaaacatctcccgggatgttcaatttcgataccttctggaaaaactttaagtctaaattagggtttatcaactgggatgcaattaacaaaaaccaggtgcctcccccttccacccgcgcgcttctgtatttctcgcggctgtgggaggatttcaaacagaacacaccctttttaaattggaaggcaatcatagagggggccgatgccagttctctacagaaacgtgcgggccgcgatgatcaaaactacaattacaatcagcacgcctacccaaccgcatacggggggaaatactccgtaaaaactcccgccaagggtggagtatcccctagtagcagtgctagtcgagtgcagcctgggttattgcagtgggtgaaattttggtag

SEQ ID NO: 6194 - DNA, 2700 bp, synthetic construct
  misc_feature 1..2700: note = source = /note="Description of Artificial Sequence: Synthetic coding sequence"
  source 1..2700: mol_type = other DNA
atgctactcctcctgctcttagcgcccttatttctgcggcctccaggggcgggtggggcccaaactcctaatgcaacatcagagggatgtcagattattcatcctccctgggagggtggcatacgctatcgcggcttgactcgcgatcaggttaaagcaatcaattttttacccgtcgactacgaaatcgagtacgtatgcaggggagagagagaagtggtgggtccaaaggtgcgcaaatgcctcgccaatgggagctggactgacatggataccccttctaggtgcgttaatcggacaccacatagcgaacgccgggccgtttacattggcgccttgttccctatgtcaggagggtggccggggggtcaagcatgtcagccagcggttgaaatggcgttggaggacgtaaactctcgcagagacatcttacccgattacgagctaaaactcattcaccacgattcaaaatgtgacccagggcaggctaccaaatatctctacgagctattgtataacgatcccatcaagatcatattgatgcctggatgctcatctgtttctactctcgtggcagaggctgctcgaatgtggaatctgatcgtactgagttacggttctagttccccagccctgtctaaccgacagcgttttccaactttctttcggacccacccgtctgcaaccctgcacaaccccaccagggtgaaattgttcgaaaagtggggctggaagaaaatagcaaccatacagcagaccacggaggttttcacctccaccctggacgacctggaggagagagttaaggaagccggtattgaaatcaccttccgccagtcttttttctcggaccctgccgttccagtcaagaaccttaagcgccaagacgcccgaattatcgtcggattgttctatgagactgaagcacggaaagttttttgtgaagtttacaaggagcgtctgttcgggaaaaagtacgtgtggttcctcatcggctggtacgccgataactggttcaagatctatgaccctagcatcaactgcactgtggatgagatgactgaagcagtggaaggccatatcacaactgagatcgtgatgttgaacccggccaacacaaggtccatcagtaatatgacatcccaggagttcgtcgagaagttgacgaaacgtttaaaaagacaccctgaggagactgggggctttcaggaggctccactggcctacgacgcaatttgggccctggccctggccctcaataagacgtcagggggtggagggagaagcggggtgcgcctagaagactttaattacaataaccagactatcacggaccagatctatcgggcaatgaactcctcgtccttcgagggtgttagtggtcacgtcgtgttcgacgcctctggatcacgcatggcatggacactgattgaacaactgcagggggggagctataagaaaataggatattatgacagtacaaaggacgacttatcctggagcaagaccgataaatggattgggggatccccccccgccgatcaaaccttggttatcaagacctttaggttcctaagccaaaagcttttcatctcagtctcagtactaagttctcttggcatagttctcgcggtcgtgtgcttgtcctttaatatatacaatagccatgtaagatatattcaaaatagtcagcctaatctgaacaatctaaccgccgtggggtgttctctggctctggctgcggtgtttcctctgggattagatggctatcatatcggaagaaaccagtttccatttgtgtgtcaggcccgactttggttgctgggcctgggattctcgctgggttacgggtctatgttcaccaaaatatggtgggttcacacagtgtttacgaaaaaagaagaaaagaaggagtggcgcaagacgctggaaccctggaaactgtatgcaactgtgggactgctcgtggggatggatgtcctcaccttggctatctggcagatcgtcgatcccttacaccggacgatagaaaccttcgctaaagaggagcccaaggaagacatcgatgtgtccatccttccacagctggagcactgctcctctagaaagatgaatacatggttgggtattttctacggctataagggtctcttattgctattgggcattttcctcgcttacgagactaagtcagtgtccacggaaaaaatcaatgatcatcgggctgtcggaatggctatttacaacgtcgcggtcttgtgtctcatcactgccccggtaaccatgatcctgtccagccaacaggatgccgcctttgctttcgcctcactggctatagtgttcagttcttatatcaccctggtagtgcttttcgtgcctaaaatgcgacggctaatcaccaggggggagtggcagtctgaagctcaagacactatgaaaactggttcctcaaccaataacaacgaagaagagaaatctaggctgcttgagaaagaaaacagagagcttgaaaagatcatcgccgagaaggaggaacgcgtcagcgaactgcggcatcaattgcagtcaagacaacagctgcggtctaggcggcatcctcccacccctccagagcccagcgggggcctgcctcggggcccacccgagccaccggataggctatcctgtgatggttcacgggtgcacctcctgtataagtag

SEQ ID NO: 6195 - DNA, 381 bp, synthetic construct
  misc_feature 1..381: note = source = /note="Description of Artificial Sequence: Synthetic coding sequence"
  source 1..381: mol_type = other DNA
atgtggtatgtgtctacaaggggagtggctccaagagttaactttgaaggggccttgttctccgggtacgcccctgatggtggtctgttcatgccagaagagcttcctcaacttgaccgaggcacactctgccaatggtctacgttgagttaccccggcctggttaaagaactgtgcgcactcttcatcggatctgaactgttgccaaaggacgaactcaatgatctgattgatcgagctttctcaaggttccgtcaccgcgaagtggtgcatctgagccgtctgcggaacggtctcaacgtccttgagttgtggcatggagttacctatgctttcaaagatctgtctctgagctgcaccactcagtttctgcaatattag

SEQ ID NO: 6196 - DNA, 147 bp, synthetic construct
  misc_feature 1..147: note = source = /note="Description of Artificial Sequence: Synthetic coding sequence"
  source 1..147: mol_type = other DNA
atgccgcctttcctaataactctgttcctcttccattcatgttgcctgagagcaaacgggcatctccgcgaaggtatgaccttgctcaaaacagaattcgccctgcatctttatcagagcgtggctgcctgcaggaatgagacatag

SEQ ID NO: 6197 - DNA, 390 bp, synthetic construct
  misc_feature 1..390: note = source = /note="Description of Artificial Sequence: Synthetic coding sequence"
  source 1..390: mol_type = other DNA
atggctgcgggctctgcgccgatgcagctgcatctgcgtgctacaatccgtatgaaggacggcctgtgcgtgccacgtaaatggatctaccatctcaccgaagggtcgaccgaccttagaactgaaggtcgacccgacatgaaaacagaactgtttagttcctcatgtcccggtggtatcatgcttaacgagactggacaagggtatcagagattccttttatacaacagatcccctcatcccccagaaaaatgcgtcgaggaattcaaatcattaaccagttgcctagactctaaggcttttctgctgactccacggaaccagggcaaggggctaaagtcacacaaaacaggcttagggttgactaaatcctcaggagtgacgggctag

SEQ ID NO: 6198 - DNA, 462 bp, synthetic construct
  misc_feature 1..462: note = source = /note="Description of Artificial Sequence: Synthetic coding sequence"
  source 1..462: mol_type = other DNA
atgaccatccatattctgatccttctcctgctgctggccttttccgctcaaggtgatttggacaccgccgcccggaggggccagcaccaggtgccccagcatcgcgggcacgtgtgttaccttggggtttgtagaacacacagactggccgagatcatttactggatcaggtgtcttcatcagggtgcactgggagaagggcagcccagagcccccggccccctacagctgtgggcaccgcctgtggcaagggggggaagtcctgcccggtttcctgggtttcgaccagccgcccggggcttagcacaatgcccagcaaggtgggtcaccagtggcaccgcccgcccacttctggggttctcattgcctatttgcatgcttgagctcctcttgcacataagctccccgttgacacctgccccggagaccgtatttccatcacccagcccaggttgcgactag

SEQ ID NO: 6199 - DNA, 450 bp, synthetic construct
  misc_feature 1..450: note = source = /note="Description of Artificial Sequence: Synthetic coding sequence"
  source 1..450: mol_type = other DNA
atgggctggctgacccgaatagtctgcctcttctggggcgtccttctaaccgctcgggctaattatcaaaatgggaagaataatgtgcctcggctaaagttaagctacaaagagatgttagagagtaataatgtaatcaccttcaatggtctcgccaatagctcgtcttaccacactttcctgttagatgaggaaagaagtaggttatacgttggagctaaagatcacattttttctttcgatctggtaaacattaaggactttcagaagatcgtctggcccgtctcctatacgagacgagacgaatgtaagtgggcgggcaaagacattctgaaagagtgcgcgaacttcatcaaagtcctaaaggcgtacaaccagacgcacctgtacgcatgtggtacaggggcattccatcccatctgcacctacattgagataggacaccattag

SEQ ID NO: 6200 - DNA, 543 bp, synthetic construct
  misc_feature 1..543: note = source = /note="Description of Artificial Sequence: Synthetic coding sequence"
  source 1..543: mol_type = other DNA
atggccgacatgcagaacttggttgaacgactggagagagccgttggacggctagaagccgtatctcatacttctgacatgcacagggggtatgccgactcaccctccaaggccggtgcagcaccgtacgttcaggcctttgactcgttactcgccggacctgtggccgaatatctcaagatttcaaaagaaattgggggggatgtacagaaacacgctgagatggtgcataccggcctgaagctcgaaagggccttactggtaacagcaagtcagtgccagcagccagctgagaacaagctttccgatctgttagcaccaatctcggagcagatcaaagaggtcatcacttttagggaaaaaaaccggggcagcaaactgtttaaccacctgtccgcagtatcagaaagcattcaggccctaggatgggtggctatggcacccaagcccgggccatatgtcaaagaaatgaacgacgcggcaatgttttacactaatcgtgtcctgaaagagtacaaggacgtggataagaaacatgtgtag

SEQ ID NO: 6201 - DNA, 630 bp, synthetic construct
  misc_feature 1..630: note = source = /note="Description of Artificial Sequence: Synthetic coding sequence"
  source 1..630: mol_type = other DNA
atgggccccgaagccctgtcttcactgctcctcctgctcctcgtggcttccggtgatgcagatatgaagggtcatttcgatcctgcaaagtgtagatatgctcttggcatgcaggatcgcaccattccagacagtgacatcagcgcttcctcctcatggtccgattcgaccgcggctcgccacagtcgactcgaaagcagcgacggtgatggggcttggtgtcctgcgggctccgtgtttccgaaagaagaagagtatctgcaggtggacctccaacgtttgcacctggtggccctagtgggaacacaggggcggcatgctgggggactgggcaaggagttttctcggtcgtatagactgcgatacagcagagacgggcgccggtggatgggatggaaagaccgatggggccaggaggtaatcagtggcaacgaggaccccgagggagtggttttgaaggacttagggcctcctatggttgcacgccttgttcggttctaccccagagctgaccgagtaatgtctgtgtgtctccgagtggagttgtacgggtgtttatggagggacggattgctttcatacactgctcccgtcgggcagaccatgtatttgtctgaggccgtatattag

SEQ ID NO: 6202 - DNA, 630 bp, synthetic construct
  misc_feature 1..630: note = source = /note="Description of Artificial Sequence: Synthetic coding sequence"
  source 1..630: mol_type = other DNA
atgggcccagaggccctgtcctctcttctgctccttctgctggtggcaagtggagacgcagatatgaagggccattttgaccccgctaaatgtcgttacgcactcgggatgcaagacaggaccattcccgacagtgatatttcagcctcatcttcctggagcgatagtactgccgcacgtcacagccgcttggaaagctccgacggagacggcgcctggtgtcccgcgggcagcgttttccccaaagaagaggagtatctgcaggttgatcttcaacgtctccacctggtggctctggtgggcactcagggccggcacgcaggcggtctgggtaaggagttttccagatcttatcggctccggtactcacgcgacgggaggagatggatggggtggaaggatagatgggggcaggaggtgatatctgggaacgaagaccccgaaggcgtggtactgaaggaccttgggcccccaatggttgcacgcttagttaggttctacccgagagccgaccgcgtgatgagcgtttgccttagggtggagctgtatggttgcctctggagggacggccttctgtcttacactgccccggtggggcagaccatgtacctgagcgaggccgtatactag

SEQ ID NO: 6203 - DNA, 2631 bp, synthetic construct
  misc_feature 1..2631: note = source = /note="Description of Artificial Sequence: Synthetic coding sequence"
  source 1..2631: mol_type = other DNA
atgggacccgaggcgctgtcttcactgttgcttttgcttttggtggccagtggagacgccgacatgaagggacatttcgatcccgctaaatgtagatatgcgctgggtatgcaggatcgcaccatccctgattcagatatcagtgccagctctagctggagcgattccaccgctgcccgccacagtcgcctggagagtagcgatggcgatggcgcatggtgccctgccggctctgtgttccctaaggaggaggagtatctccaggtcgacttgcagaggctgcacctggtggcacttgtcgggactcaagggcggcacgccgggggtctaggtaaggaattttcccgtagctacagacttcggtactccagggacgggagacgatggatggggtggaaagaccgctggggacaagaagtcatttcaggaaatgaagaccctgaaggcgtggtactaaaagatctggggccccctatggtcgctcgcctggttagattttaccctagagccgatagggtcatgagcgtgtgcctgcgcgtagagttgtacgggtgcctctggcgagatggattactctcttataccgctccagtgggtcagactatgtacctttccgaagctgtctatctcaatgattctacatacgatggccatacagtgggcggcctgcaatacggaggactggggcaactggctgatggcgtcgtggggctggatgatttccgaaaatcgcaagaactgcgcgtgtggccaggatatgactacgttgggtggtccaatcattcattctcgtctgggtacgtcgagatggaatttgagttcgaccggctgagagccttccaagccatgcaggtccactgtaacaatatgcacactctgggggcccgtctccccggaggcgtcgagtgtaggtttcgccgcggaccagccatggcctgggagggggaacctatgagacacaatcttggaggaaacctgggcgaccctcgggcccgcgccgtgtctgtcccactcggcgggagggtggcccggtttctgcagtgccgctttctttttgctggcccatggttactgttttccgaaatcagttttatctccgacgtcgtaaacaattcgagcccagccctgggcggcacatttccacctgcaccatggtggccaccaggacctcctccgaccaactttagttcattagaactcgagcctagaggtcagcagcctgtcgctaaagccgaggggtcccccaccgcgatcctcatcgggtgcttggtggccatcatactcctcctgctcctcatcatcgccctcatgctgtggcggttgcattggcgccgcctgctgtccaaggctgagagacgggtactggaagaggagttgactgttcacctgtctgtgccaggcgacaccatcttaattaataatcgtcccggcccacgcgagcctcccccgtaccaggagccacgccctagaggaaaccctccccactcggctccctgcgtgccaaacgggtctgcatactcaggcgattacatggaaccagaaaaaccaggggctccactcttgccccctcctccacagaactccgtcccccattacgctgaagccgatatcgtgacactgcagggggtgaccggcggaaatacgtacgcggtgccagctcttccacctggtgccgtgggcgatggaccgccgcgcgtggactttccacgttccaggttaagatttaaagaaaaactgggtgagggacagttcggagaggtgcatttatgtgaagttgacagccctcaagacctcgtgagtctagatttccctctcaatgttcgcaagggccaccctcttttagtggccgtgaagattctgcgaccagatgcaactaagaacgcgaggaatgattttttgaaagaggtcaaaatcatgtcccggctgaaggatcccaatattatacgtctgctgggggtctgcgttcaggatgaccccctgtgcatgattacagattatatggagaacggggatttgaatcagttcctgtccgcccaccaacttgaggataaggccgcagagggggctcccggagatggtcaggccgcccagggcccgaccatcagctatcccatgctgctgcacgtcgccgcacaaatcgccagcggtatgagatacctggcgacactcaattttgttcacagagatctggccactagaaattgtcttgtgggtgaaaatttcaccattaagatcgccgactttggaatgtcccgaaacctgtacgctggggactactaccgcgtacagggtcgcgccgtgttgcccattcggtggatggcctgggagtgcattctgatgggcaagttcacgacagcctcagatgtgtgggctttcggtgtgactctctgggaagttctgatgctgtgtcgcgcccagccattcggccagctgacagatgagcaggtgatcgaaaacgctggggaatttttccgcgatcaggggcgacaggtgtacctgagcagaccacccgcttgtccccagggcctatatgaacttatgctccgatgttggtccagagagagcgaacaacggcctcccttctcccagttacaccgttttctggcggaagacgcccttaatacagtgtag

SEQ ID NO: 6204 - DNA, 2103 bp, synthetic construct
  misc_feature 1..2103: note = source = /note="Description of Artificial Sequence: Synthetic coding sequence"
  source 1..2103: mol_type = other DNA
atgcttgcacctttccttctgctgttgactcattctagatcccccctgtcatttcgtccgtgttcccatgtccctggtgctcttattgcccagaagccaatgggttcaagtagactggctgccctgctgcttccacttttattgatagtgatagatctctctgactccgccggtattgggtttaggcatctgccccattggaacacacgctgccccctcgcttcacacaccgatgatagctttactggatcgagcgcatacatcccttgtcgcacttggtgggctctcttctcaaccaagccctggtgcgtgagggtgtggcattgtagccgttgtctgtgtcagcacttactgagcggaggtagcggactccagaggggtttatttcacttactagtgcagaaatctaagaagtcatcgacctttaaattctaccgtaggcacaagatgccagcccctgcgcagaggaagctcctgccacgccggcatttaagtgaaaaaagtcatcacatttcaatcccaagtccagatatttctcacaaaggcttgagaagcaagcgcactcaacccagcgatcctgaaacatgggaatcactgcctaggctcgacagtcagcgacatggcggtcctgaattttcattcgacctgctgccagaggccagggctatccgcgtgaccatatcatctggcccggaagtgtccgttaggctatgccatcagtgggcccttgaatgtgaagaattaagctccccgtacgatgtgcaaaaaatcgtgtcaggcggacatacagtggaactgccgtatgaattcctgctcccctgcctctgcatcgaggcctcttatcttcaggaagatactgtgcgacggaaaaagtgtccattccagagctggcccgaggcatatggctccgacttttggaagagtgttcatttcacagattactcacagcacactcaaatggtgatggcattgacactccggtgtcccctaaagctggaagcagctctttgtcagcggcacgactggcacacactctgtaaggacctgcctaatgcgacagcccgcgagagcgacggatggtacgttcttgagaaagtggacctgcacccgcagttatgcttcaagtttagcttcggaaactcctctcatgtggaatgtcctcatcaaacaggatctctgacatcctggaacgtgagcatggatacccaggcccagcagctgattttgcatttcagctctagaatgcatgccacattctcagcagcctggagccttcctgggcttggacaggacacactcgttcctcctgtttacacggtcagtcaggcccgaggctcaagtcctgtatcattagatctgattattcctttcttgagaccgggttgctgcgtcctggtatggcggagcgatgtccagttcgcctggaagcatctcttatgtcccgacgtgtcttaccgccacttgggtctccttattctcgctctgctggccctcctgacattattgggtgttgtcttagctctgacctgtaggaggcctcagagcgggccggggccagctcgtcccgtgctgctgctgcacgccgctgactctgaagcacaacgtcggcttgtgggtgctttagccgagcttctaagagcagcccttggtgggggcagagatgttatagtggatctttgggagggacgtcatgtggctcgtgtggggccgttaccttggctgtgggctgctagaacaagggtagcaagggagcaggggaccgtactcctgctgtggtccggcgcagacttaaggcctgtgtctggccctgaccctagggctgcgccactgctggccttactccacgctgcccctaggcccctcctgttattggcctacttttccagattgtgtgctaaaggagacataccgccccccctgcgggccctgccacgatacaggcttcttagagacctgcccagactcttgcgggccctcgacgccaggccattcgctgaggctacctcctgggggagactgggtgcacgacagaggaggcagtctagactggagttgtgctccaggctggaacgggaggccgcgcggctggcagatcttggctag

SEQ ID NO: 6205 - DNA, 1194 bp, synthetic construct
  misc_feature 1..1194: note = source = /note="Description of Artificial Sequence: Synthetic coding sequence"
  source 1..1194: mol_type = other DNA
atgcgatcccttctgctgctttctgccttttgtttgttagaagctgcccttgccgctgaggtcaagaagcctgctgccgctgccgctccgggcacggccgagaagctgtccccaaaggccgctactctggccgaaaggagtgccggccttgcattttccctgtaccaggcgatggccaaggatcaggctgttgaaaacatcctcgtctccccggtggtggtggcttcaagcctcgggctagtgagtctgggaggtaaagccacgactgcctctcaggctaaggcggttctgtccgcagagcagctgcgtaacgtgacatggaaattaggctcccgcctctacgggccatcctcggttagttttgccgatgacttcgtgcgcagttcaaaacaacattacaattgtgaacatagcaagatcaatttccgtgataagcgaagtgccctgcagagtatcaacgagtgggccgctcagacaacagatggaaagttgccggaagtgacaaaggacgttgaaaggactgatggagcacttttggtgaacgccatgttttttaagccccattgggacgaaaagtttcatcataaaatggtagataacagaggctttatggtgactaggagctatacagtgggagtgatgatgatgcaccgaacaggactttacaattactacgatgacgagaaggaaaagctgcaaatcgtcgagatgcctcttgcacacaagctaagctctcttatcatcttgatgccacatcacgttgagccattagagaggctcgagaagctcctgactaaggagcaactgaaaatttggatgggtaagatgcagaagaaagctgttgctatctccctcccaaagggcgtcgtggaagtgactcatgatctacagaaacacttagctggactaggcctgacagaggccatcgacaagaataaagccgatctgtcccgaatgtcgggcaaaaaggatctttatctggcaagcgtctttcacgctactgcttttgagctggatactgatgggaatccattcgaccaggacatatatggccgggaggagctgcggagtcctaagctgttttacgccgatcaccccttcatcttcctagtacgcgatacacagtcaggcagcctgctgttcattggaagactggtgcgaccaaagggagacaaaatgagagatgaactgtag

SEQ ID NO: 6206 - DNA, 612 bp, synthetic construct
  misc_feature 1..612: note = source = /note="Description of Artificial Sequence: Synthetic coding sequence"
  source 1..612: mol_type = other DNA
atggcagatatgcagaacctggtggagcgtctggagcgagccgtggggcgtctcgaagctgtgtcacatacctctgatatgcaccgggggtacgccgactcaccttcaaaagcgggcgccgccccatacgtgcaagctttcgattctcttctggctggacctgtcgctgaatatttaaagatttcaaaagaaatcgggggagacgtccaaaagcacgccgaaatggtccacaccggtctcaaattagagagggctctgctggtaactgccagtcagtgccagcagcccgcggaaaacaagctctcagacctgttggccccaataagcgagcaaattaaggaggtgattacatttcgcgaaaaaaaccgggggtctaaactgtttaatcatctgtccgcagtcagcgaaagcattcaggccctgggctgggtggcaatggcccctaagcccggcccgtacgtgaaggagatgaacgacgccgccatgttttatacaaaccgcgtcctaaaggaatataaggatgtcgataagaaacacgtcgactgggtcaaggcatatctaagcatttggactgagctgcaggcttacatcaaggaatttcacacaacttag

SEQ ID NO: 6207 - DNA, 1293 bp, synthetic construct
  misc_feature 1..1293: note = source = /note="Description of Artificial Sequence: Synthetic coding sequence"
  source 1..1293: mol_type = other DNA
atgcgcaagctgatgaaacaggtccaggagcagtgccccaatataacacggatctactcaatcggaaagagttaccagggcctcaagctctatgtcatggagatgtctgacaagccaggagagcacgagttgggcgaacctgaagtgcgctatgtagctggtatgcacggcaatgaggcactaggccgtgaactgcttctgctgctcatgcagttcctctgccacgaattcctccgggggaatcccagggttaccaggttactgtccgaaatgcgaatccatcttctgccctcaatgaatcctgatggctacgagatagcataccatagaggatctgaactggtgggatgggcagagggaagatggaacaatcagagtattgatcttaatcacaactttgccgatttaaatacccctttgtgggaggctcaggacgatggaaaggttcctcatattgtccccaaccaccatcttccactccctacatactacaccctgcccaacgccacggtggctcccgaaacgagagctgtcattaaatggatgaaacgaataccttttgtcctttccgccaatctccacgggggggagctggtggtctcttacccttttgacatgacccgcacgccatgggccgcccgtgagcttacccccaccccggacgatgctgtctttagatggttatcaactgtgtacgccgggtctaatctggccatgcaggataccagcaggagaccctgtcacagccaggactttagtgtgcacgggaatattattaacggtgctgactggcacacagtccccggttctatgaacgacttctcttatctccatactaactgttttgaagtaactgtggaactgtcctgcgacaagttcccccacgagaacgaactgccccaggaatgggagaacaataaggacgccctattgacttatttggagcaggtgagaatgggcatcgcgggtgtggtgagggataaagacaccgaactgggcatagccgacgctgttatcgccgttgacggcatcaatcatgacgttaccacagcatggggcggggactattggcgccttcttacaccaggcgattacatggtgacagcttcggctgaaggctaccactccgtgactaggaattgtcgggtcacttttgaggagggtcccttcccctgcaattttgtgcttaccaagacacccaaacagcggctgagagagctactagccgcaggcgccaaggtgcctccagacctgaggcgtaggcttgaaagactgcggggacagaaagactag

SEQ ID NO: 6208 - DNA, 1680 bp, synthetic construct
  misc_feature 1..1680: note = source = /note="Description of Artificial Sequence: Synthetic coding sequence"
  source 1..1680: mol_type = other DNA
atgtggaccaacttcttcaagctgcgtctgttttgctgtctgttggcagtgctgatggtcgtcgtgcttgtgattaacgtgacacaggtggagtaccttgaccacgaaactgtctctgccacttttattgactcttcaggacaattcgtgtcgtcacaggtgactggtataagcaggaatccctactgtggctatgatcagcagactctgtccagccaagagcgtatggaggaggactcattactagccgctttacaccggcaggtacctgacgttgggccagtccccttcgttaaatctacagacccaagtagctcctactttgtgattcttaactccgccgcattctttaaggttggcagccagctggaggtgctcgttcatgttcaggatttccagcgtaaaccgaaaaagtacggaggggattacctgcaggcgcggatacatagcctgaagctccaggccggtgccgttggccgggtggttgattatcaaaatggattctacaaggtattctttacactcctctggccaggtaaagtaaaagtgagtgtgtccctggtgcaccccagtgaggggatacgggtgctccagcggcttcaagaggacaaacccgatagggtctatttcaaatccctgttcaggagcggccggattagcgaaacaacagagtgtaatgtgtgtctgcctggaaatctccctctttgtaacttcaccgatctgtacacaggcgagccatggttttgttttaagccaaaaaagctgccctgttcttcacgtattacacatttcaagggcggctacttgaaaggcctcctgactgccgctgagagcgcctttttccagagcggcgttaacatcaagatgcccgtgaacagttcaggccctgattgggtcactgtcataccacgtaggataaaagagacaaactcgcttgagctctcccagggcagcggcacttttcctagcggctactactataaggatcagtggaggcctagaaaattcaaaatgcgacaatttaatgatcccgacaacattactgaatgcttgcagagaaaggtggtccatctattcggtgactctaccattcgccagtggttcgagtatctcactacatttgtgccggaccttgtggaattcaacctaggttcccctaagaatgtgggcccgttcctcgccgttgatcagaaacataacatccttctcaagtacagatgtcacggaccacccattcgattcacaactgtgttcagtaatgagctgcattatgtggcgaatgaactcaacggtattgtcggcgggaaaaatacagtagtggcaattgccgtgtggagtcacttttcaaccttccccctggaagtctacatacgcagactgcgaaacatcaggagggccgtcgtccgactgttggacaggagcccaaagacagttgtcgtgataagaaccgcaaatgctcaggaactagggccagaggtgagcctgttcaacagcgactggtacaatttccagctcgataccatcctccgccgaatgttttctggcgtcggcgtttaccttgtcgacgcgtgggagatgacactggctcactacctgcctcacaagctgcaccctgatgaggtcatagtgaagaatcagctcgacatgtttttatcgtttgtgtgtccactggagacctag

SEQ ID NO: 6209 - DNA, 8199 bp, synthetic construct
  misc_feature 1..8199: note = source = /note="Description of Artificial Sequence: Synthetic coding sequence"
  source 1..8199: mol_type = other DNA
atggaacagacagactgcaagccataccagccactcccaaaagtgaagcacgagatggaccttgcgtataccagctctagcgatgaatctgaagacggtagaaagcctaggcagagctacaacagtagggaaacactgcacgaatataatcaggaattaagaatgaattacaattcacagtctcggaagcggaaagaagtcgagaaatcaacacaggagatggaattctgcgagaccagtcacaccctgtgctctggttaccaaactgacatgcacagcgtgagccggcatggatatcaactggagatgggttctgacgttgacacagaaacggagggggcggcaagccctgaccacgcacttcgcatgtggattaggggcatgaaatccgagcacagctcatgtctgagctctagagccaattccgcacttagcctgacggatactgatcacgagaggaaaagtgacggggaaaatggctttaagttctcccctgtatgctgtgatatggaggcccaagcaggcagtacacaggatgtccagtcctcaccccataaccagtttacattccgaccactacctcccccgccgccaccacctcatgcatgcacatgtgctcgaaagcccccccccgcggcggatagcctgcaaagacgctctatgacaacaaggtctcagccttcaccagctgcacctgctccacccacatccactcaagacagcgttcatctccacaattcttgggtgttaaatagcaacattccgctagagactagacactttctctttaagcacggaagtggctcttccgcaatcttcagtgcagctagtcagaactatccccttacgagcaatactgtgtacagccctccacctaggccacttccccggagcacctttagtcgccccgccttcacctttaacaaaccctatcgatgctgtaactggaagtgcacagctctcagcgctaccgcaatcacagttacactcgcattgttgctcgcctatgtgatcgccgtgcatttattcggcttgacttggcagttgcagccagttgagggtgagttgtacgccaacggcgtgagcaagggaaataggggaacagagtccatggatacaacctacagtcccattggtggtaaagtgagcgataagagtgagaagaaggtatttcagaaaggtcgagctattgacacaggagaggtggacatcggggcacaggtcatgcagacaattcctcctggcctcttctggcggtttcagataacaatccaccatcccatctaccttaagtttaacattagcctggcaaaggactctctactcggcatttatggccgcagaaatataccacccacccacacacaattcgattttgtgaagctgatggacggcaagcagctggtaaagcaggattccaagggcagcgacgacactcagcacagccctcgtaacctcatactcactagcctgcaagagacaggcttcatagaatacatggaccaagggccatggtatcttgctttctacaacgatgggaaaaagatggaacaggtgtttgtcctgactaccgctattgaaatcatggacgactgctccacaaactgcaacggaaatggagagtgcatctctggccattgccattgcttccctggattcctcggccctgattgtgctcgagattcctgcccggtgctgtgcggcggaaacggggaatacgagaaaggccattgtgtctgtcggcacggatggaagggaccagagtgtgatgtgccagaggagcagtgcatcgaccccacttgctttgggcacggaacgtgcattatgggcgtttgcatctgtgtgcccggctacaagggggagatctgtgaggaggaggactgcctcgatccaatgtgttcaaatcacggcatctgtgtcaagggggagtgtcactgtagtacaggctggggtggcgtgaactgcgaaacacctttaccggtttgtcaggaacagtgctcaggacatggtactttcctgctcgacgccggagtgtgctcttgtgatcctaagtggaccggttccgattgctcaaccgagctgtgtacgatggaatgtggatctcatggggtctgctcaagaggcatctgtcaatgcgaagaaggatgggtaggacctacttgtgaggagcggtcctgtcacagtcactgtacagaacatgggcagtgtaaggacggcaaatgcgagtgctcccccggatgggaaggcgatcattgtaccatagctcattatctggatgccgtccgggacggctgtcctggactgtgttttgggaacgggcgttgcactttagatcagaatgggtggcattgtgtgtgccaagtcggttggtcagggactggttgcaatgtggttatggaaatgttatgcggagataatctggacaacgatggtgatgggctcacagattgcgtcgatcccgactgttgccagcagagcaattgttacattagtcctttatgccagggttcacctgatcccctcgacctgatccagcagagtcagaccctcttcagtcaacacacgagcagactgttttacgacagaataaagttccttatcggcaaagatagcacgcatgtaatcccaccggaagtgagcttcgattcccgccgagcctgtgtgatccgtgggcaggtggtagcgatagacggaaccccattagtgggagtcaacgtgtcattcctccaccatagcgactatgggttcactatctctcgacaggatggttctttcgacctggtagcaataggcggtatttctgtaattctgattttcgatcgctcccccttcctgcccgagaagcgtaccctgtggctgccatggaaccagttcattgtggtggaaaaggtgacaatgcagagggtggtgtccgatccaccaagttgcgacatcagcaactttatctctcctaatccgattgttttgccgagtccactgacgtctttcggcgggtcctgccccgaacgaggtacgatcgttcctgaactccaggtggtacaggaggaaatccccattccatcttcttttgttaggctttcttatctcagcagcaggacacccgggtataaaacactgttacgcatcctcctgactcactctacaatacccgtggggatgatcaaggtccacttgaccgttgccgtcgaaggccgtcttacccaaaaatggttccccgccgccattaatctggtatacacattcgcatggaacaaaactgatatctacgggcaaaaagtttggggcctggcagaggctctcgtgtcggttggttatgagtatgaaacttgtcccgacttcatcttgtgggagcagcgaaccgtcgtcttgcaaggctttgaaatggatgccagcaacctgggaggttggagtctgaacaagcaccatatcctcaacccacagtctggtattattcacaagggaaatggagagaatatgttcatatcacagcagccccccgtgataagcactattatgggaaacggccaccagagatcggtcgcatgcaccaattgcaacggacccgctcataacaacaaactgttcgcacctgtcgcgttggctagtggaccagatgggagtgtgtacgtcggagatttcaatttcgtgaggcgaatttttccttctggtaatagcgtgtcaatcctggagctcagaaaccgggacacgaggcatagtaccagccctgctcacaaatactacctggcgatggatcccgtgagtgagtcgctttatctatctgacacgaacactcgaaaggtctataagctgaagtctctggtggagactaaggatctgagcaagaacttcgaggtcgtcgctgggaccggcgatcagtgcctgccttttgaccagtcgcattgcggtgatggcggtcgagcctccgaggcatctctcaactctccaagagggatcacagtcgacaggcacgggtttatatactttgtcgacgggacaatgatccgtaaaatcgacgagaacgctgtcattacaacagtgattggatctaatggcctgacctccacacagcccctttcttgcgactccggaatggacataactcaagtcagactagagtggcccaccgacctggcagtaaacccaatggacaattctttgtatgtgcttgacaacaatatagtgttgcagatcagtgaaaataggagggttcggataattgccggccggcccatacattgccaggtccccgggatcgaccatttccttgtgtccaaagttgcaattcacagcacattggaatctgctagggccattagcgtttcccactccggcctgctttttatcgctgaaaccgacgagcgcaaagtaaataggatccaacaagtgacaacaaacggtgagatctatatcatcgcaggagcccctacagactgtgactgcaagattgatcctaattgcgactgtttcagtggagacggcggctatgccaaggatgctaagatgaaggccccatcctcactggccgttagtcctgacggcactttatacgtggccgaccttggaaacgtccgcattagaacgatatcccgcaatcaggctcatttaaacgacatgaatatatatgagatcgcatcacccgcagaccaggaactttaccagtttacagtcaacgggactcacttgcacacactgaacttgattacgagggactacgtctacaatttcacatataattccgaaggagacctcggggcaatcacatcttctaacgggaattctgtgcatattagacgagacgccggggggatgcccctctggttggtagttccaggagggcaagtctattggctaacgatttcttctaatggagtgctgaagcgggtatctgctcaggggtataacctggcattaatgacatacccaggtaacaccggcctacttgctactaagagcaacgagaacggctggactactgtctacgagtacgaccccgaggggcacctgacgaatgctactttccctaccggagaggtttccagttttcactcagatcttgaaaaactgaccaaggtagaactcgacacatctaatcgcgagaacgtcctgatgagtacaaacctgaccgcgaccagtacgatttacatcctgaagcaggaaaatactcagtccacatacagggtcaatccggatggctcgctgcgcgtgactttcgcctccggaatggagatcggtctcagtagtgagccgcacattctggcgggggctgttaatccaacgttggggaagtgtaacatttcccttccgggcgagcacaatgcaaatttgattgaatggcggcagcggaaagagcagaataaggggaatgtcagcgcattcgaacggcggctaagggcccacaatcgaaacttgctcagtatcgactttgatcatattaccaggaccggtaagatttatgacgaccacaggaaattcacactgcgtattctgtacgaccagaccggtaggcctatcctctggtctcccgtttcaaggtacaacgaggtaaacattacctacagcccctcaggtctagtcacatttattcagcgggggacctggaacgagaagatggagtatgatcaatctggcaaaattatctccagaacatgggcagatggcaaaatatggagttacacatacctggaaaaaagcgtgatgttgcttcttcattcacaaagaaggtacatttttgagtacgaccagcccgactgtttattgtccgtgacaatgccgagtatggtccgacacagtctccagacaatgctcagcgtcgggtattaccgcaatatctacaccccccccgatagctccacgagctttatccaggactactctcgcgatggaagactcctccagacattgcacctgggtaccggccgcagggtgctttataaatacacaaagcaagccagacttagcgaagtgttgtatgatacaactcaggttactttaacctatgaagaaagcagtggtgtgatcaagacaattcatctgatgcacgatggtttcatttgcaccattcgataccgtcagacggggccactaattgggagacagatcttcaggttctcggaggaggggttggtcaacgctagatttgactattcttacaacaacttccgcgtaacatcgatgcaggcagttattaacgaaaccccccttccgattgacctctacagatacgtggatgtgtcaggccggacagaacaatttggcaagttttctgtgatcaattacgacctaaatcaggttattacaacaaccgtgatgaagcataccaaaatttttagcgcaaatggtcaggtaatcgaagtccagtacgagatcctgaaggctatcgcctattggatgacgattcagtacgataacgtgggacgcatggttatctgtgatatcagggtaggggtggatgctaatattactcgttacttttatgagtacgatgctgatggccagctgcagaccgtctcagtgaacgataagacacagtggagatactcttatgatttaaatggcaatattaacctgctgtcacatggcaagagtgccagacttacccctctgaggtatgatctccgcgaccggatcacacggctcggtgagattcaatacaagatggatgaggatggatttctcagacagcgcggcaatgatatctttgaatacaattcaaatggactgctgcaaaaagcttataataaggctagcggctggacagtacagtattactacgacggacttggtcgcagggtggctagcaagagctcacttggtcagcatctgcagttcttctacgccgacttaaccaatcccataagggtaacccacctctacaaccatacttcatcggaaatcacctccctgtattatgatctccaaggacacttgatcgccatggagctgagcagtggtgaggaatactatgtggcctgcgacaatacgggcacacccctcgccgtgttcagcagcagaggccaagtgataaaggagattttgtacactccatacggcgacatttaccacgatacttatcccgacttccaggtcatcataggctttcacgggggactttatgattttcttacaaagctggtgcatcttggccagagagactatgatgtcgtagctggcaggtggactactccaaatcaccatatatggaagcaactgaacctactgcctaaaccctttaatctctattcctttgaaaacaattatccagtgggtaagatccaggatgtggccaagtacactaccgacatccgaagctggctagagctgttcggcttccaactccacaacgtgctgcccggctttccgaaacccgaactggaaaatctagagctaacatacgagctattgcgactgcagaccaaaacccaggaatgggatcctggtaaaaccattctaggaatccagtgcgaactgcagaagcaattgcggaacttcattagcctcgatcagctccccatgaccccgaggtataacgacgggagatgcctcgaaggaggcaagcaaccccgatttgccgctgtgccgtcggtcttcggcaagggcataaagttcgcaatcaaggacgggatcgtgacagccgacatcatcggcgtcgccaatgaggactctcggaggctggctgccattctgaacaatgcccactacttagagaacttgcatttcaccatcgaagggagagatacacattattttattaaactgggctcccttgaagaggacctggtattgattggaaacaccggaggcagaaggatcttggagaatggtgtgaacgtgacagtgtctcaaatgacgagcgttctcaatgggcggacccgccggttcgccgatatccagctccagcatggagctctctgtttcaatatccgctacggtacaacggtggaggaggaaaagaaccacgtgctggagatcgcgcggcagagagccgtggctcaggcctggacaaaggagcaaagacggttgcaggagggagaagaggggatccgggcttggacagaaggtgaaaaacagcaattgctcagcacagggagagtacaggggtatgatggatactttgtgctgagcgtcgagcagtatctggaattatctgattcagcaaataacatccattttatgcggcaatccgagatcggccggaggtag

SEQ ID NO: 6210 - DNA, 264 bp, synthetic construct
  misc_feature 1..264: note = source = /note="Description of Artificial Sequence: Synthetic coding sequence"
  source 1..264: mol_type = other DNA
atgaaagtcctcctgctgaccggcttaggcgctctattttttgcctattattgggacgacaacttcgacccagcgtcactgcaaggagctcgagtcctgttgaccggggctaatgctggtgtcggggaggaactggcgtaccactatgctcgcctgggatctcacctggtgttaaccgcccacactgaagctcttttgcagaaggcgcgctggctgacactggttgtctccactctgggcggcagaggcaaatggatcacttag

SEQ ID NO: 6211 - DNA, 1233 bp, synthetic construct
  misc_feature 1..1233: note = source = /note="Description of Artificial Sequence: Synthetic coding sequence"
  source 1..1233: mol_type = other DNA
atgcgggcgtgtatttcactcgtgctcgctgtgctctgcggtctggcttgggcgggtaagatcgagtcatgcgcaagcaggtgtaacgaaaagtttaaccgggacgcggcctgccagtgcgataggagatgtctctggcatggaaactgttgcgaggattacgaacacctgtgtactgaggatcacaaggagtcagaacctctgcctcagctcgaggaggaaaccgaggaggccctggctagtaacctgtatagcgcacccaccagctgtcaagggcgctgctatgaagcttttgataaacaccaccagtgtcactgtaacgctcggtgccaagagtttgggaattgctgcaaagatttcgagtccctctgttcagaccacgaggtctcccactcctccgacgcgatcactaaggaggagatacagtccatctctgaaaagatttatagagccgatacgaataaggcacagaaagaagatattgtgctcaacagccagaattgtatctcccccagcgaaacgcgtaaccaggtcgaccggtgcccaaaacctctcttcacctatgttaatgaaaagctgttctccaaaccaacatatgctgcctttataaacttgctgaacaactatcagagagcaaccggccacggcgagcactttagtgcacaggaattggcggagcaggacgcttttcttcgggaaattatgaagaccgctgttatgaaagaactctatagctttctgcaccaccagaataggtacgggagtgagcaggagttcgtggatgacctgaaaaacatgtggttcggcctgtattctagaggcaacgaggagggggactctagtggatttgaacatgtgttcagcggggaggtgaagaaaggcaaggttactggtttccacaactggatccgcttctatctagaggagaaggaaggtctggttgactactactcgcatatttacgacggcccctgggacagttacccagatgtgctggctatgcagtttaattgggatgggtattacaaggaggtcggcagcgctttcatcggtagctctccagagtttgaatttgcactatactcgttgtgcttcatcgccagaccgggcaaggtttgtcaactttctctcggcggatacccattggctgtgcggacctacacctgggataagagcacttacggaaacgggaagaagtacattgcgactgcatacattgtgagttccacctag

SEQ ID NO: 6212 - DNA, 351 bp, synthetic construct
  misc_feature 1..351: note = source = /note="Description of Artificial Sequence: Synthetic coding sequence"
  source 1..351: mol_type = other DNA
atggccgctggatccgcgcccatgcaattgcatctgcgtgccaccatcagaatgaaggatggtctgtgtgtcccgaggaagtggatctaccacctgacagaaggctctacagatcttcgcacagagggccgtcctgatatgaagaccgaactgttctcgtcttcctgtcctggaggcattatgctcaatgaaacgggacagggttaccagcgatttctcctgtataataggagccctcaccctccagaaaaatgcgtggaggagttcaagagtctgacttcctgcttggattccaaagcatttctcttaacaccccgcaatcaggaggcgtgcgaactttctaataattag

SEQ ID NO: 6213 - DNA, 1200 bp, synthetic construct
  misc_feature 1..1200: note = source = /note="Description of Artificial Sequence: Synthetic coding sequence"
  source 1..1200: mol_type = other DNA
atgagtgcaagaggcaggtgggaaggcggaggtcgccgcgcttgccgcggaagcctcggtctggccagagcccagggcgctgagcgggttacatctagtgagcagagacccgcgatggctagtcttggcctattgttattacttctgcttaccgcactccctcctctctggtcatcctctttgcctgggctggatactgctgaatccaaggctacaatagcggatttgatcctgtcggctctggaaagggctacagtcttcctggaacaacgactgccggagatcaacttggacgggatggtgggggtccgggtcctggaagagcaactgaagagcgtgagagaaaaatgggcccaggagccgctgctccaaccactctctctcagggtggggatgctgggagagaagctcgaagccgctatccagcgcagtttgcactatctgaagcttagtgatcctaagtacttaagggagttccagctcaccctgcagcccggattctggaagttgccgcacgcatggatccacaccgatgcctctttagtgtatcccacatttggccctcaggattctttcagcgaggagaggagcgacgtgtgcctggtccagctcctgggaacagggactgacagctcggaaccatgtggactgtcagatctgtgtcgatcactgatgacaaagcctgggtgttcggggtactgcctgtctcatcaacttctttttttcctttgggcgaggatgagaggatgtacccaggggccgctacagcaaagtcaggattatatcaacttgttttgtgcaaatatgatggacctgaatcgaagggctgaagccattggctatgcatatcctactcgggacatcttcatggagaacattatgttttgtgggatgggaggcttctctgacttctataagcttagatggctggaggccatactgagctggcaaaagcagcaggaagggtgtttcggggaacctgacgctgaagacgaggaactctctaaggcaatccagtatcagcagcacttcagtagacgagtgaagcggcgggagaaacagtttccagatggttgctcctctcataataccgccaccgcggtagcagcactgggagggttcctgtatattcttgcagagtatccaccagctaatcgggaaccccaccccagtacacctcctcccccaagcagtaggtag

SEQ ID NO: 6214 - DNA, 510 bp, synthetic construct
  misc_feature 1..510: note = source = /note="Description of Artificial Sequence: Synthetic coding sequence"
  source 1..510: mol_type = other DNA
atgctctctagtgtggtgttctgggggcttatcgctctgattgggaccagcagagggtcatatcctttctctcatagcatgaaaccgcacctccacccacgcttgtatcacggatgctatggagacattatgacaatgaagacaagtggcgccacatgtgacgccaatagcgtcatgaattgcgggattagaggttccgaaatgtttgctgaaatggacctgcgcgcaatcaaaccgtatcaaactctgattaaggaggtggggcaaaggcactgcgtagatccggcagtgatcgctgccatcataagtagggaatcccacggcggctctgtccttcaggatggatgggaccaccggggactcaaatttggcctgatgcaactagacaaacaaacataccacccagtcggcgcctgggatagcaaggaacatctctcccaggccacagggatcttgacagaacgcatcaaggcaattcagaagaaatttccaacatggtccgtggcgtag

SEQ ID NO: 6215 - DNA, 300 bp, synthetic construct
  misc_feature 1..300: note = source = /note="Description of Artificial Sequence: Synthetic coding sequence"
  source 1..300: mol_type = other DNA
atggagagaatctccgcgttcttttcctctatctgggacacaattcttaccaaacaccaggagggcatttacaatactatctgtctgggggttctgctgggtctcccccttttagtcatcatcacccttcttttcatttgctgccattgctgctggtctccccccggtaagcggggtcagcagccggagaagaataaaaaaaagaagaaaaaaaaaaagaagaaagacgaagaagacttgtggatatccgctcagcctaaactgctgcagatggaaaaacggccgtcacttcccgtgtag

SEQ ID NO: 6216 - DNA, 468 bp, synthetic construct
  misc_feature 1..468: note = source = /note="Description of Artificial Sequence: Synthetic coding sequence"
  source 1..468: mol_type = other DNA
atgacatcacttaagtgtggcgagaatctctatatgagtagcgcatctagctcatggtctcaagcaattcaatcctggttcgacgaatacaacgattttgatttcggagtgggccctaaaactccgaacgccgtagtgggtcattatactcaggtagtgtggtactcctcatatctggttgggtgcgggaacgcttactgccctaatcagaaagttctgaaatactattatgtttgtcagtattgtccagcggggaactgggcgaacaggttgtatgtgccctatgaacaaggtgctccgtgtgcctcctgcccagacaattgtgatgacggactgtgtaccaatggatgtaagtacgaagacctgtactccaactgtaaaagccttaagctgacattaacttgcaaacatcagttggtgcgcgattcttgtaaggccagttgcaattgctcgaacagcatatattag

SEQ ID NO: 6217 - DNA, 2886 bp, synthetic construct
  misc_feature 1..2886: note = source = /note="Description of Artificial Sequence: Synthetic coding sequence"
  source 1..2886: mol_type = other DNA
atgctgctcctgctgctacttgcccctctctttttgcgcccaccaggggccggaggcgcccagacccccaatgcaaccagcgaagggtgccagattattcatccgccgtgggagggaggcattaggtaccgcggcctgacgagggaccaggtcaaggctataaatttcctgccagtggattacgagatcgaatacgtgtgtcgtggtgagagagaggtggtcgggccaaaagtgcggaagtgcctggcaaacgggagctggacagatatggatacaccctctcgctgtgtgagaatatgttctaagtcatatctgacactggaaaatggaaaggtcttcttgacggggggcgacctgcctgcactcgacggcgcccgagtggactttaggtgcgatccggactttcacctggtgggctctagtaggtcaatttgttcacaggggcagtggtcgacacctaaacctcattgccaagttaatcggactccgcactccgaacgacgcgccgtttacatcggcgcccttttccccatgagtgggggctggcccggtgggcaagcgtgtcagcctgctgtagagatggcccttgaggatgtgaattcacgcagagacatacttccagattatgaattgaagctcatccaccatgactcgaagtgtgatcccggccaggccactaagtacttatacgagctgctgtacaacgacccaatcaagatcatccttatgcctggttgcagttcagtgtctactctggttgccgaagccgctagaatgtggaacctgatcgtgctaagttacgggtcctctagccctgccttaagcaaccgacagcgatttcccacattctttcgaacacacccctctgcaactctgcacaatccaacaagagtaaagctctttgaaaaatggggatggaagaaaatcgcaacaattcagcagaccacggaagtgttcaccagtacacttgatgacctggaagagagagtcaaagaggcggggatagagatcacttttagacagtccttctttagtgatccagctgtgccagtgaagaatctaaagcggcaggacgcccggattatagtaggcctgttttatgaaacagaggctagaaaagtgttttgtgaggtgtacaaagagaggctgttcggcaaaaagtatgtgtggttcctgattggctggtatgccgacaactggttcaaaatctacgacccatctattaattgcaccgtggatgagatgacagaggccgtggaaggacacatcactactgaaatcgtgatgttgaaccctgccaacacccgctccataagcaatatgacatcacaggagttcgtggaaaaacttacaaagagattgaaaagacacccagaagagacaggtgggtttcaggaggcccctctggcctacgatgccatctgggccctggcccttgctttaaacaagacaagcggcgggggtggccgaagcggggtcaggcttgaggattttaactacaataaccagacgatcacggatcagatttatcgcgctatgaactcaagttcattcgagggcgtgtcagggcatgttgtgttcgacgccagcggaagccgaatggcctggacattgatcgaacagcttcagggggggtcctacaagaaaatcggctattacgacagtaccaaagacgatttatcttggagtaaaaccgacaagtggattgggggtagccctcctgcggatcagacactcgtgatcaaaacattccgtttcttgagccagaaactgttcatttcagtgagtgtgctgtcaagcctggggattgttctagcagtcgtgtgtctgagttttaacatctacaattctcatgttcggtacattcagaactcccagccaaaccttaacaaccttacggccgtgggctgtagcttggctcttgctgccgtcttccccctgggactggatgggtaccatatcggtcgaaaccagtttccttttgtttgccaggcaagactgtggcttctcgggctcggcttctccctgggctacgggtctatgttcactaaaatctggtgggtgcacaccgttttcacaaagaaggaggagaaaaaagagtggcggaagaccctggagccttggaaactctacgcgacggttggcctgctcgtggggatggacgtgctcacacttgctatctggcagatcgttgacccgctgcatagaaccatagagacattcgccaaagaggagcctaaagaagacatagatgtgtccattctgccccaacttgagcactgctcttctagaaaaatgaacacatggctggggatcttttatggatataaagggcttcttctgttgcttggcatatttttagcctacgagacaaagagcgtctcgaccgagaagatcaacgaccaccgcgccgttgggatggcaatttataatgtggcagtgctgtgtctgatcacagccccggtgacaatgattctgtcctctcagcaagatgctgccttcgccttcgcgagtctagctattgttttttcctcttacatcacactggtggtcctgttcgttccaaagatgagacgcctgatcacgagaggagaatggcagtcggaggcacaggatactatgaagacagggagcagtaccaacaataacgaggaagagaaaagccggctgctcgagaaagaaaatcgggaactggaaaaaatcatcgcagaaaaggaagaaagagtctccgagcttcgccatcaactgcagtctcggcagcagctgagatcgcgacgacatccccctacccctccagagcccagtggcggtctgcccagaggccctcctgaaccgcccgatagactgtcatgcgacggttcccgcgtccaccttctctataaatag

SEQ ID NO: 6218 - DNA, 444 bp, synthetic construct
  misc_feature 1..444: note = source = /note="Description of Artificial Sequence: Synthetic coding sequence"
  source 1..444: mol_type = other DNA
atggcgggaccatggacttttacgctgttgtgcggactgctagctgctacactcatccaggccaccctgtccccaacggctgtgctgatccttgggcctaaggtcattaaggagaaactcacccaagagcttaaggaccacaacgcgaccagcatcttgcaacaattgccgctactatccgccatgagagagaaaccggctggtgggatccccgtcttgggcagtctggttaatacggtgctgaaacatattatttggctcaaggtgattaccgccaacatactccagctccaggtcaaaccatcagcaaatgaccaggaacttcttgtgaaaattcccctggacatggttgccggttttaatacccctctagtgaagaccatcgttgaatttcacatgaccacagaggcccaagccaccattagaatggacacatctgcttag

SEQ ID NO: 6219 - DNA, 948 bp, synthetic construct
  misc_feature 1..948: note = source = /note="Description of Artificial Sequence: Synthetic coding sequence"
  source 1..948: mol_type = other DNA
atgaaggttctgctgctaaccgggctgggagctctatttttcgcctattactgggacgacaattttgatcccgccagtcttcaaggagcccgagtccttctcacaggagctaacgcgggcgtcggagaggagttggcataccattatgcccgactcggatcacacctcgtgctcaccgctcacaccgaggccttattgcagaaagtcgttggcaattgcagaaagctcggggcccccaaggtcttttatatcgccgcggacatggcctctccagaggctcccgaatccgttgtacaatttgcgttggataagctaggaggcctcgattacctagtgttgaaccacattggaggagcgccagctggcacacgtgctagatcccctcaggcaacccgatggttgatgcaggtcaattttgtgagttacgtgcagctgacgtctagagccctcccctctctgaccgatagtaaagggtcactggtggtggtgagctccttgctggggagagtcccgaccagcttttccaccccctattctgctgccaaattcgccctggacggtttctttgggtctctgcggagggagttggatgtccaggatgttaacgtcgcgatcacaatgtgcgtcctcggactaagggacagggcaagcgccgccgaggccgtgcgcagctctactagccgtccaaggcaaccagagcacagaggggtgcctttgcagtctcaaaccgccatgttcctgccgccaacagtgccaggggcccgcacactgactgagaccccattaagaggctggccccaaccaaagatgaagagtagtagacaaaaatccaagacagagaaaaatgatggacatcttgaaccagtcacagcttgggaggtacaggttccacgagtgcggcgcctgtgcagaggactggcgcgacctcatttatttggccatgactag

SEQ ID NO: 6220 - DNA, 285 bp, synthetic construct
  misc_feature 1..285: note = source = /note="Description of Artificial Sequence: Synthetic coding sequence"
  source 1..285: mol_type = other DNA
atgcagcactctttagtgttttttttcgctgtgattctacatctgtctcatctgttgcacctggacgcgagcattcatcctttccgtttgcccttctctagtaagccattcttactcatccccatgagtaacaccacactgcctcacactgcttggcccctgagctttctccaccagaccgtcagtacactcaaagcagtggcagttacacatagcctgtggcacctccagatccctgtggactgtcaagcatgtaacaggaagtccaagaaaatctactgttag

SEQ ID NO: 6221 - DNA, 783 bp, synthetic construct
  misc_feature 1..783: note = source = /note="Description of Artificial Sequence: Synthetic coding sequence"
  source 1..783: mol_type = other DNA
atggagaagtttaataccatctctgtgtccaaatgtaataaagagaccgtagcaatgaaggaaaaatgtaagttcgggatgacctccactatcccaagcggccacgtttggcgcaatacatggaatcctgtgtcatgcagtcttgctactgtgaagatgaaggagtgtttgcggggcaaactaatttaccttatgggagactcgactatcaggcagtggatggagtattttaaggcaagtataaatacgctgaagtcagttgatctccatgagagtggaaagttacagcaccaactcgctgtcgatctcgataggaatattaacattcagtggcagaaatattgctatcccctcattgggagcatgacttattctgtgaaggaaatggagtacctaacaagagctatcgaccgcaccgggggagagaagaataccgtaattgtcatttctctcggacagcactttagaccgttcccaattgatgtgtttatcagacgggccttgaacgtgcataaggctattcaacatttgttgctgcggagtcctgacactatggtgatcattaaaaccgaaaatatccgtgagatgtacaatgatgctgaacgcttctccgacttccatgggtacattcagtacttgataataaaagacatttttcaggacctgtctgtgtcaatcatcgacgcctgggacattactattgcctatgggactaacaacgtgcatcctccgcagcacgtggtaggcaatcagatcaacatcctgctgaactatatttgctag

SEQ ID NO: 6222 - DNA, 1644 bp, synthetic construct
  misc_feature 1..1644: note = source = /note="Description of Artificial Sequence: Synthetic coding sequence"
  source 1..1644: mol_type = other DNA
atgagcagcaacactatgctgcagaagacactgctgattttgatatcattcagtgtggttacatggatgatttttataatctcacagaattttacaaaactttggagcgctctgaacttgtccatcagtgttcactactggaataactcagcgaagtccttgttcccaaaaacctcccttattcctctcaagcctctgacggaaaccgagttgagaataaaggaaattatcgaaaagctggatcagcagattccaccacgccccttcacacatgttaatacgaccacctcggccacacacagcacggctactatcctgaatcccagagacacctattgtcggggagatcaattagatatactgctagaggttcgcgatcacctgggccagaggaaacagtacgggggtgactttttacgcgccagaatgtcctccccagctctgaccgctggagcctcaggaaaggtcatggacttcaataatgggacgtacctggtctccttcacgttattttgggagggacaggtctcactctccctgctactcattcacccgtccgagggcgcctctgctctttggcgggctagaaaccaggggtacgataagattatctttaaaggcaagttcgtcaacgggacatcccatgtttttacagagtgtggactgactcttaatagcaatgcagagttgtgtgagtatctggatgacagagatcaggaggccttttactgtatgaaaccccagcacatgccatgtgaggctctgacctatatgacaaccaggaatcgcgaagtcagctatctgaccgacaaggagaattccctgttccatagaagtaaagtgggggtcgagatgatgaaagacagaaaacatatagatgtgaccaactgtaataagcgagaaaaaatagaagagacatgtcaggtggggatgaaaccgcccgtcccaggaggctacaccctacagggcaagtggatcaccacattttgtaatcaagtgcaactggatactataaagatcaacggctgcctcaaaggaaaattaatttacctccttggggactcgaccctgagacagtggatttactatttcccaaaagtggtcaagaccctgaagtttttcgatctgcacgaaacaggcatattcaagaaacaccttctgttggacgctgaaagacacacacagattcagtggaaaaaacatagctacccatttgtgaccttccagctttacagcctgatcgaccacgattacattccccgggagatcgaccgactgagtggcgataagaataccgccatagtcatcaccttcggccagcatttccgaccattcccaattgacatctttattcgtcgggctatcggtgtgcagaaggctatcgaacgtcttttcctgaggagccctgccactaaagtgattattaagacggagaacatcagagagatgcacatcgagaccgagaggtttggtgactttcacgggtacatccactacctgatcatgaaagacattttcaaggatttaaatgtgggcattatcgacgcgtgggacatgacaattgcctatggcactgacaccatccaccctccggaccacgtgataggcaatcagatcaacatgtttctgaattacatctgctag

SEQ ID NO: 6223 - DNA, 399 bp, synthetic construct
  misc_feature 1..399: note = source = /note="Description of Artificial Sequence: Synthetic coding sequence"
  source 1..399: mol_type = other DNA
atgctcatgctctttgtattcggggtgctcttgcacgaagtttctctctctggacagaacgaggcccctccaaatacacattccattccgggagagccactctacaattacgcctcaatccgcctgccagaggagcatattccattctttctccataacaataggcatatcgccaccgtgtgccgtaaggattctctttgtccttacaagaagcacctcgagaagctgaagtattgctgggggtacgagaagtcctgtaagcccgaattcagattcgggtatcctgtttgctcatacgtggatatggggtggactgacacgctcgaaagtgctgaggacatcttctggaagcaggcagacttcggatacgctagggaaagattggaggagatgcattag

SEQ ID NO: 6224 - DNA, 861 bp, synthetic construct
  misc_feature 1..861: note = source = /note="Description of Artificial Sequence: Synthetic coding sequence"
  source 1..861: mol_type = other DNA
atgggctcagctctgtttgtgaagaaagaactgcagttgcaggccaattttcttggcaacgtgaagcggttgtacgaggccgaggttttcagtactgacttctccaatccgagtattgctcaggcaaggataaatagtcatgtaaaaaagaagacgcaaggcaaggttgttgatataatccagggtctggatcttttaacagccatggtcctcgtgaaccatatattcttcaaggcgaagtgggaaaagccttttcacccggagtacaccaggaaaaacttcccctttctggtcggtgaacaggtgaccgtccacgtcccaatgatgcaccagaaagagcagtttgctttcggagtggatactgagctcaattgctttgtgctgcaaatggattataaaggggacgccgtggccttttttgtgctcccatccaagggtaaaatgagacaactagaacaggcactatccgccagaacccttcgaaagtggtctcattcactccaaaaacgatggatcgaggtctttattcctcgattctctatatctgctagctataacctggaaaccattctccccaaaatgggtatacagaacgtctttgacaaaaacgctgatttttcgggaatcgccaagcgcgactcacttcaagtgtctaaggctacccacaaggccgttttggatgtctctgaggaggggaccgaagcaactgcagctactaccaccaagtttattgtgagatctaaggacggcccgagttacttcaccgtgagctttaatagaaccttcttgatgatgatcaccaataaagctacagacgggattctgtttcttggaaaggttgagaaccccactaaatcctag

SEQ ID NO: 6225 - DNA, 60 bp, synthetic construct
  misc_feature 1..60: note = source = /note="Description of Artificial Sequence: Synthetic coding sequence"
  source 1..60: mol_type = other DNA
atgggatggttgaccagaatcgtatgtctgttctggggcgtgctgctgacagcccggtag

SEQ ID NO: 6226 - DNA, 1197 bp, synthetic construct
  misc_feature 1..1197: note = source = /note="Description of Artificial Sequence: Synthetic coding sequence"
  source 1..1197: mol_type = other DNA
atgaagttccagggcccattagcctgtctgttgctggcactgtgcctgggaagtggcgaggccggaccactgcagtctggggaagagtctacgggaaccaatatcggcgaagcactggggcatggtctcggagatgctttgagcgaaggagtaggcaaagctatcggtaaggaagccgggggcgccgcgggctccaaagtttcggaggcactcggacagggcacacgagaagccgtggggaccggagtgaggcaggtccctggattcggagtggccgatgcgctgggtaaccgcgtaggggaggctgcacatgcactcggcaataccgggcatgaaatcgggcgccaggctgaggacgtcatccggcatggagctgatgctgtgagaggttcgtggcaaggggtaccagggcacaatggcgcttgggagacgagtggaggtcacggcatcttcgggagtcagggaggcctaggaggtcagggacagggtaatcctggcggactgggaaccccctgggtgcacggctatccggggaactctgccggcagcttcggaatgaacccccaaggggccccctgggggcagggcggaaacgggggccctcccaattttggaacaaacacccagggcgccgtggctcagcctgggtatggatctgtgcgcgctagcaaccagaatgaaggctgcaccaatccccctccgagtggcagcggaggcggctcgtcaaattcaggaggaggatctgggtctcagtcaggctctagtggatcaggtagcaacggggacaacaataatggttctagctccggtggttctagttctggtagtagctctgggggctcttcaggcgggagctcaggggggtctagtgggaacagcggagggtcccgaggcgattccgggtccgagagctcttggggctccagcactgggagtagtagcggcaatcacggcggctctggcgggggaaacggacacaagcccggatgtgagaaacctggcaacgaggcacgcggttccggggagagcgggatacagggcttccgaggccagggagtcagcagtaatatgagaaatagcgaaacgagtcctggaatgtttaactttgacacattctggaagaatttcaaaagcaaactcggcttcattaactgggacgcgattaacaaggatcagcgcagctcaaggatcccatag

SEQ ID NO: 6227 - DNA, 81 bp, synthetic construct
  misc_feature 1..81: note = source = /note="Description of Artificial Sequence: Synthetic coding sequence"
  source 1..81: mol_type = other DNA
atggcccccaagaagctgagttgcctccggtcgttactcctccctctgtcacttaccctcctactgccccaagctgattag

SEQ ID NO: 6228 - DNA, 696 bp, synthetic construct
  misc_feature 1..696: note = source = /note="Description of Artificial Sequence: Synthetic coding sequence"
  source 1..696: mol_type = other DNA
atggcccaattattcctgccactgctggccgcactggtgctcgcccaagcgccagccgctctggctgacgtcctcgaaggagacagctctggtatttaccgatgcgaagtccagcacggaatcgacgactcttccgacgccgtagaagttaaagtgaagggggtggtctttctgtatcgcgaaggctcggcgagatatgcgttcagcttcagcggagctcaagaagcgtgtgctagaatcggcgcacatatcgccacccctgaacagctgtatgccgcttatctgggtggttacgagcagtgtgacgccgggtggttgtcagatcagaccgtacgttaccccatacagactccaagggaagcctgttatggcgacatggacgggttcccaggagtccggaactacggcgttgttgatcccgacgacctttacgatgtgtactgttatgctgaagacttgaatggtgagctttttctcggcgaccctcctgagaagctgacgctagaggaagcacgcgcctactgccaagaaagaggtgctgaaatcgctacgactggacagctttatgccgcctgggacggaggcctggaccactgttccccaggatggctggcggacggatctgtgagatacccaatcgtaaccccttctcagagatgcggaggcggcttaccaggtgtcaaaaccctgttctag

SEQ ID NO: 6229 - DNA, 600 bp, synthetic construct
  misc_feature 1..600: note = source = /note="Description of Artificial Sequence: Synthetic coding sequence"
  source 1..600: mol_type = other DNA
atggatgaactgctgcccctgatccccgttctcgagcagtataagacagatgcaaagttaattacccagttcaaagaggagatacggaatctaagtgcagtgttgacgggcatccaagaagaaatcggcgcatatgactacgaggagctgcaccagcgtgtgctcagcttagagaccaggttaagagattgcatgaagaagctaacttgtggtaagcttatgaaaattacgggtcccgtgaccgtgaagaccagcggtacacgatttggggcttggatgaccgatcccttggccagtgagaaaaataatagggtttggtacatggacagctacactaacaataagattgtgcgcgaatataaatctatcgccgattttgtaagtggtgctgagagccgaacatataatctgccattcaagtgggctggcaccaatcacgtggtctacaacgggtccttatatttcaataagtaccaatccaacataattattaagtactcatttgatatgggaagagtccttgcccagaggagcctggagtatgccggattccacaacgtaactcccactcacggagttgactctttaacaagcacctag

SEQ ID NO: 6230 - DNA, 609 bp, synthetic construct
  misc_feature 1..609: note = source = /note="Description of Artificial Sequence: Synthetic coding sequence"
  source 1..609: mol_type = other DNA
atggccgatatgcagaatctggtcgaaaggctggagcgcgccgtcggcaggctcgaagcagtgtctcacacctcagatatgcatcgaggttacgccgactctccttctaaagcaggggcagccccatatgtccaagcttttgacagtctcctcgctgggcctgtcgcggagtacctcaagatctcgaaagagatagggggtgacgtgcagaagcatgcagagatggttcacactggactcaagctagagcgggccttattagtgaccgcatctcaatgtcagcagcctgccgaaaacaaattgagcgatctgctagcccccatctcggaacaaatcaaggaggtgattactttccgcgagaaaaatcgaggctccaaattgttcaaccacttatctgctgtgagtgaatcaattcaggcactcggctgggtggccatggcaccaaaaccaggtccatatgttaaggagatgaacgatgccgccatgttctatacaaatcgcgtgcttaaagagtataaagatgtggacaagaaacacgtggactgggtgaaggcctatctaagtatttggactgaacttcaagcttatataaaggaattccacacttag

SEQ ID NO: 6231 - DNA, 2886 bp, synthetic construct
  misc_feature 1..2886: note = source = /note="Description of Artificial Sequence: Synthetic coding sequence"
  source 1..2886: mol_type = other DNA
atgttacttctcctgctgctggcccccttgtttctacgcccacctggcgccggaggcgcccaaaccccgaatgccacaagtgaggggtgtcagatcatacaccccccttgggaaggcggaataagataccgcgggctcaccagggaccaagtcaaggcgattaatttccttcccgtggattacgagattgagtatgtgtgtaggggggaacgggaggttgttggacctaaggttagaaagtgcttagctaacggttcatggaccgatatggacactccaagcaggtgtgtgcggatttgctccaagtcttatttgaccttggaaaatggtaaagtgttcctcaccgggggcgacctgccggccctggatggagctagggttgactttagatgcgaccccgactttcaccttgtcggcagctcccgtagcatttgcagccaagggcagtggagtacccccaaaccacactgtcaagttaaccggacgcctcacagtgaacggagagctgtttacattggggctttgtttccaatgtccggcggatggcccggcggccaggcatgtcagcctgcggtcgaaatggcactcgaggatgtcaattctcgacgcgatatcctgcccgattacgaactcaagttaatccatcacgacagtaagtgcgaccctggccaggcaacaaagtatttatatgagctcctttacaacgacccgatcaagatcatcctgatgccaggatgctccagcgtatcaaccttagtggcggaggcagcgaggatgtggaatcttatcgtactgtcttacgggagttccagccctgcactcagtaataggcagcggtttcccactttctttcggacacacccttctgctactctccacaatccaacccgggtgaaactgtttgagaagtggggttggaagaaaattgccacaattcagcaaaccactgaggtgttcacaagtacactggacgatctagaagagagggtcaaagaagctggcatcgagatcacctttcggcaaagcttttttagtgatcccgcggtgcctgtgaagaacctaaagcggcaggacgcaaggattatcgtgggcctcttttatgagaccgaagcacgcaaagtgttctgcgaggtgtataaggagagactgtttgggaagaagtacgtatggttccttattgggtggtatgccgataattggtttaaaatctacgacccttctattaactgcactgtggacgaaatgacagaagcggtggaaggccacatcaccacggagatcgtgatgctgaaccctgcaaatactaggagcatttcgaacatgaccagtcaggagttcgtcgaaaagctcacgaagcggctcaaacggcaccccgaagaaaccgggggtttccaggaagcccccctcgcatatgacgcgatatgggcattagctctggccctcaataaaaccagcggtgggggcggaagatctggtgtgaggttggaagatttcaattacaacaaccagacgatcaccgatcagatctatcgggcaatgaattccagctccttcgaaggcgtcagcggccatgtggtgttcgatgctagcggcagcagaatggcttggaccctcatcgaacagttacaaggaggctcttacaagaagatcgggtattatgattccactaaggatgatctatcctggtccaaaaccgacaagtggataggtggctctcctccagccgaccagaccctggtaattaaaactttccgattcttaagtcagaagctgtttataagcgtgagtgtgttgtcatcactgggtatagtgctcgctgtggtgtgcttgtctttcaatatctacaattctcatgtgagatatatccagaattcccagccaaacctgaataatcttactgccgtagggtgtagcctagcactggcagctgtcttcccacttgggctagacggctaccatatcggccgtaatcagtttccgttcgtctgccaagccagactctggcttcttggccttggctttagcctgggctacggctccatgttcaccaaaatctggtgggtccacacagtgtttacaaagaaagaggagaagaaagagtggagaaagactctggagccttggaaactctacgcaactgtggggctcctagtaggaatggacgttctgaccctcgcaatctggcagatagtcgacccgctccatagaaccattgagacattcgccaaggaagagccaaaagaggacatagatgtgtccattttgccccagctggaacattgttcatctcgaaaaatgaatacctggctcggaattttttatgggtataaaggattgttgctgctacttggtatattcctcgcttacgagaccaaatctgtgagcactgagaaaattaatgatcatagagccgtgggaatggccatctacaatgtggcggtgctctgtctgatcaccgcacccgttactatgatcctgagttctcaacaggacgccgccttcgcattcgcgagcctggccatagttttcagctcatatattactctcgtggtgctattcgtgcctaaaatgaggcgactgattactagaggcgaatggcagtcagaggctcaggataccatgaagacagggtcttccaccaataacaatgaggaagaaaaaagcagattgttagagaaggagaatagagagctcgaaaagattatcgcagaaaaggaagagagggtcagcgagctccggcaccagctacagtccaggcaacagctgcggtcgcgacggcacccgcccacaccacccgaacccagtgggggactgcctagaggcccacctgagcctccagatcggctctcatgcgacggtagtcgggtccacttgctttataagtag

SEQ ID NO: 6232 - DNA, 351 bp, synthetic construct
  misc_feature 1..351: note = source = /note="Description of Artificial Sequence: Synthetic coding sequence"
  source 1..351: mol_type = other DNA
atggccgccggatctgcacctatgcaacttcaccttcgagctacaatacgaatgaaggacggcttatgcgtgcctcggaagtggatctaccaccttaccgagggctcaacagacttgcggaccgaaggacggccagacatgaaaacagagctctttagctccagctgccctggcgggatcatgctgaacgagactgggcagggataccaaagatttcttctgtataaccgctctcctcacccgcctgagaaatgcgttgaggagttcaagtcactcacctcctgtctcgactctaaagccttcctgttgacaccacgcaaccaggaagcatgcgagctgtccaataattag

SEQ ID NO: 6233 - DNA, 2334 bp, synthetic construct
  misc_feature 1..2334: note = source = /note="Description of Artificial Sequence: Synthetic coding sequence"
  source 1..2334: mol_type = other DNA
atggctgcggcaggccttgtggctgtggccgcagcggcagaatattctggcaccgtggcctccggcggcaacctgcccggcgtccattgtggaccttctagcggagccggacctggcttcggccctgggagttggtcacgttctttggatagagctctggaggaagcagccgtaacaggggtgctctccctgagtggacgcaagctgcgggagttcccacgcggcgcggccaaccatgacttgacggacaccactagagcagacctgtcccgaaacagactctccgagatacctattgaggcatgccacttcgtgtcactggagaacctaaacctttatcaaaactgcattcggtatatccccgaagccatcctgaatttacaagcactgacttttctgaacatctcccgcaatcaattaagcactctgccagtccatctctgcaatctgccactcaaagtcctaatcgcctcaaataataagttggtgagcttaccagaggaaattggtcacctcaggcacttaatggagctggacgtgtcatgtaacgaaatacagacaattccttcgcagatcgggaatctcgaagccctgcgcgacctgaacgtacgaagaaatcatctggtacacctgccggaggaactggctgagctcccattgattcggctggatttctcctgtaacaagatcaccacaatccccgtgtgctaccggaaccttcgtcacctgcaaacaataactcttgataataatcccctgcagtcaccacccgcccagatctgtatcaagggaaaggtgcacattttcaaatatctgaacatccaggcttgcaaaattgcccccgacctgccagattatgataggagacccctggggtttggtagctgtcacgaggagctctattcaagccggccttatggtgcgctcgacagcggttttaattccgtggacagtggcgacaaaaggtggtcaggaaatgagcccactgacgagttctccgacctgcctcttcgcgttgctgagatcacaaaggagcaaaggctgcggagagagtcacagtaccaagagaatagaggcagtctggtggtaacgaacggaggcgtggagcatgatctggatcagattgattatatcgactcatgcacagccgaggaagaagaggccgaagtgcgccaaccaaagggccccgatcctgactctctcagttcccaatttatggcatatatcgagcaacgacggatctcccatgaggggagccccgtcaagcccgtcgcaattcgggaattccagaagaccgaagacatgcgcagatatctgcatcagaatagggttcctgctgagcctagcagcttgctgtccctaagtgcttcacacaatcagcttagccatacggaccttgagttgcaccagaggagggaacagttagtggagcgtacaagacgggaggctcagttggctgctctacaatacgaggaagagaagatccgtaccaagcagattcagagagacgccgtgcttgatttcgttaagcaaaaggctagccagtccccacagaagcagcatccccttctcgatggtgtggatggagagtgccctttcccttcccgacggtcccaacacacggacgattccgcactctgtatgtcgttaagtgggctcaatcaggtcgggtgcgccgctaccctgcctcactcaagcgcttttacccctctaaaatccgacgatcggccgaacgccctgctgagcagccccgccacggaaaccgtccaccacagtcccgcttatagctttcccgcagctatccagagaaatcagccacagcggccggagagcttcctatttagagcgggcgtgcgggcggaaacgaacaagggacatgctagcccactgcccccgtctgctgcccctaccacagactctactgattcaatcaccggacaaaattcccggcaaagagaggaagagcttgaactgattgaccagctccgtaaacatattgaataccggctcaaggtgtccttaccctgcgatctcggcgccgcgctgactgacggagtagtgttgtgtcacctggccaatcacgtaagacctcggagtgtgccctcgatccacgttccctcaccggctgtgccgaagctgacaatggccaaatgtcgaaggaacgtggagaatttcctggaggcttgtcggaagatcggcgttccacaggaacaactgtgtctgccccttcatatccttgaagagaaaggtctgagtcaggtcgccgtgacagtgcaggcccttctcgagctggctccacccaaacaacagcagcatcagctttctgcagtttag

SEQ ID NO: 6234 - DNA, 834 bp, synthetic construct
  misc_feature 1..834: note = source = /note="Description of Artificial Sequence: Synthetic coding sequence"
  source 1..834: mol_type = other DNA
atgctccatccagaaactagccctggtcgaggccacctattggcagttctcctcgctctgctgggcaccacatgggcggaggtatggccaccccagttacaagagcaggctccaatggcaggagcactcaacagaaaggagtctttcctgctgctcagtcttcacaacagactgcgctcatgggtacagcccccagccgctgacatgcgaaggttgctcgtgtgggccacaagcagtcagctgggctgtggacgccacctgtgctccgctgggcagaccgctatcgaagcgttcgtgtgcgcgtactctccgggaggcaactgggaggtcaacgggaagactattattccgtataagaaaggagcatggtgctccctatgtacagcttccgtaagcggctgcttcaaggcctgggaccacgccggggggctgtgcgaagtgccacgaaacccgtgccggatgagctgccagaatcatggcaggctgaacatctccacctgccactgtcactgtccacccggttatacaggacgttattgccagggccacctgcccaattcgaacatgccacatagcgcaatggggaccaaaccaaagacccccggcgtccctgcaatcggtagcctggtaaggtgctctctgcagtgtgttcatggccgcttcagagaggaagaatgttcctgcgtctgtgatattgggtatggcggagcccagtgtgcctccgagtcctgtccacgcgcacctaaggagcccgctcctctaaaaactcctcttcaatgggggatttccagccaagagcctgctgtgtgtctctctttccaactaatacagtag

SEQ ID NO: 6235 - DNA, 456 bp, synthetic construct
  misc_feature 1..456: note = source = /note="Description of Artificial Sequence: Synthetic coding sequence"
  source 1..456: mol_type = other DNA
atgtcggatttactcctcctcggactgatcggtggcctgacccttctgctgctcctgaccctcctggctttcgctgggtattccggtcttctcgccggcgtggaagtgtctgctggatcaccccctattcggaatgtcaccgtggcatacaaatttcatatgggcctgtacggggagacagggaggctcttcacagaaagttgttccatctcccctaagctccgctccatagctgtctactacgacaacccacacatggtaccccccgacaaatgccggtgtgctgtcggttcaatcctgagtgagggggaggagtctccttcaccagagcttatcgatctgtatcagaaattcggttttaaggttttctccttccccgctccatcccatgtcgttaccgcgacctttccgtataccaccattctcagtatctggctcgcaacgagaagggtgtag

SEQ ID NO: 6236 - DNA, 390 bp, synthetic construct
  misc_feature 1..390: note = source = /note="Description of Artificial Sequence: Synthetic coding sequence"
  source 1..390: mol_type = other DNA
atggcagccggatccgcccccatgcagcttcatctccgagctacgatccgaatgaaagatggactgtgtgtgccacggaagtggatctaccatctaaccgaggggagtacagacctcagaaccgaaggcaggcccgacatgaagaccgagctgttctcttctagctgtcccggcggtatcatgcttaatgaaaccggccagggttatcagagatttcttttgtacaaccgcagtccccatcctcctgagaaatgcgttgaggaattcaaatctctaacctcctgcctcgacagcaaagcctttcttctcacccctcggaatcagggaaagggactgaagtctcataaaaccggtctggggctgacaaaatcttccggggtgactggatag

SEQ ID NO: 6237 - DNA, 390 bp, synthetic construct
  misc_feature 1..390: note = source = /note="Description of Artificial Sequence: Synthetic coding sequence"
  source 1..390: mol_type = other DNA
atggccgcaggcagcgcaccgatgcagcttcacctccgggccaccatccgtatgaaagatggcttgtgtgtacccagaaagtggatatatcacctcacagagggttcgacagacctgagaaccgagggacggcctgacatgaaaacggagctcttctcgtcctcttgccctggcggtatcatgctcaacgaaaccggtcagggctaccaacggttcttgctctacaacagaagcccccaccccccagagaagtgtgtagaggagttcaagtctttaactagttgcctggactcaaaggcttttctccttaccccgcggaatcaaggaaagggattaaagagtcataaaaccggacttgggctaacaaagtcgagcggcgttactggctag

SEQ ID NO: 6238 - DNA, 891 bp, synthetic construct
  misc_feature 1..891: note = source = /note="Description of Artificial Sequence: Synthetic coding sequence"
  source 1..891: mol_type = other DNA
atggaagccctgttgctcggggccggcctgttgctgggagcatatgtgctggtttactacaacctagttaaggcccccccatgtggggggatgggcaacctgcggggtcgtaccgccgttgtcacgggcatctccagttgcggtcggactagagaagcctttaacctcttgttacgtgtcaatcatattggtccattccttctaactcacttgttgttaccctgtctgaaagcatgcgccccgagtagggtggtcgtcgtggcctccgcagcccattgccgcggtcgcctggattttaagcgattggatcgtccagtagtcgggtggaggcaagagctgcgcgcctacgctgataccaaactggcaaacgtcttgttcgcaagggagcttgctaatcagttggaagctaccggcgtgacatgctacgccgcccatccaggtccggtcaactccgagctttttctgaggcacgttcctggttggctgagacctctcctgcgacccctcgcctggctggtgcttcgggctccccgtggaggggctcagacaccactctattgtgccctgcaagaaggaatagagcctcttagcggtcggtatttcgcaaactgccacgtcgaggaggttcctcctgctgctcgggatgatcgcgcggcccaccgtctgtgggaagcatccaaaaggttggctggcctcgggcccggcgaagatgccgagccggatgaggaccctcagtccgaagactccgaggctcccagctcactcagtaccccgcatccggaggagcctaccgtgtctcagccatacccctcaccacagagttcccccgatcttagcaaaatgactcatcgcattcaggctaaagtggagcccgagatccagctctcgtag

SEQ ID NO: 6239 - DNA, 567 bp, synthetic construct
  misc_feature 1..567: note = source = /note="Description of Artificial Sequence: Synthetic coding sequence"
  source 1..567: mol_type = other DNA
atgtttcatcagatttgggctgcactgctctacttctatggcataatacttaactcaatctaccaatgtcctgagcactcccaactgacaactctcggcgtggatgggaaggaattcccagaagtgcacctgggccagtggtacttcatcgccggcgccgctcctacaaaagaggagctcgccacctttgatcccgtggataacatagtttttaatatggccgctgggtcagcccccatgcagctgcatctgagggctaccatacgcatgaaagatggtctgtgtgtgcccagaaaatggatctaccacctcaccgagggcagtacggacttacgcaccgagggtcgaccagacatgaagactgaacttttctcgtcctcctgtcctggtgggatcatgcttaatgaaactggccaaggttaccaacgatttcttttgtacaatagaagcccacaccccccggagaaatgtgtggaagaattcaaatctctgacctcttgccttgatagcaaggctttcttgcttacaccccggaatcaggaagcctgcgagctttctaacaattag

SEQ ID NO: 6240 - DNA, 978 bp, synthetic construct
  misc_feature 1..978: note = source = /note="Description of Artificial Sequence: Synthetic coding sequence"
  source 1..978: mol_type = other DNA
atgcaggggagggtggcagggagctgtgcccctttagggctgctgttggtttgcctgcacttaccaggtttattcgcacgttctattggagtggtggaggagaaggtgagtcaaaacctggggactaatcttcctcagctaggccaaccatcatccactggtcctagtaattcagagcatccacagcccgccctagatcccagaagcaacgacttagcgcgcgtgccactgaagttgtcagttcccgcgtcggacggcttccccccagccggcgggagtgctgtacagcggtggcccccctcctggggtctgcccgccatggatagttggcctccggaagacccttggcagatgatggccgctgcagctgaggacaggcttggcgaggccctgcctgaggagctatcttacctttcttctgcggcagccctggcaccagggtcgggccccttacctggcgaaagcagccctgacgccacagggttgtctcctaaggccagccttctgcatcaagatagtgagagtagacggcttccacggagcaatagtctgggtgccgggggaaagattctgagccagagacctccatggtcgctgatccaccgggtgctcccggatcatccatggggtaccctgaacccatcggtgagctggggcggcggaggccccggcactgggtggggaacaagaccgatgccacacccggagggaatttgggggattaacaaccaaccgcccggcaccagctggggaaatattaaccgctatcctggggggagttggggaaatatcaatagataccctggcggcagctggggcaacatcaaccgctatcccggggggtcctgggggaatatacacctctatcctggaattaataaccctttcccccccggagtgctgcggcctccaggcagctcttggaatatacctgctgggttcccaaatccccccagcccacgccttcagtggggttag

SEQ ID NO: 6241 - DNA, 2631 bp, synthetic construct
  misc_feature 1..2631: note = source = /note="Description of Artificial Sequence: Synthetic coding sequence"
  source 1..2631: mol_type = other DNA
atgggaccagaggccctgtcctctctgcttctgctgcttctcgtggccagcggggatgctgatatgaaaggccacttcgatcctgctaaatgcaggtacgccctgggtatgcaggataggacgatccccgacagcgacatctccgcaagctcatcttggagcgacagcacagcggccaggcacagccgactggagtccagcgacggggatggggcctggtgcccagccggctctgttttccctaaagaggaagagtacctccaagttgatctgcagcgcctgcatctggtcgccctggtcggcacccaaggacgccacgctggcggcttaggcaaggagttttcaaggtcatataggttgcgctattctagagacgggcggaggtggatgggctggaaggacagatggggccaggaagtaatttccggtaacgaagaccctgagggcgtcgtgctaaaagatctcggacccccaatggtcgcaaggttagtaaggttctacccacgcgcagatcgcgtgatgagcgtttgtttacgcgtggagctgtacggctgtctctggagggacggattgctgagctataccgcgcccgtgggacagaccatgtacctgagcgaggccgtgtacttgaacgactctacctatgacggtcacacagtgggaggcctgcagtatggaggcttgggtcagctagcagatggggtcgtaggactggacgacttcaggaaatcccaggagctgagggtgtggccaggatatgactacgtgggctggagcaaccatagctttagctcaggctatgttgaaatggaattcgagtttgatcgtttgcgggcttttcaggcaatgcaggtgcattgcaataacatgcacacacttggagctagactcccgggcggagtagagtgtcgcttcagacgaggtccagcaatggcgtgggaaggcgagcccatgcggcataaccttggtggtaatctcggtgacccaagggcccgagctgtgtccgtacccctcgggggaagagttgccagattcttacagtgtagatttctttttgccggtccctggcttctttttagcgagattagctttattagcgacgttgtgaacaattcctctccagcgctgggcggtacgtttcctcccgcaccctggtggccgcccggacctccacctactaacttctcctctttggagctggagcctagagggcaacaacctgtcgcaaaggctgaggggagcccaactgctattttgatcggatgcctcgttgctatcatcttactccttctcctgatcatcgcactgatgctctggcgactgcactggcggaggcttttgtccaaggccgaacggagagtgctggaggaggaactgaccgtacacttgtcagtgccaggggatacgatcttgataaacaacaggcccggccctagagaacctccgccataccaggagccgcgaccccgaggcaatccccctcactcggccccctgtgtgcctaatggctcagcttatagcggcgactacatggaaccagaaaagccgggggcccccttgctgccacctccacctcaaaattcggttcctcactacgctgaagcagatattgtgactttgcagggagtgaccggagggaacacctacgctgttccagcactgcccccaggagcagttggagacggtccacctcgggtggattttcctcgatctcgattacggttcaaagagaagctcggcgaaggccagtttggcgaggtccacttatgcgaggttgattctccccaggacctggtctccctggacttccctctgaacgtcagaaagggacatcccctcctggtcgccgtgaaaatcctgaggccagacgctactaaaaacgctagaaacgacttcctgaaggaggtgaaaatcatgtcccgcctgaaggacccgaacattatacgcttgctcggagtgtgtgtgcaggacgaccccctctgtatgataactgactatatggagaatggcgacctgaatcagttcctttccgcacatcagctcgaggataaggcagcagagggcgctccaggtgatggccaggccgcccaaggcccaactattagttaccccatgctcctgcacgttgctgcccaaatcgccagcggcatgaggtaccttgctaccctcaactttgtgcatcgtgatctagcgactagaaactgtctggtgggtgaaaattttactatcaagattgcagacttcggtatgtctcgtaatctttatgcgggcgactactatagggtgcagggcagagctgtcttaccaattaggtggatggcgtgggagtgtattttaatggggaaattcactaccgcaagtgatgtgtgggcctttggagttaccctctgggaggtccttatgctgtgtcgtgctcagccattcggccagcttaccgacgaacaggtgatagaaaacgcaggagaatttttcagggatcagggcagacaagtctacttatcacgacctccggcgtgccctcaggggctgtacgagctgatgctgcgatgctggtccagggagagtgaacaaaggcccccctttagccaattgcatcggttcctagcagaggacgcactgaacaccgtgtag

SEQ ID NO: 6242 - DNA, 1482 bp, synthetic construct
  misc_feature 1..1482: note = source = /note="Description of Artificial Sequence: Synthetic coding sequence"
  source 1..1482: mol_type = other DNA
atggctctcttggcaggaggtctgtctaggggattgggttcccacccagcagcggccggacgcgatgccgtagttttcgtgtggttattgctaagtacttggtgtacagccccagcaagagctatccaggttaccgtctcgaacccttaccatgtagttattctctttcagcccgtcactctgccgtgcacctatcagatgacgtctacacctacacaacccattgtgatctggaaatacaagtcattctgcagagatagaatcgccgatgctttcagcccagctagtgtcgacaatcagctcaacgctcagctagcagccggaaatcccgggtataacccctacgtggaatgtcaggatagtgtgcgaactgtgagagtggtcgctaccaagcagggaaatgctgtgaccctgggagattattaccagggccgaaggatcactataaccggtatgtacgcagctggcaaagccgcaacatcgggagtgccctccatctacgccccctcaacgtatgcacacctgagtcccgcgaagacacctccccctcctgcaatgatcccaatgggccctgcctacaacgggtatcccggaggctacccaggtgacgtggaccgctcgagtagcgctggggggcagggttcttacgtccccctgcttagagataccgacagttctgtcgccagcgaagtccgaagcggctaccgaattcaggcctcccagcaggacgacagcatgagagtactctattacatggagaaagagctagctaattttgatcctagtaggccagggcccccctctggtcgtgtcgaacgggccatgagcgaggtcaccagtctccatgaggacgattggcgttccaggcctagccgcggcccagcacttacaccaatcagggacgaggagtggggcgggcactccccgaggtcgccacggggatgggatcaggagcccgcaagagagcaggcgggtggagggtggagggctcgtcggcctagggcgcggagcgtggatgctttggatgatctaaccccacctagtacagctgaatccggatctcggagtccaacttcaaacggcggtcgctcgagggcctacatgcctccaaggagccggtcccgagacgacttgtatgatcaggatgactccagagacttcccccgaagtagggacccccattacgatgatttcaggagtcgcgagcggccaccggcggacccccgctcccatcatcaccggacacgagaccctagagataatggatcccgtagtggcgacctgccatacgacggcagactgctcgaggaggctgttaggaaaaagggatcagaagaaagacggaggccgcacaaagaagaggaggaggaggcctactatccaccggctccgcctccctacagtgagaccgattctcaggctagcagagagagacgactgaagaagaatctggcactttcgcgcgaaagcttggtggtatag

SEQ ID NO: 6243 - DNA, 1788 bp, synthetic construct
  misc_feature 1..1788: note = source = /note="Description of Artificial Sequence: Synthetic coding sequence"
  source 1..1788: mol_type = other DNA
atggactttttgcttgcccttgtgctagtgtcctctctgtacctccaggcagcggctgaatttgacggcaggtggccgcgccaaatagtttcctccattggactctgccggtacggcgggcgcatcgattgctgttggggatgggccaggcagtcctggggccagtgccagccagtctgccagccacggtgtaaacacggagaatgtatcgggcctaacaaatgcaaatgccaccccggatatgcaggcaagacttgtaatcaggatgagcacatcccagcgcctctggaccaggggagcgagcagccactgttccaacctctggatcatcaggcaacctctcttccctcgcgagatcttaacgaatgcggcttgaagccacggccatgcaaacacaggtgcatgaatacttacggaagctataaatgctactgtctgaatggttacatgctgatgcctgacgggtcttgcagctcggcactgacatgttccatggccaattgtcaatacggttgtgacgtcgtcaagggtcaaatcagatgtcaatgccctagccccggcctgcagttagcaccagacggacgcacttgcgtggatgtggacgaatgcgcaacaggccgagccagctgtccccggttcaggcaatgcgtgaacacctttgggtcttatatatgtaaatgccacaagggatttgaccttatgtacatcggtggcaagtatcagtgccacgacatcgatgaatgctcccttgggcagtaccagtgcagtagttttgcaagatgttataacatcagaggctcctacaaatgcaagtgtaaggagggataccagggggatggcctcacttgtgtatacatccccaaggtgatgatcgagccttccggccccatccacgtgcccaagggtaatggcactatcctcaaaggcgatacaggcaacaataattggattcccgatgtggggagtacgtggtggccgcccaaaactccctatattccccccattataactaacagaccgacgtctaaacccaccacacggccaactccaaagccaactcctatccctacaccgccaccacccccccctcttcccacagagctcagaaccccactgccaccgaccacaccagagcgcccaactaccggactgacaaccattgcaccagccgcatccacacctcccggaggcattactgtcgataatcgggttcagacagatccccagaagcccaggggggatgtcttcatccctagacaaccatctaatgatctttttgaaatattcgaaatcgagcgtggtgtgtctgccgatgacgaagctaaagatgacccgggcgttctggtccacagttgcaatttcgatcatggattgtgtggctggattcgggaaaaggataatgatctgcactgggaaccgattagagacccagctgggggtcagtacctcaccgtctccgctgctaaggcgcccgggggtaaggcggcgaggcttgtcctgcctctcgggcgactgatgcactctggcgatctttgtttatccttccgccacaaggtcactggattacacagcggtaccttgcaagtatttgtgcgtaaacatggcgctcatggagctgcgctgtggggccggaatggtggccatggatggcgacagactcaaatcacccttcgcggggctgacattaaatcggtggtctttaaaggtgaaaagcgccgcggacatactggcgaaatcgggctggatgatgtttcactgaaaaagggccattgctctgaggaacgctag

SEQ ID NO: 6244 - DNA, 210 bp, synthetic construct
  misc_feature 1..210: note = source = /note="Description of Artificial Sequence: Synthetic coding sequence"
  source 1..210: mol_type = other DNA
atgaagaatcaggataagaaaaatggcgcggcaaaacaaagtaacccaaaaagcagtccgggacagccggaagctggcagttttgatagtttagatctggagaaagtctctttgggcagggcccttgcgggtcggtccgagcttggcatctcttgtctggagcagggaacctggaggatgttcctgcgggggatgatgtgctggagctag

SEQ ID NO: 6245 - DNA, 483 bp, synthetic construct
  misc_feature 1..483: note = source = /note="Description of Artificial Sequence: Synthetic coding sequence"
  source 1..483: mol_type = other DNA
atggcccgggattatgatcacctctttaagctcctcatcattggcgattccggggtgggcaagtccagccttctgctccggttcgctgataacacattcagtgggagttatataacaaccatcggggtcgattttaagattcgaaccgtcgagataaacggggagaaggtgaagctgcaaatttgggatacagccggccaggagcggttcagaactatcactagtacagcggaaacagctttacgtagcctcccgcagcctgaggctcacggcggctcatccggcgactcactctcattcgtccctctgtttaaggaattttcaccatgcttctgcattgggagatgccatcgacattttcttcctaggccaccgcgagttcctagacggtgttggacgtctcccccatttccaacaggagccccatctagccccgctaaggctcccggcccaggcgaagacgccgccaggcgcgcagactag

SEQ ID NO: 6246 - DNA, 360 bp, synthetic construct
  misc_feature 1..360: note = source = /note="Description of Artificial Sequence: Synthetic coding sequence"
  source 1..360: mol_type = other DNA
atgaataagattctctccagtaccgtgtgtttcggccttctgactctgctcagtgtcttatcctttctgcaatcagtacacggtcgtccgtacctgacacagggcaacgagatttttcctgataaaaaatacaccaatagagaagaactgcttctggccctcctgaataaaaatttcgacttccagcgtcccttcaacaccgacctggcactccccaacaagctcgaagagttgaaccagctggagaagttgaaagaacaactggttgaagagaaggacagcgagacctcatacgctgtggacgggctgttctcatctcaccccagtaaaagagcctgcttttggaagtattgtgtttag

SEQ ID NO: 6247 - DNA, 2514 bp, synthetic construct
  misc_feature 1..2514: note = source = /note="Description of Artificial Sequence: Synthetic coding sequence"
  source 1..2514: mol_type = other DNA
atgtttaagtgctggtctgtagtcctagtgctgggcttcattttcttggagtcagaaggaagaccaacgaaggaaggcggctacggattgaagtcttatcagccacttatgagactgaggcacaaggagaagaaccaggaaagctcaagagtcaaaggctttatgattcaggacggccccttcggcagctgcgagaacaaatattgcggtttaggaagacattgtgtcacttctagagagaccggccaggccgagtgcgcctgtatggacctctgtaagaggcactataaaccggtctgtggaagtgacggagaattctacgaaaatcattgtgaagtacacagggccgcttgcctgaagaaacagaagattaccatagttcacaatgaagattgcttttttaagggtgacaaatgtaaaacgaccgagtactcgaagatgaagaatatgctgttagaccttcagaaccaaaagtacatcatgcaggaaaatgaaaacccaaatggagacgatatttcccggaaaaaactactggttgatcagatgtttaagtacttcgacgctgactcaaacggactcgtagacattaacgaattaacacaggtgatcaagcaagaagagctcggcaaggatctgtttgactgtacactctacgtattattgaagtacgacgattttaatgcagacaagcacctggcgcttgaagagttttatagagcattccaggtgatccaactgtccttaccagaagatcagaagctttcaattactgccgcgaccgtggggcagtccgctgtattgtcctgcgcaattcagggaacactgcggcccccgatcatttggaaacggaataatatcattttaaacaacctggacctcgaggacattaacgactttggggacgatgggtccctctacattacgaaagtgactactactcacgtgggcaattacacatgttacgcagacgggtacgaacaagtgtaccaaacacacatcttccaggttaatgtccccccggttattagggtgtatcctgaatcacaagctagggagcctggtgtaactgcatctctgcgctgtcatgccgagggtatccccaagccacagctaggatggctgaaaaacggaatagacatcacccccaaactcagcaagcagctgacgctacaggcaaacgggtccgaagtccatatatccaacgtccgctacgaagacactggtgcatatacatgcatcgccaagaatgaagccggagtggacgaggatatctcatccctcttcgtggaagacagtgcaagaaaaacgaggctgggtatcggaaacatgttttacgtcttttacgaggacggaatcaaagtgattcagcctatcgaatgtgaatttcagagacacatcaaaccaagcgaaaaactgctgggctttcaagacgaggtgtgccccaaggctgagggagacgaagtccagcgctgtgtatgggcgtctgcagtgaacgtaaaggacaaattcatctacgtagctcaacccacgttggaccgcgttctgattgtcgacgtgcagtcgcagaaagtagttcaagccgtctccacagacccagtgccagtcaaactccattacgacaaatcacatgatcaggtatgggtgttatcttggggcactctcgaaaaaactagtcctacgcttcaggtgatcactctcgctagcggtaacgtaccccatcataccatccatacacagcctgtgggcaagcagttcgatagagtagacgacttcttcataccaacaacaaccttgattatcacccacatgcgattcggcttcatcttgcacaaagacgaggccgccctgcagaaaatcgacctggagacgatgagctatattaagactataaaccttaaggattacaagtgcgtgcctcagtccctcgcttacactcatctaggcggatactattttatcggctgcaaacctgacagcactggcgccgtgtcaccacaggtaatggtcgacggcgtgacagactcggtgatcggttttaactccgacgtgacgggtactccgtacgtgtcaccagatggccattatttagtgtcaataaatgatgtcaaagggttagtacgcgtgcagtacattaccatacggggcgaaatacaagaagccttcgacatatacacaaatcttcacatctccgatctcgcttttcagcccagctttactgaagcccaccagtacaacatctatggctcctcttccacccaaactgatgttctcttcgttgagctgtctagtggcaaagtaaaaatgattaagagccttaaagagccactgaaggctgaagaatggccttggaatcgaaaaaaccggcagatccaggattcggggctgttcggtcaatacttgatgacacctagtaaggattctctgttcattctcgatggcaggttgaacaaactgaattgtgagattactgaggtcgagaaggggaataccgtcatttgggtgggcgacgcgtag

SEQ ID NO: 6248 - DNA, 648 bp, synthetic construct
  misc_feature 1..648: note = source = /note="Description of Artificial Sequence: Synthetic coding sequence"
  source 1..648: mol_type = other DNA
atggctgatatgcagaacttagttgaacggttggaacgagccgtcgggcgcctcgaagctgtgagccatacctctgatatgcataggggctacgcggactcaccatcgaaggccggtgccgcgccatacgtgcaggcctttgactcccttttggcaggacctgttgctgagtacctcaagatcagcaaggaaatcgggggcgatgtccagaagcacgcagagatggtgcacacaggtttaaaacttgagagggcactccttgtgactgccagtcagtgccagcagccagctgagaataagctaagcgacctcctggctcccatctctgagcagattaaagaggtcatcacttttcgggaaaaaaatcgcgggtccaaactatttaaccacctatctgctgtttccgagagcatccaggcgctggggtgggttgctatggctcctaaacctggcccttatgtcaaggaaatgaacgatgccgccatgttttacacaaatagggtcctcaaggaatacaaggacgtggataagaagcatgtggactgggtgaaggcctacttatccatctggacagagcttcaggcctacattaaagagttccacactaccggcctggcttggtccaaaactggtcccgtcgcgaaatag

SEQ ID NO: 6249 - DNA, 3837 bp, synthetic construct
  misc_feature 1..3837: note = source = /note="Description of Artificial Sequence: Synthetic coding sequence"
  source 1..3837: mol_type = other DNA
atgagactgctcctattagtgcccctgttactggctcctgctcccggctcctcagccccgaaagtgcgcaggcaatccgatacgtggggaccgtggagccagtggtccccctgcagcaggacatgtggcggtggggtatccttcagagaacgaccatgttacagccagcggagggatggaggctcctcatgtgtcggacccgcgagaagtcacaggagttgtaggaccgaatcatgcccggatggcgctagggattttagagcagagcagtgtgctgagttcgacggcgcagaatttcaaggcaggagatatcgctggctgccctactacagcgccccaaataagtgcgagctcaactgcatccctaagggcgagaacttctattacaagcacagggaggccgtcgtggatggaaccccatgtgaacctggcaagcgggatgtctgcgtcgatggctcatgtcgggtagtggggtgcgatcatgaactggacagcagcaagcaggaggacaaatgcctcagatgtggtggagatggcactacgtgctacccagtggctggcacctttgatgcaaatgatctgtcaaggggctacaatcagatcttaattgttcctatgggcgcaacttcaattctcattgacgaggccgctgcttcccggaacttcttagcagtgaagaacgtgcgcggggagtattacctcaatggccattggaccatcgaggccgccagggcactacccgcagcatccacaatactgcattacgagagaggcgcagagggggatcttgccccagagagactccatgcccgaggaccaaccagcgaacctctggttatagagttgatcagtcaggagccaaacccaggtgtacattacgagtatcacttgcccctgcgtcgcccctccccagggttcagctggagccatggttcctggagcgattgtagcgcggaatgcggaggcggtcaccaaagcaggcttgtcttttgcacgatcgatcatgaggcttaccctgaccacatgtgtcagcgccagccccgacctgccgataggcgaagctgtaatctgcatccttgtcccgagactaagcgctggaaagccgggccttgggctccatgctctgcttcgtgtggggggggcagccagtcccgttctgtgtactgtatcagtagtgacggagccggcatccaggaggctgtagaagaggcagagtgcgccggactacctgggaagccgcctgcaatccaagcttgcaatctgcaacgatgcgctgcatggtctccagaaccctggggagagtgcagcgtcagctgtggagttggagtcagaaagcgatcagtcacctgccgcggagaaagaggatccctactgcataccgctgcatgcagcctggaggaccgccctcccctgacagaaccatgcgtgcacgaggactgccctctactgagcgatcaggcctggcacgtgggtacttggggtctctgtagcaagtcgtgctcttccggaactcgtcgccggcaggtgatatgtgctatcggaccgccaagtcactgtggttctcttcagcattcaaaacctgtggacgtggagccctgtaacactcagccctgtcacttgccgcaggaagtgcccagcatgcaggatgtccacacccctgcatccaatccttggatgcccctcggtccccaggaatcacctgctagtgacagcagaggccaatggtgggcagctcaggagcacccttccgccagaggcgaccatagaggggagcgaggtgatccaagaggtgaccaggggacgcatttgagcgctctgggccctgcccccagcctgcagcaacccccataccaacagccactcagatcaggatccggcccccatgattgtagacacagtccccacgggtgctgccctgatggccataccgccagccttggaccacagtggcaggggtgtcccggggccccttgccagcagagtcgctacggctgctgccccgaccgcgtgtccgtagccgaaggaccacaccacgctgggtgtaccaagtcttacggcggagatagcaccggcggtatgccaaggtccagggctgtggcctctaccgtgcataacacccaccagccacaggcccaacagaacgaacctagcgagtgtcgcggctcgcagttcggctgctgttatgacaacgttgccaccgcggcagggcctttgggtgaaggttgcgtaggccagccatcccatgcctaccctgttaggtgcttgctgccaagcgcacacggctcttgtgctgattgggctgccagatggtatttcgtggcaagcgtaggccagtgcaaccggttttggtatggaggctgccacggaaatgccaacaattttgcatccgaacaggagtgtatgtcttcgtgccagggatctctgcacggaccccggaggccacagcccggcgcttctgggagaagcacacatactgacggcggcggcagctcacctgcgggggagcaggagcccagtcagcaccggaccggcgccgccgtgcagaggaaaccgtggccaagcggaggactttggagacaggaccaacaacctggacctggcgaggccccccacacccaggcatttggggagtggccctgggggcaggagctgggaagcagagctcccgggttaggtggggacgcagggagccctgctccacctttccactcctcatcgtacagaattagcctcgcaggcgtggagccctcactggtgcaagctgcactaggacagctggtgaggctgagttgcagtgatgacacagcgcctgaatcgcaggctgcatggcagaaagatgggcagccaatcagctctgatcgccaccggctccagttcgatggatcactgatcattcacccgttgcaggcagaggacgccggaacctactcctgtgggtctactcggccaggacgcgatagccagaaaatccagttgcgtattatcggaggggatatggccgtgttgtccgaggcagaactctccagatttccacaacccagagaccctgcccaggactttggccaagccggcgccgccggtcccctgggagccatccccagttcccatccacagcccgcaaatagactccgcttagatcagaatcagcccagagtggttgacgcttctcctggccagaggatacgaatgacatgcagagccgaggggttccctccacccgccatagaatggcagagagatggccaaccagtgagcagccccaggcatcagctccagcccgatggttctctcgtgatttccagggtggcagtcgaagatggggggttctacacctgtgtggcatttaacggacaggatcgagaccagcggtgggtgcagttgagggtattaggtgagctgacaattagcgggctccccccaacagttacggtgccagagggcgacactgcacgcctcctctgcgttgtagcaggagaatccgtgaatattagatggagtcgaaacggcttaccagtgcaggccgacggccacagagtccatcagtcacccgatggtactctgcttatatataacctccgcgctagagacgaaggctcttacacttgtagcgcctaccaaggctcccaagctgtaagccgatccactgaggtgaaagttgtgtcgccagcccccacggctcagccacgggatcctgggcgggactgtgtggatcagccagaactggcaaactgcgacttaatcctccaggcacaactgtgtggcaatgaatactactccagtttctgttgcgcttcatgctcaagatttcaacctcacgcccaacccatttggcagtag

SEQ ID NO: 6250 - DNA, 546 bp, synthetic construct
  misc_feature 1..546: note = source = /note="Description of Artificial Sequence: Synthetic coding sequence"
  source 1..546: mol_type = other DNA
tgaaaggggcacgcttcgccactacccccctcagccgctccaacaacggactctactgatagtatcaccggtcaaaactcccgtcaaagggaagaggaactggagttgatagaccagctcaggaagcatatagaataccggttaaaggtgtctctgccctgtgaccttggtgctgccctcacagatggtgtagttttgtgccacttagccaaccatgttaggccacggtcggtcccaagtatacacgtcccctcaccagccgtccctaaactgaccatggccaagtgtagacgtaacgtggaaaacttcctggaggcctgccgcaaaataggggtgccacaggacaacctgtgctctccctcagatatcctccagctaaacttgagcgttaaacgcaccgtggaaaccctgctgtcactcggggcccacagtgaggaatcatcatttgtttgcctgtctttacagctcttgggcttcgtggccttctactgcactgtgatgcttacactttgtgttttgtactactggctattcccggctcggtag

SEQ ID NO: 6251 - DNA, 804 bp, synthetic construct
  misc_feature 1..804: note = source = /note="Description of Artificial Sequence: Synthetic coding sequence"
  source 1..804: mol_type = other DNA
atgggccctgaggccctctccagcctcctgctgttgctgctcgtggccagtggcgacgcggatatgaaggggcatttcgaccccgccaagtgcagatatgcactgggaatgcaggataggaccatacctgatagcgacatttctgcctcctcttcttggtccgactccactgctgcccgacactctcgattagaatctagcgatggcgatggcgcctggtgcccggcgggctcagtgtttccaaaggaggaggaatatctgcaggtagatctgcaaaggctgcatctggtcgcattagttggcacacagggcaggcacgctggagggctgggaaaagagttctcccgatcctataggctgagatatagcagagacgggcgtcgttggatggggtggaaggatagatgggggcaggaggtcatatcaggcaatgaggaccctgaaggtgtggtgctgaaagacctgggcccccccatggtcgcccgacttgtaaggttttatcctcgcgccgacagagtgatgtctgtatgcctgagagtagaactgtatggctgtctctggagggacggactgctaagctataccgctcccgtcggccagacaatgtacctcagcgaggctgtttacctcaatgattctacatacgatggccacacggttggagggctgcagtatgggggtctggggcagttggcggacggcgtagttgggcttgatgactttagaaagtcgcaagaacttagagtatggcctggttacgactacgtgggctggtcgaatcactcctttagttctggttactag

SEQ ID NO: 6252 - DNA, 345 bp, synthetic construct
  misc_feature 1..345: note = source = /note="Description of Artificial Sequence: Synthetic coding sequence"
  source 1..345: mol_type = other DNA
atggcacccaagaagctgagctgcctgaggtctctgctactgccactgtccctcacactgttgctgccacaggctgataccaggtcttttgtagtagatcgcggccacgaccgatttcttctggatggcgccccgttcaggtacgtttctggaagcctgcattatttccgcgtacccagggtgctgtgggcagatcgactgctgaagatgagatggtccggattgaacgcaattcagttttatgtcccctggaactaccatgagccccagcccggtgtgtataactttaacgggagcagggatctcatcgcgttcttgaacgaagctgctcttgccaacttatag

SEQ ID NO: 6253 - DNA, 507 bp, synthetic construct
  misc_feature 1..507: note = source = /note="Description of Artificial Sequence: Synthetic coding sequence"
  source 1..507: mol_type = other DNA
gcgcctagaatggaaatgttccaggggctgcttctgctgctgctcctgtccatgggaggtacttgggcctccaaggaacccctgcgtccgcgctgtcgccccatcaacgccaccctcgcagtggaaaaggaggggtgtcctgtgtgcattaccgtgaacactacaatttgcgccggatactgccctactatgaccagagtgctgcagggcgtgcttcccgctctgccacaagtggtctgcaattacagggatgttcgcttcgaatcgataaggctccccgggtgcccacggggagtgaacccagtcgtcagttatgctgtggcgttgtcatgtcagtgcgcactatgtagaagatctacgactgattgtggcggtcctaaggatcaccctctaacctgtgacgacccaagattccaggactcgtccagcagcaaggctcctcctcccagtctaccctccccgtccaggctgcccggcccctccgatactcctattctgccccagtag

SEQ ID NO: 6254 - DNA, 1203 bp, synthetic construct
  misc_feature 1..1203: note = source = /note="Description of Artificial Sequence: Synthetic coding sequence"
  source 1..1203: mol_type = other DNA
atggaaactcaagaactgcgcggcgcgctcgccttactgttattatgttttttcacctctgcctctcaggatctccaagtgatagacctgctgacagtgggtgagagcagacagatggtagctgttgccgaaaagattcggaccgccctgctgacagccggagatatttatttgctgtcaacatttcgcctgccacccaaacagggaggggtgctctttgggctttactcaaggcaagacaacactcgatggttggaggcttccgtggtggggaaaattaataaggtaacaaacgccttgcattccatcctcggcgagggcaatgtgcctgaccctaagcatcactacggggtatctggatttcacgagcagcggagtcactgcagtccgaacccttgcttcagaggcgtagactgtatggaggtgtatgaataccccggttacagatgtggcccttgccctcccggactccagggcaatggcacccactgttctgacataaatgagtgtgcgcacgccgacccttgtttccccggctcaagttgtatcaataccatgcctggatttcactgcgaggcttgccccagagggtacaaaggaacacaggtctctggcgtggggattgactacgccagggcgtccaagcaagtttgtaacgacattgatgagtgtaatgacggcaacaatggaggatgcgacccaaactcaatttgcaccaacacggtgggtagttttaagtgcggcccttgcagactgggctttttagggaaccaaagccaaggatgcctacctgccaggacctgtcactctccagcccattccccctgccacatccacgcccactgtttgttcgagcgcaacggggcggttagttgccagtgcaacgtgggctgggccggcaacgggaacgtgtgtggcacagatacagacatagacggatatcctgaccaggccctaccgtgtatggacaacaacaagcattgcaagcaggacaactgtcttttgaccccaaactcaggacaggaggatgcggacaacgatggtgtcggtgaccagtgtgacgacgacgccgacggtgacggcatcaagaacgtggaagccagccctatggattggactatcgcactcaaaagccctacccattatcggcagaccggaatgagaacggggtgggaaatgctggccaccgctgccttgaagtag

SEQ ID NO: 6255 - DNA, 618 bp, synthetic construct
  misc_feature 1..618: note = source = /note="Description of Artificial Sequence: Synthetic coding sequence"
  source 1..618: mol_type = other DNA
atgatgaggacattgattactactcatccactgccactcttactgctgccacaacagctgctgcagcttgtgcagttccaggaagtcgacacagatttcgatttccctgaggaagacaagaaagaggaatttgaggagtgtctggaaaagtttttttctaccggacccgcacgcccccccaccaaagaaaaggttaagagaagggtactcatcgagccaggcatgcccctaaaccacatcgagtactgcaaccatgagataatgggaaaaaatgtttactacaaacacagatgggtcgcagaacactatttcctgctcatgcagtacgacgagcttcaaaaaatttgttataataggtttgtcccatgtaaaaatggcataaggaaatgtaatcgctccaagggtcttgttgaaggcgtttactgcaatctcacagaggcctttgagatccctgcatgcaaatatgagtctctataccgaaagggatacgttctcatcacttgttcatggcagaatgaaatgcagaaaagaataccacacaccatcaatgacctggtagaaccaccggaacataggagctttctctccgaagatggtgtcttcgtgattagcccttag

SEQ ID NO: 6256 - DNA, 177 bp, synthetic construct
  misc_feature 1..177: note = source = /note="Description of Artificial Sequence: Synthetic coding sequence"
  source 1..177: mol_type = other DNA
atggatctcctgcagtttctggcctttctcttcgtcctgttgttgtccggcatgggcgctacaggaaccctgagaacttctctggatcctagcctggagatctacaaaaagatgttcgaggtgaaacgaagggaacaactgctggccctcaagaacctcgcccaactgaatgactag

SEQ ID NO: 6257 - DNA, 450 bp, synthetic construct
  misc_feature 1..450: note = source = /note="Description of Artificial Sequence: Synthetic coding sequence"
  source 1..450: mol_type = other DNA
atgaaagtcatcgccatcctcaccttgctgctcttttgtagcccgacacattcaagcttctggcagtttcaaagaagggtgaagcatattaccggccgcagcgcctttttcagttattatgggtatgggtgttactgcgggctgggcgataagggcattcccgtggacgacaccgatcggcacagcccgagctcaccatctccctacgagaagctgaaggagttctcctgtcagcccgtccttaactcttaccagtttcacattgtcaatggggctgtcgtctgtggatgcaccctgggccccggggccagttgtcactgtaggctcaaggcctgtgaatgtgataagcagtctgttcactgttttaaggaatctctgccaacatatgagaaaaactttaagcagttttcctcccagcccagatgtggtagacacaaaccgtggtgttag

SEQ ID NO: 6258 - DNA, 237 bp, synthetic construct
  misc_feature 1..237: note = source = /note="Description of Artificial Sequence: Synthetic coding sequence"
  source 1..237: mol_type = other DNA
atgggcagcgggcttcctctcgtgctccttttgacactgctggggagctctcacgggaccggccccggaatgaccctgcagctcaaactgaaggaatcttttctgactaactcctcatatgagtcctcttttttggagctcttggagaaactttgtctcctgttgcaccttccttctgggacttctgtaactctccaccatgctcggagccaacaccatgtagtgtgtaacacttag

SEQ ID NO: 6259 - DNA, 1461 bp, synthetic construct
  misc_feature 1..1461: note = source = /note="Description of Artificial Sequence: Synthetic coding sequence"
  source 1..1461: mol_type = other DNA
atgatcagcccaagcccgagccaagaggagttgcagacaacactggaagaaactgaccagtccacccaggagccctttaccaccaagatcccacgaactacagagttggcgaaaaccacacaggcaccgcaccgattttacacaactgttcgtcccaggacatccgacaagccccatatacggcccgtgctcaatcggactactacccggccgacacgccccaaacctagcgggatgcctagcggcaatggggtcggaacaggggtgaagcaggcacctcgacccagtggagctgatagaaatgtgagtgtcgatagtacccacccaacaaagaaaccggggacccgacgtccccctttacctcctcggcctacccacccacgccgcaaaccattgcctccaaataatgtgactggaaagccaggcagcgccgggataatctcctctggacccataaccacccctcctctaaggtctacacccagaccaaccggcacaccactggagaggatcgagacagacatcaaacaacccaccgtcccagcaagtggcgaagagctcgaaaacataactgacttttcctcatcacccacaagagagaccgatcccctgggcaagccgcgattcaaaggacctcacgtccggtatatccaaaaaccagataatagcccgtgcagtatcaccgactcagttaagcggtttcctaaagaagaggccacagagggcaatgctacatcacccccacagaacccgcccactaatctgacagtcgtgacagttgagggttgcccatcattcgtaattttggattgggagaagcccctgaatgataccgtgaccgaatacgaggtgatttctagggagaacgggtccttctccgggaaaaataagagtatccagatgacaaaccagaccttctctaccgtggagaacctcaaaccaaacacatcatacgaattccaggtaaaacctaaaaatcctttgggtgagggcccagtgagcaacacagtggccttctcaactgaatcagcagatccccgggtctcagagccagtatcggccggcagagatgccatctggaccgagcggcctttcaactctgattcttactccgagtgtaagggtaaacagtacgtgaaacgaacatggtacaagaaattcgtgggagttcagctctgcaactccctgaggtacaaaatctatctcagcgatagcctcaccggaaagttttataatatcggtgatcaaagaggccacggcgaagatcactgccagtttgtggacagctttctggatggacgcaccggacagcagctgaccagcgatcagctcccaatcaaggagggttacttccgcgctgtcaggcaggagcccgtgcagtttggagagatcggaggacacacccaaatcaactatgttcaatggtacgaatgtggaaccactatccccgggaaatggtag

SEQ ID NO: 6260 - DNA, 243 bp, synthetic construct
  misc_feature 1..243: note = source = /note="Description of Artificial Sequence: Synthetic coding sequence"
  source 1..243: mol_type = other DNA
tgaaacggcccagttttgtggttcaaggggaccgggcccaatcgtaaactgatttacaacttcaagcaagagcaaaacccccgccccccaaagaaccggccggccggaagagccggatctcgggcacaccacgacgctcacacgtgcctttctgccctgccagagaggaacagcaccaactacttcgtccagccatgctgctgcctgaggctgctcggcctcaccggcctgctgtcgaagtag

SEQ ID NO: 6261 - DNA, 1341 bp, synthetic construct
  misc_feature 1..1341: note = source = /note="Description of Artificial Sequence: Synthetic coding sequence"
  source 1..1341: mol_type = other DNA
atgctgcaccccgagacaagtcccgggagagggcacttgcttgccgtcctgctggcactccttggaactacatgggcagaggtctggccgccccagttacaggagcaggccccaatggctggcgcccttaataggaaagaatctttcttgctgctgtcactgcacaaccgcctaaggtcatgggtccagccccccgctgccgatatgaggcggctcgattggagtgattccttggcccaactagctcaggccagagccgcgctgtgcgggatacccaccccttcgttagcctccggactctggagaaccctgcaagtcgggtggaatatgcagcttttacccgcggggctcgcttcctttgtggaggtcgtgtcactctggtttgccgaaggacaacgctattctcacgctgcaggagaatgcgccaggaacgctacctgtactcattacacacagctcgtctgggcgacctcctcccagttgggatgcggcaggcacctgtgctctgctgggcagacagcgatcgaagccttcgtgtgcgcctattctcctaggggtaattgggaggtcaacggcaagacgatcatcccatacaagaagggtgcttggtgttcactgtgcacagcttccgtgtctgggtgttttaaggcctgggatcacgcaggggggctttgcgaagtgcctcggaatccttgtcgcatgtcatgccagaatcatggcagactgaatatttcgacctgtcattgccactgtcctcccgggtacaccgggaggtactgccaggtacgatgtagtcttcaatgtgtccatggaaggtttagagaggaggaatgcagttgcgtgtgcgacatcggttacggtggcgcacagtgcgctactaaagtccattttccatttcatacgtgcgacctgcggatagacggagactgcttcatggtttcctctgaggctgatacctactacagagcaaggatgaagtgtcagcgaaaagggggggtcctggcccaaattaagtctcaaaaagtgcaggacattttggctttttacctggggcgactggaaaccaccaacgaagtcatcgattccgacttcgagaccaggaatttttggatcggcttaacctacaagactgcaaaagacagcttcaggtgggccacgggagagcatcaggcatttacctccttcgctttcgggcagccagacaaccatggatttggaaattgtgtggagctgcaggcgagcgccgctttcaactggaatgaccagcggtgcaaaaccaggaacagatatatatgccagttcgcacaggagcacatcagtcgttggggaccaggttcctag

SEQ ID NO: 6262 - DNA, 432 bp, synthetic construct
  misc_feature 1..432: note = source = /note="Description of Artificial Sequence: Synthetic coding sequence"
  source 1..432: mol_type = other DNA
atgcaggccgcctgttggtacgtcctgtttctactacagccaacagtctatctggttacttgcgcgaacctgaccaacggcgggaagagcgaactcctcaagtccggtagtagcaagagtaccctgaagcatatatggaccgagagcagtaaggacctctccattagcaggctactgtcccagaccttccggggtaaggaaaacgatactgatctggatctccggtacgacaccccggagccctactccgaacaggatctttgggattggctccgcaacagtaccgacctgcaagagccacgccctagagctaaacgcagacctattgtgaagactggaaagtttaaaaagatgtttgggtggggtgatttccacagcaacatcaaaacggtgaagttgaacctcctcatcaccggcaaaatcgttgactag

SEQ ID NO: 6263 - DNA, 783 bp, synthetic construct
  misc_feature 1..783: note = source = /note="Description of Artificial Sequence: Synthetic coding sequence"
  source 1..783: mol_type = other DNA
atgcagggcgagccctttgcctgcctaacacatcaagagcctttgcccaagatgttcaaactgctatcaagggcatacgcagacgttcacccaatgatgatggataggagcgaaaacagatgcggcggaaatttcctgaaacggggcagcatcattaatggggctgactggtatagttttaccggtggaatgtctgactttaactacctccacaccaactgtttcgagattactgtggaactgggttgcgttaaattccctcctgaagaggccttgtatattctatggcaacacaacaaggagagtctgctgaacttcgtggagaccgtgcatcggggaattaagggtgtggtcacagacaaatttggaaaaccagtgaagaatgcccggatctccgtgaaaggcatccggcatgatataaccaccgctcccgacggagactattggcggctgctgccccccggcatacacatcgtcatagctcaggcaccgggctacgcaaaggttataaagaaagtcattattcccgctaggatgaaaagggctggcagggtggacttcatccttcagcccctgggcatgggacctaaaaacttcattcacggactgcggcggaccggaccccatgatccactaggcggggcgtcttccctgggggaagctaccgagcctgatcctctgagagccaggcggcaacccagcgccgacggatcaaagccatggtggtggagctattttactagcctatccacacatagaccccgatggctgctgaagtactag

SEQ ID NO: 6264 - DNA, 882 bp, synthetic construct
  misc_feature 1..882: note = source = /note="Description of Artificial Sequence: Synthetic coding sequence"
  source 1..882: mol_type = other DNA
atgagcagtgggggtgggtcccggggtctcttggcctggctgctcctacttcaaccctggccaggtcaaaattgggctggcatggcggcaccacgcctccctagtccactgttgagcgaggaaggaggcgagaatccggaggcctcgccagcaccagggcctgaggccggaccgccactgaacctgttcacatcatttccaggcgattccttactgtgtgggaggacacctttacgcatagtggggggggttgatgccgaggagggcaggtggccctggcaagtgtctgtccggacaaaaggcaggcatatctgtggaggcactcttgtcaccgccacttgggtgcttactgcaggccactgtatcagcagccgttttcattacagcgtgaaaatgggagataggtccgtgtacaacgagaacactagcgttgtggtctcagtgcaacgcgctttcgtgcacccaaagttcagtaccgttaccaccattcgaaatgacctggctctcctgcagctgcagcaccccgtaaacttcacgtcgaacatacaacctatctgtattccacaagagaacttccaggtggaggggcgcacgcgctgttgggtgactggatggggaaagactccagaacgggagaagctggcctccgaaatcttacaggatgttgatcagtacatcatgtgttatgaggaatgtaacaagataatccaaaaagcactttcctcgactaaggatgtgataatcaaaggcatggtgtgcggttataaggaacaaggtaaggactcgtgtcagggggactccggcggacgcctggcatgcgaatataatgatacatgggtgcaggtgggcattgtctcttggggcattgggtgcgggcggtag

SEQ ID NO: 6265 - DNA, 870 bp, synthetic construct
  misc_feature 1..870: note = source = /note="Description of Artificial Sequence: Synthetic coding sequence"
  source 1..870: mol_type = other DNA
atgtttgtgctgttgtacgtgacttctttcgctatttgcgcgtctggccagcccaggggaaaccaactgaagggagagaactatagcccccgctacatttgctcgattcccgggttgccaggtccaccgggaccccctggtgccaacgggagcccaggtccacacgggcgcatcggattgcccgggcgggacggcagggacgggcgtaaaggtgaaaagggcgagaaagggaccgcaggtcttagaggcaaaaccggcccactggggctagccggcgaaaagggtgatcagggggaaactggtaaaaaaggacctatcggacctgaaggagaaaagggcgaggtcggacccattggcccacccggtcctaaaggcgaccgcggagaacagggtgatccaggcttgcctggggtctgcagatgcggatccatagtcttaaagagcgcattctctgtcgggataactacttcgtaccctgaggagaggctgcccatcatctttaacaaagtccttttcaatgaaggcgagcactacaaccccgccacgggaaagttcatatgtgcctttcctgggatatactacttctcctacgacataaccttggccaataagcatctcgccatagggctagtacataacggccaatatcgcattaaaacattcgacgcgaacactggcaatcatgacgtggcaagtgggtcaacagtgatatatctgcagccagaagacgaggtttggttggaaatcttctttacggatcagaacggtctcttttctgacccgggctgggccgattctctgttcagcgggttcctattgtacgtcgatacggactatttggattccatatccgaagatgacgaactgtag

SEQ ID NO: 6266 - DNA, 2742 bp, synthetic construct
  misc_feature 1..2742: note = source = /note="Description of Artificial Sequence: Synthetic coding sequence"
  source 1..2742: mol_type = other DNA
atggggcctgaggctctatccagtcttcttctcctgttgctcgtggcctccggagatgccgacatgaaaggccactttgacccagccaagtgccggtatgcgctgggaatgcaggataggactattcccgatagcgacatctccgccagctccagttggtctgacagcactgcagccaggcactcgagactggaatcatcagatggggacggagcatggtgtccagccggatccgtgttcccgaaggaggaagagtacctgcaggtggacttacagcggctccacctggtcgcattagttggtacccaaggccgccacgcggggggccttggcaaagagttttcccgtagctaccgtctgaggtacagccgggatgggcggaggtggatgggttggaaagatcgttggggccaagaggtcatttcaggtaacgaagatcctgaaggagtggtgctaaaagatttagggcctccaatggtcgccaggttagtccgcttttaccccagagccgaccgcgtgatgagcgtgtgcctgcgggtggaactgtacgggtgtctgtggcgcgacggactgctgtcatacaccgcacccgtcggtcagacaatgtacctgtccgaagcagtgtatcttaatgactcgacgtatgatggccacacggttggtggtctacaatatggcggcctgggccagctggcggatggagtagttgggcttgatgatttcaggaagtcacaggaactgagagtgtggcccggctatgactatgtgggatggtctaaccattccttcagctctgggtatgttgaaatggagtttgaatttgatcgcctgcgtgccttccaagcaatgcaagtccactgtaacaatatgcacaccctcggagctagattgcccggtggagtcgagtgtagattcagaagaggccccgctatggcctgggaaggagaaccgatgcgccacaacttaggcggaaacttgggggatccccgggcaagggccgtgtcagtcccacttggggggagggtggcccgcttcctacaatgcaggttcctatttgccgggccctggctcctttttagcgaaatatccttcatctctgatgtggtgaacaacagcagcccagccttgggggggacgtttccccctgctccctggtggccaccggggcctcccccaactaatttctcatctctggagctggaaccccggggtcagcagcctgtggccaaggccgagggatcccccaccgccattctgattggttgcctagtggccatcatccttcttttgctgttgatcatagctctgatgctctggagactgcactggaggagactactcagtaaagccgagcgcagagtgttggaggaagagctgaccgtccacctgagtgtgccaggagatactatcctgatcaataatcgccccgggccgcgcgagccccccccctatcaagaacctcgccccagagggaacccaccccattccgccccctgcgttcctaatggcagtgccctgttactgtccaatccagcataccgcctcctcctcgctacctacgctaggcccccacgcggaccggggccacctactcctgcctgggccaaacctaccaatacccaggcatactccggagattatatggagcccgaaaaacccggagcccctcttttacctccacccccacagaattccgtaccacactacgcagaggcagacatcgttaccttgcagggggtgaccggcggaaatacctacgctgtccctgccctgcctcctggtgcagtaggcgacgggccccccagagtggactttcccaggagccggttgaggtttaaggagaaactgggagaaggtcagttcggcgaggtgcacctgtgcgaggtggactccccccaagatctggtctccctagactttcccttgaacgtccggaaaggacatcctctcctcgtggcagtcaagatccttcgacccgacgctacaaagaatgcacgcaacgacttcctcaaggaagtgaagataatgtcacggctcaaagaccctaatatcatcaggcttttgggagtttgtgtccaggatgatccactctgtatgatcacagattacatggagaacggagatttgaatcagtttctttctgctcaccagctggaggacaaagcagcagaaggtgcacctggagacggtcaggctgcccagggtcccacaatatcttatcccatgctcctgcacgtggccgcacagatcgcttccggtatgcggtatctcgccaccctgaattttgtgcatagggacctggcgactcggaattgtctggtcggcgagaacttcaccataaagatagctgatttcggcatgtcccgaaatctgtacgccggcgactactacagggtgcagggcagggctgtgttgcctattaggtggatggcctgggaatgcattttgatggggaaatttaccacagccagcgatgtgtgggccttcggggttacactgtgggaggtgcttatgctgtgtcgggcccaaccattcggccagctcactgacgagcaagtgattgaaaacgccggtgagttcttcagggaccaaggacggcaggtgtacctttcccggccccctgcttgcccgcaggggctatacgagcttatgctgaggtgttggagtagagagagcgagcagcgccctccattcagtcagctgcacagatttctcgcggaagatgccttaaataccgtgtag

SEQ ID NO: 6267 - DNA, 1089 bp, synthetic construct
  misc_feature 1..1089: note = source = /note="Description of Artificial Sequence: Synthetic coding sequence"
  source 1..1089: mol_type = other DNA
atgcgaactctttttaacctgctatggcttgcccttgcttgttcacctgtgcataccaccctgtcgaaaagcgatgcgaaaaaagccgcgtccaaaacgctgctggagaaatcccaattctccgataagcctgtgcaggaccggggcctggtcgtaaccgacttaaaggccgaatctgtcgtcctcgagcaccgctcctactgctcggctaaggcaagagatcgacattttgcaggagacgttctgggctacgtcactccatggaacagccatggatatgatgtgacaaaagtgttcgggagtaagttcacccagatcagtcctgtgtggctccagctcaagcgtcgtggtcgggaaatgtttgaggtgactggcctgcatgatgtggatcaggggtggatgagggccgttaggaaacatgccaaggggctgcacattgttccccgtctgcttttcgaagactggacttacgacgacttccggaacgtcctggattccgaggacgagatcgaggagctctccaagacagtggtgcaggtggcgaagaatcagcactttgatggttttgtcgtcgaagtgtggaatcaactcctatcgcagaagcgtgtgaccgatcaacttgggatgttcacccataaggaattcgagcaactggctccggtcctcgacggtttttccctcatgacatacgattattccacggcgcaccaacccggacctaacgccccactatcttgggtccgagcttgtgtacaggtattagatcccaaatctaagtggcggagtaagattttgctcggacttaatttttatggaatggactatgctacaagcaaagatgctagggagcctgtggtgggggcacgatacatccaaacgctaaaggatcacagaccaaggatggtctgggactcacaggcatctgagcatttttttgagtataagaaaagtcgctcaggccgacacgtagttttttaccctacgctgaaatcactgcaagtaagactcgagctcgcaagagaattaggcgtgggggtttccatctgggagctgggacaggggctcgattatttctacgacctgctctag

SEQ ID NO: 6268 - DNA, 1350 bp, synthetic construct
  misc_feature 1..1350: note = source = /note="Description of Artificial Sequence: Synthetic coding sequence"
  source 1..1350: mol_type = other DNA
atgaagtttcagggacccctggcttgcctccttctggcgttgtgcctgggctcaggcgaggccgggccattgcaatccggggaggagtccacgggcacaaacatcggagaagctctgggacatggactgggagacgcattatccgagggagtggggaaggccattggcaaggaggcaggcggcgctgctggctctaaggtttccgaggctttgggacagggaacccgggaggctgtgggcacgggagtgaggcaggtcccaggcttcggcgtagctgacgctctgggcaatagagtgggcgaggcagctcacgccctgggaaacaccgggcatgagatcggcaggcaagctgaggatgttatccgacatggggccgatgcagtgagagggtcctggcagggcgtgcccggccataatggagcctgggaaacaagtggcggtcacggaatcttcggaagccaaggaggcctaggcgggcagggccagggtaacccaggaggcttagggactccgtgggtccacgggtatccaggtaactcagccggctctttcgggatgaatcctcagggagcgccgtgggggcagggaggcaacggagggcccccaaacttcggtacaaatactcagggcgcagttgcacagcccggctacggatctgtgcgggccagtaatcagaacgaaggatgtaccaatcccccaccaagtggctcaggaggggggtcttctaattcaggaggctcctcgacaggctcctcctccggtaatcacggtgggtccggcggcggaaatgggcacaaaccggggtgcgaaaaacccggcaacgaagcccgaggcagtggggaaagcggaattcaaggccaagggagctcctggggatctggcggaggggatgccgtgggcggggtcaatacggttaactccgaaacgagccccgggatgtttaacttcgataccttttggaaaaactttaaaagcaagctgggattcattaactgggacgctatcaacaaaaatcaggttccccccccgtccactagagctctgctatatttctccagactctgggaggatttcaagcaaaacactccttttttaaattggaaagctattatcgagggcgccgacgcttcgagtctgcaaaagcgagccgggcgcgacgatcagcctggcgccggctggcaagaggttgctgctgttacgagcaaaaattataactacaaccagcacgcttatcccactgcttatggtgggaagtactccgtcaagacccctgcgaaaggtggagtttccccaagctcttcagcttcccgggtccaacctggactgttgcagtgggtgaagttctggtag

SEQ ID NO: 6269 - DNA, 735 bp, synthetic construct
  misc_feature 1..735: note = source = /note="Description of Artificial Sequence: Synthetic coding sequence"
  source 1..735: mol_type = other DNA
atgtggggtgcccctctgcctaggcggcccgtgtgggacgtaaggtctgctagcgctgggccccagccttgcctgggtggaaagatgaagttaaacctggtgcagatcttctttatgctactgatgttactcctgggccttgggatgggactcggtctgggactgcacatggctacagccgttctagaggaaagtgaccaaccacttaacgagttttggtcaagcgactctcaagataaagctgaggcaacagaggagggcgatggaacacagacaacggagaccctggtcctgagtaacaaggaggtcgtgcagcctggttggcctgaggaccctatactgggggaagatgaggtggggggcaacaagatgctaagggcctctgcattgttccagagcaataaggactacctccgtctggatcaaaccgacagagagtgcaatgatatgatggcgcacaagatgaaggagccttcccagtcctgcattgcccagtatgcattcatacatgaagacctgaataccgtgaaggctgtgtgtaatagtccggttatcgcctgcgaacttaaaggaggaaagtgtcataaatcatccagaccatttgatctgacgctgtgtgagttgtcgcagccagatcaggtcacccctaattgcaactacctcacgtccgtgatcaaaaagcacataattataacgtgtaacgatatgaaaagacagctccctactgggcaatag

SEQ ID NO: 6270 - DNA, 1728 bp, synthetic construct
  misc_feature 1..1728: note = source = /note="Description of Artificial Sequence: Synthetic coding sequence"
  source 1..1728: mol_type = other DNA
atggcatcatggttacgccggaaattgagagggaaaagaaggccagttatagcgttctgtttactcatgatattaagtgctatggccgtgacccgattcccaccgcaaaggcctagcgccggacctgatcctgggccgatggaacctcagggcgtcaccggggcacctgcaacgcacatccgccaggctctcagctcctccagaagacaaagggctcgcaatatgggtttttggcggtctcgtgccctcccccgtaacagtatactggtgtgcgccgaggaacagggacacagagcaagggtagatcgctctagagagagtccaggcggagacctccgtcacccagggagagtgcggagagacatcactctttcgggccatcctcgtctctctactcagcacgtggtcctactaagggaggacgaggtcggtgatcctggtacgaaggacctcgggcacccacagcatggttccccaatccaggaaacacaaagtgaagttgtaacccttgtctcccctctgcctggatccgacatggccgcacttccggcctggagggccaccagtggtttgacactgtggccacacacggctgagggacgggacctgctcggggcggagaatagagcccttactggaggccagcaggctgaggaccctacattggctagcggagcccatcaatggccgggctccgtcgaaaaactccaggggtccgtctggtgcgacgccgagacgttactgtcctccagcaggaccggggggcaagctccaccatggttgaccgatcatgatgtgcagatgctgcggttgctcgcccagggcgaagtggtcgataaggcaagggtcccagcccacggccaggtgctgcaggtgggcttcagcactgaggcagctctgcaggatctgagtagcccccgcctgagtcaattgtgttctcaagggttgtgtggtctaataaaacgaccaggggatctaccagaggtcctgtctttccacgtggacagagtcttagggctgagacgttctctgccagcggtcgccaggaggttccatagcccgctgctcccctacaggtataccgacggtggcgccagacctgtcatctggtgggcccccgacgtgcaacatctttccgaccccgacgaggatcagaactctttggccctcggctggcttcagtatcaagctctcctggcacactcctgcaactggccaggccaggccccctgcccaggaatacatcatactgagtgggctagactcgcgcttttcgactttttattacaagtccacgatcggctggaccgctactgctgcggcttcgagcccgaacctagcgacccatgtgtggaggagcgcttacgcgaaaagtgtcagaacccagccgaactacgcctagtgcatatattggttcgcagcagcgatcccagtcatctggtatacatcgacaatgccggaaaccttcagcatcccgaggacaaacttaattttcggctgttggagggcattgacggattccccgaatctgccgtaaaagttttggccagcggctgcctacagaacatgctcctcaagtccttgcagatggatccagtgttctgggaatcccagggcggtgcccagggcctgaaacaggttcttcagaccttagagcagagaggtcaggtgctgctcgggcacatccaaaagcataacctgacactgtttagagatgaagacccgtag

SEQ ID NO: 6271 - DNA, 390 bp, synthetic construct
  misc_feature 1..390: note = source = /note="Description of Artificial Sequence: Synthetic coding sequence"
  source 1..390: mol_type = other DNA
atggcggccggatcggctccgatgcagttgcatctcagggccaccatcaggatgaaagatggactctgcgtgcctcgaaagtggatctatcacttaaccgaaggctctaccgatttaagaacagagggaaggccggacatgaagactgagctcttctcctccagctgccccggaggcataatgctgaatgaaaccggccaggggtatcagcggtttctgctgtataataggtctccacacccacctgagaaatgtgttgaggagtttaaatctctgactagttgtctggactccaaggcctttctgctgaccccccgcaaccagggtaaaggcctgaaatcacacaagacaggattgggcctgacgaaaagctctggggtgacagggtag

SEQ ID NO: 6272 - DNA, 567 bp, synthetic construct
  misc_feature 1..567: note = source = /note="Description of Artificial Sequence: Synthetic coding sequence"
  source 1..567: mol_type = other DNA
atgtttcaccagatttgggccgccctgctgtacttttacgggattatcctgaacagtatctaccagtgtcccgaacactctcagttaaccaccctgggtgtggatggtaaggaatttccagaagtccacctcggccagtggtatttcatcgccggtgctgcccctacaaaagaagagctggccacattcgaccccgtcgacaatatagtgtttaatatggcagctggaagcgcccccatgcagctccacctccgggccacgattaggatgaaggacggattatgtgtaccccgcaaatggatctaccatctgacagagggctctacagatctacggacagaaggtcgccccgacatgaagacagaactgttctctagcagctgcccaggcggtatcatgctcaatgagaccggacaggggtaccagagatttctgctttacaatagatctcctcatccacccgagaaatgcgtcgaggagttcaaaagtctgacctcgtgtctcgactccaaggcattcctcctgacacctaggaatcaggaagcgtgtgagttgagtaacaattag

SEQ ID NO: 6273 - DNA, 2676 bp, synthetic construct
  misc_feature 1..2676: note = source = /note="Description of Artificial Sequence: Synthetic coding sequence"
  source 1..2676: mol_type = other DNA
atgttacccacagaagtgccccagtcccacccaggaccatcagcccttttgctcttgcagctgctcctccctcccacgtccgctttcttcccaaatatttggtcactactggccgcccctgggagcatcactcatcaagatttgaccgaggaggctgctttaaacgtgactttgcagcttttcctcgagcagcccccaccaggtagacctccccttcggttagaggactttctggggcggacgttgctggctgacgacttatttgcggcttacttcggacctggtagttctagacgattcagggctgcactgggggaggtgtctagggccaacgcagcacaagacttcttgcctactagtcgaaacgatcccgacctgcactttgacgctgagcggctgggccaggggcgcgcaagactcgttggcgcactgcgtgaaacagttgtggcagcacgggctctggaccacactctggcaagacagcgtctgggtgccgctctgcatgccctgcaagatttttattctcactcgaactgggtcgaactgggggaacagcaaccacatcctcacctgctctggcccagacaggagcttcagaacctcgctcaggtggccgatccaacgtgttctgactgtgaagagctgtcttgtccgcgtaattggcttgggtttacactgctgacctccggatactttggcacccaccctccaaagcctcccggaaagtgctctcatggcggccacttcgatcggtcgtcaagccagccccctagaggaggcataaacaaggattcaacatcaccaggtttctcccctcaccacatgctgcaccttcaagccgcgaaacttgccctgctcgcctctattcaggctttctcgcttttacgaagccgacttggcgatagagactttagcaggctgctcgacatcacccctgcctcaagtctctcttttgtgttagatactaccgggtccatgggggaggagattaatgcagcgaagatccaggcacgacacctggtcgagcagaggcgtgggagccctatggagcctgttcattacgtcttagtcccctttcacgaccccggcttcggtccagtgttcactacctctgaccctgacagcttttggcagcagctgaatgagattcacgctctagggggtggcgacgaaccggaaatgtgcctctcagcccttcagcttgccctgctgcacacacctccgctctcagacatctttgtgtttacagatgctagtccaaaggatgccttcttgacaaaccaagttgaatctctgacccaagagagacggtgccgggtgacattcctggtcactgaagacacttcccgagttcaggggagggcaagacgagaaattcttagtcccctgcgctttgagccatacaaagccgtcgctctggcctctggaggcgaagtcatcttcacaaaggatcagcatattcgcgacgttgccgcaatcgttggggagagtatggccgctctcgtgaccttgccactcgatccccccgttgttgtgccgggacagccgctggtgtttagcgtcgatggcctcctacaaaaaatcaccgtgcgcattcacggggatattagcagcttttggattaagaatcccgcaggcgtcagccagggccaggaagagggaggaggccctctcggccatactcgcagattcggccagttctggatggtcacgatggacgaccctccgcagactggtacctgggaaatacaagtcacggctgaggacactccgggcgtaagagtgcaggctcagacaagcctcgacttcctgttccatttcggcattcccatggaggacggtccccacccaggattgtaccccctgacgcagcctgtggccggccttcaaacacagctgctcgtcgaagttaccggattaggttcgcgggccaatcccggagaccctcaaccgcattttagccatgtgattctaagaggggtgccagaaggggccgaactggggcaggtgccccttgaacccgtgggcccacccgagcgggggttattggccgcttccctgtcacctactctgctctcaacaccaaggcccttctcactcgaactgatcggccaggacgctgcaggaaggcggctgcaccgggcggcacctcagccatccacggtggtgccggttttgttggagctaagcgggccctcaggattcctggcccccgggagcaaggtgcctttatccctgcgaatcgctagctttagcgggccacaggacctcgacctacgcacttttgtgaatccatctttctctctgacttccaacttatcccgtgctcacttagagttaaatgaatccgcttggggacgtttatggctagaagtaccggacagtgccgccccggattctgtggtcatggtgacagtgactgctggcggcagagaagctaatcccgtcccacctacgcacgcctttttgcgccttctcgttagcgcccccgcgccccaagatcggcacaccacacctactggatcgtccgatcctatcctgaccaccgccacaccagccttcagcccgtttacactggttacacagggacgagctggtgccggcctggccgcgggttccccttggtggggtacagtgggcggggtcttgctcctcctgggtctggcctcttggtag

SEQ ID NO: 6274 - DNA, 2742 bp, synthetic construct
  misc_feature 1..2742: note = source = /note="Description of Artificial Sequence: Synthetic coding sequence"
  source 1..2742: mol_type = other DNA
atgggccccgaggcgctgtccagcctgcttcttctgctcctggtcgcatcaggagatgcagacatgaaaggtcactttgatcccgctaagtgccgttatgcccttgggatgcaagataggacaattcccgactcagacataagcgcctcaagcagttggtctgactccaccgccgctcggcactcccggctcgagagcagcgacggtgatggcgcgtggtgccccgccggctctgttttcccaaaggaagaggagtatctccaggtagacctgcagcgtctgcatctcgtggcgttggtcggcacacagggaaggcatgctggaggcttaggcaaagaattctcccggtcatacaggctaagatattctagggatggtagacgctggatggggtggaaagaccgttggggtcaagaggtcatctctgggaatgaggacccagaaggtgtggtcttgaaagatctcggtccccccatggtggctcggcttgtgcgcttttacccccgcgctgacagggtaatgtccgtctgcctcagggtcgaactgtacggctgtctttggagggacgggttactgagttataccgccccagttggccagaccatgtacttatctgaggcagtgtacttaaatgatagcacttatgacggacacacagttggcggtttgcaatacggaggcctgggccaactggcagacggggtggtgggactggacgactttaggaagagccaggagcttagggtgtggccagggtacgactacgtggggtggagcaaccactccttttccagtggctacgtggagatggagtttgagttcgaccgcctgcgtgccttccaggccatgcaggtccattgtaataatatgcacacactgggagccaggctgcccggcggcgtggaatgtagattccgaagaggtcccgctatggcctgggagggagaaccaatgcgccacaatctcgggggcaacctgggggacccccgtgcccgagccgtcagtgtgccgctgggcggaagggtggcaaggttcctgcagtgcaggttcctatttgccggcccttggctcctgttctccgagatctcattcatttcagacgttgtgaacaattcctcacccgccctgggcggcacatttcccccagcaccatggtggcctcctgggcctccacctactaatttttcctctctggagttggagcccagaggccagcagcccgtggccaaagcagaagggagcccgactgcgattctcattgggtgtcttgttgcaatcattctcctgcttctcttaatcattgccctgatgctctggcggctccactggaggcgccttttgtccaaggctgagcgcagggtgttggaggaggaattgaccgtccatcttagcgttcctggcgataccatcttgattaacaatcgacccgggcctagagaacctcctccatatcaggaaccacgcccccgcggcaacccgccacatagtgctccctgtgtgcccaatggatctgccctcctgctgtcaaatccggcctacaggcttctgttggcaacttatgcaagaccccccagaggtcccggcccgccaactccagcttgggccaagcccacaaatacacaggcatatagtggagactacatggaaccagaaaaaccaggcgcccctttactccctccaccgccccaaaattccgttccccattacgccgaggccgacatagtgacgttgcaaggcgtaacaggtggcaatacctacgctgtgccagctctgcccccaggagccgtgggcgatgggcccccacgggtggactttcctaggtcccgactcagatttaaggaaaagctgggggaaggccagttcggggaagtgcacttgtgcgaagtggattccccccaggacctcgtgtctctggacttccccctgaacgtgcgcaaaggacaccccctgttggtcgccgtaaaaatcctgcggccggacgcaacaaagaacgcacggaacgattttctcaaggaggttaagataatgtcccggttaaaggaccccaatattatcaggttactgggcgtctgtgtccaggatgaccctctctgtatgattacagactatatggagaacggcgacctgaaccagttcctcagtgcacaccagctggaagataaggctgccgaaggtgcccctggggatggccaggcagcacaggggcccaccatctcctaccctatgttgcttcatgtcgcagcacagatagcttctggtatgcgctacctggcaacccttaatttcgtacacagggacctggctactcggaactgcctggtgggagagaatttcaccattaaaattgctgatttcggtatgagtcgcaatctatacgccggagattattatagggtgcagggtcgggccgtcctgcccattcgttggatggcatgggagtgtatcctcatgggcaagtttactacggcctcagatgtctgggccttcggggtaactttgtgggaagtgcttatgctctgtagagcccagccctttggtcagctgaccgacgaacaggtgattgaaaacgccggcgagttctttcgtgaccaggggcggcaagtttatttgtcaaggccccccgcttgccctcaaggcttgtacgaattgatgcttcgctgttggagccgcgaatctgagcagcgacctcccttttctcagctgcatcgttttctggctgaggacgctctcaatacggtatag

SEQ ID NO: 6275 - DNA, 453 bp, synthetic construct
  misc_feature 1..453: note = source = /note="Description of Artificial Sequence: Synthetic coding sequence"
  source 1..453: mol_type = other DNA
atgagatttatggctggtccagccggttcacagtcactcggccctttgtgttttcatagcagtccccaggccttatatacagtgctgctgatcgtcctggtgatgatgtccctcgtgttcggcaaattcgtccccgtaaattgggaaccaccacagccacttccatttcccaagtaccttagatgctaccgatgcctgttagagaccaaagagttggggtgccttctgggctccgacatctgtctcacccccgccggcagttcctgtattaccctgcacaagaagaattcaagcgggagcgacgtcatggtctcagactgtaggagtaaggaacagatgtcggattgttcaaacacgcgaacatcccccgtgagcggcttctggatcttcagccagtactgtttcttagatttctgtaatgatccccaaaacaggggtctatacacaccctag

SEQ ID NO: 6276 - DNA, 192 bp, synthetic construct
  misc_feature 1..192: note = source = /note="Description of Artificial Sequence: Synthetic coding sequence"
  source 1..192: mol_type = other DNA
atgggacccgaggccctaagttccctgctcctgctactattagtagcttccggggacgctgacatgaagggacatttcgatcctgccaagtgtagatacgctttgggcatgcaggacagaaccattcccgactccgacatcagcgccagcagctcatggtccgactctaccgccgcaagacactcacggtag

SEQ ID NO: 6277 - DNA, 1212 bp, synthetic construct
  misc_feature 1..1212: note = source = /note="Description of Artificial Sequence: Synthetic coding sequence"
  source 1..1212: mol_type = other DNA
atgcagggaactccaggcggtgggactcggcctggaccctctcccgttgatagaagaacacttctggtgtttagctttattctggcagccgcgctggggcagatgaattttaccggagatcaagtgctgcgcgttctggcaaaggatgaaaagcagctaagcttattaggagatttggaggggctgaagccacagaaagtcgatttttggcgtggacccgcgagaccatccctcccagtcgatatgagagtcccattttccgagctcaaagatatcaaggcctacctggagagtcatggactggcctactccatcatgatcaaggacattcaagtcctcctcgacgaggaaaggcaggccatggccaagagcagacgactagagcgatctacaaatagcttctcttatagctcttaccatactcttgaggaaatttactcctggatcgataacttcgtgatggagcacagtgatatagttagtaaaatacaaattggtaatagttttgagaaccagtccatcctagtgctcaagtttagcacaggaggctctaggcacccggctatctggattgatactggaattcattctagagaatggatcacacacgctacaggaatatggacagcgaacaaaatcgtctcggactatggaaaagatagagtgttaacagacatcctgaacgccatggacatatttatcgaacttgtaactaacccagatggattcgccttcactcatagtatgaacaggctctggcgtaaaaataagagcatcaggccaggcattttctgcattggagtggatcttaacagaaattggaagtcagggtttggtgggaacggctccaatagcaatccctgtagtgaaacttatcatggccctagtcctcagagcgagccagaagtggctgccatcgtgaacttcatcaccgcacatggcaattttaaggcattgatatcaattcacagttatagccagatgctgatgtatccttacggacgcttgctggagccagtaagcaaccagagggagttgatgtggccagtcggaagcccttcaaccgggccaatgaccgttgcctcaagtacgccaagcgcattatcgtctggcactcttggttccatggcctcctgctgcagaccacatcgatcttctccccgtcctagacgcaggggctggcggttcggcccaagttggtcaacaccttag

SEQ ID NO: 6278 - DNA, 1542 bp, synthetic construct
  misc_feature 1..1542: note = source = /note="Description of Artificial Sequence: Synthetic coding sequence"
  source 1..1542: mol_type = other DNA
atggccccggctaggacgatggctcgcgccaggttggcccctgccggtatcccagccgtggccctttggctgctctgcacactggggctgcagggcacacaggcagggcctcctccggctccgccgggacttcccgctggggccgactgccttaattcttttactgctggtgtcccaggcttcgtgctggacacaaacgcatcagtgtccaacggagctaccttcctggagtcccctaccgtcagacgggggtgggattgtgttcgagcatgttgcacgacccagaactgtaacctcgctctggtcgaactccagcctgacagaggggaggacgctattgcagcatgtttccttattaactgcttgtacgagcagaattttgtatgtaagttcgcacctagagaaggctttattaattatctaacccgggaagtctataggtcatatagacagctgcgaactcaaggcttcggggggtccggtattcccaaagcctgggccggcattgatctcaaagtccagccccaggaaccactggttctcaaagacgttgagaacaccgattggcgactgctgaggggggacacagacgtgcgggtggagagaaaggatccaaatcaggttgaactgtgggggctgaaggaggggacttatttatttcagctgacggtgactagttcggaccaccccgaagatacagctaatgttacagtgacagtcctgtccaccaagcaaacagaggactattgtctcgcctcaaacaaggtcggccgatgtagaggttcctttccaaggtggtactatgatcccactgaacaaatatgcaagtcgttcgtgtatggagggtgtttgggaaacaaaaacaattatctgcgagaagaggaatgtattttagcctgtagaggggttcagggcccaagcatggagcgcagacaccctgtgtgctccggcacctgccagcctacacagtttagatgctcgaacggatgttgcatcgacagctttctggaatgcgatgacacgccgaattgcccggatgccagtgatgaggccgcctgcgaaaagtatacctcagggtttgatgagctccagcgcatacacttcccctcggacaagggacattgcgtggacctgccagacacgggtctgtgtaaggaaagcatcccccgctggtactataatccattttctgagcattgtgcccggttcacatacggtggctgctacgggaacaaaaataactttgaggaagagcagcagtgtttggaatcctgccgtggcattagcaagaaagacgtctttggactcaggagggagatacctatcccttctacaggttccgtcgagatggcggtcgcggtcttcttggtgatctgcattgtcgtggtggttgcaatactaggatactgtttcttcaaaaaccaaagaaaggatttccacggtcatcatcatcatcccccccctacgcctgcatcttccacagtaagtaccacagaagataccgagcatctggtgtataaccacactactcgccctctgtag

SEQ ID NO: 6279 - DNA, 798 bp, synthetic construct
  misc_feature 1..798: note = source = /note="Description of Artificial Sequence: Synthetic coding sequence"
  source 1..798: mol_type = other DNA
atggcgccttggagtcacccatcagcccagctgcaacctgtcgggggtgatgcagtgtctcctgctttgatggttctgctgtgtcttgggctaagcttgggcccaagaacacacgtacaagcaggcaatctgagtaaagcaactctgtgggcagaaccaggctcagtaatttctcgaggaaacagtgttaccattagatgccaaggcacattagaggctcaggaatatcgactcgttaaggagggatcaccagagccctgggacacccaaaatcctctcgaaccaaaaaacaaagcccgattttccatcccatctatgactgaacatcatgccgggcgttacaggtgttattactactcccccgctggctggtccgagccaagcgatccgcttgaactcgtggtgaccggtttctataacaagccaaccctgtccgcacttccttcccccgtcgtcacctctggggaaaacgtaacgctgcagtgtggatccagacttcggttcgatcggttcatcctcactgaagaaggggaccacaagctgtcctggacgttagattctcagctcaccccgtcggggcagtttcaagctctgttccccgtgggccctgtgacaccatctcacagatggatgctaagatgttacggctcgcgccgccatattctccaggtctggtcagagccctctgatcttctcgagatcccggtctccggggaggaagccactgttttcagttctaccatacagggaagccagaccggatgcggggagctttatcgccaagggtcaccttgttag

SEQ ID NO: 6280 - DNA, 795 bp, synthetic construct
  misc_feature 1..795: note = source = /note="Description of Artificial Sequence: Synthetic coding sequence"
  source 1..795: mol_type = other DNA
atggaaaagcctatactcaagaatttaaatgagatgctgtgccccatcattgctagtgaggtgaaggcattgaatgccaacctgagtacacttgaggtgcttaccaaaatagacaactatacattgttggactactctctcatcagctcaccggagattacagagaattacctcgacctcaatctgaagggggtattttatccccttgagaatttgaccgaccccccctttagccctgtgccttttgtcctccccgagaggagtaattctatgctgtacatcggcattgccgagtatttctttaaaagcgcctcattcgctcacttcactgctggcgttttcaatgtcaccctctctacagaagagataagtaatcactttgtccagaattctcagggcctcgggaatgtcttatcaagggttgccagtacatcggtgggattggtgatcctcgggcagcgcctagtgtgcagcctctccctgaacagatttcgccttgccttgcccgagtctaatcgctcgaacattgaggtactcaggtttgagaacatcctaagcagtatcctccattttggcgtcttgcccctggccaatgccaagctccagcaggggttcccccttagcaaccctcacaaattcctgttcgtaaatagtgacatcgaggtgctggagggcttcttgctgattagtaccgatctcaaatatgagacgtcgagcaaacagcagccatctttccacgtatgggagggattgaacctgataagccggcaatggagaggtaagtctgccccatag

SEQ ID NO: 6281 - DNA, 117 bp, synthetic construct
  misc_feature 1..117: note = source = /note="Description of Artificial Sequence: Synthetic coding sequence"
  source 1..117: mol_type = other DNA
atgaacaaaattctgtccagcaccgtgtgctttggtcttctcaccctactgtcagtactcagttttctccagagtgtgcacgggcgcccttatctgacgcaaggcaacgaaatctag

SEQ ID NO: 6282 - DNA, 567 bp, synthetic construct
  misc_feature 1..567: note = source = /note="Description of Artificial Sequence: Synthetic coding sequence"
  source 1..567: mol_type = other DNA
atgttccaccagatctgggctgccttactgtacttttacgggatcattctgaattctatctatcagtgccctgaacatagtcagctcacaaccctgggagttgatgggaaggaatttccggaagtgcatctcggacagtggtacttcattgctggcgctgcgcccaccaaggaagagctggcgacattcgaccctgtagacaacattgtgtttaacatggccgcaggatccgctccaatgcagctgcacctgagagcaaccatacgtatgaaggacggcctgtgcgtccctagaaagtggatttatcatctgactgaaggttccactgacctgcggactgagggccgtccagatatgaagaccgaactattttcctcatcatgtcctggcgggattatgctgaacgagacagggcagggatatcagcgttttcttctgtacaaccggtcgccacatccaccagagaaatgcgtcgaagagtttaaatctctgaccagttgtttggactctaaggcctttctgttgaccccacgaaatcaggaagcctgtgagttaagcaataactag

SEQ ID NO: 6283 - DNA, 600 bp, synthetic construct
  misc_feature 1..600: note = source = /note="Description of Artificial Sequence: Synthetic coding sequence"
  source 1..600: mol_type = other DNA
atggagacttttcctttgttgcttctgagcctgggacttgtcctcgctgaagcctctgagtcaactatgaaaatcatcaaggaagaattcacagatgaggaaatgcaatatgatatggccaaaagcggccaagaaaaacagaccatcgaaatcctcatgaaccccattctgctcgtgaagaatacgtccctgtccatgtcaaaggatgacatgagctctaccttactcacatttagatcgctgcactataatgatccgaagggaaattccagcggcaacgacaaggagtgttgtaacgatatgactgtatggcgaaaggtgagtgaggcaaacggttcttgtaaatggagcaataatttcattcggagctcaacagaggtgatgagaagggtgcaccgggcaccttcatgcaaattcgtccagaacccaggtatctcctgttgtgagagcctcgagctcgagaacacagtgtgtcagttcactactgggaaacagtttccacggtgtcagtaccactctgtgactagcctggagaaaatattgaccgtgctgaccggccattcactgatgagttggctcgtgtgtggctcaaaactgtag

SEQ ID NO: 6284 - DNA, 30 bp, synthetic construct
  misc_feature 1..30: note = source = /note="Description of Artificial Sequence: Synthetic coding sequence"
  source 1..30: mol_type = other DNA
atggctcccaagaaactcagctgcctttag

SEQ ID NO: 6285 - DNA, 831 bp, synthetic construct
  misc_feature 1..831: note = source = /note="Description of Artificial Sequence: Synthetic coding sequence"
  source 1..831: mol_type = other DNA
atggcccctagccctctgcagcgccttcactgtgggccctcaccctcgcctcgacctacagaggtcccacgcggaacagtctctgtcagttgtagatatttgaagaactcccttcatgttttcgttagcggcggagcaattgggacatctagcccagctcttcttgagtgccaggaaggagttgggcccgccagacccagccttctggtgcctcctccacccaggccccggcggctggacctggctagaacactgcctgccgaaaggactgattcacagtccctctacatcgtgtacatcgctttgcccgggagaaccccacgccctgcactggcctttgctttcctgatgcccgcctgctgcaaccgtccaagcccacggcccagccctgcccaccttaccgcctcttctgttctcagacgacaaagacacgtgcttgccgcaagtgcggcgtccccatgtcagtggagtggattaagggttgctcattccttgcgccaagtcgtgagtttgtgcccgaggtgcacaggaagctgccccttcagcggagcatgtgcctctagcctgcccagtcccttgagttgcccccattctcactccggctcctggggaacatggtcgcagggcaggccatgctcatccaccgaagttgcagggttggctctgtggccaactgactttctgtcttgcctgctggacgcctccgagttacaaacccaaggatcccatggattctccttcaccccaaccgggttttcttcaaataggaaggtaggggtcggctcgtgccgcgacggggccggacgtggagctatgggtggactattttag

SEQ ID NO: 6286 - DNA, 678 bp, synthetic construct
  misc_feature 1..678: note = source = /note="Description of Artificial Sequence: Synthetic coding sequence"
  source 1..678: mol_type = other DNA
tgagctgatcttccttcgtgctggggcgccgggccttgttacactggccacaaggtgggagccctacgtagggatactgtgatctgctgctgccgccacggcgactactctactccctgtctgtttacccccggcaaaccgagcaggaatccatctccttggaaacggaccctgtggaccctgtcagctccctgggccggacccgccggctggaccggagaggagcagaatgctacgaagaccggccttatcactcggcgtccgcggcctttgcgcaggcgtccgcacccagctccagcctctcctctccccgaaattatccgagggaacataccccgcatgctgggcaaatttgtgccagtgaactgggaaccgccacagcccttaccctttcccaaatatctcagatgctacagatgccttctggaaacgaaagaactcggctgcttgttgggttcagacatctgtctgacacccgctggctcttcgtgcatcaccttgcataagaaaaatagttccggatcagacgtaatggtctccgattgtcggtctaaggagcagatgagcgactgcagcaatactcgaaccagtccagtgagtgggttttggatattttcccagtactgcttcctcgacttttgcaatgatccacagaatcgcggcctatatactccctag

SEQ ID NO: 6287 - DNA, 534 bp, synthetic construct
  misc_feature 1..534: note = source = /note="Description of Artificial Sequence: Synthetic coding sequence"
  source 1..534: mol_type = other DNA
atggtgcctgccgccggggccctcctctgggtcctgctgctgaatctgggcccacgggccgccggagctcagggcttgacccagactcctaccgaaatgcagcgggtctcccttaggtttggaggccctatgacaagaagctaccgcagtactgctaggaccgggttgccaagaaaaactcggatcatcttggaggatgagaatgatgcaatggccgacgctgatcgtttggctggtcctgctgctgccgagctgttagctgccacggtttccacagggttctcccgctccagcgctatcaacgaagaggatggatcaagtgaggagggagtggtcatcaacgcaggcaaagattccacatctcgcgagctaccatccgccacgcccaacaccgcgggaagctcatctacacgctttatcgccaatagccaagagccagaaattcgcctgactagctcactgcctcggagtcccggtagaagtaccgaggacttgccaccttgccacctgctcaggatctgtgggtggtgttag

SEQ ID NO: 6288 - DNA, 912 bp, synthetic construct
  misc_feature 1..912: note = source = /note="Description of Artificial Sequence: Synthetic coding sequence"
  source 1..912: mol_type = other DNA
atgcttcatccagagaccagtcctggtcggggccatctgttggctgtattgctggctctgctggggactgcgtgggcagaggtgtggcccccgcagctgcaggagcaggctcccatggcaggtgcactcaaccgcaaagagagctttctgcttttaagcctgcacaataggttgcgctcttgggtccagccaccagcggcggatatgcgtcggttggattggagcgactccctggcacagttagcgcaggcccgagcggccctttgtggaatccccacaccttcactagccagtggcctgtggcgtacgctacaagtggggtggaatatgcagctccttccggcaggcctcgcctctttcgtggaagtggtgagcttatggttcgctgaaggccaaagatacagtcacgcagcaggcgaatgcgcaagaaacgctacttgtacccactacacacagctcgtctgggcaacatcatctcagcttggctgcggcaggcacctgtgcagcgctggccaggctgcaattgaagccttcgtttgcgcctactcgccgcggggcaattgggaagtgaacgggaaaaccattgtaccatataaaaaaggagcgtggtgctctttgtgtacagcctcagtcagtggttgctttaaagcctgggaccatgccgggggcctttgcgaggtgccgagaaatccctgtcgcatgtcctgtcaaaaccatggtaggctgaatattagtacctgtcactgccactgtcctcccggctatacaggccgatactgccaggtccggtgtagcctccagtgtgtgcatggcagattccgggaggaagaatgttcgtgcgtctgcgatatagggtatggcgagccgtcagtgccacctagatgtattttcccatctaccccagtcacgtag

SEQ ID NO: 6289 - DNA, 1482 bp, synthetic construct
  misc_feature 1..1482: note = source = /note="Description of Artificial Sequence: Synthetic coding sequence"
  source 1..1482: mol_type = other DNA
agcgaggccgtttacctaaacgattccacttatgacggccacactgtgggaggcctgcagtacggcgggctggggcagctggctgacggagtagtggggttggatgatttcaggaaatcacaggaactgagagtgtggcccgggtatgactacgtgggctggtctaaccattccttcagcagcggatacgtggaaatggagtttgaatttgatagactacgtgccttccaggccatgcaggtgcactgcaacaacatgcatacattgggagccaggcttcccgggggcgtggagtgtcggttcaggcgcggcccagcaatggcctgggagggcgagccgatgaggcacaacctggggggaaatttgggcgaccctcgcgcccgggctgtgagtgtcccacttggcggtcgggtggccagatttctgcagtgccgattcttatttgcaggaccctggctgctgttttctgagatttctttcataagcgacgtcgtgaataatagtagccctgctctgggagggaccttccccccagcaccttggtggccacctggccccccccctacaaatttctctagcctggagctggagcccaggggccagcaacctgtggccaaggcggagggctcgcccacagccatcctcatcggctgcctggtcgcaataatcttgctgctgttgttgattattgctttgatgctctggcggctccactggcggagactcttgagcaaagtgttggagtctcatcccagaacccgcagtccgggcctcgtgggcatcagacctacacccttgcccgtctcccctatggctctgagatgttgttcccctatacagcctaccgcctccttctggccgcttaccccagtgcctctcgaggccagagcaccgccacacccaccagggccaaacccccctacaccacgcggtgttacagggggcaacacttatgcagtcccagcactaccacccggtgcagtgggcgacggtcccccaagggtcgactttccacgttctaggctccggttcaaagagaaactcggcgaaggacagtttggtgaggttcatctgtgcgaggtggacagtccgcaggatttggtgtccctcgattttccgctgaatgtgcgcaaaggtcatccgctcctggtcgcggtaaagatccttaggcctgatgcgaccaagaacgcccgcaatgatttcctcaaggaggtgaagatcatgtctcggctcaaggaccccaacataatccgactacttggggtatgcgtgcaggacgacccgctgtgcatgatcaccgattatatggaaaatggagacttgaaccagtttctgagtgcccaccagctggaggacaaagccgctgaaggtgcacccggcgacggacaggcggctcaagggcccaccatatcctaccccatgttgctgcacgtggccgcccaaattgcttctggaatgcggtatctcgcgacccttaactag

SEQ ID NO: 6290 - DNA, 807 bp, synthetic construct
  misc_feature 1..807: note = source = /note="Description of Artificial Sequence: Synthetic coding sequence"
  source 1..807: mol_type = other DNA
atgaagcagatccttcacccggcgttagaaacgactgatccttgtagtacagggttcgttttcccagccatgacgttgtttccagtgctgctgttcttagtggccggactgctgccatcatttccggctaacgaggataaggacccagccttcacggcactgctgacaactcagacccaggtgcagagggagattgtgaacaagcacaacgagctgagacgcgcagttagtccccctgcacgcaacatgctcaagatggaatggaacaaggaagctgcggccaacgcccagaagtgggcaaaccaatgcaactacaggcattccaacccgaaagatcgcatgacaagcctgaagtgcggagaaaacctttacatgtcttcagctagctctagctggtcccaggccattcagtcttggtttgacgaatacaacgacttcgacttcggcgtgggtcccaagactcccaatgctgtcgtggggcactacactcaggtggtgtggtattcttcctaccttgtgggctgcggcaacgcatattgtcctaaccagaaggttttaaagtactactacgtgtgtcagtactgcccagccggcaactgggccaacaggctctatgttccctacgagcagggggctccatgcgccagttgcccagacaactgcgatgacggtctctgcacaaatggttgtaagtacgaggatttgtactctaactgtaaaagcctgaaactgactcttacctgtaaacatcagctggtgagagattcttgcaaagcttcttgtaattgctccaactccatttattag

SEQ ID NO: 6291 - DNA, 372 bp, synthetic construct
  misc_feature 1..372: note = source = /note="Description of Artificial Sequence: Synthetic coding sequence"
  source 1..372: mol_type = other DNA
atgctacccaagtccagacgggcgttgactattcaagagattgccgcactagcacgctctagtttgcacggcatttcacaggtcgtgaaagaccatgtgaccaaaccgactgctatggctcaggggcgggtcgcccacctgattgagtggaaaggatggagcaaaccttccgacagcccggcagcactagagtccgctttttcctcatatagcgacctgagcgagggggaacaagaggctcgctttgcggctggggtggccgaacagtttgctatcgccgaagccaaactgagagcttggagctctgtggatggagaggatagcactgacgactcctacgacgaagactttgccggcggaatggatacctag

SEQ ID NO: 6292 - DNA, 726 bp, synthetic construct
  misc_feature 1..726: note = source = /note="Description of Artificial Sequence: Synthetic coding sequence"
  source 1..726: mol_type = other DNA
atgggggcagtgatggggacgttcagctcccttcagactaaacagcgtcgcccaagcaaggataagattgaagacgaactagaaatgactatggtgtgccatcgtccagaaggactggagcagctcgaggcccagacgaactttacaaagagggaactccaagttttgtacaggggctttaagaacgaatgtcctagcggcgttgtcaatgaggatactttcaagcagatttatgcccagttcttccctcatggcgcgctgccatgtctggaaggcagtccctgcgttgagtttctgcccccatccccggcattgctcttttgcttggtggacgcttccacatatgcccactatctgtttaacgccttcgatacaacccagacagggtcagtgaaattcgaggattttgtgaccgcgctgtcaatcctcttacgcgggaccgttcatgaaaaattgcgatggacattcaacctgtacgatatcaacaaggacggctacatcaataaggaggagatgatggacatcgttaaggcaatctacgatatgatggggaaatatacataccctgtgttaaaagaggacactccacggcagcacgtcgacgtattcttccaaaaaatggataaaaacaaggatgggattgttaccttagacgagttcctggaaagttgccaagaggatgacaatatcatgcgatctctgcaacttttccagaacgtgatgtag

SEQ ID NO: 6293 - DNA, 630 bp, synthetic construct
  misc_feature 1..630: note = source = /note="Description of Artificial Sequence: Synthetic coding sequence"
  source 1..630: mol_type = other DNA
atgggtcctgaggcactgagcagccttctgctactgctgctggtggccagcggcgatgcagatatgaaaggccactttgatcctgccaagtgccggtatgctctggggatgcaggaccgcacaatcccggattctgatatttcagcgtcatcctcgtggtcagacagtactgcagcccgacactcccgcttggagagcagcgacggcgacggagcatggtgtccagccgggtccgtctttcctaaagaagaggagtatctgcaagtcgatctgcagaggcttcacctcgttgccctggtcgggacacagggacggcacgccggcggactcggaaaggagtttagtcgatcctaccggttacggtattctagggacggtcgacgctggatggggtggaaggataggtggggccaggaggtgatcagtggaaacgaagatcctgagggcgttgtgctgaaagatctgggccctcctatggtagcacgccttgtccggttctatccacgcgctgacagagttatgagcgtgtgtttacgagttgagctgtacggatgcctttggagagacggtttgctgagctacacagcccctgtgggccagacaatgtacttatctgaggccgtatactag

SEQ ID NO: 6294 - DNA, 312 bp, synthetic construct
  misc_feature 1..312: note = source = /note="Description of Artificial Sequence: Synthetic coding sequence"
  source 1..312: mol_type = other DNA
atgcggcagcggttgctcccatcagtgaccagtctgttgctggtcgcgctgctctttcctggcagcagccaggccagacacgtcaaccactccgccaccgaagccctgggcgaactgagagagagggccccaggacaggggacgaatggctttcagctcctaaggcacgctgtaaagcgcgatctgctgcctcctcgtacacccccataccaggttcacatcagtcaccaggaggctagaggcccttccttcaaaatttgtgttgggtttctagggccgcggtgggctaggggttgttcaaccggcaactag

SEQ ID NO: 6295 - DNA, 426 bp, synthetic construct
  misc_feature 1..426: note = source = /note="Description of Artificial Sequence: Synthetic coding sequence"
  source 1..426: mol_type = other DNA
atgaagacgggtctgttctttctctgcctgctgggcaccgccgcggcaatacccaccaacgctaggcttctttccgaccacagtaagcctaccgccgagaccgtcgcccctgataacactgccattccttctctgcgggccgaagcagaggaaaacgaaaaggagactgctgtgtctaccgaggacgacagccaccacaaggctgagaagagttccgtgctgaaaagtaaggaagagtctcacgagcagtctgccgaacaaggaaagtcatcctctcaggagctgggtctgaaagaccaggaagacagcgacggccatctctccgtgaacctggaatatgcgcctaccgagggaaccctggacattaaggaggatatgtctgaacctcaggaaaagaaactctcggaaaacactgacttcctgtag

SEQ ID NO: 6296 - DNA, 642 bp, synthetic construct
  misc_feature 1..642: note = source = /note="Description of Artificial Sequence: Synthetic coding sequence"
  source 1..642: mol_type = other DNA
atgagacttgcaggccctctgagaattgtggtgctcgtggtctcagtgggcgtgacgtggatcgtcgtgagcattctcctgggaggtcccgggagtgggtttcctcggattcaacagctgtttacatcaccagagtcttccgtgacagctgctccaagagcccgcaaatataaatgtgggctccctcagccttgccctgaggagcatctggcttttcgtgttgtgagtggcgccgccaacgtgataggtcctaaaatttgccttgaagacaagatgctcatgtcgtcggttaaggacaacgttggcagaggactgaacattgcacttgtgaacgatgtgaatgacctgcttaagtttattcgccccctgcatgaaggtacattggtgtttgtggcatcctatgatgatcctgctaccaagatgaacgaggaaacacggaaactgttctccgagctcggctccaggaacgcgaaggagcttgccttcagggattcttgggtctttgtgggagcgaagggggtgcaaaacaaatctccattcgagcagcatgtaaagaactccaaacacagtaacaagtatgagggttggccagaggcgttagaaatggagggatgcattcctcggcgctccaccgcttcttag

SEQ ID NO: 6297 - DNA, 2700 bp, synthetic construct
  misc_feature 1..2700: note = source = /note="Description of Artificial Sequence: Synthetic coding sequence"
  source 1..2700: mol_type = other DNA
atgctgctacttctgctgctggctcccctgttcctcaggcctcctggcgcgggcggtgcacagaccccgaacgcgacctctgaaggttgtcagattattcacccaccatgggaggggggaatcagataccgaggcctgaccagggatcaggtgaaagccattaattttctgcctgtcgattacgaaatagagtacgtgtgccggggagaaagagaggtagtcggaccgaaagtgcggaagtgtctggcgaatggttcttggacagacatggatacaccgtccaggtgtgtgaacaggacaccccattccgagagacgggctgtgtacatcggagcgctcttccctatgtctggaggatggccgggtgggcaggcgtgtcagcctgccgtggagatggcactggaagacgtgaacagtcgtagggatatacttccggattatgagctcaaattgatacatcacgacagtaagtgcgaccctggacaagccactaaatacctgtacgagttgctttataatgacccaatcaaaattatcctgatgcctgggtgttcaagcgtgtctacgctcgtcgcagaagctgcccgtatgtggaacttgatcgtgctctcttatggaagcagttccccagcactttctaatagacagaggtttcccaccttcttcagaacacaccctagcgccaccctgcacaatcctactagagtaaaattattcgaaaaatggggatggaagaagatcgctacgattcagcagacaactgaagtgttcacctccacgttagatgacctcgaggagagggtcaaggaggctgggattgaaatcaccttcaggcagtcgttttttagcgatccagcagttccagttaagaacctgaaacgtcaagatgcgcggattatcgtggggctgttttatgaaactgaggcacggaaggtgttctgcgaggtctataaggagcgacttttcgggaagaagtacgtttggtttttgatcggctggtatgccgacaattggtttaagatctacgatccttccatcaattgcactgtggacgagatgaccgaagctgtcgaaggtcacattacaactgaaatcgtgatgttgaacccagctaacacccgcagtatcagcaatatgacatctcaagagttcgtcgagaaactgacaaaaagacttaagcggcacccagaggagacagggggcttccaggaagcccctctcgcgtacgatgctatctgggcactggccctggccttaaacaagactagcggaggcggggggcggagtggcgtccggttggaggacttcaattataacaatcagacgatcactgatcaaatttacagagcgatgaacagctccagttttgagggggtctcgggtcatgtggttttcgatgcatctgggtcaaggatggcctggaccctgatagaacagctgcagggcggttcttacaaaaaaatcggctattatgacagtactaaggatgatctgagttggtcaaaaacagacaaatggatcggtgggtcaccaccagctgatcagacactggtgattaaaacttttaggtttctttctcagaagctgttcatctctgtttcggttctcagctcgctgggaatcgtgctggccgttgtgtgtctatcctttaatatctataactcacatgtacggtacatacagaattcacagccaaatcttaacaacctgacagcagtcggctgttctttagccctggccgctgtgtttcccctggggttggatggataccacattggacgaaaccagttcccctttgtgtgccaggcacggctgtggctgcttggcttagggttttccctgggttacggaagtatgtttaccaagatatggtgggtccacaccgtgttcactaagaaggaggagaaaaaggaatggcgaaagaccctggagccctggaaactgtacgcgactgtaggtctgctcgtagggatggatgtactaactctcgccatatggcagatcgtggatccccttcaccgtacaatagaaactttcgccaaggaggaaccaaaagaagacatcgatgtttctatcttgccgcagttagagcattgtagtagtcgaaagatgaatacatggcttggaattttttacggatataagggcctgctcctgttacttggcatctttctggcctacgaaactaagtccgtgtccaccgagaagattaatgaccaccgggccgtgggcatggcaatctataatgtcgccgtgctgtgccttattactgcaccagtgaccatgatccttagcagccagcaggacgccgcattcgcctttgcgagtctggctattgtcttcagttcatacataacgctggtagtgctcttcgtccccaagatgcgcagactgattactagaggcgagtggcaaagtgaagctcaggacaccatgaagaccggatcaagcaccaacaacaatgaggaggaaaaatcgcgtcttttggagaaggaaaatagggagcttgagaagatcattgccgaaaaggaagagcgtgtttctgaactgcgacatcagctgcagtcccgccagcaacttcggtccagacgacacccccctactcccccagagcccagcggggggctccccagaggccctcccgagccaccagacaggttgagctgtgacggaagcagggtgcatctgttatacaagtag

SEQ ID NO: 6298 - DNA, 192 bp, synthetic construct
  misc_feature 1..192: note = source = /note="Description of Artificial Sequence: Synthetic coding sequence"
  source 1..192: mol_type = other DNA
atggggcctgaggctttgagttccttgttgctcctccttctggtcgcttccggtgatgccgatatgaagggtcactttgacccagccaagtgtaggtatgccttaggaatgcaagatcgaaccattcctgactctgacatctcggctagttcttcttggtcagactccaccgcagcccgacacagccgctag

SEQ ID NO: 6299 - DNA, 489 bp, synthetic construct
  misc_feature 1..489: note = source = /note="Description of Artificial Sequence: Synthetic coding sequence"
  source 1..489: mol_type = other DNA
gacgaggatcggtatacaacatgctggcccaaaacgtggctggctaaagactgtccggccctgaggatcatctctgtggaatatgatacaagcctgtcagattggagagcccgctgtcccatggagagaaagtcaatcgcatttcgaagtaatgagctgctaaggaaactcagagccgccggcgtcggagacaggccagttgtttggatctcacactctatggggggccttctggtgaaaaagatgctgttagaggctagtactaagcccgaaatgagtaccgtcattaacaacacaaggggaatcatcttttattctgtgccacatcacggcagtagactggccgaatattctgtgaatattaggtatctcctgtttccctctttggaagtaaaggagctgtccaagggcaacacattctgtcataaggggaattggggctacatcaatatatcctatactgagaagaaaaagaaatttctaccttag

SEQ ID NO: 6300 - DNA, 1083 bp, synthetic construct
  misc_feature 1..1083: note = source = /note="Description of Artificial Sequence: Synthetic coding sequence"
  source 1..1083: mol_type = other DNA
atgcctgagctggtggtgaccgccctcctggctccttcacggctcagcctgaagctgctgagagcctttatgtggtccctcgtgttctcagtggccctggtggccgccgctgtgtacggatgtattgctttgacacacgtactgtgtcgtcctagacgtggatgctgcggtcgtcggcggtctgcctctcccgcttgcctaagcgatcccagtctaggtgagcatggcttcttgaatctgaaatcaagtgggctgcgtcttcattacgtatccgctgggcgcgggaacggcccacttatgctctttctacatggattccctgagaactggttctcctggaggtatcagctgcgagaatttcaatcacgctttcatgttgtcgccgtcgacctgcgaggctatggaccaagcgacgctcctagggacgtggattgttacacaatcgacctactgctcgtggatattaaggatgtaatattggggctagggtactccaagtgcatcctcgtggctcacgattggggcgcgctgctcgcatggcacttttccatatattatccctccctagtggaaaggatggtggtagtctctggcgcacccatgtcagtgtatcaggactattccctccaccatatttctcagttcttccggtcgcactatatgtttctatttcagctgccctggcttcctgaaaaactcttgagtatgagcgactttcagattttgaaaactactctgacccatcggaagacgggcattccctgcctcactccctcagagctcgaggccttcctatacaatttctcacagcctggggggctgacaggaccgctgaactactatcggaacctgttcaggaacttccccttggaaccacaggagttgaccaccccaaccctgttgctgtggggtgaaaaggatacctacttagagcttggattagtggaagccattggctcccgctttgtaccaggccgtctcgaggcacatattctccctggcattgggcattggatcccacagagcaacccacaggagatgcatcaatatatgtgggcctttctgcaggatctgctcgattag

SEQ ID NO: 6301 - DNA, 678 bp, synthetic construct
  misc_feature 1..678: note = source = /note="Description of Artificial Sequence: Synthetic coding sequence"
  source 1..678: mol_type = other DNA
tgagctgatctcccctcctgctggggggctgggccttgctataccgggcataaggtcggcgctctccgcagagatacagtgatatgttgttgcagacatggcgactacagcaccccttgtctttttactccagggaaacctagtcggaacccatccccgtggaagaggacgctgtggacactctccgcaccttgggccggaccagcgggctggactggcgaggaacagaatgcaaccaagactgggcttatcacccggcggccacgtcctttaaggcgcagaccccatccagcgccggcttccccgctgcctgagatcattcgggggaacataccccggatgctcggtaaattcgtaccagtgaattgggaaccccctcagcctctaccgttccccaagtatctgcggtgctacaggtgcctgcttgagacaaaggaattggggtgtctactcgggtctgacatctgcctgacgccagctgggtcttcctgcatcacacttcataagaaaaactcttcaggttctgatgtgatggtgtctgactgccgcagtaaggagcagatgtccgattgtagcaacactcggacatccccagtcagcgggttttggatcttctctcagtactgctttcttgatttttgcaacgacccccagaatcgcggtttgtatacgccatag

SEQ ID NO: 6302 - DNA, 192 bp, synthetic construct
  misc_feature 1..192: note = source = /note="Description of Artificial Sequence: Synthetic coding sequence"
  source 1..192: mol_type = other DNA
atgaagcacgtactgaatttatatctcctgggcgtggttctgaccttgctgagtatctttgtgcgcgtgatggagtctcttgaggggctgcttgaatcaccgagccctggcacctcctggactacccgctcccaactcgccaacactgaaccgaccaaaggcttacctgaccacccgagcaggtctatgtag

SEQ ID NO: 6303 - DNA, 5235 bp, synthetic construct
  misc_feature 1..5235: note = source = /note="Description of Artificial Sequence: Synthetic coding sequence"
  source 1..5235: mol_type = other DNA
atgcgattactgtgggggctcatctgggcatccagcttttttacgctgagcctgcaaaagccccgcctgcttttgtttagtcccagcgtcgtccatctcggggttccgctatctgtcggggtacagctgcaggacgttcctcggggccaggtcgtcaaaggtagcgtcttcctccggaacccatctaggaataacgtcccttgctcccccaaggtggattttacgcttagctctgagagagacttcgcactgctgtctctgcaagtccctctgaaggatgcaaagagctgcggattgcaccagctgctccggggacctgaggttcagcttgttgcacacagcccgtggctgaaggattcactcagccggacaaccaacattcagggaatcaatttgttgttctccagtaggagaggacacttgtttttacagaccgaccaacccatatataatccaggccagagagtccgttaccgtgtttttgcgctcgatcagaaaatgcgtccaagcacagatactatcaccgtgatggttgaaaactcacacgggttgagagttaggaagaaggaagtctatatgccctcctccattttccaggatgattttgtgatccctgacatatccgaaccggggacctggaagatcagcgctcggttttctgacggcttggagtctaacagctcaacccagttcgaagtgaaaaagtatgtgctgccaaacttcgaggtgaagataacccctggcaagccgtacattctaacagtccctggccacctagatgagatgcagctggatatccaggctaggtacatatatggcaagcccgtgcagggagtcgcttacgtgaggttcgggcttcttgacgaggatggaaaaaagacgttcttccggggattggagtcccagaccaaactggtaaatgggcagagtcatatttcgcttagcaaggctgaattccaggatgccctggagaagttaaatatggggattacagatctgcagggtctgaggttgtacgttgcggcagctatcatcgaatatcccggcggcgaaatggaggaagctgaactcacttcctggtattttgtgagtagtcccttttccctcgacctcagcaaaactaagcgccatttagtccctggagccccgtttcttctccaggcactggtgcgagagatgtctggtagccccgcctccgggatcccagttaaggttagtgccacagtaagtagtcctggatctgtgcccgaggtccaggacatccagcagaacactgacggctcaggccaggtgtccataccgatcatcatccctcagaccattagcgagttacagctgtctgttagcgctggcagcccacaccccgctattgcccgcttgactgtcgctgcacccccatctggaggccccgggtttctttctatcgagagacctgattcccgccctcccagggtcggcgataccctcaacctgaatctcagagccgtcggaagcggagcaaccttctcacactattactacatgatcttaagtcgcggccaaatcgtgtttatgaaccgtgaacccaagcggaccttgacatctgtttcagtgttcgtcgaccaccaccttgcacccagcttctactttgtggctttctactatcacggtgaccatcccgtggcaaacagtctgcgagttgatgtacaggctggtgcctgtgaaggtaagctggagctttcggtggatggtgccaaacaatataggaacggtgagagcgtaaaactgcatctggagaccgactccttagctctggtggccctcggcgctctggacaccgcattgtacgccgcaggaagcaaatcccataagccccttaacatgggtaaggtgttcgaggcgatgaactcatatgatctcggctgcggccctgggggaggagatagcgccctgcaggtgtttcaggccgcggggttagctttcagtgacggggaccagtggacgctgtctagaaagcggctgagttgcccaaaagagaaaacgacaagaaagaaacgcaatgtcaacttccagaaggccatcaatgagaaattgggccaatacgcatctccaactgccaagcgctgttgccaggacggagtgacccggctgcccatgatgagaagctgcgaacagcgggccgcccgtgtccagcagccggactgccgggagcccttcttaagctgttgccagttcgcagagagcttgcggaaaaaatcccgggataaaggtcaggctggactgcaacgggccttagagatcctccaggaagaagaccttattgatgaagatgacatcccggtaagatccttttttccggagaactggttgtggcgggttgagacagtagacaggtttcagatcctcaccctctggttgcccgactccctcaccacgtgggaaattcacggtctgagcctcagcaagaccaaaggcctctgtgtcgccacccctgtgcaactgagggtatttcgcgagttccatctccatctcaggcttcctatgtccgttagacggtttgagcagctagaattgcgtcccgtgctctacaattacctggataagaacctgactgttagcgtacatgtgtctcctgtcgaaggcctgtgcttggctggcggtggggggctcgctcaacaggtcctagtgccggctggatcagccaggcccgtggcattctcagtggtaccaacagcggccgccgcggtaagcctaaaggtggtggcacgaggctctttcgaattccctgtgggcgacgctgtctctaaagtgctgcagattgaaaaagagggtgccatccatagggaagaactcgtgtatgagctgaatccgctcgatcataggggcagaacactagaaatccctggaaactctgacccgaatatgatccccgatggcgacttcaactcgtacgttagggtgactgcctccgatcccctggataccctgggctctgaaggtgctttgtctcctgggggggtcgccagtctgctgaggctgcctagagggtgcggggagcagactatgatttacctggcgcctacattagctgcttcacgttacctcgacaagacagagcaatggtctacattgcctcccgagactaaagaccacgcagtggacctgatccagaaaggttatatgcgcatccaacagttcaggaaagcggatggcagctacgcagcttggctgtcccgagggtctagtacgtggctgacagcattcgtgctgaaggtgctcagtctggcacaggaacaggtgggagggtctccagagaagttacaggagacctccaactggctgctctcacagcagcaggctgacggttccttccaggatctatctcccgttattcatcgctcaatgcaagggggtcttgttggcaacgacgagactgttgccctaaccgcgtttgtgacgatcgcacttcatcacggcctcgccgttttccaagatgaaggcgccgaacctctaaagcagagagtcgaggcttcaatcagtaaagccagctcctttcttggggaaaaggcttcagccggcttgctaggcgcccacgccgcagcaataacagcttacgctctgacacttacaaaggcacctgcagatctcagaggcgtagctcacaataatctgatggccatggctcaagagacaggggacaacttgtattggggctcagtaacaggcagccagtcgaatgcagtcagccccacaccagcccctagaaatccttccgatcctatgccccaggctcccgcactttggatcgaaactacagcctacgcgttattacatttgctgctccatgaaggaaaggccgaaatggctgaccaggccgccgcttggctgacccggcaggggagctttcagggaggtttcaggagcacacaggacaccgttatcgctcttgacgcgttatctgcctattggattgcctctcacaccactgaagagcgaggcctaaatgtgaccctctccagcaccggcaggaatggctttaagtcccacgccctgcagctcaataaccgtcagatacgggggctggaagaagaactccagttttccctagggtcgaaaatcaacgtcaaggtagggggcaacagtaagggcactctgaaggttttgagaacgtacaatgtacttgacatgaaaaataccacatgtcaggacctccagattgaggtgacagtcaaagggcacgtggagtacactatggaggctaatgaagattacgaggactacgaatacgacgagctccccgccaaagacgacccagacgcgcctctgcagcctgtgacgcccctacagctgttcgaaggtcggcgcaatcgtaggagaagggaggccccgaaggtagtggaggaacaggagagccgcgtccactacaccgtatgcatctggcgcaatgggaaggtgggactgtcgggaatggccatagctgatgttactttactctcaggtttccatgccttgcgggcagatctagaaaagctaaccagcctgagcgaccgctacgtatctcattttgaaaccgaggggcctcacgtgttattgtatttcgactctgtccccaccagcagggagtgcgtcggtttcgaagcggtccaggaagtccctgtaggacttgtacaacccgctagcgcaaccctgtacgattactacaacccggaacgaagatgcagtgttttctatggtgcaccatctaaaagccgcttgctggctacgctgtgctcagccgaggtttgtcagtgcgccgaaggaaagtgtcctcggcagcgtcgtgccctggagcgtggtcttcaggacgaggatggctataggatgaaatttgcatgttattaccctcgcgtcgagtatgggttccaggtgaaggtgctgagagaggattcaagagcggctttccggctgttcgaaacgaagatcacacaggtcctgcattttactaaagatgtgaaggctgccgccaaccaaatgcgtaatttcttggtgagggccagctgtcggctcaggctggagcccggtaaagaatatctcatcatggggctagatggggctacctatgatctagagggccacccacagtatctgctcgacagcaacagttggattgaggagatgcctagcgagcgtttatgccgcagcacccgccaaagagccgcctgtgcacagctgaacgacttccttcaggagtatggaactcagggttgtcaggtgtag

SEQ ID NO: 6304 - DNA, 792 bp, synthetic construct
  misc_feature 1..792: note = source = /note="Description of Artificial Sequence: Synthetic coding sequence"
  source 1..792: mol_type = other DNA
atggccgacatgcagaacctggtggagcggctggagagagcagtgggtagactggaagcggtgtctcatacatcagacatgcatcgaggttatgcagactccccatccaaaggagccgcaccctacgtgcaggcgtttgatagcctgcttgctgggcccgtcgcagagtatcttaaaatcagtaaggagatcggtggcgacgtgcagaaacatgccgaaatggttcatacaggcctcaagttggaacgtgcactgctggtcaccgcctcccagtgtcagcagccagcggagaacaagctctcagacttattggcacctatctcagagcagatcaaagaggtgatcacttttcgagaaaagaaccgtggaagtaagctctttaaccacctgagtgccgtaagtgagtctattcaggcactgggctgggtagctatggccccaaaaccaggtccatacgttaaggagatgaatgacgccgcaatgttttatacaaatagagtgcttaaagaatacaaggacgtcgataagaaacacgtagattgggtcaaggcctacctgtccatctggacagagctgcaggcatatatcaaagaattccataccacgggactggcctggagcaagactgggcctgttgcgaaagaactgagcggcttgccttccgggccgagcgcaggcagttgcccaccaccccccccgccctgcccaccccccccgccagtgtccacaatcagttgttcttacgagagcgcctcccggtcctcactgtttgcccagataaatcagggttag

SEQ ID NO: 6305 - DNA, 501 bp, synthetic construct
  misc_feature 1..501: note = source = /note="Description of Artificial Sequence: Synthetic coding sequence"
  source 1..501: mol_type = other DNA
atgggcccagaagctctgtcttcccttttattgttgcttctggtggctagcggcgatgcagacatgaaggggcacttcgaccccgcaaagtgtaggtatgctctgggtatgcaggataggactatccctgacagtgacatctctgcttcatcatcctggtcggactccacagctgcccgccacagccgccttgaatccagcgacggggatggcgcgtggtgtcctgcaggcagcgtattccccaaggaggaagaatatctccaggtggatctgcagcggttgcacctagtggcccttgttgggactcaaggtcgtcacgccgggggtttgggcaaggaattctcacgctcatatagattgaggtatagccgcgacggccggcgatggatgggttggaaagacagatggggacaagaggtgatcagcggtaacgaggatccagagggcgtggtgctgaaagacctcgggcctccaatggtggctcggctggttcgcttctag

SEQ ID NO: 6306 - DNA, 2349 bp, synthetic construct
  misc_feature 1..2349: note = source = /note="Description of Artificial Sequence: Synthetic coding sequence"
  source 1..2349: mol_type = other DNA
agcatcctgcgcgtcgaggccgtcgacgccgactgcagcccacaatttagccaaatctgtagctatgaaatcataacaccggatgtgccattcactgtggataaggatggctacatcaagaacaccgaaaaacttaattatggcaaggagcatcagtacaagctcacagtcaccgcttacgattgcgggaagaaacgtgccaccgaggacgtcctcgtcaaaatctcaatcaagccaacatgtacacccggctggcaaggttggaataaccgaatcgagtacgagccaggaactggggccctggccgttttccccaacattcatctagagacttgcgatgagccggtagcctctgtacaagcaacagtggagctggagacaagccatatcggcaaagggtgtgacagagatacatactctgagaaatctttacatcggctctgcggcgcagccgctggtaccgctgaactcctgccaagtccttcaggcagtctgaactggacgatgggattgcctaccgacaacgggcacgatagcgaccaagtctttgaattcaatggcacgcaggcagttcgcatccctgatggcgtggttagcgttagcccaaaagaaccgttcacaatcagcgtttggatgaggcacggaccctttggcaggaagaaggagaccatattatgctcctctgataagaccgacatgaaccggcaccattatagcctttacgttcatggctgtaggttgatttttctgttcaggcaggacccgtcagaagagaagaagtacaggcctgcagaatttcactggaagctgaaccaggtgtgtgatgaggaatggcatcactatgtactgaatgtggaattcccatccgtaacgctgtatgtcgacgggacctcccatgaacctttcagcgtcaccgaggattacccccttcacccatcaaagatagaaacacagcttgtagtaggagcatgttggcagggaggagacttacatatgacccagttcttccggggaaacctcgcaggtctgactctgaggtctggcaagctggcagacaaaaaagtaatagattgtctttatacatgcaaagaaggcctcgatttacaggtcttggaggatagcggacgaggggtgcagattcaggcccatccctcgcagttggtactgacccttgaaggagaggatttaggcgaactcgataaggccatgcagcacatcagctatcttaattcaagacagttccctacgccagggatccggcggctgaaaattacctctaccattaaatgcttcaatgaagcaacctgtataagcgtgccacccgtagatggatacgtcatggtgctccagcctgaggaacctaaaatatctctttcaggggtgcatcatttcgcacgtgcagctagtgaatttgaatcctcagagggcgtttttcttttcccagaactgcgaataatatcaaccattacacgggaggtggagccagagggtgatggtgccgaggatcctactgtgcaagagtccctggtgtcagaggaaattgttcacgacctcgatacctgtgaagtcactgtggagggggaggagcttaaccacgagcaggaatcactggaagtagatatggcccgcctgcagcagaaaggcattgaagtgagctcatccgaacttggaatgacctttacaggcgtggacacaatggcctcctatgaggaagtgcttcacctgctgagatataggaattggcatgccaggagcctgctggatagaaagttcaaattgatttgttccgaattaaatggcaggtacatttctaacgaattcaaagtcgaggttaacgtgatccataccgccaaccccatggagcatgcgaaccacatggctgcccaacctcagtttgttcacccggagcataggtcttttgtggacctgtcagggcacaatttggctaatcctcacccttttgctgtagtcccctcgacggccacagttgtgatcgttgtttgtgtgtcgttcctggtattcatgatcatcctgggcgtgttccggattcgtgctgctcataggaggaccatgcgagatcaggataccgggaaggagaatgaaatggattgggatgattcagctctgacaattaccgttaatccaatggagacctatgaggaccaacactctagcgaggaggaggaggaggaggaggaggaggaagagtccgaggatggagaagaagaggacgatatcacatccgctgagtcagagagttctgaagaggaagaaggtgaacagggggacccccagaacgcgacccgacagcagcagcttgagtgggacgacagtaccctgtcatactag

SEQ ID NO: 6307 - DNA, 531 bp, synthetic construct
  misc_feature 1..531: note = source = /note="Description of Artificial Sequence: Synthetic coding sequence"
  source 1..531: mol_type = other DNA
atggcccgaagacattgtttttcttactggctgctcgtgtgttggctcgtcgtgacagttgcggaggctctgtctacgttttatctccagcagcatattaatctacacatggataagaagcggtatctgcggctcctggaaatccataagattatgcgaacactgcctacagccagaagcctccattcccctttgcacttaccccggggagttagaagccaggggcctagtccctcccagcgccacccaggggtgccctccatatttttccacgaaggaccggagagtattctgggttttcagacagacctctccagtctgcagggcgtcacgaccgtcttccattcatcgcactttatcggccacactgtgaccctgctgatcggtatctctccagaagaggactcacgagaggaggcccatctccgcaaagccgagcgagaggaaaagcctaaacatactgaggcaaaaaagtccctgtcgttccgtaaaaaacagcaaaaggacttttgttttatttttcggaactag

SEQ ID NO: 6308 - DNA, 1182 bp, synthetic construct
  misc_feature 1..1182: note = source = /note="Description of Artificial Sequence: Synthetic coding sequence"
  source 1..1182: mol_type = other DNA
atgagaacattatttaacctgctgtggctcgcgctcgcctgtagcccagttcacacaacccttagcaagtcagacgcaaaaaaggcagcctcaaagactctgctcgagaaaagccaattttcagacaagcctgtccaagatagggggcttgtggtgactgatctgaaggcagagtctgtggtcctcgagcacaggagctactgcagcgcaaaggctcgcgatcgccacttcgcaggagatgtcctgggatacgttaccccttggaacagtcacgggtacgatgtgaccaaggtcttcggaagtaagttcacacagatatctccagtatggctacagctgaaaagaagaggacgagagatgttcgaggtcaccggcctgcacgacgttgaccagggttggatgagagccgtgagaaaacacgccaaaggtttacacatcgtgcctcgactcttgttcgaggactggacttatgacgacttccgtaacgttctggactcagaggacgagatcgaagagctgtcaaagaccgtcgtgcaagtggctaagaatcaacattttgacggttttgtggtagaagtgtggaaccaactactgtctcagaagagagttgggctcatacacatgctgacccatcttgccgaggcccttcatcaggcccggcttctggctctactcgttattcctcctgccatcaccccaggcacagaccagcttggtatgttcacccataaagagtttgaacagctggcaccagtgctggacggttttagtcttatgacatacgactactctactgcgcatcagccagggcccaacgctcctctgagctgggtgagggcttgtgtgcaagtgctcgatccgaaaagtaaatggcgctcaaagattctgctgggacttaacttctatggcatggactacgccaccagtaaggatgcgagagaaccagtggtgggtgccagatatattcagaccctcaaggatcatcggcctagaatggtctgggattctcaggcttccgagcacttttttgagtacaaaaaaagtcggtccggacggcacgtggtgttctatccgacacttaagtcactacaggtgcgcctggaactcgccagggagctgggtgtgggtgtctcaatttgggagctcgggcaagggctcgactatttttacgacctgctatag

SEQ ID NO: 6309 - DNA, 324 bp, synthetic construct
  misc_feature 1..324: note = source = /note="Description of Artificial Sequence: Synthetic coding sequence"
  source 1..324: mol_type = other DNA
atgctgccttgcttagccctgttgctgctgatggagctttcagtttgtaccgtggcgggagacggtggtgaagagcagactctgagcactgaggcggaaacctgggagggagccggtcccagtattcagctgcagcttcaggaggttaagacaggcaaggcgagtcagtttttcggattgatggggaagagggtcggaggtaggccactcatccagccacgccgaaagaaggcttaccagctggagcacaccttccaaggactgcttgggaagaggagtctgtttactgagggtcgtgaggacgaagcacagggctccgaatag

SEQ ID NO: 6310 - DNA, 1086 bp, synthetic construct
  misc_feature 1..1086: note = source = /note="Description of Artificial Sequence: Synthetic coding sequence"
  source 1..1086: mol_type = other DNA
atggggattattcagtccattttagcaacatctcgtgactgctattccttcaagaaaaagccaattccaaagaaacctactatgctggccttagccaagattctgttgattagcaccctgttttattccctgctgtctggaagccacggcaaggagaatcaggacattaatactacccagaatatcgccgaggtctttaagaccatggaaaataaaccaatctccttagaaagtgaggccaacctgaactccgataaggagaatatcacgactagtaacctcaaagcttctcactctccccccctgaacctacccaataacagtcatgggataaccgacttttcttcaaactcctctgcggagcatagtctcgggtccctgaagccaacaagcacgatctccactagcccccccttaattcactcctttgtgagcaaagtgccttggaatgcacccattgcagatgaagatctcctcccaatctcagcccatcctaatgctactccagcactctctagcgagaattttacatggagccttgtcaatgatactgtgaagactcctgacaattccagtattactgtatccattctaagctctgaacctacgtccccatctgtgactccactgatcgtggagccatcaggttggctgaccaccaattcagattcctttacggggtttacgccgtaccaggaaaaaactactcttcagcccacgctgaagttcaccaataacagcaaactcttccccaataccagtgacccacaaaaggaaaaccgaaataccggaatcgtctttggggctatacttggcgctattctaggagtttccctgctgaccctggtgggatacctcctttgtggtaaaagaaaaaccgactccttctcacaccggagactttacgatgacagaaacgaacccgtgctgcggctcgataacgcacccgaaccctacgatgtgtccttcggaaactcaagctactataacccgactctgaacgacagtgctatgcccgaaagtgaagaaaatgcaagggacgggattccgatggacgacattcctcccttgaggacctctgtttag

SEQ ID NO: 6311 - DNA, 279 bp, synthetic construct
  misc_feature 1..279: note = source = /note="Description of Artificial Sequence: Synthetic coding sequence"
  source 1..279: mol_type = other DNA
atgagaggacccgggcaccccctccttctgggactgctcctggtgctcggacccagccccgagcagagagtggaaatcgtgccccgggacctcaggatgaaggataagtttctaaaacacctcaccggcccattgtatttttcaccaaagtgcagtaaacacttccacagactctatcacaacacgagagattgcacaattcccgcttactacaagcggtgtgcgcggctgctgactcgcttggctgtgagcccggtgtgcatggaagacaaacaatag

SEQ ID NO: 6312 - DNA, 1125 bp, synthetic construct
  misc_feature 1..1125: note = source = /note="Description of Artificial Sequence: Synthetic coding sequence"
  source 1..1125: mol_type = other DNA
tgaagggtacgcagggggcctttacctgctgacagacctcgagcactgggtcccgcacggcgatgctccaggcatccccatccagcaccgtttagagtgtgtagtgagggagccgcccatcgtctccggcgccccgaacgattaccgctgccatccagggccctccgacctcggcctgcccataccccaatattggggccggcccccagagcttgccctggcgccccgcgagcttccgattctccaacatgcgccgccgccgccgctactgcctggccgaggacaagggccgtggagagaaaaggctgtcaggttgccgcagccgctggagtgaggggtactggttgtccaagccgtgcagatctggaaaaagattcgtggaatgataccaaagaggacgtattcgtgcaccagaccgcgatcaagaagaacaacccgcgcaaatacctgcgttctgttggcgatggcgagaccgtcgagttcgacgtggtcgagggtgagaagggcgcagaggctgctaatgtgactggccctggaggcgtgcctgttcagggctcaaagtacgctgccgatagaaaccattatcggagataccctcggagacgcggcccacctagaaactaccagcagaactatcaaaatagcgagtcaggggaaaagaatgaaggttcagagagtgcccccgaaggccaagcccagcagaggaggccctacagaagaaggcgtttccccccttactacatgaggaggccatacggccgacggcctcaatactcgaacccccctgtgcagggggaagtcatggaaggagccgataatcagggggcaggtgagcagggaagacccgtccgccagaatatgtaccgggggtataggccccgctttcggcgcggaccccctagacaaaggcagccccgggaagatggcaatgaagaagacaaggagaaccaaggagacgaaacacagggacaacagcccccacagcgacgatacagacggaatttcaactataggcgccggcgcccagagaaccccaaaccccaggatggaaaagaaaccaaggccgctgaccccccagctgaaaacagcagtgcgcccgaggccgagcagggaggggctgagtag

SEQ ID NO: 6313 - DNA, 420 bp, synthetic construct
  misc_feature 1..420: note = source = /note="Description of Artificial Sequence: Synthetic coding sequence"
  source 1..420: mol_type = other DNA
atggcacttaggatgctctgggcgggccaggcgaagggcatcctcggaggatggggcatcatctgtttagttatgtcgctgttgttacagcaccctggcgtgtactctaagtgctatttccaggcccaagccccatgtcattacgaggggaaatactttaccctcggcgagagctggctgaggaaagattgctttcattgtacttgtctccatccggtcggagtgggatgctgtgatacaagccagcaccccatcgacttcccggcaggatgtgaagttcgacaggaagctggcacttgtcagttctctctcgtgcaaaagagcgacccccgtctgccctgtaagggaggcgggccggaccccgagtgggggtctgcgaatacacctgtgcctggtgcaccagcaccacactcgagctag

SEQ ID NO: 6314 - DNA, 462 bp, synthetic construct
  misc_feature 1..462: note = source = /note="Description of Artificial Sequence: Synthetic coding sequence"
  source 1..462: mol_type = other DNA
cactactgtaaggaaggctattaccgcgacatggggaaacccattacccacagaaaagcttgtaaagcctgtgactgccaccctgttggagccgccggcaaaacttgtaaccagacaaccggacaatgtccttgcaaagatggtgtgactgggattacctgtaaccgttgcgccaaagggtatcagcagtcacgaagccccatagctccgtgcatcaagatcccagtcgcgccccctactacagccgcatctagcgtggaggaacccgaggcggcaaggcaaccaaataccttccaggccgaaggtctttcccttttgcctggagccgccgagaaggaaggggcccgctgctggggatacagacgccgccttggccatcgcgttgcgcaagccgaatgccgagggccacggtcttgggcctggggccggatcacttccagcttttccttcgcatctaattag

SEQ ID NO: 6315 - DNA, 213 bp, synthetic construct
  misc_feature 1..213: note = source = /note="Description of Artificial Sequence: Synthetic coding sequence"
  source 1..213: mol_type = other DNA
atgttggtgctgtttctgttgggcacagtgtttcttctgtgcccttattggggagaactacacgatccaattaaagggcaaagcatgtatcattactctaagttaagctgcatgaccagttgtgaagatattaacttcttgggcttcaccaaacgcgtcgagctaatttgctgcgatcattccaactactgcaatctgcctgagggcgtctag

SEQ ID NO: 6316 - DNA, 567 bp, synthetic construct
  misc_feature 1..567: note = source = /note="Description of Artificial Sequence: Synthetic coding sequence"
  source 1..567: mol_type = other DNA
atgttccatcaaatttgggccgccttactgtacttctatggaattattctcaattctatctaccagtgccccgaacattcgcagctgacaaccctgggggtagatggaaaggaatttcccgaagtgcacctgggtcaatggtatttcatcgccggggcagctccaaccaaggaggaactggccactttcgatcccgtagacaatatagtctttaatatggcggcaggctcggcaccaatgcagctccacctgcgcgctaccattcggatgaaagacggtttgtgcgtgccacgcaagtggatctatcacttaactgagggatcgaccgatcttcggactgaaggacgtccagacatgaaaacagaactcttcagttcttcatgtccggggggaattatgctgaatgaaacgggtcagggctatcagaggttcctcctatataaccgctcaccgcatccgccggaaaagtgtgtcgaggagttcaagtcactgacttcctgcctggactccaaagccttcctgctcaccccgcgcaatcaagaagcctgcgaactctctaacaactag

SEQ ID NO: 6317 - DNA, 2316 bp, synthetic construct
  misc_feature 1..2316: note = source = /note="Description of Artificial Sequence: Synthetic coding sequence"
  source 1..2316: mol_type = other DNA
atgggctggctgaccaggatcgtttgcctgttttggggcgtgctcctcactgcccgcgccaattaccagaatggaaaaaacaacgttccacgactgaagctttcttacaaggaaatgctcgaatcaaacaacgtcatcacctttaacggattggcaaattcgtcctcctaccatacctttctgctggatgaagaacgttcaagattgtatgtcggtgccaaggaccacatcttcagttttgatcttgtgaatataaaagattttcagaagatcgtgtggcctgtgtcctacacacgaagggatgagtgtaaatgggcgggtaaagacatcttaaaggaatgcgccaacttcataaaggtgctgaaagcttacaaccaaacacatctgtatgcttgcggaacaggggccttccaccctatttgtacatacattgaaatcgggcaccacccagaggacaatattttcaaacttgagaactcccacttcgagaacggccggggcaagtccccctatgatccgaagctgctgacagcttctctgctgatcgacggggagctctactctggtacagctgctgacttcatgggcagggacttcgccattttccggactttgggccaccaccaccctatcaggaccgagcagcacgatagccggtggcttaacgatccaaaatttatcagcgcacacctcatctcagaatctgacaacccagaagatgacaaagtgtactttttcttccgagaaaatgcgattgacggggagcacagcgggaaggccactcacgctaggattggtcagatctgtaaaaacgacttcggaggtcacaggtctctggtgaataagtggaccacttttctaaaagccagattgatctgcagcgttcccggaccaaacggcatcgacacccacttcgacgaactccaggatgtatttttgatgaactttaaagacccaaaaaacccagtcgtgtatggagtttttacgactagcagcaatatctttaagggttctgccgtctgcatgtactccatgtcggacgtgcgacgggtgttcctaggtccatacgcccatagagacggccctaattaccaatgggttccgtatcagggccgagtgccttatccccggcccgggacctgtccatccaagacctttgggggttttgattctactaaggacttacctgatgacgttatcacattcgcccggagccaccccgccatgtacaatccagtctttcccatgaataatcgccccatcgttatcaaaaccgatgtgaactaccagttcacccagatagtcgtcgatcgagtggacgcagaagatggccaatatgatgttatgtttatcggaaccgacgttggcacagtgctaaaagtcgttagcatccctaaggagacgtggtatgaccttgaagaggttctgctggaggaaatgaccgtgtttcgagagccaacggcgatttccgctatggaactgagtaccaagcagcagcagctttacattggctctactgccggggtagctcaattgccattacacagatgtgacatttacggcaaagcatgcgccgagtgttgcctggccagagatccgtactgtgcctgggacgggagcgcatgcagtaggtacttcccaaccgccaaacgccggacacggcggcaggatattcgtaatggagaccccttgactcattgttccgatctgcaccacgacaaccatcacgggcattctcctgaagagcgaatcatctacggggtggagaacagtagcacatttttggaatgcagccctaaaagtcagcgggccttagtatattggcagtttcagaggagaaacgaggaaaggaaggaagaaatccgcgtggacgaccatattatcaggaccgatcagggactgctgctgcgttctctccagcaaaaggattctgggaattacttgtgtcatgcagtcgaacatggcttcatacagaccctattgaaggtgacacttgaggtgattgacacagagcacttggaagagctgcttcacaaggacgacgacggggacggttccaaaactaaagaaatgagtaactccatgactccctctcagaaagtgtggtatagagatttcatgcagctgataaatcacccaaacctgaataccatggatgagttttgcgaacaggtttggaagagggatcgcaaacagcgccggcagcgtcctggacacactccaggaaattccaacaaatggaagcacctccaggagaacaaaaaagggcgaaaccgtcggactcatgaattcgagcgagctccgagatctgtctag

SEQ ID NO: 6318 - DNA, 1014 bp, synthetic construct
  misc_feature 1..1014: note = source = /note="Description of Artificial Sequence: Synthetic coding sequence"
  source 1..1014: mol_type = other DNA
atggcaaggccaatgatcaaagaggccaggatggcctcacttctattagagaacccctattatgggtgccgcaaaccaaaagaccaagtccgcagttccttgaagaacgtcagcgatttgtttgtaatgggtggagcgctggtgctggaatcggccgctcttctgcattggctggaacgggaagggtacggcccactcgggatgactggaatatccatgggaggccacatggcatcactggcagtctccaactggcccaagcccatgcctctgatcccatgtttgagctggagcacggcatcaggcgtgtttaccaccggggtgctgtctaaatccattaattggagggaactggaaaaacagtattatactcaaaccgtgtacgaggaagagatcatccatatgcttgaatactgtggaaccgatagctttaagatggggcaggagtttgtgaagcactttacctcctccgcagacaagttgaccaatctaaacttagtatctagaactcttaacctcgatatctctaatcaagtggtgtcgcagaaacctgccgactgccacaattcctccaagacgtccgtatctgcgactagcgaaggcctgctgctccaggatactagcaaaatgaaacgtttcaaccagacgctttcaacaaacaagtctggctataccagcagaaatcctcagtcataccacctgttatcaaaggaacagtccaggaattcactgcgcaaggaaagcctcatattcatgaagggggtaatggatgagtgcacccacgtcgctaacttctccgttcccgtagatccctctctgatcatcgtagttcaggccaaggaggacgcctatattccacgtactggggtgcgctcgttgcaggagatatggccaggttgcgagattagatacctagaagggggacacatctccgcttatctgtttaagcaagggctattccggcaagcaatctacgatgccttcgacaggttcctgcataagtacgctaactag

SEQ ID NO: 6319 - DNA, 462 bp, synthetic construct
  misc_feature 1..462: note = source = /note="Description of Artificial Sequence: Synthetic coding sequence"
  source 1..462: mol_type = other DNA
atgggtccggaagctctgtcatccctccttttgcttttactggtcgccagcggagatgctgatatgaagggtcatttcgatcccgcaaaatgccgctatgctctcgggatgcaggatcggacgatccctgattcggacatcagcgcctctagtagctggtccgactcaactgccgcccgacatagtcgccttgaaagctcggatggcgacggggcgtggtgtcccgcggggtccgttttcccgaaggaggaggaatatctgcaagtagacctgcaacgtttacatcttgtagctctggtaggtacccaaggaagacacgccggaggcctgggtaaagagtttagccgatcgtaccggctcagatacagcagggatgggagaaggtggatggggtggaaggaccggtgggggcaggaggtgattagcggaaacgaagatcccgaaggtgtggtactgaagtag

SEQ ID NO: 6320 - DNA, 345 bp, synthetic construct
  misc_feature 1..345: note = source = /note="Description of Artificial Sequence: Synthetic coding sequence"
  source 1..345: mol_type = other DNA
atggacaaaagcctgctactggagcttccgatattgctttgttgcttccgagcacttagcggtagtttgagcatgcgcaacgacgcagttattgaaatcgtgcagtgccgaatgtgtcatctccagtttcctggagagaaatgtagcagagggcgggggatctgcactgctactacggaggaggcatgtatggtggggcgcatgtttaagcgagacggaaacccatggttgaccttcatgggctgtctcaaaaattgtgccgatgtgaaggggattaggtggtccgtctacctcgtgaatttcagatgctgtcgttcccatgacctgtgcaacgaagatctctag

SEQ ID NO: 6321 - DNA, 630 bp, synthetic construct
  misc_feature 1..630: note = source = /note="Description of Artificial Sequence: Synthetic coding sequence"
  source 1..630: mol_type = other DNA
atgggcccggaggcattgtcctccctgctgctactcttgttagtggcctccggtgacgccgatatgaagggacacttcgaccctgccaaatgtaggtacgcccttggaatgcaggaccgaactatacctgattctgatatcagcgcttcctcctcatggtccgactccactgccgctcgacatagtagattggagtcgtctgatggcgacggagcctggtgcccagctggttccgtgtttcctaaagaggaggagtatctgcaagtcgacctgcagcgcctgcatctcgtagcactggtgggaacccaaggcaggcacgctggaggactaggaaaggaattcagccgcagttacagactccgatattcccgcgacgggagaagatggatgggctggaaggaccgatggggccaggaggtgatctctggtaacgaggacccggagggcgtggttctcaaagatctgggaccgccgatggtggcacgcctggtacggttttatccccgcgcagaccgggtcatgtccgtgtgtctgagggtcgagctctacgggtgcctttggcgcgacggtctgctctcttacactgcgccagtgggccagaccatgtatttgagcgaagccgtgtactag

SEQ ID NO: 6322 - DNA, 639 bp, synthetic construct
  misc_feature 1..639: note = source = /note="Description of Artificial Sequence: Synthetic coding sequence"
  source 1..639: mol_type = other DNA
gattttgggtactgtccacgcgtgtattgtgaaaatcagcccatgttgccaattggtgtactcgtcatggtggggtttacggtgggcaaagtgccagtgcccgatattagaacttgtcacttctgcctcgtcgaagatccatccgtcggatgcatatccggaagcgaaaaatgcaccatctcttcatcctctctgtgcatggtcatcacaatttactatgatgtgaaagttcgttttattgtccggggatgtggacagtatatatcatatcgctgccaggagaagcgaaatacctacttcgctgagtattggtaccaggcgcagtgctgtcagtatgactactgtaattcttggtcttcaccgcagctgcagagctcattgcctgagccccacgaccgtcccctcgccctgccgttatccgactcacaaatccagtggttctatcaggccctcaatctgagcctgcctttgcctaactttcacgctgggaccgagcctgacggcctggatcctatggtgacactctctttaaacctgggtcttagttttgccgaactcaggaggatgtacctgtttctcaactccagcggccttctcgtactgccccaagccggccttttaactccacacccctcttag

SEQ ID NO: 6323 - DNA, 240 bp, synthetic construct
  misc_feature 1..240: note = source = /note="Description of Artificial Sequence: Synthetic coding sequence"
  source 1..240: mol_type = other DNA
atgaagctgcattcactgatttctgtgctgctcctctttgtcaccctgatccctaagggtaaaactggcgtgatccccggccagaagcagtgtattgctctcaaaggagtctgtagggacaagttgtgctccacacttgatgacacgatcggaatttgtaacgaagggaaaaaatgctgcaggaggtggtggatcctcgagccttatcccacgcctgttcccaaaggtaagtcgccttag

SEQ ID NO: 6324 - DNA, 1620 bp, synthetic construct
  misc_feature 1..1620: note = source = /note="Description of Artificial Sequence: Synthetic coding sequence"
  source 1..1620: mol_type = other DNA
atgtcagagccacaagagaagaagctgtcggagaacaccgatttcctggctccaggagttagcagttttactgattcaaaccagcaggagtctattacaaagcgcgaagaaaaccaggaacaacctcgtaactattcccaccatcagctcaatagatcctccaagcattctcagggtctgcgcgatcagggaaaccaggagcaggatcccaacattagtaacggagaggaggaagaagagaaggagccaggagaagtcggcacccataacgacaaccaggagcgaaaaactgaactgccacgtgagcatgccaactccaagcaggaagaggacaatacccagtccgacgatatcttggaggagtccgatcagccaacacaggtgtctaagatgcaagaagacgagttcgaccaaggtaaccaggagcaggaagacaattctaatgccgaaatggaagaggaaaatgcttcaaacgtaaacaagcacatccaggagacagaatggcagagccaggaggggaaaacaggactcgaggccatcagcaatcataaggaaacagaggagaagacagtttccgaagcccttctgatggagccaacagacgacggcaacacgacgccaaggaatcatggcgtagatgatgacggtgacgacgatggggacgatggtggcaccgatggaccgcgccatagcgccagcgacgattactttattccaagtcaagcgttcctggaggccgaaagagcccagtctatcgcttaccatctgaagatcgaagagcagagagaaaaagtgcatgaaaatgagaacattggcacaaccgagcccggtgagcaccaggaggctaaaaaagcagaaaattcgtccaatgaggaggagacctcatcggaaggcaacatgagagttcacgctgtggatagctgcatgagctttcaatgcaagcgagggcacatttgtaaagcagaccagcagggcaagccccattgcgtatgtcaggaccctgtgacgtgtccacctacaaagccgttagaccaggtctgcggaaccgacaatcaaacgtatgcgtcttcatgtcacctgttcgcaacaaagtgtaggctagagggcactaaaaagggacaccagctgcagctcgattattttggggcttgcaagtccatccccacatgtactgattttgaggtcattcagttccccctgagaatgcgcgactggctgaagaatatcctcatgcagctgtacgaagcgaactcggaacatgcaggctacctgaatgaaaagcagcgaaacaaggtcaaaaaaatatatttagacgaaaaacgactgctggctggggaccatcccatcgacctgctgttgagagacttcaaaaaaaactaccacatgtatgtctaccccgtgcattggcagttctctgagctggatcagcatcctatggatagggttctgacccactccgaactggcacccctgcgcgcatccttagtgcccatggagcactgtatcaccagattctttgaagaatgtgaccctaataaggataaacacattaccctcaaagaatggggtcactgcttcggaattaaggaagaggatatcgacgaaaacctgcttttttag

SEQ ID NO: 6325 - DNA, 2535 bp, synthetic construct
  misc_feature 1..2535: note = source = /note="Description of Artificial Sequence: Synthetic coding sequence"
  source 1..2535: mol_type = other DNA
atgggtcccggtgctccatttgcccgcgtggggtggccactgccactgctggtggtgatggcggccggagtcgcgcccgtgtgggcatcccattccccacatctcccaaggccacactctagagtgcctccccacccctcatccgaacgtagagccgtgtacattggtgccctgtttccgatgtccggaggttggccagggggacaggcttgtcagcccgcagtagagatggccctcgaagatgtcaactcccggcgggatatcctgcctgactacgagctcaagttgatacatcatgactctaaatgtgaccctggccaagctactaagtatctgtacgagctgctttataacgatccaataaagataatcctgatgcctggatgctcctcagtgtccaccctggtggccgaagccgcacgaatgtggaacctgatcgtgctttcctatgggtcctcgagtcccgcactttctaatagacagagattccctaccttctttcggactcacccctctgccaccttacacaaccctacacgcgtgaaactgttcgagaaatggggttggaagaagatcgccaccattcagcagacaaccgaggtgtttacgagcaccctggacgaccttgaggagcgcgtaaaggaggccgggatagaaattactttccgacaaagctttttttccgatcccgccgttcctgtgaagaacctgaagcgacaagatgctaggataatcgtgggcttgttctacgagacagaggcccgcaaagtgttctgtgaggtgtataaagagcggctcttcggcaagaagtacgtttggttcctcataggatggtacgctgataactggtttaagatttatgaccctagcataaattgcacagtggatgaaatgactgaggccgtggaggggcatatcacaaccgagattgtaatgcttaatcctgcaaatacgcggtcaatctccaacatgacctctcaggagttcgtcgaaaaacttactaagagactgaagagacacccagaggaaacaggcggcttccaggaggcgcccctcgcttacgatgctatctgggccctagccctggcactaaataaaacctcaggggggggcggacggagcggggtgagattggaggactttaactataataatcagacaattaccgatcagatctaccgggcaatgaactcaagcagcttcgagggcgtgtcagggcatgtggtgttcgatgcctcaggctctaggatggcatggaccttgatcgaacaacttcagggaggcagctacaaaaaaatcggatattacgacagcactaaggatgatctcagttggtccaagactgataaatggataggaggtagcccccctgcagatcagacactggtgatcaagacattccgtttcctcagccagaagttattcatttctgtctcagtcctgagcagccttggcattgttctggccgttgtgtgcctcagtttcaatatctataactcccacgtgcggtatatccagaactcccagccaaatctgaataacttaactgcagtaggctgtagcctggcactggctgctgtgttcccgttaggtctggacgggtatcatataggcaggaaccaattcccattcgtttgccaggcaagactctggctgctgggcctggggttttcactgggctatggctccatgttcactaaaatctggtgggtgcacaccgtttttaccaagaaggaagagaaaaaagaatggagaaagaccctcgaaccctggaaactttacgccacagtgggcctcctggtgggcatggacgttctcactcttgccatttggcagatagtagaccctctccatcgaaccatcgagactttcgccaaggaggagcctaaagaggatatcgatgtctctatcttgccacagctggaacactgttcgtcaaggaagatgaacacatggctgggaatcttctacggttacaaggggctcctactgctccttggaatctttctggcatacgaaactaagtctgtatcaactgagaagattaacgaccacagggctgttggcatggccatttacaacgttgcagttttgtgtctaattactgcccccgtcaccatgatcctgtctagtcagcaggacgccgcctttgccttcgctagcctggctatcgtcttcagctcttacataacactggtcgtgctgttcgtgccaaagatgcgacggcttatcacaaggggcgagtggcagtcagaggctcaagacactatgaagaccggttcttcaactaataacaatgaggaagagaaatccaggcttttggagaaagagaatcgggaactggagaaaattattgctgagaaggaggagcgggtgtccgaactccgtcatcagttgcaaagtcggcagcagctgaggtctaggaggcatccaccaacgccaccagagcctagtggcggccttcctaggggcccccctgaacccccagatcgcctgtcttgcgatgggtccagggttcatctgctgtacaagtag

SEQ ID NO: 6326 - DNA, 993 bp, synthetic construct
  misc_feature 1..993: note = source = /note="Description of Artificial Sequence: Synthetic coding sequence"
  source 1..993: mol_type = other DNA
atgcagctgtttctcttgctgtgccttgtcttgctgtccccacagggggccagcctccaccgtcaccaccccagagagatgaaaaagcgagtagaggacctccacgttggggcaaccgtggccccgtccagccgaagagactttacttttgatctgctaggcaatgctctgttcacggatctagttgtggacttacaggatacgtttgtctctgccatgaaaaccttgtacctggcagatactttccctacaaatttcagggatagcgcaggcgcaatgaaacagataaacgactacgtagcgaaacagacgaaggggaaaatagtggacctcctgaagaatttagactctaatgcggttgtcatcatggtgaactatatcttttttaaagctaaatgggaaactagcttcaaccacaagggtacccaggagcaagatttctatgttacgagcgagacagtggtccgcgttcctatgatgtctagagaggatcagtaccactacttactggataggaacttgtcatgcagagttgttggcgtgccataccaggggaatgctactgccctctttattctcccctccgagggaaaaatgcaacaagtggagaacggcctttccgagaagacactaaggaagtggcttaagatgtttaaaaaacgtcagctggaactttacctgcctaaatttagcatagagggatcctaccagctggagaaggtgctaccctcgttaggtattagcaacgtcttcacctcacacgccgatttgtccggcatctctaaccactctaatattcaggttagcgaaatggtccacaaagctgttgttgaggttgatgagtctgggacacgcgccgccgcagcaaccggaacgattttcaccttcaggagtgctcgactgaatagtcagcggctggtctttaataggccgtttctgatgtttattgtcgataataacatcctgtttttggggaaggttaatcggccctag

SEQ ID NO: 6327 - DNA, 2676 bp, synthetic construct
  misc_feature 1..2676: note = source = /note="Description of Artificial Sequence: Synthetic coding sequence"
  source 1..2676: mol_type = other DNA
atgctccccactgaggtgcctcagtctcatcccgggccttccgctctcctgttgctgcagctcctcctcccccctacctcagcattcttccctaacatctggagcctactggccgccccaggcagcattacacaccaggatttaacagaggaggctgccctgaacgttactctccagctatttctcgaacagccgccgcctggccggcccccgctgaggctggaagatttcttgggtcgcacgctactggccgatgatctattcgccgcctactttggccccggctctagccgacgcttccgcgcagccctgggcgaggtgtcgcgcgctaatgcagcccaagactttttgcccacctcccgcaacgacccagacctacacttcgatgctgaacggttagggcaagggagagcacgcctggtgggcgcccttagagaaacagttgtagctgcacgagcgctagatcacactcttgcccgacagagactaggcgcggccctgcatgccttgcaggatttctactcccatagcaactgggtggagctgggggagcagcaaccccacccacacctgttatggcccagacaggagctccaaaatctggcccaggttgctgacccaacttgcagcgactgcgaggagctttcttgcccccggaactggctggggttcaccctgttgactagtggctatttcggcacacaccctcctaagccaccagggaagtgttcccatggtggccactttgatcgatctagctcacagccacctcgtggagggatcaacaaagacagtacttcacctggcttttcaccccaccacatgctccatctgcaggccgccaaactggctctgctggccagtatccaggcattctcccttttacggtccaggctgggtgacagggacttcagtcggttactcgacatcactcctgccagcagtctaagctttgtgctggacaccacagggtccatgggtgaggaaattaacgccgccaaaatccaggccaggcatctggtggagcaacgccgtggatccccaatggaacctgtgcactatgtcctagttcccttccatgatcccgggttcggacccgtgttcactacttccgacccagacagcttctggcagcaattgaatgagattcacgcgcttggaggaggcgacgaaccagaaatgtgcttgtctgctcttcaattagctctgctccatactccacctttgtcagacattttcgtgttcacagacgcctcacccaaagatgcgttcctgacaaatcaggttgagagtctgacccaagaacggaggtgtagggtgacctttctcgtgactgaggatacctcccgcgtgcagggcagggcaaggcgtgaaattctgagtcctctgcggttcgagccctacaaggctgtagctctggcttcaggcggtgaggtgatattcaccaaggaccagcatattcgggacgtggccgccattgtcggggaatccatggctgccctggtgacgttaccgttggatccacccgtggtggtaccaggccagcctctcgtatttagcgtcgatggattgctgcaaaagatcacggtgcgtattcatggagacatatcctccttttggattaagaacccagccggcgtgtctcagggacaagaggagggggggggacccctgggccataccagaagatttggtcagttctggatggttaccatggacgatccgccccagactgggacctgggagatccaagtgacagctgaggacacaccgggtgtgcgcgtgcaggctcagacatcactagactttctattccactttggaatccctatggaagacggcccccatccgggcctatatcccttgacccaacccgtggccgggcttcagactcaattgctcgtggaagtcactggcctgggttcacgcgcgaacccaggcgatccccaaccacatttttcccatgtgatactgaggggggtccccgagggggcggagcttggtcaggtcccgctggagccagtgggaccccctgagcgcggactgctagccgcctccctgtcgccaacattactgagcactcccagacccttctctctggagctgattggccaggatgcggctggccgcagattgcaccgcgctgctccccagcctagcactgtcgtccctgtcttgctcgagttgagcggtccatctggctttctggccccaggaagcaaagttcccttgtccctgagaatcgcctccttttcaggcccacaggacctggatctccggacttttgtaaatcctagcttttcccttacctccaatttaagccgggctcacctcgagttgaacgaatctgcctggggacgcttatggctggaggtgcccgacagcgcagcccccgacagcgtagtgatggtaacagtcactgcaggtgggcgggaagccaatcctgtgccaccaacacatgcctttttgagactcctggttagcgcccccgcaccacaagaccgccacactactccaacagggtcgtccgacccgattctgactacagccactcccgccttcagtcccttcaccctggtcacacagggccgcgccggagccgggcttgcggctggatcaccctggtggggtacagtgggcggcgttttactcctgcttggactagcgtcttggtag

SEQ ID NO: 6328 - DNA, 708 bp, synthetic construct
  misc_feature 1..708: note = source = /note="Description of Artificial Sequence: Synthetic coding sequence"
  source 1..708: mol_type = other DNA
atgaagtacgtgttctacctgggcgttctggcagggacatttttcttcgcagattcatccgtgcagaaagaggatccagcaccctaccttgtgtacctgaagtcacacttcaacccgtgcgtgggcgtgctgatcaagccctcatgggtgcttgcaccggcacattgttatctccccaatctcaaagtgatgttagggaacttcaaatctcgcgtgcgtgatggaacagagcagaccataaaccctatccaaatcgtcaggtactggaactactcacactccgccccacaggacgatttgatgctcattaagttagcgaaacctgcaatgttaaaccctaaagtgcagccactgactctggcaaccacaaatgtgcggcctggaactgtttgtctactgagtggcctcgattggagccaggaaaatagcgggcgacaccccgacctccgacagaaccttgaagcacccgtgatgtctgacagggaatgtcagaagactgagcagggtaagtcccaccggaacagcctctgtgttaaattcgtgaaagtgtttagccggattttcggtgaggtcgcagtggctacagtcatttgtaaagacaaacttcagggaatagaggtcggccactttatgggcggggacgtgggcatctatactaacgtctacaagtatgtgtcatggattgaaaacactgcaaaggacaagtag

SEQ ID NO: 6329 - DNA, 1386 bp, synthetic construct
  misc_feature 1..1386: note = source = /note="Description of Artificial Sequence: Synthetic coding sequence"
  source 1..1386: mol_type = other DNA
atgtcgctagacatccaatccttggatatccagtgcgaggagctctctgatgcgagatgggccgagctgctgccgctcctgcaacagtgtcaggtggtacgccttgatgactgcgggctgacagaagcacggtgtaaagatatttcctctgctctacgggttaaccccgccctggctgagctcaacctgaggtccaacgaactcggcgatgtgggtgtgcactgcgttctgcagggactgcagaccccaagttgcaagatacaaaaattgtctcttcagaattgctgcctgaccggagctggatgcggagtccttagcagcacactgcgcaccttgcccacactgcaggagctgcatctgagcgataatctgttgggcgacgctgggctgcagctgttgtgtgagggcctactggatcctcaatgtcgtctggagaaacttcagctagaatactgcagcttgtctgcggcctcctgtgaacccctggccagcgtactccgggccaagcccgattttaaagagttaaccgtgtcaaataacgacatcaatgaggccggagtgagggtgctatgccaagggctgaaagattccccgtgccagctggaggcccttaagctcgaatcatgtggtgtgacgtctgacaattgccgagacctgtgtggtattgtggcctccaaggcaagtttgagggaactggccctaggaagtaataaacttggcgacgtcggcatggctgagctgtgtcctggtcttcttcacccgtcctctcggttaaggactctgtggatctgggagtgcggcatcacagcgaaggggtgtggcgatctgtgccgagtgttaagggctaaggagtctctcaaagagctttcactggccgggaacgagttaggggacgagggcgcccgtctgttgtgcgaaacgttgttggagcccgggtgtcagctcgaaagcctgtgggtgaaatcttgtagcttcactgccgcctgctgctcccatttcagctccgtgctggcccagaaccgtttcctcttagaattgcagatctctaacaatcgtttagaggacgccggcgtgagggagctttgccagggtctcggtcagcccgggtcagtccttagagtcctttggctggccgattgtgacgtgagcgattcctcttgctcctctctggcagctaccctccttgccaatcacagcttgagagaactcgatctctctaataactgcctcggtgacgctgggattctccagttagtggagtcagttcgccaacccggatgcttactcgaacagttggtgctttacgatatatactggtccgaagaaatggaggaccgattacaggccctcgaaaaagataagccatctctgagggttatctcatag

SEQ ID NO: 6330 - DNA, 2676 bp, synthetic construct
  misc_feature 1..2676: note = source = /note="Description of Artificial Sequence: Synthetic coding sequence"
  source 1..2676: mol_type = other DNA
atgctgcccactgaagtccctcagtcccatcccggacctagtgccctcttgctgctgcagctcctgctgcccccaacatcagctttcttccctaatatctggtcattactggctgcacctggttccatcacccatcaggacttgacagaggaggcggcccttaacgtgaccctccaactattccttgagcagcccccccctggacggcctcctctacgactcgaggactttctcggacggaccctgctggccgacgacctctttgccgcctattttggaccaggaagtagccgaaggtttcgggcagctcttggagaagtgagccgcgctaacgcagctcaggacttcttgcccacgtcacggaacgaccctgacctgcacttcgatgctgaacgtctgggccaggggcgggctaggctggtgggggcactgcgggaaaccgtcgtggccgcacgggctctagaccacactctggcccggcaacgattgggagccgcactgcacgcccttcaggatttttacagtcattccaattgggtcgaactaggagaacagcagccacacccacacctcttgtggccacggcaggaattacaaaacctggcacaagttgcagacccgacatgtagtgactgcgaagaacttagttgtccccggaattggctaggtttcacccttttaacaagtggctacttcggcacacaccccccaaagcccccaggaaagtgtagccatgggggccatttcgatcgctcctcatcccagccccctcggggaggtataaacaaggatagcactagcccgggcttctctccacatcatatgttacacctccaggctgctaaactggccctgctggcatccatccaggcctttagcctgctcaggtctcggctgggcgatagggactttagcaggctgctggacatcactcccgccagttcgctctctttcgtgttagatacgactggttctatgggggaagagattaatgctgcaaaaatccaggcacgtcatttagtggagcagaggagaggatcccctatggaacccgtgcattatgtccttgttcctttccatgatcccggcttcggaccagtctttacaacttctgatccagattcattctggcaacagctgaatgagatccacgccttagggggaggagacgaaccggagatgtgcctctcagctctacagctggccctccttcacacgccgccactgagtgacatcttcgtctttactgacgcttcgcctaaggacgcatttcttactaaccaagtagagtctttgacccaggaaagacggtgcagagtcacctttctggttactgaagacacttccagagtccaaggccgggccagacgcgagatcctgagtccccttcgcttcgagccttacaaggctgtggctctcgcttccggtggagaagtgatctttaccaaggaccagcatattagagatgttgctgcaattgtgggggagtcaatggctgctttggtcacattaccgctggacccccctgtggtggtccctggccaaccactggtgttctcagtggacggactgctccagaaaataactgtgaggattcatggcgacatctccagcttctggatcaagaatcctgcgggagtctcccagggacaggaggaagggggcggacccctcggccatactaggagatttgggcaattttggatggtgacaatggacgacccaccccaaacaggcacttgggagatccaagtcaccgcggaggacacaccaggagtccgcgtgcaggcccaaacatccctggacttcttgttccatttcgggattccaatggaggacggacctcatccagggctctaccccttgacccagccggtggccggactccagacgcaactgctggtggaggttaccggcctggggtcccgcgccaaccctggcgatccccaaccacatttttcccacgttatcctaaggggcgtgccagagggggctgagcttggccaggtgcccctggagcccgtaggtcctcccgagcgtggccttcttgctgccagcctgagtccaaccctcctaagtacaccccgacccttcagtctcgaacttattggccaagacgccgcaggtagacgcctgcacagagctgcgcctcagccctctacagtggtgccggtgctgttggagctcagcggtcccagtggattcttggcccccggatcaaaggttccattgtccctccggatcgcgtcttttagcggcccccaagacttggacttgcgaacgtttgtgaacccgtccttcagtctgacctcgaacctgtctagggcgcatctggagctgaatgagagtgcctgggggcggctctggttggaggtgcccgacagcgcagccccggacagcgtggtgatggtcacagtgaccgccggcggccgagaagccaatcctgtgccccccacccacgccttcttgaggttattggtgagtgcccctgctccacaggatcgtcacactacacccactggctcctccgaccccattcttaccaccgctacaccggcttttagccctttcaccctggtcacccagggcagggcaggcgccggtttagccgccgggtccccatggtggggtacggttggcggagtgctacttttactcggcctcgcttcatggtag

SEQ ID NO: 6331 - DNA, 501 bp, synthetic construct
  misc_feature 1..501: note = source = /note="Description of Artificial Sequence: Synthetic coding sequence"
  source 1..501: mol_type = other DNA
atggggccggaggcactcagctcactcctcttgctgcttctggtggcctccggcgatgctgatatgaagggtcacttcgaccctgctaaatgcagatatgctctggggatgcaggataggacaatccccgattctgacatcagcgccagcagctcttggagtgacagcacggccgcccggcacagccgccttgaaagtagtgatggcgatggtgcttggtgcccagccggtagcgtgttccccaaagaggaagagtatttgcaggttgaccttcaaagactgcaccttgtggctctggtgggtacccaaggccgtcacgccgggggcctcgggaaggagttcagcagaagttatcgactgaggtactcccgggatggccgtcgctggatgggctggaaggatagatggggtcaggaagtcatcagtggtaatgaagacccggagggggtggtcttgaaagacttagggccaccgatggttgcgcgattagtacgtttctag

SEQ ID NO: 6332 - DNA, 420 bp, synthetic construct
  misc_feature 1..420: note = source = /note="Description of Artificial Sequence: Synthetic coding sequence"
  source 1..420: mol_type = other DNA
atgcaggcagcctgttggtatgtgttatttctgctgcagcccaccgtttacctggtcacctgtgctaatcttacgaacggaggaaagagcgagcttctgaagtctgggtcttctaaatccaccttgaagcacatctggacagaaagtagcaaggacttgagcataagtcggttgctgagtcaaacatttcgagggaaagagaatgacacggacctggaccttagatacgacaccccagaaccctattccgaacaagatctctgggactggctgaggaacagtacggatcttcaggagccacgcccccgagccaagaggagaccaatcgtgaaaacagggaagtttaagaaaatgttcggttggggtgacttccactctaatatcaagaccgtgaagttgaatctgttgattacaggatag

SEQ ID NO: 6333 - DNA, 2412 bp, synthetic construct
  misc_feature 1..2412: note = source = /note="Description of Artificial Sequence: Synthetic coding sequence"
  source 1..2412: mol_type = other DNA
atggccgctgccggcctggtcgctgtggctgctgcagcggagtactcaggaacagtggcctccggaggcaatctccctggggtgcactgcggaccatcctctggagccggccctgggtttggtcccgggagctggtctcgatcactggacagggccctcgaggaggccgctgtgacaggagtgctatccctgtccggacgcaagctgcgcgagtttccaaggggtgctgctaaccatgatttgacagatacaacacgcgccgacctctctagaaacagattgagtgagatcccaatagaggcgtgtcatttcgtttctctggaaaaccttaatctatatcagaactgcattagatacatcccagaagcaatactcaaccttcaggcattgacatttctcaatatttcacggaatcagctgtcaaccttgccagtccatttgtgtaacctgcccctgaaagtgctgattgcctccaataacaagctcgtgtctctgcccgaggagatcggccatctccgtcacttaatggagttggatgttagctgtaatgaaatacaaaccattccctctcaaataggcaatctcgaagctttacgtgatcttaacgtgcgccgcaaccatctcgtacatctccctgaggagctcgctgaactgcccctgatcagattagacttctcatgcaataagatcaccacaatacccgtatgctatcgcaaccttaggcacttgcagactatcacactggataataatcctctccaaagccccccagcgcagatttgcatcaaagggaaagtgcatatctttaagtatttaaacatacaggcttgtaagatcgctcccgacctaccagactacgaccgacggcctctcggttttggctcatgtcacgaagaactctactcaagtcggccttatggagcactagacagcggatttaattcggttgactcaggggacaagaggtggtctggaaatgaaccaacagatgagttttctgatctacctctcagggtagctgaaatcacgaaggaacagcgcctccgtagggagtcacagtaccaggagaacagagggagtctggtcgtgaccaatggaggagtggaacatgacttggatcagatcgactatatcgatagctgcaccgcagaggaggaggaagcggaagtcagacagcccaagggccctgacccagattctttgtcctcacagttcatggcatacatcgaacagaggaggatcagtcacgaagggtccccagttaagcctgtcgcaattcgggagtttcagaagacagaggatatgcgtagatatctgcatcagaaccgcgttccagccgagcccagctcacttttaagcctgagcgcctctcacaatcagctttcccatacagacttggagttgcatcaacgacgagaacaattggtggagagaaccaggagggaggctcagctggccgctctgcagtacgaagaggagaagataaggactaagcagatccagagagatgctgtcttggattttgttaagcagaaggcatcccagtctccccagaagcagcatccattgttggacggcgtggatggagaatgcccatttccctccaggagaagccagcatacagacgactcggccctctgcatgagtttgagcggcctgaaccaagttgggtgtgctgccacactgccacatagcagcgcgtttacgccacttaagagcgacgatagaccaaacgccctgcttagttctcctgcgaccgaaactgtgcatcattctcccgcttactcctttcctgccgctatccagcggaatcaacctcaaagacccgagagtttcctgttccgcgccggtgtgcgggccgaaactaacaagggacatgcgtcacctctgcccccgtccgcagcgcctactaccgattctacagactccatcactgggcagaacagccgtcagcgggaagaagagttggagctgatcgaccaactgaggaagcatattgagtaccggctgaaagtcagcctaccttgtgacctcggggctgctctgactgacggagtagtgttgtgccatcttgctaatcacgtgagaccaagaagtgtgccctctattcatgttccatcacctgccgtcccgaaattgacaatggcgaagtgtcggcgtaacgtggaaaattttttggaagcctgccgcaagataggcgtaccgcaggacaacctgtgttctccatctgacatcctccagcttaacctgtcggtgaaaaggactgtggaaacactgctttcgctcggcgcgcattctgaagaatctagctttgtgtgtctctcactgcaactcttaggctttgtggcgttttactgtacagtgatgctgacgttgtgtgtactatactattggcttttccctgcccgttag

SEQ ID NO: 6334 - DNA, 633 bp, synthetic construct
  misc_feature 1..633: note = source = /note="Description of Artificial Sequence: Synthetic coding sequence"
  source 1..633: mol_type = other DNA
atgtacaaagccagaccgcctgccggctcaggcggcccgggtgctgagcctcctgcaatggcggccccaagaggtcgcgcggcgccctggacaaccgctctactgcttctcttagcatcccaggttctctctccaggttcctgtgcagacgaggaagaggtaccagaagagtgggtgctgctccacgttgttcagggccagataggtgctggcaactatagttacctgcgcctgaatcatgagggcaaaattgttttacgcatgcgatccctgaaaggagacgctgatctctatgtcagtgcctcatcactgcacccttccttcgacgactatgagcttcagtctgccacttgcgggcctgacgctgtctccattcctgcccactttcgccgtccagttggcatcggcgtgtacggccatcccagccatctggagtccgaatttgagatgaaagtatactacgacggcaccgtcgagcagcatccgttcggagaagccgcttacccggccgatggagccgatgccgggcagaagcacgcgggagcaccagaagacgcctctcaagaggaggaatccgtgctgtggacgatcctcatatcaatcctgaagttggtgctggagattctgttttag

SEQ ID NO: 6335 - DNA, 486 bp, synthetic construct
  misc_feature 1..486: note = source = /note="Description of Artificial Sequence: Synthetic coding sequence"
  source 1..486: mol_type = other DNA
tgatgtcccacagagataatagccttcggcgataggctcgaggaattccgatccatcaacaccgaggtggttgcgtgtagtgtcgattctcagtttactcacctggcctggataaatacgccccgaaggcagggtggacttggccctatccgtatccccctactgtccgacttgacacaccagatcagcaaggattacggagtgtacctggaggactctggccacacccttcgtggcctgttcattatcgacgataaaggcatcctcaggcagattacactcaacgatctccctgtcggccgctctgttgacgagacccttaggttggtacaggccttccagtacacagataagcacggcgaggtgtgtcctgccggctggaagccagggagtgaaactatcaagcccgaggacaccatgaaagcgtggtggcctcgcgaaagctataaccccaggtcatcctggaaggctgaggtctttcggtag

SEQ ID NO: 6336 - DNA, 2886 bp, synthetic construct
  misc_feature 1..2886: note = source = /note="Description of Artificial Sequence: Synthetic coding sequence"
  source 1..2886: mol_type = other DNA
atgctcctgctgctcctgctggccccattgtttctaagaccccccggcgctggcggagcccaaacacccaacgctacctcagagggctgtcagataatccatccaccctgggaagggggcatacggtacagggggctgacacgcgatcaggtgaaggccataaatttcctgcccgtggattacgaaatcgaatacgtgtgtagaggtgagagggaggtggtgggcccaaaggtgaggaagtgtctggctaatgggtcttggactgatatggacaccccctctaggtgcgtgaggatatgtagtaagtcttacctgacactcgagaacggaaaggtctttcttactggcggagaccttccagctctagacggagcgcgggtggattttaggtgcgacccagacttccatctcgtgggtagcagcaggagtatttgttcccagggacaatggagcacccccaagccccattgccaggtgaataggactccacactccgagcgacgtgctgtttatattggtgccctatttccaatgagtgggggatggcccggaggtcaggcatgccaacccgctgtggaaatggcactggaagatgtcaacagcaggcgggatattctgcccgattatgagctgaagctgatacatcacgattcgaagtgcgatcctgggcaggcgaccaagtatctgtatgagttattgtacaacgaccccatcaagattatcctgatgccaggctgttcttctgtcagtactcttgtggccgaggccgcgcgcatgtggaacctaatcgtgttatcgtatggcagctcttccccagcactgtcgaataggcagcggtttcccacctttttccgaacccacccatctgcgaccctgcacaaccccactcgcgtgaagctgttcgagaaatggggctggaagaaaattgcaaccattcagcaaacaactgaggttttcacctcaaccctggatgacttagaggaaagggtgaaagaggcaggcattgaaattaccttcagacagtcgtttttctctgatccagccgtaccagtaaagaatctcaagcgccaggacgcccgaatcatcgtgggccttttctatgagacagaggcacggaaggtgttttgtgaggtttataaggagagactgtttggtaagaaatacgtatggtttctcattggatggtatgctgataactggttcaaaatatacgaccctagcattaattgcaccgttgacgagatgaccgaagctgtggaaggccatatcacaacagaaatcgtcatgctcaacccagccaacacccggtcaatttctaacatgacatctcaagagtttgtcgaaaaattgaccaaacgcctcaaacggcatcccgaggagaccggcggcttccaggaggcacctctggcatacgatgctatctgggctctggcacttgcgctgaataagacatcaggcggggggggcagaagtggagtgagattagaggacttcaactataataatcaaaccatcacagaccagatctatcgagccatgaatagctcaagcttcgaaggggtgtcaggtcatgtggtgttcgatgcctccggatccaggatggcttggacactgatcgaacagctgcagggtggaagttataagaaaattggctattatgactccacaaaagatgacctgtcttggtcaaaaactgataaatggatcggtggtagtccccccgctgatcaaactctggtaatcaaaacgttccgtttcctttctcaaaagttgttcatctctgtatcagtcctctcctctctcggcattgtcctagctgtggtctgtctaagctttaatatttacaactctcatgtgagatacattcaaaattcacaaccaaacctcaacaatttaaccgcagtggggtgctcgctcgccctggctgccgtgttcccactgggcctcgacgggtatcacattggacggaatcagttccctttcgtttgtcaggcacgtctgtggctgttgggattagggttctctctgggatacggtagcatgtttacaaagatctggtgggtgcacactgtctttaccaagaaagaagaaaagaaagaatggagaaaaaccttagagccctggaagctatacgctacagtaggattactggtgggtatggacgtcctcacactagctatatggcagatagtggaccctctgcatcgaacaattgagacatttgccaaagaagaaccaaaagaggacatcgatgtctcaatcctgcctcagctggagcactgctccagtcgaaaaatgaatacttggctaggtattttctacggctacaaagggctgctgctgctgcttggcatattcctcgcatacgaaaccaagtccgtgtctaccgagaaaataaatgaccaccgagccgttgggatggccatttataacgtggctgtgctgtgcttaatcacagccccagtaactatgattctgtctagtcagcaggatgccgcatttgcttttgcatctctcgcaattgtcttctcctcctatatcacccttgtggttttgttcgtccccaagatgagaaggctgatcactcgcggcgagtggcagagtgaggcccaggacactatgaagactggttcctccactaacaataacgaagaggagaaatcaagacttttagagaaagagaatagggagctggagaagatcatagccgagaaggaggagagagtttccgagcttcgacaccaacttcagtcccgccagcagctgaggtcacggagacacccccctacaccaccagaaccgtctggggggctccctaggggaccaccagaacctcccgacagactgtcatgtgatggctctcgcgtgcatctgctgtataagtag

SEQ ID NO: 6337 - DNA, 2853 bp, synthetic construct
  misc_feature 1..2853: note = source = /note="Description of Artificial Sequence: Synthetic coding sequence"
  source 1..2853: mol_type = other DNA
atgacttggcggatggggccccggtttacaatgctgctcgccatgtggctggtgtgtggatctgagcctcacccgcacgccaccattagggggtctcacggtggaaggaaggtcccgctcgtcagccccgatagctccagacccgcccgcttccttaggcacaccggacgatctcgtgggatcgaacgatccacacttgaggaaccaaatctccagcccctgcagcggaggaggtctgttcctgttctaaggctggctagacctaccgaacccccagccagaagcgacatcaacggcgccgctgtgcgtcctgagcagagacccgccgcacgcggaagcccaagagagatgatcagggacgagggctcatccgcgcggagccgcatgctccggttcccttccggcagctcttcaccaaatatactcgcctctttcgcaggcaagaaccgggtttgggtgatatccgcaccccatgcaagcgaggggtattaccgcttaatgatgagcctgctcaaggatgacgtgtactgcgaacttgctgagcgccatattcagcagatagtgctgttccatcaggcgggggaggaaggaggaaaggttagaaggatcacctccgagggccagatcctggagcagcctctggaccctagcttaattccaaagctcatgtccttcctgaagctggagaagggtaaattcggaatggtgctccttaaaaagaccctgcaggtggaggagcgctacccctacccagtccggcttgaggctatgtacgaagtcattgaccagggcccgatccgacggatcgaaaagataaggcaaaagggatttgttcaaaaatgcaaggcctctggcgttgaaggtcaggtggttgccgagggcaatgacggggggggtggcgctggccggccatcacttgggtccgaaaagaaaaaggaggaccctcggagggcacaggttcctcctacacgcgagtcccgcgtgaaagtgctgagaaaactcgcagccactgcccccgcactacctcagcctcccagcacccctcgcgctactacattgcccccagcacctgcgaccacagtaacgcggtctaccagccgcgccgtgacagtagcagcccgccctatgacaaccacagccttccctacgacgcagaggccctggaccccgagcccctcccacagacctcctaccactacggaagtgataacagcgcgccgtcctagcgtgtccgagaacctctaccccccaagtcgcaaggatcagcatcgggagagaccacagaccacccggagaccttctaaggccacatcactggagagcttcacgaatgccccaccaactacgatctctgagcccagtacaagagctgcaggacctgggaggtttcgcgataaccggatggaccgacgggaacatggccatcgtgatcctaacgtcgtaccagggcccccaaaacccgctaaagagaaaccgcccaaaaagaaggcacaggacaaaatcttgagtaacgagtacgaggagaaatacgacctgtcaaggcctaccgccagtcagttggaagatgaattgcaggtggggaacgtccctctaaaaaaggctaaagagtccaaaaagcatgagaaactggaaaagcccgaaaaagaaaagaaaaagaaaatgaagaatgagaatgcggataaactattgaagagcgaaaaacaaatgaaaaagtcggagaaaaaatctaagcaggagaaggaaaagagcaagaaaaagaagggcggaaagacagagcaagacggctaccagaagcctacaaataagcacttcacccaatctccaaaaaagagtgttgctgatctgctcgggagcttcgagggcaaaagacgccttctgctgattacagctcccaaagctgagaataacatgtacgttcagcagagagacgagtatctcgaatctttttgtaagatggccacgagaaagatctcagtcatcactatctttgggccagttaataacagtactatgaagatcgatcacttccagttagacaatgagaagcctatgagagtggtggacgatgaggacctagtcgatcaaagactcatctccgagctgagaaaagagtacggcatgacctacaatgacttcttcatggtcctgaccgatgtggacttgagggtcaagcagtattatgaggtgcccattacaatgaaaagcgtgttcgacttgatcgacaccttccagagccgtattaaggacatggagaagcagaagaaagagggcattgtctgtaaagaggacaagaaacagtcccttgaaaatttcctcagcaggttccgatggcggcgaagacttctcgtgatctcggcacccaatgacgaggattgggcttactcccagcagctgtccgccctctctgggcaggcatgtaatttcgggcttcggcacattaccatactgaaactccttggggtaggggaagaagtcgggggcgttctcgaactctttcccatcaatgggagctccgtggtggagcgggaagatgttcctgcccatttagtgaaagacatacggaattacttccaggtatctccagagtacttcagcatgctgttagtgggtaaagatgggaatgttaaatcgtggtatcccagccccatgtggtccatggtgatcgtgtacgacctgatcgactccatgcaactcaggcggcaagagatggctatccagcagtccctgggcatgagatgcccagaggatgaatacgctggatacggatatcacagttaccatcagggataccaggatggctatcaggacgattaccggcatcacgagtcctaccatcatggctacccctactag

SEQ ID NO: 6338 - DNA, 351 bp, synthetic construct
  misc_feature 1..351: note = source = /note="Description of Artificial Sequence: Synthetic coding sequence"
  source 1..351: mol_type = other DNA
atggctgccggtagtgcacctatgcaactgcatcttagagcaaccatccgaatgaaagacggcctgtgcgtaccccggaagtggatctatcacctaaccgaagggagtactgaccttcgcacagaagggcggcccgacatgaaaacggagctgttctcctcctcatgcccggggggcatcatgctgaatgaaacaggacagggctaccagcggttcctgctctataatcggtcaccccaccctccagagaaatgtgtggaggagtttaagtccctgacctcttgtttagattccaaagctttcctcctgacaccacgaaaccaggaagcttgtgagctgtccaataattag

SEQ ID NO: 6339 - DNA, 1251 bp, synthetic construct
  misc_feature 1..1251: note = source = /note="Description of Artificial Sequence: Synthetic coding sequence"
  source 1..1251: mol_type = other DNA
atgaagtttcagggccccctcgcttgtttgctgctggctttatgcctgggcagcggcgaagcaggaccccttcagtcgggtgaggagagcacaggaacaaatatcggggaagctctgggccacggtctgggggatgccctttcagagggggtaggcaaagccatcggaaaggaggccggcggggcagccggctctaaagtaagcgaggccctgggacaggggacccgggaagctgttgggactggagttcgacaggtgcccgggtttggggtggctgacgcccttggaaatcgtgttggggaggctgcccacgcactgggcaacactggccacgagatagggcggcaggcggaggacgtgatcaggcacggcgcagacgctgtaagagggtcatggcagggggttcccgggcataatggtgcgtgggaaacttccggggggcatggcatttttgggagccagggcggtctcggtggccagggccagggcaatcctggtggcctgggaacgccctgggtacacggatacccggggaattccgcaggaagctttggaatgaatccacaaggagccccttgggggcaggggggaaatggaggacctccaaatttcgggacaaacacacaaggagccgtggcccagcccggatacggttctgtgagggcatcaaatcaaaacgaagggtgtactaatcctccccctagtggatccgggggtgggtcctccaactccggcgggggttcagggagtcagtcaggctccagcggctccggttccaacggcgataataacaacgggtcttctagtggtggttcctcatctggcagcagcagcggcggatcatctggcggcagcagtggcgggagctctggtaatagtgggggatcgcgcggcgactctgggtccgagtcatcttgggggagcagcacagggtcatcgtcaggtaaccacggcggcagtggggggggcaacggtcataaacccggttgtgagaagcctgggaacgaggcccggggctccggcgagagcggcatacaaggcttccggggccaaggagtaagctcaaatatgcgagagatcagcaaggaaggtaaccgtctccttggagggagcggtgacaattaccgcaattcggagacatccccaggcatgtttaattttgacacgttctggaagaacttcaaatcgaagttaggctttatcaattgggatgctattaataaagatcaaaggtctagtcgcatcccttag

SEQ ID NO: 6340 - DNA, 933 bp, synthetic construct
  misc_feature 1..933: note = source = /note="Description of Artificial Sequence: Synthetic coding sequence"
  source 1..933: mol_type = other DNA
atggtggataaggacaccgagcgggacattgagatgaaaagacagctgcgcagacttcgggaacttcatctttattccacttggaaaaagtaccaggaggcaatgaaaacctcactgggggtccctcagtgtgaacgggacgagggcagtctcggaaaacccttatgtcctccagaaattctttctgaaaccctccccggaagtgtgaaaaagcgggtgtgcttcccatctgaggatcacctggaagaatttatcgccgagcatcttcccgaggcatccaaccagtccctgttgacagtggctcacgctgatgccggtacacagacaaatggggatctcgaggatctagaggaacacggccccgggcagaccgtgtccgaggaggctaccgaggtgcatacaatggaaggggatcctgatactttagcagaatttctgataagggatgtgctgcaggaattgtcctcttataacggtgaggaagaggaccccgaggaggtgaagacatccttaggcgtgcctcagcggggggatcttgaggacctcgaggaacacgtgccgggacaaacagtgtctgaagaggccacaggggtgcatatgatgcaagttgacccagcaacactggctaaatcagatctcgaagacctggaggagcacgtcccggagcagactgtgtccgaagaagcaactggagtccatatgatgcaggtggaccccgccacgttggccaagcagctggaggatagcactataaccgggagtcaccaacaaatgagtgcctctccaagctccgcccccgctgaagaggccaccgagaaaaccaaggtagaggaagaagtgaaaaccaggaaaccgaaaaagaagactcgaaaaccatctaagaaaagtcgttggaatgtgctgaaatgctgggacatttttaacatcttttag

SEQ ID NO: 6341 - DNA, 150 bp, synthetic construct
  misc_feature 1..150: note = source = /note="Description of Artificial Sequence: Synthetic coding sequence"
  source 1..150: mol_type = other DNA
atggctcccccttcagtgccactcgtgctcctgctcgtcttgcttttgtccctcgccgaaactccggctagcgcccccgctcaccggagttccactttccctaaatgggtgaccaagaccgaacgagggcgtcagcctcttcggagctag

SEQ ID NO: 6342 - DNA, 978 bp, synthetic construct
  misc_feature 1..978: note = source = /note="Description of Artificial Sequence: Synthetic coding sequence"
  source 1..978: mol_type = other DNA
atgcagggaagagtcgcaggtagctgcgcccctttaggactacttcttgtgtgcttgcacctccccgggcttttcgctagaagcatcggtgttgttgaggaaaaggtttcccagaatctcggcactaatcttcctcaattggggcagccatcatcaacaggtccttcaaacagcgaacatccccagcccgccctggaccctcggtccaatgacttagcccgcgtgcctctcaaactttccgtgccagcctccgacgggtttccccccgctggaggatcagccgttcagcgctggccgccttcgtggggcttacctgctatggactcttggccacccgaagacccctggcagatgatggcagctgctgccgaggaccgactcggtgaagctctcccggaggaactgagttatctctccagcgcagcagccctcgctcctggcagcggcccgttgcctggtgagtccagcccagatgctaccggcctgagccctaaagcttcactactgcatcaggactcagagtcccgcaggctgcctcggtctaattctctgggcgctggtggaaagatcctgtcacaaaggcccccatggtctctgattcatcgtgtcctgcccgatcacccttggggtaccctgaacccttctgtgtcatggggaggggggggcccgggcaccgggtggggcactaggccaatgccccaccctgagggaatttggggcatcaacaatcagccccctggcacatcctgggggaacattaatagatatcctgggggttcatggggtaacattaataggtaccccggcggttcttggggcaacatcaaccgatacccaggtggcagctggggtaatatccacctgtatccagggatcaataatcctttcccacctggagtgctcaggcctcccggcagctcatggaatatcccagcaggtttccctaatcccccctcaccgaggcttcaatggggctag

SEQ ID NO: 6343 - DNA, 390 bp, synthetic construct
  misc_feature 1..390: note = source = /note="Description of Artificial Sequence: Synthetic coding sequence"
  source 1..390: mol_type = other DNA
atggcagcaggctctgcaccgatgcaactccatctcagggcaaccattcggatgaaggacgggctgtgtgtgcccaggaaatggatctatcatctaaccgagggtagcactgacctaaggaccgaaggccgccctgacatgaaaacagagttgtttagttcttcatgccctggtgggatcatgctgaatgaaactggccagggataccaaagattcttactgtacaaccggtccccacaccctcctgaaaagtgcgtggaagagttcaagtctctcaccagctgtcttgattcgaaggcctttttattgacgcccaggaatcaggggaaggggctcaaaagccataagacaggactcgggctcaccaaatcttcaggggtgacaggatag

SEQ ID NO: 6344 - DNA, 1056 bp, synthetic construct
  misc_feature 1..1056: note = source = /note="Description of Artificial Sequence: Synthetic coding sequence"
  source 1..1056: mol_type = other DNA
atggcgggtattcctggcctgctgttcctgttgttttttctgttgtgcgccgtcgggcaggtatcgccatactccgccccttggaagccaacctggccagcttaccgtttgcctgtagtgctccctcagtcaacccttaacctcgcaaaacagtacttatcatacgagacattgtacgcaaatggctcacggacggagacccaggtgggcatctacatcttatccagcagtggggacggtgcacagcaccgggactcgggctcatcaggcaaatcaaggcgcaagagacagatttatggatatgactcgaggttttccattttcgggaaggattttctgctgaattacccgttctccaccagtgtgaaactgagtacggggtgcacaggaactctggttgccgaaaagcacgtcttgaccgcagcgcactgtatacatgacggtaagacttacgtgaagggcacccagaagctgagagtcgggttcctgaaacctaaatttaaggacggcggtagaggtgccaatgatagtacctcggccatgccagagcagatgaaatttcaatggattagagtgaaaagaactcatgttcctaagggatggataaagggaaatgccaacgacattggtatggattacgactacgctctgttggagctaaaaaagcctcacaagagaaagttcatgaagataggtgtttcgccacctgccaagcagttgcctggcggtcgtattcatttcagcgggtatgataacgatcggccagggaacctggtctaccgcttctgcgatgtgaaggatgaaacctatgacctgctgtatcagcagtgtgacgctcagccaggtgccagcggtagcggggtgtacgtgaggatgtggaaaaggcagcagcagaagtgggagcgaaaaattatcggtatcttttcagggcatcagtgggttgatatgaatggtagtccacaggatttcaacgtggctgtcagaatcacacccttaaaatatgcacagatttgctactggataaaaggcaattaccttgactgcagggagggctag

SEQ ID NO: 6345 - DNA, 345 bp, synthetic construct
  misc_feature 1..345: note = source = /note="Description of Artificial Sequence: Synthetic coding sequence"
  source 1..345: mol_type = other DNA
atggaaagaggggcaggggctaagctgctgccactactcctgctgcttcgtgctaccgggttcacatgtgcgcagacggacggccggaacggctataccgctgtcatcgaggtcacctcaggtgggccgtggggcgactgggcttggccagagatgtgtccagacggtttctttgcttctggattttcgctgaaggtggagcctcctcaagggatccctggcgacgatacagccctcaatgggatccggttacactgtgcccgaggcaacgtgctggggaatactcatgtggtggaaagtcagtcaggaaggtggggcgctggcgtcgaagatcccctcggttag

SEQ ID NO: 6346 - DNA, 825 bp, synthetic construct
  misc_feature 1..825: note = source = /note="Description of Artificial Sequence: Synthetic coding sequence"
  source 1..825: mol_type = other DNA
atgtggcggtgccctctagggttgcttctgttgttacctcttgctgggcaccttgcacttggcgcccagcagggcagaggtaggagggaactcgctcctggcctccacctgcggggtatcagagatgccggggggagatattgtcaggagcaggatctctgttgccgcggaagggcggacgattgcgctttaccctacctgggtgcaatttgctactgtgaccttttttgcaataggactgtgtctgattgttgccctgacttttgggacttttgccttggcgtaccgcctccctttcctccaattcagggctgcatgcacgggggtaggatttatcctgtcctcgggacttactgggataactgcaaccgatggcctcccttagagtgctgggatctgctcccccccgcgctcccagggccggtctgggcagcgttaggcgccaaagaagaaatggctgggaaggatcggaccgtctactgcccattgctcatgaaggccctcggcgcccgagtgggtgagtgcccaggctgccagtcaccccagcgcatgctgcccgaatcctcgagggtgcttcttccaaggtgcgcagagggcgagcagcccggcgtgcagcgcggcaagggcagaatgaggaaagcatttccagcactgcagacaccactggccctcccgtcaagcgcacccgctagcccaggggcgggtaagcccagccacacaggcagctggctgcctctgcggctcctgaagcggcagcactggcggtgggagccctggactgcgtgtaaggaggccgtgcagcatctggtgattacggagttgtag

SEQ ID NO: 6347 - DNA, 438 bp, synthetic construct
  misc_feature 1..438: note = source = /note="Description of Artificial Sequence: Synthetic coding sequence"
  source 1..438: mol_type = other DNA
atggctcaattgtttctgccattactagcagctctggtcctggcccaggcccctgctgctttagctgatgtgcttgagggcgattccagtgaggaccgggccttcagggtgcggatcgctggagatgcacctctccaaggagtactgggaggggcccttacaatcccctgtcacgtgcattatctgaggccacctccctcacgaagggccgtcctcggctcgccccgggtcaaatggacattcctgtctcgtggccgcgaggcggaagtactcgtggcacgcggagtaagagtcaaagtaaatgaggcttatcgctttcgggtggctcttcccgcttatcccgcttccttgacggacgtgtctttagcactgtccgaactgaggccaaacgattccggcatctatcgctgtgaggtgcagcatggaattgacgattag

SEQ ID NO: 6348 - DNA, 567 bp, synthetic construct
  misc_feature 1..567: note = source = /note="Description of Artificial Sequence: Synthetic coding sequence"
  source 1..567: mol_type = other DNA
atgtttcatcaaatttgggccgccttattatacttctatggtatcattctgaatagcatctaccaatgtccagagcattctcagctgacgacacttggagttgacgggaaagagtttccagaagtccacttaggccagtggtacttcatagcaggggccgcccccaccaaggaggaactggccactttcgatcctgtggacaatattgtttttaatatggcagcaggttctgccccaatgcaactgcacctgcgggctacaatacgcatgaaagatggtctgtgtgtccctcgcaagtggatctaccaccttactgaaggctccactgacctgaggaccgagggtcgcccagatatgaagactgaactattcagcagctcctgccccgggggtattatgctgaacgagaccggacaaggatatcagcgattcctcctgtacaaccggtctccacaccctcccgagaaatgcgtcgaagaattcaagtctctgacctcttgcctggatagcaaggctttcctgctcacacccaggaatcaggaagcttgcgagttgtccaacaattag

SEQ ID NO: 6349 - DNA, 558 bp, synthetic construct
  misc_feature 1..558: note = source = /note="Description of Artificial Sequence: Synthetic coding sequence"
  source 1..558: mol_type = other DNA
atggggcctgccgggtgcgcctttacactgctgttgctgctcggcatatccgatcgggactaccactctgccttgcaggaggcggaggtgcctatcatcgacaggcaggcctgcgagcagctgtataacccgattggcatcttccttcctgcactggaaccagtcatcaaggaggacaaaatttgtgcaggtgacacacagaatatgaaagattcatgcaagggcgacagtggcggcccgctgtcttgtcatattgacggtgtctggatccagaccggcgttgtttcatggggactggagtgcggcaagtccctacctggggtttacaccaacgtcatttattatcagaaatggattaacgccactatttctagggctaacaatttagattttagcgatttcctcttcccaattgtgctgctgtcccttgctctcctacgaccatcatgtgccttcggtccaaacacaatacacagagtgggaacggtggcagaggccgtagcctgcatccaaggctgggaggagaatgcctggcggttttcccccagggggcgctag

SEQ ID NO: 6350 - DNA, 1653 bp, synthetic construct
  misc_feature 1..1653: note = source = /note="Description of Artificial Sequence: Synthetic coding sequence"
  source 1..1653: mol_type = other DNA
cccgcccccgccagcagaaaactgttaccacgacgccatttgtctgagaagtcccaccacatatctattccgtcaccagatataagtcataagggcctgaggtcaaaaagaacccaaccgagcgaccctgagacctgggagtccctgccccgacttgacagccaaaggcatggagggccagaattttcctttgacctgttgcctgaagccagggcaattagggttaccattagttctggaccagaggtgtccgtgcgcctgtgccaccaatgggcattggaatgcgaagaactttcaagcccatatgacgtacagaaaatagtgagcggcggccacaccgtcgagttaccatacgaattcctcttaccatgcctgtgcatcgaagcctcttacttacaggaggacaccgtaagacggaagaagtgtcctttccagagctggcccgaggcttatgggagcgatttttggaaatctgtccatttcacagattacagccagcatacccagatggtgatggcactgaccctacggtgtcccttgaagctggaagcagccttatgccagagacacgattggcatacgttgtgcaaggatctccccaacgctacggcacgcgagtccgatgggtggtatgtgttggaaaaggtcgatcttcatcctcagttgtgctttaaattctcattcggcaacagttctcatgtggaatgtccccatcaaacaggatcactgacatcctggaatgtatcgatggatacgcaggctcagcagctcattctgcacttttctagcagaatgcacgctaccttctcagcagcatggagtctccccggcctcggacaggataccttggttccccctgtgtatacagttagccaggccagggggagctccccagtgagcctagatctgattatcccgttcttgaggcccggttgctgcgtgctggtgtggcgttctgacgttcagtttgcctggaaacacttgttgtgcccggatgtctcttaccgtcacctcggactactgatccttgctctgctcgcactgctgactttactgggtgtcgtcctagcgttgacatgtcggaggcctcagtctggcccaggcccagcacggcccgtcctcctactgcatgcagccgactcagaagcccagcgtaggttagttggcgcactggctgagttgctgagggccgcactgggcggcggaagggacgtcatcgtggacctgtgggaagggcgccacgtggccagagtagggcccctcccctggctctgggccgcccggaccagggtcgccagggagcaaggtacagtgttattgctatggagcggcgctgacctccggccagtatccggacctgatccaagagccgcaccgctcctggccctgctgcatgccgctcctcggcctttgttgctgcttgcttacttcagtagactgtgcgctaaaggagacatcccccctccactccgagctctaccacgctaccggctcttgcgagatttgcctaggctcctccgggccttagatgcccgcccttttgccgaggctacaagttgggggaggctaggggcccggcagagaaggcagtcaagattggagctttgctcgaggcttgaacgggaggccgctcgactcgcagacctgggctag

SEQ ID NO: 6351 - DNA, 816 bp, synthetic construct
  misc_feature 1..816: note = source = /note="Description of Artificial Sequence: Synthetic coding sequence"
  source 1..816: mol_type = other DNA
atgggtattgtatgtgcccagtgttctttcatactgttgctgtccattattagagccagaccgccacctttcctcttttgcccgttgagcagtcagcgcactgagtccccctacaagcccgtgcacttaggccttgggcccacggataaagtggcagccattgccatggcccggattatcgacctggtgccttgggacgacggatctactcatgtttacgcttctcctgcgatcttgttgcccatggagagacagagaaaccagctggccggcgtgaagcaacagctgtaccatcctgccctccccacgctaaggcatatggaccgggacaccgtgaaagcatgtctcccggatgaacattgccagtcgacaacctactgtcgcaaggatgaatttgataatgctcattttaccttgctgggggtgcctaacaaaccccttcagtgtctcgacataaccgcaaccggccagaaactgcgcaatcgataccatgagggcaaactagctccaatagccccagggatcaacagggtggattggccctgtttcactagagccatagaggattggtctcacttcgtgagctccgccggagaatttaaactgccatgtctccgaaagcgcgcggaagggctttcgggctacgccgttcggtatctgaagcctgatgttacgcagacctggcgatactgtctgtcacagaatcccagtctggatcgctacggccagaaacccctccctttcgattcactcaataccttcaggtcattcggatcctcatactcccgagtgaattatctcaccccttggcattag

SEQ ID NO: 6352 - DNA, 1743 bp, synthetic construct
  misc_feature 1..1743: note = source = /note="Description of Artificial Sequence: Synthetic coding sequence"
  source 1..1743: mol_type = other DNA
atgcatctgtccgccgtgttcaacgccctattggtgtctgttttggctgctgtcctatggaaacacgtacggttgcgtgagcacgccgcgaccttggaagaagagctagcactctcacgtcaagcgaccgaacctgcaccagcattaagaatcgattacccaaaggccctgcagatactgatggaaggaggcacgcacatggtttgcactggaaggactcatacagaccggatctgccggtttaaatggttgtgctactccaacgaggccgaggaattcattttcttccatgggaacacatccgtgatgttgccaaatcttggctccagacggttccagcccgccttgcttgatttgtcaactgtggaagatcacaatactcagtactttaatttcgtggaactgccggcagccgcgctgcggtttatgcccaaacccgttttcgtgccagatgtggcactgatcgcaaacagatttaatcccgataacctgatgcatgtgtttcacgacgacctgctgcctctcttctacacactgcgtcaattccccgggctggcacatgaggctagactttttttcatggagggatggggcgaaggcgctcattttgacctgtataagttactttctccaaaacaacctctcctgcgcgcccaactgaaaactctcgggcggctcctctgcttcagtcatgcttttgtgggcctaagcaagatcaccacgtggtatcagtacggctttgtgcaacctcagggccccaaggccaatatcttggtgtcaggtaacgaaatacgccagtttgccagattcatgacagagaaacttaacgtttcccatacgggagttccacttggggaagagtacatcttagtcttttcgaggacccagaacagactgattctgaacgaagcagaactcttgttggctctcgctcaagagtttcagatgaagaccgtgactgtatcattagaagaccatacatttgccgatgtggttaggcttgtttctaacgccagtatgttagtcagtatgcatggagcccagttagtaactaccctgtttctccctcgcggcgccaccgtcgtcgagctgtttccttatgctgtgaatcccgaccactacactccatataaaacgctggccatgctccccggcatggacctacagtacgtggcctggaggaacatgatgccagaaaataccgtaactcatccggagagaccttgggatcaaggcgggatcactcacttagatagggccgaacaagctaggattctacagtccagggaggtgccacggcacctttgttgtagaaatcccgagtggctgtttcgcatttaccaagataccaaagttgatataccctctctaatccagacaatccgtcgcgttgtgaaaggaaggcccggcccacgtaagcaaaagtggactgtcggactgtacccaggcaaagtgcgcgaggcacgttgtcaggcctctgtccatggagcatccgaggctcgcctgaccgtgtcatggcagatcccttggaatctaaagtatttgaaagtaagggaggtaaaatacgaggtttggttgcaagaacaaggggagaacacctatgtaccgtatatcctcgctctccagaatcacactttcaccgagaacattaagccgttcaccacttacctggtttgggtgagatgcattttcaacaaaatcctgctcggacccttcgctgacgtcctggtgtgcaacacctag

SEQ ID NO: 6353 - DNA, 513 bp, synthetic construct
  misc_feature 1..513: note = source = /note="Description of Artificial Sequence: Synthetic coding sequence"
  source 1..513: mol_type = other DNA
atggagtttgttgatgtgacagaaagtaacgcgcgctgggtgcaagatttcaggctgaaagcctacgctagcccagcaaagctggaatccattgacggagctcgttaccatgcactgttgatccctagctgccctggtgcgctgaccgacttggccagctccggatcactggctcggatccttcaacacttccacagtgaatccaaacccatttgtgctgtgggccacggggtggctgctctatgttgtgcaaccaatgaagaccggagctgggttttcgattcgtacagtctgactggaccttctgtctgcgaactcgtgcgtgccccagggtttgcccggctgcccctcgtcgtggaagactttgtcaaggatagtggcgcctgtttcagtgcgtcggaacccgatgcagtgcacgtcgtcttggacaggcacctggtgacggggcagaacgccagcagtaccgtcccggccgtccagaatctcctctttttgtgtgggtcaaggaagtag

SEQ ID NO: 6354 - DNA, 1041 bp, synthetic construct
  misc_feature 1..1041: note = source = /note="Description of Artificial Sequence: Synthetic coding sequence"
  source 1..1041: mol_type = other DNA
atgaggctgctgtttctggccgtgctgagaccacacaccggcaatgctgtaacagcacagcgggtccgagcccatctggaggcggccggccacgtgtgtgtgctgaaggacgcgtttgactttgagagtagatccgagattgcaaatttgattctcgctgagaattgcgaagccgccctcgctctccacctctaccgaggcggtcgccttctccaggggcaccgaattcctttcggggtgatcttcggcggcacggacgtcaacgaggacgccaaccaggccgagaagaatacagtcatggggcgagtgctggaggaagcgagattcgccgtcgccttcactgaatctatgaaggagatggcacaggcccaatggccccacgcaaagggaaaagtgtacgtgcagtcccagggcatcgccacaacacctaacgcggccttcaactggaacactttccttcagcgctcagagatcaatcagtccgcggacaatctccatatcttcctgctgatctgcgggctccggcaggtgaaagatcccctgtatctggtggacgcgttctcggcctggcaccaggaggagcccaatgttcacctggtaatcgtgggacctgaggttgatccggtcttcacccgggaggtgaaggctaaggtaaagcgggcagctggggtccggctgatcggagagatgccccaagaagacttacacgccgtggtgaaaaattgcttcgccgtggtgaattcctccgtgagtgaggggatgagcgcagcaattttggaagcaatggacctggaggtccctgtgttagccaggaacatccccggcaatgctgccgtggtcaaacatgaggttaccggattacttttttctaacccacaagagtttgtacatttggctaagcgtttagtatctgatcctgcattagagaaggagatcgtggtgaatggaagggaatacgttagaatgtatcacagctggcaggtcgagcgcgatacttatcaacaactgatccgaaagttggagggctccacagaggactag

SEQ ID NO: 6355 - DNA, 1482 bp, synthetic construct
  misc_feature 1..1482: note = source = /note="Description of Artificial Sequence: Synthetic coding sequence"
  source 1..1482: mol_type = other DNA
agcgaggcagtgtatctgaacgatagcacctatgacgggcacacagtgggcggcctgcagtacggcggtctgggacagcttgctgacggcgtggtgggcctggacgactttcgaaagagtcaggaattacgcgtgtggcccggttacgactatgttggttggagtaatcacagcttttcttctgggtacgttgagatggaattcgagtttgatcgactgcgggcgtttcaggctatgcaagtgcattgcaacaatatgcacaccctcggcgcgcgcctcccagggggcgtggagtgtcgatttagacggggaccagccatggcatgggagggcgagcctatgaggcataacttgggagggaaccttggagacccacgagctcgtgcagtaagtgtgccattggggggtcgagttgctaggttcctgcagtgcagattcctcttcgcaggtccctggctcttatttagcgaaattagctttatctctgacgtagtgaataactcatctccagccctgggtgggacctttcccccggcaccctggtggccacctggccctcctcctaccaacttcagctcccttgagttagaaccaaggggacagcaacccgtggcgaaggctgaggggtcacctacagctatcttgataggctgtttggttgcgattatactgttgttgctcctaattatcgcccttatgttgtggcgacttcattggagaaggttactttccaaggtactcgaaagccatccacggacccggagccctggcttggtaggaatccgccctacaccattaccggtttcccctatggcactccgctgttgctcaccgatccagccaacagcctccttttggccgcttacccctgtgcctctggaggctagagcaccacctcatcccccaggaccgaaccccccaactccgcgtggcgttaccggcggaaacacatacgcggtgcccgccctgccgcctggggctgtgggagacggacccccgagagttgactttccacgctctcgtctgcggttcaaggaaaaattgggagagggacagttcggcgaagttcatttgtgtgaggtggattcccctcaggacctggtctccttggactttccactgaacgtgcgaaagggacaccctctgttggtagccgtaaaaatcctgcggccagacgcaacgaagaacgctcgcaacgactttcttaaggaggtgaaaatcatgtctcgcctgaaggatccgaacattatccgcctgcttggggtctgtgtgcaggacgatcctctgtgtatgattactgactatatggagaacggagatcttaatcagttcctgtctgctcatcaactggaagataaagccgccgagggagcccccggagatggccaggctgcccaaggtcccacaatctcttaccccatgctcctgcatgttgcagcccagatagctagcggcatgcgctacctggctaccctgaattag

SEQ ID NO: 6356 - DNA, 354 bp, synthetic construct
  misc_feature 1..354: note = source = /note="Description of Artificial Sequence: Synthetic coding sequence"
  source 1..354: mol_type = other DNA
atgttaatcttctggactattactctcttcttgcttggcgcggccaaaggcaaggaagtctgctacgaagacctcgggtgctttagtgacaccgaaccgtggggtggcacagctattcggcccctcaaaatactcccttggtccccagagaagatcggaacccggtttttgctttacactaacgaaaaccccaacaactttcagatactgcttctgagcgacccgtcaactatcgaagcttcgaactttcagatggatagaaagactagattcatcatacatggatttatcgacaagggagatgagtcttgggtgaccgacatgtgcaaacccggcgcttcccccagggcctag

SEQ ID NO: 6357 - DNA, 1581 bp, synthetic construct
  misc_feature 1..1581: note = source = /note="Description of Artificial Sequence: Synthetic coding sequence"
  source 1..1581: mol_type = other DNA
atgcaggggcctctcctgctcccaggcctctgcttcctgctcagcctgttcggggctgtgactcagaaaacgaaaacctcatgtgcaaagtgcccaccaaatgcaagctgcgtaaacaacactcactgcacgtgcaatcatggctacacttccggctccggccagaagctctttactttccccctggaaacctgtaatgccatcgagacacaggccatcaccgacaactgctcagaggaacgcaagacatttaacttgaacgtccagatgaattccatggacatccgctgtagtgacattattcagggagatactcagggaccctctgctattgcctttattagctactcatctttgggtaatattatcaatgcaaccttcttcgaggaaatggacaagaaggatcaggtgtatctgaatagccaggtggtgagcgccgcaattggccctaaacgcaatgtgtccctgagcaaatctgtcacgctcactttccaacacgtaaagatgacacccagcaccaaaaaggtcttctgcgtgtattggaagtccaccggccaaggcagtcagtggtcaagggacggttgttttctcattcatgttaacaagtcacacaccatgtgcaattgtagccatctttcctccttcgctgtactcatggccctgacctctcaagaagaggacccagtcctgaccgttattacatacgtaggattatccgtgtccttactatgtctgctgttggccgcgcttaccttcctgctgtgtaaagctataaggaacactagtacctcactgcacctacaattaagcttgtgtctgttcctggctcacctcctgttcctggtggggattgaccgaacagaaccgaaagtactgtgctctattatagctggtgccctacattacctctatcttgcggcttttacttggatgttactcgaaggggtgcatttgtttcttaccgcgaggaatctcacagttgttaactattcatctatcaatcgcttaatgaaatggattatgtttccagtcggctatggagttcctgccgtaactgtcgcaataagcgccgcctcctggccacatttatatggtacagcggatagatgttggttgcacctagatcagggttttatgtggagcttcctgggaccagtttgcgccatcttttcagcgaacctggtgctctttatcctagtgttttggatcctgaagcgcaagctgagcagcctcaatagcgaagtgtctacaatccagaatactaggatgctggctttcaaagctacagctcagctgttcattctggggtgcacttggtgcctcggcttattgcaggtgggccccgctgcccaggttatggcgtacttgtttacgatcatcaattccctccagggattttttatctttctcgtgtattgcctgctgtcccaacaggtccaaaaacagtatcagaagtggttccgagagatcgtcaagagcaagtccgaatctgaaacatatacactgtccagcaaaatgggcccagattccaaaccttccgaaggcgacgtgttcccaggacaagttaaacgtaagtactag

SEQ ID NO: 6358 - DNA, 5832 bp, synthetic construct
  misc_feature 1..5832: note = source = /note="Description of Artificial Sequence: Synthetic coding sequence"
  source 1..5832: mol_type = other DNA
tgaccgagtctcgcgggcagaggagctggacgaatggctccaggggccctgagggggggctgcgaacaaagagctccaggcgggggagcccgaaccgcagccctgggcccgtggccgtggccaagcccaggcccagcgcctagtcctggcgctgctcccccccggagccggaaaatgagcggcgctctgctgtggccactgcttccactcctccttctgctgctctccgcgagggacggcgttagggccgcacaaccccaggcccccggttacctgatcgcagcacctagtgttttccgggcaggcgtggaggaagtgattagcgtaacaatattcaattcacctcgtgaggtcactgtgcaagcccagctggtcgcacaaggggaacctgtggtgcagtcgcagggtgctatcctggacaagggcacaatcaagctgaaggtcccaactggcctgcgcggacaagccctcctgaaggtctggggcagaggatggcaggccgaagaaggtccactgtttcacaaccagacatccgtcaccgtagatggccgtggagcctctgttttcatacaaaccgataagcctgtgtaccggccacagcacagagtgctgatcagtatctttaccgtatcacctaacctgagaccagtcaatgagaagcttgaggcgtatattcttgatcctagggggtcacggatgatcgaatggcgccacctcaaaccattttgctgtggcatcactaacatgtcattccctctctccgaccagcctgttctgggggagtggtttatcttcgtggagatgcagggacatgcttacaataagtccttcgaggtgcaaaagtacgtcttacccaagttcgaactgctcatcgaccccccacgctacatccaagacctcgatgcctgtgagactggcacagtcagagctagatatactttcgggaaaccggttgctggcgctctgatgatcaatatgactgttaacggagttgggtattacagtcatgaggttggccgacccgttctgaggaccaccaaaatactcggaagtagagacttcgatatctgcgtcagagacatgatacccgctgacgtacctgagcactttagaggcagagtctccatttgggccatggtgacttcagtcgatgggtcacagcaggtggccttcgatgactcgactccagtgcagaggcaactggtcgatatccggtattctaaggacactagaaaacaatttaagccagggctggcatacgtgggtaaagtcgaactcagctaccccgacggttcacccgccgaaggagtcacagtgcaaattaaagccgaactcaccccgaaggataatatttataccagcgaggtggtttctcagcggggactggttggcttcgaaattccttcaatacctaccagcgcacagcacgtgtggctggagacaaaggtgatggctctgaacggtaagcccgtaggtgctcagtatctgccttcatacctgagcttggggtcctggtactcgccgtctcaatgttacctccagctgcagcccccaagccacccacttcaagtcggcgaggaagcttatttcagtgttaagtccacatgtccctgtaatttcacactgtattacgaagtggctgctagggggaacatcgtgctttccggtcaacagcctgctcacaccactcagcagcgttctaaaagggctgctccagctctcgagaaacccattcgactcacccacctgagtgagacggaacctcctcccgctcctgaagctgaagtggatgtgtgtgttacttccctgcatctcgccgtaactccttcaatggtgcctctggggcggctgttagtcttctatgtgcgggagaacggcgaaggagtggcagattccctccagttcgccgtggaaacctttttcgagaatcaggtttctgtaacctattcagcaaatgagacccagccaggcgaggtggtggacttacgcattagggccgccagggggtcatgcgtgtgcgtcgccgcggtcgacaaaagtgtctacctgttgcgctcagggtttcgactcacacctgcccaggtgttccaggagctggaggactacgacgtcagcgactccttcggggtcagtcgcgaagacggaccattttggtgggctggactaacagcccagagaagacggaggagctccgtgttcccttggccctggggtataacaaaggattccggcttcgcctttaccgaaaccgggctggtcgtaatgaccgaccgggtctccctcaatcatcgacaggacggtggtctgtacacagatgaagccgtacccgcgttccagccacacaccggttctctggttgccgtagctccctctagacatcctccacgcacggaaaaacgcaagagaactttcttccctgagacctggatatggcactgcctcaatattagcgatccaagcggtgaagggacgctgagcgtgaaggtgcctgacagtattacatcatgggtgggcgaggccgtggcgctaagtactagtcagggcttgggcattgccgaaccaagtctcctgaaaacttttaagccctttttcgtggacttcatgctgccagcgctgatcatcagaggagagcaggtcaagatccccttgagcgtgtataattatatgggtacatgtgccgaggtgtatatgaagttaagtgtaccgaagggaatccagttcgttggccacccaggaaagagacatgtgacaaagaaaatgtgcgtcgcacccggggaggccgaacccatttgggtggtcctgtctttttctgacctaggcttgaataatatcacggcgaaggcactggcttatggagatactaattgttgccgcgatgggcggtcatcaaagcatcccgaagagaaccacgcagaccgacgggtacccattggcgtggaccacgtaaggagatcagtgatggtcgaagccgaaggcgtgcctagagcatacacttacagtgccttcttttgcccctctgagcgggtgcacatctctacgcccaacaaatacgaattccagtatgtgcaaaggcctctccggcttacccgctttgatgtggctgtgcgcgcccataacgatgctagagtggctctaagctctggaccacaggataccgctggaatgatcgaaatcgtactcggaggccatcagaatacccgctcctggatctcgacaagcaaaatgggtgagccagtggccagtgcccacactgctaaaatcttgtcctgggacgagtttcgtacattttggatttcgtggcgaggggggttaattcaggtcgggcatgggccggaaccaagtaacgagtctgtcatcgtagcttggacccttcctcgtccacctgaggtccagttcatcggcttctctaccggctgggggtcaatgggcgaatttcgaatctggcgtaagatggaagtggacgagtcttactcagaagcctttaccctgggggtgccccatggcgctatcccaggaagcgaacgcgcgaccgcttccatcattggggatgttatgggcccgacccttaatcacttgaacaatctgttgagattaccctttgggtgtggggagcagaatatgatccactttgccccaaatgtgtttgttctcaagtatttacagaagactcaacagctctctcccgaagtggaacgagagaccacagattaccttgttcagggctatcagaggcagcttacctataagcgacaggatggctcttacagtgcttttggagagcgcgacgctagcgggagcatgtggctcaccgctttcgtcctgaaatcgtttgcacaagcccgatcttttatcttcgtggacccccgtgagctcgccgccgccaagtcttggatcatccagcaacagcaagctgacggaagctttctagctgtcggacgtgtcttaaacaaggacattcagggcggtattcacggtaccgtacctctcactgcatatgttgtggtggcgttgctcgagaccgggaccgcctctgaggaggagcggggatctactgataaggccagacactttctggaatcagctgccccgctggcaatggatccttatagctgcgccttgacgacgtacgctttgacactacttcggtcaccagcagcccctgaagcgctgaggaagttgagatccctagctatcatgcgggacggcgtgacccactggagcctctccaattcttgggatgttgacaaggggacattcctctcgttttccgatagagtatcacagagcgtggtctccgccgaggtcgaaatgacggcatacgctctgttgacctacaccctcctcggtgacgtggccgccgctctcccggtcgtgaagtggttaagtcaacagcggaacgcgctcggtgggtttagtagtacacaagatacgtgcgtggcacttcaagcattagcagaatatgctatcctaagctatgctggagggattaacctgaccgtgagcctagcgtctacaaatctggattatcaagagaccttcgagctgcatcggaccaaccagaaagtactgcagacagccgccatccctagcctgcctacaggactgtttgtctctgctaagggggacggatgctgtctgatgcagattgatgtgacatacaatgtccccgatcctgtggctaagccagccttccagctgttagtctctctccaggagcctgaggcgcaggggcggccaccacctatgcccgccagcgcagccgagggtagccggggcgattggccgcccgctgacgatgacgatccagccgcagatcagcaccatcaggagtataaggtcatgctggaagtctgtacaaggtggctgcacgccggcagctcaaacatggccgtgttagaagtccctcttctgagcggattccgagccgatatagaatctttagaacagctcctattagacaagcatatgggaatgaagcgctatgaggttgccggacggcgggtcttgttttacttcgacgaaattcctagccgttgcttgacctgcgtgagattcagagcactgcgtgagtgcgtcgtggggaggactagtgcccttcccgtgtccgtgtacgattactacgagcccgcttttgaagcaacccggttctataacgtctccacgcactctcccctggcgagagaactgtgtgctggccccgcctgcaacgaagtggaacgcgctccggctaggggccccgggtggttccctggtgaaagcggccctgcggtggctcccgaagagggcgccgccatagctcgctgtggatgcgatcacgattgcggcgcccagggtaatcccgtgtgtgggagtgatggagtcgtgtacgccagcgcctgtcgactgagagaagccgcttgtcgccaggcagcacccctggagcctgctccaccgtcgtgctgtgcactggagcagaggctgcctgcgtctagcagctctacttacggagacgatctagcatccgttgcacctggacctctgcaacaggacgtgaagcttaatggcgccggtctagaggtggaagacagtgaccctgagccagagggggaggctgaggaccgggtgactgctgggcctagacctccagttagtagcggcaacctggagagctcgacacagtcagcatcacccttccaccgctgggggcagacgcccgcaccgcaaagacattccggtcgcgtggtaggcgcacatcggcctgggctcctgtcccctgtgttcgtttattctcccgccttccagtctgggggggaggagggcctctggatgagtaacacatgcactttgcgctag

SEQ ID NO: 6359 - DNA, 456 bp, synthetic construct
  misc_feature 1..456: note = source = /note="Description of Artificial Sequence: Synthetic coding sequence"
  source 1..456: mol_type = other DNA
atggaggccacagggacagatgaggtggataaactgaagaccaagtttatctcggcctggaacaacatgaaatattcctgggtgctcaaaacgaagacatatttcagccgcaatagccccgtactgcttctgggcaagtgctaccactttaaatatgaagacgaggataagactcttccagctgagtccggatgtactattgaagaccatgtgatcgccggaaatgttgaggagtttagaaaggactttataagtaggatatggctaacataccgggaagagtttccccagatcgagggttccgcattgacgaccgattgtggctggggatgtaccctgagaaccggacagatgctgctggctcagggattgatactccattttctgggtagagcctggacctggcccgacgcgcttaacatcgaaaattctgattcggaaagctggacttcgtag

SEQ ID NO: 6360 - DNA, 2616 bp, synthetic construct
  misc_feature 1..2616: note = source = /note="Description of Artificial Sequence: Synthetic coding sequence"
  source 1..2616: mol_type = other DNA
atgcgcaagccgaggagaaaatcccgccagaatgcggagggccggaggagcccgtctccttactcacttaagtgctcacctacacgtgaaaccctcacctatgcacaggcacagagaattgtggaggtcgatatcgacggaaggctgcaccgtatctccatctacgatccattaaaaatcatcaccgaggatgaattgactgcccaggacattaccgagtgcaactccaataaagagaattcagagcagcctcagtttccagggaagagcaaaaaaccaagttccaaggggaagaagaaagagtcatgttcgaagcacgccagtggaacaagctttcatctgccccagcccagctttcgaatggtagatagtggtatccagcccgaagcgccacccctccccgctgcatattataggtatattgagaagccacctgaagatctggacgcggaggttgagtatgacatggacgaagaggatctcgcgtggcttgacatggtcaacgagaaacgaagggtggacggacactcactcgtgagcgccgatacctttgagttattggtcgataggctggaaaaggagagctacctagagagtaggtctagcggcgcccaacagtcgctcatcgacgaagacgcgttttgctgtgtgtgtctcgacgatgagtgtcacaattcaaatgtgatcctgttttgcgacatttgcaacttggccgtgcatcaggagtgttatggcgtaccatatatccctgaaggccagtggttatgcaggtgctgcctacagagccctagtcgccccgtggattgcatactctgccctaacaaaggaggagccttcaaacagacctccgacggacattgggcccacgtggtctgcgccatttggatcccagaggtgtgctttgcaaacacagtgtttctggagcctatagaaggaatagacaatatccctccagcccggtggaagctaacctgctacatttgcaagcagaaggggctgggggcagccatccagtgccacaaggtcaactgctacacagcctttcacgtcacctgtgctcagagggcaggcctgtttatgaagatcgagcctatgcgagaaacctccctgaacggcactatttttactgtccgtaaaacggcttattgtgaagcacactccccccccggtgccgcaactgcacgaaggaaaggggatagtcctagatccatttccgaaactggagacgaagagggcctgaaggaaggtgatggcgaagaggaggaggaagaggaagtcgaggaggaagagcaagaagcacaagggggtgtgtctgggtcactcaaaggcgttcccaaaaaatctaagatgtccctgaagcagaagattaagaaagaaccagaagaagctggccaagacacacccagcaccctcccaatgttggcggtgccccagatcccatcttacagattaaataagatctgtagcggcctgagtttccagagaaagaatcagtttatgcaacgcctgcacaactactggttactgaagcgccaggccaggaatggagtgccactgattcggagactgcactcacacttgcagtcccagaggaatgcagaacagagggagcaagacgagaaaactagcgctgtaaaggaagaattaaaatactggcagaaattacgtcacgacctggagagagcccggctcttgatcgagttgatcagaaaacgggaaaagctcaaacgtgagcaagtgaaggttcagcaggcagcgatggagctggagctgatgccctttaatgtactgctgaggacgactttggatttgctgcaagagaaggatcccgctcacatattcgctgaacccgttaatttgtcagaagtgcccgactacttggaatttatcagtaagccgatggactttagcaccatgcggcggaaattggagtcccatctctaccggacactagaggaattcgaggaagacttcaatcttatcgttactaattgtatgaaatacaatgccaaggatacaattttccatcgggcagcagtcaggcttcgggacctgggaggggctatactcaggcacgccagacggcaagctgagaacatcgggtatgatccagaaagaggtacacacttgccagagagtcctaagttagaagacttctaccgtttttcttgggaggacgggcgcagccttctgctgcccttcgaggatcggggcgatttggaaccattggagcttgtatgggccaaatgtaggggatacccttcatatccagcccttatcatcgaccccaagatgccccgagaggggcttctgcacaacggtgtcccgattcctgtcccacctctggacgtgttgaaacttggggagcagaagcaggctgaagccggagaaaaattattcctggtcctgttctttgataacaagcgaacctggcagtggcttccgcgggacaaggtgctacctctgggcgtcgaagataccgtggacaaactgaagatgttagaagggcgcaaaacaagcatcagaaaatccgtgcaggtggcctatgacagagcaatgatccatctgagcagagtaaggggaccacactcatttgtaacatcctcttacctctag

SEQ ID NO: 6361 - DNA, 2700 bp, synthetic construct
  misc_feature 1..2700: note = source = /note="Description of Artificial Sequence: Synthetic coding sequence"
  source 1..2700: mol_type = other DNA
atgctgctactgctgcttctggcccccctgtttctgcgacccccaggtgccggcggcgcgcagaccccaaatgccaccagtgaaggatgtcaaatcatccaccctccttgggagggcggcataaggtatcggggcctcactcgggaccaggtgaaggccattaattttctgcctgtggactacgagattgaatacgtctgcagaggcgagcgggaagtcgttggtccaaaagtgcgcaagtgcctcgctaatggaagctggactgatatggacacacctagtcggtgtgtgaataggaccccacattcagaaagacgggccgtatatataggagcccttttccctatgagcggcggttggcccggtggtcaggcctgtcagcctgccgtggagatggccctggaggacgtgaattctcgccgtgacattcttccagattacgagcttaagttgatccatcatgactccaaatgtgatccaggtcaagcgaccaaatacctgtacgagctgttgtacaatgaccccattaaaattatccttatgccaggatgctcatcagtttcgacactggtggccgaggccgcccggatgtggaacctcatagtcctttcatatggttcatcttcacccgccctgtccaataggcagcggtttcccacgtttttcagaacacaccccagtgcaaccttacataaccccacaagggtgaaactgtttgagaaatgggggtggaagaagattgctaccattcaacagacaacagaggtgtttactagcactctggatgacctcgaggagcgagttaaagaagctggcattgaaatcacttttagacagtcgtttttttccgaccctgcagtgcctgtcaagaatcttaaaaggcaggacgcaagaatcatcgtggggctcttctatgagacagaagcccgaaaggtgttttgtgaggtgtacaaggaaaggttgtttggcaagaagtacgtgtggtttctgatcggctggtacgctgataactggttcaaaatctatgaccctagcatcaactgcacagtggacgagatgaccgaggccgttgaggggcatattactactgaaatcgtgatgctaaatcccgctaatacccgctccatctctaacatgacatctcaggaattcgtcgagaagctgactaaaagactgaagcgccaccccgaggagaccggcggctttcaggaggctcctctcgcctatgacgccatttgggctttggctcttgctctgaataagacatcgggagggggtgggcgctcaggtgtccggctggaggacttcaactataataaccagaccataacagaccagatctaccgcgcaatgaactctagcagcttcgaaggtgtgagcggccacgtagtgtttgacgcctcaggatcgcgcatggcttggactctcatcgaacagttacagggggggtcttataagaagattggctattacgacagtaccaaagacgatctgagctggagtaagaccgataagtggatcgggggctcgccaccggctgatcagacattagtcattaaaaccttccgttttctgtcccagaaattgtttatctccgtgagtgtactcagctcccttggtatagtactcgctgtcgtgtgcctgtcttttaatatttacaactcacacgtgcgatacatccagaactcgcagccaaaccttaacaatctcacagctgtgggttgtagcctcgccttggctgcagtctttccacttggcctcgacgggtatcacattggcagaaaccagtttccctttgtctgtcaggctagactgtggttgctgggcctaggcttctcattaggctatggatcgatgtttacaaagatttggtgggtgcatactgtgttcactaaaaaggaagaaaagaaagaatggaggaagaccctggaaccttggaaactctatgccacagtggggctgttggtcggaatggacgtactgacactcgctatctggcagattgtggacccccttcatcggacaatcgaaacttttgccaaagaggaacccaaggaggatattgatgtaagcatcctaccacaactggagcattgcagctccaggaagatgaatacctggctcggtatattttacggctacaaggggctgctgttgcttctcggcatttttctcgcttatgaaacaaaatctgtgagcacggagaagattaatgatcaccgggcagtcgggatggctatctataacgttgcagtattgtgtcttatcacggcccccgtgaccatgattctgagctcacagcaagacgcagctttcgcgttcgctagcctggccatagtcttctcaagctacatcaccctagtcgtactgtttgtgcccaagatgcggcggcttataacacgcggtgaatggcagagcgaggcacaggacaccatgaagaccggttccagtaccaacaacaatgaagaagaaaagtcccgcctcctggaaaaagagaatcgcgagctggaaaagatcatagccgagaaggaagagcgggtctctgaactgaggcaccagctgcagtcccgacaacagctgcgctcccggcggcaccctccaactccccccgagccatctggtgggctcccccgcggtcctcctgaacctcccgaccgcctttcgtgcgacggctctcgggtgcatcttctatataagtag

SEQ ID NO: 6362 - DNA, 537 bp, synthetic construct
  misc_feature 1..537: note = source = /note="Description of Artificial Sequence: Synthetic coding sequence"
  source 1..537: mol_type = other DNA
atggaaacatttccgctacttctcttatccctgggcctagtgctggctgaagcttcagaatccactatgaagatcattaaggaggagtttaccgacgaggagatgcagtacgatatggccaagtcaggacaggagaaacaaacgatcgagatactaatgaatccgattctcctagtgaaaaacacatccctatcaatgtctaaggatgatatgtctagcaccctgttaactttcaggtcccttcattataacgaccctaaagggaactcttctgggaatgacaaggagtgctgcaatgacatgaccgtgtggcggaaagtgagtgaagcaaacggatcttgtaaatggtcgaataatttcatccgctcttccacagaagtgatgcgccgggtgcatagggctccaagctgtaaattcgtgcagaaccccggcatctcctgttgtgagtcactggaattggaaaacaccgtctgtcagtttacgacgggcaagcaattccctcgctgccagtaccattccgtgaccagcctggaatag

SEQ ID NO: 6363 - DNA, 2184 bp, synthetic construct
  misc_feature 1..2184: note = source = /note="Description of Artificial Sequence: Synthetic coding sequence"
  source 1..2184: mol_type = other DNA
atgatcttgtccctattattctcactaggaggacctctcgggtggggcctactcggcgcatgggcgcaggccagctctactagcctctcagaccttcagtctagtcgcaccccaggggtgtggaaagccgaagccgaggacactggcaaagaccccgtggggcgcaactggtgtccctaccctatgtctaagctggtaacactgctcgctctgtgcaagacagaaaagttcctaattcactcccaacaaccctgtccccagggggctcctgactgccagaaagtaaaggtgatgtaccgcatggcccacaaacccgtgtaccaggtgaaacagaaggtgctcacctctctggcttggaggtgctgccctggctacactggccccaactgcgagcatcacggccccatggccgtgtggtgttggcctgagcctgactcattgcaagcccgcctcggtcagctgcaacggaacttaagtgagctgcacatgacgacagctagaagagaagaagagctgcaatacaccctcgaggatatgcgcgctacactaacacgtcatgttgacgaaatcaaagaactgtacagcgagtcagatgaaacttttgaccagataagcaaagttgaaagacaagtggaggagctccaggtcaatcatacggctctacgggagctgagagtcatacttatggaaaagagtctaataatggaggaaaacaaggaggaagttgaacgccagctgcttgagctgaacctgactctgcagcacctgcagggcggtcatgcagatctcattaaatacgtgaaagattgcaattgccaaaagttatatttagacctcgacgtgattagggagggccagcgcgatgctacacgtgcccttgaagagacccaggtttctcttgacgagagacgtcagttggacggatcgagcctgcaagctttgcagaatgctgtggacgccgttagtctggcagttgatgcccacaaggccgaaggcgaaagagcgagggccgccacctccaggctgcgctcccaggtgcaggcccttgatgacgaagtaggcgcactcaaggcagcggcagctgaggcaagacatgaagtgcgacagctgcattccgccttcgcagccctgctcgaggatgccttgcgccatgaggcagttttggctgcactgttcggtgaagaggtcctggaggagatgtcagagcaaacccccgggcctctgcctctgtcatacgaacagattcgagtcgctctgcaagacgccgctagtggcctgcaggagcaggccttaggatgggacgagctcgcagcacgtgtcactgccctcgagcaagcctcagaacctccccggcctgccgagcatctcgagcctagccatgatgccggacgcgaggaagccgccacaactgcactcgctgggctcgcacgtgaactccagtctctctccaacgatgtgaagaacgtgggtagatgctgtgaggcggaggccggagcaggcgcggccagcttgaatgccagtctgcatggactgcacaacgcattattcgccacccaaagaagcctggagcagcaccagagactgtttcacagtcttttcgggaattttcaaggtctaatggaagctaatgtctcactcgacctgggcaagttacaaacaatgctgagccgaaagggaaaaaagcaacagaaagacctcgaggccccaaggaaaagagataagaaagaggctgagccgttggtggacatccgtgtgaccgggccggtgcccggggctctgggagcagccctctgggaggccgggtcacctgttgcgttctacgcgagcttcagtgagggcaccgctgcactgcagaccgttaaattcaacactacctatattaatattggtagctcatattttcccgaacatggttactttcgggctcctgagcggggagtatacttattcgccgtgagcgtggagttcgggcctggcccaggcaccggccagctcgtgtttggtgggcatcacaggactccagtgtgcactaccggccaggggtcaggttcaaccgcgaccgtctttgcgatggcggagctccagaagggggagcgcgtgtggttcgagctgacacagggaagcattacgaagcggagcctgagcgggaccgctttcggcgggtttttgatgtttaagacctag

SEQ ID NO: 6364 - DNA, 828 bp, synthetic construct
  misc_feature 1..828: note = source = /note="Description of Artificial Sequence: Synthetic coding sequence"
  source 1..828: mol_type = other DNA
atgggcagtgccccatgggctccagtgctattgctcgcactcggactgcgtgggctgcaggcagggggtgagtggcgaagacctcctgcgcattcccctgtacctgcccccccgctgcgttttgcatcaccacactccccacagggacccggacccagactgcccggggccctgctcccagccgccagcggccccttgcagctgcgcgccctgaggcagcaggatctgccatccgcactgcccggagtggggcaagtgctcggccctggtcgcggcgcacatcttctgcttcactgggaaaggggacggcgggtcgggctgcgccagcagttggggctgaggagaggtgccggaggccgggctggtggtagcacaggattacggggcgcgccccttttacgcgaggtggccgctgtgaggtgtgccgtccatgccgctcgcgcccacggggccgcggacggcggggctgggccaggtcggctgaggagagccgccccccgcgccacaacccgcccacgcggcccgggttgtccgcgccacaggctgcggtggaaattgtggggggatgcacaatgcctgcccgaagacgaagtctcacctcccgggggggggggagccggggggcagagggctagaagttcctgtggcaggccacgaagacttcaacctgtgctgcccggtagacatggtggatctctcaggcacggtccgctcggggtccggcacctgcccgcggctgtgcggcgggaggggcctgatcccgcactgcacgtcagaccagagtgcctccaccgcgccggccacgacggactcccactgcctcactag

SEQ ID NO: 6365 - DNA, 351 bp, synthetic construct
  misc_feature 1..351: note = source = /note="Description of Artificial Sequence: Synthetic coding sequence"
  source 1..351: mol_type = other DNA
atggctgctggctccgctccgatgcagctccacttacgcgcgaccatcaggatgaaggatggtctttgtgtgccccgcaagtggatatatcatcttacagaggggagcactgacctcaggaccgaaggtcggcccgacatgaaaaccgaacttttctcgtctagttgccccggtggcataatgcttaatgaaaccgggcagggctaccaacggttcctgctgtacaatcgttctcctcaccccccggagaagtgcgtggaggagtttaaaagtctcacatcctgtctggattccaaggcatttctgcttaccccaaggaaccaggaggcatgtgagttgtccaataactag

SEQ ID NO: 6366 - DNA, 522 bp, synthetic construct
  misc_feature 1..522: note = source = /note="Description of Artificial Sequence: Synthetic coding sequence"
  source 1..522: mol_type = other DNA
atgcattggaaaatgttgctgctcctgctcctgtattataacgctgaggccagcatgtgccataggtggagccgtgccgtgctgttcccagctgcccaccgccccaaacggtcatctagcttgcccctgaaccctgttctgcagacgagcctggaagaggtcgaactgctgtatgaatttctgcttgccgaactcgaaatatccccagacctgcagatatccattaaagatgaggaattagctagtctgcggaaggccagtgactttcggactgtttgtaacaacgtgatccccaagagcattccagacatacgacgcttaagcgcatcgctttcgtctcatccaggcattctcaagaaagaggactttgagcgcactgttttaacattggcatataccgcgtacagaaccgccttgtcacacgggcatcaaaaggatatatgggcgcagtcgctcgttagtctgttccaggctctgcgccacgacctgatgagatcctcacaaccgggcgtacccccctag

SEQ ID NO: 6367 - DNA, 1482 bp, synthetic construct
  misc_feature 1..1482: note = source = /note="Description of Artificial Sequence: Synthetic coding sequence"
  source 1..1482: mol_type = other DNA
agcgaagccgtctacctcaacgatagcacttacgacggccataccgtgggaggcctgcagtacggcggccttggacagctggcagacggcgtggtgggcctcgacgacttcaggaagtcccaggaactgagggtttggcccggctatgattacgtcggctggtcgaaccatagcttttcatctggttacgttgagatggagttcgagtttgatcggctgcgggcttttcaggcaatgcaggtgcactgtaataacatgcatactctgggtgctcggttgccaggtggggtggaatgcagatttcgcagaggccccgccatggcctgggagggcgagccaatgagacacaatctgggcggtaatttgggagatcctcgtgcccgcgccgtgtccgtgcccttgggaggacgcgtcgcacgttttcttcagtgccgttttctctttgccgggccctggctgctattttcagagatcagtttcatctcagatgtggtcaacaatagcagtcctgccttgggtggaactttccccccagcaccatggtggcctcccgggccgcctcctaccaatttcagcagcctggagctggagccccgcgggcaacagcccgttgccaaagccgagggttcccctacagccattctcattggttgtctggtggccatcatactgctcctgttgctgattatcgccctgatgctgtggcgcttgcattggcgccgcttgctgtctaaggtgctcgagtcccaccctcgaaccagatccccaggactggtcggaattagacccactctcttgcccgtatccccgatggcattgcgatgctgctcccccatccagccaactgcttctttttggcccctgactcctgtgcccctggaagctcgggccccacctcaccccccggggccaaaccctccgacccctaggggcgtgaccggtggaaacacatatgccgttcccgctttgccccctggggccgtcggagacggaccaccccgagtggacttccctcggtctcggttaagattcaaagagaaactaggggaggggcagtttggcgaagtgcacctttgcgaagtggatagcccacaggacttagtgagtttagactttccccttaatgtacgaaaagggcatccactgctggtggcagtcaaaatcctgcgccccgatgccactaagaatgcacgaaatgattttctgaaggaagttaagattatgtctagattaaaagatccaaacatcattcgtctgctaggggtctgtgtgcaagacgatccactgtgtatgataaccgattacatggagaacggcgatctcaaccaatttctatcggcgcaccagttggaggataaagcagctgagggggcccctggggacgggcaggccgctcagggacctacaattagctaccccatgctgctacatgtggctgcccaaatagcttcgggcatgcggtacctggctactctgaactag

SEQ ID NO: 6368 - DNA, 639 bp, synthetic construct
  misc_feature 1..639: note = source = /note="Description of Artificial Sequence: Synthetic coding sequence"
  source 1..639: mol_type = other DNA
atgggcctgcacctccgcccttatcgcgtaggtctcctgcccgacgggctgctctttctgctcctgctactcatgctccttgctgatccggcccttcctgcagggaggcatccaccggttgtcctgggagataataatcgaattcccgtgatagggcccctcaagatcagggagcagcagagatcagcagtgagcacttcctggctgctgccgtataactacacatggagccccgagaaggtttttgtgcaaacgcctactatcaattacaccttgcgtgactacaggaagttcttccaggacatagggtttgaagacggatggcttatgaggcaagacactgaaggactggtggaagcgactatgccccccggcgtgcagttgcattgcctatatggcaccggcgtacccacccccgattccttttattacgagtcctttccggacagggaccccaaaatctgtttcggagacggtgacggtactgtgaatctcaaaagcgcattgcagtgccaggcttggcaatctaggcaagagcatcaggtgttgctccaagagttgcccggctctgaacacattgagatgctcgccaatgcaacgaccctcgcctatctgaagcgggtgttgcttgggccgtag

SEQ ID NO: 6369 - DNA, 654 bp, synthetic construct
  misc_feature 1..654: note = source = /note="Description of Artificial Sequence: Synthetic coding sequence"
  source 1..654: mol_type = other DNA
atgtcagatctactcctgctgggacttatcggcggacttacattgcttcttcttcttacgctgctcgcatttgccgggtatagcggtctcctagccggtgtagaggtctctgctggatccccacccattcgcaatgtgacagtggcttacaaattccacatgggactctatggagagaccggaagattattcacggagagttgctctatctcccccaagcttcgctctatcgccgtgtactatgacaatccacatatggtgccgcctgataagtgccgttgtgccgtcggaagcattttgtcggaaggggaggagtcacctagtcctgaactgattgacctctaccagaagtttggattcaaggtattttcctttcctgcgccgtcccacgttgtgacggctaccttcccgtacacaaccatcctgtccatttggctcgccaccagacgcgtgcaccccgcactggatacctatattaaagaaagaaagctgtgcgcctaccccaggcttgagatctaccaggaggaccagattcacttcatgtgccccctcgccaggcagggcgatttttatgtgcccgaaatgaaagagaccgaatggaagtggcggggccttgtggaggcaatcgacacccaggttgatgggactggttag

SEQ ID NO: 6370 - DNA, 345 bp, synthetic construct
  misc_feature 1..345: note = source = /note="Description of Artificial Sequence: Synthetic coding sequence"
  source 1..345: mol_type = other DNA
atgaagacattcacctggacgttaggcgtactgttttttcttttagtggacacagggcactgtagaggtggtcagttcaagataaaaaagatcaatcagcggcgctatccccgggcaacggacggcaaggaggaggccaaaaagtgcgcctacacattcctcgtccccgaacagcgcattactgggcccatctgcgtgaatacaaaaggacaggatgctagtactatcaaagacatgataactcgcatggatttggagaatcttaaagatgtgctctcaaggcagaagcgcgaaatcgatgtgctgcagctggtggtcgacgtggacgggaatatcgtgaactag

SEQ ID NO: 6371 - DNA, 870 bp, synthetic construct
  misc_feature 1..870: note = source = /note="Description of Artificial Sequence: Synthetic coding sequence"
  source 1..870: mol_type = other DNA
atgtttgtgctgctgtatgttaccagctttgccatatgtgctagcggtcagccacgagggaaccagctcaagggtgaaaactattcccccaggtacatatgtagcattccagggttaccagggcctcccggcccccctggagccaacggttctcctggtccccatggcagaatcgggctcccggggcgagatggccgggatggaaggaaaggagagaaaggcgaaaagggaacagccggtctgaggggaaagacaggacccttggggctggcaggagaaaagggggaccaaggcgagacgggcaaaaaaggcccaattggacccgaaggcgagaaaggcgaggttgggccaattggaccccccggacccaaaggtgaccggggcgagcagggagaccccggcctgcccggcgtatgcagatgcgggtccatcgtcttaaagagtgccttctccgtaggcattaccacgtcataccctgaggagaggctccctattattttcaataaggtcctcttcaacgagggcgaacactacaatccagcgacgggaaagtttatctgcgcctttcctggcatatactatttttcttatgacattacacttgccaataagcacctcgccattggactggtccataacggacaataccgcatcaaaaccttcgatgctaacactgggaatcacgacgtggcttcaggatccacagtgatttatctgcaacccgaagacgaggtttggctcgagatcttcttcacagaccagaatggtttgttcagtgaccctgggtgggccgatagtcttttcagtggcttcctattatacgtcgacactgattatttagacagcatatctgaagatgacgagctgtag

SEQ ID NO: 6372 - DNA, 1002 bp, synthetic construct
  misc_feature 1..1002: note = source = /note="Description of Artificial Sequence: Synthetic coding sequence"
  source 1..1002: mol_type = other DNA
atggtctccaagtcacggtggaagctgctggcaatgctcgctttagtgttggtagtgatggtttggtattccatcagtagggaagatcgctacattgagctgttctacttccctatccctgagaaaaaagagccatgcttacagggcgaggcagagtccaaagccagcaagctttttgggaactactctagagatcagcccatcttcctccggttggaggattatttttgggttaaaacaccttccgcctatgagttgccgtacggcaccaaggggagtgaggacctgctgctccgagttctggccataacttctagttcaatccccaagaacattcagagccttagatgccgtcgttgcgtagtggtgggaaacgggcacaggttgagaaactcctccctcggagacgccattaataagtacgacgtagttatcaggctgaataacgcccctgtggctggatatgagggcgacgtgggaagcaagaccacaatgcgactcttttacccggagagtgcccacttcgatcctaaagtggaaaacaatcccgacaccttgctggtgctggtggccttcaaggccatggactttcattggatcgaaaccatcttatcagacaaaaagcgcgtgaggaaggggttttggaaacaacccccgctgatatgggacgtgaatcccaaacaaattcgcatcctgaacccttttttcatggagatcgctgctgataaactgttgagcctgccgatgcagcaaccccgcaaaataaagcagaagcccactactggcctactcgccattaccctggctctccatctgtgtgacctcgtgcatatagctggattcgggtacccagacgcctacaacaagaaacagacaattcactactacgagcagattacgttgaaatccatggctggcagcggccacaacgtcagtcaggaggcactcgcaatcaaacgcatgctggaaatgggggcaatcaaaaatctgacctctttttag

SEQ ID NO: 6373 - DNA, 531 bp, synthetic construct
  misc_feature 1..531: note = source = /note="Description of Artificial Sequence: Synthetic coding sequence"
  source 1..531: mol_type = other DNA
atgcggctgcttatcctgacctgtttagtggccgtcgcactcgcaagaccgaaactgccactgcgctacccagaacggctgcagaatcccagcgagagttctgaaccgattcctctggagtcacgggaagagtacatgaatggaatgaaccgaagaaatatcttgagggaaaagcagaccgacgagattaaggatacaaggaacgagtctactcagaactgcgtggtggcagaacccgaaaagatggagtcgtcgatatcgagctcttcagaagaacaattttgtagactgaacgaatataatcagctccagttgcaagcggcccacgcccaggagcagattagaaggatgaatgaaaacagtcatgttcaggtgccatttcagcagctgaatcagctggcggcatatccttacgccgtctggtactacccacagattatgcaatatgtgccatttccccctttctcagacatctccaacccaacagcccacgagaattacgaaaaaaataacgtgatgcttcaatggtag

SEQ ID NO: 6374 - DNA, 279 bp, synthetic construct
  misc_feature 1..279: note = source = /note="Description of Artificial Sequence: Synthetic coding sequence"
  source 1..279: mol_type = other DNA
atgaaactatgtgtgactgtgctctcattactagttctggttgctgccttctgcagtctggccctctcagcacccatgggatcagacccaccaacggcatgctgttttagctacaccgccagaaaattgccacggaacttcgttgtcgactattacgagacgtcatccctgtgttcccaacctgccgtggtgtttcagactaaacgaggtaagcaagtctgtgcggatccttcagaaagttgggtacaagaatacgtatacgatctggaactgaattag

SEQ ID NO: 6375 - DNA, 1656 bp, synthetic construct
  misc_feature 1..1656: note = source = /note="Description of Artificial Sequence: Synthetic coding sequence"
  source 1..1656: mol_type = other DNA
atgacctggagaatgggccctcggttcaccatgctgctggcgatgtggcttgtttgtggttccgagccccatccccacgctacaattagagggtctcatggcgggagaaaggtccctctggtcagtcccgatagctcacgacccgctaggtttcttaggcacactggcaggtccaggggcattgaaagatcaaccctggaagaaccgaacctgcaacctctccaaagacggaggtcagtcccagttttacgcctcgcgcggcccagcagattccgagacaatcgcatggacagaagggaacatgggcatcgggaccccaacgtcgttcccggcccccctaaacccgccaaagaaaaacctccgaagaaaaaagctcaggacaaaatactctctaatgaatacgaagagaagtacgacttgagtcggcctacagccagccagctcgaggacgaacttcaggtggggaatgtgccactgaagaaagcaaaagaaagtaagaagcacgaaaaactggaaaaacctgagaaagagaaaaaaaagaagatgaagaacgagaatgcagataagctgctaaaatcagagaaacagatgaagaaatcggagaagaagtccaaacaggaaaaagaaaagtccaagaagaagaaagggggaaaaacggaacaggacggctatcaaaagcctactaacaaacacttcacccagtcacccaagaagtctgtcgccgatttactcggttcttttgagggcaaacggcgtttgcttctcatcacagccccaaaggcggagaacaatatgtatgtgcagcagcgcgacgaatatctggaaagcttttgcaaaatggcaacacgaaaaatctcagttatcaccatattcggacccgtcaacaatagcacaatgaagattgaccacttccagctggacaacgaaaaacccatgagagtcgtggacgacgaggatctcgttgaccaacggttgatttccgaactccgaaaggagtatgggatgacatacaatgatttctttatggtgcttactgacgtagatttgagagttaagcaatattacgaggtacccatcacgatgaagagcgtgttcgatctgatcgatacctttcagagccgtattaaagatatggaaaaacagaagaaagaggggatagtgtgcaaagaggataaaaaacagagccttgagaactttctgtctcgattcagatggaggaggagattgcttgtgatcagtgcacccaatgatgaagattgggcatacagtcagcaactgagcgctctttctggccaggcatgcaactttggttctagcgtcgtggagagagaggacgtccccgcacacctcgtgaaggacatccgcaattatttccaggtttcacctgagtattttagcatgctgctggtcggaaaggatggtaatgtgaaatcctggtaccctagcccaatgtggagcatggtgatcgtttacgacctcatcgattctatgcagctgaggcgccaggagatggcaattcaacaaagtcttgggatgcgttgtccagaagacgaatatgctggatacggctaccattcttatcaccaggggtaccaggacggctatcaggacgattaccgtcaccacgaatcatatcatcatgggtacccatactag

SEQ ID NO: 6376 - DNA, 1245 bp, synthetic construct
  misc_feature 1..1245: note = source = /note="Description of Artificial Sequence: Synthetic coding sequence"
  source 1..1245: mol_type = other DNA
atgggggtgagtaagctcgacattttatatcggcggctgctgttaactaagttgttcatccggggatggggacggccagaagatctcaagagactgtttgagttccgaaagatgattggcaaccgggaacgctgtcaaaacttagtgtcttctgactatccagtgcacattgacaagatcgaagagcaatccgactgtaagattttagacggccacttcgtctcaccgatggcacactatgtccctgatatcatgccaattgagagcgtgatcgcacgtttccaattcatcgtacccaaggagtggaatagtaagtaccgcccagtctgtatccacctggccggcacaggtgaccaccactattggagacggaggaccctgatggcccgaccaatgatcaaggaggcccgcatggcctctctgctgcttgaaaatccttattacggatgtcgcaagcccaaggaccaggtgaggagtagtctcaaaaatgtcagcgatctgttcgtgatgggcggcgccctggtcctcgaaagcgcagctctcttgcactggctcgagcgggaaggttatggcccactggggatgaccggaatctcaatgggaggccacatggcttctttggccgtctccaactggcccaagcctatgccactgataccatgtctgagctggagtactgcatctggcgtgttcactacaaccgatagttttaagatgggacaggaattcgttaagcatttcacttccagtgcagacaagctgaccaacttgaatctcgtttctcgcacccttaacttagatatttccaatcaggttgtgagtcaaaaacctgctgactgtcataattccagcaaaacatccgtgagcgccacaagtgagggacttttattgcaggatacctcaaaaatgaagagatttaaccagaccctgtccacaaacaagtccggctataccagccgcaacccacagagctaccacttattatctaaggagcagtcccggaacagtctgaggaaggaaagcctgatcttcatgaagggggtgatggatgagtgcacccacgtggcaaatttttccgtaccggtggatccatcactgataatcgtggtacaggccaaagaagacgcttacatcccacggaccggggttcggagccttcaggagatttggccaggttgtgagatcaggtacctggagggcgggcacatttccgcctatctttttaagcaagggctgtttaggtag

SEQ ID NO: 6377 - DNA, 300 bp, synthetic construct
  misc_feature 1..300: note = source = /note="Description of Artificial Sequence: Synthetic coding sequence"
  source 1..300: mol_type = other DNA
atggagaggatctccgcatttttcagttccatctgggatacgatattgacaaaacatcaggaggggatttacaatactatttgcttgggcgtgctgctcggattgcccctattggtgatcatcaccctgctgttcatttgctgtcactgctgttggagcccaccaggcaagagaggacaacagccggaaaagaataagaagaaaaagaagaagaaaaaaaaaaaggacgaagaggacttatggatttcagcccagcctaaactcctacaaatggaaaagcggccgagcctgcccgtgtag

SEQ ID NO: 6378 - DNA, 912 bp, synthetic construct
  misc_feature 1..912: note = source = /note="Description of Artificial Sequence: Synthetic coding sequence"
  source 1..912: mol_type = other DNA
atgagcgagcctcaacctgatcttgagccgcctcagcacggactgtacatgttgtttttgttagtgctggtgttcttccttatgggcttggtgggtttcatgatatgccacgttttaaagaaaaaggggtacaggtgtcgtaccagtagagggtcagagcctgacgatgctcagcttcagcctcctgaggatgacgacatgaatgaggataccgttgaacgaatcgtgcgctgtattatccagaatgaggccaatgccgaggccctgaaagaaatgttgggcgacagtgaaggggagggcactgtccagctgagctcagtagacgcaacttccagccttcaggacggtgcaccttctcatcaccacacggttcatctgggcagcgccgccccatgcttgcactgttcgcggtctaaacgccccccgctcgtgcggcaggggagatctaaggagggaaagagtcgccccagaactggcgaaactaccgtgttctcggtgggcagatttcgcgtgacacatattgaaaagaggtacggcctacacgaacatcgcgatggcagcccaaccgataggagttggggcagcgggggcggccaggaccccggtggtggtcaaggctctggcggcggacaaccaaaagcaggtatgcctgccatggagcgtctgccgcctgagcggccccagccccaagtgcttgccagtccccccgtgcagaacggagggctccgggatagctcactgacgccaagagccctggaaggaaatcccagagccagtgccgaaccgacacttagggcggggggccggggtccctccccaggtctcccaacccaggaagctaacggacagccttcaaagcctgacaccagtgaccaccaggtaagtttgccgcagggcgccggctccatgtag

SEQ ID NO: 6379 - DNA, 444 bp, synthetic construct
  misc_feature 1..444: note = source = /note="Description of Artificial Sequence: Synthetic coding sequence"
  source 1..444: mol_type = other DNA
atgggccctgaggccttatcttccctgctgctcctgctactggtggcttcaggtgacgccgatatgaaaggccacttcgatccagccaagtgtcgctacgcgctcggaatgcaagatagaacaattcccgacagcgatatctcagcttcctcaagctggtctgatagcactgccgcccgccactcgagattggaaagctctgatggagatggcgcatggtgccccgcaggcagtgttttccctaaggaagaggaatatttgcaagtcgaccttcagagattacacctggttgctctggtgggcacccaaggtcgacacgccggcggacttgggaaagaattcagcaggtcttaccggcttcggtatagcagagacgggcgcagatggatgggatggaaggataggtggggtcaggaggtgatctcagggaacgaggatccttag

SEQ ID NO: 6380 - DNA, 1173 bp, synthetic construct
  misc_feature 1..1173: note = source = /note="Description of Artificial Sequence: Synthetic coding sequence"
  source 1..1173: mol_type = other DNA
atgggggctacaacgatggatcagaaatcactttgggcaggggtagtcgttttgttactcctgcaaggaggatcagcttacaagctggtgtgctatttcacaaattggtcccaggataggcaggaacccgggaagtttacaccagagaacattgaccccttcctgtgttcccacttgatctactccttcgcgagcatcgagaataataaagtgattatcaaagacaaaagtgaagtcatgctgtatcaaactatcaatagcctcaaaactaagaaccctaagctcaagatcctcctttctatcggcggttacctgtttgggagcaaggggtttcaccctatggtggactcgtctacgtcccgcctcgagttcatcaactcaattatcctattcctccgaaaccacaatttcgacggtcttgatgtctcgtggatctaccctgatcagaaggagaacactcactttacggtcctgattcatgagctggccgaagcgtttcagaaggactttaccaaaagcaccaaggagagattgctgttaaccgccggtgtttccgcggggaggcagatgatagataattcttaccaggtggaaaaactagctaaggatctggacttcattaatctgctgtcttttgacttccacggaagctgggaaaaaccacttatcaccggccacaattctccgctctcaaaaggctggcaggatcgagggccatctagttattacaatgtggaatacgcagtgggatactggatacacaagggtatgccctccgagaaagtggtgatgggtattcctacatacggacactctttcactttggccagcgcagaaaccacggtgggggctcccgcatcaggacctggcgcagctggcccaattaccgaaagctctggttttctggcttattacgaaatttgccagtttttaaaaggagctaagataaccagactgcaagatcagcaggtcccttatgccgtgaaagggaatcagtgggtgggatatgacgacgtgaaaagcatggagactaaagtgcagtttctgaaaaaccttaacctgggcggcgccatgatctggtccattgacatggatgacttcaccgggaagagttgcaatcaggggccctacccactggtccaagcagtaaaaagatctctcgggtctctttag

SEQ ID NO: 6381 - DNA, 297 bp, synthetic construct
  misc_feature 1..297: note = source = /note="Description of Artificial Sequence: Synthetic coding sequence"
  source 1..297: mol_type = other DNA
atgaacaaacattttctgttccttttccttttgtactgtctcatcgtagcagtcacaagcctacagtgcatcacctgtcacttacgcaccagaacagatcggtgtagaaggggtttcggtgtttgcacggcccaaaaaggcgaagcttgcatgttgcttagaatttaccagcgcaacacactgcaaatctcatatatggtatgtcaaaagttttgtagggatatgaccttcgacttaaggaaccgcacttatgtccacacatgctgcaactataattattgcaatttcaagttgtag

SEQ ID NO: 6382 - DNA, 600 bp, synthetic construct
  misc_feature 1..600: note = source = /note="Description of Artificial Sequence: Synthetic coding sequence"
  source 1..600: mol_type = other DNA
atggcttggggcggggttcacacctgctgttttcatttgtgttgttgttgcagctggcctcaaggggccgtccctgaagaattgcataaacatccgggccaaactctgctgctgcagtgtcagtacagcccaaaaagggggccctaccagcctaagagctggtgccagcagacctccccctccaggtgtaccctgctggttacatcatccaaaccatggaccgccgtgcagaagtcacattacactatctgggacaagccgaacgctggcttttttaacatcaccatgattcagctcacccagaacgattcgggattttactggtgtgggatctacaacgcatctgaaaatattatcaccgtccttcggaacatttccctggtggtgagtcccgctccgacaactagtcccatgtggaccctgccttggctgccaacttctacggcctgggagccccagatccaagagattaagttcagagcccctaccgactctacactttggaagtctagagccccagcctgtctggggtccggtggaccaagatttcttgtacttgtactatgtgggttgctgctggcaaaagggctgatgctgtag

SEQ ID NO: 6383 - DNA, 2025 bp, synthetic construct
  misc_feature 1..2025: note = source = /note="Description of Artificial Sequence: Synthetic coding sequence"
  source 1..2025: mol_type = other DNA
atgacaaccgacgacaccgaggtgccagcaatgactctcgccccggggcacgcggctctggaaacacagactctctccgctgagacatccagtcgagcttcgaccccagccggcccaatccctgaggccgaaacaaggggagccaaaagaatatctccagcacgggagactagaagcttcaccaagacatcacctaactttatggtgctaatcgctacaagcgtagaaacaagcgccgcctcaggctcacctgaaggtgccgggatgacaaccgtgcaaactatcacgggaagcgatccccgtgaggctatcttcgacaccctgtgcacagatgacagcagcgaagaagcgaagaccctgactatggacattcttacccttgcacacaccagtacagaggctaaggggttgtcttctgagtcttcggccagctccgattccccacatcctgtcattactcctagccgggccagcgagtcatcagccagctcagatggcccacaccccgtgatcaccccctcacgagcctcagagtcatctgcttcttctgatggtcctcacccagtgataacgccatcacgtgcatctgagagctcggcctcaagtgacggaccacacccggtaattacacctagtcgcgccagtgagagttcggcctctagcgacggccctcatcctgttatcaccccctccagggctagcgagtcttcggcgtctagtgacgggccacatcctgttataacaccgtctcgcgcatcagagagcagtgcaagtagcgatggtccgcatccagtgatcaccccttctcgagctagtgaatcaagtgccagcagtgatggcccccacccggtgatcactccgtcgagggccagcgaatctagcgcttcctcagatgggccacatccagtgatcaccccgtcacgagcatccgaatcgtctgcttcatcagacggacttcaccctgttatcaccccctcgcgtgcctcggaatcctccgcaagctccgatggccctcacccagtcatcacaccatctagagcatcagaaagcagtgccagtagtgatggtcctcacccggtgattaccccttcttggtcccccggatccgatgtgacgctgctagcagaggctcttgtaactgtcaccaatatagaagtcattaattgttcaataaccgaaatcgagacaaccactagttcaatccctggcgcctcagatacagatctgattcctaccgagggcgtcaaagccagttccaccagcgatcctccggctcttccagacagtactgaagctaagcctcatattaccgaggtgactgcttccgccgagactctcagcactgctgggactacagagtctgctgcgcctgacgcgactgtagggacgcccttacccaccaactccgccacagagagagaggtcactgctcccggagctactaccctaagtggtgcactggttacagtctccaggaaccccctggaggagacatctgcattgagcgtcgagacgcctagttacgtgaaggtgagtggcgctgccccggtgtctatcgaggctggcagtgccgtgggaaaaaccacctcatttgccggctcatctgctagctcctacagcccctcagaagccgcattgaagaactttaccccttccgaaacacctactatggatatagccactaagggacctttcccaacatctcgtgaccccctgccaagcgtcccgccgaccacaactaacagtagcaggggaaccaactccacactggccaaaattaccacaagtgcaaagacaacaatgaagccgccaacggcgacccctacgactgccagaacaaggcccacaacagatgtcagcgctggtgagaatggcgggtttctgctgttgcgcctgagcgttgctagccccgaagacctcaccgacccacgtgtagcagaaagattaatgcagcagttgcaccgagaactgcatgctcatgcaccccattttcaggtctctttgcttcgcgtgagacggggttag

SEQ ID NO: 6384 - DNA, 738 bp, synthetic construct
  misc_feature 1..738: note = source = /note="Description of Artificial Sequence: Synthetic coding sequence"
  source 1..738: mol_type = other DNA
atgcaggccgcgtggctattaggagctctagtggtaccacagctcctgggtttcggccacggtgcacgcggagcagagagggagtgggaggggggctggggcggggctcaggaagaagaacgggagcgggaagcactaatgttgaaacatctccaggaggccctcggactgccagccggaaggggcgacgagaaccctgctggcaccgtggaggggaaagaagattgggaaatggaagaggaccagggggaggaggaagaggaagaagcgacacctaccccctcttcagggcctagcccatctcccacccccgaagacatagtgacatacatcttggggcgccttgcaggacttgacgcgggcttgcaccaactgcatgtaaggctgcacgctttagacacccgggtggtcgaacttacacagggtctgcgccagctgcgcaatgcagccggggacacccgggacgcagtgcaggccctacaggaggcgcagggccgagccgaacgcgagcacggaaggctggagggatgtttgaagggtctccggttgggacacaagtgtttcctcctttctcgggattttgaagcgcagccttcagcctctccccaccccttgagcccagatcagcccaacggaggaacgttagagaactgcgtggcacaggcctctgatgacggcagctggtgggaccacgactgccagcgacgcctgtactacgtatgcgaatttccgttctag

SEQ ID NO: 6385 - DNA, 279 bp, synthetic construct
  misc_feature 1..279: note = source = /note="Description of Artificial Sequence: Synthetic coding sequence"
  source 1..279: mol_type = other DNA
atgatttggaggtccagggcaggagcggagcttttctccctgatggcgctgtgggaatggatcgccctcagcttacactgctgggttctggcagtcgcggcagtgagcgatcaacacgcaacatctccgtttgactggctcctcagtgataaggggccctttcaccggtcccaggagtataccgactttgtcgacaggagtaggcaggggttcagcacgcgttacaagatttatcgtaacatgggtcacatctcatgttaccttctgctctgggaatag

SEQ ID NO: 6386 - DNA, 177 bp, synthetic construct
  misc_feature 1..177: note = source = /note="Description of Artificial Sequence: Synthetic coding sequence"
  source 1..177: mol_type = other DNA
atggctgacatgcagaacctagtagaaagactggagagggcagtcggaagactggaggccgtgagccacaccagcgacatgcaccgcggctatgccgacagccccagcaaggcgggcgctgcgccatatgtgcaagccttcgactctctccttgcaggacccgttgcggagtattag

SEQ ID NO: 6387 - DNA, 732 bp, synthetic construct
  misc_feature 1..732: note = source = /note="Description of Artificial Sequence: Synthetic coding sequence"
  source 1..732: mol_type = other DNA
atgggtccagaggctttgtcatcactgcttctgctgctcttggtcgcatcaggtgatgctgacatgaaaggtcattttgacccagcaaagtgtcggtatgcgctcggtatgcaggatcgcacaattcccgattcagatatcagtgcctccagctcctggtctgacagtactgccgcacgccactcccgactggaatcctcggatggcgatggcgcctggtgtccggcaggctccgtgtttcctaaggaggaagagtacctgcaagtggatttacagcgtctacatctggtcgcactggtcgggacccagggcagacacgcagggggactcggcaaggaattctcccggtcctatcgtttgcgctactccagggatggcaggagatggatgggttggaaggaccgatggggccaagaggtaattagtggtaacgaggatcccgagggtgtcgttctgaaggacttggggccccctatggtggcaaggctcgtacggttttaccctagggccgaccgggtgatgtctgtgtgcctgcgggttgagctgtatggatgtctttggcgggactgttccatgggggtatgggcttcgtggcagatggtgtggtggggctggatgactctgggtagagtcaggtcttgtggctctggccaagctatgacaatgtgggatggcgctacgactgcatcacccgtcgcaatgtggcgatggtccctcagcctgaccggctag

SEQ ID NO: 6388 - DNA, 2535 bp, synthetic construct
  misc_feature 1..2535: note = source = /note="Description of Artificial Sequence: Synthetic coding sequence"
  source 1..2535: mol_type = other DNA
atgggaccaggagctccctttgctcgtgtgggctggccgctgccactattggttgtgatggctgccggagtggctcctgtctgggcaagtcactcgccacaccttccgaggcctcactcaagggtcccacctcatccaagcagtgagagaagagccgtatacatcggggctctgtttcctatgtccggaggatggccgggaggccaagcctgtcaaccagccgtcgaaatggcacttgaagatgtgaactccagaagagatatccttcccgattacgagcttaaactgatacaccacgattcaaaatgtgatcccggacaggcaaccaagtacctttacgagttactgtataatgatccaatcaagattatccttatgcctgggtgctcgtctgttagcacgctggtggcagaggccgcacggatgtggaatttaatcgtgctctcttatggaagcagcagtccagccctatccaaccggcagcgtttccctacgtttttccgcacccacccatcagccaccctacacaaccctacaagagtcaagcttttcgaaaaatggggatggaagaagatcgcaaccattcaacagaccacagaagtgtttacttctaccctggatgacctggaagaacgggttaaagaagctggtatcgagattacctttcggcagtctttctttagtgacccagcagtgcccgtcaagaatctgaaaaggcaagatgctagaatcattgtcgggctattttacgagactgaggcccgcaaggtcttttgcgaggtctacaaggagaggctgtttggcaaaaaatacgtttggttcctgataggatggtacgccgataattggtttaaaatatacgatccctccatcaactgcacagtggatgaaatgacggaggcggtggaaggacatatcactacagaaatcgttatgctgaatccagctaatacccgcagtatcagcaacatgaccagccaagaatttgtcgagaaactcaccaagcggctcaaacggcaccccgaggaaaccggaggctttcaagaggctccccttgcttacgacgctatttgggctctggcccttgcactcaacaagacctccggggggggcggccgtagcggcgttcgcttagaggattttaactacaataaccagacaattacagaccagatttaccgagctatgaattcttcttcattcgaaggagtgagtggccacgtagtgttcgatgcatcgggttccaggatggcctggaccctcattgaacagctccaaggtggcagttataaaaagattggctattacgactccacgaaggatgatctgagctggtctaagaccgacaaatggatcggagggagccctccagctgaccagactctagtaatcaaaacatttaggttcctcagccagaaactgttcatttctgtgtcagtgctatcctcccttgggatcgtgctcgccgtggtctgcctgtctttcaatatttataatagccacgtgagatacatccaaaatagccaacccaacctgaacaatctgacagccgtaggttgcagccttgcactggccgccgtgttcccactgggactcgatggttatcatattggcaggaatcaatttccctttgtctgccaggctcgcttgtggctattgggccttggctttagccttggctacggcagtatgttcactaagatatggtgggtccacaccgtttttaccaagaaggaagaaaaaaaagagtggcgtaagactctggagccctggaaactgtatgctactgtcggtttactggtcggcatggatgtactgacattggccatctggcaaatcgtggaccccctacacagaaccattgagacttttgccaaggaagaacctaaggaggacatcgacgtcagtatcctacctcagctggaacattgctcttcaaggaaaatgaatacctggcttggcattttctatggttacaaaggccttttattactgctgggtatttttctggcctatgagacaaaaagcgtgtccaccgaaaaaattaacgatcacagagcagtggggatggctatttacaatgtggcagttttgtgtctgatcaccgctcccgtaacaatgattctgagctctcaacaggatgccgcattcgcttttgcatccctcgccatcgtcttctcatcttacatcaccctggtggtcctcttcgtccccaaaatgcgcaggctcatcaccagaggcgagtggcaaagtgaagcccaggacaccatgaagactggcagtagtaccaacaacaacgaagaggaaaaatcccgcttgcttgaaaaggaaaacagagaactcgagaagatcattgcggagaaggaggagagggtgagcgaacttcgccatcaactgcagagtagacaacagctgaggtcccggaggcacccacctactccaccggagccctcaggaggcctcccccgggggcccccagagccccctgaccgtttaagctgtgatggatcgcgagtccacctgctttacaaatag

SEQ ID NO: 6389 - DNA, 921 bp, synthetic construct
  misc_feature 1..921: note = source = /note="Description of Artificial Sequence: Synthetic coding sequence"
  source 1..921: mol_type = other DNA
aggcgcacatgcgccggtccgggccgcgcaggcggcgctcggagcgcatcatggatgtctagattgcgggccctgcttgggctaggactcctggttgccggatcacgagtgccccggatcaaaagtcagacaatcgcatgccgatccggccctacttggtgggggccccaacgcctcaattcaggggggcgctgggatagtgaggtgatggcttctaccgtggttaaatacctgagccaagaggaggcccaagctgtggaccaggaactgtttaatgaataccaattttccgtagatcagctcatggaacttgctggactgtcttgtgccactgcgatcgccaaggcttatccaccaacctcaatgagccggagtcccccaaccgtgttagtgatctgcggtccaggcaacaacgggggagacggtctggtgtgtgccagacacctgaagttatttggatatgagccaactatttactaccccaaacgcccgaataagccgctcttcacagcccttgtaactcaatgtcaaaagatggatatccccttccttggcgaaatgccagccgaacctatgaccatcgatgagctgtacgagttagtggtggacgccattttcggattcagtttcaaaggggatgtgcgtgagcctttccactctatcctatcggtcctgaagggtctgactgtgcccatcgcttcaatcgatattccaagcggatgggatgttgagaagggcaacgcgggcggcatccagccagaccttttgatttccctgacagccccaaaaaagtccgctacccagttcactgggagataccattacttgggcggcaggttcgtgcccccagccctggagaaaaagtaccagttgaaccttcccccttatcccgatacggagtgtgtttatcggctgcagtag

SEQ ID NO: 6390 - DNA, 1137 bp, synthetic construct
  misc_feature 1..1137: note = source = /note="Description of Artificial Sequence: Synthetic coding sequence"
  source 1..1137: mol_type = other DNA
taatatagtggggattacatggagccagagaagcccggcgcccctctgctgccacctccaccacagaactctgtgcctcattacgctgaggctgatatcgtgaccttgcagggcgtgaccggtggtaacacatacgccgtgcccgcattaccacccggcgcggtgggtgacggtcctcctagggtggactttcctagaagcagactaaggttcaaggagaaacttggagaggggcagttcggtgaagtgcacctgtgtgaggtggattcaccacaggacctggtgtcgctggacttccccctgaatgtgcgaaagggacatccactgctggtggccgtgaaaatccttcgccctgacgccactaaaaatgccagtttcagtctgttctccagaaatgactttttgaaggaggtcaaaattatgtcccgattgaaggatcccaacatcatcagattgctgggcgtgtgtgtacaggatgatcctctgtgcatgattacagattacatggagaacggcgacttaaatcagttcctgtccgcccaccagctggaggataaggccgccgagggagcccccggtgacggacaggctgcacaaggcccaaccattagctaccccatgctcctgcacgtggccgctcagatcgcttcaggaatgcgctatctggccaccctcaatttcgtgcaccgtgatctcgctacccgaaactgtctggtgggagaaaactttacaataaaaattgcagactttggcatgtcccggaacctatacgcgggggactactacagggtgcaagggcgggcggtgctgcctatccgttggatggcatgggaatgtatcttaatgggcaagtttactactgccagtgacgtttgggcatttggtgtgactctctgggaggtgttgatgttgtgtagggcccagccttttggacaactaacggatgaacaggtgatcgagaacgccggagaattttttagggatcagggtaggcaggtttacctctctaggcctcccgcttgtccccagggactttacgagttgatgttgcgttgttggtcacgggagagtgagcagcggccgcccttctcacaactgcaccgcttcctggctgaggatgctctcaacacagtttag

SEQ ID NO: 6391 - DNA, 762 bp, synthetic construct
  misc_feature 1..762: note = source = /note="Description of Artificial Sequence: Synthetic coding sequence"
  source 1..762: mol_type = other DNA
atggctccttggtctcaccccagcgctcagctccagcctgtgggaggcgacgccgtgagcccggccctgatggtgctcctctgtctgggtaatctgtcgaaagctacgttgtgggctgagcctgggagcgtcatttctaggggaaacagtgtgacgattagatgccagggtacgctcgaagctcaggagtacagattggtgaaggaaggcagtcctgaaccctgggacacccaaaacccactggaacctaagaataaggccagatttagcatcccatcaatgactgagcaccatgcaggcagataccggtgctactattactctcccgctggttggtcagagccctctgatccactggagctggttgtgaccggcttttataacaagccaactctctccgctcttcctagccctgtggtgaccagcggcgagaacgtcactctgcagtgcgggagcaggctccggtttgatcgcttcattctaactgaagaaggagaccacaagctgtcctggacactggactctcagctgacacccagtgggcaatttcaggccttgtttcctgtggggccagtcaccccgtcccacagatggatgctcaggtgctacggaagccgtaggcatattttgcaggtgtggagtgagccttccgacctgcttgaaatccccgtgagcggcgaggaggccacggtgttcagttccaccattcagggatctcagaccggctgtggcgaattatatcggcaggggtccccatgctag

SEQ ID NO: 6392 - DNA, 288 bp, synthetic construct
  misc_feature 1..288: note = source = /note="Description of Artificial Sequence: Synthetic coding sequence"
  source 1..288: mol_type = other DNA
atgagaaagccaaggagaaagtctcgccagaacgctgagggccgccgaagcccctcaccctattcactgaaatgcagtccaacccgcgagaccctgacctacgctcaggcccagaggatagtcgaggtcgatatcgacggaaggcttcaccggatatcaatctatgacccactgaagatcattacggaggatgaactcactgcccaagacattaccgagtgcaatagtaacaaggagaattccgagcaaccgcagtttcccggcaaatcaaaaaaacctagcagctag

SEQ ID NO: 6393 - DNA, 1311 bp, synthetic construct
  misc_feature 1..1311: note = source = /note="Description of Artificial Sequence: Synthetic coding sequence"
  source 1..1311: mol_type = other DNA
atgaagttccagggacccctcgcctgcctgcttttagccctgtgtttaggctccggcgaagccggccctcttcagtcaggggaggaatccaccgggaccaatattggggaggctctaggtcacggtcttggagacgcgctctccgagggagttgggaaggccatcgggaaggaagcaggcggcgcagccggcagcaaggtctctgaggccctcggccaaggcacccgtgaggctgtggggactggtgtgagacaggtcccaggttttggggtcgctgacgccctcggaaaccgggtaggtgaagctgcacatgccctgggtaacacaggccatgagatagggagacaggctgaggacgtgatccgccatggagcagacgccgtgaggggctcatggcagggagtgcctgggcataatggcgcctgggaaacgtccggaggtcatggcatttttggatcccaggggggcctcggaggtcaggggcaagggaatccgggtggtctcgggactccttgggtacacggctatcccggaaacagcgctgggtcattcggtatgaatccacagggggccccttggggacagggcggcaatggcggaccccctaactttgggaccaacactcaaggagcggtagctcaacctggatatgggtccgtccgtgccagcaatcagaatgagggctgcacaaatcccccaccatctggttctggcggcgggtcgagcaattctggcggtggttcaggttcacagagtggctcctcaggttctgggtcgaacggcgacaataataatgggtccagtagtggcggatcctcctcagggtcgagttcagggggatcaagtgggggttcttcgggcggcagttcgggtaattccgggggctcacgaggtgactcagggtccgagagttcgtgggggagctctaccgggagcagcagtggaaaccacggcggcagtgggggagggaacgggcacaagccaggctgtgagaaacccggaaatgaggccagagggagtggcgagagcggcatccagggctttaggggccagggcgtctcaagcaatatgagggaaattagcaaggaggggaataggctactggggggttccggagataattaccgcgggcagggctcctcctggggttccggtgggggggatgcagtgggcggggtgaacacagtaaacagcgagacctcccccggaatgtttaattttgatacgttctggaagaattttaagagtaaactggggttcataaactgggatgctataaataaggaccagcgctcttcaagaataccctag

SEQ ID NO: 6394 - DNA, 240 bp, synthetic construct
  misc_feature 1..240: note = source = /note="Description of Artificial Sequence: Synthetic coding sequence"
  source 1..240: mol_type = other DNA
atgcccgcttgccgtctgggaccactggcagccgcactcctgcttagtcttctgctgtttgggttcaccctcgtttccgggactggcgcagagaagactggagtgtgtcccgaactgcaggctgatcagaattgcactcaggaatgtgtaagcgacagtgagtgcgcggataacctgaagtgttgtagcgccggatgcgccactttttgtagccttccaaacgggcagctggccgagtag

SEQ ID NO: 6395 - DNA, 2130 bp, synthetic construct
  misc_feature 1..2130: note = source = /note="Description of Artificial Sequence: Synthetic coding sequence"
  source 1..2130: mol_type = other DNA
atgggatgcctgtggggactcgctctgcccctcttctttttttgctgggaggttggcgtgagtggctctagcgccgggccaagcacccggagggcagatacggccatgactacagatgacaccgaagtgcctgctatgacattggcccccggtcatgccgccttggagacacaaacactgagtgctgagacctcctccagagcctcaactccagctggacctatccctgaggccgagactcgcggagccaagcggatttctcccgcacgcgagacacgatcattcactaagacttcccctaattttatggtactgattgcaacgtctgtagagacttccgcagcatcaggaagtcctgagggcgctggaatgactactgtgcaaactatcacaggtagcgatcctcgcgaggctattttcgatactctgtgtaccgacgactcttcggaggaagccaaaaccctgaccatggacatcctgactctggcccacacttccacggaggccaaaggcctgagcagcgaatcttctgccagttctgattcgcctcacccagtaattacaccctcacgggcatctgaaagcagcgcgtctagcgacggccctcaccccgttatcactcctagtcgcgcctctgagtcttccgcttcaagcgatggaccacaccctgtcatcacaccctctcgggcctccgagtccagcgcaagcagtgatggaccacaccctgtgatcactcctagccgggcttctgaaagtagtgcatcttccgacggccctcaccccgtaataacccctagtcgagcgagcgaatcatctgcttcatccgatggaccccatcctgtcatcacccccagtcgtgcttccgaatcatctgccagctctgacgggccccatcccgtcatcaccccgagtcgtgcttcagaatcatctgcctcttcagacggcccgcaccctgtcatcacccctagccgcgctagcgagagttccgcaagctcagacggccctcaccctgtgatcaccccgagtcgggcatcagagagcagcgcgtccagtgacgggctccatcctgtgatcactcctagccgtgcatctgagagctctgcctcgtcggatggcccacaccccgtaatcacacccagtagagcttcagagtcttccgccagttccgacggaccacaccccgtgatcaccccgtcctggtcccccggctcagatgtgaccctgctggcagaagctctcgtgacagtgacaaacatcgaggttattaattgctctattacagagattgagacgacgaccagctctataccaggggccagcgacactgatttgatcccaactgaaggggtaaaggcctcaagcacctccgacccgcccgcattacccgactcgacagaagcaaagccacatatcacggaagtgaccgcctcagccgaaacactgtccactgccggtaccaccgagtctgccgccccggacgcaactgtcggcaccccccttcccaccaactccgcaacggagagggaggtgacagccccgggggccacgaccctctccggagcacttgtcaccgtgagccgcaacccactcgaggagaccagcgctttgtccgtggagactcccagctacgtcaaggtgtcaggggccgccccagttagcattgaagcaggctcagcagtgggtaagactaccagcttcgccggctcctccgcaagcagctactccccctcggaagccgcactgaaaaactttaccccttctgagacccctaccatggacattgcaaccaaaggacctttcccaaccagccgtgaccctttgccatctgttcccccgacaactacgaactcctctcgaggtactaacagtactctggcaaaaattactacctcagccaagaccaccatgaaaccgccgactgctacccctacaacagctaggactagaccaaccactgacgtttcggcgggtgagaatgggggattcctgctcttgcgtttaagtgtggcatccccagaggacctgacagacccgcgggtggctgaacgtctgatgcagcagctgcacagagagctccacgcgcacgccccacactttcaggtttccctgctcagagtgcgtcgaggctag

SEQ ID NO: 6396 - DNA, 2067 bp, synthetic construct
  misc_feature 1..2067: note = source = /note="Description of Artificial Sequence: Synthetic coding sequence"
  source 1..2067: mol_type = other DNA
atgttgcctacagaggttccccagtctcaccctggcccatccgcattgctcctactgcaattgttattacctccaacctccgcatttttccccaacatctggagtctgttggcagctccaggaagcattacgcaccaggatctgactgaagaagctgcactgaacgtaactcttcagctgttcctggaacagcccccccccggtaggccccccttgagactagaagacttcctggggaggacactactcgcagacgacctatttgccgcatactttggacctgggagtagccgccgcttcagggctgcgctgggtgaggttagtcgagcaaacgcagcccaggacttcctacccacgtcccgaaacgatccggacctgcactttgatgccgaaagattaggccaaggaagagccagactagtcggggcattacgggagactgtcgtggccgcacgggcgctggaccatactctagcgaggcagcggctcggtgccgctttgcacgccttacaggacttttattctcattccaattgggtggagctaggtgagcagcagcctcacccgcacctcttgtggccacggcaggagttacagaacttggcccaggtggcagacccaacctgcagcgattgtgaggaactttcctgtccgcgaaattggttaggctttaccctgttgacttcgggttattttgggactcaccccccaaaacccccaggaaagtgctcacatggcggacactttgatcgctcctcgtctcagccccctcgaggagggatcaacaaggattctacctcccccggattctctccgcaccatatgcttcatttgcaagcggccaagcttgccctactggcctctatccaggcgttcagtctcctgcggtctagactcggagacagagatttttcgcggctgctggatataaccccagcttccagcctttccttcgtcctggataccaccggttctatgggggaagagatcaatgccgccaagatccaggcacgccacttggtcgagcagaggcgtggctccccgatggagcccgtacactatgtgctggtcccatttcacgacccgggttttggaccagtatttactacttcagatcctgacagcttttggcagcagctgaacgagattcacgccctaggcggcggcgatgaaccggagatgtgccttagcgcgctccaactggcgctcctccataccccccccctgtccgacatttttgtgtttaccgacgcgagtcctaaggacgcttttctgacaaaccaggttgagtctctaactcaagagcgccgatgtagagtgacctttctggtgactgaggatacatctcgggtgcagggaagggcaaggagagagatactgagccccttaaggttcgagccgtacaaagccgtggccctggcctcaggcggcgaagtgattttcacaaaggaccagcacattagggacgtcgcagccatagtcggcgagtctatggccgccctagtcacccttcccctggatccccctgtggttgttccaggtcaaccactggttttcagcgtggacggattgctgcagaagataacagtgagaatacatggcgatatttccagcttctggattaagaaccctgccggggtgagccaaggccaggaagaaggagggggacctctggggcacacacgtcgctttggacagttctggatggttactatggacgacccgccgcagacaggtacctgggagattcaggtgacagctgaagacacccccggagtccgagtgcaggcccagactagtctggatttcctcttccactttggcattcccatggaggatggaccacacccgggtctgtaccccttgacccagccagtcgcaggcctgcaaacacagttgttggtcgaatctcagtcatggggcagcagcgcggcgtttctgcccagacatccgtcacgcggaccaagggggtgccgcacacggccaggcgctctaggcgcccgcggcacttcaggtgctaggagcccacgatccctcgccgtggcccatgccgcagtacacccttag

SEQ ID NO: 6397 - DNA, 1257 bp, synthetic construct
  misc_feature 1..1257: note = source = /note="Description of Artificial Sequence: Synthetic coding sequence"
  source 1..1257: mol_type = other DNA
aataacctgaacgtcggctctgatactacttcagagacatcattcagcttatcaaaggaagccccgcgagagcacttagatcaccaggccgcacaccaaccctttccccggccccgattcagacaggaaaccggacaccccagcctgcaacgggactttcctcgaagcttcttgctcgaccttcctaatttcccagatctgtctaaagcggatattaatgggcagaaccctaatatccaggtgactatcgaagtggtcgatggacctgattccgaagccgataaggaccagcatcccgagaacaagccaagttggtccgtacccagcccagactggagggcttggtggcagcggagtctgagtctggccagagccaacagcggcgaccaggactacaagtatgactccacctccgatgacagcaacttcctcaatccccccagggggtgggatcataccgcacctggccatcggaccttcgagacaaaggatcaacctgaatatgatagcactgacggagaaggggattggtccttgtggtctgtgtgctctgtgacgtgtggaaacggcaaccagaagaggaccaggtcatgcgggtatgcctgcaccgccacggaatcccgcacgtgtgataggccgaattgtccaggcattgaagatactttccggactgccgcgaccgaggtcagccttctcgcagggtccgaagagttcaatgctactaaactgttcgaagttgatactgatagttgtgaacgttggatgtcctgtaaatccgaattcttgaaaaaatatatgcataaggtgatgaatgatcttccctcctgtccatgctcctaccctaccgaagtggcgtactccacagccgacattttcgatcgaattaaaagaaaggatttccggtggaaagatgcttccgggccgaaagaaaaattagaaatctataaaccaaccgcaagatactgcattagatccatgttaagcctcgaatccaccaccctggctgcgcagcactgctgttacggcgacaacatgcagctcattacacggggaaaaggtgccggcaccccaaatttaatatccactgaattctcagccgagctgcactacaaggtcgatgtcctgccctggattatctgtaagggcgattggagtcgatataacgaggcacgtccacctaacaacggtcagaagtgcacagagtcccccagcgatgaggattatatcaaacagtttcaggaggccagagaatattag

SEQ ID NO: 6398 - DNA, 693 bp, synthetic construct
  misc_feature 1..693: note = source = /note="Description of Artificial Sequence: Synthetic coding sequence"
  source 1..693: mol_type = other DNA
atgagattggctggccccctgaggattgtcgtactggtcgtgtccgtcggcgtgacctggattgtcgtgtccatcctgctggggggacccggaagtggatttcctcggatccagcagctctttacttcacctgagagtagtgtgacagccgcccctcgtgcccgcaaatataaatgtgggcttcctcagccatgtcccgaagaacatctggccttcagggtggtttctggagctgccaatgttattgggcccaaaatttgtcttgaagacaagatgctcatgagttctgtgaaggataatgtgggcaggggactgaatattgcactcgttaacggcgtgtcaggagaactgatcgaagccagggctttcgacatgtgggcaggggatgtgaatgatttgctgaaattcattcgccctctgcacgaaggaacattggttttcgtcgccagctacgacgaccccgctacgaagatgaacgaggagacccggaaactgtttagcgagctgggctctagaaatgccaaggaactggcttttcgagactcatgggtatttgtgggagcaaagggcgtgcagaataaatccccgtttgagcagcatgtgaagaactccaagcattctaacaagtacgaagggtggccagaggctcttgaaatggagggatgtattcctcgtcgaagtactgccagttag

SEQ ID NO: 6399 - DNA, 192 bp, synthetic construct
  misc_feature 1..192: note = source = /note="Description of Artificial Sequence: Synthetic coding sequence"
  source 1..192: mol_type = other DNA
atgggtcccgaggcgttatctagccttttgctcctgctgctggtcgcgtcaggggacgccgatatgaagggtcacttcgaccccgccaagtgtcgttacgcactaggcatgcaggataggacgattcccgatagtgatatttctgcgagttccagctggtctgattcaacagcagcacgtcattcacgatag

SEQ ID NO: 6400 - DNA, 1014 bp, synthetic construct
  misc_feature 1..1014: note = source = /note="Description of Artificial Sequence: Synthetic coding sequence"
  source 1..1014: mol_type = other DNA
atgctgagcctcggggctcactccgtcaccaagacgcagattctgcagggactcggcttcaacctgactcatacccctgagagcgccatccaccaggggttccaacacctagtccattctctgacagtgcccagtaaggacctgacgctgaagatgggcagtgctttgttcgtgaagaaggaattacagcttcaggctaactttctggggaatgtcaagcgcctttatgaagcagaggttttttccactgacttttctaatcccagcatcgctcaagcccgcattaatagccacgttaaaaaaaagacccagggtaaggtggtggatataattcagggcttagatctgctaactgctatggttctagtaaatcacatttttttcaaagctaaatgggagaaacctttccacccagaatacacaaggaagaattttccatttctggtgggagaacaggtcaccgtgcacgttccaatgatgcatcagaaggagcagtttgcattcggagtggataccgagctcaactgtttcgtgctgcagatggactacaagggcgacgccgttgcctttttcgtacttccttcaaaaggaaagatgcgccagttagagcaggctctaagcgctaggactctgaggaaatggtcccacagcctccagaaaaggtggattgaagtgtttattccccggttcagtattagtgcctcttacaatctcgagactatcctgccaaagatgggaatccaaaatgtgttcgataagaacgccgatttttctggcatcgctaagcgcgactcccttcaagtgtcaaaagcaacccacaaggccgtcttggatgtttctgaggaagggactgaggcaacagccgcaaccacgactaagttcatcgtgagaagtaaagatgggccttcttatttcaccgtcagctttaaccgcacattcctgatgatgatcactaataaagctaccgacggaatcctgtttttgggcaaagtggaaaatcccacaaagtcttag

SEQ ID NO: 6401 - DNA, 336 bp, synthetic construct
  misc_feature 1..336: note = source = /note="Description of Artificial Sequence: Synthetic coding sequence"
  source 1..336: mol_type = other DNA
atgtttttcactatctccaggaagaatatgtcccagaagttgtctttattgttgctggtgttcggcctaatatggggccttatgctcctgcactatactttccagcagcctcggcatcaatcatcagtgaaactgcgggagcagatactggatctgagtaagcgttacgtgaaggcactagcggaggaaaataaaaataccgtcgacgtggagaatggggccagtatggctggttatgctgatctgaagcgcaccatcgctgtcctcctggatgacatccttcagaggctcgtgaaattggagaacaaagttgactacattgtggtgaatggctag

SEQ ID NO: 6402 - DNA, 498 bp, synthetic construct
  misc_feature 1..498: note = source = /note="Description of Artificial Sequence: Synthetic coding sequence"
  source 1..498: mol_type = other DNA
atggagatgttccagggtctcttgcttctcttattgctgagcatggggggcacctgggcatcaaaagaaccactgagaccaagatgccgccctattaatgctactctggcggtggaaaaagaggggtgcccagtgtgcattactgtcaataccaccatctgtgccgggtattgtccaaccatgacccgcgtgctgcagggagtgctgcctgccctcccccaggtggtttgtaattacagggacgttagattcgagagcattcgcttgcccgggtgcccacggggcgtcaatcccgtggtatcctacgccgtagcactgtcctgtcaatgtgcattatgcaggcggtctacaactgattgtgggggccctaaagatcaccccctaacatgcgatgaccctaggttccaggattcatcaagcagtaaagcccctcctccttcactgcctagcccctccagactcccagggccttccgatacacctatcctgccacaatag

SEQ ID NO: 6403 - DNA, 699 bp, synthetic construct
  misc_feature 1..699: note = source = /note="Description of Artificial Sequence: Synthetic coding sequence"
  source 1..699: mol_type = other DNA
atggtcctgcttttagtgattctgatccctgttttagtgtcttctgctgggacaagtgcacactatgaaatgctgggtacttgtcgcatggtgtgtgacccctacggcggtacaaaagccccttccactgccgctacaccagatcgtggcctgatgcagagtttgcccaccttcatacaaggtcctccaatgggcccccctggagaaaaaggagagccaggtagacagggactgccaggcccacctggagccccaggattgaatgctgcaggtgcgattagtgccgccacctactccacagtccctaaaattgccttttacgccggccttaagagacagcatgaggggtacgaggtacttaaatttgacgatgtggtgaccaacctgggaaatcattatgacccaaccactggaaagttcacatgttctatccccggcatttacttcttcacttatcacgtattgatgagaggaggtgacggcacttctatgtgggccgacctgtgtaaaaacaatcaggtgagagccagcgctattgcccaggatgcagatcaaaattacgattatgcctccaacagcgtcgtgcttcatctcgagccaggcgacgaagtatacattaagctggacggcggcaaggcccatggggggaataataacaagtactctaccttttccggcttcatcatctatgctgattag

SEQ ID NO: 6404 - DNA, 501 bp, synthetic construct
  misc_feature 1..501: note = source = /note="Description of Artificial Sequence: Synthetic coding sequence"
  source 1..501: mol_type = other DNA
atggggcctgaggccttgagcagcctcctgctccttcttctcgtggccagtggggacgcagacatgaagggacatttcgacccagccaagtgtcggtacgccctaggtatgcaagatcgcactatcccggattctgacatctcagctagttcatcatggagcgattccacagcagctcgacattcacgcctggagtccagcgacggggatggagcttggtgtccggccggaagtgtttttccaaaggaagaagagtacctccaggtcgatctgcagcgactgcatctggtggccctcgtgggcacccaggggcggcacgcaggcgggctgggaaaggaattttcccgaagttacaggctgaggtactcaagggacggacggcgctggatgggctggaaagaccgctgggggcaggaagtcatttcaggcaacgaagaccccgagggggttgtcctgaaggatttagggcctcccatggtggcgcgcctggtccgcttttag

SEQ ID NO: 6405 - DNA, 627 bp, synthetic construct
  misc_feature 1..627: note = source = /note="Description of Artificial Sequence: Synthetic coding sequence"
  source 1..627: mol_type = other DNA
atgattattaaacactttttcggaaccgtgctggtgttgctggcttcaacaactattttttccctggacttgaaactgattatattccagcagagacaggttaatcaagagtcattgaagcttctgaataagctgcagactcttagcattcagcagtgcctgcctcaccggaagaattttctgctcccacaaaaatccctgagtcctcagcagtatcaaaagggacacacactcgcaattttgcatgagatgctgcaacaaattttctccctgtttagggccaacatctctctcgacggctgggaagaaaaccacacggagaaatttctgatacagctgcaccaacaactcgaatacctggaagctttaatggggctcgaagcagaaaaattgagtggaactttggggagcgataacctgcgcctccaggttaaaatgtatttccgccgtatccacgattatctcgagaaccaggattatagcacttgtgcatgggctatcgtccaggtcgaaatctccaggtgcctgttcttcgtattcagtctaacggagaaactgtccaagcagggcaggcccctgaacgacatgaagcaagaacttactaccgaattccgatcccctagatag

SEQ ID NO: 6406 - DNA, 2241 bp, synthetic construct
  misc_feature 1..2241: note = source = /note="Description of Artificial Sequence: Synthetic coding sequence"
  source 1..2241: mol_type = other DNA
atgccctttaggcataagcctggcagcgttttctctgtcgagggtgaaaacctcgatctggccatgtctaaggaagaagtagttgcaatgataggcgatggcccctgcgtggtcaaaacattaactcgtcatcatctgtattgtgagccgcccgtggagcagcccctgccccgacaccacgctctgagagaggcccccgacagcttaccggaattcaccgtgcagatgggtaacctcaggttttccctggggcatgtgcagtacgacggtgagtctccgggagcttttcctgttgccgcacaagtcggacttggcgtcggcacgagtctgctggctttgggcgtgataataattgtcctcatgtacagaaggaagtcgaagcaggctctgagggattataagaaggtacagatccaattggagaacttagagagttctgtgcgcgaccggtgcaagaaagagttcaccgatcttatgacagagatgactgatctcacctcagacctattaggctcaggaatcccgtttctcgattacaaagtatacgcggaaaggatcttcttccctggccaccgggagtctccattgcaccgcgatctaggcgtgccagaatctcgcagacctaccgtggaacagggactgggccagctgagcaaccttctcaactccaaacttttcttaacgaaattcatacatactctggagtcccaacgaacattctcagccagagatcgagcgtatgtggcaagcctgttgaccgtggcgctacatggaaaactggagtatttcacggatattctcagaaccctgctgtctgacctggtggcacagtacgttgcgaaaaaccccaaactaatgctccgcagaacagagaccgtggtggagaagttactgaccaactggatgagtatctgtctttatactttcgtaagagacagtgtgggggaacctttgtatatgctgtttcggggcatcaagcatcaagtggataaaggacctgtggacagcgttacggggaaagctaaatacaccctgaatgataatagacttctgcgtgaagacgtcgagtataggcctctgactttgaatgcgctgctggcagtgggaccgggcgcaggagaggcacagggcgtccccgtaaaggtcctggactgtgataccatctcccaggccaaagaaaaaatgctcgaccagctgtataagggcgtgcccttaacccagcgccctgaccctagaacactagacgtagagtggaggtctggagtggctggccatcttattctatccgatgaagatgtcacaagcgaggtccaagggctgtggcgccgcctgaatactctccagcattacaaggtccccgacggcgcaacagtagccttggttccttgcctcacaaagcatgtgctgagagagaatcaagactatgtgcctggagaacgtactccaatgctcgaggatgtcgacgaaggtggcattcggccctggcaccttgtcaagcccagcgacgaaccggagcctcctcggccccgaagaggcagcctccgtggtggcgagcgggagcgcgccaaggcaattcctgagatctacttaacccggctcctatccatgaaaggcacactgcagaagttcgtggacgacctttttcaagttatcctgtctacctcccgccccgtccctttagctgtaaagtatttcttcgatctcctcgacgaacaggcacagcagcacggcatctctgatcaggataccatacatatttggaagacaaactccttgccgctccgcttttggataaatattattaagaatccacagttcgtgtttgatgtccagacaagcgataatatggacgctgtgctgctcgttattgctcagacattcatggatgcatgcacactcgctgatcataaattggggcgggacagtcccatcaacaaactcctgtatgccagagatatcccccgctataaacgcatggtcgagagatactacgccgatattagacaaacagtaccagcctccgaccaggagatgaatagtgtgctagcggaactgtcatggaactactctggcgacctgggggcccgagtcgccctgcacgaactttacaagtatataaacaaatattacgatcagatcattactgcactggaggaggacggaaccgcccagaagatgcagcttgggtatagacttcagcagatcgctgccgcagttgagaataaggtcaccgacctctag

SEQ ID NO: 6407 - DNA, 603 bp, synthetic construct
  misc_feature 1..603: note = source = /note="Description of Artificial Sequence: Synthetic coding sequence"
  source 1..603: mol_type = other DNA
atggcttggggtggggtccacacttgctgctttcacctttgctgttgttgctcttggccccagggagccgtcccagaagaactgcataagcacccgggccagaccctcctgctccagtgccagtactccccaaagcgaggcccataccagcccaaatcctggtgccaacagacatccccctcccgttgtactctcctagttacatctagcaagccatggactgccgttcagaagagtcactataccatctgggataagcctaacgccggattttttaacatcaccatgattcaactcactcagaacgactccggtttttactggtgtggtatctacaacgccagtgagaatataattaccgtccttagaaacatctctctggttgtctcccctgcccccacaacatctcccatgtggacccttccctggctgcctacttctacagtattgatcacatcaccggagggaacctctggccatcccagtatcaacggtagcgagacccgtaaatcgagagcacctgcttgtctgggatctgggggcccgcgtttcctcgtattggttctgtgcggccttctcctagccaagggcttgatgctttag

SEQ ID NO: 6408 - DNA, 114 bp, synthetic construct
  misc_feature 1..114: note = source = /note="Description of Artificial Sequence: Synthetic coding sequence"
  source 1..114: mol_type = other DNA
atgggttggttaacacgcattgtctgcctgttctggggcgtactgctgaccgcgcgggccaattatcagaatgggaagaacaatgttcccagactcaagctgtcatacaaatag

SEQ ID NO: 6409 - DNA, 525 bp, synthetic construct
  misc_feature 1..525: note = source = /note="Description of Artificial Sequence: Synthetic coding sequence"
  source 1..525: mol_type = other DNA
atgcgcttactggcctttctttctttgctggcgctggtgctccaggagacggggacagcaagcctccctcgaaaggagcgcaaacgccgtgaggagcaaatgccccgcgagggggacagtttcgaggtcctgccgctccgaaacgacgtccttaaccctgataattacggcgaggttattgatctgagcaattatgaggaactgaccgactatggagaccaactgccagaagtgaaggtgacaagtttggctcccgccaccagcatcagcccagccaaatccacgaccgccccagggacacccagctcaaacccgacaatgaccagacctacaaccgccggactgttactgtcctcacagcctaatcacgaagacatccctcctctgccgcgccggacagcgtatctttatgccagattcaaccgcatctctcggattagagctgaggacttcaagggtttaactaaactgaagcgcatagatctcagtaataatctgattagctccatcgacaatgatgcctag

SEQ ID NO: 6410 - DNA, 657 bp, synthetic construct
  misc_feature 1..657: note = source = /note="Description of Artificial Sequence: Synthetic coding sequence"
  source 1..657: mol_type = other DNA
atggggcgggtcttccttactggcgaaaaggcgaatagtattctgaaacggtatcctagggcaaatgggtttttcgaggaaattcggcaggggaacatcgagcgggagtgcaaagaagaattttgtacattcgaggaggctcgtgaggccttcgaaaacaacgagaagactaaggagttctggagcacctatacgaaggcccagcagggggagtcgaatcgcgggtcagactggtttcagttttatctcacttttcccctaatttttggcctcttcattatattgctcgtaatattcctcatatggcgttgcttcctgcgaaacaaaactcggcggcagacggtgactgaaggccacatcccttttccacagcacctaaacatcataacgcccccccccccgcctgacgaggttttcgattcctcaggactgagccctggatttctgggctacgtggtgggcagaagcgattccgtgagcaccaggctatcaaactgtgaccctccccccacctacgaagaggctacagggcaggttaatctgcagcgaagtgaaacagaacctcatctggacccaccccctgaatatgaagatattgtcaactctaactcggcctcggcaatccccatggtgcccgtggtgactacaatcaaatag

SEQ ID NO: 6411 - DNA, 2535 bp, synthetic construct
  misc_feature 1..2535: note = source = /note="Description of Artificial Sequence: Synthetic coding sequence"
  source 1..2535: mol_type = other DNA
atgggccctggagccccttttgcacgggtagggtggccattgcctctgctcgttgtgatggctgctggcgtggccccagtgtgggcatcccactctccccacttacctaggccgcatagccgggtgcctccccatccctctagtgagcggagggctgtgtatattggagcgttatttcccatgtccggtggttggcccggaggacaagcatgccagccggctgtggagatggccctggaggatgtgaacagcagaagagacatcctgccggattacgagctcaagctgatccaccacgactccaaatgtgatcccgggcaggctactaaatacctatatgagctcctgtataacgatccgatcaagatcatcctgatgcctggctgttcctcggtcagcaccctggttgctgaagctgcacgtatgtggaatctcattgtgctgagctacggcagttctagccccgctctgtcaaaccgccagagatttcccacattctttaggacacaccctagtgccacactccacaacccaaccagggtaaagctctttgagaagtggggctggaagaaaattgccaccatacagcagacaactgaggtgtttacatctacactcgacgacttggaagaacgggtcaaagaagcaggcatagagattacattcagacagtcattcttttcagatccggctgtgcccgtgaagaacttgaaaagacaagacgccagaatcatcgttggactgttttacgagacagaggctaggaaggtgttctgtgaggtgtacaaagaaaggctgtttggcaagaaatacgtgtggtttctaataggatggtacgcggataattggtttaagatctatgaccctagtataaattgtacggtggacgaaatgacagaggctgtcgaaggacacataacaaccgagatagttatgctgaatcctgccaacaccaggagcataagcaacatgactagccaagagtttgtagagaaattgactaagcggctgaaacgccatccagaagagacaggtggctttcaggaggcgccactggcatatgatgccatatgggcacttgctctggccttgaacaagacatccggcggcggggggaggtcaggagtacgacttgaggattttaactataacaaccagactataacagaccagatttacagggctatgaatagcagctctttcgagggtgtcagcgggcatgtcgtgttcgatgcttccgggagccgcatggcttggacactgatcgagcaattgcaggggggctcatataagaaaataggctattacgactctaccaaagacgatctcagttggagtaaaactgataaatggatcggcggcagcccccccgctgatcaaaccctggtcattaagacctttaggtttctttcccaaaaactgtttatctctgtatccgtgcttagcagcttgggcattgtgttggcagtcgtctgcctctcgttcaatatctataatagccacgtacgatacatccagaattcacaacctaatctgaacaatctcaccgcggtcgggtgctctcttgccttggccgccgtgtttcctctgggcctggatggctatcacatcggtagaaaccaattcccattcgtctgtcaggcgaggttatggctgctcggactgggcttttccttggggtacggcagtatgtttaccaagatctggtgggtgcatactgtttttacaaaaaaggaggaaaagaaggagtggcgtaagacccttgagccctggaagctttacgctacagtggggctcctggtggggatggacgtactgactcttgccatttggcaaatcgtggaccccctccatagaactatcgagacatttgctaaagaggagccaaaggaggacatcgacgtaagcattctgccgcagcttgaacactgctcatcgcgcaaaatgaacacttggctgggtatcttttatggatacaaaggcctcctgctgctattgggcatcttcctggcttatgagaccaagtccgtttccacggagaagattaacgaccaccgtgccgtgggaatggccatctataacgtagccgtgctgtgcttgatcacggcaccggtaaccatgattttgtccagccagcaggacgccgcgttcgctttcgcgtctcttgccatcgtattttcctcatatattacattagtagtgctgttcgttcctaagatgagacgcttgattacaaggggcgagtggcagtccgaggcccaagatactatgaagactgggagtagcaccaacaacaatgaagaagaaaagagccgactcttggagaaagagaaccgggagctggagaaaattatcgcagagaaggaggaacgggttagcgagctcaggcatcagttgcagagtagacaacagctgcgcagccgccgtcacccccctaccccccccgaaccttctggagggctgcctagaggccccccagagccccctgatcgactctcttgcgatgggtcaagggtccacctgctgtacaagtag

SEQ ID NO: 6412 - DNA, 2007 bp, synthetic construct
  misc_feature 1..2007: note = source = /note="Description of Artificial Sequence: Synthetic coding sequence"
  source 1..2007: mol_type = other DNA
atggacctggtgctgaagaggtgtctgcttcatctggctgtcattggggccctgctagccgtgggcgccacaaaggtgccccgcaaccaggattggctcggggtgagccgccaattgcgtacgaaagcttggaacagacagctgtaccccgagtggacagaggcccagcgactagactgttggaggggggggcaggtttctcttaaggtgtctaacgatggacctaccttgatcggcgcaaacgctagcttctccattgctctcaatttccctggatcacagaaagtgctcccggatggtcaagttatttgggttaataacaccattatcaatggctcacaagtctgggggggccagcccgtgtatccacaggaaactgacgacgcttgtatctttcccgatggtggtccatgcccatcaggtagctggtcccagaagagatcgttcgtatatgtgtggaaaacttggggccagtactggcaggttctgggtggccctgtgtccggactcagcatagggacaggccgggctatgctcggcacacatacaatggaggtgacggtgtaccacagacggggctcgagaagctatgttccattggcccatagttcatccgctttcacaatcactgatcaggtgcccttcagcgtctccgtgtctcagttacgggccttagatggcggaaataagcactttcttcgcaaccaacctctgactttcgctctacagttacacgatccctcgggctacctggctgaagccgatctcagctatacctgggattttggcgattcctcaggaaccttgatctctagggccctggtggttacccacacgtacctggagcccggacctgtgacagcccaggtggttctgcaagctgctataccccttacaagctgtgggagttcaccagtgcctggtactacggacggacatcgccccaccgccgaggcacccaacaccaccgccggtcaggtcccaaccaccgaagtggtgggcacaaccccgggccaggcccccactgccgagccgtcaggcacaacttcggtccaggtgcctaccaccgaagttatttctactgcaccagtgcaaatgcccactgcagagtctactgggatgacacctgagaaggtgcccgtgtctgaagttatggggaccacactcgcagagatgagtacacctgaggctactggtatgactcctgccgaggtcagcatcgtggttctatccggaacgaccgcagcacaggtaactactaccgaatgggtagaaactacagctcgcgaattaccaatacctgagcccgagggacccgatgcttcatcaattatgagcaccgaatcgatcaccgggtcccttgggcccctcctagacggaacggctacactgcggctcgtgaagcggcaggttccactagattgcgtactgtatcgttatggcagcttctccgtgactcttgacatcgtccaaggtatcgagagcgccgaaattctgcaggcagtacctagcggagagggcgatgcattcgagcttacagttagctgccagggcgggctccctaaggaggcctgcatggagataagttcacctggctgtcagcctcctgctcagcggctctgccagcccgtgctcccctcccctgcctgccagctggtgttacaccagatcctcaagggtgggtctggtacatattgcctgaatgtgagtttggcagacaccaacagcttagccgtcgtcagcacacaactgatcatgccagtgccaggaatccttctcacaggacaggaggccgggttgggacaggtgccactgatcgtgggcattctgttggttctcatggctgtagtactggcatccctgatttacaggaggcgactgatgaagcaggatttttctgttccacaactgccccacagttcttcacactggctcagacttccaagaattttttgcagctgccctattggcgaaaactccccactactgtcgggccaacaagtgtag

SEQ ID NO: 6413 - DNA, 525 bp, synthetic construct
  misc_feature 1..525: note = source = /note="Description of Artificial Sequence: Synthetic coding sequence"
  source 1..525: mol_type = other DNA
atggcggatatgcagaacctggtggaaagactggagagggctgttgggcgattggaggctgtctcgcacacctctgatatgcatcgcggctacgcagactccccgagcaaagcgggtgccgccccctacgtgcaggcatttgatagcctgctggctggacccgtggccgagtatctgaagatcagtaaagaaatcggcggggatgtccagaaacatgctgaaatggtgcacaccggcttgaagctggagagggctctgttagtgacagccagtcagtgtcagcagccagcagagaacaaactgtcagacctcttggccccaataagcgagcaaataaaggaggtgattaccttccgcgaaaaaaatagggggtccaaattgtttaatcacctcagtgctgtctccgaatcaatacaggctttggggtgggtggcgatggcaccgaagcctgggccctatgtgaaagaaatgaacgatgccgctatgttttatactaaccgcgttctgaaggagtacaaagactag

SEQ ID NO: 6414 - DNA, 1368 bp, synthetic construct
  misc_feature 1..1368: note = source = /note="Description of Artificial Sequence: Synthetic coding sequence"
  source 1..1368: mol_type = other DNA
atgcttcaccccgaaactagtcccggaaggggacatctcttggcagttctcctggccctgctggggacagcttgggctgaggtgtggcctccgcagctgcaggaacaggcgccgatggcgggcgcactcaacaggaaagaatcctttctacttctgtcccttcataaccggctccggagttgggtacaacctccagctgccgacatgcgtcgccttgattggtccgattccctggcccagcttgcgcaggcccgggctgctctttgcggtactcccacacctagcctagcatcaggcctgtggcggacactgcaggtgggatggaacatgcagctgctacccgctggcctcgtctctttcgtcgaggtggttagtttgtggttcgcagaaggccagagatactcccatgccgcaggggagtgtgcgcggaatgcaacatgcacgcactacacacaactcgtttgggcaacaagctctcagctgggatgcggacgccacctgtgtagcgcaggccaggctgcgatagaggcctttgtgtgcgcttatagccctagagggaactgggaggtcaatggaaaaacaatcgttccctacaaaaagggcgcttggtgttctctgtgcactgccagcgtgtccgggtgttttaaagcctgggaccacgccgggggcctgtgcgaggtgcccaggaatccctgccggatgagctgtcagaaccatggacgcctcaacattagtacatgccactgccactgcccacccggctatacaggtagatactgtcaggtgcgttgttccctccagtgtgtgcacggcaggttcagggaggaagagtgttcctgtgtgtgcgatatcggatatggcggggcccagtgtgcaacaaaggtgcacttcccattccatacctgcgacctccggatcgatggcgattgctttatggtgtccagtgaagccgacacttactatagggcccggatgaagtgccaaagaaaggggggcgttctggcacagataaaatctcaaaaagtgcaagatatactggccttctatctcggccggttggagacaaccaacgaggtgattgacagtgacttcgagacccgcaatttttggattgggctgacgtataagaccgccaaagactcctttagatgggcgactggcgagcaccaggccttcacatcttttgctttcggccagccagacaatcacgggctggtttggctttcggccgccatgggtttcggcaattgcgtggagctccaagcctctgccgcatttaactggaacgaccaaagatgcaagaccagaaataggtacatctgtcagttcgcgcaagaacacatctctaggtggggcccaggctcgtag

SEQ ID NO: 6415 - DNA, 297 bp, synthetic construct
  misc_feature 1..297: note = source = /note="Description of Artificial Sequence: Synthetic coding sequence"
  source 1..297: mol_type = other DNA
atggtgttggcgatgttgggggcattacacccccgagctggactctctttgttcctccatttgattttggccgtggcattgctgcggtctcagcccctgaggtctcaacggagcgttccagaagccttttccgcccctttagagctgtctcagcccctcagtggactggtcgacgactatggtattctgcccaagcacccacgcccccgtggcccacggcctttgctgtctagagcccaacaaagaaaacgggacgggcccgacctggcagagtactattacgacgcccacctgtag

SEQ ID NO: 6416 - DNA, 2742 bp, synthetic construct
  misc_feature 1..2742: note = source = /note="Description of Artificial Sequence: Synthetic coding sequence"
  source 1..2742: mol_type = other DNA
atgggacctgaagcactctcctctctcttgttattactcctggtggcatctggggacgccgacatgaaaggccattttgatcccgccaaatgccgttacgccctcgggatgcaggatagaactatccctgattcagatatctcagcctccagctcctggtccgacagtacggcagctcggcatagcaggctggagtcttcagatggcgacggggcgtggtgcccagctgggtctgtgtttcctaaagaggaagaatacttacaggtggatttacaaagactgcatctcgtggcgcttgtggggactcagggcaggcacgctggcgggctagggaaggagttctcacgaagttatcgtctcagatacagccgcgacggcagaaggtggatgggctggaaggatcgctggggccaagaggtgatttccggaaatgaggacccggaaggcgtggtgctcaaggatcttgggcccccaatggtcgcaagattggtgcgcttttatcccagagccgatagagttatgtcagtctgccttagagtcgagctgtacggctgtctctggcgcgacggcctgttatcatataccgccccggtgggccagactatgtacctgagcgaagctgtttacctgaacgattctacctacgatggacatacagtggggggactacagtacggcggactgggccagctggccgacggggtcgtgggtttggacgattttcgtaagtctcaagagctgcgggtgtggcccgggtacgattacgtgggttggtctaatcattcttttagcagcggttatgttgagatggagttcgagttcgatcgcttacgggcgttccaggctatgcaagtgcactgcaacaatatgcacacattgggtgctaggcttcccggcggagtggagtgcaggtttcggaggggacccgccatggcctgggagggagagcctatgcgccacaatctgggtggaaacctgggcgatcccagagcaagggcggtgtctgtgcctctgggtggaagggtggctcggttcctccagtgccgttttctgttcgcagggccttggttactcttctccgaaatctccttcattagcgatgtcgtcaacaactcaagccccgctcttggagggacatttccacccgcaccctggtggccccccggacctcccccaacaaatttctcatcactcgagctcgagcccaggggccagcagcccgtggcaaaggccgaaggcagccccacggcaattctcattgggtgtctggtggctatcatcctccttctgctgttgatcatcgctctgatgctgtggcgactccactggaggagattgctgtccaaggcggagagaagggtactagaggaggaacttaccgtgcatctttccgtgccaggcgacactatactgatcaataaccgccccggaccacgggagcctcctccctatcaggagccacgacctcgcgggaatccacctcactctgctccttgcgttccaaatggctctgcccttctgttgagcaatcctgcctacaggcttctgctcgccacatacgctaggcctccccgtgggcctggcccccctacacccgcctgggcaaagccaaccaacactcaggcttattctggcgactacatggagcctgagaaacccggggcaccactgctcccaccacctccccagaatagcgtgcctcattacgccgaggcagacatcgtgaccctgcaaggagtcacgggagggaatacatatgcggtcccagccttaccccctggtgcggtcggcgacggtccacctcgagtcgattttcccagatctcgtctcagatttaaggaaaagctgggagagggacagttcggcgaagttcacttgtgcgaagtggacagccctcaggacttggtgtcccttgacttcccacttaacgtcagaaaagggcacccactcctggtcgcagttaaaatcctgcggccggacgccaccaaaaacgcccgaaacgatttcctgaaggaagtcaagataatgtccaggcttaaagatcccaatatcattaggcttctgggcgtatgcgtgcaggatgatccactgtgcatgatcactgactacatggaaaatggcgatctaaatcaatttctgtcagcacatcagctggaggacaaagccgccgaaggtgcacccggcgacgggcaggccgctcaagggcccacgatcagctaccctatgttgcttcatgtagctgcgcagatcgcctcgggaatgaggtacctggctactctaaactttgttcatagagacttagcaactcggaactgcctcgtgggcgaaaactttacaatcaagattgcggactttggcatgtctagaaacttatacgccggcgattactatcgagtacagggtcgtgccgtgctgccaataagatggatggcatgggaatgtattttgatggggaagtttacaactgcctccgacgtgtgggcttttggcgtgactctatgggaggtactgatgctctgtagagcccagccctttggacagctcactgacgagcaggtgatcgagaacgcaggggagttcttccgagaccagggccggcaagtgtatttaagtaggccacccgcctgccctcagggactgtacgaactgatgctgagatgctggagcagagaatccgaacagcgcccacccttcagtcagcttcaccgctttctggccgaagacgctctgaacactgtgtag

SEQ ID NO: 6417 - DNA, 678 bp, synthetic construct
  misc_feature 1..678: note = source = /note="Description of Artificial Sequence: Synthetic coding sequence"
  source 1..678: mol_type = other DNA
tgagcagacttgcccagctgttggggtgccggcccgtgctacaccggccacaaagtcggagctctgaggcgagacaccgtgatctgttgttgtcgacacggggactacagtacaccctgtctctttacacccggaaagccatcacgcaatccctcaccgtggaagaggaccctatggacgctgtctgcaccatgggcggggcctgctggttggacaggcgaggaacagaacgcaaccaagacaggcctgatcacccgcaggccgcgccctttaagaagaagacctcatccagcccccgcctctccattgccggagatcattcgcgggaatattccccggatgctcgggaagtttgttccagtgaattgggagccaccccagccactccccttccctaaatatcttcggtgttaccgctgtctacttgagactaaggaactgggatgtctgctgggcagtgacatttgcttgacaccagctggctcttcctgcattacactccacaagaaaaactcctccggttccgatgtgatggtctccgactgtagatccaaagagcaaatgagtgattgttccaacacgcggacatcacctgttagcggattctggatattcagccaatattgtttcttggacttttgtaacgatcctcagaatcgtgggctctatacaccctag

SEQ ID NO: 6418 - DNA, 405 bp, synthetic construct
  misc_feature 1..405: note = source = /note="Description of Artificial Sequence: Synthetic coding sequence"
  source 1..405: mol_type = other DNA
atgccacgatgtcgttggctttcccttattcttcttaccatccccttggctctggtggcaagaaaggatcccaaaaaaaatgagacaggggtgctccgcaagctcaagccggtgaacgctagtaacgccaacgtgaagcagtgtctctggtttgcgatgcaggagtacaataaggaatccgaggacaagtacgtgttcctcgtggtgaaaaccttgcaggcacagctgcaggtcactaaccttctggagtacctgatcgacgtggagatcgccagatcagattgccgtaaacccctgagcacaaatgagatttgtgcaattcaggaaaatagcaaattgaagcgtaagctgtcttgttccttcctcgtgggtgcattgccctggaatggtgagttcaccgtctag

SEQ ID NO: 6419 - DNA, 1182 bp, synthetic construct
  misc_feature 1..1182: note = source = /note="Description of Artificial Sequence: Synthetic coding sequence"
  source 1..1182: mol_type = other DNA
atgcggaccctattcaacttgctctggctggcactcgcatgtagccctgtgcatacaactctgtcaaagtccgatgccaagaaggcagcctcaaaaaccctgctcgaaaaatcccagttctcagacaagccggtacaggatcggggcctagttgtgactgacttgaaggctgaatctgtggtgctcgagcatcggagctactgctccgctaaggcacgtgaccgccattttgctggagacgtcctaggatacgtcactccctggaattcacacggctatgacgtgaccaaagtgtttggtagtaagttcacccagatcagtcccgtctggctgcagctcaaacgacggggcagggaaatgttcgaggtgaccggcctgcatgacgtagaccagggttggatgagagctgtcagaaaacatgctaaagggctgcacattgtcccacgtctcttgttcgaggattggacctatgatgatttcagaaatgtgctagatagcgaagacgagattgaggagctgagcaagactgtggtccaagtggccaagaaccagcattttgatggttttgtcgtggaggtgtggaatcagctcctgtctcagaaaagagtcggactgatccacatgctgacccaccttgccgaggccctgcatcaagcccggttattggcactgttggtgattcctccagctattactcctgggacagaccagctggggatgtttacacataaggagttcgagcaacttgccccagtgttggacggcttcagtttaatgacctatgattattcaactgctcatcagcctggccctaatgcccccctcagctgggttagggcttgcgtccaggtcttggacccaaaaagcaaatggcggtcaaagattctcctggggctcaatttctacggaatggattacgccacaagcaaagatgcacgcgaaccggtcgttggcgcccgctatatccagacacttaaggatcatcgacctagaatggtgtgggattcacaggcgtctgagcattttttcgagtacaagaagtccagatctgggcggcacgttgtcttttaccccaccctcaagtctttacaagttagactggagctcgccagggaactaggggtgggcgttagtatctgggagctcggccaaggcctggactacttctatgaccttctgtag

SEQ ID NO: 6420 - DNA, 678 bp, synthetic construct
  misc_feature 1..678: note = source = /note="Description of Artificial Sequence: Synthetic coding sequence"
  source 1..678: mol_type = other DNA
taagctgatctgccgtcttgttggggcgcaggtccatgttataccggtcacaaagtgggcgccctgaggcgtgacaccgtgatctgttgctgccgacatggtgattatagtacaccctgcttatttacacccggcaaaccaagtagaaatccttcgccctggaagcgaacactttggacattgagtgctccatgggccggacccgccgggtggacaggcgaggagcaaaatgccacgaaaacaggtcttatcactagaagacctaggcctctcagaagacgtcctcaccccgccccagccagtcctctcccagagatcattcgagggaacatccctaggatgctgggcaaattcgtgccagtgaactgggagcccccgcagccgctgcccttcccgaaatacctgcggtgctaccgatgcctgctggagactaaggagttgggatgtctgcttggctcggacatctgtctgacacccgcgggatcatcatgcatcacgctgcacaaaaagaactcttccggatcggacgtcatggtgagcgattgcaggtctaaggaacagatgtctgattgctcaaataccagaacatcccctgtttctggcttctggatcttttcgcagtactgctttctagacttttgcaatgacccccagaaccggggcctgtacaccccatag

SEQ ID NO: 6421 - DNA, 1410 bp, synthetic construct
  misc_feature 1..1410: note = source = /note="Description of Artificial Sequence: Synthetic coding sequence"
  source 1..1410: mol_type = other DNA
atgatgagactcggagggcgactagttctgaacacaaaagaggaacttgccaacgaaagactgatgaccctgaagatcgctgagatgaaagaggccatgaggactctgatctttccgccttccatgcacttctttcaggccaaacatttgattgagagatcccaggtctttaatattttaagaatgatgccaaaaggtgccgcactccacctgcatgacattggcattgtgaccatggactggctagtgagaaatgttacttaccggccacactgccacatctgcttcaccccgcgcggtattatgcagttcaggtttgcccacccgacaccccggcccagtgagaagtgctcaaagtggattctcctggaagattaccggaaacgagttcagaacgtgaccgaatttgatgattcactgcttaggaattttacgctcgttactcaacatccagaagtgatttatactaaccagaatgtggtatggagcaagttcgagactatcttcttcactatatcgggtctgattcattatgcccctgtgttccgggactacgtcttccggagcatgcaggaattttatgaagacaacgtattgtacatggagattcgggctcgccttctgccagtgtatgagctgtcaggagagcatcatgacgaggagtggtccgtgaaaacctatcaagaagtcgctcagaaatttgtcgaaacgcaccccgagttcataggcatcaagataatctactccgaccaccgttccaaagacgtggctgtgatcgccgagtcaattaggatggcaatgggtctcagaataaaattcccaacggtggtcgcgggtttcgatctggtgggacacgaagacaccggccacagtctacacgactacaaagaggcgctcatgatccccgcaaaagacggggtgaagctgccttacttctttcatgcgggagaaacagattggcaggggacctctatcgatcggaatatactggacgcactaatgctgaacacgactcgcattggccacggatttgccctaagtaaacaccccgccgtacgaacttactcctggaaaaaggatattcccatcgaagtatgcccaatttccaatcaggtgctcaagttggtatcagatctgcgcaatcaccccgttgctacactgatggcaacgggccaccccatggtgatttcctcagacgatcctgccatgtttggcgcaaaggggctctcatatgatttttacgaggtgttcatggggataggcggtatgaaggccgacctgagaacgcttaaacagctggccatgaactcgatcaaatacagcactctgttggaaagtgagaaaaacacttttatggagatatggaagaaacggtgggacaaatttattgccgacgttgccacaaagtag

SEQ ID NO: 6422 - DNA, 1137 bp, synthetic construct
  misc_feature 1..1137: note = source = /note="Description of Artificial Sequence: Synthetic coding sequence"
  source 1..1137: mol_type = other DNA
tagtatagtggcgactacatggaacctgagaaacctggcgcccctctcttgcctcctccccctcagaactccgtccctcattacgctgaggctgacattgtgaccctacaaggcgtgacgggcggaaatacatatgccgtgccagcccttccgcccggcgccgtgggagacgggcctcccagggtagacttcccccgatctcggctccgcttcaaagagaaactgggggagggacagttcggcgaagtgcacctgtgcgaagtggactcccctcaggacttggtctcactagatttccctctcaacgtcaggaaaggccatccactcctggtagcggtgaaaatccttcggcccgatgcaactaaaaatgcaagcttctcactgttcagccgaaacgactttttaaaggaggtgaaaatcatgagccgcctgaaagaccctaacataatcagactcctgggcgtatgcgttcaggacgaccccctgtgtatgatcaccgattatatggagaatggtgatctcaatcagtttctgtccgctcaccagctggaggataaggctgcggaaggggccccaggcgacggacaggcagcacaggggcctacaatctcgtatcctatgttgcttcacgtggctgctcagatcgcatctggaatgaggtacttggcaaccctgaattttgtgcaccgtgaccttgcgacacgtaactgtctcgtcggtgaaaattttactatcaagatagccgacttcggcatgtctagaaatctgtatgctggggactactaccgtgtgcaggggagagctgtgttgcctatcagatggatggcctgggaatgcatcctgatggggaagttcaccactgcgagcgatgtctgggctttcggagtgactctgtgggaggtgctcatgctttgccgggcacagccgttcggtcagttgaccgatgagcaggtgatcgaaaacgcaggggagttttttcgcgatcagggtcggcaggtgtatctgtcccgcccaccagcctgtccgcagggcctgtatgagctgatgctgagatgctggtctagggaatcagaacagcgccctccattcagtcagctgcatcggttcctggcagaagatgcgctgaacaccgtgtag

SEQ ID NO: 6423 - DNA, 678 bp, synthetic construct
  misc_feature 1..678: note = source = /note="Description of Artificial Sequence: Synthetic coding sequence"
  source 1..678: mol_type = other DNA
tgagcggacctcccctcttgttggggagcggggccatgttacacaggccacaaggtgggagcccttagacgggacactgttatttgctgctgtcgccatggagactacagcactccttgcctgtttactccaggcaaaccttcgcgtaatcccagcccatggaagcgcactctctggaccctttccgccccctgggctggcccagccggctggacgggcgaggagcagaacgctacaaagacaggactgataactcggcggccccggccactaagacgcaggccacaccccgcccctgcaagccctctgcccgagattatccgggggaatatacctcgcatgttaggcaagtttgtcccagtcaactgggagcctcctcagccactaccatttccgaaatacctgcggtgttacaggtgcctgctagagactaaggagttgggatgccttctaggaagtgacatttgcctaacacccgctggctcctcatgtatcacactccataagaagaatagcagcggctccgatgtgatggtatccgactgcagatcaaaggagcaaatgtctgattgcagcaatactagaacttcccctgtgtcaggattctggatcttttcccagtactgcttcctggacttctgtaatgacccacagaacagagggctgtacaccccctag

SEQ ID NO: 6424 - DNA, 846 bp, synthetic construct
  misc_feature 1..846: note = source = /note="Description of Artificial Sequence: Synthetic coding sequence"
  source 1..846: mol_type = other DNA
atgctgccaaagtctcgcagagccctcacaattcaggaaatcgccgcgctcgcacggagttcacttcatgggataagccaggtggtgaaggaccacgtaacaaaacctaccgccatggcacagggacgagtggcccatctgatagagtggaaaggttggagcaagccttctgacagccccgccgccctggaatctgccttttcttcctactcagacctatcagaaggggaacaggaggcccggttcgccgctggagtggcagagcaattcgcgattgccgaagccaagttgcgcgcctggtcctctgttgacggcgaggacagcactgatgattcttacgacgaggatttcgccggggggatggacactgatatggccggccagctccccctcggaccccaccttcaggatttgtttaccgggcatcgcttctctcgacctgtcagacagggcagtgtcgaaccagaatcagactgcagccagaccgtcagccccgatacactgtgcagtagcttgtgctctctcgaagatggccttttggggagcccggcacgtttggcctcccaactgctcggagatgaactcttgctcgctaaactgccaccctccagagagtctgcctttaggagtctcggaccactcgaagcgcaagactcactttacaattccccgctcaccgaatcgtgcttgagccccgccgaggaggagcctgccccttgcaaggattgccagccgttatgccctcctctcactggctcttgggaaagacagaggcaggcttcagacctagcttcatccggggtagtgtcacttgacgaggatgaggctgaacccgaagaacaatag

SEQ ID NO: 6425 - DNA, 1110 bp, synthetic construct
  misc_feature 1..1110: note = source = /note="Description of Artificial Sequence: Synthetic coding sequence"
  source 1..1110: mol_type = other DNA
atgaagtttcagggccctctggcttgtctgctcctggctctttgtctggggtcaggtgaggccggaccgctgcaaagcggggaggagtccactggcactaacataggcgaagccctgggccacgggctaggggacgccctgagtgaaggcgtaggaaaggccattggcaaggaagctggtggggcagccggaagcaaagttagcgaagccctcggacagggcaccagggaggccgtgggaacaggagtaagacaggtcccagggttcggtgtggctgatgcgctgggcaatcgcgtgggcgaagctgcacacgccttgggaaacactggccacgaaattggtagacaagccgaggatgtcattaggcatggggccgatgccgtccggggatcatggcagggggtgcctgggcataatggtgcctgggagacatcgggtggccacggaatctttggctcccagggtgggttgggcggtcaaggacaggggaatcctggagggctcggtaccccctgggtgcatggctaccccggaaactccgccggcagtttcggtatgaacccacagggcgctccgtgggggcaaggagggaatgggggtcccccaaattttggcaccaacacccagggcgccgtggctcagccgggatatgggagtgtgagggcctccaatcagaacgaaggttgtacaaacccccccccaagcggctccggaggtggcagcagtaattccggagggggcagtgggagccaatcaggcagctctggttcaggctcaaacggtgataacaataacgggagctccagcggaggctcatcgagcgggagcagttccggagggagctctggcggcagttcaggaggatcttccggtaacagcgggggatctaggggcgattccggctctgaatcatcttgggggtcttccaccggtagcagtagcggcaatcatgggggttccgggggcggaaacgggcataagccaggcaattccgaaaccagcccgggaatgtttaatttcgatacattctggaaaaactttaagtcaaagctgggatttataaattgggacgctattaacaaggaccaacgctcctctcgaattccctag

SEQ ID NO: 6426 - DNA, 420 bp, synthetic construct
  misc_feature 1..420: note = source = /note="Description of Artificial Sequence: Synthetic coding sequence"
  source 1..420: mol_type = other DNA
atgggcccagaagccttaagcagcctcctgctgctgctgctggtagccagtggcgatgccgatatgaagggccatttcgaccccgctaagtgtcgctatgccctagggatgcaggacaggacaattccagatagcgatatctccgcttcgtcttcttggagcgatagtaccgctgctaggcactcaagactagaaagcagcgacggggacggtgcctggtgccctgccgggtcagtttttcccaaggaggaggagtaccttcaggtcgacttacagcgcctccatctggtggccttagttggcacccaagggcggcacgctggtggactgggcaaggagttctctcgatcatataggttaaggtacagcagagacgggaggcggtggatgggttggaaggaccggtggggtcaggaatag

SEQ ID NO: 6427 - DNA, 516 bp, synthetic construct
  misc_feature 1..516: note = source = /note="Description of Artificial Sequence: Synthetic coding sequence"
  source 1..516: mol_type = other DNA
atgagacataatctggggggcaatctaggggatccaagggcgcgggcagtgtcggtccccttagggggaagagtagcccgctttctacagtgcaggtttctgttcgcagggccttggctgctgttctccgagatttcatttatatccgatgtggtaaacaatagtagccccgctcttgggggtacatttcccccagcaccctggtggccccctggccctcctcctacgaattttagttccctggagctcgagccaagggggcagcagcctgttgccaaagcagaaggctcccccacagctatcctgattggttgcttagtggccatcatacttttactacttttgatcatcgccctgatgttgtggaggctgcactggcggcggctgctgtccaaagtcctggaatcgcaccctagaacccggtcccccggcctggtgggaatcaggcctacaccattgcccgtcagccccatggcacttgttcacctctgtgaggtcgactcaccccaagactag

SEQ ID NO: 6428 - DNA, 192 bp, synthetic construct
  misc_feature 1..192: note = source = /note="Description of Artificial Sequence: Synthetic coding sequence"
  source 1..192: mol_type = other DNA
atgggacctgaggcactgtctagcctccttttgctgctgctggtggctagtggcgacgccgacatgaaaggtcacttcgatcccgcgaagtgtaggtacgcattgggcatgcaggaccggacgattcctgattcagacatctctgcctcatccagttggtctgattctacagctgcccgacattcccggtag

SEQ ID NO: 6429 - DNA, 1137 bp, synthetic construct
  misc_feature 1..1137: note = source = /note="Description of Artificial Sequence: Synthetic coding sequence"
  source 1..1137: mol_type = other DNA
tgatacagtggcgattacatggaacccgagaagccgggggcacctctcctcccaccaccaccgcagaactctgttccacactatgctgaggccgatatagtaactctgcagggtgtgacaggcggcaatacatacgctgtcccagccctaccaccaggcgcagtgggtgacgggccacctcgcgtggactttcctagatccaggctgcgctttaaggagaaattgggagaaggtcagttcggggaagtgcacctttgtgaggtcgacagcccccaggacctcgtgagccttgattttccactcaatgttaggaaaggccatccgttgctggtcgctgtcaaaattctccgccccgacgcgaccaagaatgcttctttctcactatttagcaggaacgactttctgaaagaagtgaagatcatgagtagactgaaagatccaaacatcatccgtctcctcggcgtttgtgtccaggacgatcctctctgtatgattacagactatatggaaaacggagacctgaatcagtttctgtccgcccaccagctggaagataaggcagccgaaggggctcctggagatggacaggcagcacaggggccaacaattagctaccccatgctgctccacgtcgccgctcagattgcctccggcatgagatatctggcaactctaaactttgtccatagggaccttgccacccggaactgccttgtgggcgaaaactttactatcaagatagccgattttggtatgtccagaaacttgtacgcaggcgattactatagagtgcaggggagggctgtcctgcccattcgctggatggcctgggagtgcatcttgatgggcaagttcaccacagcctcagatgtgtgggctttcggcgtgactctctgggaggtgctaatgctgtgccgagcccaaccgtttgggcaactgaccgacgagcaagtaatagaaaacgccggagaattttttagggaccagggtcgtcaggtttacttgtcccggccccccgcctgccctcagggcctgtacgagctaatgctgcgctgctggtcccgcgagtccgagcagcgacctccatttagtcagttgcacaggttcctcgctgaggacgctttgaataccgtgtag

SEQ ID NO: 6430 - DNA, 2535 bp, synthetic construct
  misc_feature 1..2535: note = source = /note="Description of Artificial Sequence: Synthetic coding sequence"
  source 1..2535: mol_type = other DNA
atgggccccggagccccgtttgcgagagtcggatggcccttgccgctgctggtcgtaatggcggctggagtcgcgccagtatgggcctcacattccccacatttgcctagaccccactcccgagtccctcctcaccctagttcagagagacgagcagtatatatcggggccttatttcctatgtctggtgggtggcctggcggccaggcctgtcagcctgcggtcgagatggctttagaggacgtgaacagtagacgagacatactgccggattacgagctcaagctgatacatcatgattcaaaatgtgacccggggcaggctactaagtatctgtatgaattactctataatgaccctatcaagatcattctgatgcccggatgtagcagtgtgagtaccctggtcgccgaagcagcacgcatgtggaatctgatcgtgctcagttatggcagctcttctcccgcactatctaaccgccaaagattccccacattttttcgcactcatccatccgcaacgctccataatccgaccagagtgaagctcttcgagaagtgggggtggaaaaaaatcgccacaattcagcagaccacggaggtgttcacctccacactggacgatcttgaggaaagggtgaaggaagccggtatcgagatcacctttcgccagagcttcttttcagaccccgcggtgccagtgaaaaatttgaagcggcaagacgccaggataatagtgggacttttttatgagacagaagctcggaaggtgttctgcgaggtctacaaggaacggctttttggcaaaaaatacgtttggttcctcataggctggtacgccgataactggttcaagatctacgatccctcaatcaattgcacagtagatgagatgaccgaggctgtggagggccatatcactacagaaattgtcatgctgaatccggcaaacactcgctctatcagcaacatgacaagtcaggaattcgtcgagaagctgacaaagaggctcaaacgacatcccgaagagaccggaggtttccaggaggcccccctggcttacgacgccatttgggcactggccctagcgctgaacaagacctctggcggcggtggtcggagtggcgtcagacttgaagacttcaattacaacaatcagacaattaccgatcagatctatagggccatgaacagcagttcattcgagggcgtttcaggtcacgtagtcttcgatgcctccgggtccaggatggcctggacattgatcgaacaattgcaaggaggaagctacaagaagatcgggtactatgacagcaccaaggacgacttgagctggagcaagacagacaagtggatcggcggcagtcctcctgccgaccagactctggttattaagacattcagattcctctcacagaaactgttcatttctgtatccgtcctgtcatctttgggaattgttctggccgtggtttgtctcagctttaatatatataattcacacgtgcggtacatccagaacagccagcctaatctcaataacctcacagctgtcgggtgttccttagccctggcagccgttttcccactagggttagatggatatcacattggacgtaaccagttccccttcgtctgtcaggctaggctttggctgctgggactggggttttccctggggtatgggtccatgtttaccaagatttggtgggtgcacacagtgtttacaaagaaagaagaaaagaaggagtggcggaaaacccttgaaccttggaaactttatgctacagtaggtctgctggtcggaatggatgtcctcacactcgctatttggcagatcgtggaccccttacaccgaacgatcgagacttttgccaaagaggagcctaaagaggatatcgatgtgtccattctgccacagctagaacattgttcatcccgcaagatgaacacctggctcggtatattctacggctataagggcctactcctgttacttggaatatttctggcttacgaaacaaaaagcgtgtcgacagaaaaaataaacgatcatcgggcagtggggatggcaatctacaacgtggcagtactgtgccttatcacagcaccggtaacaatgatcctgagcagccaacaggacgccgctttcgcttttgcaagtcttgcgattgtcttctcctcttatataactctggtcgtgttattcgtccctaagatgaggaggcttattacgcggggagagtggcagagtgaagcgcaggacaccatgaaaacagggtcatccaccaataacaatgaggaggagaaaagcagactcctggaaaaagagaatcgcgagctcgagaagatcatcgccgagaaggaagaacgagtctcagaactcagacaccagttgcaatctcggcaacaactgcgcagcagaaggcatcctcccactccgcctgagccttctggcggattaccacgaggtccccccgagcctcctgatcggctgtcatgcgatgggagtcgcgtacacctcctgtataaatag

SEQ ID NO: 6431 - DNA, 339 bp, synthetic construct
  misc_feature 1..339: note = source = /note="Description of Artificial Sequence: Synthetic coding sequence"
  source 1..339: mol_type = other DNA
atgctgaccgccgccctggccccgggtgctgccaactcccctacgacaaatcccgtgattttaattgtcgataaagtgctggaaacccaagacttgaatggagacggattaatgaccccagctgagcttattaatttcccaggagtagccttacgcccctacccgccctacatcggtgtggggcctaactctaacatgtgcagcagatctgatctgcccgaggattctaacacactgtacccaggaagtcatctgtggcttcgccacgccctcaacagtaagggcaacctggatgcacggctcgacggcggcgagaaggctatgcagcctcagtggtag

SEQ ID NO: 6432 - DNA, 2676 bp, synthetic construct
  misc_feature 1..2676: note = source = /note="Description of Artificial Sequence: Synthetic coding sequence"
  source 1..2676: mol_type = other DNA
atgctgcccactgaagtgccacaaagccacccgggcccatctgcgctgttgctgctgcaattgctgctgccccccacatccgctttctttcctaacatctggagcctgctggccgctccaggcagtataacacatcaggatctgaccgaggaggcagctctaaatgtgacactgcaattgttcttggagcaaccaccacccggcaggccccctctccgcttagaggatttcctcggccgtaccctgctggctgacgaccttttcgccgcctacttcggacccgggagttcaagacggtttagagcagctctgggggaggtgtctcgcgcaaacgccgcccaggattttttaccgacatcaaggaacgatcctgacctacattttgatgctgagcgcctgggccaggggcgggcgcgactagtgggtgcactgcgcgagaccgtcgttgcagctagggccttagaccacactctcgcaagacagagactgggagccgccttgcacgccctacaagatttctactcacatagcaactgggtggagctaggtgaacagcagccgcaccctcacctgctgtggcctcgccaggagctgcagaatttagcgcaggtggctgatcccacatgctccgattgtgaggagctgagctgtccacgcaactggctcggattcacgctactcacatctggttactttgggacccaccccccaaagccgcctggcaaatgttctcacggcggacatttcgatcgaagctcaagccagccacctcgcgggggaattaataaggattctacatcccccggcttttccccgcatcacatgctgcatttgcaagctgcaaaactggccctcctggctagcattcaggctttctcgctgctaaggtcacgcttgggcgatcgggacttttctagactgttagacatcacacccgcctcttccttgagcttcgtgctggatacaaccggtagcatgggcgaagaaattaacgctgccaaaatacaggccaggcatttagtggagcagcgtagagggtctcccatggaaccggtccattacgtgctggtgccctttcacgatcctgggtttgggcccgtgttcactacatccgaccctgactccttttggcagcagctaaatgagatccacgcgctcgggggaggcgacgagcctgagatgtgtctttctgctctgcagctggcactgctgcacacaccacccctcagcgatatatttgtgtttaccgatgcatcccctaaagacgcgtttctaactaatcaggttgaatctcttacccaagagagaaggtgcagagtcacttttctcgtcacggaggatacgagtagggtgcagggcagggcccgtcgggagatcctgtctccccttcgcttcgagccttacaaggctgtcgctttggccagtggtggcgaggtgattttcacaaaagaccagcatatccgggacgtggcagctatcgttggcgagtcgatggcagcgttggtgactttgcccctcgaccctcccgttgtggtgcccgggcagccactggtgttttccgtggatggcctattacagaagataacggttcgtattcacggggacattagctcattctggataaaaaacccagccggtgtgtctcagggccaagaagagggagggggccccctgggccatacgagaaggtttggccagttctggatggtgactatggatgacccgcctcagaccggaacatgggagatccaagttacagccgaagataccccaggcgtgcgtgtgcaggcccagacaagtttggatttcctgtttcatttcggcatcccaatggaggacgggccacatcccggtctttaccccctcactcagcccgtggccggtttacagactcagctgctggtcgaagtgacggggctcggaagcagagcaaacccaggggatccccagccccatttcagccacgtgatcctgcgcggagttcccgaaggagcggagcttgggcaggttcctctcgagccagtaggccctccggaacgtggcttgcttgcggctagcttatcaccaaccctgctgagcactccgcggcccttttcactcgagctcatcggacaggatgcagcgggcagacggctgcatagagccgccccccaaccttccaccgtggtgccagtgcttctggagctgtcggggccctccggattcttggccccgggcagcaaagtgcctctgtccctgcgtatcgcctccttttctggccctcaggacctagacctccgaacttttgttaatccatcattcagcctgacgtcaaacctgtcgcgggcgcacttagagctgaacgagtctgcttggggacgcttgtggttggaagtgcctgactcagctgcccccgacagtgttgtaatggttactgttaccgctgggggtagggaagctaacccagtgcctcctacacacgctttcctgaggctccttgtcagcgcacctgccccacaggatcgacacacaacgcccacaggaagctccgatccaatcttaacaaccgctaccccagccttttcaccgttcaccttggtgacccagggtagggcaggagccgggctggccgcagggagtccttggtggggcacagtgggtggcgttctgttactgttgggcctggcttcatggtag

SEQ ID NO: 6433 - DNA, 2742 bp, synthetic construct
  misc_feature 1..2742: note = source = /note="Description of Artificial Sequence: Synthetic coding sequence"
  source 1..2742: mol_type = other DNA
atgggaccggaggccttatcatcactccttttgctgttattagtggcctcaggagatgccgatatgaaaggtcactttgatccagccaaatgccggtacgcgctgggcatgcaagaccggaccatcccagatagtgacatctccgctagttctagctggagcgatagtaccgccgcacggcactcccggctggaatctagtgacggagacggagcctggtgtcctgccggcagtgtattcccgaaggaggaagaatacctgcaggttgacctccagagactgcatctggttgctctggtcggaacacagggcagacatgccggcgggctgggcaaggagtttagtcgcagttataggctcaggtacagcagagacggtcgcagatggatgggatggaaagatcgctggggacaggaggtaatatccggaaacgaggaccctgagggagtggtcctgaaggacttgggcccccccatggtggccagactggtcaggttttacccacgggctgatagggtgatgagcgtgtgcctgcgtgtggagctgtacggttgtctatggcgcgatggactgctatcctacactgccccagtggggcagacaatgtaccttagtgaggctgtctatctgaatgatagtacatatgatggtcataccgtgggcgggttgcaatatggcggtttgggacagctggctgatggcgtagttggcctggacgactttagaaagagccaggagttgagagtgtggcctggatacgattacgtgggctggagcaatcacagtttctcatcgggttatgtcgagatggagtttgagtttgacagacttagagcttttcaggccatgcaggtgcattgtaataacatgcataccctaggggcccggctgcccggaggtgtcgagtgcagattccgtcgcggccccgcaatggcttgggaaggcgagcctatgcggcataaccttggcggcaacctcggagatcctcgggcccgcgctgtgagcgtacctctcggggggagagttgcaagattcctgcaatgccgattcctgttcgctggtccctggctactcttcagcgagatctcattcatatccgacgtagtaaataattcctctcccgcactcggaggcactttcccaccagctccctggtggcctcccggcccacctcccacgaacttcagcagcttagaacttgagccacgggggcagcagccagttgccaaagccgagggaagtccgaccgcaatcttgatcgggtgcctggtggccatcattctgctactgcttctcatcattgccctgatgctgtggagacttcattggagaaggctgctcagcaaagccgaacgccgggtgcttgaggaagaattgactgttcacctgtcagttcccggggatactatcttaattaataaccgccccggccccagggagccgcctccgtatcaggaacccagacccaggggtaaccccccacattctgccccatgcgtgccaaatgggtcagctcttctattgagcaatccggcatacagattgcttctggccacatacgcccgtcctcccagaggcccagggcctcctacccccgcatgggccaaacccaccaatacccaggcctactccggcgactatatggagccagagaaaccaggcgcccccctgcttccaccccctccacagaatagcgtgcctcattacgccgaagccgacattgtaactctgcagggggttactggtgggaatacctatgcagtccctgcgctccccccgggtgcagtcggtgacgggcctcctcgcgtcgactttccccgtagtcgactgcgctttaaagaaaagttgggggaaggacagttcggcgaagtgcatctgtgcgaggtcgacagcccacaagatctggtttccctagacttcccgcttaatgtgcggaagggtcatcccctgctggttgcagtgaaaatcctccgaccggacgcgaccaagaacgcccgaaatgacttcctgaaagaggtcaaaataatgtctcgtctgaaagacccgaatataattcgtctgttgggagtgtgcgtgcaagacgaccccttgtgcatgataaccgactatatggaaaacggggacttgaaccagtttctgagcgcccaccagctggaggataaagccgccgaaggcgcccctggtgacggccaggccgcacaggggccaaccatctcttaccccatgctgctccacgtagctgcccagatcgcctccggtatgaggtatctggcgacactgaactttgttcaccgagatctggccacccggaattgtcttgtcggcgaaaatttcaccatcaaaattgccgactttgggatgtctcggaatctgtacgctggagactactaccgggtgcaaggccgagctgtgctaccaatcaggtggatggcgtgggagtgcatactcatggggaagtttactactgctagcgatgtgtgggcattcggagtgactctgtgggaggtcctcatgctctgccgggcccagcctttcgggcagctcacggatgagcaagttatagaaaacgcaggagagttctttagggatcaggggcgtcaggtttacctctctaggcctccagcctgcccacagggcctgtatgagctgatgctgagatgctggagtcgagagtccgaacaacgccctccttttagtcagctgcacaggtttctggcagaagatgccctgaacaccgtgtag

SEQ ID NO: 6434 - DNA, 390 bp, synthetic construct
  misc_feature 1..390: note = source = /note="Description of Artificial Sequence: Synthetic coding sequence"
  source 1..390: mol_type = other DNA
atggcggccggaagtgcaccaatgcagctccaccttcgggccactataaggatgaaggacgggctgtgtgtaccccgtaagtggatttaccatttaaccgaggggtcaaccgaccttaggacagagggtcggcctgacatgaagacagagctgttctcctcatcatgccctgggggcattatgctcaatgagaccggtcaagggtaccagcggttcctcttgtacaatcgcagccctcacccccccgaaaagtgtgtggaggagtttaagagtcttacatcatgtctggacagtaaagcctttttgctgacaccaaggaaccaaggaaaaggactcaagtcccataagacagggctcggcctaacaaaaagctcgggcgttaccggatag

SEQ ID NO: 6435 - DNA, 846 bp, synthetic construct
  misc_feature 1..846: note = source = /note="Description of Artificial Sequence: Synthetic coding sequence"
  source 1..846: mol_type = other DNA
atgctgcccaagagtagacgggctctgacaatccaggaaatcgcagcactggcgagatctagcctccatggcatcagccaggtagtcaaagaccatgtgaccaagcccacagcaatggcccagggtcgcgtagcccacttgatagagtggaaagggtggtcaaagccctccgatagcccagctgcactcgaatcagctttctcctcatactcggatttaagcgaaggcgagcaagaggcccgcttcgcggcgggtgtagcggaacagtttgcaattgcagaggctaagctcagagcttggagctcagtagacggcgaggattccaccgatgatagctacgacgaggatttcgccggggggatggatactgacatggcaggacagctccccttgggaccacatctgcaggatctgtttacagggcaccgcttttcccgtcccgtgcggcagggcagcgttgagcctgagagcgattgctcacagacagtctcccccgataccctgtgctcctccctgtgcagcctggaagatggactcctgggctctccagcgcggctcgcaagccagctcctcggagacgaacttctgttggctaaactgccccctagcagagaaagcgctttccgaagtctgggacccttggaagcccaggatagcttgtacaattctcctctgaccgaatcatgtctgagtccagcggaagaggaaccagctccatgtaaggactgtcagcctttgtgccctccactgactgggtcttgggaacggcagagacaggcctcagacttggcttcttctggtgtggtgtcgctggatgaagacgaagcagagccagaggagcagtag

SEQ ID NO: 6436 - DNA, 444 bp, synthetic construct
  misc_feature 1..444: note = source = /note="Description of Artificial Sequence: Synthetic coding sequence"
  source 1..444: mol_type = other DNA
atgggcccagaagctctctcaagtctgctccttttactcttggttgcaagcggtgatgccgacatgaagggccacttcgatcccgctaaatgccgctacgcactgggcatgcaggataggaccatacccgattcagacatttctgcaagtagctcctggtctgacagcactgcagcccgtcattcccgcctggagagctccgacggcgatggtgcttggtgccctgcaggctcagtctttccgaaagaagaggaatacctgcaggtggacctccagagactccatctggtggcactggtcggtacccagggacgacacgctggcggtctgggtaaggagttctcgaggtcgtacaggctgaggtattctagagacggcaggagatggatgggttggaaggaccgatggggccaggaggttatttctggtaatgaggatccgtag

SEQ ID NO: 6437 - DNA, 2631 bp, synthetic construct
  misc_feature 1..2631: note = source = /note="Description of Artificial Sequence: Synthetic coding sequence"
  source 1..2631: mol_type = other DNA
atgggcccagaggccctgtcatctctgctgctgctcctgttggtagctagcggagatgccgacatgaaaggacacttcgaccctgccaagtgcaggtatgcgctgggtatgcaggatcgcactatccccgattcagacatatcagcctcctcgagctggagtgattccacagcggcacgtcattcacgcttggaatccagcgacggtgatggtgcctggtgtccggccggtagtgtcttccccaaggaggaggaatacctgcaggtggacctgcagaggttgcatctcgtcgcactggttggcacccaggggagacacgccgggggactcggcaaggaatttagtaggtcctaccgactgcgctattcccgggacgggaggaggtggatggggtggaaagatcgctggggacaggaagtcatatccggcaatgaggatcccgagggcgtcgtgctgaaggatcttggtcctcctatggtcgccaggctggtaaggttctaccctcgagctgatagggttatgtccgtgtgcctgcgcgtcgagttatatgggtgcctgtggagagatggcttgttatcgtacactgcccccgtcggccagacgatgtatctctcagaagcggtctacctgaatgattctacgtatgatgggcacaccgtgggcgggttgcagtacggaggcctgggccagcttgccgacggggttgtggggctggatgactttcgcaagtctcaggagttacgggtatggccaggctatgactatgtggggtggagcaatcactcctttagctccggctatgtggaaatggagttcgagtttgaccggctaagggcttttcaggccatgcaggtgcattgcaacaacatgcataccctgggggctcggctgcccgggggcgtggaatgcaggtttcgtcggggtccagctatggcctgggagggagaaccaatgcgtcacaacttaggaggtaatcttggagatccgcgggcccgagcggtctccgtcccactgggtgggcgcgtagccagatttctgcagtgccgctttcttttcgctggtccctggcttctgttttcagagatcagcttcatctcagatgtggtaaataactcaagtccagccttggggggaacattcccccccgccccatggtggccaccgggaccaccccccacgaacttctcgtcactggaactcgagccgcggggccagcagccagtcgctaaagccgagggaagcccgacagccatcttaatcggctgtttggtggccatcatcctgcttctgttgttaatcattgccctgatgctctggcgactccattggcgccgccttctgagcaaggctgagcgcagggtgttggaggaggagttaactgtgcacctgtctgtcccaggggacactatcctgattaataatcgcccaggtccaagagaaccacctccctatcaggaacccagaccccgcggtaaccccccccatagtgccccgtgcgtgcctaatggttctgcctactctggcgactatatggaacctgaaaaacccggcgccccactcttgccaccgccaccccaaaactccgtaccgcattatgctgaggctgatatcgtcaccctgcagggcgtcactgggggcaatacctacgctgtgcctgccctgccacccggcgccgtgggggacggcccccctcgagtggattttccgcgctcacggctgaggttcaaggaaaaattaggagaggggcagtttggagaggtgcacctttgcgaggtagattctccgcaggacttggtctctctggatttccccctcaacgtgcgcaaggggcatcccctgctggtagcagttaaaatactgaggcctgatgcaactaaaaacgctcgtaacgatttcctcaaagaagtcaagatcatgagcagactcaaggatcctaatatcattcggctgctgggcgtgtgcgtacaggacgaccccttatgtatgataaccgactatatggagaatggcgatttgaatcaattcctaagtgcacatcagcttgaagacaaagcggccgaaggcgcgcctggagacggtcaagccgcacagggacctaccatatcatatcccatgttactgcatgtagccgcccagatcgcttcaggcatgagatacctggcgaccctcaacttcgttcacagagatctagccaccagaaactgcctggtgggcgagaatttcactataaagattgctgatttcgggatgagcagaaatctctacgctggagactactatcgggttcaggggcgcgctgtgctgcctatcagatggatggcctgggaatgtatcctgatgggaaaattcaccacagcttcagatgtctgggcattcggggtgacactttgggaagttctgatgttgtgcagggcgcaacctttcggacaactgaccgacgaacaggttatagaaaacgccggcgaattcttcagggatcaaggtcggcaagtctatctgagccggcctccagcctgtccccagggcttgtacgaactcatgctcaggtgctggagtagggaaagcgaacaacgaccgcctttcagtcagttgcaccgtttcctggccgaagatgctctgaatacagtttag

SEQ ID NO: 6438 - DNA, 1749 bp, synthetic construct
  misc_feature 1..1749: note = source = /note="Description of Artificial Sequence: Synthetic coding sequence"
  source 1..1749: mol_type = other DNA
atggacttcctactggcactggttctggtttcttctttatacctgcaagctgcagcagaatttgacggaagatggccgcggcaaatagtgtcaagtattggactgtgcagatacggtgggagaatcgattgctgctggggatgggccagacagagttggggtcaatgtcagcccttttatgtgctccggcagagaattgctagaatcagatgtcagctcaaggccgtgtgtcagccaaggtgtaagcacggagagtgtatagggcccaataaatgtaaatgccaccctggctacgcggggaagacttgtaaccaagatttaaatgagtgtggtttgaagccaaggccttgtaagcaccgctgtatgaacacgtacggctcttataaatgctactgtttgaatggctacatgctgatgcccgacggctcatgttcttctgccctcacttgctctatggcgaactgccaatacggttgtgatgtggtgaaagggcagataagatgccagtgcccaagtcccggcctccaacttgcccctgatggacgaacatgcgtcgacgtggatgagtgcgcgacaggcagagccagctgtccacggttccggcaatgtgttaacaccttcggtagctacatatgcaagtgtcataaaggattcgatctcatgtacattggaggaaaatatcagtgtcacgacatcgatgaatgctcacttggtcagtaccaatgcagttctttcgcacggtgttacaatatccgtggatcttacaaatgtaagtgcaaagagggctaccagggggatggattaacttgcgtctatatcccaaaggtcatgatcgagccatctggccccatccatgtgccgaaggggaatggaactattctaaaaggggacacaggcaacaataattggattccagatgttggttccacatggtggccacccaagaccccttacattccccctattatcacgaatcggccgacatccaagcctacaacccgcccaaccccaaaacccacaccaattccgactccacctccccctcctcccctcccaactgagctgagaaccccactgccacctaccacacctgagaggcccacaacaggcctgacaactatcgccccggctgcatctactccccctggaggaatcacagtggacaatcgggtgcagacagatcctcaaaaacctaggggcgatgtgttcattccccggcagccttccaacgatttgttcgagatcttcgaaatcgagcgcggggtgtcagctgacgatgaggcgaaggacgaccctggcgtcctcgttcattcatgtaatttcgatcacgggctttgtggctggattagggagaaggacaatgacctgcattgggagcctatacgcgaccctgcaggcggccagtatctcacagtcagcgcagcaaaggccccggggggcaaggctgccaggctggttttacccctgggcagattgatgcatagcggggatttgtgtttgtccttcaggcataaggttacaggtctgcattctggtacactccaggtctttgtgcggaaacatggggcccatggtgccgctctctgggggcgcaacggcggtcatggttggagacagactcagattactctccgcggcgccgatataaagtcagtcgtatttaaaggcgaaaaacgtcggggacataccggcgagatcgggctggacgacgtctccctgaagaaaggtcactgttccgaggagagatag

SEQ ID NO: 6439 - DNA, 1602 bp, synthetic construct
  misc_feature 1..1602: note = source = /note="Description of Artificial Sequence: Synthetic coding sequence"
  source 1..1602: mol_type = other DNA
atgggctctagtcgactggccgctctcctattgccccttcttctgattgtgattgaccttagcgactctgcagggatcgggttccgacacttacctcattggaataccaggtgtcccctcgcgtctcacacagatgattcgttcaccggctccagtgcctatatcccttgcaggacttggtgggccctgttttctacaaagccctggtgcgtgcgtgtgtggcactgctcccgctgtctctgtcaacacctcctgtcaggaggttccggcttacagaggggtctttttcaccttctggtccagaagtcgaaaaagtcttccacatttaagttctaccggagacacaagatgccagcacccgcccaaaggaaactgctgcccaggcgccacctgtcagagaaaagccatcacatctccatcccgtctcccgacataagtcataaaggcttacggagtaaacgcacccagccttccgaccctgagacatgggagtccctgccacggctggactcacagcggcatggtggacccgagttctcttttgacctgttgcccgaggcaagggccatcagagtgaccattagcagcgggccagaggtgtcagtacgtctgtgccaccagtgggcactggagtgcgaggaactgtcaagcccatacgatgtgcagaaaattgttagcggggggcatactgtagagttgccctacgagttccttctcccatgcctttgcattgaagcttcttatctgcaggaagacactgtgcgccggaaaaagtgcccctttcagtcgtggcctgaagcctatggctcagacttctggaagtcagtacacttcaccgactattcacaacatacccaaatggtcatggccctaactcttcgctgcccactgaagctggaagccgcgctttgccagcgtcatgattggcatactctgtgtaaagatctcccgaacgctaccgcacgggagagcgacgggtggtatgtgttagaaaaggtggacctccacccacagctgtgcttcaaattctctttcgggaacagtagtcacgtcgagtgtccccatcagactggatcattgacaagttggaatgtcagcatggacacacaggcacagcagctaatcctgcatttcagtagcagaatgcatgccacatttagcgcagcttggagccttcccggtctgggccaagatactctggtgcctccggtatacacagtgagtcaggcccgcggctcatcccccgtatccttagaccttatcatcccatttctgaggcctggttgctgtgtcttgctccatgctagcttgagctcacccggcggcgaagatgcgtggttgataggtgttggaggttccgtgccctccggggtggctgtcagatgtcccgtttgcctcgaggcccctctagtctccgggtgcttactacagaccccaggtgccctggaccctgggaccgcagggccaccacatccaaccgggtgttgttcaggcccccacttacctgcccccaccgtcagacctgggccttctgccgcaagcgcccctccagccaggggaggtctgggcggcgccgcagcgcccggcggtagtgcgggttag

SEQ ID NO: 6440 - DNA, 1293 bp, synthetic construct
  misc_feature 1..1293: note = source = /note="Description of Artificial Sequence: Synthetic coding sequence"
  source 1..1293: mol_type = other DNA
atgggcgtaagcaagttagacatactgtaccggcgactgctgctgacgaaactcttcatccgcgggtggggccgtcccgaggacctgaagcgcttatttgagttccgaaagatgattggcaaccgggagcggtgtcagaatcttgtgagtagcgactatcctgtgcacatcgacaagatcgaagaacagtctgactgcaaaatcctggatggtcacttcgtgtcgccgatggcccactatgtccctgatataatgcctatagaatcagtcatcgcgcggttccagtttatcgtaccaaaagaatggaatagtaaataccggcccgtgtgtatccatctggcaggcacaggagaccaccactattggcggagacggacactgatggctcgtccaatgattaaagaggccaggatggccagcctccttcttgaaaacccctattacggctgtcgtaagcctaaagaccaggtgaggtccagcctcaagaatgtgtctgatctgttcgtcatgggcggcgcgttagtgcttgaatctgcagcacttttacactggttggaacgggaaggctacggcccactgggtatgaccggtatcagtatgggtgggcatatggccagcctggccgtctccaattggcccaaaccaatgcctttgatcccatgtttgagctggtcgactgctagcggcgtgttcacaacaacagacagctttaagatgggccaggagttcgttaagcatttcacctccagtgccgataagctcacaaaccttaacctggtgtcaaggactctgaacttggatatatcaaaccaggtagtttcacaaaagcctgcagactgtcacaactccagcaaaacctccgtatcagcgacttcagagggcctcctgttacaggacaccagtaagatgaaaagattcaaccagaccttatctactaataaatcaggctacacctcccgcaacccgcagtcataccacctgctgtctaaagaacaatcccgcaactctttaaggaaagagtcactgatatttatgaagggagtgatggacgaatgcacacatgtcgctaacttctccgttccagtggacccttcactgattattgtggtgcaggctaaagaggacgcatatatcccacgaacgggcgtgagatcgcttcaggagatctggccggggtgtgaaataaggtacctggaaggcggccacatttccgcatatctgtttaaacagggcctctttcgtcaagccatctacgatgcatttgaccgctttttgcacaagtacgcaaactag

SEQ ID NO: 6441 - DNA, 2631 bp, synthetic construct
  misc_feature 1..2631: note = source = /note="Description of Artificial Sequence: Synthetic coding sequence"
  source 1..2631: mol_type = other DNA
atgggtcctgaggcactgagtagcttactactattgttgctggtggcttcaggggacgcagacatgaagggacactttgaccccgccaagtgccgttacgccctcggcatgcaggatcggacaattccggacagcgatatcagcgcttccagttcatggtcagactcaacagccgcacgccattccagactcgaaagtagtgatggtgatggggcatggtgcccagccggcagcgtgttcccaaaagaagaagagtatttgcaagtcgacctgcagcgcctgcacctcgtcgccctcgtggggacacagggccggcatgcagggggcctcggcaaggaattttcccgctcatataggctgaggtactcacgggacggacgcagatggatggggtggaaggataggtggggccaggaggtgatctctgggaatgaagatcccgaaggcgtcgtcctgaaggacctaggaccacccatggttgcccgcctggttagattttatcctcgggcagatcgggtgatgagtgtctgtctgcgcgttgaactgtacggctgtttgtggagggatggactcctctcttataccgcccccgtaggacagacgatgtatctgtctgaggccgtgtacctaaacgactccacttacgatggacacactgtaggcggcttgcaatacggcggacttgggcaacttgccgatggcgtggtggggttagatgatttcagaaaatcccaggagctccgcgtttggcccggttacgactacgtcgggtggagtaatcattctttttcaagcggttatgtggaaatggagtttgaatttgaccggcttagggccttccaagctatgcaagttcactgtaataacatgcacaccctcggagctaggctgcccgggggagtggaatgccgtttccgccgtgggccagcgatggcatgggaaggagagcccatgaggcataacttgggcgggaatctcggtgaccccagggctcgagccgtcagtgtccccctcggaggccgtgtggcccggttcctccagtgccgattcttgtttgctggaccatggctgctattttctgaaatctccttcatttccgatgtcgttaataattcctcacctgcactaggcggtacatttccaccagccccgtggtggcccccgggccccccaccaaccaacttcagttccctggagctcgaacctagaggccagcagcccgtggcgaaggccgaggggagccctaccgccattctaattggatgcttagttgccattatcctgctgctcctcttgatcatcgccctgatgctttggcggctgcactggagacggctactcagcaaagctgagcgtcgtgtcctggaggaagaactgacggtgcatttaagcgtcccgggggacacgatcctaataaataatagaccaggcccacgagagcctcccccatatcaggagccccggccacgaggcaatccacctcattctgcaccctgcgtgcctaacggctccgcctatagcggtgactatatggaacccgagaaaccaggagctccactcttgcccccccccccccaaaatagcgttccccactacgctgaagccgacatcgtcaccctgcagggagtcacgggcggaaatacttatgccgtgccggcgctgcccccaggagctgtgggcgacgggccccctagggtcgacttcccccggagccggttgaggttcaaggaaaagctaggggaaggccagtttggagaagtgcatttgtgtgaggtggactcccctcaggaccttgtatctcttgacttccctctgaatgtacggaaggggcatcccctgttagtagccgttaaaattctgagaccagacgccactaaaaacgcccggaatgattttctgaaagaagtcaaaattatgtcacggctgaaggacccaaatatcatcagacttttaggagtgtgcgtccaggacgacccactctgtatgattactgactacatggaaaacggtgatttgaaccagttcctgtccgcccatcagctcgaggacaaagcagctgagggcgcacccggagacgggcaggcagcgcagggacccacaattagctaccccatgctgcttcatgttgccgcacaaatcgcctctggtatgaggtacttggcaacactgaacttcgtccaccgcgatctcgccacgcgaaattgcttggtgggggaaaatttcactatcaaaattgctgacttcggtatgagccgcaacctctacgccggagactactaccgggtccaaggacgagcagttctgccaatacggtggatggcttgggagtgtatcttaatgggtaagtttactacagcgtctgatgtctgggcgttcggcgtcaccctatgggaggtgttgatgctttgcagagcgcagcctttcggccagctgacggacgagcaagttatcgagaatgcaggggagttttttagagatcagggccggcaggtctacctgtcgcgcccacctgcatgtccccaaggactatatgaactgatgcttaggtgctggagtcgggaatcagaacagaggcctcctttcagtcagttacatagattcttggctgaggacgccctgaacacagtctag

SEQ ID NO: 6442 - DNA, 237 bp, synthetic construct
  misc_feature 1..237: note = source = /note="Description of Artificial Sequence: Synthetic coding sequence"
  source 1..237: mol_type = other DNA
atggggtccggtttacctctggtattgctgctaactctcctggggtccagtcacggaaccgggccgggcatgacactccagcttaaactcaaagagagcttccttactaattctagctacgagtctagcttcctggagttgctggagaaactctgtctgcttctccatctcccctccggaacctccgtgacactccaccatgctcgctctcagcatcacgtcgtctgcaacacttag

SEQ ID NO: 6443 - DNA, 2631 bp, synthetic construct
  misc_feature 1..2631: note = source = /note="Description of Artificial Sequence: Synthetic coding sequence"
  source 1..2631: mol_type = other DNA
atgggtcctgaagccctgagtagtttgctgctgctgctgctggtggcaagcggcgacgctgatatgaaaggacactttgatccagccaaatgtcggtacgctctgggtatgcaggaccgaaccattcccgatagcgacatttccgccagttcatcgtggtcagattccacggctgccagacactcgagactggagtcatccgatggcgatggggcctggtgtcccgcgggttctgtgttcccaaaagaagaggagtacctgcaggttgatctccagcgactgcacctggtggccctggtcggtactcagggcaggcatgctggaggactgggcaaagagttcagcaggagctatcgccttagatatagtcgggacggaagaagatggatggggtggaaagacagatgggggcaggaggtaattagcgggaatgaagatccagagggagtagttctcaaagatctcgggccgcccatggtcgcccgcttggtcaggttttacccccgcgccgacagagtgatgtccgtatgtctgcgggtagaactgtacggatgcttatggcgcgatggactcctgtcgtacacggctccagtcggccagaccatgtatttatctgaggcggtctacttaaacgacagcacctacgacggccatacagtcggaggccttcagtacggaggcctcggtcagctcgcggacggagttgtaggtctggatgactttaggaaaagtcaggaactcagggtgtggcctggctatgattacgtcgggtggagcaatcatagtttttctagcggctatgtggagatggagttcgaattcgatcgtctgcgagcgttccaagccatgcaggtccattgcaacaacatgcataccctgggggccaggctgcctggcggcgtggagtgtagattcagacggggaccggctatggcgtgggagggtgaaccaatgaggcacaacctcggtgggaatctgggggacccaagggcacgggccgttagcgtgccattgggaggaagggtagcccggtttctgcaatgcagatttctgtttgccggcccttggctgttattcagcgaaatctcttttatcagcgacgtggtgaataactcgtcaccggcactgggcggaacattccctcccgcaccgtggtggccgccgggacctcctccgaccaacttttcatctttagaactggaacctcgtggacaacaacccgtcgcaaaggccgagggttctccaacagcaatacttattggctgtttggtcgccattatcttgcttctgctcttaatcatcgcactcatgctctggcggctgcattggcggaggctcctgtccaaagctgagcgccgggtgctcgaagaagagcttacagtgcatctgtccgtacctggcgacactatccttatcaataataggccgggaccacgggaaccgcctccctaccaggagccccgtcccaggggcaacccaccacactccgcaccgtgtgtacctaatggaagtgcttactccggtgactatatggagccagaaaaacccggtgcgcccttgcttcctccaccgcctcagaactcagtgccccattacgcagaggccgacatagtcacactccaaggtgtcaccggcgggaacacttacgccgtccccgccctccctcccggcgccgtgggcgacggccctccgcgcgtggactttccccgtagccgccttcggttcaaagagaagctaggcgaaggccagtttggggaggtgcacctgtgtgaggtcgacagtccgcaggacctggtgagccttgactttcctctgaacgtccgcaaaggccacccgctgctcgttgccgtcaaaattcttcggccggacgctactaaaaacgctaggaacgacttcctgaaagaagtcaaaatcatgagtcgcttaaaggacccaaacatcatcagactgctaggcgtgtgcgttcaggacgatccactctgcatgattactgactatatggagaatggagacctgaatcagttcctgtctgcccaccaactggaagataaagccgctgagggggcccccggagacggacaggccgcacagggccccaccataagctaccctatgcttctgcacgtagccgcccaaatcgcaagtgggatgagatacctcgccacccttaacttcgtccacagagatttggccacacgtaattgcttagttggcgaaaacttcactattaagatcgcggactttggcatgtctaggaacctgtatgctggcgattattatagggtgcagggcagagctgttttgccaatacgatggatggcatgggaatgcatactaatgggtaaatttactacagctagtgacgtctgggctttcggtgtcaccctttgggaggtcctgatgctttgtcgggctcagcctttcgggcagctgaccgacgagcaggtgattgagaatgccggcgagttttttcgtgatcaaggtaggcaagtatacctgtctcgccccccagcctgccctcaggggctctatgagctgatgctgcgatgttggagccgggaatccgaacagagaccgcccttctcccagctacatcgcttccttgctgaagatgctcttaacaccgtgtag

SEQ ID NO: 6444 - DNA, 1257 bp, synthetic construct
  misc_feature 1..1257: note = source = /note="Description of Artificial Sequence: Synthetic coding sequence"
  source 1..1257: mol_type = other DNA
atgaggacattattcaacctcctgtggctggctctggcttgcagccctgtgcatactaccttaagcaaaagcgacgctaagaaagcggcatctaaaactctcctggaaaaggtcaaattttgctcctgttgccccggatggagtgccatggctcggagctggcttaccgccacttccgccacccagagccagtttagcgataagcctgtgcaggacagagggctcgttgtgactgacctgaaggccgagtccgtcgtgctggagcataggagttactgctcggccaaggcccgtgatcggcactttgccggtgatgtgctgggatatgtgaccccctggaacagtcacggctacgacgtcactaaggtctttggatccaagttcacccagattagcccagtgtggcttcagctcaagcggaggggccgggaaatgttcgaggttacaggcctccatgatgttgaccaaggctggatgcgcgccgtgcggaaacacgccaaagggcttcatatcgtgcctcgcctgctctttgaagactggacctacgatgattttcgcaatgttctcgattccgaagacgaaatagaagagctctctaaaacagtggtgcaggtggccaagaatcagcactttgacgggttcgtggttgaggtatggaatcagctgctgtcccaaaagagggtaggcctgatccacatgctgactcaccttgccgaggccctgcatcaggctaggctgttggccttgctcgtcataccgcccgctattactcccgggactgatcagctcggaatgtttacccacaaggaatttgagcaattagccccagtactagacggcttctccctgatgacttacgattacagcacggcccaccagcccggccctaacgctcctctctcttgggtgagagcgtgcgtgcaggtgctcgacccaaagagcaagtggaggagcaagattttgctgggactcaacttctacggcatggattacgctaccagtaaagacgccagagagccagtggtcggagctcggtatatccaaaccctgaaggaccatagacccagaatggtctgggacagccaagctagtgaacactttttcgagtataaaaaatccaggtcagggcgacatgttgtcttctacccgacattgaaaagcctgcaggtgcggctggagctggccagggaattgggggtgggcgtgagcatctgggagttgggccaaggcctcgactatttctacgatcttctgtag

SEQ ID NO: 6445 - DNA, 390 bp, synthetic construct
  misc_feature 1..390: note = source = /note="Description of Artificial Sequence: Synthetic coding sequence"
  source 1..390: mol_type = other DNA
atgcgcaagccacgcagaaagtcgaggcaaaatgcagaaggaagaaggagtccaagcccttacagtctcaagtgcagcccaacaagggagactctaacctatgcccaagctcagcgcatagtcgaggtcgatatcgatggccgactgcacagaatctctatttatgatcccctgaaaatcatcacagaagacgagctgaccgcccaggacattacagaatgtaactcaaacaaagagaactcagaacagccccaattccctgggaaatctaagaagccctcctctaaaggtaagaaaaaggaatcctgctcaaaacacgcttctggcacgagttttcacttgcctcaaccttccttcaggatggtcgacagcggaatccaacctgagtag

SEQ ID NO: 6446 - DNA, 315 bp, synthetic construct
  misc_feature 1..315: note = source = /note="Description of Artificial Sequence: Synthetic coding sequence"
  source 1..315: mol_type = other DNA
atgcgcgtggttacaattgtcatcttgctgtgtttttgcaaagccgcagagctcagaaaagccagtcccggctccgtccggagtcgggtaaatcatggacgcgccggaggggggaggcgcggctctaacccagttaagcgatacgcaccagggttgccttgcgacgtgtatacataccttcatgaaaaatacctggactgccaggaacgaaaactggtttacgtactgccaggatggcctcaggatctgcttcatatgcttctcgcaagaaataagatccgcacgctcaaaaataacatgttttctaaattctag

SEQ ID NO: 6447 - DNA, 639 bp, synthetic construct
  misc_feature 1..639: note = source = /note="Description of Artificial Sequence: Synthetic coding sequence"
  source 1..639: mol_type = other DNA
gacttcggctactgtccacgggtgtactgcgaaaaccaacccatgttgcctatcggggtgctggttatggttggatttaccgtgggcaaagtcccagtccccgatataaggacttgtcacttctgccttgttgaggatccttcggtaggatgtatctctggtagcgaaaagtgtaccatctcatcaagcagtctgtgtatggtgattaccatttactatgatgtaaaggtaaggttcattgtgaggggatgtgggcaatacattagctacaggtgccaggagaagcgcaatacatactttgcagagtactggtatcaggcacaatgttgccagtacgactactgcaattcctggtccagcccccagctgcagtcatctctcccagaacctcatgacaggccactggcacttcctctcagcgattcccagattcagtggttttatcaggctttgaacttatccttacctctaccaaactttcacgccgggacagagccggatggcctcgacccgatggtcaccttaagtttgaaccttggattaagttttgccgagctgcggcgaatgtatttgttcttgaacagttccggtttacttgttttgccccaggcgggcttgctaaccccccatccaagctag

SEQ ID NO: 6448 - DNA, 1005 bp, synthetic construct
  misc_feature 1..1005: note = source = /note="Description of Artificial Sequence: Synthetic coding sequence"
  source 1..1005: mol_type = other DNA
atgctggcccttgcaaagatactactgatatccaccctgttttactctctcctgagtggttcacacggaaaagagaatcaagatattaataccacacagaacatcgcggaagtctttaagaccatggagaacaagccaatatcccttgaatcggaagcaaatcttaactcagacaaagaaaacatcacaacctcaaatcttaaagcctcgcactcaccccctctgaacctgccaaacaattcacacggcattaccgatttctcttcgaactctagcgctgagcatagcctcggttcattaaagcccacctcaactatatctacctctcccccgcttattcattcgttcgtgtccaaagtgccatggaatgctcctattgccgacgaagacctcttacctatctccgcccatcctaatgccaccccagcattaagctcagagaactttacttggtcactcgtgaacgacaccgtgaagactcctgacaattcttctatcactgtgtccatcctgtctagcgagcccacttcacctagtgtaacccctcttatcgtagaaccctccggctggctgacgactaactccgatagctttacaggatttaccccataccaagaaaaaactacattacagccaactctgaaatttacgaataacagtaaactctttccgaacacctcagatcctcagaaagaaaaccgaaatacgggaatagttttcggcgccatattaggagctatccttggtgtgagcctgctgacacttgtcggctatctgctctgtggtaagcggaagacagacagtttctctcatcgtaggttgtacgacgacaggaacgagcccgtgctcagactggacaatgcacctgagccttacgacgtgtcttttggcaactcgtcgtattacaatcccactctcaatgactccgcgatgcccgaatccgaggagaatgccagagacggtatccctatggacgacatacccccactgcggacaagcgtatag

SEQ ID NO: 6449 - DNA, 987 bp, synthetic construct
  misc_feature 1..987: note = source = /note="Description of Artificial Sequence: Synthetic coding sequence"
  source 1..987: mol_type = other DNA
atggggcctgctggatgtgctttcacactcttgcttcttctgggtatttctgtctgcggacagccagtgtacagctcacgtgtggtgggcgggcaggatgctgcggcgggcaggtggccctggcaggtctccctgcacttcgaccacaatttcatttgcggcggctctctggtatctgaaagattgatcctgaccgccgctcactgcatccagcccacctggacaacattctcttacacagtgtggctcggttccatcacagttggcgattctcgcaagcgcgtgaagtattatgtgtccaaaatagtgatccaccccaaataccaggacactacggctgacgtggccttgctcaaactatcatcccaggtgacattcacgtccgctatcctgccgatctgtctccctagtgtgacgaagcagctcgccatacccccattctgttgggtgacgggttggggtaaggtgaaagaatcctcagatcgggattatcactccgctcttcaggaggcagaagtcccaatcattgatcgccaggcctgtgagcagctatataacccaatcggaatttttctgcccgcccttgagcccgtcatcaaagaggacaaaatatgcgcgggcgacacacagaacatgaaggattcatgtaaaggggactccgggggaccactgagctgtcacatcgacggcgtttggatccaaacaggcgtggtgtcatggggactggagtgtggcaagtccttgccgggtgtgtatactaacgttatctactaccaaaagtggattaacgctacgataagcagagcgaataatttggacttctccgactttctgtttccaatcgtgttactgtctttagcacttttgaggccatcttgcgctttcgggcccaatacaattcacagggttggaacggtggcggaggcggtcgcttgcattcaggggtgggaggaaaacgcgtggagattttccccgagggggcgctag

SEQ ID NO: 6450 - DNA, 453 bp, synthetic construct
  misc_feature 1..453: note = source = /note="Description of Artificial Sequence: Synthetic coding sequence"
  source 1..453: mol_type = other DNA
atgcggttcatggcagggcccgcgggctctcagagtctaggaccgctgtgtttccattcatcaccccaggcgctatataccgttctccttatcgtcctagtgatgatgtccctcgtcttcggtaaattcgtgcctgtgaactgggagcctccgcagcctttgcccttccccaagtacctgcgatgttaccggtgtctactagagacaaaggagctgggctgtctgttgggctccgatatttgcctcacccctgccgggtctagctgcataacccttcacaaaaagaactccagcggctcagacgtcatggtgtctgactgccggagcaaggagcagatgagtgactgttcaaatactcgcaccagccccgtaagcggcttctggattttcagtcagtattgttttctagatttttgtaacgatccccagaaccggggtctgtacacaccctag

SEQ ID NO: 6451 - DNA, 234 bp, synthetic construct
  misc_feature 1..234: note = source = /note="Description of Artificial Sequence: Synthetic coding sequence"
  source 1..234: mol_type = other DNA
atgcgcgttgcaggcgccgcaaaactggtagtggctgttgcagtcttcttactgactttctatgttatctcccaggtgttcgaaattaagatggacgccagcctcggcaacctgtttgctcgcagtgcgcttgacaccgctgcacgcagcaccaagcctccgcggtacaaatgcggaataagcaaggcttgccctgagaagcactttgcatttaaaatggcatcaggggcttag

SEQ ID NO: 6452 - DNA, 1143 bp, synthetic construct
  misc_feature 1..1143: note = source = /note="Description of Artificial Sequence: Synthetic coding sequence"
  source 1..1143: mol_type = other DNA
atggccttaacaccgggctgggggtccagcgcaggcccggtgaggcccgagctctggctcctactgtgggctgcggcctggcgcctcggcgcatctgcctgtcccgccctgtgcacttgcactggtactactgtagattgccacgggacagggctccaggcaattcctaagaacatcccccgcaacactgagagattagagttaaacggaaataacattacccgcatccataaaaacgattttgctgggctgaagcagctgagggtgttgcagctgatggaaaaccagatcggcgctgtcgaaagaggagcctttgatgacatgaaagagttagagcgcctcgatctgagtgagaacgccatccaagccattcctagaaaagcctttcgcggagcaacagatctgaaaaaccttcagcttgacaagaaccagataagttgtattgaggagggcgctttcagagccttgagaggtctggaggtgctaaccctcaataacaataatatcactactatcccagtgtcgtcatttaatcacatgccaaaactgagaacgtttagattacatagcaatcaccttttttgcgactgccatctggcctggctttctcagtggttaaggcaacgacccacaatcggcctgttcacacagtgttcaggacctgcctcactgagaggcttaaatgtcgcagaagtgcagaagtccgaattctcctgttccggccagggagaagccgggcgcgtaccaacttgcaccctgtctagtggatcctgtcctgctatgtgtacttgctccaacggaattgtcgactgtcgcggtaagggccttacagccattccagccaatctgcccgaaaccatgactgaaatccgcctggagctgaacggaatcaagagtatcccccctggcgcattttcaccctatcgcaagctcaggcgtattgacctgagcaataaccagattgccgagattgcgccagatgcctttcaagggttacgctcgcttaactccctggtgctctatggcaacaaaatcaccgatttgccgaggggcgtgttcggtggtctgtataccctgcaactgctcctgcttaatgccaataagattaactgcattcgcccagatgcctttcaggacttatag

SEQ ID NO: 6453 - DNA, 558 bp, synthetic construct
  misc_feature 1..558: note = source = /note="Description of Artificial Sequence: Synthetic coding sequence"
  source 1..558: mol_type = other DNA
atgcctggatggctgactctccccactctttgcaggttcctgctgtgggcattcacaattttccacaaggcacaaggcgaccccgcaagccaccccggacctcattatttgctgccacccatccatgaagttatccactctcacaggggagccaccgccaccctgccatgcgtcctgggaaccactcccccatcctacaaagttaggtggagtaaggtcgagccgggcgaattgcgagagaccctgatcctgattacaaacggactccacgcaaggggttacggacccctaggcgggagggctcgaatgcgccggggccatcggctggacgcatctctggtgatcgccggagtgcggttggaggacgaaggaagatacagatgcgagctgattaatggcatcgaggacgagtctgtcgctttgaccctgtcactggagggtgtggtctttccttatcagccttcgagaggccgttaccagttcaattattacgaagccaagcaggcctgtgaggaacaggatggtaggctggctacttattctcagctgtaccagtag

SEQ ID NO: 6454 - DNA, 375 bp, synthetic construct
  misc_feature 1..375: note = source = /note="Description of Artificial Sequence: Synthetic coding sequence"
  source 1..375: mol_type = other DNA
atgctgatgctgttcgttttcggcgtcttgctacatgaggtgtctctaagcggccagaatgaagctccgcctaacacccatagtatcccaggcgagcctctctacaactacgcttctattcgcttgccagaggagcacatccctttcttcttgcataataatagacacatcgctaccgtctgccgaaaggactccttgtgcccctacaagaagcatttggagaagctgaaatactgctggggttacgaaaaatcctgtaagccagaatttagatttgggtatccggtctgttcctatgtggacatgggttggacagataccctcgaatccgcagaggacattttttggaagcaggccgatttcggctatgcgtag

SEQ ID NO: 6455 - DNA, 5859 bp, synthetic construct
  misc_feature 1..5859: note = source = /note="Description of Artificial Sequence: Synthetic coding sequence"
  source 1..5859: mol_type = other DNA
atgcctgcgctgggccccgcccttcttcaagccttgtgggcaggctgggtgttgaccctgcaaccacttccacccaccgctttcaccccaaatggaacatatctgcagcacctcgcccgcgacccaacgtctggaactctatacctgggcgctacaaacttcctgttccagctctccccagggctccagttggaggctacagtgtccactggcccagtcctggattcaagggactgccttccacccgtcatgcccgatgagtgcccccaggcccagcccaccaacaatccaaaccaattgctcttggtgtcccctggggctctcgttgtttgtgggtccgtccatcagggcgtgtgcgagcagcgtaggctgggtcagctggagcagctcctactgagacccgaacgcccaggcgacacccagtacgtagcagcaaatgaccctgctgtttctacagttggacttgttgcccaggggctagccggtgaacccctacttttcgtgggccgcggttatacaagcagaggcgtgggggggggcatccctcccattaccacacgcgcactgtggcctcctgaccctcaggccgccttctcctacgaggaaactgcaaagcttgcggtgggccgactctcggaatactcacaccacttcgtgtctgccttcgccagaggcgccagcgcctatttcttgttccttcggcgggacctgcaggcccagtcccgcgccttcagagcctacgtctcccgagtttgccttcgagatcagcattactattcctatgtagaactgcctctggcatgcgaaggtggaagatacgggctaatccaggctgccgccgtcgccacaagcagagaggtggcccatggtgaggtgctgtttgcggctttctcaagtgctgcgcctcctaccgtgggtagaccaccatccgcagccgctggagcgtccggagcctctgccctctgtgcgtttccgttagatgaggtcgacaggctggcaaataggacccgagatgcctgttacactagagaaggccgggcagaggacggcaccgaggttgcttatattgagtatgatgtcaattctgattgcgctcaactgccagtggataccctggatgcctatccttgtggctctgaccacactcccagccctatggcctctcgagtaccactagaggccactcctatactcgagtggcctggcatccagttgaccgcggtggccgtcaccatggaggacggccatacaatcgcctttctcggagactcccaaggacagctgcacagagtatacctgggccccggaagtgatggtcacccttattcaacccaatcaattcaacagggcagcgccgtgagtagggatttgacatttgatggaacattcgaacatctgtatgtgatgacccagagcaccctgctgaaggtgcccgtggcgagctgcgctcagcatctggattgtgctagctgcctcgcccacagggacccttactgtgggtggtgcgtgctcctgggcagatgttcaagacgatccgagtgctctagagggcaggggcctgagcagtggttatggtcttttcagccagagcttggatgtcttcaggttgccgcaatgtcgcccgccaatatatctcgggaagagaccagggaggtgttcctgagcgtgccggacctaccaccactctggccaggagaaagttacagctgccacttcggagaacaccaatcacctgccttgctgacaggcagcggtgtaatgtgtccttccccggatccgagcgaggcccctgtcctgcctcgaggcgctgactacgtgtcggtgagcgtggaactcagattcggagccgtggtgattgctaagacctccctgtcattttatgattgcgttgcagttaccgagcttagaccatctgcccaatgtcaggcatgcgtatcgagcagatggggctgcaattggtgcgtgtggcaacatctgtgcactcacaaagcctcctgcgacgcaggaccaatggttgcctcccatcagtcccccctggtgtcccctgatcctcctgcaagaggcgatggagactcggccgagctggagggaccccctgcgccattgattctccctagctcccttgattaccaatatgacacccccgggctatgggaactagaggaagccaccctgggcgcgtcctcctgcccctgcgtggaatccgtccaaggctcgactctgatgcctgttcacgtagagagagagataagactgcttggacgaaatctccacctgtttcaagacggccccggagacaatgaatgcgttatggagctcgaggggctggaggtggtggttgaggcacgggttgagtgtgaaccacctcccgatactcagtgccacgtcacttgccaacagcatcagctgagctacgaggccttgcagcccgagctacgagtggggcttttcctgcgacgcgctggccggctgcgtgtggatagtgccgaggggcttcacgtagttctttatgactgctctgtaggtcatggtgattgtagtaggtgtcagaccgccatgccccagtacgggtgcgtgtggtgcgagggggagcgcccacgttgtgtgaccagggaggcctgcggcgaagccgaagccgtggctacacagtgtcccgccccgcttatccatagtgtcgagccacttacaggccctgtggacggaggcactcgagttacgatacgagggtccaatcttggacagcatgtgcaagacgtcctgggcatggtcaccgttgctggcgtgccgtgcgccgtggatgcccaggaatatgaggtgtcctcctcactggtgtgcattacaggcgcttccggggaggaggtagccggggccacagccgtcgaggttcctggccggggaagaggggtgtccgaacacgactttgcatatcaggaccctaaggttcattccatcttccccgcacggggcccaagagccggcggcacaaggttgaccctgaatgggtccaagctgctgacaggcagactggaggacatacgtgtagtggtcggcgaccagccgtgccatctgctgcctgagcagcagtctgagcagctgcgatgtgaaacctcccctcgccctacaccagccactctgccagtggcagtgtggttcggtgcaacagagaggagactacagagagggcagttcaaatacactctggaccccaatattaccagcgctggcccgaccaagtctttcttgagtggcggccgggagatttgcgttcgtggccagaacctggacgtagtccaaacgccacgtatccgggttactgtcgtatctagaatgcttcagcccagccagggcctgggtcgaaggagaagagtggttcccgagacagcttgttccctggggccaagctgttcctctcagcaattcgaggaaccatgccatgtgaatagcagtcaactcatcacctgtaggacgcccgccctgcctggactgcccgaagacccctgggtgagggtggagttcatccttgacaatcttgttttcgatttcgcaacactgaatccgacaccattttcttacgaggctgatccgaccttacagccattgaatccagaggacccaaccatgccgttccggcacaagcctggatctgttttttccgtagagggcgagaacctggacctagcgatgtctaaggaggaggtggttgctatgataggggacggcccctgtgttgtcaagacgctgactaggcaccacttgtactgcgaaccgcctgtggagcagccactgccccgccaccacgccttaagggaagcccccgactccctccccgagttcacagttcagatgggcaacctcaggttctccctgggacacgtgcagtacgatggtgaaagtccgggggcctttcctgtagcagctcaagtgggcctgggagtggggacatcattactggcccttggagttatcatcatcgttcttatgtaccggcgcaagagcaagcaagccctgcgcgattacaagaaggtacagatccagttggaaaatctggagagttccgtgagggacagatgtaagaaagagtttaccgatctcatgacggaaatgacagaccttacgtcagacctgcttggatccggaatccctttccttgactacaaggtatacgcggaacgcattttttttccagggcacagggaatcgcctctgcatcgggatctcggcgtacccgagagccggcgtcccacagtcgagcaagggctggggcagttaagcaatctcctgaacagcaagctgttcctgacaaaatttatacataccctggagtctcagcgaacattctccgcacgcgaccgggcctacgttgcaagcctactgactgtggccctacatggtaagcttgaatatttcactgacatcttgaggacactactgagcgacctggttgcacagtacgtagctaagaaccccaagctgatgctccggcggaccgagacagtcgtagagaagctcttgacaaattggatgtccatctgcttgtatacatttgtgagagacagtgtgggcgaacccctctatatgctgtttcgcggcatcaaacatcaggtcgacaagggaccagtggactcagtgacggggaaggccaagtacactctgaacgacaatagattgctgagggaagacgtggaatacagacccttaaccctcaacgcactacttgcagtggggccaggcgccggagaggcccaaggcgtgccagtgaaggttttggattgtgacactatcagccaggctaaagagaaaatgttagaccaactgtataagggagtcccactaacccagaggcctgaccctcggactctcgatgtcgagtggagatccggagtggcgggacacttgattctctcagatgaagacgtcacctcggaagttcagggactttggcgccggttgaataccctgcaacattacaaggttcctgatggcgcgaccgtagctctggtcccctgtctgacaaaacacgtgctgagagagaaccaggattacgtgccaggggagcggacacccatgctggaagatgtggatgaaggcggaatacggccttggcacctggtgaaaccttctgatgagcctgaaccccccaggcccagacggggatcactgcggggaggagagcgagagagggctaaggccataccagagatttatctgaccaggttgctgtctatgaaggggacattgcagaagttcgtcgatgacctgtttcaggtgatcctcagtacgagcaggcccgtgccacttgccgtcaaatattttttcgatctgctggatgaacaggcccaacagcacggcataagcgaccaggacactattcacatatggaagacaaattctctgccactgcgcttttggatcaatattatcaaaaatccccagttcgtctttgacgttcagactagcgacaacatggacgctgtcctcctggtcattgcccagactttcatggatgcctgcactttagcggatcacaagttgggaagggattcccccatcaacaaactgttgtatgcacgagacattcctagatataaacgaatggtggagagatattacgccgacatccggcagacagttccggctagtgatcaggagatgaacagcgtcttggcagagttgtcctggaactatagtggggacctcggagcccgcgtcgcactccacgagttgtataaatacatcaataagtactatgatcagatcattacagccctggaagaggatggaacggcgcagaagatgcagctggggtataggctccagcagatcgctgctgccgtagaaaataaggttaccgacttgtag

SEQ ID NO: 6456 - DNA, 612 bp, synthetic construct
  misc_feature 1..612: note = source = /note="Description of Artificial Sequence: Synthetic coding sequence"
  source 1..612: mol_type = other DNA
atgagaacagtggtgctgaccatgaaagcttcagtaattgagatgttccttgtactactggtcaccggcgttcacagcaataaagaaaccgcaaagaagatcaaacggccaaaatttacggtgccccagatcaattgcgacgtgaaggccggcaagattatagatccagagttcattgttaaatgccctgccgggtgtcaggatcctaagtaccatgtctatggcaccgacgtatacgcctcatactcttccgtgtgcggtgccgccgttcactcgggagtactggataattcgggggggaagattttagttcgcaaggtagcaggccaatcaggctataagggaagctatagtaacggggtccagagcctgagcttacctaggtggagggaaagttttattgttctcgaaagcaagcccaagaaaggtgtgacatatccatctgcactgacttactctagtagcaagtcacccgctgcccaggccgggaagtgtagccgcgtcatagagagtaaaccttcagaatcgatgaacacccgccgggttttgggcgactccggtgaaattaacatacttacagggcaggcgccgttagctctggccatcttttag

SEQ ID NO: 6457 - DNA, 2511 bp, synthetic construct
  misc_feature 1..2511: note = source = /note="Description of Artificial Sequence: Synthetic coding sequence"
  source 1..2511: mol_type = other DNA
atggagactcaggaactgaggggggcactggcactcctgctgctgtgctttttcacatccgcttcccaggacctccaggttatcgacctactcacagttggcgagagccggcaaatggtggcagtggcagagaaaatcaggacggcacttctcaccgccggtgacatctatctgctctcaacatttcgattaccacctaagcaagggggggtgttgtttggcttgtattcccgccaggataacacacgttggctagaagccagcgtggtggggaagattaacaaagtaaccaatgcgctccattccattctgggagaacagacgaaagctctggttactcagctgaccctgttcaaccagatccttgtggagctgcgggacgacatcagagaccaggttaaggagatgagcctcatcagaaacaccataatggaatgtcaagtttgcggctttcatgagcagcggtctcattgcagtcccaatccgtgcttccgcggagtggattgcatggaagtctatgaatatcccggctatagatgcggaccatgccctcccggactgcagggaaatggtacacattgcagcgacatcaatgaatgcgctcacgctgacccatgttttccaggctcttcatgcattaataccatgccaggtttccactgcgaagcatgccctagaggttacaagggcacgcaggttagtggggtgggcattgactacgcacgggctagtaagcaggtttgtaatgacatcgacgaatgtaacgacggcaacaacggcggatgtgaccctaactccatctgcacaaatactgtcggatccttcaaatgtggaccatgtcggctgggctttctgggaaaccagagtcagggatgtctacccgctcgcacctgccatagccccgcccacagtccctgccacattcatgcacactgcctgttcgagcggaatggggctgtgagctgccagtgtaacgttggctgggccggcaatggaaatgtttgcggtactgacaccgacattgatggatatcctgaccaagccctcccctgcatggataataataaacactgcaaacaagataactgtctgctgacccctaacagtggccaggaagatgccgacaacgatggcgtgggggatcaatgcgacgatgatgccgacggggatggtattaaaaatgtggaagataattgtcggctatttcccaacaaggaccagcagaacagcgacacagattcatttggtgatgcttgcgacaactgccccaacgtgcccaacaacgatcagaaggatacagacggcaacggtgagggcgacgcctgcgacaatgacgtagatggcgacgggattcctaacgggctcgacaattgcccaaaggtgccaaacccactacagaccgatcgcgacgaggatggcgtcggggatgcctgcgactcatgcccggaaatgagcaaccccacccagacagacgccgactctgacctggtcggcgacgtttgtgataccaacgaggacagtgatggtgatggccaccaagatacaaaggataactgcccccagcttccgaactcttctcaactggactccgacaacgacgggctgggggatgagtgcgatggggacgacgacaacgacgggattcccgattacgtgcctcccggaccagataattgtaggttagtcccaaacccaaaccagaaagatagcgacggcaacggtgtcggcgacgtgtgtgaagatgatttcgacaacgatgcagtggtggatcccctcgatgtctgtccggagtccgccgaggtaaccttgactgattttagggcctatcaaaccgtcgtcctcgatccagaaggcgacgcacaaattgaccctaactgggtggtgctgaatcaaggaatggagattgttcaaaccatgaattccgatccgggcctggctgtaggctacacagctttcaacggcgtcgactttgagggtaccttccacgtcaatacagtgacagatgacgattacgcagggttccttttctcttaccaagactccggccgtttttacgtcgtcatgtggaaacagactgaacaaacttattggcaggccaccccatttcgcgctgtagcccagccgggactgcaacttaaagccgtgactagtgtgtcaggacccggcgagcacctcagaaacgctctctggcacactggccacacaccagaccaggtcagactgttgtggactgacccccggaacgttggttggcgcgacaaaacctcctaccgctggcagctcctgcacaggccacaagtaggctacatacgagttaagctctacgaaggtccacagctggtagctgactctggcgtgattatcgatacatctatgagaggaggtcgtctgggtgtgttctgtttttcgcaggagaacattatctggtccaatctgcagtacagatgcaacgacacagtacccgaagatttcgagccattccgacggcagttgcttcagggccgcgtttag

SEQ ID NO: 6458 - DNA, 1311 bp, synthetic construct
  misc_feature 1..1311: note = source = /note="Description of Artificial Sequence: Synthetic coding sequence"
  source 1..1311: mol_type = other DNA
atgtggcgttgcccacttggcctcttactgctgctgccactggcaggccacctcgctctcggagcacagcagggacgcggccgccgtgaactggctcccgggctccacctccgaggtatccgcgacgctggcggcaggtactgtcaggaacaggacctctgttgccgaggccgcgccgatgactgcgctctcccttatctcggtgccatatgctattgcgatctcttttgcaaccggactgtctccgactgttgccctgatttttgggacttctgcttaggggtgccgcctccctttccacccatccagggctgtatgcacggcggcagaatttacccagtcttgggaacctactgggataattgtaatcgttgttggcaggctggaaaccacagtgccttctggggaatgacacttgatgaaggtattcgctaccgcttgggcacaatccgcccaagctcctcagtgatgaacatgcatgagatttataccgtcctgaaccccggcgaagtactcccaactgctttcgaagccagcgagaagtggccaaacctcatccacgagccgcttgaccaaggaaattgcgccgggagttgggcttttagcaccgccgcggtggcctctgatagagtgtccattcactcattaggccacatgacccctgtcctgtcgccccaaaacctactctcttgcgatacccatcaacagcagggctgtcggggaggcagactggatggcgcctggtggtttttgaggagacgcggcgtcgtgtccgatcattgctatcctttcagtggcagggagcgcgatgaggcaggcccagccccgccctgcatgatgcattccagggccatgggtcggggtaaaaggcaggcaaccgcccactgtcccaattcatacgttaataacaatgatatttaccaggtgacacctgtgtaccggctggggagcaatgataaagagatcatgaaggagcttatggaaaacggccccgtgcaagcccttatggaagtgcatgaagatttctttttgtacaaaggtggaatctactcacatacccccgtatcactcgggcggcccgaaagatataggagacacgggacacatagcgtaaaaattaccggctggggagaggaaactcttcccgacggccgaactctgaagtattggacggcggctaattcctggggccctgcctggggcgaaagagggcattttcgcatagtgaggggtgtcaatgaatgcgacatcgagtccttcgttctgggggtgtggggccgtgttggcatggaggatatgggccaccattag

SEQ ID NO: 6459 - DNA, 942 bp, synthetic construct
  misc_feature 1..942: note = source = /note="Description of Artificial Sequence: Synthetic coding sequence"
  source 1..942: mol_type = other DNA
atgtctgatctgttgctgctgggactgatcggtgggctgacactgctcctgctcctgaccctccttgccttcgctggttattctggtctcctagcgggtgtcgaagtgagcgccggctcccccccaatcagaaacgttaccgtcgcctataagttccacatggggttatacggcgagacaggcaggctgtttacagaatcgtgtagtatctcccccaaactgaggtcaatcgccgtctactatgacaatccgcacatggttccgcccgataagtgtagatgcgctgtggggagcattcttagcgaaggcgaggaatccccgtccccagagctcatcgacctctaccaaaaattcggatttaaggtgttctccttcccagcaccaagccacgtggtgacagcgacgtttccctataccaccatcctgagtatctggctggctaccaggcgcgtccatcctgccttagatacttacatcaaggaacggaagctgtgtgcctaccctcggctggagatttaccaggaagatcagatccattttatgtgccctctggcaaggcagggtgacttctacgtgcccgagatgaaggaaacagagtggaagtggcggggtctggtggaggctatagacacacaagtggacgggacaggagcggataccatgtccgacaccagcagcgtgtcccttgaggtctcaccaggtagtcgggaaacgtctgccgcgacactctccccaggcgcttcaagcagaggatgggacgatggggatactcggtccgaacacagctactccgaaagcggggcttccgggtcttctttcgaagagctggacctcgaaggcgagggccctctcggtgagagcaggcttgaccccgggaccgaaccattagggaccacgaagtggctctgggagcctacggctcccgaaaagggtaaggagtag

SEQ ID NO: 6460 - DNA, 213 bp, synthetic construct
  misc_feature 1..213: note = source = /note="Description of Artificial Sequence: Synthetic coding sequence"
  source 1..213: mol_type = other DNA
atggtggcccctgccgccagggtattcttacgggccgttagggccgcgctgacttccacagtgcctgatctgctgtgtctcctggcccgcggatcccctcgagggttagccagcggacggctgcctctggccgtccattcagcccaacatgggcccggctccggtgctccgtggttgcggattgctcgccgagcgctatcccaaaggatctag

SEQ ID NO: 6461 - DNA, 642 bp, synthetic construct
  misc_feature 1..642: note = source = /note="Description of Artificial Sequence: Synthetic coding sequence"
  source 1..642: mol_type = other DNA
atggcccaactgttcctacccttactggctgcactagtgctcgcccaggcccctgcagcactggccgatgtcctggaaggggactccagtgaagaccgtgccttcagagtcagaatagctggggatgctccccttcagggggtactcgggggggccctgaccatcccatgccatgtacattaccttcgtccaccgcccagcaggagagccgtattaggaagtccacgcgtaaagtggactttcctgtccagggggcgcgaggcagaagttcttgttgcccggggggtgagagtgaaagtgaacgaggcttatagattccgggtggcccttccagcttacccagcatctttgacagatgtgtccctggctttgagcgagctcaggcccaacgactctggaatttaccgctgtgaagtgcaacatggcatcgacgactctagtgatgcagtcgaagtgaaagtcaaaggcgttgttttcttgtatagggagggcagtgcacgatacgccttttccttctctggagcccaggaggcctgtgcacggataggagcacacatcgcgacccctgaacagctctacgctgcctacctgggcgggtacgaacagtgtgatgccgggtggcttagcgaccagactgtgtag

SEQ ID NO: 6462 - DNA, 237 bp, synthetic construct
  misc_feature 1..237: note = source = /note="Description of Artificial Sequence: Synthetic coding sequence"
  source 1..237: mol_type = other DNA
atgggcagcggacttccactcgtgttactcctcacactgctcggatctagccacggtaccggtccaggaatgacactgcagcttaagttaaaggaatcttttcttacgaacagctcctacgagagttcatttctggaacttttggaaaaattgtgtctcttgctccacttgccctctggcaccagtgtgaccttacatcacgccaggtctcaacaccacgtcgtatgtaacacctag

SEQ ID NO: 6463 - DNA, 651 bp, synthetic construct
  misc_feature 1..651: note = source = /note="Description of Artificial Sequence: Synthetic coding sequence"
  source 1..651: mol_type = other DNA
atgtctgatttgctgttattgggcttaataggaggccttacactgctgctgctcctgaccctcctcgcgttcgctggatatagcggactacttgccggagtggaagtgagtgcgggcagtcccccaattcggaatgtcacagttgcttacaaatttcacatgggactgtatggcgaaaccggacggctgttcaccgagtcctgctccattagtcccaagctgagatctattgctgtgtactacgacaacccacacatggtgccaccagacaagtgtcgttgtgcagtgggaagtattctgtcagagggcgaagagtctccttcaccagagttaatagatttataccagaagtttggattcaaagtcttctcatttcccgctccatctcacgtagtgaccgcaaccttcccctatacaactatcttatcaatatggctcgccactcgcagagtgcaccccgcccttgacacgtacataaaagagaggaagctgtgtgcctaccccaggctcgaaatataccaagaggatcagatccactttatgtgtccgctggcaaggcagggcgacttttatgtgcccgagatgaaggaaacagagtggaaatggcggggcctcgtcgaagccattgatacccaggtcgatgggacttag

SEQ ID NO: 6464 - DNA, 453 bp, synthetic construct
  misc_feature 1..453: note = source = /note="Description of Artificial Sequence: Synthetic coding sequence"
  source 1..453: mol_type = other DNA
atgaggtttatggccggcccagccggatcccaatccctgggtcctctctgcttccactctagcccgcaggcgctgtacaccgtgttgctgatcgtgctggtaatgatgtctttagttttcggaaagtttgtgccggttaattgggaacccccacagccactcccttttcctaagtacctaaggtgctataggtgcctcctggagaccaaggagctgggttgtctgctaggcagcgatatttgcctgacccctgcggggagctcatgtatcacactgcataagaagaattcatccgggagcgacgttatggtttctgactgtcggtcaaaagaacagatgagtgattgctcaaacacccggactagtcctgtcagtgggttctggattttttcacaatactgcttcttggatttctgcaatgatcctcagaacagggggctatacacgccgtag

SEQ ID NO: 6465 - DNA, 171 bp, synthetic construct
  misc_feature 1..171: note = source = /note="Description of Artificial Sequence: Synthetic coding sequence"
  source 1..171: mol_type = other DNA
atgaagactggcctgttctttctgtgcctgttgggaacagcggctgcaattcccacaaacgcgcgtctgcttagcgaccacagcaaacctaccgcagagaccgttgcccccgataacactgctatccccagccttcgggctgaagccgaagaaaatgaaaaagagacctag

SEQ ID NO: 6466 - DNA, 2346 bp, synthetic construct
  misc_feature 1..2346: note = source = /note="Description of Artificial Sequence: Synthetic coding sequence"
  source 1..2346: mol_type = other DNA
atggccgtggccgaagtgagcaggacttgtctgctcacagtgcgcgttcttcaggcacatcgcctgccgtcaaaggatctcgtgacacctagcgactgttatgtaaccttatggctcccaacagcttgttcccacaggctgcagactagaaccgtgaaaaactctagctcccccgtgtggaatcagtcctttcactttagaatccatagacagttgaaaaatgtaatggagctgaaagtgtttgatcaagaccttgtcacgggagatgaccccgtactgtcagttctgtttgatgccgggactctccgagcaggcgagtttcgaagagagagttttagcctgtccccacaaggggaaggccggttggaggtggagttccgcctacagagcctcgccgacaggggtgagtggcttgttagtaacggcgtgttggtcgcccgtgagctcagctgtctccacgtccagctcgaagagactggagaccagaagtcaagtgagcaccgtgtacaactggtagtgcctgggtcttgcgaaggcccccaagaggcaagtgtgggaactgggacttttcgtttccattgccctgcttgctgggaacaggagctttccatcaggctacaggatgcccccgaagaacagctgaaggcaccactgtctgccctcccttctggacaagtagtgcggttagttttccctacctcccaggagcctctgatgagggtggaattaaagaaggaagccggtctgcgcgagctggcagtacgactgggcttcgggccatgcgccgaagagcaggctttcctctcccgccgtaagcaagtggtagccgccgcactacggcaggccctgcagcttgacggcgaccttcaggaagacgaaattccagtggtggctatcatggcaacgggcggcgggattagggctatgacctcattgtatggccagttagcaggcttgaaggaactaggtctactggattgcgtctcctatattacgggggcctccggatccacgtgggctctggcgaacttgtacgaggaccccgaatggagtcaaaaggatttggcggggccaaccgagttgctgaaaacacaggtgacaaagaataaactgggagttctcgccccaagtcagcttcagagataccggcaggagctcgctgagcgagcacggctcgggtatccatcctgcttcaccaatctctgggccctcatcaacgaagccttactccacgatgaaccccacgatcacaagctgtctgaccagagggaggctctcagccacggacagaacccactgcctatttattgtgctcttaacactaagggccagagtttaacaacattcgaattcggcgagtggtgcgagttttctccatacgaggtaggtttccccaagtacggggctttcatcccctccgagctcttcggatcagagttctttatgggccagctcatgaagcgtctgcccgagtcacggatctgcttcttggagggaatttggtctaacctgtacgcagccaatcttcaggattctctctactgggctagtgagccttcgcagttttgggatcgatgggtcagaaaccaggccaatctcgacaaggagcaggtgcccctgctgaaaatagaggaacccccatccacggccggacgtatcgcagagttttttactgatttactgacctggaggcccctggctcaggctactcacaacttcttaagaggactccattttcacaaggactacttccagcacccgcacttctctacctggaaagctaccacattggatggcctccctaaccagctcacaccatccgaacctcacttgtgcctcctggacgtgggctacctaatcaatacaagctgtttaccactcttgcaacccacacgggatgttgacctgatactgtcactggactacaatctccacggggcattccagcagctgcagctgctgggaaggttttgccaggagcaaggcatacctttcccacccatcagcccgagccccgaggagcagctgcagccccgtgaatgccacactttctccgatccgacttgtcctggagcccctgctgtccttcactttcctctggtgtctgattcttttcgcgagtattctgcaccaggtgtcaggcgcacccctgaagaagccgctgccggagaagtaaatttgtcttcaagcgatagcccatatcactacacaaaagtaacctattcacaggaagacgtggacaagttactacatttgacacattataacgtctgtaacaatcaggagcagctcctggaggccctaagacaggcagtccagaggcggaggcaacgccgacctcattag

SEQ ID NO: 6467 - DNA, 219 bp, synthetic construct
  misc_feature 1..219: note = source = /note="Description of Artificial Sequence: Synthetic coding sequence"
  source 1..219: mol_type = other DNA
atggcagccgcaactcgtgggtgtagaccttggggctctctgctgggactgttaggccttgtcagcgcggccgctgccgcctgggatcttgctagcttacggtgcacccttggggccttttgcgaatgtgacttcaggcctgatctgcctgaggggagtgaagaactcggcccacgggaaccccactgtctgtggcccctgccattgccgttgcggtag

SEQ ID NO: 6468 - DNA, 243 bp, synthetic construct
  misc_feature 1..243: note = source = /note="Description of Artificial Sequence: Synthetic coding sequence"
  source 1..243: mol_type = other DNA
atgaaagtctttttccttttcgcagtgcttttttgtctggtgcagactaactctggagatgtcccacccggcatccggaatactatctgccacatgcagcaagggatttgtcgcctgttcttttgccattccggggaaaaaaagcgggatatctgtagcgatccatggaaccggtgctgtgtcagcaacactgatgaggaagggaaggagaagccggagatggacggaagatctggcatctag

SEQ ID NO: 6469 - DNA, 861 bp, synthetic construct
  misc_feature 1..861: note = source = /note="Description of Artificial Sequence: Synthetic coding sequence"
  source 1..861: mol_type = other DNA
atggggcccgaagctctgagtagcctcctgcttttgctgctggtcgccagtggcgacgcagacatgaaggggcactttgacccagcgaagtgccgatacgcactgggcatgcaagaccgtaccatcccagattctgacattagcgcttccagctcttggtcagattcgacggcagcacgacacagccgtttagaaagctccgatggcgatggcgcgtggtgccccgccggaagcgtgttcccaaaggaagaagagtacctccaggttgatctccagcggctccatcttgtcgctctggttggaacacaaggtcggcatgcaggcgggctgggcaaggaattctccagatcctatagattgcggtatagcagggatgggcggcgttggatgggttggaaagacagatgggggcaggaagttatctcaggtaatgaggaccccgagggggtagtcctaaaagacctcggccccccgatggttgccagactcgtcagattttatcctagggcggatagggtcatgagcgtgtgtctgcgggtcgaactctacggctgtctgtggcgcgacggccttctcagctacaccgcaccggttggccagacaatgtacctcagtgaagcagtgtacctgaatgatagcacatacgacggccacacagtgggcggactgcagtatggcggcttgggtcagctggctgatggcgtagtcggccttgacgacttccgcaaatcccaagagttgagggtatggcccggatacgattatgtaggctggagcaaccactctttttcctcagggtacgtcgagatggaatttgaatttgatcgattgcgcgcgtttcaggcgatgcaagtccattag

SEQ ID NO: 6470 - DNA, 858 bp, synthetic construct
  misc_feature 1..858: note = source = /note="Description of Artificial Sequence: Synthetic coding sequence"
  source 1..858: mol_type = other DNA
atgaggggccagggaagaaaagaatccttgtccgacagcagggacttagacgggtcttatgatcagctgacggggcacccaccaggacctaccaagaaagcactaaagcagaggttcttgaagctgctgccttgctgcggcccccaggcgttaccttccgtgagcgagataggccgtgtcttccgttttttgggtgattcctcgctcccatctgccctcgccgctcctgcttcgctacggcctcaccgacctaggctgttagatcctgattccgtggatgacgagttcgaactctccacagtgtgtcatcgaccagaaggactggagcagttgcaggaacagactaaatttacccggaaggaactccaggtgctctatcgcggatttaagaatgaatgtcctagcggaatcgtcaatgaggagaactttaagcaaatctactcccagttctttccacagggagactcatccacatacgccacgtttctcttcaacgcatttgatacaaatcacgatggaagcgtctccttcgaagattttgttgccggcctgtctgtcattctccgcgggactgtggacgatcgactaaattgggcatttaacctttatgatctgaataaggatggttgtattacaaaagaggagatgctggatatcatgaaatcaatttatgatatgatgggcaagtacacctatcctgcattgcgcgaagaggcccctcgcgagcacgttgagagcttctttcaaaagatggaccgcaataaggacggcgtcgtgaccatcgaagaatttattgaatcatgtcagaaggacgagaatatcatgcggtccatgcagttattcgataacgttatatag

SEQ ID NO: 6471 - DNA, 1311 bp, synthetic construct
  misc_feature 1..1311: note = source = /note="Description of Artificial Sequence: Synthetic coding sequence"
  source 1..1311: mol_type = other DNA
atgcagggaactcccgggggcggcacaaggccaggaccaagtccagttgatcggcgcacattgctggtcttcagtttcattctggccgcagcactgggccagatgaacttcactggagaccaggtgcttagggtcctggccaaggatgaaaaacagctgagtctgcttggcgatttggaaggtctgaaacctcagaaggtcgacttttggcggggccccgcccgccccagcctccccgtggacatgcgagttccgtttagcgagctcaaagatataaaggcctacctggagtcacacgggctggcctattcaattatgattaaagacattcaggtcttgcttgacgaagaaaggcaagccatggcaaagtctcgcagactggaaaggtcaaccaactctttctcctactcttcctatcacactctggaggagatctacagctggatcgataacttcgttatggaacactcagacattgtttccaaaatccaaatcgggaacagcttcgagaatcagtcgatcctggtgctaaagttttccactggcggatcacgacacccagcaatctggattgatacgggtatacacagtagagagtggatcactcacgccaccggtatttggactgcgaataaaattgtatctgattacgggaaagacagggtgctgactgatattcttaacgcaatggatatctttatagagctggtaactaatcccgatggctttgcgttcacacacagtatgaacaggctgtggagaaagaacaagtccatccggcccgggattttttgtatcggagtggacctgaatcggaattggaagtcaggattcgggggcaacgggagcaactccaatccgtgcagtgagacttaccacggcccaagcccccagtctgagccggaagttgctgctatcgtcaactttattacagcacacggaaacttcaaggccctcatcagcattcacagttactcccagatgcttatgtacccgtacggacgccttctggaacctgtttccaaccaaagagaactttacgacttggctaaggatgccgtagaagcgttgtataaagtacacggtatcgagtatattttcggaagtattagcaccacgctgtatgtcgctagcggcatcaccgtcgactgggcatacgatagcggtatcaaatacgccttcagtttcgaactcagggacaccggacagtacggattcttgctgccagctacccaaatcattcctactgcccaggagacatggatggctctccgcaccattatggagcacactttgaaccatccctactag

SEQ ID NO: 6472 - DNA, 1218 bp, synthetic construct
  misc_feature 1..1218: note = source = /note="Description of Artificial Sequence: Synthetic coding sequence"
  source 1..1218: mol_type = other DNA
atggacacaatattcttatggtcacttctgttactctttttcggcagccaggcatctcgatgcagcgctcaaaaaaataccgagttcgctgtggatctctatcaggaggtgtccctcagtcacaaagataatatcatcttctcaccactggggatcactctggtcctcgagatggttcagctcggcgcgaaaggcaaagctcaacaacagattcgccagaccctgaagcaacaagaaacctccgcaggtgaggaattctttgtattgaaatctttcttcagcgctatctccgaaaaaaagcaggaatttacatttaacctcgcaaacgccctctatttgcaggaggggtttactgttaaagagcagtacctgcacggaaacaaggagttcttccagtctgcgataaaactggtggattttcaggatgcaaaagcctgtgctgagatgatcagtacctgggtagagcgaaaaactgacgggaaaatcaaggacatgttcagtggagaagaatttggcccattgacccggctcgttttggtgaatgccatctactttaaaggggactggaagcagaaattcagaaaggaggatactcagctaattaattttactaaaaagaacggctcaactgtgaagattcccatgatgaaagccttgctgagaaccaaatatgggtattttagtgagtcttctctcaattatcaggtactggaacttagctataaaggagacgagttctcactcatcattatacttccagctgaaggtatggatatcgaggaagtggagaagctgattacggcccagcagatattaaaatggctcagcgagatgcaggaggaagaggtggagatcagccttccaagatttaaggtagaacagaaggtggattttaaggatgttctgtatagcttaaacattacagagatcttctcaggagggtgtgatctgagcggcattactgattcctccgaagtgtatgtgtcgcaggtgacacagaaagtattctttgagatcaacgaggacggttccgaggccgctacgtctacgggtatccatatacctgttattatgagtctcgcccagtcacagttcattgccaaccatccctttctatttattatgaaacacaatcctaccgagtcaatattatttatgggaagagttaccaatcctgatacacaggagatcaaggggagagacctcgactccctctag

SEQ ID NO: 6473 - DNA, 300 bp, synthetic construct
  misc_feature 1..300: note = source = /note="Description of Artificial Sequence: Synthetic coding sequence"
  source 1..300: mol_type = other DNA
atgctggcccttctggtcctggtgacagttgctcttgcttccgcccaccacggcggcgaacacttcgaaggagagaaagtcttccgggtgaatgtagaggatgagaatcatattaacatcatcagggaactggccagcaccactcagattgacttttggaaaccagattcagtaacacaaattaagccccatagtaccgtggattttagggttaaggcagaggacacagtgacagttgagaacgtgcttaaacaaaatgaactccagtacaaagtgctcatttccaacctgagaaactag

SEQ ID NO: 6474 - DNA, 471 bp, synthetic construct
  misc_feature 1..471: note = source = /note="Description of Artificial Sequence: Synthetic coding sequence"
  source 1..471: mol_type = other DNA
atgctcttgctccttctcctggccccgttgtttctgagacccccgggggccggaggcgcacagacaccaaatgccacgtcagaggggtgccagatcattcatccaccttgggagggtggaatccggtacaggggattgacccgcgatcaggttaaggcgatcaacttcctccctgtggactacgagatcgaatatgtgtgtagaggtgagagggaagtggttggaccgaaggtgcgcaagtgtcttgccaatgggtcctggaccgatatggacacaccctcaaggtgcgtgaggatttgtagcaaatcatatctgaccctggaaaatggaaaagtttttcttacgggtggcgacttgccagctctagacggtgcacgagtggattttcgctgcgatcccgatttccaccttgtcggaagcagccgatctatctgttctcaggggcagtggtccacacctaaacctcattag

SEQ ID NO: 6475 - DNA, 249 bp, synthetic construct
  misc_feature 1..249: note = source = /note="Description of Artificial Sequence: Synthetic coding sequence"
  source 1..249: mol_type = other DNA
atgggccgggtttttctcacgggcgagaaggccaattctatcctgaagcgttaccctcgggccaacggttttttcgaagagatccgccaagggaacatcgagcgggaatgtaaggaagaattttgcacattcgaagaggcacgcgaagcctttgagaataatgagaagaccggcttggttttgctacccagactggagtgctcttgcgaacatggcagtctgcaaccccagttacccgtgcccaaatag

SEQ ID NO: 6476 - DNA, 372 bp, synthetic construct
  misc_feature 1..372: note = source = /note="Description of Artificial Sequence: Synthetic coding sequence"
  source 1..372: mol_type = other DNA
atgcaggggaccccaggaggtggaacacgaccaggtccttccccagtggacagaaggacattattggtcttttccttcatcctggcagcagcccttggccagatgaacttcaccggagatcaagtactaagagtcctggccaaggacgagaaacagttatccctgctgggggacctggaggggctaaagcctcagaaggttgacttctggcgaggacctgcgcggcccagtctgccagttgatatgcgagtgcccttcagcgagctcaaagacattaaagcctaccttgaatcccatggtctggcatacagcatcatgatcaaggatatccaggttctgctggacgaggaacgtcaggccatggccaagtag

SEQ ID NO: 6477 - DNA, 840 bp, synthetic construct
  misc_feature 1..840: note = source = /note="Description of Artificial Sequence: Synthetic coding sequence"
  source 1..840: mol_type = other DNA
atggggcgcgtatttctgaccggtgaaaaggccaattcaatccttaaacgttatccacgcgcgaacgggttttttgaggagatccgccagggtaatatcgagcgtgaatgcaaagaggaattctgtacttttgaggaggctcgggaggccttcgaaaataatgagaaaaccatcacaggggtgattctcctcgccgttggggtctggggaaaactcaccctgggcacttacatttctttgatagccgagaattccacgaacgccccatacgtgcttattgggacagggaccaccattgtagtgttcgggctgttcggctgcttcgctacgtgtcggggatccccgtggatgctgaagctctatgctatgtttctgagcctggtctttttggcagaactcgtggccgggatatctggcttcgtgttccggcatgaaatcaaggacacgttcttaagaacttacactgatgcgatgcagacatacaacggcaacgacgagcgaagcagggcggttgatcatgtccagcggagtctcagttgttgtggggtgcagaactataccaattggagcacatcgccctattttcttgagcacggtatacccccttcgtgttgcatgaatgagaccgactgtaacccccaggacctgcataaccttactgtcgccgcaactaaggtaaaccagaagggttgttacgatctggttaccagttttatggagactaacatgggcatcattgctggcgtggcctttggcatcgcatttagtcagctgatcgggatgctcctcgcatgttgtctcagtcgtttcataactgctaatcagtatgaaatggtttag

SEQ ID NO: 6478 - DNA, 564 bp, synthetic construct
  misc_feature 1..564: note = source = /note="Description of Artificial Sequence: Synthetic coding sequence"
  source 1..564: mol_type = other DNA
atgtggtgcgcctcccctgttgccgtcgttgctttctgtgcaggcctgctggtttcccaccctgtgctcacccagggtcaggaagctggggggcggcctggtgctgattgcgaggtatgtaaggagtttttgaaccgattttacaagagcctcatcgatcggggtgtgaatttttcgctagacacaatcgagaaggagctgatcagcttctgcttggatacaaaaggaaaggaaaatcgcctatgctactacctgggagccacaaaagatgctgccactaaaattcttagcgaggtcacacggccaatgagtgtgcatatgccagctatgaaaatatgtgaaaaacttaagaaactggatagccagatttgtgaactgaaatacgaaaaaacacttgacctggcttctgttgacctccgcaagatgcgcgtagctgaattgaaacagattttgcactcgtggggagaggaatgccgggcatgcgcggagaagaccgactacgtgaatcttattcaggagctggctcctaagtatgctgcaacccatcccaagaccgagctgtag

SEQ ID NO: 6479 - DNA, 1311 bp, synthetic construct
  misc_feature 1..1311: note = source = /note="Description of Artificial Sequence: Synthetic coding sequence"
  source 1..1311: mol_type = other DNA
atgcaagggacccccggtggcgggacacgacccggaccctcacccgtggacagacggactctgttagttttcagctttattttagccgctgcactagggcaaatgaacttcactggtgaccaggttctgagagtccttgctaaggacgaaaaacaactgtccctccttggggacctggagggactcaagcctcagaaggtcgatttttggcgcggcccggctcgtccctccttgccagtggacatgcgtgtgccctttagtgagctgaaagatattaaggcttatctggagtcacacggcctcgcttattccatcatgattaaagatatacaggtattgctggacgaggaacggcaggcaatggcaaagtcaagaaggctagagagaagtaccaatagcttcagctattcatcataccatacgctcgaagagatctatagctggattgacaatttcgtgatggagcactcagatatagtgtctaagattcagatcggaaatagcttcgaaaatcaaagcattctcgtgctgaagttcagtacaggcggatccaggcaccctgccatctggatagataccggaatccactctcgcgagtggattacccacgcaacggggatctggacagccaacaagatcgttagcgactatgggaaggacagggtccttacagacatactcaatgctatggatatctttattgaattggtaacaaatcccgacggtttcgcttttacacactccatgaacaggctgtggcggaagaataagtcaatacgtcccgggatcttctgcataggagtcgaccttaatagaaactggaaatctggctttggagggaatgggtctaattcaaacccctgttcggaaacataccacgggcccagcccccagagcgaacctgaagtggccgccatcgtgaattttataactgcccatggcaactttaaagccctcatttccattcactcgtacagccagatgctgatgtacccctacgggcgtttattggagcccgtgtcaaatcagagagagctgtatgacttggctaaggatgcagtggaagccctctataaagtgcatgggatcgagtatatcttcggcagcatctcaacaaccctatacgtcgcttccggaattactgtggattgggcctacgatagtggcattaagtacgctttttccttcgaactgagagatacaggacagtacggatttctcctccctgccactcagatcatccctacagcccaggagacctggatggccctgagaacaatcatggaacacacattaaatcatccttattag

SEQ ID NO: 6480 - DNA, 450 bp, synthetic construct
  misc_feature 1..450: note = source = /note="Description of Artificial Sequence: Synthetic coding sequence"
  source 1..450: mol_type = other DNA
atgggacgggtcttcctcactggagagaaagctaatagcattctaaaacgatatcccagggccaacggttttttcgaggagattcgccaggggaatatcgagagggagtgcaaggaggaattctgcaccttcgaggaagctcgcgaagctttcgaaaacaatgagaaaactaaggaattttggtctacttatacaaaggctcagcagggcgaaagcaatcgtggctccgattggtttcagttctatctgacgttcccgctgatcttcggcctctttatcattctcttggtaatctttctgatatggagatgcttcctccggaacaaaacaaggagacagaccgtgaccgagggccatatccctttcccccagcacctgaacattattactccgcctcccccgccagacgaagtgtttgatagtagcgggctcagtcctggattcctctag

SEQ ID NO: 6481 - DNA, 936 bp, synthetic construct
  misc_feature 1..936: note = source = /note="Description of Artificial Sequence: Synthetic coding sequence"
  source 1..936: mol_type = other DNA
atgctctatcagactatcaatagtttgaaaaccaaaaatcccaagctcaagattctgctgtccattggcggctatctatttgggagcaagggattccatcccatggttgatagcagcacatcccggctggagttcatcaactctatcatcctgtttctgcggaaccataactttgacggattggacgttagttggatttacccggaccagaaggagaatacacacttcacggtccttatccacgaactagccgaagcttttcagaaggattttacaaagtcgacgaaagaacgactcctgttgacagctggagtgtcagcaggccggcagatgattgataattcctaccaggttgaaaaactggcaaaagacctcgacttcattaatcttctcagttttgattttcacgggagttgggagaagcccttgataaccggccataatagcccactctctaagggatggcaggatcgcggcccgtcaagttactataacgtggagtacgctgtcgggtattggattcacaaaggcatgcctagtgagaaagttgtgatgggtattcccacgtatggccacagtttcaccttggctagcgctgagacaacggtgggtgcccctgcctcaggccccggcgccgctggacccatcaccgaaagctctggcttcctcgcctattacgagatatgccagtttttgaagggtgccaaaataactcgcttgcaagatcagcaggtcccctacgcggtgaaggggaaccagtgggtgggatatgatgacgtaaaatcaatggaaactaaggtgcagtttctgaagaatctcaacctcggcggagcaatgatttggtcaatcgacatggatgacttcacaggtaagtcatgcaatcagggaccatatcccctagttcaggccgtgaagcgctcactgggctctttgtag

SEQ ID NO: 6482 - DNA, 621 bp, synthetic construct
  misc_feature 1..621: note = source = /note="Description of Artificial Sequence: Synthetic coding sequence"
  source 1..621: mol_type = other DNA
atggatactattttcctctggtcgttactcctcctgttctttggttctcaggcttcacggtgctctgcccagaaaaacaccgaatttgccgtcgacctataccaagaggtgagcttgtcccacaaggacaacattattttttcccctctgggtattactttggtcctggagatggttcagctgggggccaaggggaaagctcagcagcagattcgtcagacattgaagcaacaggagacctctgccggggaggaattcttcgtattgaagtccttctttagcgccatctcggagaaaaagcaggaattcacttttaacctcgccaacgcactctatctgcaggaaggcttcaccgtcaaagaacagtaccttcacggaaataaggagtttttccaaagcgccatcaagttggtggactttcaggacgccaaggcgtgtgccgaaatgatctctacatgggttgagaggaagacagatggtaaaataaaggatatgtttagtggcgaagagtttggtcctcttacccgtctcgtgctcgtaaacgctatctacttcaagggagactggaaacagaaattccgaaaggaggacacccagctgatcaactttacaaagaagtag

SEQ ID NO: 6483 - DNA, 1218 bp, synthetic construct
  misc_feature 1..1218: note = source = /note="Description of Artificial Sequence: Synthetic coding sequence"
  source 1..1218: mol_type = other DNA
atggatacaatatttctctggagtcttcttcttctgttttttgggtcacaggcctcaaggtgcagcgcgcagaagaacacagaattcgctgtggatctgtaccaggaagtaagcctgtcccataaggacaacattatattcagtccactgggcataacgctggtgctggagatggttcagctgggcgctaaggggaaggctcagcagcagatcagacagaccctgaagcagcaggagacgagtgcaggcgaagagttcttcgtcctaaagtccttttttagcgcaataagcgagaaaaagcaggagtttacatttaatctagccaatgccttgtatctccaggaggggtttaccgtgaaagagcagtacctgcacggcaataaagagtttttccagtccgcaatcaagctggtggacttccaggacgctaaagcctgcgccgaaatgatcagtacttgggtcgaaaggaagactgacggaaagatcaaggacatgttcagtggtgaagaattcggacctctgactaggctggtgctcgtgaacgctatttacttcaagggcgactggaagcaaaagttccgtaaggaagatacacagttgatcaattttacaaagaagaatggaagtactgtgaagatcccgatgatgaaggctctgcttaggactaagtacggctatttctccgagtcctcactcaactaccaggttctcgagctttcctacaaaggagatgaattttcactcatcattatcctgcctgcagaaggaatggacattgaggaagtggaaaaattgataacagctcaacagattttaaaatggctttccgagatgcaggaggaggaggtcgagatcagcctgccgcgcttcaaagtggaacagaaggttgatttcaaggatgtgttgtacagcctcaacatcaccgaaattttttcggggggctgtgatctgtcgggcatcacggactcttctgaagtatacgttagccaggtgacacagaaggtattctttgaaatcaatgaagatgggtcagaggccgccacttccacgggaattcacatacctgtgatcatgtctttggcccagagccagttcattgcaaaccacccattcctgtttatcatgaaacataaccccactgagagcattctgtttatggggcgcgtgactaacccggatacccaggaaatcaagggacgtgatctggattcactatag

SEQ ID NO: 6484 - DNA, 399 bp, synthetic construct
  misc_feature 1..399: note = source = /note="Description of Artificial Sequence: Synthetic coding sequence"
  source 1..399: mol_type = other DNA
atgctcatcttctggacaattaccctgtttctgcttggcgcagcaaaaggaaaagaggtatgttatgaggatttggggtgcttctctgatacagaaccctggggaggaactgcaatccgcccacttaagatcctgccatggagcccagagaaaatcggcactaggttccttctctacaccaatgaaaacccaaataatttccagatcctgcttctaagcgacccatccactatcgaggcttccaattttcagatggacagaaaaacacggttcataatccacgggttcattgacaaaggagatgaatcctgggttaccgatatgtgcaaaaagttgttcgaggtagaggaagttaattgcatctgcgtggattggaagaagggaagtcaggccacatag

SEQ ID NO: 6485 - DNA, 606 bp, synthetic construct
  misc_feature 1..606: note = source = /note="Description of Artificial Sequence: Synthetic coding sequence"
  source 1..606: mol_type = other DNA
atgaaggtccatatgttagtaggtgtgctagtgatggtaggatttaccgtcggaaaggtgccggttcccgatattcgtacatgccatttctgcctggtggaggatccaagtgtcggttgcataagcgggtcggaaaagtgcacaattagctcttccagcctgtgtatggtgatcaccatctactacgatgtgaaggttaggtttatcgtcagaggatgtggccaatacattagctataggtgtcaagagaagcggaacacatactttgcagagtactggtaccaggcgcagtgctgtcagtacgactattgtaatagctggtccagcccgcaactgcagagcagtttgccagagccccacgaccgcccactcgcacttcctctctccgactcacaaattcagtggttttatcaagcactcaatctctctcttcctctgccaaattttcatgccgggaccgagcccgacggccttgatcccatggtgactctatccctgaacctaggcttgtcatttgcagaactgcggcggatgtacttattcttaaactccagtggacttcttgtgctgccacaggcaggccttcttacacctcacccatcctag

SEQ ID NO: 6486 - DNA, 1086 bp, synthetic construct
  misc_feature 1..1086: note = source = /note="Description of Artificial Sequence: Synthetic coding sequence"
  source 1..1086: mol_type = other DNA
atggccagcctcgggctgctccttttgctgctcttaaccgcgctaccacccctctggtcctcttcattgccaggtttagacactgccgaatctaaggcgactatcgccgacctaattcttagtgctctcgaaagggccaccgtttttctggaacagaggctgccagagatcaacctcgatggtatggtgggcgtgagggtcctcgaggagcagctgaaatctgtgcgcgaaaaatgggcccaggaacccttactacagccgctgtcattaagggtggggatgctcggggagaagctggaagccgcaatccagcgtagtcttcattacctgaagctgtccgacccaaagtacctgagagaatttcagttgacgctgcagcccgggttttggaagctgccccatgcgtggatacataccgatgccagtttagtctatccaacattcggaccccaggactccttctctgaggaaaggtctgatgtctgtcttgtgcagttgctcgggaccggcactgactctagtgaaccttgtggcctaagcgacctgtgccgaagtttaatgactaagccaggatgctccggctactgtctcagccaccaactcctgttcttcttatgggcacggatgcgcgggtgtactcagggacctcttcagcagagccaggactatatcaacctattttgtgccaacatgatggatctgaacagaagggccgaggcaatcgggtacgcctaccctaccagggacattttcatggagaacatcatgttttgtggaatgggtggattctccgacttctataaactgagatggctggaggccatcctttcttggcagaagcagcaggagggatgttttggggagcccgacgccgaagacgaggagctgtccaaagccatacagtaccagcagcacttctctcgccgggtgaagcgccgcgagaaacaatttcctgacggatgttcttcacataatacggccaccgccgtggccgcgctgggtgggtttctgtatatcttggccgaatacccccccgccaaccgcgaacctcacccttctaccccgccacctccctcaagtcgatag

SEQ ID NO: 6487 - DNA, 162 bp, synthetic construct
  misc_feature 1..162: note = source = /note="Description of Artificial Sequence: Synthetic coding sequence"
  source 1..162: mol_type = other DNA
atgtggacgaacttcttcaaattaaggctgttttgctgtcttcttgcggtgctgatggtagttgtgctggttattaacgttacacaggtcgaatacttggaccacgaaacagtttctgcgacgtttatcgattcctcgggccaattcgtatccagccagtag

SEQ ID NO: 6488 - DNA, 1305 bp, synthetic construct
  misc_feature 1..1305: note = source = /note="Description of Artificial Sequence: Synthetic coding sequence"
  source 1..1305: mol_type = other DNA
atggcatcgcttggccttctgctgttgctcctccttaccgccctcccccctctctggtcaagcagcctgcccggccttgatacggccgagtctaaagcaaccattgctgatcttattctgagtgccctggagagggccacggttttcctggagcagaggttgcctgagataaatttagacgggatggtgggagttagagttctggaggagcagctgaaatcggttagagagaagtgggcgcaagagcctctgctccagccattatccctgagggttggcatgctgggggaaaagctcgaggccgccatacagagatctctgcactatcttaaactatcagaccctaaatatctccgcgaatttcaattgacactccaaccaggtttttggaaactgcctcacgcctggattcacacagatgcgagcctagtgtacccaacttttggtcctcaagattccttctccgaggagcggtctgatgtgtgcttggttcaacttctgggcactgggaccgactcatcggaaccctgtggcctctcggacctttgtaggagcttaatgaccaaacctgggtgtagcggctattgcttgtcacaccagcttctttttttcttatgggcccggatgcgaggttgtacgcagggacctcttcagcagagtcaagattacatcaatctcttttgcgcaaacatgatggacttgaatcgcagagcggaagctatcggctatgcataccctacgcgggatatcttcatggaaaacagtgtgacgggccaccccgtgttctacctgcccctttgcgactcttttctgccacctaaagctgcaccagtaaccgagttgtatacggatggtcctgtcatgttctgcggcatgggcggcttctcagacttctataaacttagatggttggaggcaattctatcatggcagaaacagcaggaagggtgtttcggcgaacccgatgcagaagatgaagagctgtcaaaggccatccagtaccagcagcactttagtagacgtgttaagagaagagaaaaacaatttcccgattctagatccgtggcccaagccggggttcaatggagaaatctcggctcgctgcaaccccttcccccaggcttcaagcaattcagctgtctgattcttcctagttcttgggactaccggtccgtccccccatacctagccaacttctacatcttcctggtggagaccggctttcatcatgtggcccatgcaggacttgagctgctgatctcaagagatcctccaacgagcggctcacaatctgtaggcttatag

SEQ ID NO: 6489 - DNA, 1311 bp, synthetic construct
  misc_feature 1..1311: note = source = /note="Description of Artificial Sequence: Synthetic coding sequence"
  source 1..1311: mol_type = other DNA
atgcagggaacacctggcggcggcaccaggcctggtccgagtccagtagataggaggactctactcgtgttttcttttatattagcggctgcattaggtcagatgaactttactggcgaccaggttctccgcgtgctggctaaggacgagaaacaattgagcttgttgggcgacctggagggtctgaagcctcagaaggtggacttttggcggggccccgcccgacccagcttgcccgttgatatgagagtgcccttttctgaattgaaggacattaaggcctatctggagtcgcatgggctagcttattcaataatgataaaggacattcaggttctgctggacgaggagaggcaagcgatggctaagagtaggagactggagcgaagtacaaattcattttcatacagttcctaccacaccctggaagagatctactcatggatcgacaatttcgttatggagcatagcgacattgtgagcaagatccaaatcgggaacagcttcgagaaccagtccattctggtcctcaagttcagcactgggggatctcgccaccctgccatttggattgatacaggcatccactccagagaatggatcacacacgcaacaggcatctggacagcgaataagattgtgtcagattatggcaaagatagagtgctgaccgatatacttaatgcaatggacattttcattgagctggtgactaatccagacggctttgcgttcacccattccatgaaccggctgtggagaaaaaacaagagtatcagacctgggatcttttgtataggcgtggacctgaaccgaaactggaaatcaggatttggaggtaacgggagcaatagcaacccgtgctccgagacctaccacggcccatcacctcaaagcgagcccgaagtcgctgccatagtgaatttcatcactgcccacggcaacttcaaagccctgataagcattcatagttactcccagatgctcatgtatccctatgggcgacttcttgagcctgtatccaatcaacgggagctgtacgacctcgcaaaggacgcagttgaggctctgtacaaggtgcacggcattgaatacatcttcgggtccataagtaccaccttgtatgtggctagtggaatcacagtggactgggcttacgacagtggcatcaagtatgctttctcatttgaactacgggatacaggccaatacggttttcttttgcccgcgactcagatcatccctaccgcccaggaaacatggatggcgctgaggacaataatggaacacacgctcaatcacccttactag

SEQ ID NO: 6490 - DNA, 1218 bp, synthetic construct
  misc_feature 1..1218: note = source = /note="Description of Artificial Sequence: Synthetic coding sequence"
  source 1..1218: mol_type = other DNA
atggacactatctttctgtggtcactcctgctacttttttttggaagccaggcatcacgttgctctgctcaaaaaaatacagagtttgctgtggatctgtaccaggaggtttctttgtcccacaaggataacatcatattcagccccctcggtataacactggttctggagatggtccaactgggcgctaagggcaaggctcaacagcagattcgacagactctcaaacaacaggaaacttccgccggggaagagttcttcgtgctgaaatcttttttctccgccatcagcgaaaagaagcaggaatttacgtttaatctagccaacgctttgtacttgcaggaaggtttcactgttaaggagcaatacttgcacggtaacaaagagttcttccagagcgccattaagctggtcgactttcaggacgcaaaagcatgcgctgaaatgatctcaacttgggtggaaagaaagactgacggaaagattaaggacatgtttagtggggaagagtttggaccactgacgcgcctggtgctggtcaatgcgatctatttcaagggggactggaagcaaaaattcagaaaagaagacacgcagcttatcaacttcaccaagaaaaacggatctactgtcaagatccccatgatgaaagctctgcttagaactaaatatggctacttctcagaaagctctttgaattaccaggtgcttgagttatcatacaaaggagacgaattctcgctgataataatactccctgccgagggaatggacattgaggaggttgagaagctgatcaccgctcaacagattctgaagtggctatctgaaatgcaggaggaagaggtggaaatctccctaccacgttttaaagttgagcagaaggtggactttaaggacgtactctattctctaaatatcacagagatattttctggaggctgtgatctctccgggattaccgactcaagtgaagtttatgtcagtcaggtgacacagaaagtgttcttcgagattaatgaagatggatccgaggccgcaacttctacaggcatccatatacccgtaattatgtccctcgcgcagagccagttcattgccaatcaccctttcctttttattatgaagcacaatccaactgagagcatcctgttcatgggaagagtgacaaacccagatactcaggagatcaagggcagggatctcgatagcctctag

SEQ ID NO: 6491 - DNA, 510 bp, synthetic construct
  misc_feature 1..510: note = source = /note="Description of Artificial Sequence: Synthetic coding sequence"
  source 1..510: mol_type = other DNA
atgctgtaccagacaataaacagcctcaagacgaagaatccgaagcttaagatattgctgtccattggaggatatctgttcggaagcaaaggctttcatcccatggttgattcctcaacaagtagactcgagttcattaatagtataatacttttcctgcgcaatcataactttgatggcctagacgtttcctggatctacccagaccagaaagagaacacacactttacagtgctgatccatgagttggcagaggcctttcagaaagacttcacgaagtccacaaaggagcgactcctgctcacggccggcgtctccgccggacgccaaatgatcgataactcttatcaggttgaaaagctcgccaaagatttggacttcatcaatttactgtcctttgacttccacgggagctgggaaaagcccctgataaccgggcacaatagccctttaagcaaagggtggcaggatcggggtccttctagctactataacgtggaatatgcgtag

SEQ ID NO: 6492 - DNA, 1209 bp, synthetic construct
  misc_feature 1..1209: note = source = /note="Description of Artificial Sequence: Synthetic coding sequence"
  source 1..1209: mol_type = other DNA
atggcctccctgggactgctattgctgttgttgctgacagcattgccaccgctatggtccagcagtttgccaggcctggacactgctgaatccaaggcgaccatcgcggatttgattttaagcgcactcgaaagggccacggtattccttgagcagcgcttaccagagatcaacttggatggcatggtgggcgtgagagtactggaggaacagctgaagagtgtaagggaaaagtgggcacaggaacctctgctgcaacccctgagtctccgtgttgggatgctaggcgagaaactcgaggccgccatccaacggtcattacactaccttaaattgtcagaccctaagtacctacgcgagtttcaactcacactccagcccggattctggaaactgcctcacgcgtggatccatacagacgctagcctcgtctacccaacttttggcccccaagactcattctctgaggaacgtagcgacgtgtgtctggtacagttgctgggaactggcaccgattcaagtgagccttgcggactcagtgacctctgcaggagccttatgactaaaccaggctgtagcggctactgcctgtcacaccagctcctgtttttcctgtgggcccgcatgaggggctgcacccagggtcccctgcagcagagtcaagactatatcaatctgttttgcgccaatatgatggatctcaatcggagagccgaagccatcggctatgcctaccctactcgggatatctttatggagaatatcatgttttgcgggatggggggatttagcgatttttataaattaaggtggttagaggctattctatcttggcagaagcagcaggagggttgcttcggcgagcccgatgcggaagacgaagaactgtctaaagccattcagtatcagcaacatttcagcagaagagtgaagcgacgggagaagcagttcccagattcgagatctgtggcccaggctggcgtacagtggaggaatctaggctcattgcagcctttacctccaggatttaaacaattctcatgtctgatcctgcctagctcatgggactaccggtcagttccgccctacttggcaaacttctatatatttttagtcgaaaccggcttccatcacgtcgcacatgccggcctcgaactgttgatctctcgggatccaccaacctctggctcgcagtcggtgggcctttag

SEQ ID NO: 6493 - DNA, 1680 bp, synthetic construct
  misc_feature 1..1680: note = source = /note="Description of Artificial Sequence: Synthetic coding sequence"
  source 1..1680: mol_type = other DNA
atgtggacaaacttttttaaattaaggctattctgttgtcttctggctgtcctgatggtggtggtcctggtaatcaatgttactcaggtggaatatctggaccatgagacagtgagcgccacattcatcgactcaagtggccagttcgtctccagtcaagtcaccggtatctcacgaaatccatattgcggctacgaccagcagaccctttcgagccaggagaggatggaggaggactcactgctggccgctttgcatcgacaagttcctgacgtgggccccgtgccctttgtgaagagcactgaccccagtagttcctactttgtcatcctcaacagcgctgcattctttaaggtcgggagtcagctagaagtgttggtgcacgtgcaggactttcaacggaaaccgaaaaaatacggaggtgattacctgcaagcaagaattcactccctcaaactccaagcgggggccgtgggccgggtagtagactatcaaaacggattttataaggtattttttacactgctgtggccaggcaaagtcaaggtctccgtcagcctggtgcatccttcggaggggatcagggtgctgcagcggctacaggaggataagccggaccgggtctactttaagagcttatttcggtccggccggatctcagagaccactgagtgcaatgtgtgtcttcctggaaacctgcctctgtgtaactttacggacctttacaccggtgagccctggttttgttttaagccgaagaagctgccatgctccagtcgaattacacactttaaaggtgggtaccttaaaggactcttgaccgccgccgagtccgctttcttccagtctggggtgaatattaagatgcctgtgaactcttctggcccagactgggttaccgtaattccacgccgcattaaggagacgaattccctcgagctgtctcaaggctctggaacatttccgagtggttattactataaggaccagtggcgtccgagaaagttcaaaatgcggcagtttaatgacccagacaatatcacagaatgcctgcagcgtaaagttgtgcatctcttcggggatagcaccatcaggcagtggttcgaatacttgaccactttcgtccccgaccttgtggagttcaatctcggtagtcctaagaacgtgggaccctttctcgccgttgaccagaagcacaacattctgctcaagtatcggtgtcatggaccccctattcgattcacaaccgtattttctaacgagttgcactacgttgccaacgaactgaatggaatcgtgggtgggaagaatactgtcgtggctattgccgtgtggtcgcacttctcaacattcccactggaagtgtatattagacgcctgcggaacatcagacgggccgtggtccgcctgttagaccgtagtccaaaaacggtggttgtgattcggacagcgaatgctcaggaactgggccctgaggtgagtctgttcaactccgactggtacaactttcagttggacacgatcctccgtcgtatgttttctggagtcggcgtgtatctggtggacgcatgggaaatgaccctagctcactacctgcctcataaactgcatccggacgaagtgattgtaaaaaatcaactcgacatgtttttatcatttgtttgccctcttgagacatag

SEQ ID NO: 6494 - DNA, 402 bp, synthetic construct
  misc_feature 1..402: note = source = /note="Description of Artificial Sequence: Synthetic coding sequence"
  source 1..402: mol_type = other DNA
atggccatggtgtccgctatgtcttgggtcctttacttatggataagtgcatgcgccatgctactttgccacggctcgctccagcatacattccagcagcatcacctccatagaccagaggggggcacctgcgaagtcatagccgcacatcggtgctgtaataaaaaccgaatcgaggagcgcagtcagacagtgaaatgcagttgcctacccggaaaggtggctggaacgacaagaaacaggccttcctgtgtcgacgcatctattgtgatcggcaaatggtggtgtgaaatggaaccatgcttagaaggcgaagagtgcaagacgctgcctgataattcgggatggatgtgtgcaaccggcaacaagatcaaaaccacaagaattcaccctagaacttag

SEQ ID NO: 6495 - DNA, 606 bp, synthetic construct
  misc_feature 1..606: note = source = /note="Description of Artificial Sequence: Synthetic coding sequence"
  source 1..606: mol_type = other DNA
atgaaagtgcatatgctggtcggagtgctagtgatggtgggattcaccgtggggaaggtgccggttccagatatccgaacctgtcacttttgtcttgtagaggaccctagcgtagggtgtatcagcggctccgaaaagtgcacaattagtagtagttcactgtgtatggtgataaccatctactacgatgttaaagtgcgcttcattgtgcgcggctgtggacaatatatctcatatcggtgccaggagaaaagaaacacttactttgcggaatactggtaccaggcacagtgttgtcagtatgactactgtaattcatggtctagcccacaacttcaaagctccttacctgaaccccatgatcggccgctggcactgcccctgtccgactcccaaatccaatggttttatcaggccctaaatctatctctcccactgcccaatttccacgccggcacagaacccgatggactcgacccaatggtaaccctcagtctgaacctcggcctgtcctttgcggagttgcggcgtatgtatctcttcctgaactcttccggacttcttgtgctgcctcaggccgggctcttgacccctcatccctcctag

SEQ ID NO: 6496 - DNA, 606 bp, synthetic construct
  misc_feature 1..606: note = source = /note="Description of Artificial Sequence: Synthetic coding sequence"
  source 1..606: mol_type = other DNA
atgaaggtccatatgctcgtaggtgtcctcgtaatggtggggttcactgttggaaaagtgcccgtgcccgacatcagaacctgccacttctgcctggtggaggatccaagtgtgggatgtatctcaggttcagagaagtgcacaatctcaagcagcagtctgtgcatggttataactatatactatgatgtaaaagtgcgattcatcgtccgcgggtgtggccaatacatcagttataggtgtcaggaaaaacgcaatacctattttgcagagtattggtatcaagcacagtgttgccagtacgactactgcaacagctggtcctccccccagctacaatcgtcacttccagaaccccacgatagaccactggctttaccgctatcagacagtcaaattcagtggttttatcaggccctcaacttgagcctgccccttcccaatttccacgcagggactgagccagatggcctcgacccgatggttacgcttagtttgaatcttggtctgtcttttgctgagctgcgccggatgtatttatttctgaattcttccggcttactggttcttccccaagctggactcctcacgcctcacccttcttag

SEQ ID NO: 6497 - DNA, 732 bp, synthetic construct
  misc_feature 1..732: note = source = /note="Description of Artificial Sequence: Synthetic coding sequence"
  source 1..732: mol_type = other DNA
atgggcccggaggcactgtcgagtttgttgctgttgcttctcgtggcctcgggggatgcagatatgaaaggacacttcgaccctgcaaaatgccgctacgccctggggatgcaggacaggaccatacctgactctgacataagtgcctctagttcctggtctgacagcactgcagcacgtcactccagactcgagtcgagtgatggagacggggcatggtgtccagccggttctgtgtttcctaaggaagaggagtatctgcaggtggacctgcaaaggctgcacctggtggcccttgttggcacacaaggccgccatgccggcggtcttggaaaagagttcagccggagttatagactgagatacagcagagacggcaggcggtggatgggatggaaggacaggtggggtcaggaggttattagcggcaacgaagaccctgagggtgtggtacttaaggacctggggccacctatggtggcccgccttgttcgattttaccctcgcgccgaccgcgtgatgtctgtgtgcctgagagtggaattgtatggctgtctttggagagactgttcgatgggcgtatgggccagctggcagatggtgtggtggggatggatgacgctcggccgggtgcgctcctgtgggagtgggcaggcaatgacgatgtgggatggtgcaacaacggcctcacccgtcgcgatgtggcgctggagtctctccttgactggatag

SEQ ID NO: 6498 - DNA, 258 bp, synthetic construct
  misc_feature 1..258: note = source = /note="Description of Artificial Sequence: Synthetic coding sequence"
  source 1..258: mol_type = other DNA
atgaaaatacctgtgttaccagcagtggttctgctttccctcctcgtgctgcacagtgcccaaggagcaaccctggggggcccggaagaagaatccacgatcgagaactatgcctcccggcctgaggcttttaaagctgacgagttcttaaactggcacgctttgtttgagagcatcaaaaggaagctcccgtttcttaactgggacgcctttcctaagttgaagggccttaggagtgccactccagacgctcagtag

SEQ ID NO: 6499 - DNA, 348 bp, synthetic construct
  misc_feature 1..348: note = source = /note="Description of Artificial Sequence: Synthetic coding sequence"
  source 1..348: mol_type = other DNA
atggggcgggtgttcctgaccggtgagaaggccaatagtatcttgaagagatatccaagagctaatgggttcttcgaagagatcaggcaagggaacattgaaagggagtgtaaggaggaattttgcacgttcgaggaggctcgagaggcattcgaaaataacgagaaaaccaaggaattctggtccacctatactaaggcacagcagggcgaaagcaatcggggcagcgattggttccagttctatttgaccttccccctgatcttcggactgtttattatcctgttggtgatctttctgatctggcgctgcttcctgcgcaataaaacccgacgacagacggtttag

SEQ ID NO: 6500 - DNA, 606 bp, synthetic construct
  misc_feature 1..606: note = source = /note="Description of Artificial Sequence: Synthetic coding sequence"
  source 1..606: mol_type = other DNA
atgaaagtgcacatgttagtgggggtactcgtgatggtcgggttcactgtgggcaaagtgccggtccctgacataaggacttgtcacttttgcctggttgaggatccatccgtgggctgcatcagcggctcagaaaaatgtactatttcatcgagcagcctgtgcatggtgattactatctactacgacgtgaaggtgcggtttatcgttcgagggtgcggacagtacatctcctaccgatgtcaagaaaagcggaatacctatttcgccgaatattggtatcaggctcagtgttgtcagtatgactattgtaacagctggagttccccgcaattacagtcttcactccccgaaccccacgaccgtccactggctttaccattatccgattcccaaattcagtggttttatcaggccctcaaccttagtttgcctctgcccaacttccatgccggcacagaaccagacgggcttgatcccatggtgactctttcactgaatctcgggctctcttttgccgagttgcgcaggatgtatctttttttgaattcttctggcctgctggtcttgcctcaagcaggcctactgacaccccatccctcctag

SEQ ID NO: 6501 - DNA, 1311 bp, synthetic construct
  misc_feature 1..1311: note = source = /note="Description of Artificial Sequence: Synthetic coding sequence"
  source 1..1311: mol_type = other DNA
atgcagggtacgcctggcggcggcacaagacccggaccgagcccagtggacaggcggacactcctggttttctcctttatcctcgccgcagctctggggcagatgaacttcaccggagatcaagtcctgcgggttttagctaaagatgagaaacagttatctctcctcggcgatctcgaaggccttaaacctcagaaggttgacttctggcggggccctgctcgtccctctttacctgtggatatgcgtgtgccattctcagagcttaaggatatcaaagcatatttggaatctcatggactggcttatagcatcatgattaaagacatccaagtcctgctcgacgaggagcgtcaagcaatggctaagtcaaggcgactcgagcgatctacaaattctttctcttacagtagttatcatacactggaagagatttactcctggattgacaactttgtgatggaacattctgatattgtcagcaaaattcagataggtaacagctttgagaaccagtcaattctggtgctgaaattctctaccgggggctcccgtcatcctgccatctggatcgatacagggatccactcaagagaatggatcacccacgctaccgggatttggactgctaataaaatcgtctctgattacggcaaggatagagtcctcactgacatcctgaacgcaatggatatcttcatcgaactggtaacaaatcccgacggatttgctttcacccactccatgaacagactctggaggaagaacaaatccatccgtccggggattttttgcataggagtggacttgaacagaaactggaagtccggcttcggaggcaacgggagtaactcaaacccatgcagcgagacctatcacggcccaagcccccagtccgagcctgaggttgccgcaattgttaacttcattacagctcatggcaacttcaaagccctgattagcatccactcctattcgcaaatgttgatgtatccgtatgggagactgctcgagcctgttagcaatcagagggaactgtacgacctggccaaagacgccgtggaggcgctgtataaagtgcacggaattgaatatatcttcggctctatttcaactacgttgtatgtggcaagcggaataacagtcgattgggcttatgattccgggataaagtatgcattctctttcgaacttagggacaccggtcagtacggatttctgcttcctgccacccagattatacccaccgcccaggaaacatggatggctctccggactataatggaacacacactcaatcatccgtactag

SEQ ID NO: 6502 - DNA, 606 bp, synthetic construct
  misc_feature 1..606: note = source = /note="Description of Artificial Sequence: Synthetic coding sequence"
  source 1..606: mol_type = other DNA
atgggcgcaacaacaatggaccagaagtcactctgggcaggcgtcgtggttctccttttactacagggcggctccgcctataaactggtctgttattttactaattggagtcaggacagacaggaacccggaaagtttacccccgagaatatcgacccctttctgtgtagtcatcttatctattcgttcgcttctatagaaaacaacaaggtgataatcaaagacaagtccgaggtgatgttatatcagactataaatagccttaaaactaagaatccgaagctcaagatccttctttctatcggcggatatctgttcggcagcaaaggatttcatcctatggtcgactcctccacctcaaggctggagtttatcaacagtatcatcctctttctgcgcaatcacaactttgatgggttggatgtctcttggatctaccccgatcagaaagaaaacactcactttaccgtactgatccacgaacttgctgaggcctttcagaaagacttcaccaagtctactaaagaacgtctgctgttaactgccggggtgtctgctggccggcaaatgatagataactcataccaggtagagaaactcgcctag

SEQ ID NO: 6503 - DNA, 75 bp, synthetic construct
  misc_feature 1..75: note = source = /note="Description of Artificial Sequence: Synthetic coding sequence"
  source 1..75: mol_type = other DNA
atgcttgttgatggcccgagcgaacgtccagcattgtgtttcctactcttggccgtagccatgtcattcttctag

SEQ ID NO: 6504 - DNA, 252 bp, synthetic construct
  misc_feature 1..252: note = source = /note="Description of Artificial Sequence: Synthetic coding sequence"
  source 1..252: mol_type = other DNA
atgcggccccgcgggcttccccctttgctagtagtcctgctgggatgctgggcaagtgtgagtgctcagactgacgcaaccccggcagtgaccaccgaagggctgaactccactgaggccgcactggccacatttggaacattcccttccacgcggcccccgggtacaccccgggctcccggaccatcttctggccccaggccaacccccgtgactgacgggagccattctgtgacccaggctggtgtatag

SEQ ID NO: 6505 - DNA, 1254 bp, synthetic construct
  misc_feature 1..1254: note = source = /note="Description of Artificial Sequence: Synthetic coding sequence"
  source 1..1254: mol_type = other DNA
atgcttgcgcttctcgttctcgtcaccgtcgcattagccagcgctcaccatgggggggaacatttcgagggggaaaaagtattccgtgtcaatgtggaggatgagaaccatattaacatcattcgtgaactcgcatccactactcagatagacttctggaagcccgactccgtgacacaaatcaaaccgcactccaccgtcgacttcagggtgaaagccgaggatacagtgaccgtcgagaacgtgctgaagcagaacgaactccagtataaggtactgatctccaacttacgtaacgttgtcgaggcccagttcgatagcagggttcgtgcaactgggcatagctatgaaaagtataataagtgggagacaatcgaggcatggacccagcaggtagctactgagaacccagcactgatttcccggtcagtgatcggcacgacattcgagggaagggctatatatctattaaaagtgggcaaggctggtcagaataaacccgcaatttttatggattgcgggtttcatgccagggagtggatctcccctgccttttgccaatggttcgtgcgagaggccgtgcgaacatatgggagggagatacaagtcaccgaacttcttgataaactggacttttacgttttacctgtgctgaacatcgacggctacatctacacttggacaaagagtaggttttggagaaaaacgcgctccacccatacagggagttcctgcattggcaccgatccgaataggaacttcgacgccggatggtgcgagataggagctagcaggaatccctgcgacgagacgtactgcggtccggccgcagagagtgaaaaggagaccaaagcactcgcagacttcatcaggaataaactatcaagtataaaagcatatcttacgatacatagttatagtcaaatgatgatatacccatattcttacgcctataaacttggcgaaaacaatgcagagctgaacgccctggccaaggccactgtgaaggagctggctagcctccacggcacaaaatacacttacggtccaggagcaacaacaatttacccagcagctggaggtagcgatgactgggcttatgaccagggtatccgctattcatttacctttgagctgcgagacaccggtcgatatggcttcctactgcctgaatctcagatcagagccacctgtgaggaaacttttttggcaatcaagtacgtagccagctacgtgctcgagcatctctattag

SEQ ID NO: 6506 - DNA, 1680 bp, synthetic construct
  misc_feature 1..1680: note = source = /note="Description of Artificial Sequence: Synthetic coding sequence"
  source 1..1680: mol_type = other DNA
atgtggaccaatttttttaagctgaggctcttctgctgcttgctcgccgtgttgatggtggtggtgctggtgatcaatgttacccaggtggagtatttggatcacgagaccgtcagcgccaccttcattgattcctccggtcagtttgtgagcagtcaggtcaccgggatcagcaggaacccgtactgtggctacgaccagcagaccttatctagtcaggagcgcatggaggaggattctttgctggcagccctccacaggcaagtccctgacgtgggccccgtgccatttgttaagtctaccgaccctagcagcagttacttcgtcatactgaactcagctgctttttttaaggtgggcagtcagctagaggtgctggtgcatgtgcaggactttcagcggaaaccaaagaagtatgggggagactacctgcaggccaggatccacagcctcaagcttcaggcaggcgctgtgggccgagtggtcgattatcagaatggcttctataaggttttcttcacccttctgtggcccggcaaagtcaaagtgtctgtgtccctcgtgcaccccagcgaaggtataagagtactccagaggctccaagaggataaacccgatagagtttactttaagtcattgtttcgatcagggcgtatcagcgaaactaccgagtgcaacgtgtgcttgcctggaaacttaccactttgtaatttcaccgatctgtacaccggagaaccttggttctgctttaagcctaaaaagctcccctgtagctcccgtatcacacattttaaaggcgggtacctgaaaggcctgctgacagccgcggagagcgcattcttccagtctggagttaatatcaagatgcccgtcaattcttccgggcctgactgggtgaccgtgatacctaggcggattaaggagactaactccctggagctctctcaggggagcgggacctttcctagcgggtactattacaaggaccagtggcgccctaggaagttcaagatgcggcagttcaacgacccagataacattacagaatgtctccagagaaaagtcgtgcatcttttcggcgacagcactatacgtcaatggttcgagtacctgactacgttcgtgccagacctcgtcgagtttaacttgggatccccaaaaaatgtgggaccattcctggccgtggatcagaagcacaacatcctgctaaaatacaggtgccacggaccacccattcgtttcacgaccgtgttttccaatgaactgcattacgtcgccaacgagctaaacggaatcgtaggtgggaaaaacacggttgtggcaatcgcagtttggtcacacttttccacattccccctggaagtgtatatccgtcgcttgaggaacattcggagagccgtggttcgactcctggatcggagccccaagaccgtcgttgtgattcggaccgcaaacgcacaggaacttggccccgaggtcagcctctttaatagcgattggtacaattttcaactggataccatcttacggcggatgttttcgggcgtgggcgtgtacttagtggacgcttgggagatgacattagcccattacttgccacataagctgcacccggatgaggtgatcgtcaaaaaccaattagatatgttcctgtcgtttgtctgccctctagaaacctag

SEQ ID NO: 6507 - DNA, 99 bp, synthetic construct
  misc_feature 1..99: note = source = /note="Description of Artificial Sequence: Synthetic coding sequence"
  source 1..99: mol_type = other DNA
atgcagggcacccccggcggaggcacaagaccaggtccttccccagtagaccggcggaccctgttggtattctcctttatcctggccgcggcgctgtag

SEQ ID NO: 6508 - DNA, 180 bp, synthetic construct
  misc_feature 1..180: note = source = /note="Description of Artificial Sequence: Synthetic coding sequence"
  source 1..180: mol_type = other DNA
atgctggccctcctcgtgctggtgaccgttgccctcgccagcgctcaccacggtggcgagcacttcgagggagagaaagtattccgggtgaacgtagaggacgagaatcacatcaatataatccgtgagctggcttcaaccacccagattgatttctggaagcctgacagtgtcacgtag

SEQ ID NO: 6509 - DNA, 303 bp, synthetic construct
  misc_feature 1..303: note = source = /note="Description of Artificial Sequence: Synthetic coding sequence"
  source 1..303: mol_type = other DNA
atgcggccacgcggtttacccccccttctggtcgtactgctgggttgctgggcctctgtgagtgctcagacagacgcgaccccagccgtgactacagaaggactgaacagcaccgaggcagcactggccaccttcggcacatttccttcgacaaggcctcctggcacaccgagggcaccaggtcctagcagcggcccgcggcctacacccgttactgacggggggtaccatgtacctgcgccgggcgtgcatagcgaccctacaagtcgcggccagccaagatgttgttctctatgtctgtag

SEQ ID NO: 6510 - DNA, 234 bp, synthetic construct
  misc_feature 1..234: note = source = /note="Description of Artificial Sequence: Synthetic coding sequence"
  source 1..234: mol_type = other DNA
atgcgctcccctcgcatgagggtgtgcgctaaaagtgtgctacttagccactggctatttttggcttacgttctgatggtttgttgcaagctgatgtccgcttcctcacagcatctcagggggcatgcaggtcaccaccagataaaacaggggacatgtgaagtcgtcgccgtgcatcggtgctgtaataagaaccgtatcgaagaaaggagtcagaccgtaaagtgttcttag

SEQ ID NO: 6511 - DNA, 12 bp, synthetic construct
  misc_feature 1..12: note = source = /note="Description of Artificial Sequence: Synthetic coding sequence"
  source 1..12: mol_type = other DNA
atgtggacctag

SEQ ID NO: 6512 - DNA, 402 bp, synthetic construct
  misc_feature 1..402: note = source = /note="Description of Artificial Sequence: Synthetic coding sequence"
  source 1..402: mol_type = other DNA
atggccatggtctcagctatgagctgggttctgtacctgtggatctctgcatgcgccatgcttctttgccacgggtcgctacagcacacattccagcagcaccacttgcaccggcctgagggcggcacctgtgaggtgattgcagcccaccgatgctgtaataagaataggattgaagagagatctcagacggttaagtgttcatgtttgccaggcaaagtcgccggaacaaccagaaacaggcctagttgtgtcgatgcctctatagtgattggcaagtggtggtgcgagatggaaccgtgtctagaaggggaggaatgcaaaaccctgccggataactccggctggatgtgcgctaccggcaataagattaaaacaaccaggattcacccaaggacctag

SEQ ID NO: 6513 - DNA, 600 bp, synthetic construct
  misc_feature 1..600: note = source = /note="Description of Artificial Sequence: Synthetic coding sequence"
  source 1..600: mol_type = other DNA
atgacaatgaggcataattggaccccagatctcagtcccttgtgggttctcctgctctgcgctcacgtggtcactttgctggtgcgcgctacccctgtttcacagaccactacagccgctactgcctctgtccggtcaacaaaagatccttgtccctcacagccgcctgtgttccctgctgccaagcagtgccccgctctagaagtaacctggcccgaagttgaggtgccactgaacgggacgctatcactgtcatgtgtagcttgctcccgattcccaaacttttcgattctatactggttaggaaatggctccttcatagaacatctgccaggtagactatgggaaggcagcaccagcagggaacgggggtctaccggaacacagctttgtaaggctttggtgctcgagcagttgaccccggcactgcacagtacgaactttagctgcgtgcttgtggacccagaacaggttgttcagcggcatgttgtgctggcccagctgtgggtccgctccccacgtcgtggcctgcaagagcaggaggagctgtgtttccacatgtggggcggcaaaggtggcctgtgtcagtcatctctgtag

SEQ ID NO: 6514 - DNA, 1044 bp, synthetic construct
  misc_feature 1..1044: note = source = /note="Description of Artificial Sequence: Synthetic coding sequence"
  source 1..1044: mol_type = other DNA
atgggtgtggtgcaatacggtgacaatccggcaactcatttcaacttaaaaacccacactaattctcgagacctgaagacggctatcgagaagatcacccagcgcggaggactgagcaacgtgggccgcgccatttcctttgttacgaaaaacttcttcagtaaggcaaatggaaaccgatctggagcacctaacgtagtcgtggtgatggtggatggttggcctacagacaaggtcgaagaggcctctaggttggcccgggagtctggaattaatattttcttcatcaccatcgaaggggctgcagagaatgagaaacaatacgtggttgagcccaattttgccaacaaagcagtgtgtcggacgaatggattctactccctgcatgtccagagttggttcggactgcataagaccctccagccattggtcaaaagggtatgcgataccgatcgcctagcttgcagcaaaacatgtctcaacagcgcagatataggcttcgtgatcgacggctccagtagcgtcgggactggcaatttcagaacagtgttgcaatttgttacgaatctgaccaaagaatttgagatttctgatacggatactcgaatcggggctgtgcaatacacgtacgaacagcgtctcgaattcggttttgataagtattcctccaaaccggatatcctgaacgccataaagcgcgttggctattggtccgggggcacttccaccggagcagctattaattttgcgttagaacaactgttcaagaagtccaaacccaacaagcggaagctgatgatcttaatcaccgacggaaggagctatgatgacgtgagaatcccagctatggccgctcatctgaaaggtgtgattacgtatgcaattggggtcgcttgggcagctcaggaggaactcgaagtaatcgccacccatccagcaagagatcacagctttttcgtagatgagttcgacaaccttcaccaatatgttccaaggattatccaaaacatttgcactgagtttaactcacagcctcggaactag

SEQ ID NO: 6515 - DNA, 27 bp, synthetic construct
  misc_feature 1..27: note = source = /note="Description of Artificial Sequence: Synthetic coding sequence"
  source 1..27: mol_type = other DNA
atgcagggcacgcccgggggtggctag

SEQ ID NO: 6516 - DNA, 369 bp, synthetic construct
  misc_feature 1..369: note = source = /note="Description of Artificial Sequence: Synthetic coding sequence"
  source 1..369: mol_type = other DNA
atgttgtatcagaccatcaactccctgaaaaccaaaaatcccaaactcaaaattctgctgtccattgggggttatctgtttgggagtaaaggcttccacccaatggtcgacagcagcacgtcgagactcgagtttattaattccattattctgttcttacggaatcataattttgacgggttagacgtgtcatggatttatccggatcagaaggagaacacccacttcaccgttttaatccacgagctggctgaagcttttcaaaaggactttaccaagtctacaaaggagcgattgttgctcaccgcgggtgtctcagctggacggcaaatgatagataatagctaccaggttgagaagctggcatag

SEQ ID NO: 6517 - DNA, 309 bp, synthetic construct
  misc_feature 1..309: note = source = /note="Description of Artificial Sequence: Synthetic coding sequence"
  source 1..309: mol_type = other DNA
atgagagtgagcggtgtcctgcgcctgttggcccttatctttgccatcgtcacaacctggatgttcattaggagctatatgtcattctctatgaagactatacgtctgcctagatggctggctgcttcacctactaaagaaatccaagtgaaaaagtacaaatgcggcctgataaaaccctgccctgccaattattttgccttcaaaatctgttcaggggctgccaacgttgtcggaccaactatgtgcttcgaagatagaatgataatgtccccagtaaagaataacgtggggcgcgggctgaactag

SEQ ID NO: 6518 - DNA, 660 bp, synthetic construct
  misc_feature 1..660: note = source = /note="Description of Artificial Sequence: Synthetic coding sequence"
  source 1..660: mol_type = other DNA
atgaaactgctcctgtgggcctgcatcgtctgcgtggcgttcgctagaaagcgccgttttcccttcatcggtgaggatgacaatgatgacggccacccgttgcatccatccctcaatattccatacggaataagaaacctcccccctccgctgtattacagaccagtgaatactgtcccctcctatccaggcaacacgtatacagatacaggtttgccgtcctatccatggatattaactagtccaggatttccttacgtgtatcacatcagaggatttcctctggccacccaattaaatgttccaccccttccaccccgcggatttccattcgttccaccatctaggttcttcagtgctgcagccgctcccgccgctccccccatagctgcagaacctgccgcagccgcgcctcttaccgctacaccggtcgctgcagagccagctgccggggcaccagtggccgctgaaccagcagctgaggccccagtgggagccgagccagcagccgaggctccagtggctgctgaacctgccgctgaagcccccgttggtgtcgaacctgccgctgaggagccttccccggcagaaccggccacggcgaaacccgcagcccccgagccccatccatctccctccctggaacaagccaaccagtag

SEQ ID NO: 6519 - DNA, 1869 bp, synthetic construct
  misc_feature 1..1869: note = source = /note="Description of Artificial Sequence: Synthetic coding sequence"
  source 1..1869: mol_type = other DNA
atggggaagtctgagggcccagttggaatggtggaaagtgcgggtagagcaggccagaaaagacctggctttctggaaggagggctgttactgctgctgctgctcgttactgctgccctggtcgccctgggggtgctgtacgccgatagaagaggaaaacagttgccacgcctggcctcacgcctgtgcttcctacaggaagagcgtacgtttgtcaagagaaaacctcgaggaatacccgaagcccaagaggtgagcgaggtgtgcactactcctgggtgtgtgatcgcggcagcccggatcttgcagaacatggacccaaccacggaaccctgtgacgatttttatcagttcgcctgcggtggctggttacggcgacacgtcataccagagacaaattcccggtattcgattttcgacgttttgcgggatgagctggaagtgatcctgaaggccgtgctcgagaattccaccgccaaggcaaccgtgccccaggaagagcggcacgatgtaatcgccttgtatcatagaatgggcctggaggaactgcagtctcagttcggactgaagggcttcaactggacacttttcatccagaccgttttgagctccgttaagatcaaactgctgccagatgaggaagtcgtagtctatgggattccctatctgcagaacctagagaacatcatcgacacttactcagctcgcacaatccaaaattaccttgtgtggcggctcgtgctcgaccggatcgggtctttgtcacagcgtttcaaggacactagagtcaactacaggaaggccctcttcggaactatggtggaagaagttcgctggagagagtgcgtcggctatgtgaacagcaacatggaaaacgcagtgggctctttatatgtcagagaagcttttccgggggattcaaagtctatggtgcgagagctaattgacaaggtgcgtacagtgtttgtggagaccttggacgagctgggatggatggacgaggagtccaagaaaaaggctcaggaaaaagccatgagtatcagagagcagatcgggcaccccgattatattctggaagagatgaatcgcagacttgatgaagaatacagtaatctcaacttctcggaggatttatattttgagaacagtttgcagaatctcaaagtgggagcccagagatcccttcggaagctacgggaaaaggtcgatccaaacctgtggattattggcgcggccgtcgtgaatgcgttttattcacccaatcggaaccagatcgtatttcctgcaggaatcttacagcctccttttttctcaaaagagcagccccaggcgttgaattttggaggcatcggcatggtcatcggacacgagataacacatggcttcgatgacaacggacgcaacttcgacaaaaacggaaatatgatggactggtggagtaatttcagtacacagcatttcagggaacagtctgagtgtatgatttaccagtatgggaactattcatgggatctcgccgatgaacagaatgtgaatgggttcaataccctgggggagaatattgccgacaatggaggcgtgcggcaagcatataaagcgtatctcaagtggatggccgaaggtgggaaagatcagcagttgcccggactcgacctgacacatgagcagctattttttatcaactatgcccaggtgtggtgtggctcctaccgaccagaattcgcgatccagtccatcaaaacggatgtgcattccccactcaagtatagggtgctgggcagtctgcaaaaccttgcagcctttgccgacaccttccactgtgcccgcggaacaccgatgcatccaaaagaacgctgtcgcgtctggtag

SEQ ID NO: 6520 - DNA, 168 bp, synthetic construct
  misc_feature 1..168: note = source = /note="Description of Artificial Sequence: Synthetic coding sequence"
  source 1..168: mol_type = other DNA
atggggccagaggctctgagctctctgttgctgctgctgctcgtggcaagtggagatgcggacatgaaaggccacttcgatccagctaagtgtagatacgctttgggcatgcaggacaggaccatccctgattcagacataagcgctagtagcagctggtccgattag

SEQ ID NO: 6521 - DNA, 156 bp, synthetic construct
  misc_feature 1..156: note = source = /note="Description of Artificial Sequence: Synthetic coding sequence"
  source 1..156: mol_type = other DNA
atgggacctgaagcactctcttcgcttctgcttctcctcctggtggcatctggcgacgccgacatgaagggtcatttcgatcctgcaaagtgcagatatgcactaggaatgcaagaccggactattcctgatagtgatatttccgcgtctagctag

SEQ ID NO: 6522 - DNA, 1620 bp, synthetic construct
  misc_feature 1..1620: note = source = /note="Description of Artificial Sequence: Synthetic coding sequence"
  source 1..1620: mol_type = other DNA
atgagtgagccccaggaaaagaagttgtcagagaatacggactttctcgcccccggtgttagtagctttactgacagcaaccaacaggagtccatcactaaaagagaggaaaatcaggagcagccacggaactatagccaccatcaactaaacagatctagcaagcactctcagggccttagagatcagggtaatcaggaacaagacccaaatataagcaatggtgaagaagaagaggagaaagagcctggagaggtcggtacacataatgataatcaggagcgaaaaacagaattacccagagagcatgccaactcaaagcaggaagaggataatactcagtccgacgacatcttagaggaaagcgaccagcctacacaggtatcaaaaatgcaggaggacgagtttgaccagggcaatcaggagcaggaagacaactccaacgctgaaatggaggaggagaatgcttcaaacgtgaacaagcacatccaagagaccgaatggcagagccaggaaggcaaaactggccttgaggcgattagcaaccacaaggagactgaggaaaaaacagtaagcgaggcccttctaatggaaccgactgatgatggaaataccacccctcggaaccacggggttgatgatgacggggacgatgacggagatgatggcggcacggatggcccgcgccattctgcctcggatgattattttatcccatcacaagctttcttagaagccgagagggcccaatccatagcttaccacctgaaaatcgaggaacagagggagaaggtgcatgaaaatgagaacattgggacaacggagccgggcgagcaccaggaggcaaaaaaggcagagaatagctcaaatgaagaagaaacctcttcggagggcaacatgagagtccatgctgtagacagctgcatgagctttcagtgcaagcggggccatatttgcaaggcagaccagcagggaaagccccactgcgtctgccaggacccagtcacatgtccacccaccaaacctttagatcaggtgtgcggaacagacaatcaaacttatgcttcctcttgccatctcttcgcaacgaaatgccgacttgagggaaccaagaaggggcaccaactgcagctagactatttcggagcgtgcaaaagcattcctacttgcactgactttgaagtgatccagttcccactgcgaatgagagattggctaaagaacatacttatgcagctgtacgaggcaaattctgagcacgccggatacctcaacgaaaagcagaggaataaggttaaaaaaatctatctggacgagaagagactactggcgggagaccaccccattgacctcttgctccgggactttaagaagaattaccatatgtatgtttatcctgttcattggcaattctcagaattagaccagcaccccatggatcgagtgttgacccattcggagctggcaccgttgagggctagcctggtaccgatggagcactgtattaccagattcttcgaggagtgcgatccaaacaaagataagcacataaccctgaaggaatgggggcattgtttcggaattaaggaggaggatatagatgaaaatttgctgttttag

SEQ ID NO: 6523 - DNA, 591 bp, synthetic construct
  misc_feature 1..591: note = source = /note="Description of Artificial Sequence: Synthetic coding sequence"
  source 1..591: mol_type = other DNA
atgcctcatttagcctcactcttcacggcatcttctcgttgttgtccccacccacttcgacccgagggtagcggcgcgatgggcccagaagcactgtctagcctgttgctgttgttgctggttgccagcggggacgccgacatgaagggacactttgaccctgccaagtgccggtacgccctcgggatgcaggacaggaccattcccgactctgacattagcgcgtcctcgtcctggagcgattctaccgccgcgcggcattctcggctcgagtcaagtgatggggacggcgcttggtgcccagctggcagtgtatttcctaaggaggaggagtatctgcaggtcgatctacagagactgcatctggttgccctggtcggtacacagggaagacacgccggcggtctgggcaaggaattcagtcgatcctaccgcttgaggtacagcagagatgggaggagatggatgggctggaaggacagatggggccaagaggtgatttcagggaacgaggacccagaaggcgttgtccttaaggacctggggcccccaatggtggcccggctggttcgcttctatccccgcgcctag

SEQ ID NO: 6524 - DNA, 162 bp, synthetic construct
  misc_feature 1..162: note = source = /note="Description of Artificial Sequence: Synthetic coding sequence"
  source 1..162: mol_type = other DNA
atgctcccttgtctggcactgctgctcctgatggaattgtccgtctgcacagtggcgggagatgggggggaggaacagacactgtctactgaggccgagacatgggttatcgtggctctcgaagtgctcctgggaagggggtcagacgaggggagaggttag

SEQ ID NO: 6525 - DNA, 126 bp, synthetic construct
  misc_feature 1..126: note = source = /note="Description of Artificial Sequence: Synthetic coding sequence"
  source 1..126: mol_type = other DNA
atgggtccggaggccctaagttccttgctacttttgctcctggtcgcctccggcgatgcagacatgaaaggccattttgatcccgctaagtgcagatatgcactggggatgcaggaccggacttag

SEQ ID NO: 6526 - DNA, 222 bp, synthetic construct
  misc_feature 1..222: note = source = /note="Description of Artificial Sequence: Synthetic coding sequence"
  source 1..222: mol_type = other DNA
atgggacccgaggctcttagctccctgctgctcctgctcctggtcgcatctggtgacgctgatatgaagggtcacttcgatcctgccaagtgtaggtacgccttgggtatgcaggacaggacaatacctgatagtgatatctctgccagctccagttggtctgattctaccgccgctcgacactcacgtctggaatcctctgacggagacggcgcttggtag

SEQ ID NO: 6527 - DNA, 369 bp, synthetic construct
  misc_feature 1..369: note = source = /note="Description of Artificial Sequence: Synthetic coding sequence"
  source 1..369: mol_type = other DNA
atgggacccgaggccttgtcaagcctgctgctcctgttactggtggcttctggagacgcagatatgaaaggacattttgaccctgccaaatgccggtatgctctgggaatgcaggacaggaccatacctgatagtgacatctcggctagctctagctggtcagattcaacggccgcacggcattccaggctagagtcatcggatggggacggagcttggtgtccggcgggatctgtgttccccaaagaggaggagtacctgcaggtggatctgcagagactacacctcgtggcattagttggcactcaaggaagacatgcgggcggcctggggaaggaattctcaagatcgtatcgcctgagatactag

SEQ ID NO: 6528 - DNA, 483 bp, synthetic construct
  misc_feature 1..483: note = source = /note="Description of Artificial Sequence: Synthetic coding sequence"
  source 1..483: mol_type = other DNA
atgggccccgaagctcttagttccttattattgctgctgttggtcgcctctggggatgccgatatgaaagggcacttcgatcccgctaaatgtcggtacgccctgggaatgcaagatcggactattccagatagcgatatctccgcatcttcaagctggtccgactccacagccgcccgacactctcgtctagagtcctcggatggagatggagcctggtgtcccgccggatcagtatttccaaaagaggaagagtacctacaggtcgacctgcaacggctgcatctcgtcgcattggttgggacacaagggagacacgcggggggcctgggcaaggagttttcgaggtcttataggttgcgctactctagggacgggcggagatggatgggctggaaggatcggtggggtcaggaggttatctcaggcaacgaagatcccgaaggcgttgtcctgaaagacttgggcccccctatggtgtag

SEQ ID NO: 6529 - DNA, 540 bp, synthetic construct
  misc_feature 1..540: note = source = /note="Description of Artificial Sequence: Synthetic coding sequence"
  source 1..540: mol_type = other DNA
atgggaagtagcggactgctgtctttgctggtactgtttgtgcttttagccaatgtgcaggggccagggctcacggattggctgttcccgcgaaggtgccccaaaattcgggaagagtgtgagttccaagagagggatgtgtgcaccaaggatagacagtgtcaggataataagaaatgctgcgtgttcagttgtggaaaaaaatgcctggatctcaagcaagatgtctgcgagatgcccaaagagacaggcccatgcctcgcttatttcctccactggtggtatgacaagaaagacaacacttgtagtatgttcgtctatgggggatgtcaggggaacaacaataacttccagagcaaagctaactgtctcaatacatgcaagaacaaacagccttgtccaaagatcaaagtcgagtgtgaggtggaggaaatcgaccaatgtactaagcccagagattgcccagagaatatgaaatgctgcccttttagccggggaaaaaaatgtttggattttagaaaagcttcattgtcaacttag

SEQ ID NO: 6530 - DNA, 438 bp, synthetic construct
  misc_feature 1..438: note = source = /note="Description of Artificial Sequence: Synthetic coding sequence"
  source 1..438: mol_type = other DNA
atgttgttccgcaaccgctttctcctcctgttagccttggcggcactcttagccttcgtgtccctgtctctgcagttcttccacctcatcccagtcagtacaccgaaaaacgggatgtcttcaaagtcacgcaagcgcattatgccggacccagtcaccgaacccccagttacggaccctgtgtatgaggccctgctgtactgtaacatcccatcagtggcagaacggtctatggaaggccacgccccccaccacttcaaactggtgtcagttcacgtgttcattagacacggggaccgttatcccctatacgttatccctaagaccaaacggccggagatcgactgcaccctcgtggccaatcgtaagccttatcaccccaaactcgaggccttcatctcccacatgtccaaaggcagtggcgcatcatttgaatag

SEQ ID NO: 6531 - DNA, 399 bp, synthetic construct
  misc_feature 1..399: note = source = /note="Description of Artificial Sequence: Synthetic coding sequence"
  source 1..399: mol_type = other DNA
atgggacctgaggccctgtcctccttactgctgttgctgctggtagccagcggtgacgccgatatgaaaggccatttcgacccggccaaatgtcgctacgctctgggcatgcaggaccgaaccatccccgacagcgatatcagtgcttcaagttcttggtccgattccaccgctgcccgccactctagattggaatcttcagatggtgatggtgcatggtgtcccgcgggctcagtgtttccaaaggaggaagagtacctgcaagtggatctgcaaaggctgcacttggtggccctggtggggacacaggggaggcacgcaggtgggcttgggaaggagttctcccgctcttacaggctaaggtactccagggatggccgcagatggatggggtggtag

SEQ ID NO: 6532 - DNA, 306 bp, synthetic construct
  misc_feature 1..306: note = source = /note="Description of Artificial Sequence: Synthetic coding sequence"
  source 1..306: mol_type = other DNA
atgggcccagaagctctaagtagcttattgctgttgcttttagtggccagcggtgacgcggacatgaaggggcacttcgatcccgcaaaatgccgttatgctctgggaatgcaggacaggacaatcccagacagcgacatctcagcttcctcctcttggagtgatagtacagcggcccggcactcacgactcgaatcaagtgatggagatggggcctggtgtccagccggatcagtgttccccaaggaggaagagtacctacaagtggaccttcaaaggctacacttggttgccctggtagggtag

SEQ ID NO: 6533 - DNA, 393 bp, synthetic construct
  misc_feature 1..393: note = source = /note="Description of Artificial Sequence: Synthetic coding sequence"
  source 1..393: mol_type = other DNA
atgttggccccgttattcctgtgttgcttaaggaacctgttcaggaagttaatctccttccagccaccccagctcggcagaactaacatgcattacagcaagttgccgcggacggccattgagactgaattcaagcagaacgtcggacctcctccaaaggacctgacagcagaggtatactttccatctatcaaatctagatctcacctgcctgccgtgttttacaaccaatacttcaagcaccctaagtgtgtgggcgagtacgggccaaagaatggtgccgagagacagattgaagagaggaaagtcctgccaactaccatgatgttctccatgctggccgattgtgtactcaagtctacacccattcctatcctgggggtagctatgtag

SEQ ID NO: 6534 - DNA, 420 bp, synthetic construct
  misc_feature 1..420: note = source = /note="Description of Artificial Sequence: Synthetic coding sequence"
  source 1..420: mol_type = other DNA
atgcccgccattgccgtgctcgctgctgcagccgccgcgtggtgctttctccaggtagagagcaggcatctcgacgctctggcaggtggagccggaccaaaccacgggaacttcctcgataacgaccagtggctgtctactgttagccaatacgatagggacaagtactggaataggtttcgcgacgatgattacttccgaaattggaaccctaataaaccattcgatcaggcactggatccaagcaaagacccctgcctcaaggtcaagtgcagcccacacaaggtctgcgtgactcaggactaccagactgcactctgcgtttcccggaagcatctgttaccgaggcaaaagaaaggaaatgtggctcagaagcactgggtcggcccaagcaacctggtcaaatgcaaaccttgttag

SEQ ID NO: 6535 - DNA, 510 bp, synthetic construct
  misc_feature 1..510: note = source = /note="Description of Artificial Sequence: Synthetic coding sequence"
  source 1..510: mol_type = other DNA
atgcggctgttgattctaacatgtttggtcgctgttgccttagcccgcccgaagctgcccctcagatatccggaacggctgcagaaccctagcgagtctagcgaaccgattcccctcgagtcccgtgaagagtatatgaatggcatgaatcgccagaggaacatccttcgtgaaaagcagaccgatgagataaagaattgtgtggtggcagaacccgaaaaaatggaaagcagcatctcctcgtcttccgaagagcagttttgccggctgaatgaatacaatcagctgcagctgcaggccgcgcacgcccaagagcagatccggaggatgaacgagaatagccacgtccaggtccccttccagcaactgaaccaactggctgcttatccgtatgccgtttggtactatccccagatcatgcagtacgttcccttccctccattttccgatatctcaaatcctacagcacatgaaaattacgagaagaacaacgtgatgcttcagtggtag

SEQ ID NO: 6536 - DNA, 921 bp, synthetic construct
  misc_feature 1..921: note = source = /note="Description of Artificial Sequence: Synthetic coding sequence"
  source 1..921: mol_type = other DNA
atgaaaaaggatgaacctcccttggattttcctgatacgcttgaaggtttcgaatacgcttttaatgaaaaagggcagcttcgtcacataaagaccggggagccctttgtgtttaactaccgggaagatctacaccgatggaaccagaaaaggtacgaggccctcggtgaaattataaccaagtacgtatatgagctcctcgagaaggactgtaacctgaagaaggtgagtattcccgagggatatggcgtaattgtgcttaaccctaatgagaactacattgaagttgaaaaacccaagatacatgttcagtcctcaagtgacagctcggacgaaccagccgagaagcgagagcgaaaagataaggtctcaaaagaaacgaagaagagaagggatttctatgaaaaataccgcaatccacaacgggaaaaggaaatgatgcaactgtatatcagggaaaacggttccccagaggaacacgctatttacgtctgggatcactttattgcgcaggccgccgctgagaacgtgttcttcgtggctcatagttacgggggcctggcatttgtcgaactgatgattcagcgagaggctgatgtaaagaataaagtcacagccgttgccctgaccgacagtgtgcacaatgtctggcatcaagaagccggcaaaactattcgagaatggatgagagagaactgttgcaactgggtgagcagctctgaaccccttgacactagtgtagagagtatgctgccagactgcccacgtgtcagcgctggaacagatagacacgaactgacgtcgtggaaatcgtttccatctatctttaagttttttaccgaagccagtgaagctaaaaccagctctctgaagcctgcagtgactcgccgctcccacagaatcaaacacgaagaactctag

SEQ ID NO: 6537 - DNA, 2862 bp, synthetic construct
  misc_feature 1..2862: note = source = /note="Description of Artificial Sequence: Synthetic coding sequence"
  source 1..2862: mol_type = other DNA
tgacaactctgctggctgccgctcctggcaccactcctacttctgagaccgccgggggtgcagagtgccggtccaatcagagcttttgttgtcccacactcccatatggatgtgggctgggtttacacagttcaggaatctatgcgggcttacgccgccaatgtgtacacctcagtagtagaggaattggccaggggtcaacagagacgcttcattgccgttgagcaggagttctttcgtctgtggtgggatggagttgctagtgaccagcagaaatatcaggtgcgccagttgctggaggaaggccggcttgagtttgtgattggtggccaggtgatgcacgacgaagctgtgacccatctggacgatcagatcctccaactcaccgaggggcacggtttcttgtatgagacattcggcatccgtccacaattttcctggcatgtggaccctttcggcgcatctgccacaacacctactctgttcgccctggcgggctttaatgctcacctcggctcacggatcgattacgatctgaaggccgccatgcaagaagccagaggtctccaattcgtctggcgcggctctccatcactctccgagagacaagaaatcttcacccacattatggaccagtatagttactgtaccccttcacatatccccttttctaacagaagtggcttctactggaatggcgttgccgtgttcccaaagcctccccaggatggcgtgtaccctaacatgagcgagcctgtcactccagccaacattaacttgtatgcggaggcgctcgtagccaatgtcaagcagcgcgcggcctggttccggacacctcacgttctctggccttggggatgcgataagcagttttttaatgccagcgttcagtttgcaaatatggatcccctattagatcatataaacagccatgccgcagaattaggcgtgtcagtccagtacgccaccttgggcgactacttcagggcgctgcatgctctgaacgtgacgtggcgggtgcgagatcatcacgatttcctgccatattcgaccgaacctttccaggcatggactggcttctatactagtcggagcagccttaagggtcttgccagacgggcaagcgctttgctttacgccggagagtccatgtttacccgttatctgtggcctgcaccgcgtggtcacctcgatccaacttgggcactccagcaactgcagcagttgcggtgggcggtctcagaagtgcagcaccatgatgctatcacgggcaccgagagtcccaaggtgcgagacatgtatgcaacacacctggctagcggtatgctgggaatgcggaagttgatggctagtatcgttcttgatgagctgcagccacaagcaccgatggcagcaagcagtgatgcagggcctgcaggccactttgccagcgtatacaacccgttagcatggactgttactactatcgtcactctgaccgttggctttcctggagtgagagtgacggacgaagcaggccatcccgtgccttcccagatccaaaactccacagagacgcctagtgcctacgatctcttaatcttaacgactattcccggcctgagttatcgtcattacaatatacgacctacagctggcgcccaggaaggaacccaggaaccggccgcgactgtcgcgtccaccctgcagtttgggaggagattgaggcggagaacttcccacgctggaagatacctggttcctgttgccaatgactgctatattgtgttgcttgaccaagatactaacctcatgcatagcatctgggaaaggcaatccaatcgcacagtgcgtgtaactcaggagtttctagaataccacgtcaacggagacgtcaagcagggaccgataagcgataattacctgttcacgcctggcaaggcagcagttccagcatgggaggcagttgagatggaaatcgtggcaggccagttggtgactgagattcgacagtatttttatcggaacatgactgcacagaactatacatatgcgatacgctcgcgtctaacgcacgtgccccaaggtcatgacggagagcttctgtgccacagaatcgagcaggaatatcaagccggtcccctggaacttaatcgtgaggcagtccttcgcacctctaccaatctcaactcccagcaggtcatttactcggacaacaacggctatcaaatgcaaaggcggccttatgtgtcttacgttaacaactcaattgcccgcaattactacccaatggtccagtccgcgttcatggaagacggcaagtctaggctagtcctccttagcgaaagagctcacggcatctctagccagggtaacggacaggtggaggttatgcttcataggaggctttggaacaacttcgactgggatctcggatacaacctgaccctgaatgatacatccgtggttcatccggtgctgtggctcctattaggctcttggtctctcactactgcgctaaggcagagaagcgccttagctcttcagcatcgccccgttgtactctttggggacttggcaggcacagcacctaagttacccgggccccagcaacaagaggctgtaactttaccaccgaacctgcatctacagattctatctatccccggatggcggtacagctctaatcacactgagcattcccagaatctgcgcaaaggccatcgcggcgaagcccaggccgacctcagacgcgtgctactccgtctgtatcatctgtacgaagtgggcgaagacccagtgctgtcccagcccgtcacggtgaacctggaagtgaacttcccgacaccgattcagacgatttcccagggcagtaagccctag

SEQ ID NO: 6538 - DNA, 459 bp, synthetic construct
  misc_feature 1..459: note = source = /note="Description of Artificial Sequence: Synthetic coding sequence"
  source 1..459: mol_type = other DNA
atgcggttcaaaactacagctaaggacgggttgcttctgtggcgcggcgattcccctatgcggccaaacagtgacttcatcagcttgggcttgcgggacggcgcccttgtgtttagctacaatctcgggagcggagtggcgtccatcatggtaaatgggtcatttaatgatggtcgttggcatagggtgaaagcagttcgcgatgggcagtcaggcaaaatcaccgtggacgattatggtgctcgcacaggcaaatcgcccggtatgatgaggcaactcaatatcaacggagccctttacgtgggcggcatgaaggagattgctctgcacaccaaccgtcagtatatgaggggcttagtgggctgtatctcacatttcaccttatccactgattatcatataagtctagtagaagacgccgtggacggaaagaatattaatacatgtggggcaaagtag

SEQ ID NO: 6539 - DNA, 1701 bp, synthetic construct
  misc_feature 1..1701: note = source = /note="Description of Artificial Sequence: Synthetic coding sequence"
  source 1..1701: mol_type = other DNA
atggactttctgctggcacttgtcctggtgagctctctgtacctacaagcagcagccgaatttgatggcagatggcccaggcaaattgtgtcatcgatcgggttatgcaggtatgggggccgcattgactgttgttggggatgggcgaggcagtcttggggacagtgccagcctgtctgtcagcccaggtgcaaacatggggaatgtattggtcctaataaatgcaagtgtcaccctggttacgctggcaagacttgcaatcaggatgaacacattcctgcccccttggatcagggatctgagcagcccctgtttcagccactagatcatcaggcaacctcgctgccatcacgggacttaaatgaatgcgggcttaagcctaggccttgtaaacacaggtgcatgaacacctatggttcatacaagtgctattgtttgaatggctacatgctgatgcccgacggttcctgctcctccgctctcacatgctccatggcgaactgtcagtatggctgcgatgtcgttaaagggcagattaggtgtcagtgtccctctcctggcctgcaacttgcccccgacggcagaacttgtgttgacgtcgatgagtgtgccacagggcgtgcctcttgcccacggttccgacaatgcgttaatacattcggtagttatatatgcaagtgccataaaggattcgacctgatgtacattggaggtaaataccagtgccacgatatcgatgaatgtagtctgggccagtatcagtgcagtagctttgctcgctgttataatattagaggctcctacaaatgtaagtgcaaggaaggttatcagggggacggactgacatgtgtctatattcccaaagtcatgattgagccaagcggacccattcacgtgcctaaggggaacgggaccattctgaagggcgataccgggaataataattggattccggacgtcggaagtacgtggtggccaccaaaaacaccgtatatccctcctattataacaaaccgccccacctccaagcctaccaccagacccaccccaaagcccaccccaattcctaccccccctccccccccaccgctcccaactgagctgagaacacctctgccgcctaccacccccgagaggcccaccacagggctcactaccattgcccccgcggcgagtactcctcctggtggcatcacggtggacaaccgcgtgcagaccgaccctcagaagcccaggggagatgtattctctgtgctcgtgcactcatgcaattttgaccacggcttgtgcggttggataagagagaaggacaatgacctacattgggagcccatcagagacccggccgggggccagtatttgacagtgtctgctgctaaggccccaggtggcaaagccgcccggttagtacttcctttgggccgcctaatgcactcaggagatctgtgcctgagtttccggcacaaggtgaccggcctccacagtggcaccctgcaggttttcgtgagaaagcatggtgcccatggtgccgccctgtgggggcgcaatggtgggcatggttggcggcaaacccagatcactctccgaggagctgacatcaagtctgtggtgttcaagggagagaaacggagagggcacactggggagatcggcctggatgatgtgtccctgaagaaaggacactgcagtgaggaacggtag

SEQ ID NO: 6540 - DNA, 213 bp, synthetic construct
  misc_feature 1..213: note = source = /note="Description of Artificial Sequence: Synthetic coding sequence"
  source 1..213: mol_type = other DNA
atgggtccagaagccctcagcagcttgttacttctgctcctcgtcgcatccggagacgcagacatgaaggggcacttcgacccggctaaatgccgctatgctctggggatgcaagacaggacgatcccagactcagacattagtgcttccagttcatggagcgatagtactgccgctaggcactctcgactggaatcgtccgatggcgactag

SEQ ID NO: 6541 - DNA, 237 bp, synthetic construct
  misc_feature 1..237: note = source = /note="Description of Artificial Sequence: Synthetic coding sequence"
  source 1..237: mol_type = other DNA
atgggtcctgaggctttgtcctccctgttactgctgctgctggttgcgtctggcgacgctgacatgaagggccattttgaccctgctaaatgtcggtatgctcttggcatgcaggaccgtaccattcccgattccgatatatcagcaagcagtagctggtctgactctaccgccgcccggcactccaggctcgaaagtagcgatggagatggtgcctggtgccccgcaggatcctag

SEQ ID NO: 6542 - DNA, 339 bp, synthetic construct
  misc_feature 1..339: note = source = /note="Description of Artificial Sequence: Synthetic coding sequence"
  source 1..339: mol_type = other DNA
atgaggtttaagacgaccgccaaggatggcctgctattatggcgcggggattcgccaatgcggccaaactctgatttcatttcattgggccttcgcgatggagcgctggttttcagttataacctcgggtcaggtgtagcttctatcatggtgaatgggagctttaacgacggaagatggcacagggtgaaggcggtgcgagacggccagtcaggaaagatcacagtggacgattatggcgctcgtacagggaagagccctggtatgatgcgtcaactaaatatcaatggggctttgtacgtggggggcatgaaggagatcgccctgcacacgaattag

SEQ ID NO: 6543 - DNA, 2685 bp, synthetic construct
  misc_feature 1..2685: note = source = /note="Description of Artificial Sequence: Synthetic coding sequence"
  source 1..2685: mol_type = other DNA
atgtcactgccacgatgctgtccgcacccgctgcggccagagggctccggggccatggggccagaggctctaagctcactgttgctacttctgctggtggctagcggcgacgccgacatgaaggggcattttgacccggctaaatgcagatatgctctggggatgcaggatcggactatcccagactctgacatcagtgccagtagctcctggagtgactcaactgcagctaggcatagtagactggagtcttccgacggcgacggtgcttggtgtccagcaggatcagtgttccccaaagaagaagaatacttgcaggtagacttgcagagacttcatctcgttgctcttgtgggtactcaggggaggcatgccgggggcctgggaaaggagttttctagatcctaccgcctgcgctatagcagagacggacgaaggtggatgggctggaaggataggtggggacaagaggtgattagtgggaacgaggatcctgaaggagtggtgctgaaggatctgggcccaccaatggtagctaggctcgtgcgcttttatccacgagctgatcgggtaatgtctgtgtgccttagggtggagttgtatggttgtctgtggcgcgacggcctgcttagctacactgcgcccgtgggccagactatgtatctttctgaagccgtctatttaaacgatagtacctacgatggccacaccgttggaggcctgcagtacgggggtttgggacagctggccgatggcgtggtgggacttgatgactttagaaagtctcaggagctgagggtgtggcccggctacgactacgtgggatggagtaaccatagctttagttccggttacgttgaaatggaatttgagtttgacagactgcgagcatttcaggctatgcaagtgcactgcaacaacatgcacacgctgggagcccgattacccgggggtgtggaatgccgctttaggcggggcccagccatggcttgggagggagaacctatgcgacataatctcgggggtaatcttggcgacccaagggccagggctgtttcggtcccacttggagggcgggtggcacgcttcttacagtgccggtttctttttgccggaccctggcttctgttctcagaaatctcctttatatcagatgtggtaaataattcaagccccgccctcgggggcactttcccacctgccccatggtggcctcccgggcctccccctactaatttttcctccctcgagctcgaacctaggggccagcagccggttgctaaagctgaagggtctcccacggccattcttatcggttgtctcgtagccatcatcttactcctgctcctaataatcgccttgatgctctggcgactgcactggagaagattacttagtaaagccgagagacgggtcttggaagaggagctgaccgtgcatctcagcgtgcccggtgacactatcctgatcaataacagacccgggccacgcgaaccacccccttaccaagagcctcgtcctcgcggcaaccctcctcacagcgccccttgcgtcccaaatgggtccgcttactcaggtgattacatggaacccgagaaacctggagcccccctgctgccacccccaccgcagaactcggtccctcactacgcagaggctgatatcgttactctgcagggggttaccggagggaatacatatgcagtgcctgccctccccccaggagcagtgggggatggacctcctcgcgtcgatttccctcggtctaggttgcgttttaaggaaaagcttggcgaaggacaattcggggaggtccacctctgtgaagtcgactcaccccaggacctggtgtctctcgactttcctctgaatgttcgcaagggtcatccgctcctggttgctgtgaagatactgcggcctgatgcgactaaaaatgccagaaatgacttcttgaaggaagttaagatcatgtctcgcttgaaggaccctaatatcatcagactcctgggcgtctgcgtgcaggatgacccactgtgcatgattacggattacatggaaaacggtgatctgaaccagttcctctctgcccaccaactcgaggataaggcagctgagggcgcccccggagacggacaagcagctcagggcccaacgattagctatccaatgctgctgcatgtggcagcccagatcgccagtgggatgcgatacttagccacactgaactttgttcacagggacctggcgacccgcaattgccttgtgggtgaaaatttcacaatcaagatcgcagacttcgggatgtctcgcaacttatacgctggagactactatcgcgtgcaaggaagagcagtgctgccaatccgatggatggcctgggagtgcattctgatggggaaattcactaccgccagtgatgtgtgggctttcggtgtgacactgtgggaagtcctgatgctgtgccgggcacagccttttgggcagctaactgacgagcaagtaatcgagaacgcgggggagttttttcgcgatcaaggacgtcaggtatatctgagccggccacccgcatgcccacagggtctgtatgagctaatgctcaggtgctggtcgagggaatctgagcagagaccgccattcagccagctccatagattcctggcggaggatgctctaaacaccgtgtag

SEQ ID NO: 6544 - DNA, 384 bp, synthetic construct
  misc_feature 1..384: note = source = /note="Description of Artificial Sequence: Synthetic coding sequence"
  source 1..384: mol_type = other DNA
atgggacctgaggctctgtctagtctactgctgttactgctggtcgcgagtggagacgcagacatgaagggacacttcgatcctgcgaagtgcagatatgctctggggatgcaggaccggacaatacctgactccgacatctccgctagttccagttggtcggacagcaccgctgcacgccattcacgtttggaaagcagcgacggggatggagcctggtgccccgctggatccgtgtttccaaaagaagaggagtacctccaggtggacctccaacggttgcatctcgtggctttggtcgggactcagggccgtcatgccggaggcctgggaaaggagtttagccgctcctaccggcttaggtatagcagggacggacggtag

SEQ ID NO: 6545 - DNA, 1113 bp, synthetic construct
  misc_feature 1..1113: note = source = /note="Description of Artificial Sequence: Synthetic coding sequence"
  source 1..1113: mol_type = other DNA
atgaagaaggacgaaccccctttagactttcccgacaccctggaaggctttgagtacgctttcaacgaaaaggggcagctacgccatataaagacaggtgagccgttcgttttcaattacagggaagatctacataggtggaatcagaagcggtacgaggccctgggtgagatcattactaagtatgtgtacgagctgctagaaaaagactgcaatctgaagaaagtctcaattccagtggacgcaactgaatctgagccaaaatcttttatattcatgagcgaagacgctctaaccaaccctcaaaagcttatggtgctcattcacgggtctggcgtggtacgcgctggacaatgggccaggcgcttgatcattaacgaagatctcgactctggcacccagatcccattcataaaacgagcagtggccgaaggatacggagtaattgtgcttaatcctaatgagaattatatcgaagttgagaaaccgaagattcacgtccagtctagctcagacagctccgatgagcccgccgagaaaagagagcgaaaggacaaggttagcaaggagaccaaaaaacgccgtgatttctacgagaagtacagaaatcctcagagggaaaaggaaatgatgcagttatatattcgcgaaaatggatcccctgaggagcatgctatatacgtgtgggatcactttattgcccaggcagctgctgagaatgtatttttcgtggctcacagttatggggggctcgcatttgtggagctgatgatccagcgcgaagccgatgtcaaaaacaaagtcacagcagtcgctctgactgactccgttcataatgtctggcatcaagaagcaggcaaaaccatccgcgagtggatgagagagaactgctgtaactgggtgtcctccagcgaacccctggacacgtcagtggagtccatgttacctgactgtcctagagtctcagcgggcaccgatcgccatgaactgacctcctggaaatcctttccctcaatttttaaattttttactgaggctagtgaggcaaagacatcctctctgaagcctgccgtcactagacgaagtcacagaatcaagcatgaagagctgtag

SEQ ID NO: 6546 - DNA, 435 bp, synthetic construct
  misc_feature 1..435: note = source = /note="Description of Artificial Sequence: Synthetic coding sequence"
  source 1..435: mol_type = other DNA
atgaagaccggcctgttcttcctatgcctccttggcacagccgcagcaatccctaccaatgcccggctcttgtccgatcacagtaagcccaccgctgaaacggtggcccccgacaacactgccataccatcattgcgtgccgaggccgaagagaacgaaaaggagactgccgtatccaccgaagatgactctcaccataaagcggagaaatcgtccgtgctcaagtcaaaagaggagtcccacgagcagtccgcagaacagggaaaaagctctagtcaggagcttggactgaaggatcaagaggactcggacggtcacctgagcgtgaatcttgagtacgctcccactgaaggaactctcgatatcaaggaggatatgagtgaaccacaggaaaaaaaactctccgagaatacagattttctggccccaggatag

SEQ ID NO: 6547 - DNA, 1341 bp, synthetic construct
  misc_feature 1..1341: note = source = /note="Description of Artificial Sequence: Synthetic coding sequence"
  source 1..1341: mol_type = other DNA
ctgacactgcatagcttgacctgctatgaggatctggtgacttttcttcagcaatccatccatcagttcgaggtgggcccatacgggtgcatcctgctgacactttcagccatactttctcgatcaaccgaactgattcgacaggactttgatgtgccaaccagccacctgatcggcgcccatgggtactgcactcaagagctcgtaaatttgttgttgaccgggaaggctgtttcgaatgtctttaacgatgtggtagaacttgatagcggcgacggaaacatcacgcttctcaggggcatagccgctcgctccgacattggatttttatcactgtttgaacattacaacatgtgccaggtcggctgctttctcaagacgccgcgctttccaatctgggtggtgtgtagcgaaagtcatttctctatcctgttctccctccagcctggactcttgcgggactggaggactgagcggctgtttgatctatattactacgacggacttgcaaaccagcaggagcagattcgattgacaattgacaccacgcaaaccatctccgaggacaccgataatgatttggtccctcctctggagctttgtataagaactaacataggttctgcacttggattcaagtacccagttgggaacaaccaaactgccgtccaggataacgtgaaagtgagcctggcattcgggctgtctattgctacgcttgcccagtctgtcggacacatcagtggcgctcacctcaacccagctgttacactgggactactcctgagctgtcagatatccatttttcgagccctgatgtacatcatagcccagtgcgtaggggccatcgtcgccactgcaattctctctggcattacatccagcttaactggaaattcccttggaagaaatgacctcgctgacggcgtgaactcagggcagggcctgggcatcgagatcatcggcaccctgcagctggtcttgtgcgtactcgccactactgatcgtaggcggcgagacctcggaggctctgcacccttagctataggcctgagcgtggctctggggcacctgctggcaatagactacacgggctgcggcataaaccctgcaaggtccttcggatctgccgttatcacccataacttcagcaatcattggatcttttgggtgggaccattcattggaggggcacttgctgtgttgatctacgacttcatcttggctcccaggtcttccgacctgactgaccgggtcaaggtctggaccagcggacaggtcgaggaatatgacttggacgcggacgacatcaattcacgggtggagatgaagcctaagtag

SEQ ID NO: 6548 - DNA, 81 bp, synthetic construct
  misc_feature 1..81: note = source = /note="Description of Artificial Sequence: Synthetic coding sequence"
  source 1..81: mol_type = other DNA
atgaagctgcttttatgggcttgtattgtgtgcgtcgctttcgcccggaaaaacgccggtcttggtttcttgtggctgtag

SEQ ID NO: 6549 - DNA, 348 bp, synthetic construct
  misc_feature 1..348: note = source = /note="Description of Artificial Sequence: Synthetic coding sequence"
  source 1..348: mol_type = other DNA
atggggcctgaagcactgagcagcttgctcttgctattattggtagctagcggggacgccgatatgaaggggcatttcgacccagccaaatgccgttatgccttgggtatgcaagatcgcacaatccccgatagtgacatctccgcctcctctagctggtccgactcaaccgcggctagacacagccggttggaatcctctgacggcgatggcgcctggtgtcctgcaggaagtgtgtttcccaaggaagaagagtacctccaggtggacctgcagcggctgcacctggttgccttggtgggaacccagggccggcacgcagggggtttggggaaggaattcagctag

SEQ ID NO: 6550 - DNA, 165 bp, synthetic construct
  misc_feature 1..165: note = source = /note="Description of Artificial Sequence: Synthetic coding sequence"
  source 1..165: mol_type = other DNA
atgtacattcctttagaccctgactataatgctgactgtccaaatgtaactgcaccggtgtgtgcgagcaatgggcacacgttccagaatgagtgcttcttctgcgtggaacagagagaatttcactacagaattaaatttgagaagtacggcaaatgcgattag

SEQ ID NO: 6551 - DNA, 351 bp, synthetic construct
  misc_feature 1..351: note = source = /note="Description of Artificial Sequence: Synthetic coding sequence"
  source 1..351: mol_type = other DNA
atggtcctgctccactggtgcctcctgtggctcctctttcccctaagctcccgtacccaaaagctgcccacccgcgatgaggaattgttccagatgcaaatccgtgacaaagcttttttccatgattcctccgtgatccctgatggggccgagatcagcagctatctgttcagagatacaccgaagaggtacttcttcgtcgtcgaggaggacaatacccccctaagcgtcacggtgactccttgtgacgcccctctggagtggaaactgtcactccaagagctgccagaggaccggtcgggggagggctccggggatctagaacctctggaacaacagaagcaacagtag

SEQ ID NO: 6552 - DNA, 432 bp, synthetic construct
  misc_feature 1..432: note = source = /note="Description of Artificial Sequence: Synthetic coding sequence"
  source 1..432: mol_type = other DNA
atgggccccgaagctctttcgtccctgctgttgctactcctcgtggcctctggggatgctgacatgaaggggcactttgatcctgccaagtgtcgttacgcccttggaatgcaggacaggactatccccgactctgacatttctgcatcatcatcctggagtgatagcaccgctgctcgccactctaggttagagagctcagacggcgacggggcatggtgtcctgccggctctgtctttccgaaggaggaggagtacctgcaggtagatttgcagaggctacacctggttgccctggtgggcacacaagggaggcatgccggggggctcggcaaagagtttagccggtcttataggctacggtactctcgcgatggcaggcgttggatggggtggaaagacaggtggggccaagaggtcatatccggatag

SEQ ID NO: 6553 - DNA, 747 bp, synthetic construct
  misc_feature 1..747: note = source = /note="Description of Artificial Sequence: Synthetic coding sequence"
  source 1..747: mol_type = other DNA
atggagctgctacaagtgacaatattgttcctattgccatccatctgctcctcaaattctactggtgttcttgaagctgctaacaattctctagtagtgacaaccaccaaaccttctattactaccccaaacacagaatcattgcagaagaatgtggtgacccctactactggcacgacccctaagggtacgattaccaacgagctgttgaagatgtccctgatgagcacagcgaccttcttgactagtaaggacgaagggcttaaggctacaacaaccgatgtgagaaagaacgacagcattatttcaaacgttaccgtgaccagtgtgactctgcccaacgccgtctcaactctgcagtccagcaagccgaagtcttccgtgttacagccagacgcctctccgtcaaaaactggtaccctcaccagcattccagttacgatccccgagaacacctcccaaagccaggtgattggaacggaaggaggcaagaatgcctccacctctgctaccagcaggagctatagctcaatcatactgcccgtcgtcatcgccctgatcgtaataacactctcagtctttgtgctggtcggcctgtaccggatgtgctggaaagccgatcccgggacgcctgagaacgggaacgatcagccacagtcagataaggagagtgttaagcttcttaccgtgaagacgattagtcatgagtccggagagcattccgcccagggtaagaccaagaattag

SEQ ID NO: 6554 - DNA, 363 bp, synthetic construct
  misc_feature 1..363: note = source = /note="Description of Artificial Sequence: Synthetic coding sequence"
  source 1..363: mol_type = other DNA
atgaaaactggcttatttttcctgtgcctcttgggtaccgcagccgccattccgaccaatgccagattgctctctgaccattccaagcccacagcagaaacagtcgcccccgataacacagcaattccttcgctcagagccgaagctgaggaaaatgaaaaggagacggcggtgtcaacggaggacgacagccaccacaaggctgaaaagtcatccgtcttgaaaagtaaggaagaatcacacgagcagagcgccgagcagggtaagagctcatctcaggaactgggccttaaggaccaggaggacagtgatggtcacctgtcagtcaaccttgaatacgctcccaccgaaggaaccctgtag

SEQ ID NO: 6555 - DNA, 339 bp, synthetic construct
  misc_feature 1..339: note = source = /note="Description of Artificial Sequence: Synthetic coding sequence"
  source 1..339: mol_type = other DNA
atgggaccagaggctctttcttcgctcctgctcctgctgttggtcgcttctggcgacgcagatatgaaaggacactttgaccccgcgaagtgcagatacgccctgggcatgcaagatcgtacaatcccagactccgacatcagcgcaagctcatcatggtccgattccacagcggctcggcattcacgcctggaatctagcgacggtgacggcgcttggtgcccggccgggagtgtgtttcctaaagaggaagagtatctgcaagtcgacctgcagcgattgcacctggtggccctggtgggaacccagggcaggcacgcaggaggactgggcaagtag

SEQ ID NO: 6556 - DNA, 513 bp, synthetic construct
  misc_feature 1..513: note = source = /note="Description of Artificial Sequence: Synthetic coding sequence"
  source 1..513: mol_type = other DNA
atgggtcccgaagccctgtccagccttctcctgctgctgttagtggcttccggggacgctgacatgaaggggcatttcgaccctgctaaatgtaggtacgccttaggcatgcaggataggaccattccggactccgatatttcggcatcttcatcttggtccgattcgaccgcagctagacattcacgcctggagtctagcgatggagacggcgcctggtgccccgctggcagcgtgtttcccaaagaagaggaataccttcaggtcgacctgcagagactccatctcgttgcactggtaggcacccagggaaggcacgctggcggcctcggcaaagaattctcacggtcttatcgcctgcgctactctcgggatggacggcgatggatggggtggaaggaccgatgggggcaggaagttatttctgggaacgaggacccagagggggtggtgctgaaggatctcgggcccccaatggttgccagattggttcgcttttatccccgagcttag

SEQ ID NO: 6557 - DNA, 417 bp, synthetic construct
  misc_feature 1..417: note = source = /note="Description of Artificial Sequence: Synthetic coding sequence"
  source 1..417: mol_type = other DNA
atgggtcctgaagccctgagttcactactgcttttgcttcttgtcgcctccggggacgcagatatgaagggtcatttcgatcctgctaagtgcaggtacgcactgggcatgcaagaccgcaccatcccagatagtgatattagcgcgagcagcagttggtcggattctactgctgcccgccactccagactggaaagctccgacggcgacggtgcctggtgcccagcgggatccgtgttcccaaaagaagaggagtatttgcaggtggatctgcagaggctgcatctggtggccctggtgggtacccagggtaggcacgcaggcggcctggggaaagagttttccaggagttacaggctgaggtattctcgggatgggcggaggtggatgggttggaaggaccgctggggccaatag

SEQ ID NO: 6558 - DNA, 285 bp, synthetic construct
  misc_feature 1..285: note = source = /note="Description of Artificial Sequence: Synthetic coding sequence"
  source 1..285: mol_type = other DNA
atggcagcctttcctcacaaaatcattttcttcctggtgtgctccacgctgacccacgttgctttctccggcatatttaataagagggactttacacgctggcccaaaccccgttgcaagatgtacattccgctggacccggactacaacgcagattgtcccaacgtgaccgcccctgtttgtgcttcaaacgggcatacatttcaaaatgaatgttttttttgcgtggagcagagagaattccattataggattaagttcgagaaatacggcaagtgtgattag

SEQ ID NO: 6559 - DNA, 156 bp, synthetic construct
  misc_feature 1..156: note = source = /note="Description of Artificial Sequence: Synthetic coding sequence"
  source 1..156: mol_type = other DNA
atgggacccgaggctctctcctcactgcttctcttactacttgtcgcatcgggggatgctgatatgaaggggcactttgatcctgcaaaatgccgttacgctttagggatgcaggatagaacaatcccagattccgacatttctgcaagctcctag

SEQ ID NO: 6560 - DNA, 2760 bp, synthetic construct
  misc_feature 1..2760: note = source = /note="Description of Artificial Sequence: Synthetic coding sequence"
  source 1..2760: mol_type = other DNA
atgggccccgaggctctttcatccctcttgctgctcctcctggtcgcatccggcgatgccgatatgaaagggcactttgacccagcgaagtgtagatatgcactgggaatgcaagaccggacaatccccgactccgatataagcgcttccagcagttggtctgactcaacagccgccaggcactcccggctcgaatctagtgacggcgacggcgcatggtgcccagctgggagcgtgtttcctaaggaggaggagtatctccaggttgacctgcagcggctgcacctggtcgctctcgtaggaacacaaggtaggcatgccggtgggctggggaaggaattctccagatcatatcgcctgcgttatagccgagacggccggcgatggatgggctggaaagaccggtggggacaggaggtcatctctggaaatgaagaccccgagggtgtggtgctcaaggacctgggacctcccatggtggctcggcttgttaggttctacccccgggccgacagggtgatgtccgtgtgtctgcgggtggagctgtacggttgcctgtggcgggacggactgctcagttacactgctcccgttggccagacaatgtaccttagtgaagccgtatacttaaatgattcaacctacgacggtcacaccgtcggtggtctgcagtacggcggccttggccagctagctgatggagtggtgggactggacgatttcaggaagtcccaggaattgagggtctggcccggctacgactacgtcggatggtctaatcactcattctctagtggatatgtagaaatggagttcgagtttgatagattgcgggcctttcaggctatgcaggtacactgtaacaatatgcacacactaggagccagactgcccggcggcgtagagtgccgatttagacgcggcccagcaatggcctgggaaggcgaacctatgaggcataacttgggagggaatctgggcgatcctcgagcccgggcggtgagtgtcccccttggcggaagagtcgctaggttcctacagtgtcgattcctttttgccggtccatggctcctctttagtgagatcagcttcattagcgatgttgtgaacaatagtagccctgcgttggggggcactttcccacccgctccctggtggccccccggcccgcctccaacaaattttagctccttggagcttgaacctcggggccaacaacctgtggctaaggcagaaggatcgcctactgccatcctgatcggatgtctggtcgcaatcattcttcttctgctgctcataatcgccctgatgctttggagactgcattggcgcagactcctaagcaaagctgagcgcagggtactagaggaggagctcacggtccatttgagcgtacctggcgacacaattttaatcaataatcgtccggggcccagggaaccgccgccttatcaagagccccggccgcgtggcaaccctccccacagcgcgccctgcgtaccaaatgggagcgcattgcttctcagtaacccagcctacaggttgctgctcgcaacctatgctagacccccccgagggcctggtcccccaaccccggcgtgggcgaagccaaccaatacacaggcctactccggggattatatggagcctgagaaacctggtgcccctctactcccccccccaccccagaacagtgtgcctcactacgctgaagccgacattgtgacgttgcagggggtgaccggaggaaacacctatgccgttcctgcattaccccctggcgcagtgggggatggcccaccgcgtgtggatttcccccggtcaagactacggtttaaagaaaagctgggcgagggccagttcggcgaggtgcacctgtgcgaggtcgactctccacaggatttagtgtccctggattttcctcttaacgtgcggaaaggccatcccctcctggtggctgtgaaaatcctccgccctgatgccaccaagaatgctagttttagcctcttttctcgcaacgattttctgaaagaggtgaaaatcatgtcacggctgaaggaccctaatattattcgacttctcggcgtgtgcgtccaggatgacccgttgtgtatgataaccgactatatggaaaatggcgacctgaaccagtttctgagtgctcaccagctcgaggacaaagcagcagagggagccccaggcgacggacaggcagcccaaggccccaccatttcctaccctatgttgttgcacgtggccgcacagattgcgtccggcatgagatacctagcgacattaaactttgtgcatagggatctggcgacgcgaaactgcctggtgggcgagaacttcacgatcaaaattgctgattttggcatgagcaggaatctgtacgccggcgattactaccgggtccagggccgcgcggtgctacccattaggtggatggcctgggaatgtattctaatgggcaagttcacgacggcgtcagatgtgtgggcatttggcgtgactttgtgggaagtgctgatgctgtgtcgggcccagccttttgggcaactcaccgatgaacaggtgatcgagaacgcaggagagtttttccgcgaccagggcagacaagtatatttaagtcgaccccccgcctgtccccagggactgtacgaactcatgctgcgatgttggagccgggagtccgaacagagaccacctttttcacagctgcatagattccttgcagaagatgccctcaacacggtgtag

SEQ ID NO: 6561 - DNA, 318 bp, synthetic construct
  misc_feature 1..318: note = source = /note="Description of Artificial Sequence: Synthetic coding sequence"
  source 1..318: mol_type = other DNA
atgggggtttctaaactggatatcctctacagacggttgttgcttacgaaactgtttatccgcgggtggggtcgacctgaggaccttaaaagacttttcgaattcaggaaaatgattggcaaccgtgagagatgtcagaacctggtttcttcggactacccagtccatatcgacaagatagaggaacagagtgattgcaagatcctggatggacacttcgtgagccccatggcgcactatgttcccgatatcatgccaatcgagtccgtgatcgccaggttccagttcatagttcctaaggagtggaattctaagtag

SEQ ID NO: 6562 - DNA, 126 bp, synthetic construct
  misc_feature 1..126: note = source = /note="Description of Artificial Sequence: Synthetic coding sequence"
  source 1..126: mol_type = other DNA
atgaaattgagtggaatgtttctcctcttatctctcgcacttttttgcttcttgaccggtgtgttttctcagggaggacaggtagattgcggcgaatttcaggatccaaaagtgtactgcacatag

SEQ ID NO: 6563 - DNA, 459 bp, synthetic construct
  misc_feature 1..459: note = source = /note="Description of Artificial Sequence: Synthetic coding sequence"
  source 1..459: mol_type = other DNA
atgagatttaaaactaccgccaaggacggacttcttctgtggcggggagatagccccatgcgtccaaacagcgatttcatttctttgggcctgagagacggtgcactcgtgttctcatacaacctcggcagcggggtggcctccattatggttaatggctcatttaacgacgggagatggcatcgggtgaaagccgtgcgcgatggccagtcgggcaagatcacagtggacgactacggcgctcggacaggcaaatccccaggcatgatgaggcagctgaatatcaacggcgcgctctacgtgggcggcatgaaggaaattgccctgcatacaaaccgccaatacatgaggggactcgtggggtgcatttcgcactttactctgtctactgattaccatatttcactagttgaggatgcagttgatggtaaaaatattaacacatgcggagcgaagtag

SEQ ID NO: 6564 - DNA, 1611 bp, synthetic construct
  misc_feature 1..1611: note = source = /note="Description of Artificial Sequence: Synthetic coding sequence"
  source 1..1611: mol_type = other DNA
atggacttcctgctggctctggtgcttgtatcaagtttgtacctccaggccgcagcagaatttgacgggaggtggccacgtcagatcgtgagtagtattggcctctgtcgctatggagggagaatagactgttgttggggctgggccaggcagtcatggggccaatgtcaacccgtgtgtcaacctaggtgcaagcacggagaatgcataggtcccaataaatgcaagtgtcatcccggttacgctgggaaaacctgtaatcaggatctaaatgaatgcggactgaagccaagaccctgtaagcatagatgtatgaacacatacggaagctataagtgttattgcttgaacgggtatatgctcatgcccgacgggagttgctcctcagcattgacttgctctatggccaactgtcaatatggatgcgatgtcgttaagggccagatcagatgtcaatgtccctctcctggcctgcagttagcccccgatgggcgaacctgcgttgacgtcgatgaatgtgctacgggacgggctagctgcccaaggttccgccagtgtgtgaacaccttcgggtcatacatttgcaagtgtcacaagggctttgacctaatgtacattggaggcaagtatcagtgccacgacatcgacgagtgtagtctcggccagtaccagtgcagcagcttcgcaagatgctacaatattaggggatcatacaagtgtaagtgcaaggagggttaccagggtgacggattgacgtgcgtgtacattcctaaagtgatgatcgagcccagcggccctattcatgttcccaaggggaacggaaccattctgaaaggagatacaggtaataacaattggatccctgatgttggaagtacctggtggccacctaaaaccccatatatcccacccattataactaacagaccaacaagtaaaccaacaaccaggcctaccccaaagcccacccctatacctacaccaccacctcccccacctcttcctacagaacttaggacaccgctgccccccacgacgccagaaaggcccaccactggcttaacaacgatagctcctgcagcttccacaccccctggtggcattactgttgacaacagagtgcagacagacccccaaaagcccagaggagatgtgttttctgtattagtacattcttgcaatttcgatcatggactgtgcggatggatccgcgaaaaggataacgatttacattgggagccaatcagggacccggccggaggacagtatttgacggtaagcgcggctaaggcacctgggggcaaggccgcccggctcgtgctacctttaggcaggttgatgcactccggtgacctgtgcttgtcatttcggcacaaggttacaggtctgcacagcgggacacttcaagtcttcgtgcgaaagcatggagcccacggggctgcactgtgggggcgaaacggcggacatggctggagacagactcaaattaccctccgtggcgccgatataaagtcggtcgtgtttaaaggagaaaagcgacgtgggcacactggggaaattggcctggatgatgttagcctgaaaaaggggcactgctcagaggaacgatag

SEQ ID NO: 6565 - DNA, 288 bp, synthetic construct
  misc_feature 1..288: note = source = /note="Description of Artificial Sequence: Synthetic coding sequence"
  source 1..288: mol_type = other DNA
atgctattccgtaatcggttcttgctgctgctggctttggctgctctactcgcgttcgtttccctttccttgcagttttttcaccttatccccgttagtactcctaagaacggtatgtctagcaaaagtagaaaaaggatcatgccggatccagtgaccgagcctcccgttactgacccagtttatgaggcgctgctctactgcaatattccaagcgtagccgagcgaagcatggagggacacgcgccgcatcactttaaactggtatccgtgcatgtgtttatatag

SEQ ID NO: 6566 - DNA, 213 bp, synthetic construct
  misc_feature 1..213: note = source = /note="Description of Artificial Sequence: Synthetic coding sequence"
  source 1..213: mol_type = other DNA
atggcttcagacctcatacgcaccattttggctgtggctctgatcagcaagctgggaaccgcagtggacgctgaactgatgccttccggggcaatcctacagaacaagagggagaatttaccacgggtgtgccatgccttggcgttcttgggaatggctcggtgtcaggacctcttcctggttcggctgcagggttggaaactgggcacatag

SEQ ID NO: 6567 - DNA, 417 bp, synthetic construct
  misc_feature 1..417: note = source = /note="Description of Artificial Sequence: Synthetic coding sequence"
  source 1..417: mol_type = other DNA
atgggacccgaagcgttaagcagcttgctgctgttactgcttgtcgcatctggcgatgcagacatgaaaggtcacttcgatcccgctaagtgccgctatgctctaggcatgcaagataggaccatacctgactctgacatcagcgcttcatcttcctggtctgatagcaccgctgctcgccatagcaggctggagagcagcgatggcgatggagcctggtgtcctgctggttccgtgttcccaaaggaggaagagtatcttcaggtagatctgcagcgtctccacctggtggcgctggtaggcactcagggcagacatgcaggaggcctgggcaaggaattctcacgttcataccggctgcgatattcaagggacggacggcgctggatgggctggaaggacagatggggccagtag

SEQ ID NO: 6568 - DNA, 219 bp, synthetic construct
  misc_feature 1..219: note = source = /note="Description of Artificial Sequence: Synthetic coding sequence"
  source 1..219: mol_type = other DNA
atggctgttagcgtgctaagactcacagtagtgttaggcttactggtactgtttttgacatgctacgcagacgataaaccagataagccagacgataaacctgatgactctgggaaggacccgaagccagattttcctaaatttctgagtctgctagggactgaaatcatcgaaaacgccgtggagtttatcttaaggtctatgtcgcgttcgacttag

SEQ ID NO: 6569 - DNA, 438 bp, synthetic construct
  misc_feature 1..438: note = source = /note="Description of Artificial Sequence: Synthetic coding sequence"
  source 1..438: mol_type = other DNA
atggttcttctgcattggtgcctgctgtggctgctgttccctctcagctcacggacgcaaaagctccccaccagggatgaggagctgttccagatgcaaattcgggacaaagcttttttccatgactcttcagtgataccagatggcgccgagatctcgtcctacctcttcagggacacgccaaagcggtacttctttgtggttgaggaggacaacacgcctctgtctgtgactgtcactccttgcgatgcaccgttggaatggaagctctcgctgcaggaacttccagaggaccggtctggcgaaggatccggggatctggagcctttagaacagcagaagcagcaaattatcaatgaagaaggtacagaactgttctcttataaaggcaacgacgttgaatattttattagctcatcttccccctctgggctctag

SEQ ID NO: 6570 - DNA, 258 bp, synthetic construct
  misc_feature 1..258: note = source = /note="Description of Artificial Sequence: Synthetic coding sequence"
  source 1..258: mol_type = other DNA
atgggacccgaagcactttcaagcctattgcttttgctactggtggcctccggggacgctgacatgaagggccatttcgaccctgccaaatgccgctatgcactggggatgcaggatagaacgatcccagactctgacatatcagcctcaagcagctggtctgattcgactgccgccagacatagtagactcgaaagctctgatggagacggcgcttggtgccccgccggcagcgtgtttcccaaggaggaagagtag

SEQ ID NO: 6571 - DNA, 1410 bp, synthetic construct
  misc_feature 1..1410: note = source = /note="Description of Artificial Sequence: Synthetic coding sequence"
  source 1..1410: mol_type = other DNA
atgctgaaggtgcattaccccaaattcggagtgagcgaagattgtctgtatcttaacatctacgctcccgcacatgccgatacagggagcaaactgcccgtactcgtttggtttcctgggggggccttcaaaacaggctctgcctcgattttcgacggcagtgccttagctgcatacgaagacgtgttggtagtggtggttcagtaccggctgggcatttttggattcttcaccacttgggaccaacatgctccggggaactgggccttcaaggatcaagtcgcagctctcagttgggtacaaaaaaacatcgagttctttggtggcgaccctagctcagtgacaatttttggggagagcgcaggcgcaatatcggtatctagcctgatcctttcaccaatggctaagggactgtttcataaggccatcatggaatctggtgtcgccattattccctatctggaggcacacgattatgagaagtccgaggatctacaggtggtggctcatttctgtgggaataacgcgtcagactccgaagcactgcttcgatgcctccgaaccaaaccctctaaggaactgctgacactgtctcaaaaaaccaagtcatttacccgtgttgtggatggggcttttttccccaatgagcctctggatctgctctcacagaaggcgttcaaggccatccctagtattattggcgtgaacaaccatgagtgtggatttttacttcccatgaaagaggcgcccgagatcctctcagggagcaacaaatcgttagctttgcatctgatccagaacatccttcacattccacctcagtacctgcacctggttgccaacgaatactttcacgataaacactctctgactgagattcgcgactccttgctggacctcttaggggacgtctttttcgtggtcccagccctgatcaccgctcggtaccaccgcgatgccggggctcccgtgtacttttatgagtttcgccaccgccctcagtgttttgaagacactaagcctgctttcgtaaaagcagaccatgccgacgaggtgcgttttgtcttcggcggggcctttctcaagggtgatattgtcatgttcgaaggtgcaaccgaggaggaaaaactgctgagccggaagatgatgaaatattgggctacttttgcccgaactggaaaccctaacggcaacgacttgtccttgtggcctgcatataacctcaccgagcaatatctccagctggacctgaatatgtccttgggtcaacgactgaaggagcctcgtgttgatttctggaccagcaccatccccctgatcctgtctgccagtgacatgctccatagccctctgtcctctcttacgtttctatcgctccttcaacccttcttcttcttctgtgcaccgtag

SEQ ID NO: 6572 - DNA, 393 bp, synthetic construct
  misc_feature 1..393: note = source = /note="Description of Artificial Sequence: Synthetic coding sequence"
  source 1..393: mol_type = other DNA
atgctcccattcctgtttttctctaccctcttttcttccattttcacagaggcacaaaaacagtactgggtgtgcaactcttccgacgcttccatttcgtatacctactgcggccgagacttaaagcagctctacttcaacctctatatcactgtgaatacgatgaatcttcccaaaaggaaggaagttatatgtaggggctccgatgacgattattctttctgtcgggcattaaagggtgagaccgtaaatacgacaattagcttttcctttaaggggattaagttttctaaagggaaatataagtgcgttgtggaggcaatctccggttcccctgaagagatgttgttctgcctggagtttgttattctgcatcagccgaatagcaattag

SEQ ID NO: 6573 - DNA, 318 bp, synthetic construct
  misc_feature 1..318: note = source = /note="Description of Artificial Sequence: Synthetic coding sequence"
  source 1..318: mol_type = other DNA
atgaagtgtaccgctcgtgaatggttgcgtgtgacgaccgtcctcttcatggctagagccatccctgctatggtggtccccaacgctacacttctggagaaactgttggagaagtatatggacgaggacggtgagtggtggatcgctaaacagcgtggtaagcgcgccattacagacaatgacatgcagagcattttagatcttcataataagctgcgttcccaggtgtatccaacagcttcgaatatggaatatatgacgtgggatgtcgaattggaacgttcagctgagtcctgggctgaatcatgtctgtggtag

SEQ ID NO: 6574 - DNA, 567 bp, synthetic construct
  misc_feature 1..567: note = source = /note="Description of Artificial Sequence: Synthetic coding sequence"
  source 1..567: mol_type = other DNA
atgaccatggtgtgccacagacccgaaggcctggaacagctcgaagcccagacaaactttacaaaaagggagttgcaagttctgtacaggggattcaaaaacgagtgccccagtggggtggtgaacgaggacacttttaaacaaatatacgcacagttcttcccgcacggagatgcaagcacttacgcccattatctctttaatgcattcgataccacacaaactggctcagtgaaattcgaggactttgtgaccgccctgtcaattttgctacgtggtactgtccatgaaaagctccgttggacctttaacctgtatgacattaataaagatggatatatcaacaaagaagagatgatggacatagtgaaggcaatatacgacatgatgggaaagtatacatatcccgtgttgaaagaggatacccccagacagcacgtagacgtgttttttcagaaaatggataaaaacaaggacgggatcgttactttggatgagttcctcgagagctgccaggaagacgataatataatgcgcagcctgcaactgttccagaacgtcatgtag

SEQ ID NO: 6575 - DNA, 1275 bp, synthetic construct
  misc_feature 1..1275: note = source = /note="Description of Artificial Sequence: Synthetic coding sequence"
  source 1..1275: mol_type = other DNA
atgcctccctttctcattactctgtttctgttccattcgtgttgtttgagagctaatggccacttgagggaaggcatgactttattgaaaactgagtttgccctgcacttataccagtcagtagccgcctgtaggaacgaaacaaactttgtcatttcgccagctggtgtatcactgcccttggaaatcttacagtttggtgccgaaggcagtaccggccagcaactggctgacgccttgggatataccgtccacgataagagagtaaaggacttcctgcatgctgtgtatgcaacacttcccacctccagtcagggtacggagatggaattggcatgtagcctatttgtgcaggtgggtacaccactgtctccctgcttcgtggagcacgtgtcatggtgggcaaattcttccctcgagcctgcggatctcagcgaacctaattcgactgcaattcagactagtgagggcgcgtcaagggagacggccggcggaggcccctcggagggcccgggcggatggccttgggaacaggtttccgcagctttcgcccagctggttctggtgtccactatgtctttccagggtacctggaggaaaagattttctagcaccgatacacaaatcctcccttttacatgtgcctacgggctggtgctgcaagtgcccatgatgcaccaaaccacagaagtgaattacggacagttccaagatacagcagggcaccaagttggcgtactggagctcccctatctcgggtctgctgtttccctttttcttgtgttgcctcgggacaaggacacgcccctgtctcacatcgagccccatctgactgcatctactattcacctgtggacaacttccctgcgacgagcccgtatggacgtatttctgcccagatttcgtattcaaaatcagttcaatctgaagtcaatactcaattcttggggagttaccgacctgtttgatccactgaaagccaacttgaaagggatcagtgggcaggacgggttttacgtgtctgaagccatacataaggctaagatagaagtgctcgaggagggtaccaaggcctccggcgccacagctcttctattactgaagcgctccagaatccccattttcaaggcggatagacccttcatttactttctcagggaacccaacaccgggatcacagtgttcttcgatcgaattcagatcatctaccagtgcctttcaagtaataaagggagcttcgtacattacccgctgaagaacaagcacagtttttag

SEQ ID NO: 6576 - DNA, 1815 bp, synthetic construct
  misc_feature 1..1815: note = source = /note="Description of Artificial Sequence: Synthetic coding sequence"
  source 1..1815: mol_type = other DNA
atggccgtcctcgtctgcccggcatcgtgccatggcctcaaggaatttagaataaggaggggcatgtggcgattgtgcctggtgtactatttctatccagccagttcaacattgtatgtgctgcgtatagacgtattgaattacacttctaaggatgagggtccatctgccgaagggccacagaggaatacaagactaggatggatccagggaaagcaggtgacagtgctgggatccccagtccctgttaacgttttccttggggttccattcgcggctccacctttgggcagtctcagatttactaatcctcagcccgcatcaccctgggataatctcagagaagctaccagctatcccaacctgtgtctgcagaattcagagtggctactgctcgatcagcacatgcttaaggtacactacccgaagttcggagtgtccgaagactgcttgtatctcaacatatatgcccctgcacatgccgatacagggagcaagctccccgtactggtgtggttccccgggggtgcattcaagactggctccgccagcatctttgacggatcagcactcgcggcttacgaggatgtattggtggtggtggtgcagtatagactcgggatttttggcttctttacaacctgggatcaacacgcccccggcaactgggccttcaaggaccaagtggctgccctgagctgggtgcagaaaaatatcgagttttttggaggagaccctagttcagtgacaatttttggcgagtccgccggggcaatcagcgtcagctctttaatcctgagccccatggcaaaggggctgttccacaaggccatcatggagtctggagtggctatcatcccttaccttgaagcccacgattacgagaaatcagaagacctgcaagtcgtagcccacttctgcggcaacaatgcctcagatagcgaggccctgctcagatgtctacggactaagccatctaaggagctgttaactttatcccaaaagaccaagtcattcacccgggtagttgacggcgccttctttccaaacgagccactggacctgttgtcccaaaaggcgttcaaagccattccgagtataatcggggtgaacaaccatgagtgcggctttctgctgcccatgaaggaggcccctgagatcttgagcggctcaaataagagcctcgccctgcatctcattcagaacatcctgcatatcccaccgcagtatcttcacttagttgctaacgaatattttcacgataagcactctctgacggagatccgagacagtctgcttgaccttttaggagacgtattttttgtcgtgccagcgctcatcaccgctcgctaccaccgcgatgcaggcgccccagtttatttctatgaatttagacatcggcctcagtgtttcgaggacaccaaacccgcgtttgtgaaagcggatcatgccgacgaggtgaggtttgtgttcggtggcgcctttctgaaaggcgacatcgtcatgttcgagggcgcaaccgaggaggagaagttactgtcaaggaagatgatgaaatattgggccacattcgcacggactgggaacccaaacggtaacgacctgtccctctggcctgcttacaacctgactgagcagtatttacagctggatcttaacatgtcactgggccagaggctcaaggagcccagggtagacttttggacctctactattcccctgatcctttccgcgagcgacatgctgcatagtccgctcagcagcctgacttttctttctctgctccagcccttctttttcttctgcgctccatag

SEQ ID NO: 6577 - DNA, 939 bp, synthetic construct
  misc_feature 1..939: note = source = /note="Description of Artificial Sequence: Synthetic coding sequence"
  source 1..939: mol_type = other DNA
atgaatatctggggtcaaatctggccaaaggcagtgtacctggtttgtaattattcacccaaggggaattggtggggccatgctccatacaagcacgggagaccttgcagcgcttgtcccccatcctttggaggcggttgtcgcgaaaatctatgttacaaggaaggttcggacaggtattatcctccgagagaggaggagactaacgaaatcgagaggcagcagtcccaagttcacgatactcacgtgaggacccgaagcgacgatagcagcagaaacgaagtgatatccgcgcaacagatgagtcagattgtttcctgcgaagtgcggctacgggaccagtgtaaaggtactacatgtaatagatacgagtgccccgccggatgtttggactctaaggctaaagttattgggagtgtacattatgaaatgcagagctctatatgcagagccgcgatccactatggaattatcgacaatgatggcggatgggtcgacatcactcgacaagggcggaagcactacttcatcaagtcaaaccgtaacggaatccagactattgggaagtatcaatctgctaacagtttcaccgtctcaaaagtgaccgtccaggctgtaacatgtgagaccactgtcgagcagctgtgccctttccataaacctgctagccactgtccgcgcgtgtactgcccccggaactgtatgcaggccaatccccattatgctcgagttattggtacgcgcgtctactcggacctctcatccatctgtagggcggccgtgcacgcaggagtagtaaggaatcacgggggctacgtggatgtgatgcctgtggacaagcggaaaacgtacatcgcctccttccagaacggcatcttctccgaatctcttcagaacccccctggcggcaaagcgtttagagtctttgccgtggtatag

SEQ ID NO: 6578 - DNA, 777 bp, synthetic construct
  misc_feature 1..777: note = source = /note="Description of Artificial Sequence: Synthetic coding sequence"
  source 1..777: mol_type = other DNA
atgatcgccatcagcgccgtatcctcggccctgcttttctcgctgctctgtgaagcttccaccgtcgtcctcctgaactcaactgattcctccccaccaaccaacaacttcacagatatcgaagcagccctcaaagcccagctggacagcgccgacatccctaaggcgcgccggaagaggtacatttcccagaatgacatgatcgcgatattggattaccacaatcaagtgcggggtaaggtattccctcccgcagctaacatggaatacatggtgtgggatgagaacctggccaaatccgcagaggcctgggccgcgacctgcatttgggatcacggcccgagctatctgctgcggttcctgggccagaacctctctgtacgcaccggacgttacaggagcattctgcagctggtgaagccttggtatgacgaggtcaaggactacgcattcccctatccgcaggactgcaatcctcggtgtcccatgaggtgtttcggccccatgtgcactcactatacacaaatggtgtgggcgacgtcgaatcgcatagggtgcgctattcacacctgccagaatatgaacgtctgggggagtgtttggcgccgagccgtctacctggtgtgtaactacgccccaaaggggaactggataggtgaagccccatataaggttggcgtaccttgcagctcttgccctccgtcatacggcgggtcatgtaccgacaacctctgctttccaggggttacaagcaactatctgtattggtttaaatag

SEQ ID NO: 6579 - DNA, 1215 bp, synthetic construct
  misc_feature 1..1215: note = source = /note="Description of Artificial Sequence: Synthetic coding sequence"
  source 1..1215: mol_type = other DNA
atgccaccgtttttgatcactctctttctgtttcacagttgctgcctgagagccaacggtcatttgagagaaggaatgactctgctaaaaactgagttcgccctacatctctatcagtccgtagcagcctgtcgcaacgaaaccaactttgttatctccccagcgggcgtgagcctcccactcgagatccttcagtttggcgcagaggggagcaccggacaacagttggctgacgcgctcgggtatacggttcacgataagagagtgaaggacttcttgcacgccgtgtatgctaccctcccaactagcagccagggcacagagatggagctggcttgctccctgttcgtgcaggttggcactcccctcagcccttgcttcgtcgagcatgtgagttggtgggcgaatagtagtttggagcccgcggatctgtcggagcccaactctactgccattcagaccagcgagggcgcctccagagagacggcaggcgggggaccatcagaagggccaggagggtggccctgggagcaagtgtctgccgcttttgcgcagttggtattggtaagtacaatgtcatttcagggtacttggcgcaaaagatttagttcaacagatacacaaattttgccttttacctgtgcctacggattggttctccaggtgcctatgatgcaccaaaccacagaggtgaattacggccaatttcaggacaccgcgggacaccaagttggcgtgttggaactgccttacctgggttccgcagtaagcctgttcctggtgctgccacgggacaaagatactccgctcagccatatcgagccccatttgaccgcatctactatccacctgtggacaaccagtctgcgccgggcaaggatggacgtctttctgccacggtttaggatccaaaatcagttcaatttaaagagcatattaaactcatggggggtgacggacttgttcgacccactgaaggcaaacctgaagggcattagcggtcaggatggattctacgtttctgaagcaattcataaggccaaaattgaagtactagaggagggcactaaggcctcaggcgcgaccgctctccttcttctcaaaagatctaggattcctattttcaaagctgaccggccgtttatctacttcctgcgggagccgaacacggggttcgtctttagcattggacgtgtgagcaacccactagattag

SEQ ID NO: 6580 - DNA, 936 bp, synthetic construct
  misc_feature 1..936: note = source = /note="Description of Artificial Sequence: Synthetic coding sequence"
  source 1..936: mol_type = other DNA
atgctgtaccaaaccataaacagtctgaagacgaaaaatcctaagctaaagatacttctctctatcggcggctacctctttggttctaagggctttcacccgatggtggatagcagcacatcgcgcctagaattcatcaattccatcatactgtttttgcgaaatcacaacttcgacggcctagatgtgagctggatttacccggaccaaaaagagaatacccacttcacggttcttattcatgagttagccgaggcgttccagaaggatttcactaaatcaaccaaggagcggctgctgcttacagccggagtgagtgccgggcggcaaatgattgataatagttatcaggtggagaagcttgccaaagacttggacttcattaacctgttatccttcgacttccatgggtcttgggagaaacctcttatcacagggcacaactcgcccctgagtaaagggtggcaggataggggtccgagctcatactataacgtggaatatgccgtcggttactggattcacaaaggaatgcccagtgagaaggtggtaatgggtatccccacgtatgggcacagcttcacacttgcctctgccgaaaccactgttggtgcacccgcttccggacccggagcagccggacccatcaccgaaagtagcggctttttagcttactatgagatctgtcagtttctgaagggggccaagattactcggcttcaggaccagcaggtcccatatgccgtgaagggcaaccagtgggtgggatatgatgatgtgaagtctatggagaccaaggtccagtttctaaaaaacctgaatctgggaggcgcgatgatctggtcaatcgacatggacgattttacaggaaagtcatgtaaccaaggaccttatcctttggtacaagcagtgaaacgctcactcgggagtctgtag

SEQ ID NO: 6581 - DNA, 555 bp, synthetic construct
  misc_feature 1..555: note = source = /note="Description of Artificial Sequence: Synthetic coding sequence"
  source 1..555: mol_type = other DNA
atggcaagcgaacggctgccaaatagacctgcctgtctgctggtcgccagtggtgcagctgagggcgtgagcgctcagtccttcctgcactgttttaccatggcttcaacggcttttaatctgcaggtcgcaacacctggtggtaaagcgatggaatttgtggacgtgaccgagtccaatgcccgttgggttcaagatttcaggctcaaggcttacgctagccctgcaaaacttgagtctatcgacgagcctatatgtgccgtaggccacggcgtagccgcactatgctgtgccaccaacgaggacagaagctgggtgtttgattcctacagcctgactgggccgtcagtctgtgaactcgtgcgagccccagggtttgccagactgcctctcgttgtggaggactttgtgaaagatagcggagcttgtttctccgcttctgagccagacgccgtgcacgttgtactggacagacacctagtcacgggtcagaatgccagctccaccgtcccggccgtccagaacctcttgtttctatgcgggagccggaaatag

SEQ ID NO: 6582 - DNA, 1257 bp, synthetic construct
  misc_feature 1..1257: note = source = /note="Description of Artificial Sequence: Synthetic coding sequence"
  source 1..1257: mol_type = other DNA
atgagaagtctcctcctgttgagcgctttctgcctcttagaagctgccctcgctgccgaggtcaagaaacctgccgccgccgctgcccccggaaccgccgagaagctgagccccaaagctgccacgctggctgaaagatcagcaggactcgcattcagcctgtaccaggcgatggccaaagaccaggcagttgagaatattttagtgtctcccgtggtagtggcatccagtttagggctagtgtcgctgggcgggaaggccactacagcttctcaggccaaagctgtgctgagcgccgaacagcttagagacgaagaggtgcacgccggtctgggtgagttactgcggtctttaagtaatagcacggccaggaacgtgacatggaagttgggcagtcgcctgtatggtccttcttctgtgagcttcgcagacgactttgtgaggtccagcaaacagcactataactgtgaacactcaaaaattaactttagggacaaaagatctgcccttcagtctattaacgagtgggccgcccaaacgacagatggcaaactccctgaggttactaaagacgtggagcgtaccgatggggctctgctggtcaatgcaatgttcttcaagccccactgggacgagaagtttcatcataaaatggtggacaatcggggttttatggtaacccggagttacactgtgggagtaatgatgatgcaccggacgggtttatataactattacgatgatgagaaggaaaagctccagattgtggagatgccgctcgcccataaactcagttccttaattatcctgatgcctcatcacgtggagccgttagagagactggagaaactgttgaccaaggagcagctcaaaatctggatgggcaagatgcaaaaaaaagccgtcgcaattagcctgccaaagggcgttgtcgaggtgactcacgacctccagaagcatttggctggcctgggcttgactgaagcaattgataagaacaaggccgacctcagccggatgtcaggcaagaaggacctttacctagcttcagtcttccacgcaaccgcgtttgaattggatacagatggcaacccttttgaccaggacatctacggccgcgaggaactccggtccccgaagttgttctacgccgatcatccctttatcttcctggtgagagatacccagtccggtagcctgctgtttatcggcaggcttgtcagacccaagggcgataagatgcgcgacgagctttag

SEQ ID NO: 6583 - DNA, 1425 bp, synthetic construct
  misc_feature 1..1425: note = source = /note="Description of Artificial Sequence: Synthetic coding sequence"
  source 1..1425: mol_type = other DNA
atggatcgtaacccctctcctccaccacctggccgggacaaggaagaggaggaagaggtggccgggggcgattgtattggctctacagtttactctaaacattggctctttggtgttttgagtggtttgattcagatcgtcagccctgagaacaccaaaagctcatcagacgacgaagagcagttaacagagctggacgaagaaatggagaatgaaatctgtcgcgtgtgggacatgagcatggacgaagacgtggcactgtttcttcaggaatttaatgcccccgacattttcatgggagtgctcgccaagagcaaatgtccacgtttaagagagatttgtgtggggatcctcggtaacatggcgtgctttcaggagatctgtgttagtatatcgagcgataaaaacttgggccaggttctgctgcactgtctctacgacagcgatcctcctaccctgctggagacatcacggctcctgctgacctgtctctctcaggccgaagtcgcaagcgtctgggtggagcggatccaagagcatccagcaatctatgacagcatttgcttcatcatgtccagttctacgaatgtcgatctgttggtcaaggtaggggaggtggtcgacaagctatttgacctggatgaaaagcttatgctggaatgggtccggaatggtgccgcccagccgctcgaccaacctcaggaagagagtgaagagcagcccgtgttccgcctggtaccttgcatcctcgaggctgccaaacaggttcggtccgagaaccccgaatggcttgatgtctacatgcacatcctgcaactcctgacaacagttgacgacggcattcaggctatagtccattgccctgacactgggaaggacatatggaacctcctgttcgacctggtgtgtcatgagttctgccaaagtgatgatccccctataattctgcaggaacaaaaaaccgtcctcgcatcagtgtttagcgtgcttagtgctatatatgcaagccagaccgagcaggaatacttgaagatcgagaaggtggatctccccctgattgatagtcttattcgcgtcttgcagaatatggagcagtgccaaaagaaaccagaaaactctgcagaatccaatactgaagagacgaagcgcaccgatctcactcaggacgattttcaccttaagatactgaaagacatcctctgtgaatttctatccaatatcttccaggcgttaacaaaggaaacggtggcccaaggagtcaaagaagggcagctaagcaagcagaagtgttcaagcgcctttcagaacctgctgcctttttactctccggtggttgaagactttatcaagatactccgggaagtggacaaggctttagcagacgacctcgagaagaattttccaagcctaaaggtccaaacctag

SEQ ID NO: 6584 - DNA, 438 bp, synthetic construct
  misc_feature 1..438: note = source = /note="Description of Artificial Sequence: Synthetic coding sequence"
  source 1..438: mol_type = other DNA
atgctgactaggctggtgctgtcagctcacctgtcaagtacaaccagtcccccctggacacacgccgctattagttgggagcttgataatgtcttaatgccgagtcctcgcatctggccccaggtgacgcccaccggcagatccgcgtccgtgcgatctgaagggaacacttctagcctgtggaacttctcagctgggcaagacgtgcacgctatcgtcacgcgaacgtgtgagtctgtgctttcatccgctgtgtatacccacggttgcgggtgcgtccggtccgccacgaatattacatgtcaaagtagtggtcaacaaaggcaggccgcacggcaggaagaagagaattccatctgtaaggctcatgattccagggagggtagactgggttacccactgtcagcccaccaacccggtagcggcggccctaactag

SEQ ID NO: 6585 - DNA, 1728 bp, synthetic construct
  misc_feature 1..1728: note = source = /note="Description of Artificial Sequence: Synthetic coding sequence"
  source 1..1728: mol_type = other DNA
tgaatcttcggcggctcaattcactattttagggtgccgcgggaatattggagggaccgtctgttgaagatgaaagcatgcggcctcaacacactgacgacctacgttccctggaatctgcatgaacctgagagaggcaagtttgattttagcggcaatctcgaccttgaagcctttgtcttgatggctgcagagattggactttgggtgattctacggccaggtccctatatctgcagcgagatggacctggggggactgccctcctggctgctgcaggatccaggaatgagattacggaccacttacaaggggttcactgaggctgtggacctgtactttgaccatctcatgtctcgcgtggtgcctctgcagtacaagagaggcggccctattatcgctgttcaggttgaaaatgaatacgggtcatacaataaagatcccgcctacatgccatacgtcaagaaggcattggaggatcgcggaatcgtcgagctcctgctgactagtgacaacaaggacgggctgtctaagggtatagtgcaaggggtcctagccacaatcaacctacagtcaacacacgaattgcagctgctaacgacatttctcttcaacgtgcaaggcacacagcccaaaatggtcatggaatattggactggctggttcgacagctggggagggccccataacatactggattcctccgaagtgctcaagaccgttagtgctattgttgacgcgggtagcagcatcaatctgtacatgttccacggcggcaccaatttcggatttatgaacggggcaatgcacttccatgactataagagtgatgtgacaagttatgactatgacgccgtcctcactgaagcaggcgattataccgcgaaatatatgaaactcagggatttctttggctctataagtgggattcccttgcccccacctcctgacctcttaccaaagatgccgtatgagcctctcaccccagttctgtacctcagcctttgggatgccctcaagtacctgggggagccgatcaaaagtgagaaacctattaacatggagaaccttccagtcaacgggggcaatggtcaatccttcggctacattctgtacgagaccagcattacctcatccggaattctgagtggccacgtgcacgacagagggcaagtgttcgtgaacacagtgtcgatcggcttcctggattataagacaacaaaaattgcagttccactcatccagggttacacggtgctcagaatcctggtcgagaaccggggccgagtgaattacggcgaaaacatcgatgatcagagaaaaggtctgatcggtaacttgtacctaaatgatagtcctctgaaaaatttccggatttacagcctggacatgaagaaatccttcttccagagatttgggctggacaaatggagcagtttgcctgaaacgcctaccctgcccgccttcttcctgggatctctgagcatttcaagcactccatgcgacacttttcttaagcttgaggggtgggagaagggcgtggtgttcattaatggacagaaccttggtaggtactggaatattgggccacagaagaccctttaccttccaggcccctggctgtcatcaggaattaatcaagtgattgtcttcgaggagaccatggcaggtcccgcacttcagtttaccgagaccccccacctcgggcgcaatcagtacatcaaatag

SEQ ID NO: 6586 - DNA, 255 bp, synthetic construct
  misc_feature 1..255: note = source = /note="Description of Artificial Sequence: Synthetic coding sequence"
  source 1..255: mol_type = other DNA
atgagaactctttttaacttactgtggctggcactagcctgcagccccgtgcatacaaccctcagtaaaagcgatgccaaaaaggccgctagtaaaaccttgctcgaaaagtcccagttctcggacaaaccggtccaagaccggggactcgttgttaccgatctgaaagctgaatctgtcgtgctggagcaccgaagttactgttccgcaaaagcccgcgaccggcattttgcaggtgacgtgctcggctactag

SEQ ID NO: 6587 - DNA, 744 bp, synthetic construct
  misc_feature 1..744: note = source = /note="Description of Artificial Sequence: Synthetic coding sequence"
  source 1..744: mol_type = other DNA
atgagatcgttgctgctcctatctgcgttctgtttactggaagctgccttggccgctgaagtaaaaaagccagctgcagctgcagcacctgggactgccgagaaattgtcacctaaagccgccacgttggccgaacgctccgccgggcttgccttttcactgtatcaggcaatggccaaagaccaggctgtggagaacattctggtcagccctgttgttgttgcatcaagtcttggcctggtcagcctcggtggaaaggcaactactgcaagccaggctaaagccgtattgtctgctgagcagcttcgcgacgaggaggtccatgctggactgggggagctgctccgctctttaagcaacagcaccgcccgcaacgtcacttggaagcttgggtcccgcctgtatggaccttcaagcgtctcgttcgcggacgacttcgtgagatctagtaaacagcactataactgtgaacactccaagatcaacttcagggacaaacggtccgcattgcagagcattaatgagtgggccgctcaaacaaccgatgggaagctccctgaagtcaccaaagacgttgagagaaccgacggcgccctgctagtcaatgcaatgttctttaaacctcactgggacgagaagttccatcacaaaatggtcgataaccggggtttcatggtgacgcgatcatacacagtcggcgtgatgatgatgcataggaccgggctgtacaattattacgactag

SEQ ID NO: 6588 - DNA, 117 bp, synthetic construct
  misc_feature 1..117: note = source = /note="Description of Artificial Sequence: Synthetic coding sequence"
  source 1..117: mol_type = other DNA
atgcggacattgtttaatctcctgtggctcgcattagcttgctcccctgtgcatacaaccctcagcaaatcagatgccaaaaaggccgccagcaaaaccttactggaaaaggtctag

SEQ ID NO: 6589 - DNA, 750 bp, synthetic construct
  misc_feature 1..750: note = source = /note="Description of Artificial Sequence: Synthetic coding sequence"
  source 1..750: mol_type = other DNA
atgcgctcactgctactactgagtgcattttgtctgctcgaggccgctctggccgcggaagtcaagaaacctgcagccgctgcagccccagggacagccgaaaaattgagtccaaaggccgcaactctggcagaaaggtctgctggcctcgccttttcactttatcaggccatggctaaggaccaagccgtcgagaacattctggtctcgcccgtggtcgtcgcgtcatctctcgggctcgtctcccttggagggaaggctacaaccgcgtcccaggcgaaggctgttctcagtgccgagcagttacgcgacgaggaagtccatgctggacttggcgagctgctcagatccttgtcaaactctacagcaagaaacgtgacgtggaagttggggagcagactatacgggccgtcctccgtgtcattcgctgatgatttcgtgcgatcttcaaaacagcactataactgcgaacattccaagattaattttcgggacaaacgttccgccctgcagtcaataaacgagtgggccgctcagacaaccgacggcaaactgcccgaggttacaaaggatgtagaacggacagatggagcccttctggtgaatgctatgttctttaagccacattgggacgaaaaattccatcacaagatggtggacaataggggattcatggtaacgcgatcatatacagtgggagtcatgatgatgcataggaccggcctatataattactacgacgacgagtag

SEQ ID NO: 6590 - DNA, 201 bp, synthetic construct
  misc_feature 1..201: note = source = /note="Description of Artificial Sequence: Synthetic coding sequence"
  source 1..201: mol_type = other DNA
atgaaacctctgctcgtcgtgtttgtgttcttgttcttatgggatcccgtattagctggcatcaattctttgtcatcagaaatgcataaaaaatgttacaagaacggcatttgtcgtctggaatgttatgagtcggagatgctcgtggcatattgcatgttccagctggagtgttgcgtgaagggaaaccccgctccctag

SEQ ID NO: 6591 - DNA, 1002 bp, synthetic construct
  misc_feature 1..1002: note = source = /note="Description of Artificial Sequence: Synthetic coding sequence"
  source 1..1002: mol_type = other DNA
atggtttcaaaaagtaggtggaagcttctagccatgctcgctttggtgttagtggtgatggtttggtactctattagtcgggaagatcgctacatcgagctgttttattttcccattccagagaagaaagagccgtgcctacagggtgaagccgaaagcaaggcctccaagttgttcggcaattactctcgtgaccaacccatcttcctacgccttgaggattacttctgggtgaagactccatcggcctacgagctgccatacggtaccaagggatctgaagacctgcttcttagagtcctcgccatcactagctcttccatcccaaagaatatccagtccctgcgttgtaggcgttgtgtcgtggtaggcaatgggcatcgtttgagaaactccagtctcggcgatgccatcaataagtacgacgtagtgatcaggctcaacaacgcgcccgtcgctggctatgaaggagatgtcgggtccaagactacgatgcggttgttctatcccgagtccgcgcacttcgaccctaaggtggaaaataaccccgacacactgctggtcttggtggcatttaaggctatggactttcactggatagagacaatactgtccgacaagaaacgcgtgcgcaaggggttctggaagcaaccacctctgatttgggacgtaaatcccaaacagatacgcatcttaaacccctttttcatggagatcgccgctgataagttgctgtctcttcccatgcagcagccgcgcaagatcaagcaaaaacctactacagggctcctggcaattacgcttgcattgcacctgtgtgatctcgtccacatcgccggctttggctatccagacgcctacaacaaaaagcaaactatccactactacgagcaaattactctgaaaagtatggccggaagtggtcacaacgtgagccaggaagcgttagctatcaaacggatgctggaaatgggagcgataaaaaacctgacttcattttag

SEQ ID NO: 6592 - DNA, 645 bp, synthetic construct
  misc_feature 1..645: note = source = /note="Description of Artificial Sequence: Synthetic coding sequence"
  source 1..645: mol_type = other DNA
atgcgacccaagactgggcaggttggttgcgaaacacccgaggaactcggtcctggacctcgtcagagatggcctctcttacttctgggactggccatggtcgcacacgggctgctccggccaatggttgctccacagtccggggacccagacccaggagcctctgtaggttcctccagatcttccctcagaagcctctggggcaggctgttgctgcaaccttcccctcagagggctgatcccaggtgttggcccagggggttctggtccgagccccagagcctgtgctacgtgttcggtaccgggaccaaggtgacagtactggggcagccaaaggctaaccccacagtgaccctgttcccgcccagttcggaggagttgcaggctaacaaagccacccttgtttgcctgatcagtgacttctatcccggagcagtaactgtggcgtggaaagccgatggaagccctgtgaaagcaggcgtggagactacaaaaccttctaagcagtccaacaacaaatacgccgctagcagctacctgtctctaactccagagcagtggaaatcacatcgtagctattcttgtcaggtcactcacgaagggtccaccgtggagaaaaccgtggcaccgaccgagtgctcatag

SEQ ID NO: 6593 - DNA, 1050 bp, synthetic construct
  misc_feature 1..1050: note = source = /note="Description of Artificial Sequence: Synthetic coding sequence"
  source 1..1050: mol_type = other DNA
tagctgtataagaatcggcttggaagcggggggagaggccggtgcataaagcaaggagaaaactggtactctcccaccgaattcgaggccatggcaggacgagccagttccaaagattggaaaaggagtataagatatgctggtcggccccttcagtgcctcatccaggacgggattttaaacccacatgctgcgagctgcacttgtgccgcttgctgtgacgatatgaccttgagtggtcccgtgcggttatttgtcccttataaaaggcgcaagaaggagaacgaactcccgactacccccgtgaagaaagactccccgaagaatataaccctcctgcccgctaccgccgccacaacttttaccgttactccctccggtcagatcacaacatcaggtgccctgaccttcgaccgcgcttcaaccgtggaggccacagctgtgatctctgagagccccgctcaaggcgatgtctttgcaggtgccactgtgcaggaggcctcagtccagccaccctgcagggcttcacaccccgaacctcactatccgggataccaggactcctgtcagatagctccattccctgaggcagcgttacccacaagtcatcctaaaatcgtcctgacctccctgcccgccctggccgtcccacctcccacccctaccaaagcagcaccacctgcactcgttaatgggctagagctctctgagcctaggtcttggctctatcttgaggaaatggttaactctctgttgaacacggcccagcagctgaagacccttttcgagcaggccaaacacgcctccacttaccgagaggccgctacaaaccaggcaaagattcacgccgatgctgaaagaaaggagcagtcatgtgtgaactgtggacgtgaggccatgtctgagtgtacgggctgccataaggtgaactattgcagtactttttgccagcgcaagcggtggtccctcaccatgctgacgagtctggtgagcatatcctggctgagagctattctcccctgccagcccccaaaagtactcggcctgtag

SEQ ID NO: 6594 - DNA, 600 bp, synthetic construct
  misc_feature 1..600: note = source = /note="Description of Artificial Sequence: Synthetic coding sequence"
  source 1..600: mol_type = other DNA
atgtcgctggacatccagtccctggatatccagtgcgaagaactttccgacgccagatgggctgagttgcttcccctattgcagcagtgccaggtagtcaggcttgatgattgcggcctcaccgaggccaggtgtaaggatatcagttctgccctcagagtcaatccggctctcgccgaattgaatcttaggtccaacgaactcggcgacgtgggagtccattgtgtacttcagggactccaaacacctagttgcaaaatccagaaactgagtctgcagaattgctgcttgactggtgccgggtgtggcgtgctttcctcaaccctgcgaacattacccaccctgcaagagctacatctctcggacaacctgctcggagatgccgggctgcagctgctgtgtgagggactgcttgacccacagtgtcgtcttgagaaattacagctcgaatattgtagtctgagtgccgcaagctgcgaacctctggcttctgtactgagggccaagccagacttcaaagagctcacagtgagcaataatgacattaacgaggccggcgtgagggtgctctgtcagggcctgaaagacagcccatgctag

SEQ ID NO: 6595 - DNA, 465 bp, synthetic construct
  misc_feature 1..465: note = source = /note="Description of Artificial Sequence: Synthetic coding sequence"
  source 1..465: mol_type = other DNA
atggcaggcatcccaggactgctgttcctcctgtttttcctgttatgcgccgtggggcaggtgagtccttactcagcaccttggaagccaacatggccagcctacaggctgcctgttgtgttgccacagtccaccctgaatcttgccaaaccagattttggcgcggaagccaagttggaagtgtcatcttcgtgtggaccacagtgtcacaaaggaactccgctcccaacgtatgaagaggccaagcagtacttgtcttacgaaacattgtacgcaaacggctctcgaactgaaacccaagtgggcatctatatcttgagcagcagcggagatggtgcccagcatagggacagcggatctagcgggaaatcacgtcggaagcggcagatttacgggtatgactccagattttccatctttgggaaggacttcctgctgaactacccattctccacaagcgtgtag

SEQ ID NO: 6596 - DNA, 936 bp, synthetic construct
  misc_feature 1..936: note = source = /note="Description of Artificial Sequence: Synthetic coding sequence"
  source 1..936: mol_type = other DNA
atgggtatcatacagtctatcctcgccacctcacgcgactgctatagcttcaagaagaagcctattccgaagaagcccactatgttggctctggccaaaatcctgctcatttcaaccttgttttactccctgctttcggggtcccatgggaaggagaaccaggatataaatactacccagaacatcgccgaggtctttaagaccatggagaataagccaatttcactggagtccgaagccaatctaaactctgataaagagaacattaccaccagtaacttgaaggcctcacacagcccacctctgaatctgcccaacaattctcatggcatcactgatttttcctcgaactcctccgccgagcactcgctgggtagtcttaaaccaacatcaacaatcagcaccagcccgcctttaattcacagttttgtatctaaagtcccatggaacgcccctattgcggatgaggatctccttcctattagtgctcaccccaacgctacacccgccttatcatctgaaaacttcacatggagtcttgtcaatgacactgtcaagacgcctgacaattcttcaatcaccgtgtcaatcctgagcagcgagcccacgagccccagcgttacgcctctgatcgtggaaccttcagggtggctgaccaccaattccgacagtttcactggatttaccccgtaccaggaaaaaacaacactccaacctacattgaagtttaccaataactccaaacttttcccgaacacatcagacccacaaaaagtgctgcgtctagacaacgcccctgagccctacgacgtatcttttggcaattcttcctactataaccccactttaaacgatagtgctatgcccgagagcgaagaaaatgctcgcgacggcattccaatggacgacattcctccactccgtacaagtgtgtag

SEQ ID NO: 6597 - DNA, 1404 bp, synthetic construct
  misc_feature 1..1404: note = source = /note="Description of Artificial Sequence: Synthetic coding sequence"
  source 1..1404: mol_type = other DNA
atgctgatcttttggacaataaccctgtttctgcttggagcagccaaaggcaaagaggtatgctatgaagatctgggatgtttcagcgatacagagccatgggggggtacagcgatccgaccacttaaaattctgccatggtcaccagagaaaataggaactaggtttctgctctacacaaatgaaaaccccaataactttcagattctactcctgagcgaccccagcactatcgaagcctctaatttccaaatggaccggaaaacgcggttcattattcacggcttcatagacaaaggtgatgaatcatgggtgacagatatgtgtaagaaactgtttgaggttgaagaggttaactgtatttgtgttgactggaagaagggctctcaggcaacatacacccaagctgccaataacgtcagggttgtgggcgcccaggtggctcaaatgctcgatatattactgactgaatattcttatccaccgagcaaggtccacctgataggacactcgctgggagctcacgttgcaggagaagctggcagcaagacccccggcctgagtcggataaccggtctggatcctgtggaagcttcattcgagtcaacaccggaagaggtgcgtcttgatccctcagacgctgactttgtggacgtgatccacaccgacgctgcaccactaattccctttctgggattcggcacaaaccagcagatgggtcaccttgactttttcccgaacggcggtgagtcgatgccgggctgtaagaaaaacgctttgagccagatcgtcgatctggacggtatttgggctggcaccagggattttgtcgcgtgtaatcatctgcgatcttacaaatattaccttgaatctattctgaacccagacgggtttgccgcttacccttgcacaagctacaagagttttgaaagtgacaagtgcttcccgtgtcccgaccaaggttgtccccagatgggccattatgctgacaagtttgcaggcagaacatcagaagaacagcagaagtttttcctgaataccggcgaggcctcaaacttcgcaagatggcggtacggagtatcaatcaccctcagcggacgcaccgcaacaggccagattaaggtggcactcttcgggaataagggcaatacacaccagtacagtatattccggggaatactgaagcctggatccacgcactcgtacgaattcgatgctaaattggacgtgggcactatagagaaagtgaagtttctatggaataataacgtcatcaatcccaccctacctaaggtgggtgcaaccaagatcacagtccagaagggggaggaaaagaccgtttacaatttttgctcagaagataccgttagggaagatacgctcctgaccctaacaccttgctag

SEQ ID NO: 6598 - DNA, 81 bp, synthetic construct
  misc_feature 1..81: note = source = /note="Description of Artificial Sequence: Synthetic coding sequence"
  source 1..81: mol_type = other DNA
atgcgaaccctattcaatctcctctggctcgccctagcatgctcacccgtgcacaccaccctgtctaaaagtgatgcatag

SEQ ID NO: 6599 - DNA, 549 bp, synthetic construct
  misc_feature 1..549: note = source = /note="Description of Artificial Sequence: Synthetic coding sequence"
  source 1..549: mol_type = other DNA
atgcgacgcatgtgggccactcagggcctcgcagtggccctggccttgtcagtgttacctggatcaagagcactccggcccggagactgtgaggtctgcatatcctacttaggccggttctatcaggatctaaaggacagagacgtgacttttagcccagcgactatagagaatgaactgatcaagttctgtcgtgaagctcggggcaaggagaatcgactgtgttattatatcggggccactgacgacgcggctaccaagatcattaatgaggtgagtaagcctctggcccaccatattcccgtcgaaaaaatctgcgagaagctgaaaaagaaggactcccagatttgcgaactgaagtatgataaacagatcgacctttccactgttgatctaaagaagctgcgagtgaaagagctgaagaagattcttgatgactggggtgaaacgtgtaagggctgtgccgaaaaatctgattacatcagaaagatcaatgagctgatgccaaaatatgcccccaaagccgcttctgcccgtaccgacctctag

SEQ ID NO: 6600 - DNA, 153 bp, synthetic construct
  misc_feature 1..153: note = source = /note="Description of Artificial Sequence: Synthetic coding sequence"
  source 1..153: mol_type = other DNA
atgaaggtgtttttccttttcgctgtgctgttctgtcttgtccagacaaactccgtacatatctcacatagagaagcgcgcggcccatcttttaggatatgcgtggacttcttgggtccccggtgggcacgcggctgttccactggcaactag

SEQ ID NO: 6601 - DNA, 666 bp, synthetic construct
  misc_feature 1..666: note = source = /note="Description of Artificial Sequence: Synthetic coding sequence"
  source 1..666: mol_type = other DNA
atgggagccacgaccatggaccagaagtcactgtgggccggggtcgtggtgcttctgctgttgcagggcggcagcgcgtataaactggtttgttatttcacgaattggagccaagacaggcaagaacccggcaagtttactcccgagaacattgatccttttctgtgctcacaccttatctacagttttgcaagcatcgaaaacaacaaggtgatcatcaaggacaagtcagaggtgatgctctaccagacaatcaacagccttaaaaccaaaaacccaaaactgaagattctgttgagcatcggtggctacctgtttggtagcaagggctttcaccctatggtcgactcctctacctcaaggctcgagtttataaatagtattatcttgtttctgcgaaatcacaacttcgacggtctggacgtcagctggatatacccagatcaaaaagagaacacacactttaccgtgctcatccacgagttagcagaagcatttcagaaagacttcaccaaaagcacaaaagagcgcctactgttaactgctggcgtttctgccggcaggcagatgattgacaatagctatcaggtggaaaagcttgctaaggacttggacttcattaatctgctaagctttgacttccatggtagctgggagaaaccctag

SEQ ID NO: 6602 - DNA, 1257 bp, synthetic construct
  misc_feature 1..1257: note = source = /note="Description of Artificial Sequence: Synthetic coding sequence"
  source 1..1257: mol_type = other DNA
atgaggaccctttttaacttattatggctggctctagcgtgctctccagttcacaccaccctgtctaaatctgacgccaagaaagcggcaagcaagactctgctggagaaagttaagttctgtagttgctgcccgggctggagcgcgatggcgcgcagctggttgacagcgacatcggccacgcagtcacaatttagcgacaagcccgtgcaggaccgcggtttagtcgttactgaccttaaggccgaatctgttgttctggaacatcgtagctactgcagtgccaaagcccgcgacaggcattttgcaggggatgttctggggtacgtgacgccatggaactctcatggctatgatgtaacgaaagtgttcggctccaagttcacgcaaatctccccagtctggttgcaattaaaaagaaggggacgtgaaatgttcgaagtgacaggattgcatgatgtggatcaaggttggatgagagccgtcaggaagcatgctaaaggactgcatattgtcccacggctcctgttcgaggactggacctatgacgacttccgtaacgtacttgactccgaggacgaaatagaggagctgagtaagaccgtggtgcaggttgccaaaaatcagcacttcgatggttttgtggttgaggtttggaatcaactgttatctcagaagcgcgtcggtcttattcacatgctcacacacctggcagaggccctacatcaggcacggcttcttgccctgctggtgatcccgccagccatcacccctggtaccgaccagctgggaatgtttactcataaggagtttgaacagttagcacccgttctggacgggtttagcttgatgacatatgattattccacagcgcaccaacctggccctaatgctccgttgtcctgggtccgtgcctgcgtgcaggttttagacccaaagagtaaatggcgcagtaaaattctccttgggctcaacttttatggtatggattacgctactagtaaggatgcccgcgagccagtggtcggggctcgctacatccagactcttaaagatcaccgcccaaggatggtttgggactcccaggcctcggagcattttttcgagtacaaaaagagtagaagcggaaggcatgtggtcttttaccccacattaaagagcctgcaggtgagactcgaactggcacgcgagctcggggtgggcgtgtctatctgggagctcggccagggactggactatttctacgatctcctgtag

SEQ ID NO: 6603 - DNA, 612 bp, synthetic construct
  misc_feature 1..612: note = source = /note="Description of Artificial Sequence: Synthetic coding sequence"
  source 1..612: mol_type = other DNA
atgagatccctgcttctgctatcagccttttgcttgctggaggcagctttggccgctgaggtaaaaaagcctgcagcagcagcggcacctggtacagcagaaaagctgagccctaaggctgccacactggcggaaagatcagccggattagctttttctctgtatcaagcaatggctaaagaccaagcagtggaaaacatcctggtctccccagtggttgtagcgtctagcttaggcctggtcagcttaggcggcaaagcaacaacagcctcccaggctaaagctgtcttgtctgccgagcagctccgggatgaagaagtccacgctgggctcggggaattgctcagatctctcagcaactcaacggcaagaaacgtgacctggaagctgggcagccggctgtacggtccctcatccgtgtctttcgccgacgatttcgtgagatctagcaagcagcattacaattgtgaacacagcaagattaatttccgcgataaacgttcagcactgcaatctatcaatgaatgggcagctcaaacaacagacggcaaacttcctgaggtgacaaaagatgtcgaaagaactgacggagctctgctggtgaatgcctag

SEQ ID NO: 6604 - DNA, 492 bp, synthetic construct
  misc_feature 1..492: note = source = /note="Description of Artificial Sequence: Synthetic coding sequence"
  source 1..492: mol_type = other DNA
atgcggtctctccttctcctgagcgcgttttgcctgctcgaggccgccctggctgcggaggtgaagaagccagcagcagccgcagctcccggtaccgcagagaagctctcccccaaagcagcaaccttggccgagcgctccgcgggactggccttttcactgtaccaggccatggctaaggaccaagcagtagagaatattctcgtgtcgccagtggtagtcgctagttccttgggtctggtgtctctcggcgggaaggcaaccactgctagccaagctaaggctgttttgagcgcggagcaactccgcgatgaggaagttcacgcagggttgggggagctgctacgttcccttagcaatagcactgctcgcaacgttacctggaagctgggaagtcggttatacgggccaagcagtgtctctttcgcggatgatttcgttaggtccagcaaacaacattataattgcgaacactccaaaattaacttttag

SEQ ID NO: 6605 - DNA, 570 bp, synthetic construct
  misc_feature 1..570: note = source = /note="Description of Artificial Sequence: Synthetic coding sequence"
  source 1..570: mol_type = other DNA
atgtctctggatatccaaagcctggatattcagtgtgaggagttgagcgacgcacgatgggcggagctgcttccattactgcaacaatgtcaggtggtaagattagatgactgtggtctgaccgaagcacgttgcaaggatataagcagcgccctgagagtcaacccagccctggccgaactgaatctgagatctaatgaacttggagatgtgggcgtgcactgcgtcttgcagggtttgcaaaccccttcgtgtaagattcagaagctgagcttacagaattgttgcttgactggagccggttgcggagtcctgtctagcactctgcgcacgttgccgacactacaagaattacacctttccgacaacctattgggagatgcgggcctgcagcttctgtgcgagggtctgctagaccctcagtgtcgcctggagaagctgcagctggagtactgcagcctatccgctgccagctgcgagccgctggcctcagtgttgcgagctaagcccgacttcaaggaactcacggtgtcaaacaacgatattaatgaagcaggggtgcgagtctag

SEQ ID NO: 6606 - DNA, 585 bp, synthetic construct
  misc_feature 1..585: note = source = /note="Description of Artificial Sequence: Synthetic coding sequence"
  source 1..585: mol_type = other DNA
atgtcactagatattcagagtctggacatccagtgcgaagagctgtctgatgcacgatgggccgagttgctcccattactgcagcagtgccaggtagtgcgactagatgattgcgggttaaccgaggctagatgcaaagacatcagcagcgctctgcgagtgaacccagcgctggccgaactcaacctgaggtcaaatgaactaggtgacgttggcgtgcattgcgtactgcagggtctgcaaacaccgagctgtaaaattcagaagctgtcactccagaattgctgcctgacaggtgcaggctgcggtgtactgagttccacactccggacgcttcctaccctgcaagaactccatctgagcgacaatctgctgggcgatgcgggactgcagttgctctgcgagggtctactggatcctcagtgccgcctggagaaactgcagctcgagtactgctcactgtctgctgccagctgcgaacccctcgcctccgtgctccgggccaaacctgactttaaggaacttacagtgagcaacaatgacattaatgaggcgggggtgagggtgctctgccagggactgtag

SEQ ID NO: 6607 - DNA, 1086 bp, synthetic construct
  misc_feature 1..1086: note = source = /note="Description of Artificial Sequence: Synthetic coding sequence"
  source 1..1086: mol_type = other DNA
atgggtataatccagagcatcctggcgacctctagagattgttactcctttaaaaagaaaccgattcccaagaagccaaccatgcttgctctggctaagattcttctcatcagtaccttgttttatagcctgttgtctggctcccacgggaaagaaaaccaggatatcaacacgacccagaatattgcggaagttttcaaaacgatggaaaataaaccgatctcactggaatccgaggcaaacctaaactccgacaaagaaaatattactaccagcaatctgaaggcatctcattctccaccactcaatctgcctaataactctcatggaatcactgacttttcgagcaatagcagtgccgaacacagcctgggttctctcaaaccaacaagcaccatctcaacttctcccccactcatccactcctttgtgagcaaggtcccttggaatgcacccatcgctgatgaggatctgctgcctatcagcgcccaccctaatgctacccccgctctcagcagtgagaacttcacctggtcccttgtgaatgataccgtgaagacccccgacaatagctctatcaccgtcagcattttgtccagcgaaccaaccagcccatcagtgaccccactcatcgtggaaccttcaggctggctaactaccaacagtgatagtttcacaggctttacgccgtaccaagagaagacaacgctccagccaaccctaaaattcacgaataacagtaagctcttccccaacaccagcgatccccagaaggagaatcgaaacaccggcatcgtctttggagctatcctgggagcaatactcggcgtctccttgctaaccctggtgggttatctcctctgcggcaagaggaaaacagactctttttctcaccgccggctttacgatgatcgcaatgaacccgttctgcggcttgacaacgcccctgagccttacgacgtgtctttcggcaactcatcttactacaaccccacactcaatgactccgcaatgcctgagagcgaggagaacgcacgcgacgggatcccaatggatgatatcccgcctcttaggacctctgtctag

SEQ ID NO: 6608 - DNA, 327 bp, synthetic construct
  misc_feature 1..327: note = source = /note="Description of Artificial Sequence: Synthetic coding sequence"
  source 1..327: mol_type = other DNA
taacccaagagtaagtggcgctccaagatcctcctgggcttgaacttctatggaatggattacgcaacaagcaaggatgcacgagagcccgtggtcggagcgaggtacatccagacattgaaggaccacaggccacgcatggtgtgggattctcaagcctcagaacacttctttgaatataaaaagagtcgctcaggcagacacgtcgtcttctatccaaccctgaaatcactccaagttcggctcgaactggcgcgagaactgggcgttggcgtaagcatatgggagctgggccagggtcttgactacttctacgacctgctgtag

SEQ ID NO: 6609 - DNA, 504 bp, synthetic construct
  misc_feature 1..504: note = source = /note="Description of Artificial Sequence: Synthetic coding sequence"
  source 1..504: mol_type = other DNA
atgaggtccctcctgcttctgtccgctttttgtcttttggaggctgcattggcggcggaagtgaagaagccggccgcggccgccgccccagggactgctgagaaactttctcctaaagctgctacgctggcggaacggtcagcggggcttgccttcagtctgtatcaggccatggcgaaggaccaggccgtggagaacatcctcgtaagcccggtcgttgttgcttcctccctaggcttggtgtcactgggaggcaaggctaccactgcttctcaggctaaggccgtactgtccgccgagcagttaagagatgaggaggttcacgctgggcttggagaactattgcggtctctgtcaaacagtaccgcacggaacgtcacttggaaattagggagccggctgtatggaccatctagtgtatcttttgccgacgatttcgttaggagctctaaacagcattacaattgtgaacactccaaaatcaactttagggacaaaagatag

SEQ ID NO: 6610 - DNA, 1209 bp, synthetic construct
  misc_feature 1..1209: note = source = /note="Description of Artificial Sequence: Synthetic coding sequence"
  source 1..1209: mol_type = other DNA
atgatggtagctctcagaggggcaagcgcactgctagtcctgttcctcgccgccttcctcccgcccccgcagtgcacccaggacccagccatggttcactatatttaccagagatttcgagtgctcgaacaggggttggaaaagtgcacacaggcaactagagcgtatattcaggagttccaggagttttcaaagaatattagcgtgatgttggggcgctgccagacgtacacctccgaatataagtctgcggtcggcaacctggctctgagagtggagcgtgctcagcgcgaaatagattacatacagtacctgcgggaggccgatgagtgcattgagagtgaagacaagacccttgcggaaatgctgctgcaagaggccgaagaagagaaaaagattaggacactgctaaatgcctcgtgtgataacatgttgatgggtatcaagagtcttaagattgtgaagaagatgatggacacccacggatcatggatgaaagatgcggtatacaacagccctaaggtctatctgctaataggttctcgcaacaataccgtgtgggaattcgccaatatacgcgccttcatggaagataacactaaaccagctccacggaagcagattctcactctgtcctggcagggaacaggccaggtcatttacaaaggcttcctctttttccacaatcaggcgacatccaacgagatcattaaatacaacttgcaaaagagaacagtcgaggatagaatgctgctgcccgggggagtggggcgcgctctggtctatcagcatagtccaagcacgtacatcgatcttgctgtcgacgaacacggcttgtgggccatccactctggacctggtactcatagccatctggtgctgactaagattgagcctgggactctgggcgtggagcatagttgggacaccccctgcagatcccaagacgcggaggctagttttctgctatgtggcgtgctatatgttgtgtattcaacaggcgggcaggggcctcacaggatcacatgcatttacgaccccctggggacaatttctgaggaggacctgcctaacctcttcttcccaaagaggcctcgctctcactccatgatccactacaaccctagggataagcagctctacgcctggaacgaagggaatcagattatttacaagctgcaaacaaagaggaaattgccgctgaagtag

SEQ ID NO: 6611 - DNA, 975 bp, synthetic construct
  misc_feature 1..975: note = source = /note="Description of Artificial Sequence: Synthetic coding sequence"
  source 1..975: mol_type = other DNA
atgagaagcctcctactactctccgccttctgtctcctggaggccgcgttagctgccgaagtcaaaaagcctgcggccgcagcagcccctgggaccgccgaaaagctgagtcccaaggctgctaccctcgctgaaaggagcgcaggcttggctttttcactctaccaggctatggccaaagaccaggccgtcgagaacattctggtaagcccagtagtggtcgcttcttcgctcggtctcgtctctctggggggaaaggctactaccgcatcccaggccaaagcagtactctctgcagagcagcttcgtgatgaagaggtgcacgccggactcggcgagctcctgcggagcctcagcaactcaactgcccgaaacgttacctggaagttaggaagcaggctctacgggccaagttcagtatccttcgcagacgatttcgtgcggtccagtaaacagcactacaattgcgaacacagcaaaatcaacttccgcgacaagcgatcggcgctgcagagcattaacgagtgggccgctcagacaaccgatggaaagctgccagaagtgactaaagatgtcgaacggaccgacggagctttgctggttaatgccatgttttttaagccacactgggatgagaaattccaccacaagatggtggataatcgaggcttcatggtgacacgaagttacactgtgggcgtgatgatgatgcacagaaccggcttatataactactacgacgacgagaaagaaaagctacagatcgtagaaatgccccttgcacacaaactgtccagcctcatcatcctgatgcctcatcacgttgagcctctggaacgacttgaaaaactcctcacaaaagagcaacttaagatatggatgggcaagatgcagaaaaaggccgttgccattagccttcccaagggggtggtggaggtgacacacgatctgcaggtgcggggggggcctgcgtag

SEQ ID NO: 6612 - DNA, 990 bp, synthetic construct
  misc_feature 1..990: note = source = /note="Description of Artificial Sequence: Synthetic coding sequence"
  source 1..990: mol_type = other DNA
atggtcagtaaatcccggtggaagttactggcaatgttggctcttgtgctcgttgttatggtctggtactccatctctagggaagactccttctatttccctatcccggaaaaaaaggagccctgtctccagggagaagccgagtctaaagcatctaagctgttcggcaactattcccgggaccagccaatctttctccggctggaagactacttctgggtcaagacgccatcagcctatgagcttccttatgggacaaagggatcggaagaccttctcttacgggtgctggccatcacatcctccagcatcccaaagaacattcagtccctccggtgtagaaggtgcgtggttgtgggaaacggccaccggctcagaaactcgtccctgggcgacgccatcaacaagtatgatgtggtcattcgtttgaataacgctccggtcgcaggctacgagggagacgtagggtccaagaccacaatgcgactcttctaccccgagagcgcccactttgatccaaaggtcgaaaacaaccccgatacgctcctggtgctcgtcgctttcaaagctatggactttcattggatcgagactatattgtcagacaaaaagagagtgcgcaaaggcttttggaagcaaccgcccctcatctgggatgtgaaccccaaacagatacggattctgaacccattctttatggagattgccgcagacaagctgctctccctacccatgcaacagccacggaagataaagcagaagccaactaccggcttgctagcaatcacattggccctccatttatgcgatctggtgcatatcgccggatttgggtatcctgacgcatataataagaaacagacgatccactattacgagcagattacactcaagagcatggcgggatccggtcacaatgtgtcgcaggaggccctcgcaataaagaggatgcttgagatgggcgcaatcaagaacctgactagtttctag

SEQ ID NO: 6613 - DNA, 351 bp, synthetic construct
  misc_feature 1..351: note = source = /note="Description of Artificial Sequence: Synthetic coding sequence"
  source 1..351: mol_type = other DNA
atgcgtactctttttaatctgctgtggttggcactcgcatgcagccccgtgcacactacactcagtaaatctgacgcaaagaaagccgcttctaaaactttgctggagaagagccaattctctgataaacccgtgcaggacaggggcttggttgtgacagatctgaaggcggaaagtgtggtgctggagcaccgaagctactgcagcgcaaaggcccgggataggcacttcgcaggagacgtactgggatacgtcaccccatggaacagtcacggctatgatgttaccaaggttttcggatcaaaatttactcagatttctccagtgtggttacagctgaaaagacgctag

SEQ ID NO: 6614 - DNA, 282 bp, synthetic construct
  misc_feature 1..282: note = source = /note="Description of Artificial Sequence: Synthetic coding sequence"
  source 1..282: mol_type = other DNA
atggacagcctgcggaaaatgttaatttccgtcgctatgctgggggctggcgcgggagtgggctatgcactactggtaattgtcacacctggcgaacggaggaagcaggagatgctgaaggaaatgcccttacaagaccccaggtctcgagaggaggccgcaaggacccagcagctccttctagctactctgcaagaggccgccacaacccaggaaaatgtggcctggcgcaagaattggatggtcgggggtgaaggtggcgctgggggccgttctccttag

SEQ ID NO: 6615 - DNA, 255 bp, synthetic construct
  misc_feature 1..255: note = source = /note="Description of Artificial Sequence: Synthetic coding sequence"
  source 1..255: mol_type = other DNA
atgaggccaaagacaggacaggtggggtgcgaaacccctgaggagctcggaccaggtccacgccagcgttggccgttgctgctgctgggtttggcgatggtcgcccacggcctgctccgaccaatggtagccccacagtcgggtgaccctgatcctggtgccagcgtggggagctctagaagtagcctgcggtcgctctgggggcggtccgcacaggggcaaccccattgtcactccgttcctgctctcttgtag

SEQ ID NO: 6616 - DNA, 27 bp, synthetic construct
  misc_feature 1..27: note = source = /note="Description of Artificial Sequence: Synthetic coding sequence"
  source 1..27: mol_type = other DNA
atgagcctggacattcagagtctttag

SEQ ID NO: 6617 - DNA, 576 bp, synthetic construct
  misc_feature 1..576: note = source = /note="Description of Artificial Sequence: Synthetic coding sequence"
  source 1..576: mol_type = other DNA
atgctgatattttggaccattaccctcttcttgttgggggctgccaagggaaaggaggtctgttatgaggatctcggctgcttttcggacacggaaccttggggcggtacggctatcagacccctgaagatcctcccctggtcacctgagaagatcggaacccggtttttactgtacacgaatgagaatcctaacaattttcagatcctcctcctgagtgatcccagtaccatagaagcatcaaactttcaaatggaccgaaagacccgctttataatacacggttttattgataagggagatgaaagctgggttaccgacatgtgcaaaaaactctttgaagtcgaggaggtcaattgtatctgtgtcgattggaaaaagggatctcaggcaacctacacacaagccgctaataatgtgagggtagtgggtgcgcaggttgctcagatgctcgatattctcctgacggagtactcttaccctcctagcaaggtgcatctcatcggtcatagcctcggtgcccatgtggcaggcgaggccggaagcaagactcctggcctgtcgcgaattacctag

SEQ ID NO: 6618 - DNA, 123 bp, synthetic construct
  misc_feature 1..123: note = source = /note="Description of Artificial Sequence: Synthetic coding sequence"
  source 1..123: mol_type = other DNA
atgagcctcgatattcagtcgttagacatccagtgtgaggagcttagcgacgcgaggtgggccgagctcctgccgctgctccagcagtgtcaagtggtccgtctcgatgactgtgggttatag

SEQ ID NO: 6619 - DNA, 648 bp, synthetic construct
  misc_feature 1..648: note = source = /note="Description of Artificial Sequence: Synthetic coding sequence"
  source 1..648: mol_type = other DNA
atgcgccccaaaacgggccaggtggggtgcgagacacccgaggaattgggccctggcccccggcagagatggccgctgctgttgctggggctggcaatggtggcgcatggactcctacggcccatggtggctccacagagcggagaccctgaccctggagcctctgtcgggtcttcccgaagctctctccgatccctgtggggctctaggttactgcttcagccctctccccagcgagccgacccaaggtgctggcctcgcggattctggtctgaacctcagtctctttgctatgtgtttggtacagggactaaagtcaccgtacttggtcagcccaaagcgaaccctactgtgacactgtttccacctagcagtgaggaactgcaggctaataaagccacacttgtgtgcctgatttcggacttctatcctggcgccgtgactgtggcctggaaggcggatggcagcccggttaaggccggagtggagactacaaagccatctaagcagtccaacaataaatatgctgcttcttcatacctctctctcacaccggagcaatggaagagtcatcgatcttatagctgccaggtcactcatgaaggttccactgtggagaagaccgtcgcccccacggaatgcagctag

SEQ ID NO: 6620 - DNA, 999 bp, synthetic construct
  misc_feature 1..999: note = source = /note="Description of Artificial Sequence: Synthetic coding sequence"
  source 1..999: mol_type = other DNA
atgtgccctgcgggctggaagttactggccatgctggctcttgtccttgtggttatggtatggtacagcatctcgcgggaggacagatatatcgagctgttctattttcctatcccagaaaagaaggaaccatgtttgcaaggcgaggccgaaagcaaggcctctaaactgtttgggaactactcccgtgaccagcctattttcctgcgactcgaagattatttctgggtcaaaaccccctctgcttatgagctgccctacggcaccaaagggtctgaagatctcctcctccgcgttcttgctattacctcttcatccattccaaaaaacatacagagtctgaggtgccgacgctgcgtggtagtgggtaacggccataggcttagaaactcctcactaggtgacgccatcaataaatacgacgttgtaatcaggctgaacaatgcacccgttgccggatacgagggtgacgtgggatccaaaactacaatgagattattctaccccgagtccgcccacttcgaccctaaagtggagaataacccagataccctgctcgtgttggtagcattcaaggctatggatttccattggatcgaaacaatcctctcggataagaagcgcgtccgcaagggtttctggaaacagcctcccctcatctgggacgtcaaccccaagcagattaggatcctgaatccatttttcatggagatcgcagccgacaagctgctgagcctgcccatgcagcagcccagaaagattaaacaaaagccaaccacgggcctcctggccattaccctggccctgcatctgtgtgatctcgtgcatatcgccgggtttggttatcccgacgcctataataaaaaacagacgatccactattacgaacaaatcactctgaagtctatggctggcagcggtcataacgtatcacaggaagcactcgccataaaacgcatgctggagatgggggcaatcaagaacttaacttcattttag

SEQ ID NO: 6621 - DNA, 888 bp, synthetic construct
  misc_feature 1..888: note = source = /note="Description of Artificial Sequence: Synthetic coding sequence"
  source 1..888: mol_type = other DNA
atgcggtcactcctgctgctatctgccttctgtttactggaagcagcattagccgccgaggtaaagaagccagcagctgcggccgcccccgggactgccgagaagctgtcaccaaaagccgcaaccctggctgagcggagtgcggggctggcgttctctctttatcaagccatggccaaggaccaggcagttgagaacatcctcgtgtccccagtggtggtggctagtagcttgggcttagtatccctcggggggaaagccacaacagcgagtcaagccaaagctgtactgagcgcagaacagctccgggatgaggaggtccacgctggtttaggcgagttgctgcgctccttgtcgaattcaaccgcccggaacgttacctggaagttaggttctaggctctatggaccatctagcgtgtcgtttgctgacgacttcgtaaggagttctaaacaacactataattgcgagcatagcaagataaattttcgtgacaaacgttccgcgctgcaatctatcaacgaatgggctgcccagaccactgatggaaagctgccagaggtgaccaaagatgtagaacgaaccgatggtgcgctgctggtcaatgctatgttttttaagccacactgggatgagaagttccatcataaaatggtggataatagggggttcatggtgactcggtcttatacggtaggcgtcatgatgatgcacaggactggcttatacaattactacgatgacgagaaagaaaagctgcaaatagtggaaatgccgctggctcataaactaagcagtttaataattcttatgccccatcacgttgagcctttagaaagactggaaaagctcctgactaaagaacagttaaagatctggatgggctag

SEQ ID NO: 6622 - DNA, 399 bp, synthetic construct
  misc_feature 1..399: note = source = /note="Description of Artificial Sequence: Synthetic coding sequence"
  source 1..399: mol_type = other DNA
atgagaacgttgttcaatctgctgtggttagcactggcctgctcaccagtgcacaccactctgtcaaaaagcgacgctaagaaggcagcatcaaagacccttctggaaaagagtcaattctctgataagcccgtgcaagatagaggcctagtggttactgacctgaaggccgagtctgtggtgttggaacatcgtagctattgtagcgctaaggccagggaccggcattttgcaggggacgtcctcgggtacgtaaccccgtggaacagccacggttatgatgtaaccaaggtgtttggatcgaaatttacccagatctcaccggtgtggttgcaactcaagcgccgcggccgtgagatgttcgaggtgacgggcttgcacgacgtggatcagggttag

SEQ ID NO: 6623 - DNA, 360 bp, synthetic construct
  misc_feature 1..360: note = source = /note="Description of Artificial Sequence: Synthetic coding sequence"
  source 1..360: mol_type = other DNA
atgcggactttgttcaatctgctatggttggctctggcctgtagtccagttcacaccactctcagtaagagcgacgcgaagaaagccgcctccaaaaccctgctggagaaatcccagtttagtgacaaacctgttcaagataggggtctggtagtcactgatctgaaagctgagagcgtggtcctggagcatcgaagttactgttctgccaaggcacgagaccgacatttcgctggagatgtgctcggatatgtaaccccatggaatagtcacggctatgatgtgacgaaggtcttcgggtcgaaatttactcagatcagtcccgtatggctgcagttgaaacggcgcggaagagaatag

SEQ ID NO: 6624 - DNA, 390 bp, synthetic construct
  misc_feature 1..390: note = source = /note="Description of Artificial Sequence: Synthetic coding sequence"
  source 1..390: mol_type = other DNA
atgccaatggcttcaccccagactcttgtcctgtacttgctcgttctagcggtcacagaggcatggggccaagaggcagtcatacctgggtgtcatttacatccgttcaacgtgacggtgcgctctgacagacagggaacgtgtcagggttcgcacgttgcccaggcctgcgtaggtcactgtgagtcatccgcatttccgtcacggtactcagtactggtggcgagtggatataggcataatatcacctctgtctctcagtgctgtaccatcagcggcctgaagaaagtcaaagtccagctacagtgtgttggctctcggcgggaagagctagagatttttacagcccgggcatgtcagtgcgacatgtgcaggcttagtaggtattag

SEQ ID NO: 6625 - DNA, 1386 bp, synthetic construct
  misc_feature 1..1386: note = source = /note="Description of Artificial Sequence: Synthetic coding sequence"
  source 1..1386: mol_type = other DNA
atgagcctcgacatacagagtttggacatacaatgcgaggagctgtctgatgcgcgctgggccgaattgctaccgttgttgcaacaatgtcaggtcgtacggttagatgactgcggactcacagaggcaaggtgcaaagacatttccagtgccctacgggtgaatcccgctctcgcagagctgaacctcaggtcgaatgagctgggagatgtcggagtgcattgcgtcctgcaaggcttacagacaccaagttgcaagatccagaagttgtccctgcagaattgttgcttgacaggggcagggtgcggcgtgctgtctagtaccctcaggacactgcctaccctccaggaattacacctttcagataatctgctaggggacgcgggcctccaacttctgtgcgaggggctgctggacccacagtgtcgtttagagaagctgcaactggaatactgtagcctgtctgccgccagctgcgagcctctcgccagtgtgctccgtgctaagccagacttcaaagaactaactgtcagtaataatgacatcaacgaggcgggcgtgcgagtgttatgccaagggctgaaagactccccgtgtcaactcgaggccctgaaactggagagctgcggggtgacaagcgacaattgccgagacctgtgtggaatagtggctagtaaggccagcctgcgcgaattggctttgggatccaacaagctgggtgatgtaggcatggccgagctttgtcccggcttgttgcacccctcaagccgtctaagaacactgtggatttgggaatgtggtataactgccaagggatgcggggatctgtgtagggttctccgcgccaaggaatctctcaaagagttgagccttgcaggcaatgaacttggggatgagggcgcacgtctgttgtgtgaaaccctgctagaaccaggctgccaactggagagcctctgggtcaagtcctgttcttttacagctgcctgctgctcgcacttttccagcgtcctagcccagaaccggtttctcttggaactgcagatctctaataaccggctggaagatgccggcgtcagggaactgtgccagggactggggcagcctgggtctgtgcttcgggtcctgtggctggcagactgcgacgtctccgactcctcctgctcgagtcttgcggccactctattagcgaaccactccctgcgtgaactcgacctatcaaataattgcctgggagatgctggcatcctgcaactagtggaatcagtgagacaacctggctgcctgctcgaacagctggtgctgtacgatatttactggtctgaagaaatggaagacaggttgcaggctctggaaaaagacaaacccagcttgagggtcatctcctag

SEQ ID NO: 6626 - DNA, 453 bp, synthetic construct
  misc_feature 1..453: note = source = /note="Description of Artificial Sequence: Synthetic coding sequence"
  source 1..453: mol_type = other DNA
atgcgtagtttgctactcctatctgcattctgcctgctagaggcggccctggccgcagaagtaaagaaacccgctgcagctgcagctcccggcacagccgaaaaactgtctcccaaagctgccacactcgcggaaaggtccgccgggttggccttctcgctgtaccaagccatggccaaggaccaggccgtggagaacattttggtgtccccagtggttgtggccagcagcctggggctggtctcccttgggggaaaggcaacgaccgcctcacaggccaaggccgtcctgagtgcagagcaactgagggacgaggaggtgcacgctgggctcggggagttacttagatctctctctaattccaccgcgaggaatgtgacgtggaaattaggttcccggctgtacgggccaagttccgtttcttttgcagacgacttcgtccgcagcagctag

SEQ ID NO: 6627 - DNA, 1257 bp, synthetic construct
  misc_feature 1..1257: note = source = /note="Description of Artificial Sequence: Synthetic coding sequence"
  source 1..1257: mol_type = other DNA
atgcgaagcttgctcttgctgagtgctttctgtcttctggaggccgcactcgccgcagaggtcaagaagcctgctgctgctgccgctccaggaacggccgagaaactgagccctaaagcagctaccctggccgagcgctcagccggcctggcattcagtctctaccaagctatggccaaggatcaggcggtggagaacatactcgtgtctccagtggtggtggcaagtagcctaggtctagtgtcccttggcggcaaagccaccactgcaagccaggcaaaggccgttctctcagccgagcagctcagagacgaggaagtgcacgcaggcctgggggaactgcttcgaagcttgtcgaacagtaccgccaggaacgtgacgtggaagctgggctccagactttacggcccgtcaagcgtgagcttcgctgacgatttcgtgcggtcctcaaagcaacactataactgcgagcactcaaaaataaactttagggataaacgatcggccttacagtcgattaacgagtgggccgcacagacaactgacggaaagctgcctgaggtgaccaaggacgttgaaagaactgatggagccctgcttgttaatgctatgttcttcaagccccactgggacgagaaatttcaccacaagatggtggataatcggggctttatggttacacgctcctatactgtgggagttatgatgatgcatcgtactggactgtacaattactacgacgatgaaaaagaaaagctgcagattgtggagatgcctcttgcgcataaacttagcagcctgattatcctcatgccgcatcacgttgagccgttagagaggttagagaaactccttactaaggagcagttgaaaatttggatgggaaagatgcaaaagaaggccgttgcaatttccctccctaaaggcgtggtagaagttacccatgatctgcaaaaacacctagccggccttggtttgaccgaagccattgataagaataaggccgacctatcccgcatgagtggtaagaaggacctgtacctcgcttccgtgttccacgccaccgcttttgaactggacacggacggtaacccattcgaccaggacatttacggccgtgaagagcttagatcccctaaacttttctacgctgatcacccatttatattcttggtaagggacacacaatcaggcagcctgctgttcattggtagattggtaaggcccaaaggcgacaagatgagagacgaactatag

SEQ ID NO: 6628 - DNA, 1002 bp, synthetic construct
  misc_feature 1..1002: note = source = /note="Description of Artificial Sequence: Synthetic coding sequence"
  source 1..1002: mol_type = other DNA
atggtctcaaagtcgcggtggaagctccttgcgatgctcgctctcgtgctggttgtgatggtgtggtattccatctcaagggaggatcgctatattgagctcttttattttccgatcccagagaagaaagaaccttgtctgcagggcgaggcggagtcaaaagcttccaagttattcggcaactattctagggaccagccaatcttcctgcgcctcgaggactatttctgggtcaaaaccccttcagcctatgagctcccttacgggacaaagggaagcgaggacctcctgttgcgggtccttgcaatcactagttcttccatcccaaagaatattcaatccttgcggtgtaggagatgtgtggtggtggggaatgggcatcgtctgaggaacagtagcctcggggatgcaattaataaatacgacgttgttattagactaaataatgccccagttgccggatatgagggggatgttgggagtaaaacaactatgcgcttgttctaccctgagtcagcacacttcgaccctaaagtcgagaataatcccgacacacttctagtgctggtggcctttaaagctatggacttccactggattgagaccattttgtccgacaaaaagcgcgttcgaaaaggcttttggaagcagcccccattgatttgggacgtgaatcctaagcagatcaggattctgaaccctttctttatggaaattgccgcagataagctccttagcctgcccatgcaacaacccagaaagatcaagcagaaacctaccacaggactgcttgcgattacacttgctctccatctatgcgacctggtacacattgcgggttttgggtaccctgatgcctataacaagaaacagaccatccattactacgaacagatcacactaaaaagcatggctggcagcggacacaatgtgagccaggaggcccttgctattaagaggatgctcgagatgggagcaattaagaatctgacaagtttctag

SEQ ID NO: 6629 - DNA, 987 bp, synthetic construct
  misc_feature 1..987: note = source = /note="Description of Artificial Sequence: Synthetic coding sequence"
  source 1..987: mol_type = other DNA
atgtgtcccgcaggatggaagttgctggccatgctggcactcgtactcgtggttatggtgtggtatagcatcagcagagaggatagtttctattttccaattcccgagaaaaaagagccttgtctacaaggcgaggccgaatcaaaggcttctaaactgtttgggaactatagccgcgaccagcccatctttctgaggcttgaggattacttttgggtgaagacaccatccgcttacgagctgccatatggtaccaaagggtctgaagacctgctgctgcgcgtactggccattaccagctcatcgatcccgaagaatatccagtcgctccgatgccggaggtgcgtggtggtgggcaacgggcatagacttcggaatagcagcctgggagatgcgataaacaaatacgacgtggtcatacgactcaacaacgcacccgtagcagggtacgagggggatgttgggtccaagactacaatgagactgttctatcccgagagtgcgcactttgaccccaaggttgaaaacaacccggataccttgttggtgctggttgctttcaaagccatggacttccattggatcgaaaccatactgtccgataagaaaagagtgagaaagggattttggaaacagccaccgttaatatgggatgtgaatcctaagcagatccgtattctaaacccatttttcatggagatcgcagccgacaagctactctcgttgcctatgcaacagccacgtaaaatcaaacagaaacccaccacagggctcttggcaattacactagcactgcacttgtgcgatctggtgcacatcgcagggtttgggtacccagatgcatataataagaagcagactatccattactacgagcagataactctgaaatccatggccggctcaggccacaatgtgagccaggaagctctcgccatcaaacgtatgttggagatgggcgctattaagaatctgaccagtttctag

SEQ ID NO: 6630 - DNA, 585 bp, synthetic construct
  misc_feature 1..585: note = source = /note="Description of Artificial Sequence: Synthetic coding sequence"
  source 1..585: mol_type = other DNA
atgacaatgaggcataattggacaccagacttatcaccactctgggttttgctcctgtgtgcacacgtggtcaccctgctagtccgtgctactccggtgtcacagaccacaaccgccgctacagcctccgttagatctactaaagatccatgtccttctcagcctcccgtgtttcctgcagccaagcagtgtcccgcactcgaggtgacttggcccgaagtggaagtgcctcttaacggcacgctcagtcttagctgcgttgcctgtagtcgttttccgaatttctccattttatattggctgggaaacggctcattcatcgaacatttaccaggccgcctctgggaggggtccacctctcgggaacgagggtccactgggacccagctctgcaaagctctcgtgctggaacaattgactcctgcactgcactccacaaacttttcctgtgtcctggtagatcctgaacaggtcgtgcaacgccacgtggttctggcccagttatgggctggcctcagagccacactcccacctactcaggaagccttgccaagttcccactcttcaccgcagcagcagggttag

SEQ ID NO: 6631 - DNA, 1386 bp, synthetic construct
  misc_feature 1..1386: note = source = /note="Description of Artificial Sequence: Synthetic coding sequence"
  source 1..1386: mol_type = other DNA
atgagtctggacattcagtccctggacattcaatgcgaagagctaagcgacgcgcgatgggctgaactgctgccgctcctacagcaatgccaggtggtgaggttggacgactgcggtctgactgaggctcggtgtaaggatatctcctctgccctgagggtgaacccagcgcttgccgaactaaatctgcgcagcaacgagctgggagatgtgggtgttcattgcgtgctgcagggactgcaaaccccctcctgcaagatccagaagctctcactacaaaattgttgcctcactggggcaggctgtggagtactgagctccaccctaagaactcttcccacccttcaggaattgcacctgagcgataaccttctgggagacgccggccttcagctgctctgtgaaggactattagacccacagtgtaggctggagaaattgcaactggaatactgtagcctgagtgcagcttcatgcgaaccgttagcatccgtattgagagccaaacctgactttaaagagctgaccgtgtctaacaatgatattaatgaggctggcgtccgggtgttatgccaaggtctgaaagactcaccctgccagctcgaggctctcaaactggagtcgtgcggggttacctcagacaactgtagagacctttgtggaattgtggcctctaaggcatccttacgtgaattggctctaggttccaacaaacttggcgacgtggggatggcggaactttgccctggactactccacccttccagtaggttacgcaccctgtggatttgggagtgcggaatcacagcaaaaggctgcggagacctgtgccgggtcctaagagctaaagaatctctcaaagaactctccctggctggcaacgagttaggtgacgaaggtgcacgtctcctctgcgaaaccctgttagaacccggctgccagctggagagcctttgggtcaaaagctgtagttttacagccgcatgctgttcacatttttcctccgtcctagcccagaataggttccttctggaactgcaaatctccaataataggctggaagacgcaggggtgagagagttatgccagggcttaggccagcccggatctgtgctgagagtgttgtggctggccgactgtgatgttagcgattcaagctgctccagcctggccgcaacccttctcgctaatcactccctgcgggagcttgatctctccaataattgtttgggggatgccggaatcctgcagcttgtagagagcgtaaggcagcccgggtgtctattggagcagcttgttctttacgacatctattggagcgaggagatggaggatagattacaggccctggagaaggataagccgtcacttcgagtgatctcatag

SEQ ID NO: 6632 - DNA, 1995 bp, synthetic construct
  misc_feature 1..1995: note = source = /note="Description of Artificial Sequence: Synthetic coding sequence"
  source 1..1995: mol_type = other DNA
atgccacaggcacctagtacaggcagcagtttgataagggacccaagcattgctcatagaaatacccagatcctatggacagaagcagggcgggatttggcccaggatacccgttacacgggcgaggagtcactcaccatcttcgtcgacaagcggaaactctccaagagggccgagggctctgactcaactactaattctagcagtgtgacattagaaaccttgcatcagttggccgctagctattttatcgaccgcgactcaacactgcggcggctccatcatatccagatagcatcgaccgccattaaggtaaccgaaaccagaacaggaccactggggtgttccaactacgacaatctcgactcggtgtcctccgtccttgtccagtcccccgagaataagatccagctccaaggtctacaggtgctactacctgattacctgcaggagcgcttcgttcaggctgccctttcatacattgcctgcaactcggaaggggagttcatatgtaaggaaaatgattgttggtgtcattgcggacctaaatttcccgaatgcaactgccctagtatggacatccaggccatggaagaaaatctactgcgaatcaccgagacatggaaggcatacaattcggatttcgaggagtcagacgaatttaagctgttcatgaagagactacctatgaattatttcctaaatacctctaccattatgcacctatggactatggatagcaattttcagcgtcggtacgagcagcttgagaacagcatgaaacagctgtttctcaaggctcagaagattgtgcacaagttgttttccctgagtaaacggtgccataagcagcctctcatcagcctgcccaggcaacgtaccagtacctattggctgactcggatccagagcttcctgtattgtaatgaaaacggcctcttggggtctttcagcgaagaaacccacagctgtacctgtcctaatgaccaagtggtttgcacagccttccttccatgcactgtgggcgacgcatccgcatgtctgacatgtgccccagacaatcggactcgttgcggtacctgtaacaccggatacatgctgtcccaaggattatgcaaaccagaagtggctgaatctacagaccattacatcgggtttgagaccgacctgcaggacctcgagatgaaatacctcttgcagaaaaccgatcgtagaattgaggtccatgcaattttcatttccaatgatatgaggctgaattcgtggtttgacccttcctggcgcaagcgcatgcttctgactctgaagagcaacaaatacaagagttcattggtccacatgatcctgggcttgtcactccagatttgcctcacaaaaaattctacgctggagccagtactcgccgtgtatgtcaaccccttcggtgggtcacattccgagagttggttcatgccggtgaatgaaaattcattccctgactgggagcgtaccaagctggatctgcccctccagtgctacaattggaccttgaccttagggaacaaatggaagacattttttgagacggttcacatctacctgagatcccggataaaatctaatgggcctaacggaaatgagagtatctactacgagccattggaatttatagatcctagcaggaacctggggtacatgaagattaataacatccaggtttttgggtactccatgcactttgatcccgaggccatcagggacttgatattgcagctggactatccatacacccaggggtcccaagactctgcacttctccagcttcttgagatcagagaccgggtgaataagctttccccacccggacagaggcgattggacctgttttcctgcctcctgcggcacagactgaagctgtctactagcgaggtggtaaggatccagtcagctctgcaggcctttaatgccaagctgcccaatactatggactacgacacgacaaaactgtgttcctag

SEQ ID NO: 6633 - DNA, 459 bp, synthetic construct
  misc_feature 1..459: note = source = /note="Description of Artificial Sequence: Synthetic coding sequence"
  source 1..459: mol_type = other DNA
atggctcgcgattacgaccatctgtttaagttacttattatcggcgattcaggagtgggaaagagctcattgctactgcgcttcgctgacaataccttcagcggatcttacattaccaccatcggggtggattttaagattcggaccgttgaaattaacggtgagaaagtgaagttgcagatctgggacactgcgggacaggaacggtttcgcaccattaccagtacatactatagaggaacacacggggttattgtggtttatgatgtaactagcgccgagtcctttgtgaacgttaagagatggttgcacgaaattaatcaaaattgcgatgatgtatgtcgcattctcgatgtgcaattgcaccatggcgctgggccaccgtccaaggagaggcagcctggtaagacggctgcagctactaccgagcgctgcggcgaggcccacgaggagcagtag

SEQ ID NO: 6634 - DNA, 696 bp, synthetic construct
  misc_feature 1..696: note = source = /note="Description of Artificial Sequence: Synthetic coding sequence"
  source 1..696: mol_type = other DNA
atgctgtacatcgggattgcagagtacttcttcaagtctgcctcctttgcccatttcacagcaggagtgtttaatgtgacattgtctactgaagaaatttctaatcatttcgtacagaatagtcaaggcttagggaacgtcctatcccgaattgctgagatctacatcctgagtcagcctttcatggtccggataatggccacggaacccccaatcatcaaccttcagcccgggaatttcacactcgatatccctgcgtcaattatgatgctcacccaaccaaaaaatagcaccgtggaaaccatcgtgtcaatggactttgtcgccagtacgtcggttgggctcgtgatcctgggccaacggctggtgtgcagcttatccctgaatcgtttccgactggcactccccgaatctaacaggagcaatatcgaagttctgcggttcgagaacattctcagttcaatcctccactttggcgtcctgcctcttgcaaacgccaagcttcagcagggttttccactgtcaaatccccacaaattcctgttcgttaattccgatatcgaggtgcttgaaggctttctgctcatcagcaccgacctaaaatacgaaacctcctcgaagcagcagccatcctttcacgtttgggagggactcaacctgatctctaggcagtggcgaggaaaaagcgctccatag

SEQ ID NO: 6635 - DNA, 1911 bp, synthetic construct
  misc_feature 1..1911: note = source = /note="Description of Artificial Sequence: Synthetic coding sequence"
  source 1..1911: mol_type = other DNA
atgaccacgtggtccctccgcagaaggccagcccggaccctgggtctacttctgctagtggtcttaggctttctcgtcctccgacgactggactggagtaccttagtgccgctccgtctaaggcacagacaattgggcctgcaggcaaaaggatggaacttcatgttggaagacagcacgttctggatcttcggaggaagcattcactatttcagagtgccgcgcgaatactggagggatcgcctgctcaagatgaaggcctgcggcctcaacactctcaccacatacgttccatggaacctccatgagcctgagcgagggaagttcgatttttctggaaatcttgatctggaggcattcgttctgatggcagcagagattggactgtgggtgattctgaggcctgggccgtatatctgttcagagatggacctgggagggcttccctcatggctgctgcaggatccagggatgcgtctccggactacctataagggtttcaccgaggcagtggatttatattttgatcacctgatgtctcgggttgtgcctctgcagtataagcgaggcgggcccattatcgcagtgcaggttgagaacgagtatggaagctataacaaggatcctgcctacatgccttacgtcaagaaggcgttagaagatcgagggattgttgagcttttgcttacctcagacaacaaagatgggctaagcaagggtatagttcagggagtgctggccacaattaacctccaatccacccacgagctgcagctgctgacaactttccttttcaatgtgcagggtactcaacctaaaatggtgatggagtactggactggatggttcgatagctggggaggcccccacaacatcttagattcttccgaggtcctgaaaaccgtgagcgccatcgtggacgcgggaagttccatcaatctttatatgtttcatggcggaacaaatttcggcttcatgaatggggccatgcacttccatgactacaagagcgatgttactagctacgattacgacgccgtgttgaccgaggctggggattacacagccaaatacatgaaactgcgggacttcttcggatccatttcgggaatccctctgccacctcctccagacctcctgcctaagatgccgtacgaaccccttacccccgtgctgtatctatctctgtgggatgcattgaagtacttgggtgagccaatcaagagcgaaaagcctatcaacatggaaaatcttcccgttaatggcggcaacggacagagctttgggtacatcctctatgagactagtatcaccagttcaggcatattgtccggccatgtgcatgacagaggacaagtgtttgtcaacacagtctctatcgggttcctggactataaaacaactaaaatagcagtgcccttaatccaagggtacacagtgctgaggattcttgtggagaacagaggtcgtgtgaattacggagagaatatcgacgatcaaagaaagggcttgattggaaatctgtacttgaatgatagtcccctgaagaacttccggatttacagtctcgacatgaaaaaaagcttcttccagcggtttgggctcgacaaatggtcaagccttcctgagacaccgactctgcctgcgttcttcctgggctctctgagtatttccagcaccccctgcgacacattcctcaagctggaggggtgggagaagggggtggtcttcattaatggccagaatcttggtaggtattggaatatcggccctcaaaagacgctttacctccctgggccttggctgtcgtcgggcattaatcaggtaatcgtctttgaggaaaccatggccggccctgctctgcagttcacagagactccccatctggggcggaatcaatacatcaagtag

SEQ ID NO: 6636 - DNA, 1374 bp, synthetic construct
  misc_feature 1..1374: note = source = /note="Description of Artificial Sequence: Synthetic coding sequence"
  source 1..1374: mol_type = other DNA
atgggctgcagcctgcctctctcatgcataatggttcgctcagtggcctgggctggcttcatggtcctgctcatgattccttggggatctgcagccaagttggtttgttactttaccaactgggctcagtacagacagggcgaggctaggttcctccctaaggacttagacccttccctatgtactcatttaatctatgctttcgccggcatgacgaatcaccagctgtccaccacagagtggaatgatgaaactctgtatcaggaattcaacggactgaagaagatgttcaccgatatggtggccactgccaataaccggcaaacttttgtcaacagcgctattcgtttcttgcgcaagtactcatttgacggcctcgacctggattgggagtatcctggctctcaggggtcccctgctgttgacaaagaacggtttactacgttggtgcaggacttggcaaacgcctttcaacaggaggctcagacctccggaaaagaaaggctgctgctgagtgcagccgtgccagcaggccagacctatgtggatgcaggatacgaggtagataaaattgctcaaaacctcgattttgtaaatctgatggcatatgactttcacggatcctgggaaaaagtgactggtcacaactcccccctgtacaaaaggcaggaggaaagcggagcagccgccagcctcaatgttgatgctgccgtgcagcagtggctgcagaaaggaacccctgcatccaagctaattttgggtatgcccacatacggaagatccttcaccttggcctcctcctcagacacgcgggtgggggcaccagctaccggctctgggactccaggtcccttcacaaaggagggagggatgctggcttattatgaggtctgcagctggaagggagcgaccaagcagagaattcaagatcagaaggtcccctacatctttcgggacaaccagtgggttggattcgacgacgtcgagtccttcaaaacaaaggtaagttatttaaaacagaaaggcctagggggagctatggtctgggcccttgatttagacgactttgctggctttagttgcaatcagggaagatacccactcattcagaccttacgccaggaactgtccctgccataccttcccagtgggacacccgagctggaggtgcctaaacctggccaacccagtgaacccgaacacggacccagccctggacaggatactttctgccagggtaaggccgacggcctatatcccaatcctcgggagagatcatctttctacagctgcgccgccggccggctatttcagcagagctgtccaacgggcctggttttctcaaactcctgtaaatgctgtacatggaactag

SEQ ID NO: 6637 - DNA, 1125 bp, synthetic construct
  misc_feature 1..1125: note = source = /note="Description of Artificial Sequence: Synthetic coding sequence"
  source 1..1125: mol_type = other DNA
atgtatgttagcacccgggaacggtacaagtggctgcggttcagcgaggactgtctgtacctgaacgtgtatgcccctgctagggcccccggagaccctcagttgccagtgatggtgtggttcccaggcggcgctttcatcgtgggagccgccagttcctacgaaggaagtgacctggccgcgcgagagaaggtggtgctagttttcctgcagcatcggctcggcatcttcgggttcctgagatggagaggtcgcacagacgatagccacgcgaggggaaactggggtttgttagaccagatggccgcattgcggtgggtgcaggagaacatcgccgcctttggaggagatcccggcaacgtgacgctgtttggacagtcggctggtgccatgagtatctctgggctgatgatgtcccccctggcgtccggtctatttcatcgggccatatcccagtccggtaccgccctattcagactatttatcacttcaaatcctctgaaagtggcaaagaaagtggcccatctggccgggtgtaatcacaatagcacccagatcttagtcaattgcctcagagcactgtctgggacaaaagttatgcgcgtctctaacaaaatgaggttcctgcaacttaacttccaaagggaccccgaagaaatcatttggagtatgtctcctgtggtggacggggttgtcatccctgacgatccattggtgttgctaactcagggaaaagtgagctcagttccatacctgctgggtgtgaataatctcgagtttaactggctgctgccttacattatgaaatttccgctcaaccgacaggctatgcgtaaggagacgatcactaagatgctgtggtccactcggacgttacttaatattactaaagaacaggtgccacttgtggttgaggagtatctggataacgtcaatgagcatgactggaagatgctgcgtaacagaatgatggatattgtacaggacgccactttcgtttacgccacgctacagactgcccattaccacagagagacccctatgatgggaatctgtcctgcaggacacgcaactaccaggatgaagtcaacatgttcctggatcctgccgcaagagtgggcgtag

SEQ ID NO: 6638 - DNA, 384 bp, synthetic construct
  misc_feature 1..384: note = source = /note="Description of Artificial Sequence: Synthetic coding sequence"
  source 1..384: mol_type = other DNA
atgaagacaggtctattttttctctgcttgctgggaaccgctgccgccataccaaccaatgcccggctgctgtctgatcattccaaaccaacggccgaaactgttgcccctgataataccgctatccccagtcttagggccgaagcagaggagaatgagaaggaaacggccgtcagtacagaggacgactcacaccataaggctgaaaagtctagcgtgttaaagtcaaaggaagaaagccatgaacagtctgcagagcaggggaagtcttccagccaggagctgggcctcaaggaccaggaggatagtgacggacatctctctgtcaacctcgaatatgcccccactgaggggacgttggatattaaggaagacatgtcttag

SEQ ID NO: 6639 - DNA, 285 bp, synthetic construct
  misc_feature 1..285: note = source = /note="Description of Artificial Sequence: Synthetic coding sequence"
  source 1..285: mol_type = other DNA
atgcgcaccctcgcaattctagccgccattcttttggtggctttgcaggctcaggccgagcccctccaggcccgggccgacgaggtcgccgctgcccctgagcagattgctgccgacattcccgaggtggtggtgtctttagcttgggacgaaagcctcgcaccaaagcaccctggttctcggaagaacatggcctgttattgcaggatccccgcttgtattgcaggagaacggagatacggtacttgtatctaccagggaaggctgtgggccttctgttgctag

SEQ ID NO: 6640 - DNA, 414 bp, synthetic construct
  misc_feature 1..414: note = source = /note="Description of Artificial Sequence: Synthetic coding sequence"
  source 1..414: mol_type = other DNA
atggctgccctgtctcgggcgctgggaccactcagaactccggcccctccactgtggatcggtctgtttctggtggctactggaagccagcagagcctggctcaaccattgcctggaaatacgaccgaggctacaccgcggtctctcagagcctcaggatctctttgcggccctcatgccaaggcgccatatctctgtgaggccacccatgaacccgccgctgcacgaatccgcgctcaagtgcccgatacacggtggtctcgagtcgggggtcagaggttttactctagagtactgagccccctgcaccgtggtcccagtggccataccgaggctagcgcccagcgttcccacatggggaaactcaaggaaccccagccccaggaccacaagcccggtctgggggcatcgtag

SEQ ID NO: 6641 - DNA, 228 bp, synthetic construct
  misc_feature 1..228: note = source = /note="Description of Artificial Sequence: Synthetic coding sequence"
  source 1..228: mol_type = other DNA
atgctgaaggttcactacccaaagtttggagtctccgaagactgcttgtacctcaacatttacgcccctgctcacgccgataccggaagtaagctccccgtgcttgtgtggttcccgggaggagcttttaagaccggtagtgcttctatctttgacgggagtgcactagcggcttacgaagacgtacttgtggttgtcgtgcagtatcggctcggcattttcgggtag

SEQ ID NO: 6642 - DNA, 1491 bp, synthetic construct
  misc_feature 1..1491: note = source = /note="Description of Artificial Sequence: Synthetic coding sequence"
  source 1..1491: mol_type = other DNA
atggctccggccaggactatggccagggctagactggcaccagccgattgtttgaacagctttaccgcaggggttccggggtttgtcctcgatacaaacgcgagcgtcagcaacggcgctaccttcctcgagagcccaacagtacgcaggggatgggattgtgtcagggcgtgctgtaccacgcaaaactgtaatttggccctggttgaattgcagccagaccgaggcgaagatgccatcgccgcctgcttcttgattaattgcctttacgagcagaatttcgtatgcaaattcgcaccacgagaggggttcattaactacctgacgcgcgaagtgtatagatcctaccgccagctcagaacgcagggatttggcggctctggcatacccaaagcatgggccggcatcgacctgaaagtgcaaccacaagaaccacttgtcctcaaagatgtagagaatactgactggagactgctgcgaggcgatacagatgtgagagtcgaaagaaaggaccctaaccaggtcgaactatgggggttaaaggagggtacatatctctttcaattaactgtgacttcaagcgaccaccctgaggacactgcaaacgtgacagttaccgttctgtcaaccaagcaaaccgaagattactgcctggcaagcaacaaagtggggaggtgtcgaggctccttcccacggtggtattatgatccaaccgaacagatctgtaaaagcttcgtgtatggtgggtgccttggcaacaaaaacaattacctaagggaagaagagtgcatcctggcttgtagaggggtgcagggaggtcctcttagaggctctagtggtgcccaggcaacatttccacagggaccatccatggaacgccgtcacccagtgtgttctgggacttgtcagcccacccaatttcggtgcagcaacggctgttgcattgatagtttcctggaatgcgatgatacccccaattgcccagatgcctcggacgaagccgcctgcgaaaagtacacctccgggtttgatgagctgcaacgcatacacttccccagcgataaagggcattgcgttgatctgcctgatacgggtctctgcaaggaatctattccccgttggtactacaacccgttcagcgaacattgtgcacgcttcacatatgggggttgttatggcaataagaacaattttgaggaagaacagcagtgtttggaatcctgtagagggattagcaagaaggacgttttcggattgcgcagggaaattcccataccctccaccgggagcgttgagatggccgtggcagtattcctggtcatctgcattgttgtggtcgtggcgattctgggctactgtttctttaaaaatcaaaggaaggactttcatggccatcaccaccatcctcctccgaccccagcatcttccaccgttagcaccacagaggatactgagcatttagtgtacaaccatacaaccaggcctttgtag

SEQ ID NO: 6643 - DNA, 528 bp, synthetic construct
  misc_feature 1..528: note = source = /note="Description of Artificial Sequence: Synthetic coding sequence"
  source 1..528: mol_type = other DNA
atgcccccgggtacccgagcatgtcgtgtgccaaggcctgggcggcgcgctcctagacctagaagggacggagaaccaggtggccatggtgtggccccagccagcgccgaagaggtgggcgccaggcctggcttacgggcggtcgccagactattgcctcagcaacatctgcaggctggctatgtgtgcgagaggaaggatttgcttgtgaatggatgctgtaatgttaacgtgccctccacaaagcaatactgctgtgatgggtgttggccaaatggatgttgtagcgcctatgagtactgcgtgagttgctgtctgcaacctaacaaacagctgttacttgagaggttcttgaatcgcgccgcggtggcattccagaatctgttcatggctgtcgaggatcactttgagttatgcctagccaagtgtaggacgtcaagccagtccgtacagcacgagaatacctatcgggaccctatcgcaaaatactgttacggggagagcccacccgaactgttccctgcctag

SEQ ID NO: 6644 - DNA, 1881 bp, synthetic construct
  misc_feature 1..1881: note = source = /note="Description of Artificial Sequence: Synthetic coding sequence"
  source 1..1881: mol_type = other DNA
atggacttagtcctgaagagatgcttactgcacctcgccgtgattggagccttgctggccgtgggcgcaaccaaagtcccgcggaatcaagactggctaggagtaagccggcagttgcgcacaaaagcctggaaccgccaactgtacccagaatggactgaagcacagcggctcgattgctggagaggcgggcaagtgtcacttaaggtcagcaatgacgggccaacgcttatcggtgcaaatgcgagtttctccatcgctctgaattttcctggctcccaaaaagttcttccagacggacaggtaatatgggtcaacaatacaatcatcaacggcgatcaggtttggggtggccagccggtctatccacaagaaacggacgacgcctgtatctttccagacggaggcccgtgcccctctggctcatggagccagaagcgctcctttgtgtatgtatggaagacttggggccagtactggcaggtcctgggaggacctgtttctggtctgtctatcggaactgggcgagccatgctggggactcacacaatggaagttacagtttatcaccgtaggggcagtcggtcgtatgttcctctcgcacattccagctccgcatttacaattaccgatcaggtgccattctccgtgagcgtcagccagctaagggccctggatggcggcaataaacactttctgaggaatcagcccttaacctttgctctgcagttgcacgacccttcaggttacttggctgaggctgatctgagttatacgtgggatttcggcgatagctcaggtaccctgatctccagggcccttgtcgtgacacatacctacctcgagccgggccctgtgactgcccaggtagtgctccaagccgccattccattgacatcttgcggttccagcccagtaccgggcacaaccgatggccatcgaccaacagcggaggctccgaacacaactgcaggtcaggtgccaaccacagaagtggtaggcacgacaccgggacaggccccaacggccgagccaagcgggaccacaagcgttcaggtgcctaccaccgaagtaatcagcactgcccctgtgcagatgccaaccgccgagtccaccgccgcccaagtgacaactacggagtgggtggaaactaccgctcgggaactccctataccggaaccagaggggcccgatgccagctccattatgagcactgagagcattaccggcagtctgggaccgctgttggacggtacagccactctgaggttggttaagcgccaggtgcccctcgactgcgtgctctacagatacggctccttttcagtgacactggacattgtgcaggggatcgagtctgccgaaatcctgcaggcggttccctcaggtgagggggatgcctttgaacttacagtatcctgtcagggcgggctccccaaggaagcttgcatggagatttcttccccaggctgtcagccgccagcacagagattatgtcaacctgtactgccaagtcctgcttgccagctggtgctccatcagatcctgaaaggcggaagcggcacgtattgcttgaacgtctctctggctgatactaactctcttgctgtggtgtcaacacagctgatcatgcctgtcccagggattctgctgacaggccaggaggccggcctggggcaggttcctctcatcgtgggcattctacttgtcctcatggccgtggtgctcgccagtttaatctataggcgccgcttaatgaagcaggatttcagtgtgcctcagctccctcacagctcaagccattggttgaggctccctagaatattttgttcatgtcccatcggtgaaaactcccctcttctctccggacagcaggtgtag

SEQ ID NO: 6645 - DNA, 1611 bp, synthetic construct
  misc_feature 1..1611: note = source = /note="Description of Artificial Sequence: Synthetic coding sequence"
  source 1..1611: mol_type = other DNA
atgccaactttatgttcttcttttgggttacaggtcctgttgcctgagtacctaagagaaagattcgtcgccgctgcattaagctatatcacctgtagcagcgaaggtgaactagtttgtaaggaaaacgactgttggtgcaagtgctccccgaccttccctgagtgcaactgtcccgatgcggatatacaggccatggaggattcgttgctgcaaatacaggactcctgggcaacgcacaatcgccaattcgaggagtctgaggagtttcaggctcttctcaagagactgcccgatgacagattcctcaatagtaccgctattagccagttctgggcaatggacaccagtcttcaacatagatatcagcaacttggggcaggattgaaggtgctttttaaaaagactcacagaatactgaggagattatttaatctgtgcaagcgatgtcacagacaacctagattccgcttacctaaggagtcaagcccaaggtccctctcgtactggtggaatcggatccagagcttgttgtattgtggtgagtcgacgttccccgggacattccttgaacagtcacattcgtgtacatgtccatatgaccagtcttcatgtcaggggccgatcccgtgtgcgttaggcgagggccccgcttgcgcccattgcgcccccgataatagcactcgatgcggctcctgtaaccccggatacgtgctcgcccagggtctgtgcagaccggaagttgcagagagtttagaaaactttctcggtctggaaacagacctccaggacctggagcttaagtacctgttacaaaagcaggatagtagaatcgaagtccactctatttttatctctaatgacatgaggcttggttcctggttcgacccgagttggagaaaacggatgttgctgaccctgaagagcaataaatacaaacctgggcttgtgcacgtaatgcttgccctttcacttcagatttgcctcacaaagaactctacactggagcctgttatggccatttatgtgaaccctttcggcggttctcactctgagtcgtggtttatgccagtcaatgaggggtcctttcctgactgggagcggacaaatgtcgacgccgccgcccaatgccagaactggacaatcacgttaggtaaccggtggaagacgttctttgagacagtgcatgtgtatctacgttctcgtattaagtcccttgatgactctagcaacgagacaatttactacgaaccgctggagatgacagatccttctaagaacctgggctacatgaagatcaataccctgcaggtctttgggtactcgctgccctttgacccagatgccatcagggatctcatcttacagctcgattacccctacactcagggaagtcaggatagtgcccttctccagttgattgagctccgagatcgggtcaaccagctcagtccccccgggaaggtgaggctcgacctcttctcctgcctactccggcaccgtctcaagcttgcgaataacgaagttggccggatccaaagctcgttgcgtgcattcaattccaaattgcccaaccctgtggagtatgaaacaggaaagctgtgcagctag

SEQ ID NO: 6646 - DNA, 423 bp, synthetic construct
  misc_feature 1..423: note = source = /note="Description of Artificial Sequence: Synthetic coding sequence"
  source 1..423: mol_type = other DNA
atgtcacaaagtatagaggtcctgaatcttcgcacacaaagagatttccagtacgtgttaaagatggagacccagatgaaaggtctgaaggctaagttcagacagattgaggacgaccgtaaaactctgatgactaagcacttccaggaactaaaagagaagatggatgagctcctgccactgattcccgtgctggagcagtacaaaaccgatgctaaattaattacacagttcaaagaggagattcgaaacctttccgcagttctgaccggcatacaagaagagattggcgcgtacgattacgaagaactgcaccaacgggtgctaagcttggagaccaggcttcgcgactgcatgaagaaactcatcgacctgaagaaaaggaaagaagaggagaagcggcaacaaaaaggggaggcctag

SEQ ID NO: 6647 - DNA, 1119 bp, synthetic construct
  misc_feature 1..1119: note = source = /note="Description of Artificial Sequence: Synthetic coding sequence"
  source 1..1119: mol_type = other DNA
atggcttacattgaacagcgaaggattagccatgaagggagccctgtgaagcctgttgcaatcagagagttccaaaaaacagaagacatgcgccgatacctccaccagaatcgcgtgcctgctgagcccagctcactgttgtcactttctgcttcacataatcagctctctcacactgacctggaacttcaccagcggagggagcagctcgttgaacggactagacgggaggcgcagctcgccgctctccaatacgaggaggagaaaataagaacgaaacagattcagcgcgacgccgtattggactttgtaaagcaaaaggcctcacagtctccccaaaagcaacatccacttctcgatggcgttgatggcgagtgtccgttcccctctcgtcgtagccagcacacagacgatagcgccctttgtatgtccctttctggcctgaaccaggtgggctgtgcagcaactctgccccactcctctgcttttaccccccttaagtctgacgatcggcctaacgccctgctaagctctcccgccaccgagaccgtgcatcacagtcctgcctacagcttccctgctgcgatacagaggaaccagcctcagcgccccgagtccttcctatttcgcgcgggggtgagagccgagaccaacaaaggccacgccagccccctgccgccatctgccgcccccaccacagactccaccgatagcatcacaggacagaactccagacagcgcgaggaagagttagagctgatcgatcagctccggaaacacatcgaataccggctgaaggtgagtctgccatgcgatttaggtgccgcgctgaccgatggcgtcgtcttgtgccatctcgcaaaccacgtcagacctcggagcgttcccagtatccacgtgcccagccccgccgtacctaaactgactatggccaaatgccgtcggaacgtcgaaaatttcctcgaggcctgccgtaaaattggcgtgccacaggagcagctgtgtctgcccctgcacatactggaagaaaagggtctgtcacaagtagccgtgacggttcaggccttactggaactggcccccccaaagcagcagcagcaccaactcagtgcagtatag

SEQ ID NO: 6648 - DNA, 1242 bp, synthetic construct
  misc_feature 1..1242: note = source = /note="Description of Artificial Sequence: Synthetic coding sequence"
  source 1..1242: mol_type = other DNA
atggagaatatgttattgtggcttatcttttttacgccgggctggactctgattgatgggtccgaaatggaatgggattttatgtggcacctgagaaaggtgcctcggattgtgagcgaacgcacattccacctgacatctcctgcctttgaggccgatgccaagatgatggttaacacagtatgtggaattgaatgtcagaaggaactgcctactccctctttaagtgagttggaggattacctctcctacgagaccgtgttcgagaacggcacgcggacattaacccgcgtcaaggtgcaggatttagtgctggagccaacccagaatattactacaaagggtgtctctgttaggcgtaaaagacaggtgtatggaaccgatagccgatttagtatcctggacaaaagattcctaaccaacttcccattttccactgcggtgaagctctctaccggctgttctggcatcttaattagcccccagcacgttctcactgccgcacattgtgtccatgacgggaaagattatgtgaaagggtccaaaaaacttcgcgtgggcttactgaaaatgaggaataagtctggcggtaaaaaaaggcgcggatccaagcggtcccggcgtgaggcatcaggcggggaccagcgagaaggcacacgggaacatttgcgtgagagagctaaagggggtaggaggcgtaagaagagcggacgcggccagagaatcgctgagggtaggcccagtttccagtggaccagagtgaagaatacacacattccgaaaggatgggcgaggggaggcatgggcgacgcaaccctcgattatgactacgcactcctcgagctaaaacgagcgcacaaaaaaaaatacatggagctgggcatcagccccaccatcaagaaaatgccagggggtatgattcacttttcaggatttgacaatgatcgggccgatcagcttgtgtaccgcttctgttccgtttctgacgagtctaacgatctgctctatcagtattgcgacgcggagagcggaagtactgggagcggagtgtatttacgactgaaggaccctgacaagaagaattggaaacgcaagatcatcgccgtatatagtgggcatcagtgggtcgatgtgcacggagttcaaaaagattataacgtcgcagtgcgaattacgcccctcaagtacgcgcagatctgtctgtggatacatgggaatgacgcgaactgcgcatacggatag

SEQ ID NO: 6649 - DNA, 2541 bp, synthetic construct
  misc_feature 1..2541: note = source = /note="Description of Artificial Sequence: Synthetic coding sequence"
  source 1..2541: mol_type = other DNA
atgttcaagtgctggagcgtagtgctcgtgctgggcttcatttttctggagtctgaagggagaccgacgaaggaggggggctacggacttaagagctatcagcctctgatgaggctgcgccataaggaaaaaaatcaggagtcaagtcgggtgaaaggattcatgattcaagacggcccattcggttcgtgtgaaaacaagtattgtggtttgggtaggcattgtgtcacctcgagagagactggacaggcagaatgcgcctgcatggatttatgtaaacgtcactacaagcctgtgtgtggtagtgacggcgaattttatgaaaatcactgcgaggtacacagggccgcctgcctgaaaaaacagaagatcaccatagtccataatgaagactgtttttttaagggtgacaaatgcaaaactacagagtacagcaagatgaagaatatgctcctcgacctgcagaaccagaagtacatcatgcaggaaaatgagaatccaaatggcgatgatatctctcggaagaaactgcttgtggaccagatgttcaaatattttgacgctgactccaacggccttgtggacatcaacgagctcacccaagtcattaagcaggaagaattaggaaaagacctctttgactgtaccttgtacgtactgctgaaatatgacgactttaacgccgacaagcacctcgctcttgaggaattctatcgcgcttttcaagtgatacaactgtcactgcctgaagatcagaagctgtccataacagcagccacggttggacagtccgccgtgctctcctgcgcaattcaggggactctgagacctccaatcatatggaagcggaataacatcattctgaacaacctggatttggaggatatcaatgacttcggcgacgacggttcactctacattacaaaggtgacaaccacacacgttggaaattacacctgctatgcagatgggtacgaacaggtctaccaaacacacattttccaggttaatgttcccccggtcatccgagtgtatccagagtcgcaagcccgagaaccaggcgtgactgccagtctgaggtgtcacgccgagggcatcccaaagccccaacttggatggctgaagaacggtatcgatattactccgaagcttagcaagcagctgactctgcaggccaatgggagtgaggtacacatctcgaacgtccgttatgaggacacaggcgcctacacttgtatcgcaaaaaatgaagcaggtgtagacgaggatatttccagcttattcgtagaggattccgctaggaagacgctcgccaatatcctgtggcgggaggagggtctcggcattggtaacatgttctatgtattttacgaggacgggattaaggtgatccagccgatcgagtgtgagtttcaaaggcacattaagccatctgagaagctcttgggattccaggacgaggtgtgccccaaggccgaaggcgacgaagtgcagaggtgtgtgtgggccagtgcagttaacgtcaaagacaagttcatatacgtggcacagcccacactggatcgtgtgctgatagtggatgttcagtcacagaaagtggtccaggccgtgtctacagaccccgtgcccgttaaactgcattacgataaaagccatgaccaggtttgggtcctttcatggggtacgctggagaagacctccccaacactccaggtgatcacactggcctcagggaacgtacctcaccatactattcacacccaaccagtgggcaaacagttcgaccgagtcgacgatttctttattcctaccacaacactaataattacacatatgagatttggatttatattacataaagatgaggctgccctacagaagatagacctcgagaccatgagttacattaagacaatcaatctaaaagattataaatgtgtgccccagtcactggcgtacacccacctcgggggctactacttcataggctgtaagccagacagcaccggcgctgtcagtccccaggtgatggtagatggcgtgaccgacagcgtaatcggattcaatagcgacgtgactggcaccccatatgtgagcccggatggccactacctggtcagtattaatgatgtgaaagggctggttcgtgtgcagtatattactattaggggggaaatccaggaagcgttcgatatttataccaatcttcacatctctgacttggccttccagccatctttcactgaggctcatcagtataatatatatggatcctccagtactcagactgatgtcctgttcgttgagctgtcctctggtaaagtcaaaatgattaagtcattgaaagaaccccttaaagctgaagaatggccctggaaccgcaagaaccgccagattcaggactccggacttttcgggcagtatctgatgactccttcaaaggattctctgttcattctggacggaaggctgaataagctgaactgcgaaataacagaggtggaaaaaggcaatactgtcatttgggtaggcgacgcttag

SEQ ID NO: 6650 - DNA, 582 bp, synthetic construct
  misc_feature 1..582: note = source = /note="Description of Artificial Sequence: Synthetic coding sequence"
  source 1..582: mol_type = other DNA
atgctcggcgtgctggagctgctcctactcggagctgcctggcttgcaggccctgcgcgaggtcaaaatgagactgaacccattgtgctggagggcaagtgtctggttgtgtgcgacagcaacccgacaagcgatcctaccggcaccgctctcgggataagcgttcgctccggatcggctaaggttgccttctctgcaattagatctaccaaccacgagccaagcgaaatgagtaaccgaacaatgatcatatattttgaccaggttttggtgaacataggaaacaatttcgattccgaaaggtccactttcatagccccaaggaaaggaatctacagcttcaatttccacgtagtcaaagtatataaccgccagaccatacaggtctctctcatgcttaacggatggccggtaatttctgcctttgcaggagaccaggacgtcacacgtgaagctgcctcaaacggggttctgattcaaatggagaagggagatcgggcttaccttaaactcgagagggggaatttgatggggggctggaaatactcaaccttcagtgggttccttgtattccccctttag

SEQ ID NO: 6651 - DNA, 813 bp, synthetic construct
  misc_feature 1..813: note = source = /note="Description of Artificial Sequence: Synthetic coding sequence"
  source 1..813: mol_type = other DNA
atgcacggttcatgtagtttcctgatgttgctactgcctctcctccttttactagtggcaacaacagggccggtcggagccttgacagatgaggaaaaacgcctgatggtggagctccacaacttgtaccgcgcacaagtgagccccacagcctcagacatgcttcacatgaggtgggacgaggaattagctgcctttgctaaggcctatgcaaggcagtgcgtctggggccataacaaggagaggggtcgccggggtgagaacctgttcgcaattactgatgagggcatggatgtgcccctggctatggaagagtggcaccacgaacgggaacattacaatctctctgcagcaacatgttctccaggccaaatgtgtggccactacactcaagtggtatgggccaagacggagcgaatcggttgcgggtcccacttctgtgagaagctgcagggtgtggaggagaccaacattgagctactggtgtgcaattatgagcctcccggaaacgtgaaagggaagcgcccttaccaggaaggcaccccttgctcgcaatgtcccagtggctaccattgtaagaatagtctgtgtgagcctattggtagccccgaagatgctcaggacctgccctacttggtcacagaagctccctctttcagggccaccgaggccagcgatagccgtaaaatgggggccgagggaccagataaaccgtccgttgtgagcgggctgaatagcggccccggccacgtctgggggccgctactcggcctcctcttactcccgccgttggtactcgcaggcatcttttag

SEQ ID NO: 6652 - DNA, 702 bp, synthetic construct
  misc_feature 1..702: note = source = /note="Description of Artificial Sequence: Synthetic coding sequence"
  source 1..702: mol_type = other DNA
atggaccaagtgtttatgattgactcaaagtgcgagagcggaaaaggacggtgctcattcaatccaaacgtcaacaccgtgtctgtgatgattaatgaggaactcttttctggaatgtatatcgacttcatggggaccgacgccgctatattccgtagcctgaccaagagaaatgccgtccggacagaccagcacaatagtaagtggctaagcgaacccatgtttgtagacgctcatgtgattcctgacggcacagatccgaacgacgccaaggtctatttttttttcaaggagaagcttacagataacaaccgcagtacaaagcagatacactccatgatagcgaggatatgtccaaatgacactggcggcttaagatccctcgtaaataagtggaccacattcctgaaagctcgcctcgtgtgcagcgtgaccgatgaggatggccccgagactcacttcgatgaactagaagacgttttcttgcttgaaactgacaatccgcggacaaccttggtgtacggcatttttactacaagttcatccgttttcaaaggtagcgctgtgtgcgtctaccacctgtcagatatccagactgtcttcaacggtcctttcgctcacaaggaagggccaaatcaccagctcataagctatcaggggaggatcccttatcctaggcccggtaccaacacttgtgtatag

SEQ ID NO: 6653 - DNA, 1368 bp, synthetic construct
  misc_feature 1..1368: note = source = /note="Description of Artificial Sequence: Synthetic coding sequence"
  source 1..1368: mol_type = other DNA
atgctacatcctgaaacaagtcctgggcggggacatctgctcgccgttttacttgccctcctcggtaccgcttgggctgaggtatggccaccccagttacaggaacaggcccccatggccggagctctcaacaggaaggagtctttccttctgctctccctgcataacagactccgctcttgggtccaacccccagcagccgacatgcggagattagattggagcgatagtttggcccagttggctcaggctagggcagccctgtgcgggattccaacccctagtctcgctagtggattgtggaggactctgcaggttggttggaacatgcaactgctgccagctggcctggcttcctttgttgaggtggtaagtctatggtttgcagagggccagaggtattcacatgctgctggagaatgcgcccggaatgccacctgcacgcactacactcagctggtgtgggcgacatcctctcaacttggctgcgggcgtcacctgtgctcggctggtcaagcagctatcgaagcatttgtgtgtgcttactcccctaggggcaattgggaggtgaacggaaagactatagtgccttataagaagggtgcatggtgttccctctgcactgcttcagtgagtgggtgtttcaaagcttgggaccacgctggtggtctttgcgaggttccacgcaatccttgcagaatgtcctgtcaaaaccatggaaggttaaatatcagtacctgccactgccactgtcctccaggatacaccggcaggtattgtcaagtgcgctgctcactgcagtgtgtgcatgggcggttcagggaagaggaatgtagctgcgtgtgcgacatcggatacggcggggcacagtgtgctaccaaagttcactttccattccatacatgcgaccttcgcatcgacggggactgctttatggtgagcagcgaagcagatacctattaccgagctcgtatgaagtgtcaacgcaaaggaggcgtcctggcccaaatcaagagtcagaaggtgcaagatatcctggctttctacctgggccggctggaaacaacaaacgaggtaattgactcggactttgaaactaggaacttttggataggactgacgtataagaccgcgaaggatagttttcgatgggccacaggagaacatcaggccttcacctctttcgcattcggccagccggacaaccatggcctggtgtggctctctgccgccatggggttcggaaactgtgtggaactgcaagcctctgccgcctttaactggaacaaccagaggtgtaagacccgcaaccggtatatctgccagttcgctcaggagcatatttctcggtggggtcctggctcctag

SEQ ID NO: 6654 - DNA, 462 bp, synthetic construct
  misc_feature 1..462: note = source = /note="Description of Artificial Sequence: Synthetic coding sequence"
  source 1..462: mol_type = other DNA
atggcaaggttctgggtatgcgtggcaggcgccggatttttcctcgcatttcttgtgttgcactcaaggttttgcggcagtccggtgttacgcaatttcacctttgccgtgtcttggaggactgaaaagatcctgtacagattggacgtgggctggccgaagcaccccgagtatttcaccggcactaccttttgcgtagcagtagattcactgaacgggctggtgtacattggacagcggggagacaatatccctaagattctcgtctttactgaagacggctactttttacgcgcttggaattacactgttgacacgccccatggaatctttgccgcttccaccctgtacgaacagagcgtgtggataaccgacgtgggctccgacttcatgattttgtggttacatggggagaatggtacgggccccgcaaagttcaatatcccacactccgttacatag

SEQ ID NO: 6655 - DNA, 375 bp, synthetic construct
  misc_feature 1..375: note = source = /note="Description of Artificial Sequence: Synthetic coding sequence"
  source 1..375: mol_type = other DNA
atgtggcggtgtcccctcggcctactcttgctgttgcctctggcggggcatctggccctcggggcacagcagggacggggaaggcgggagctggcacccggtctacatctccgaggtatccgagatgccggcgggcgctactgtcaggaacaggatctgtgctgtcgagggagggcggatgactgcgcactgccctatctcggtgcgatatgctattgcgatcttttttgcaaccgcacagttagcgattgctgtcctgatttttgggacttttgtctcggggtgcctcctcctttcccaccaattcaggcgcctgccagacggaccggttctggctcagttactaagaaccacgcttggtggatccagacgtag

SEQ ID NO: 6656 - DNA, 777 bp, synthetic construct
  misc_feature 1..777: note = source = /note="Description of Artificial Sequence: Synthetic coding sequence"
  source 1..777: mol_type = other DNA
atgaagaccttgtacctagctgacacgttccccacaaatttcagggattctgcgggcgccatgaagcagatcaatgactacgtggcaaaacaaactaagggcaagatcgttgacctgttgaagaacctggatagtaacgccgtagtaatcatggtaaactacatcttcttcaaggccaagtgggagacctcctttaatcataagggcacgcaggaacaggacttctacgtgacgtcggaaacggttgtgcgggtacccatgatgagtcgggaggaccaataccactatttactggatcgcaatctctcatgccgggtagtcggcgtgccatatcagggcaatgccaccgccctgttcatcttgccctcagaggggaaaatgcaacaggtggaaaacgggctgagcgaaaaaacgctgcgcaaatggctcaaaatgtttaaaaagcgccagctcgaattatatctccccaagttcagcattgagggaagctaccaactggagaaggtgctcccttccctcggcattagcaatgtgtttacaagtcatgccgatctgagcggcataagcaatcactccaacattcaagtcagcgagatggtgcacaaagcggtggtggaagtcgacgagtcagggactagagccgcagccgccactggaacaatcttcacattcaggagtgcaagactcaattcccagaggttggtttttaatagaccttttttgatgtttattgtcgacaataacattctctttttggggaaggtcaaccggccatag

SEQ ID NO: 6657 - DNA, 1731 bp, synthetic construct
  misc_feature 1..1731: note = source = /note="Description of Artificial Sequence: Synthetic coding sequence"
  source 1..1731: mol_type = other DNA
atgattgtgtttgggtgggctgtgttcctggccagtcgatccctcggacagggactcctcttgacgctggaagagcatatcgcacatttcttaggaactggaggagccgccactactatgggaaactcgtgcatttgtagagacgatagtgggaccgacgactctgtggatacgcagcagcaacaggccgaaaacagtgcggttccgaccgccgatacacgctctcagcctagagaccctgttagacccccccgccgtggccgcggaccacacgaaccccgcaggaaaaagcagaacgtggacgggctggtacttgataccttggccgtgatccggactctagtcgacaacgaccaggaacctccgtatagtatgatcactctgcacgaaatggccgaaacggacgaaggatggttggacgtcgtgcagtccttgattcgagtgatccccctggaagatccactgggcccagctgtgattactttgctgctggacgaatgcccactgcctactaaggacgcactgcagaagctcaccgagattttgaacttgaatggggaggtggcctgtcaggattcctcccatcctgctaagcatcggaacacttcagcagtgctcgggtgtctggccgaaaagttggccgggcctgcctccattggcttactgtcacctggtatcctggaatacctgctccagtgcctgaagctgcagtcgcaccccactgtcatgctgttcgccctaatcgccttggagaagtttgcccaaactagcgaaaacaaactcactattagcgagtccagtatctccgataggttggtcacgcttgaatcgtgggcaaacgatccagactatctgaagcgacaggtgggcttctgcgcacagtggtctctggacaatctgttcctgaaggagggaaggcaactgacatacgaaaaagtgaatctgagttccatccgcgcaatgctgaactccaatgatgtgtccgaatatctgaagatttccccccatggcctcgaggcaaggtgcgacgccagcagcttcgaatccgtgcggtgtactttctgtgtggatgccggggtgtggtactacgaagtgactgtcgtgaccagcggagtaatgcagatcgggtgggcaactcgggattcaaagttcttaaatcacgagggctacgggattggtgatgacgaatactcttgcgcttacgatgggtgcaggcaactcatttggtataacgcaaggtcaaaaccacacattcatccctgctggaaggaaggtgacaccgtgggattcttacttgatttaaacgaaaagcagatgatttttttcctaaatgggaatcagttgcccccggaaaagcaagttttctcctctaccgtcagcgggtttttcgccgccgcttcatttatgagctaccagcagtgcgaattcaacttcggagccaaacctttcaaatatcccccaagtatgaaattttctacatttaacgactatgccttcctgacagcagaagaaaagattattctgcctcgacatcggagactagcactgctcaaacaagtctccattcgggagaactgttgttctctctgttgtgacgaggtagcagacactcagttgaagccatgtgggcactctgacctctgtatggattgtgcgctgcagctggaaacgtgtccactgtgcaggaaggagattgttagccgcatccgccagatttctcatatatcttag

SEQ ID NO: 6658 - DNA, 1359 bp, synthetic construct
  misc_feature 1..1359: note = source = /note="Description of Artificial Sequence: Synthetic coding sequence"
  source 1..1359: mol_type = other DNA
atggccgatatgcaccgcggctatgcagactctccctcaaaggcaggagcagccccctacgtacaggccttcgattctctgctcgccggacccgtagcagagtatctcaagatcagcaaagagattggcggcgacgtacagaagcacgccgaaatggtgcacacaggtttaaagctcgaacgcgcactactagtaacagcaagtcagtgccagcagccagctgagaataagttgtccgacctgctggcgccaattagtgagcagattaaagaagttatcaccttccgcgaaaaaaatagaggtagcaagctgtttaatcatctctctgccgtctctgaatcaattcaggctctcggctgggtggccatggcgccgaagcctggcccttatgtgaaggagatgaacgatgccgccatgttctataccaatcgcgttcttaaagagtacaaagacgtcgacaaaaaacatgtcgactgggtaaaggcctatctctccatttggaccgagctccaagcatacatcaaagagtttcacaccacaggactcgcctggtcaaaaaccggccccgtcgcaaaagaactgtctggcttgcctagcggcccctccgcaggaagttgtcctccccccccccccccttgcccacctccacctcctgtgagtaccatctcgtgttcttacgaaagtgcgtcacgctcctccttgttcgcccaaatcaaccagggcgaaagcatcactcacgctttgaaacatgtgtcagatgacatgaaaacacataaaaaccccgcgctgaaggcacagagtggcccggtgcggtcggggccgaaacccttcagtgctcctaagccccaaaccagtcccagtccaaagagagccacaaagaaggagcctgcagtccttgaactggaaggaaagaaatggagggttgagaaccaagaaaatgtgtctaacctggtgatcgaggataccgagcttaagcaggtggcctatatatacaaatgcgtgaatacgacacttcagataaaaggtaagattaacagcatcaccgtggacaactgcaagaaactcggactagtgttcgatgatgtagtcgggattgtggagattattaactctaaagatgttaaagtccaggtaatggggaaggtgcccacaattagcatcaacaagacagacggttgccacgcctatttaagtaagaactcgttggattgtgagattgtgagcgccaaaagttcagagatgaatgtgctgatccccaccgaggggggcgacttcaacgagtttccggtcccagaacagttcaagaccctgtggaacggccagaaactggtcacaaccgtaactgagatcgccggttag

SEQ ID NO: 6659 - DNA, 1533 bp, synthetic construct
  misc_feature 1..1533: note = source = /note="Description of Artificial Sequence: Synthetic coding sequence"
  source 1..1533: mol_type = other DNA
atgggccgaccaacacagtggccctcactcctgctccttctactgctgcctggcccacccccagtcgccggcctggaggatgctgcctttccccacctgggcgaaagtctgcagcctctgcctcgggcatgccctctcagatgtagttgccccagagtggacaccgtggactgtgacgggctggacttacgcgtattccctgacaacataactcgcgctgcacagcacttgagtctgcagaacaaccaactgcaggagctcccttataatgagctgagccggctgtccggtttacgaacacttaacctccacaacaatctcatatcaagcgagggcttaccggacgaggcttttgaatcgctcacacagctgcaacatctttgcgtagcccacaataaactgagcgtggctcctcaattcctgccgaggagcctccgagtcgcagacctcgccgcaaaccaggtgatggagattttcccactgaccttcggagagaagccagctctgaggagtgtttatctacacaacaaccagctctccaacgccgggttgccgccagacgcattcaggggaagcgaagcaattgctacactgagtctgtcaaacaatcagcttagttacttgccccctagccttcccccatcactcgaacgattacatctccagaataatctgatttccaaagtgccgcgtggcgcgcttagccggcagacacagctaagagagctctacttgcagcacaaccagctcaccgactcgggccttgatgccaccacattctcaaagctgcactcactggagtacctggatctcagccataaccagctgacgaccgtgcccgccggactgccaaggacgttggcgatccttcacttaggccggaatcgaattagacaagttgaagccgcacggctgcatggcgccagagggctacgatacctgctgctacagcacaaccagttgggcagtagcggactaccggcaggggctctgagacctctgcgcggcctgcataccctccacctatacggaaacggtctggatagggtcccccccgccctgcctaggagacttcgtgctctagttctgccacacaatcacgtggcagcccttggagcacgagatttagttgctacacctggccttaccgagctgaaccttgcctacaaccgactggcttcagccagagtgcatcatcgcgcctttagacgtctcagagccctgcgtagtctggacctggccggtaaccagctgactcggctacccatgggcctcccaacaggtctccgcactttgcagctacaacggaatcagttgcggatgctggaaccggaaccgttggcgggactagaccaactgcgggagctgtccttggcccataaccgcctccgagttggcgatatagggccagggacgtggcatgagctgcaagcccttcaggttcgccataggctcgttagtcacactgttccccgagctccaccatcgccctgtctgccttgccacgtgccaaacatactggtatcatggtag

SEQ ID NO: 6660 - DNA, 114 bp, synthetic construct
  misc_feature 1..114: note = source = /note="Description of Artificial Sequence: Synthetic coding sequence"
  source 1..114: mol_type = other DNA
atgaacagcactctgaatttttttatccagtcttacaataacgcctcaaatgacacctacctgtacagggtgcaacggctcattaggagtcagatgcagcaggtccactgctag

SEQ ID NO: 6661 - DNA, 1266 bp, synthetic construct
  misc_feature 1..1266: note = source = /note="Description of Artificial Sequence: Synthetic coding sequence"
  source 1..1266: mol_type = other DNA
atgggccgcccaacccagtggccttcgctgctcttgctcttgttgcttcctgggcctccccctgtcgccggcctagaggacgcggccttcccacacttgggcgagagcttgcagcccctaccacgagcgtgcccattgaggtgctcctgcccgcgggtagataccgtggactgcgacggcctggatctgagggtattcccagataacatcacacgagcagcccaacacctttctctgcaaaataatcagctgcaggagctgccctataatgagttgtcccggttatcagggctgagaaccttgaacctgcataataacctgatcagctcagagggcctgcctgatgaggcatttgaaagcctcactcagttacagcatctctgtgttgcgcacaataagaacaacttgatttccaaggtaccccgaggtgccctgagcagacagacccagctgcgcgaactttacctgcagcacaaccaactgacagactctggcctcgatgccacgaccttctccaagcttcacagtcttgagtatttagatcttagccacaaccagctgacaactgtccccgctggccttcccaggaccttggccatactgcacctggggcgaaatcgcatccggcaggtggaggccgcccgactccatggagctagaggcttgcgctatctgcttttgcaacataatcaactgggaagctctgggctgccggcaggagccctccgacccctgcgcggtctgcataccttacacctctacggaaatggcctcgatcgtgtaccgccagctttgcctagaagactacgggctctagtcctgcctcacaaccatgtggccgccctgggcgccagggatcttgtggcaacgcctggactgaccgagctgaatctggcctataatcgattggcctcagctcgggtgcatcaccgcgctttcagacgattgagggctctacgcagtcttgatctagcaggcaaccagttaactaggctgcctatgggcctaccaactggattgagaaccctccaattgcaaagaaatcaactgagaatgctcgaaccggagccgctggcgggcttagaccagctgcgggagctgtctttagctcacaacaggcttagggtgggcgacatcgggcctggcacttggcacgagctccaggcactccaggtccgacacaggcttgtttcacacaccgtcccaagagctcctccttctccatgcctgccatgtcacgttccaaacatactggtgagctggtag

SEQ ID NO: 6662 - DNA, 993 bp, synthetic construct
  misc_feature 1..993: note = source = /note="Description of Artificial Sequence: Synthetic coding sequence"
  source 1..993: mol_type = other DNA
atgtctagttggagcaggcagagaccaaaaagccccggcgggattcagccacacgtctcccggaccctcttcttgttgttactcttggccgccagcgcatggggtgtaaccctgtcaccaaaggattgtcaggtgttcaggtcagatcatgggtcctccatttcatgccaacctcccgctgagattccaggatacctgccggcagacactgttcatcttgccgtggagttctttaatctgactcacctcccagccaacctgctgcagggagcctcaaaattacaagagctgcatctctcaagcaatggattggaatctctttcacccgagtttttgcgtcctgtcccccaactgagagtcctcgacctcacgcgtaatgcacttgtgctgaaagagaaccagcttgaggtcttagaggtatcttggcttcacgggttgaaggctctgggtcatctggacctcagcggaaacagactgcgcaaacttcccccagggcttctcgccaattttacactcttgaggactctcgatttaggtgaaaaccagttggaaacactgccacctgaccttctgcgaggacccctgcagctggagcgactccacttagagggtaacaagctgcaggttctcggaaaggatctgctcctgccccagccggacctgcggtatctgtttctgaatggcaataaacttgcaagggtcgccgccggggccttccaaggcttgagacagcttgatatgctggacctatctaacaactctctggccagcgtgccggaagggctctgggccagcctaggccagcctaattgggacatgcgggatgggttcgacatctctggaaacccatggatctgcgaccaaaatctgtctgatttgtataggtggctgcaggctcaaaaagacaaaatgttctcacagaatgacactaggtgcgcagggccagaggccgtgaagggccagactctgttggcggtcgccaagtcgcagtag

SEQ ID NO: 6663 - DNA, 1815 bp, synthetic construct
  misc_feature 1..1815: note = source = /note="Description of Artificial Sequence: Synthetic coding sequence"
  source 1..1815: mol_type = other DNA
atgatgcgggcggtttgggaagccttggcggcgctggccgccgtcgcctgcctggtcggcgctgtaagaggaggacccggcctgagtatgtttgccgggcaggccgctcagcccgacccttgctcagacgagaatggccatcctcgacggtgtattcctgactttgtcaacgccgcttttggcaaagatgtgagggtcagcagcacatgcggccgtcctccagcacgatactgcgtggtcagtgagcggggggaggaaaggcttcgatcttgccatttatgcaatgcatcagaccccaagaaggcgcacccccccgcttttctcactgatctgaacaatccacacaatttgacatgctggcagagcgagaattatcttcagtttcctcacaatgttactctcaccctatcactgggcaagaaattcgaggtcacgtacgtgagccttcagttctgtagccctcggccggaaagcatggccatttataaaagcatggactatggccgcacatgggtgcctttccaattctactcaactcagtgccgcaagatgtataaccgaccgcatcgtgccccaattaccaaacagaatgagcaggaagcggtttgtacagactcccatacagatatgcggcctttgtccgggggattaatcgcctttagcaccctcgacggtcgcccgagcgcacacgattttgacaactccccagtgctgcaagactgggtgaccgcaactgatatcagagttgctttctcacgcctgcatacattcggagatgaaaatgaggatgatagcgagctggcccgcgatagctacttttatgcagtgagcgaccttcaggtgggtggccgatgcaaatgtaacggccacgccgcccgctgcgtgcgagaccgcgatgacagcttggtgtgcgattgcagacacaacacagcaggtccggagtgtgaccgctgcaaaccttttcattatgaccgtccttggcagagggcgaccgcccgggaggccaacgagtgtgttgcctgtaattgtaaccttcacgccaggcggtgccgtttcaatatggaattgtacaaactgagtggacggaaaagtggtggcgtgtgcttgaattgtcgccataacactgctgggcgccattgtcattactgcaaagagggctactacagggatatgggaaaacccattacacacagaaaggcctgtaaggcttgcgactgtcaccccgtgggcgctgctggaaagacctgcaaccaaaccaccggacagtgcccttgcaaggatggcgtgactggtattacctgtaaccggtgcgcaaaagggtatcagcagagtagaagccctatcgcgccatgtatcaagattcctgttgctccgccaacaaccgcggccagcagcgtcgaggaacccgaggactgtgattcctactgcaaagcatccaagggtaagctcaagatcaatatgaagaaatactgtaagaaggattatgctgtccagattcatattctgaaggctgacaaggccggagactggtggaagtttaccgtcaatatcatatccgtgtacaaacagggcacaagcaggatccggagaggagaccagtcactgtggatcaggtcgagggatattgcttgtaagtgtccaaaaatcaaacccctaaaaaagtatctgctgctgggcaacgcggaggattctccagatcaatccggcatcgtcgcagataagtcttctctggttattcagtggcgcgatacctgggcacgaaggttgcggaaatttcagcagagggagaagaaaggcaagtgcaaaaaggcctag

SEQ ID NO: 6664 - DNA, 948 bp, synthetic construct
  misc_feature 1..948: note = source = /note="Description of Artificial Sequence: Synthetic coding sequence"
  source 1..948: mol_type = other DNA
atggggcaggatcgcgaggagaccaacatcgagctcctggtgtgcaattatgaacctccgggtaacgtgaagggcaagcggccgtaccaggaggggacaccctgcagtcagtgtccctctggttaccactgtaagaacagcctctgtgagcccatcggttcaccagaagacgcccaggacctgccttatcttgtaaccgaagccccttccttccgggctaccgaggcttccgactctcggaagatgggcacgcctagttccctggctaccgggataccggccttcttggtgacagaagtttcaggatccttggcgaccaaagccctgccagccgtggagacccaggcgccaacctctctggccacgaaagatcctcccagcatggctactgaggccccaccttgtgtcactaccgaagtgccctccatcctggcagcccatagtctgccctcactcgacgaagaacctgttacgtttcccaagtctacacatgtgcctattcctaagagcgcggataaggtgaccgataaaacgaaggtgcccagtaggtcccccgagaattccctggacccaaaaatgtcgctgactggggcccgtgaacttcttcctcacgcccaggaggaagcagaggccgaagcggaactccccccctctagcgaagttctggcctctgtatttccagcacaggataagccaggcgagctgcaggccactctggaccatacaggacacacctctagtaaaagcctcccaaacttccccaatacgagcgctacagctaacgcaacaggtgggagagcacttgccctgcagtcttcactgcctggcgccgagggccctgataagccatcagtcgtgagcgggcttaactcaggcccaggacatgtctggggacccttactgggccttttacttctccctcccctcgtgcttgcaggcatcttctag

SEQ ID NO: 6665 - DNA, 207 bp, synthetic construct
  misc_feature 1..207: note = source = /note="Description of Artificial Sequence: Synthetic coding sequence"
  source 1..207: mol_type = other DNA
atgcaggtgagcaccgctgcattggcagtgctcctttgcacgatggctctttgtaatcaagtcttatcggctcccttggcagcagacactccgacagcgtgctgctttagctataccagccgtcaaattcctcaaaactttattgcagattattttgagacttctagtcagtgtagcaagccttccgtcatggctgcaccaggatag

SEQ ID NO: 6666 - DNA, 3369 bp, synthetic construct
  misc_feature 1..3369: note = source = /note="Description of Artificial Sequence: Synthetic coding sequence"
  source 1..3369: mol_type = other DNA
atgtccctccaagagatgtttagattcccaatgggccttctgcttggttctgtactgctggttgccagtgcccccgctaccctggagccacccggatgtagtaataaagagcagcaggtgactgtaagtcatacatacaaaatagatgttcccaagtctgccctggtgcaggttgatgctgacccccaacctctgtctgatgatggggcctccctgttggcactaggagaggcgagagaggaacagaatatcatctttaggcataacatccgcctacagactccgcagaaagattgtgagcttgccggatccgtccaggatcttctggctcgtgtgaaaaaactggaagaggaaatggtggaaatgaaagagcagtgcagcgcccagaggtgctgtcaaggcgttacggatctgtcaagacattgcagcggacatggaactttttccttggaaacatgctcatgtcactgtgaggaagggagagaaggaccagcttgcgaaaggctcgcttgtcctggggcatgtagcgggcacggccgctgtgtcgatgggagatgcctatgtcatgagccatatgtcggcgccgattgtggataccccgcctgtcctgaaaattgctccggccacggcgagtgtgtccgaggcgtctgtcaatgccatgaggattttatgtctgaggattgttcagaaaaacgatgtcccggagattgttcgggacacggtttttgtgatactggagagtgttattgcgaggagggcttcacaggtctggactgtgcccaggtagtgacgcctcagggtctgcagctgctgaaaaatacggaggactccctcctggttagctgggagcccagctctcaggtggatcactatctactttcttactatcccctgggaaaggagctctctggtaagcagatccaggtccccaaggaacaacactcttatgagatcctcggtcttctgccaggcacaaagtatattgtcaccctgagaaacgttaagaacgaggtctccagctctccacagcacctgctcgccaccaccgatctggctgtactgggaaccgcctgggtgacggacgagactgagaactcgctcgatgtagagtgggaaaatccgtctacagaagtcgattattataaattgagatatggccccatgactggacaagaagtggctgaagtgactgtacccaaaagctcagaccctaaatcccgatacgacataaccgggttacatccagggacagagtataaaattaccgttgtgccaatgaggggcgaactcgaagggaagcctatcctgctgaatggtcgcaccgagatcgatagccctaccaacgttgtgactgatagagtgactgaagataccgcaactgtatcctgggatcctgtgcaagcagtcatcgacaagtacgtggtgcggtatacctccgctgatggcgatactaaggaaatggcagtgcacaaagacgagagctcgacagttctgaccggcctcaaaccgggagaagcatacaaagtttacgtatgggcagaacggggaaatcaggggagtaaaaaggcggacaccaatgccctgactgaaattgattctcctgctaatctcgtgacagaccgggtgaccgagaacaccgcaacgataagctgggatcctgtacaagctacgatcgataggtacgttgttaggtacacttccgcaaaggacggcgaaactcgggaagtccccgtgggcaaggaacagtcttctactgttctgacaggcctccgcccgggggttgaatacacagtgcatgtatgggctcagaagggagcccaagaatccaagaaagctgatactaaggcacagacagatattgacagcccgcagaacctggtcacagactgggtgacggagaataccgccacggttagttgggatccggtgcaggcaactatagatcgatatgttgtacactacacctccgccaatggagagaccagagaggtgcctgtgggaaaggagcaatcgagcactgtattgactggcctgaggccaggtatggagtacacagttcacgtttgggcccagaagggcaaccaggagtccaagaaggcggataccaaagcacagacggagatcgacggccccaaaaacctggtaaccgattgggttaccgaaaacatggccacagtaagttgggaccctgtacaagccaccatcgacaagtacatggttcgttacacctccgcagacggggagaccagggaagtccctgtaggtaaagagcactcatctaccgttctgactggcctccggcccggcatggagtatatggtccatgtgtgggctcagaagggagctcaggagagcaagaaggccgacacgaaggcccagacggagcttgacccccctcggaatctaagaccctctgccgtgacgcagagtggcggaatactcacttggactcctcctagcgcacagatacacggctacattttgacttaccagtttcccgacggtactgtgaaggagatgcagctcggaagggaagaccaacggtttgccctgcagggacttgagcagggcgccacttaccccgtgtctttagtcgccttcaagggtggtagacggtcacggaatgtgagcaccactctgtccaccgtgggagcccgtttcccccatccatccgattgctcccaggttcagcagaatagtaatgctgccagcggtttgtatacgatttacctccacggagatgcgagcaggccactgcaggtctactgcgacatggagactgatgggggaggatggatagtgttccagaggcggaacaccggtcagttggatttctttaagcggtggcgatcttacgtggagggttttggagaccctatgaaagaattctggctgggactagacaaattacacaatctgactacaggtactcctgccaggtatgaagtcagggtggacctccagaccgctaatgaaagcgcctatgccatatatgattttttccaggttgcaagctccaaagagcggtacaagttaacagtggggaagtaccgcgggaccgcgggcgacgctctgacatatcacaacggttggaaattcacaacctttgatagggataacgacatagccttatcaaactgtgcactgacccatcacggcggctggtggtacaagaattgtcacctggccaacccaaacggaagatatggcgaaactaaacacagtgaaggagttaattgggagccatggaagggacatgagttttccattccttacgtcgagctgaaaatccggcctcatggttacagccgtgagcccgtgctcggcaggaagaaaaggaccctgcgaggcaggctgcgcacattttag

SEQ ID NO: 6667 - DNA, 897 bp, synthetic construct
  misc_feature 1..897: note = source = /note="Description of Artificial Sequence: Synthetic coding sequence"
  source 1..897: mol_type = other DNA
atgctgcatcccgaaactagtcccggccgtggtcacttgttagccgtcttactcgccctcctgggcactgcatgggccgaggtgtggcccccacagctccaggaacaggcccccatggccggcgccctgaacaggaaagagtcatttttacttctcagcctgcataatagactccggagctgggtgcagcctccggccgctgacatgcgaaggttggactggtccgatagcctcaattggctaaagcccggcccactgtggaaccctaacccagaaccaggcgtacgcccagtggcccacccagcatctgggttggaacacgccgcttgccccagggcctggcgacccttattgaaatggtccctgtggtttgccgaggggcagcggtattctcacgccgcaggagaatgtgcccggaatgctacctgcacccattacacacagctcgtgtgggccacttccagtcagttagggtgtggcagacacctgtgctctgccgggcaagccgctattgaggctttcgtctgcgcctattctccccgtggaaactgggaggtgaatggaaaaacaattgtaccctataagaaaggggcttggtgctccctctgcacagctagcgtcagcggatgctttaaagcatgggatcatgcgggaggactttgcgaagtgcctagaaatccttgccgtatgagctgccagaatcatggaagattgaatatctccacttgtcactgccattgtccccctggatacacaggaagatattgtcaggtaaggtgctctcttcaatgtgtgcacgggagatttagggaggaggaatgttcctgcgtgtgtgatatcggttacgagccttctgtgccgccgaggtgtatcttcccgagcactccagtgacctag

SEQ ID NO: 6668 - DNA, 1728 bp, synthetic construct
  misc_feature 1..1728: note = source = /note="Description of Artificial Sequence: Synthetic coding sequence"
  source 1..1728: mol_type = other DNA
atggacctcgtactgaagcgttgcttgctgcatctggctgtcatcggagcactgcttgccgtcggcgctactaaagggtcccaggtctgggggggccagccagtgtatcctcaggagaccgacgatgcctgtatttttcccgacggcgggccttgcccgtctggttcttggtctcagaagcgaagttttgtttatgtttggaaaacatggggtcagtattggcaagttcttggggggcccgtctcaggacttagtatcggaactggaagggccatgctcggcacccatactatggaagtcaccgtgtatcacagaaggggcagcaggagttatgtgcccctggctcattcttcctctgcgtttactatcaccgatcaagtgcctttcagcgtttctgtctcacagctgagggctctggacggcggcaacaaacactttttaaggaatcagccactcacatttgccctgcagttacatgatccttcaggctatctggccgaagctgacctgtcctacacctgggacttcggtgacagctcaggcacccttatttctagggctttagttgtgactcatacctatctcgagcccgggccggttacggctcaggtggtactccaggccgctatcccgctgacctcctgcggctcctcacccgtgcctggtactaccgacgggcaccgccctacggcggaagcacccaacacgactgccggtcaagttccaacaactgaggtagtaggcactactccagggcaagcgcccactgcagagccctctggcaccacatccgtccaggttcccactacagaagtgatctcaactgcccccgtgcagatgcccacagccgaatccactgggatgacccccgagaaagtgcccgtgtcagaagttatgggcactacgttggccgagatgtccacccccgaagccactgggatgacacctgccgaggtgtcaattgttgttttgtctggcactacagcagcacaggtcaccaccaccgaatgggtggaaaccaccgcccgagagctgcctattccagagcccgaaggaccagacgcatctagtatcatgagtactgaaagcatcaccggtagtctgggacctttactggacggtaccgctacgttacggcttgtgaagcgtcaggtgccattggattgcgtgctgtacagatatggttccttctctgtaacgctcgacatcgtacagggaattgaaagtgcagagattcttcaggcagtccccagtggcgaaggagatgcttttgagcttactgttagctgtcagggaggcctgcccaaggaggcatgcatggaaattagctctccgggatgccaaccgcccgcccagcggctgtgtcagcccgtcctgccctcaccagcttgccaactggtgcttcatcaaattctcaaaggtggctctggtacctattgtcttaacgtctccctggctgacacaaactcactcgcagttgtgtcaacacaattgatcatgcctggtcaggaagccggcctgggacaggtgcccctgatagttgggatactattggtcctgatggcagtcgttctcgcctcccttatttaccgacgacgtttaatgaaacaagacttcagtgtgccacagctccctcattcttctagccactggctccggcttccacggatcttctgttcgtgcccaatcggcgaaaactcccctctcttgagtggccagcaggtttag

SEQ ID NO: 6669 - DNA, 330 bp, synthetic construct
  misc_feature 1..330: note = source = /note="Description of Artificial Sequence: Synthetic coding sequence"
  source 1..330: mol_type = other DNA
tagagtgggcagtccctcaaaagcctgaacgcgagtagtggccatctggcactcattctttcttctattttcgggctgctcctcttagtactcttcattctttttttgacatggtgcagggttcagaagcagaaacatctgcctctgagagtgtccacacgaaggcgtggatccttagaggaaaacttattccatgagatggagacatgtctcaaacgggaggacccacatggaacccggacctccgacgatacacccaaccacgggtgtgaagacgcaagcgacacctccctgttgggcgtcttgcctgccagtgaggcgacaaagtag

SEQ ID NO: 6670 - DNA, 312 bp, synthetic construct
  misc_feature 1..312: note = source = /note="Description of Artificial Sequence: Synthetic coding sequence"
  source 1..312: mol_type = other DNA
atgagcggcagaggtaagggcgggaaggggctgggcaaggggggagcgaagagacacagaaaggtgctgagagataacatccagggcataacgaaaccagcgatccgccgcctggcccgaagaggtggcgtcaagcgaatcagcggtctgatatatgaggagacaaggggagtgctgaaagtcttcctggagaacgtgatcagggacgccgtgacatacaccgaacatgcaaagcggaagaccgttacagctatggacgtcgtttacgctctgaagaggcagggaaggactctgtacggtttcggaggctag

SEQ ID NO: 6671 - DNA, 2889 bp, synthetic construct
  misc_feature 1..2889: note = source = /note="Description of Artificial Sequence: Synthetic coding sequence"
  source 1..2889: mol_type = other DNA
atgttacgccggccagcgcccgctctcgctcccgcggcccggctgctactggcagggctgctatgtggcgggggcgtgtgggccgccagagtcaataaacataagccttggctcgagcccacttaccacggtatcgttacggaaaacgacaataccgtgctgttggatccgccactcattgccctggataaagatgccccattaagattcgctgaatccttcgaggtaactgtcaccaaagaaggcgagatttgcggctttaagatccatggccagaatgtcccgttcgatgctgtggttgttgacaaatccactggtgaaggggtgattcgctccaaggagaaattggactgtgagttgcagaaggattactccttcactatacaggcctacgactgtggcaagggaccagatggaactaacgtgaaaaagagccacaaagcgactgttcacatacaggttaacgacgttaacgagtacgcgcccgtgttcaaagagaagagctataaagctactgtgatcgaaggaaagcagtatgacagtattctgcgtgtggaagccgtcgacgccgactgttccccccaatttagccagatttgcagttatgagataatcactccagatgtcccgttcactgttgacaaggatggatatatcaagaacaccgaaaagctgaattacggtaaagaacaccagtataagctaactgtcacggcatatgactgcggaaaaaagcgcgccacagaggacgttctagtgaagatctccatcaagccaacttgtactcccggctggcagggatggaataacagaattgagtatgagcccggaaccggtgctctggcagtcttccccaatattcacctcgaaacatgcgatgagccagttgcatctgttcaggctacagttgaactggagacatcacacatagggaaggggtgtgacagggatacttattcagagaagagccttcacagactgtgtggcgccgccgccggtaccgcagagctgctaccatccccaagtgggtcccttaactggaccatgggcctgcctacggataatggccacgactctgatcaggtgttcgaattcaacggaacacaggcagtgcgtatccctgacggtgtcgtctccgtgtctccaaaggaaccttttacaatcagcgtatggatgcgtcatggccccttcgggcgtaagaaagaaacaatactgtgctctagcgacaagactgacatgaaccggcaccactactcgctttacgttcacggctgcagactgatcttcttgttcaggcaggacccgagtgaggaaaaaaaatataggcctgcagagttccactggaagctgaaccaagtctgtgacgaagaatggcaccattacgtgctgaacgtcgagttcccgtccgtcactctgtatgtggacggcacctctcacgagccattctccgtgaccgaagactatcctctgcacccctcgaaaatagagacacagctcgtggtaggggcttgttggcagggtggtgacctgcatatgacacagttcttcagaggaaatttagccggactaacacttcgcagcggtaagctagccgataagaaagtcatcgattgtctgtatacttgcaaggaaggactcgatctgcaggtgctggaagactctggtaggggggtgcagattcaggcacatcctagtcagctagtcttgacactagaaggcgaagacttaggcgaactggataaggcaatgcagcatatttcttaccttaactcccgccagtttcccacccctggtattagaagactgaaaatcacctccacgattaagtgttttaatgaggcaacctgtatttccgttccccctgtggacggctacgtgatggtgctgcagcccgaggagcccaagattagtctttcgggcgtccatcactttgcaagggctgcttccgaattcgagagctcagagggtgtgttcctcttccccgagctgagaattatctcgaccattactagggaggtcgagcctgagggggacggtgcagaggatcctaccgtgcaggagagcctggtgagcgaggagattgtgcatgacctggacacttgtgaagtgaccgtggaaggcgaggagctgaaccacgagcaggagagcttggaggtggatatggcgcggctgcagcagaaaggtatcgaagtgtcatcctccgagctaggaatgacatttaccggcgtggacacaatggcctcttatgaggaagtactccatttacttcgttacaggaactggcatgctcgatccctcttggatagaaaatttaagctcatctgcagcgaactgaacggaaggtacatctccaatgaatttaaggtggaagtgaacgtcattcatactgccaatcccatggaacatgctaaccatatggctgcccagccccagttcgtgcaccctgagcacaggagctttgttgatctgtctggccataatctggctaacccacatccgtttgctgtggtaccttccacggctaccgttgtaatcgtagtgtgtgtaagctttctggtgtttatgataattctaggcgtgtttcgaattcgcgctgcccaccgtagaacaatgcgagatcaggacacaggtaaggaaaatgagatggactgggacgactccgcattaactatcacagtcaaccctatggaaacatacgaggaccaacattctagcgaggaagaagaggaagaagaagaggaagaggagagtgaggacggagaggaagaggatgatattacaagtgcggaatctgaaagctctgaggaggaggaaggagagcagggggatccacagaacgccactcgccaacaacagcttgaatgggatgacagcactctgagctactag

SEQ ID NO: 6672 - DNA, 912 bp, synthetic construct
  misc_feature 1..912: note = source = /note="Description of Artificial Sequence: Synthetic coding sequence"
  source 1..912: mol_type = other DNA
atgctccatccggagacctctccaggacgagggcatctgctggcagtcctgttggccctgctgggtaccgcttgggctgaagtgtggcctccccagctgcaggaacaagcaccgatggccggggcgctgaaccgtaaggagtcttttctgttactgagccttcacaaccgccttaggtcttgggttcagcctcctgctgctgacatgaggaggcttgactggagcgacagcttggcacagttagctcaggctcgggccgcgctgtgtgggactccgacaccttctctcgccagcggcctttggaggaccctgcaagtcgggtggaatatgcagttattacccgcagggttggtatccttcgtcgaagtcgtcagtctgtggttcgcagagggccagcgatactctcacgcagcaggtgagtgcgcaaggaatgcaacctgtacgcactatactcaactggtgtgggccacaagttcccaacttgggtgcgggaggcatctgtgtagtgctggccaggcggccatcgaggcttttgtctgcgcctacagtccgagggggaactgggaagtgaacggtaagactatcgtcccctataagaaaggggcatggtgtagtttatgcactgcaagtgtgtcaggttgctttaaggcctgggatcacgcaggcgggctttgcgaagtcccccgcaatccatgcaggatgtcctgtcagaatcacgggagattgaacatttccacctgccactgccactgtccgccggggtataccggccgatactgtcaggtgaggtgtagtctccagtgcgtccatgggcggttccgagaagaagagtgtagctgcgtgtgcgatataggatacggcgagcccagtgtgcctccacgctgtatttttccatctacacctgtgacatag

SEQ ID NO: 6673 - DNA, 1356 bp, synthetic construct
  misc_feature 1..1356: note = source = /note="Description of Artificial Sequence: Synthetic coding sequence"
  source 1..1356: mol_type = other DNA
atggaggccacaggcactgacgaagttgacaaactgaaaactaaattcatttcggcctggaacaacatgaaatacagctgggtgctgaaaaccaagacgtatttttctcgcaactctccagtgttgctgctgggcaagtgctaccacttcaagtacgaggacgaagataaaacactgccggctgaatctggttgcactattgaggatcatgttatcgcaggaaatgtcgaggagttcagaaaggattttataagccgtatctggctcacctaccgtgaagaatttccacaaatagaaggctctgccttaactacggattgcggatggggctgcacactccgcacagggcagatgttgctggcacaaggcctgattttgcacttcctgggtcgggcatggacttggcccgatgctctcaacatcgaaaacagcgattcagagagctggacttcccacactgtcaaaaagttcacagcttcttttgaggcctctctctcaggagagagggagttcaagactccaacgatcagcctgaaagagacgattgggaagtattccgacgaccatgagatgcggaacgaggtttaccacagaaaaattataagttggtttggggactcgcctttggccctcttcggactgcaccagttgatcgagtacggtaagaaatcaggaaaaaaagcaggtgactggtacggacccgctgtcgtggctcatattctgagaaaggccgtcgaggaggccagacacccagatcttcaggggattacaatttatgtcgcgcaggactgcacagtgtacaatagtgacgtcatcgataagcagagcgcgtccatgacctcagataacgctgacgataaagctgtgatcattctagtgcccgtgcgccttggcggcgagagaacgaacacagattacttggagttcgtcaaggggattctcagccttgagtattgtgtaggtatcatcggtggcaaaccaaagcaatcttactacttcgccggatttcaggatgacagtctgatctacatggatccgcactattgccagagctttgtggacgtgagcatcaaagattttcctctcgagacgttccactgccccagtccaaaaaaaatgtccttcagaaagatggacccttcctgcactatcggtttttattgccgcaacgtccaggatttcaaacgggcctcagaagaaatcacaaagatgctgaaattctcctccaaagaaaaataccccctctttactttcgtgaatggccattccagagactatgactttacatccaccacgactaacgaggaagacctgtttagtgaggatgagaaaaagcagaaaaagaagaaaaagtag

SEQ ID NO: 6674 - DNA, 1557 bp, synthetic construct
  misc_feature 1..1557: note = source = /note="Description of Artificial Sequence: Synthetic coding sequence"
  source 1..1557: mol_type = other DNA
atgcgcacatgggactaccgatggtctctggccttggtcgcccagacaggggtgcattgttgcaacctctcatcgcttcagcctctgccccccaggtttaagcgtttctcctgtctgtccctgtcctccggttgggactacagcaacagtggaaacatgaagcctccccttctcgtcttcattgtttgcctgttgtggttaaaagactcccattgcgcccccacatggaaagacaaaacagctatctcagagaatctgaagtccttctctgaagtgggcgaaatagatgccgacgaggaggtcaagaaggcactaactggcatcaagcaaatgaagatcatgatggagcgaaaagaaaaggagcacactaacttgatgagtaccctgaagaagtgccgagaagagaaacaggaggctcttaagctgttaaacgaggtccaagagcacctagaggaagaagaacgcctgtgcagagagagtctcgccgacagctggggtgagtgtcgctcctgtctggaaaataactgtatgaggatttataccacctgccagccctcttggtcaagcgtaaaaaataagatcgagagattcttcagaaaaatttaccagtttctgtttcccttccacgaggacaatgaaaaggatctgcccatatccgaaaagttgatcgaagaagacgcccagctgactcagatggaggacgttttttcgcagctcaccgtcgacgtcaattctctattcaaccggtccttcaatgtgtttcgccagatgcagcaggaattcgaccagacatttcaaagccattttatctcagatacagacctcacagagccgtacttctttcctgcattttccaaagagccaatgaccaaggccgatctggaacagtgctgggacatccccaactttttccagcttttttgcaactttagcgtgtccatctatgaaagcgtgtccgagaccatcacaaaaatgcttaaagccatcgaggatctgcctaagcaagataaagcaccagatcatggaggtctgatctcgaagatgctgcccggccaggaccgcgggctctgcggtgagctggatcagaatctaagcagatgcttcaaatttcatgagaagtgtcaaaagtgccaagcacacctcagtgaagattgccctgatgtacccgccctgcataccgagctggacgaagctatccgactggtgaatgttagtaatcaacagtatggacagattctgcagatgactcgcaaacatctggaggatacagcctatctagtagaaaagatgagggggcagtttggttgggtgtcggagctcgccaatcaggcccccgaaacggagatcatctttaactctatccaggttgttccacggatccacgaggggaatatttcgaagcaggacgagaccatgatgacagatctgtccattctgcctagttctaacttcacccttaaaatccccctggaagaatccgctgaatctagcaactttatcggttatgtggtcgcaaaggctctccagcattttaaggagcacttcaagacatggtag

SEQ ID NO: 6675 - DNA, 1716 bp, synthetic construct
  misc_feature 1..1716: note = source = /note="Description of Artificial Sequence: Synthetic coding sequence"
  source 1..1716: mol_type = other DNA
gtggagatgcgcaaatggagcagtgaacccggccctgagcccgataccgtcgaagcggtgatcgagtatatgtacactgggcggattcgcgttagtaccggaagtgttcacgaggttctggagcttgctgacaggtttctcttaatccgactgaaagaattctgtggcgagttcctgaagaagaagctgcatcttagcaattgcgttgcgattcatagcctcgcccacatgtatacactgagtcagcttgccctgaaagcggccgatatgatccgaaggaattttcacaaggtgatccaagacgaggaattttataccctgccttttcacctgattagggattggttgtctgacctggagataaccgtcgacagcgaagaggtacttttcgagaccgttttaaagtgggtgcagcgaaacgcagaggagcgcgaacggtattttgaagagttatttaagcttctccgactttctcagatgaagcctacatatttaacccggcacgtaaaaccggaacggctggtagcaaacaatgaggtctgcgtgaaactagttgctgatgccgtggagcggcacgctctgagggccgaaaatattcagagtggaacatgccagcatcccacgtctcacgtgtccttgcttccgaggtatgggcaaaatatggatgtgattatggtaatcggcggagtttccgaggggggcgattacttaagcgaatgcgtggggtattttgtagatgaagatcggtgggtgaatttgccacacatccacaaccatctggatggtcacgcagtagcggtgaccgaaagctatgtgtacgtggcagggtcaatggaacccggatttgctaagactgtagaaaggtataatcccaatcttaacacctgggagcacgtctgctccctgatgaccagaaagcactctttcggcctgacagaagtgaaaggcaagctgtattccattggcggacacggcaatttctcacccggtttcaaggatgttactgtctataatcctgagctggataagtggcataacttggaatccgcccctaaaattctaagagacgttaaagctctggccatagaggatcggtttgtgtacattgctgcgagaactccagtggacagagacaccgaagacggcctgaaggctgtgataacctgttacgacacagagaccagacagtggcaggacgtggagtctctccctcttattgataactactgctttttccaaatgtcagtggtcaattcaaatttctaccagacagcttcttgctgtcctaagagctactgccttgagaacgaagaggcagtgagaaagattgccagtcaggtatctgatgagatcctggagagtttgcccccggaggttttgagcatagaaggcgccgccatatgctattataaagatgatgtttttatcattggagggtggaagaactccgacgacatagacaaacagtatcgcaaagaagcatacagatattgtgccgagaggaagaggtggatgctgttgcctcccatgccccagccgagatgtagggcaactgcatgccacgtccgtattccatataggtacctgcatgggacccagagataccctatgccacagaaccttatgtggcagaaggacagaattcgccagatgcaagaaatacataggcatgccttaaacatgaggcgggtgcctagttcccagatcgaatgctag

SEQ ID NO: 6676 - DNA, 729 bp, synthetic construct
  misc_feature 1..729: note = source = /note="Description of Artificial Sequence: Synthetic coding sequence"
  source 1..729: mol_type = other DNA
atgctgaagaagatctctgtcggcgtggccggagacctcaacaccgttaccatgaagctgggatgtgtgctgatggcatgggccctctacctgtccctgggcgttttatgggtcgcccagatgcttctggcggccgggtgtcatgctgagttgtttccagcacctatactccgggctgtaccttctgccgaacctcaggccggctccccaatgaccctctcttgtcaaaccaagctgccactgcaaaggtccgcggctcgtctcctcttctccttctacaaggacggccggatcgtgcaatccagaggtttgtccagcgagtttcagatcccaaccgcttccgaggaccattcaggctcttattggtgtgaagcggccaccgaggacaaccaagtttggaaacaaagccctcagctggagatcagagtgcaaggcgcaagctcctctgctgctccgccaactttgaatcccgctccacaaaaatcggcagctcctggcacggcaccggaggaggccccaggccctcttccaccgccacctaccccttcatcagaagatccaggtttctctagcccccttggaatgcctgaccctcatctataccaccaaatgggcctgctgcttaagcatatgcaggatgtgagagtgctgctgggccacttgctgatggagctccgagaactcagcggccaccggaaacctgggaccacaaaggccactgctgagtag

SEQ ID NO: 6677 - DNA, 1392 bp, synthetic construct
  misc_feature 1..1392: note = source = /note="Description of Artificial Sequence: Synthetic coding sequence"
  source 1..1392: mol_type = other DNA
atgtatgtgagtactcgcgagcggtataagtggctgaggttctccgaggattgcctctatcttaatgtctatgctcccgccagagcaccaggagaccctcagcttcctgtgatggtgtggttccccggaggagctttcattgtcggtgctgcatcctcctacgagggcagcgacctggctgccagagagaaagtggtcctcgtatttctgcagcaccgcttgggcattttcggcttcctttctacagacgatagccacgctagggggaactggggacttttggaccaaatggctgcgctgcgctgggtgcaagagaatattgccgcctttggcggtgacccaggcaacgttacgctgtttggtcagtcagcaggtgcaatgtctatctcaggactgatgatgagcccactcgcttccgggctgttccatagggcaatcagccagtcaggaacagcactcttccggctgtttatcacttctaatcctctcaaggtggccaaaaaagtggcacatctcgctggctgtaatcataattcaacacaaatcttggtgaattgtctgcgggcactctccggcacaaaggttatgcgggtgagcaataaaatgaggttcctgcagctcaacttccaaagagaccctgaggagataatttggtctatgtcgcccgtggtggacggcgtcgtaattcccgatgaccctttggttctcttgacacagggcaaggtgagctctgtgccttatctccttggagttaacaacctcgagttcaactggctcctgccatacattatgaagttcccactgaaccggcaggcaatgcggaaggaaacaattacgaaaatgttatggtccactaggactttgctcaacattaccaaggagcaggtgcccttagttgtggaggaataccttgacaacgtgaatgagcacgactggaaaatgcttcggaaccgtatgatggatatagtacaggacgccacttttgtttatgctactctgcagacagctcactaccatcgtgatgcaggattgccagtctacctttacgaatttgagcatcacgctaggggcatcattgtcaagccccggaccgacggggctgatcatggcgacgagatgtactttctattcgggggaccatttgctactggcctctcaatggggaaagagaaggccctcagcctccagatgatgaagtactgggcaaatttcgctagaaccggaaatcccaacgatggcaatctgccatgttggccaaggtacaacaaggacgagaagtacttgcagctggacttcaccacacgggtgggaatgaaactcaaggagaagaaaatggccttttggatgagcctgtatcaaagtcaaaggcccgaaaaacagcgccagttctag

SEQ ID NO: 6678 - DNA, 1215 bp, synthetic construct
  misc_feature 1..1215: note = source = /note="Description of Artificial Sequence: Synthetic coding sequence"
  source 1..1215: mol_type = other DNA
atgttctaccacgcatacgacagttatctggaaaatgctttcccatttgacgagctcaggcccctgacatgcgacgggcacgacacttggggttctttctccctgacccttattgatgctctggataccctgctaatcctgggaaatgtgtcagaatttcagcgagtcgtcgaggtcctgcaggattctgtcgattttgacatcgatgtgaacgcatccgttttcgagactaacatcagggttgtcgggggtctgctgagcgctcacctgttgtcaaagaaggctggcgtagaagtggaggcaggctggccctgctctggacctctactaaggatggcggaggaggctgctcggaaactactccctgccttccaaacacccactgggatgccttatggcacggtaaacctgttacacggggtgaaccccggcgaaactcccgtcacctgcacagcaggtattgggacattcatagttgagttcgctacgttgagttccttaacgggcgatcctgttttcgaggacgtagcacgagtagcattgatgagattatgggagagtcggtcagacattgggctggttggaaaccacatagatgttctcaccggtaaatgggtcgcccaggatgctgggatcggcgctggcgtcgacagttacttcgagtatttagtaaaaggagcaatcttgctccaggataagaagcttatggcaatgtttttggaatacaacaaggcaatcaggaattacacaaggtttgatgactggtatctgtgggtacagatgtataaggggacagtttcaatgccagtattccagtctctggaggcctattggcctgggcttcaaagcctaataggagatatcgacaatgccatgcggacctttctgaattactataccgtatggaaacaatttggcgggcttcctgagttttacaacatcccacagggatacacggtagagaagcgagaggggtacccacttcgacctgagctcatagagagcgccatgtatctgtaccgcgcaactggagaccctacacttctggagttgggtagggatgctgtggagagcattgaaaagatcagtaaagtggaatgcggctttgcaactgtgtccgtgtgcatggcaccaaggactggcaagagcctgcctctgttgttgaagtctctattcaaggggagagcgctgggagtgttgacctaccagcattag

SEQ ID NO: 6679 - DNA, 1281 bp, synthetic construct
  misc_feature 1..1281: note = source = /note="Description of Artificial Sequence: Synthetic coding sequence"
  source 1..1281: mol_type = other DNA
atggggtggacggacaccctcgagtctgccgaagacattttctggaaacaggccgattttggttacgcccgggagcgccttgaggaaatgcatgtgttgtgtcagcccaaggaaacctccgactccagtctcgtctgctcgcggtatctccagtattgcagggccaccaacttgtatctagacttgcgcaacataaaacgaaatcacgatagattcaaggaagatttttttcagtctggcgaaatcgggggacactgcaagttggacattcgcaccctgacgagtgaggggcagcggaagtcccccttacagtcatggtttgcagagctgcagagttatacccaactcaatttccgaccaatcgaggacgccaagtgcgatatcgtcatcgaaaagcccacttactttatgaagctggacgccggcgtgaacatgtatcatcatttctgtgacttcataaatttatatattacacagcacgtaaacaatagcttcagtacagacgtttacatcgtgatgtgggacacctctagctatggttatggggacctgttctcggatacctggaacgccttcaccgattacgatgtaatacaccttaaaacatatgattctaagcgcgtttgttttaaagaagctgttttttcccttcttcccaggatgcgttatggcctattctacaatacgcccttgatatcgggatgtcaaaataccggactattcagagcctttgctcagcacgttctccaccgactgaacattacacaggaaggaccaaaagatggtaaaatcagggtcaccatcctggccagatctacagagtatagaaagatccttaatcagaacgagctggttaacgcacttaaaaccgtgtctaccttcgaagtgcagattgtggactataaatatcgcgagctggggttcctcgatcagctcagaattacacacaacaccgacattttcatcggaatgcatggtgcaggactcacacacctgctgtttcttcctgactgggctgcagttttcgaattatacaactgtgaagatgagcgctgctacctggacttagccagacttcgcggagtgcattacattacatggcggcggcagaacaaggtgttcccccaagacaagggccaccatccaactctgggagagcacccgaaatttaccaattactcattcgacgtagaggaattcatgtacctggtactacaagccgccgatcacgtgctacagcacccaaaatggcccttcaagaaaaagcacgatgaactctag

SEQ ID NO: 6680 - DNA, 1098 bp, synthetic construct
  misc_feature 1..1098: note = source = /note="Description of Artificial Sequence: Synthetic coding sequence"
  source 1..1098: mol_type = other DNA
atgaagttggggtgcgtgctcatggcttgggcactgtatttgagtctgggtgtcctgtgggtcgcacagatgctgttagtagcaagcagcttttcagcagcttctttcgaaaccctgcagtgcgaggggcccgtgtgtaccgaggaaagctcttgccacacggaagatgatctgacagacgccagagaagcggggtttcaagtgaaagcctatacattcagtgagccctttcatttaatcgtttcttacgactggctaattctgcaaggcccagcgaaaccagtgttcgagggcgacttgctggtgctccggtgtcaggcgtggcaggactggccactgacacaggttaccttttaccgggatgggagtgctctcggaccccctgggccaaacagagagttctcgatcacagttgtgcagaaggcggattctgggcactaccattgttcaggcatctttcagagtccaggccccgggatacccgaaaccgcgtctgttgtcgctattaccgtgcaggagttattccctgcacctattttgcgagcagtcccaagcgctgaacctcaagccggaagcccaatgaccctctcttgtcagactaaactgcctctgcagcggtccgccgcaaggcttttgttctccttttacaaggatgggaggattgtccagtctcggggactctcttccgagtttcagattcccacagcatctgaagatcactcaggatcgtactggtgtgaggctgccacagaagacaatcaggtatggaagcagagccctcagctggaaatcagagtgcagggcgcctcctccagcgctgccccccccaccctgaaccctgcaccccagaaatctgctgctccgggtactgcaccagaggaggccccaggacctttgcctccaccaccaaccccttcaagcgaggatccagggttttcatctccactcggaatgcccgacccccacttgtaccaccaaatgggtctgttgctgaagcatatgcaggacgtcagagtgctacttggccatttgttgatggagttgcgcgagttgagcggacacaggaaacctggaactacaaaggcaacagcggaatag

SEQ ID NO: 6681 - DNA, 1407 bp, synthetic construct
  misc_feature 1..1407: note = source = /note="Description of Artificial Sequence: Synthetic coding sequence"
  source 1..1407: mol_type = other DNA
atgcggtggatcctgtgctggtcccttacattgtgccttatggcccagacggccttaggtgcactgcataccaaacggccccaggtggttacaaaatatggtacgctccaaggtaagcagatgcatgtcggtaagaccccgatccaggtcttcctgggagtgccattcagcagaccccccctggggatcttaagattcgcaccacccgaacctcctgaaccttggaaaggcattcgcgacgccactacgtatccacctggatgcctgcaggagagttggggccagctggccagcatgtacgttagtaccagagaacggtacaagtggctcagattttcagaggattgcctttacctgaacgtctatgctcccgcaagagctcccggagatccacagctgcccgtgatggtttggttccccggaggcgccttcatcgtcggcgcggccagctcttatgaggggtcagacttggccgcacgggagaaggtagtcctggtcttcctccaacataggctgggaatcttcggttttctgtccacggacgatagtcacgccaggggcaattggggccttctagaccagatggctgcgctgcgttgggtgcaggagaacatcgcggcttttggcggcgatccaggaaatgtcaccctgttcggccaatcagcaggcgctatgtctattagcgggctgatgatgagccctctggcttctgggttgttccacagagcaatctcacagtctggcacagccttatttagattgtttattaccagtaatcctctaaaggtggccaaaaaagtcgctcatctggctggctgtaaccacaactctactcagattctggtaaactgtctacgggcactgtctggtacaaaggtaatgcgcgtgtccaacaaaatgcggtttttacagctgaatttccagcgcgatcctgaggagatcatttggagcatgagccccgttgtcgacggagtggtgattcccgacgacccgctggtcctccttactcagggtaaggtgagcagcgtaccctacttgctcggtgttaacaatttggagtttaactggctgcttccctacatcatgaaattccctctcaaccggcaggctatgcggaaagagaccatcactaaaatgctatggagtactaggacattgctcaatatcacaaaagaacaagtacctctggtggtggaggaatacttggataacgtgaacgagcatgattggaagatgttacgaaacagaatgatggacattgtgcaggacgccacttttgtgtacgctacattgcagaccgcccattaccacagagaaactcctatgatgggtatttgccctgccggccacgcaaccacacgtatgaaatctacttgtagttggatccttccgcaggaatgggcttag

SEQ ID NO: 6682 - DNA, 756 bp, synthetic construct
  misc_feature 1..756: note = source = /note="Description of Artificial Sequence: Synthetic coding sequence"
  source 1..756: mol_type = other DNA
atgagtagttatgggtacggggacctgttctctgacacttggaacgcattcacggattacgatgtgattcatttgaagacatacgattcgaagagggtgtgttttaaagaagcagtttttagcctgctaccacgaatgcgttacggactgttctacaatacaccactgatcagcgggtgtcagaataccggtctgttcagagccttcgcccaacatgtcctacatcgcctgaatatcacccaggagggacccaaagacggaaagatccgagttacgattctcgcccggagcacagaataccgcaaaatcctcaaccagaacgagttggtaaacgcccttaaaacagtgagcacttttgaagtacagatcgtggactataaatacagagaactcggattcctcgatcaactgaggattactcacaacaccgacatctttattgggatgcacggagccggcctgactcatcttttgttcctcccggattgggccgccgtattcgagttgtataattgcgaggatgaaaggtgctatctggatctggcacgccttagaggcgtgcactatattacttggcgtcgtcagaataaagtgttcccccaggataagggacatcaccctacactcggggaacaccccaagttcacgaactactcctttgacgtcgaggagttcatgtatcttgtgcttcaagccgccgaccacgtgctgcaacaccctaagtggccgttcaaaaaaaagcatgacgaactttag

SEQ ID NO: 6683 - DNA, 927 bp, synthetic construct
  misc_feature 1..927: note = source = /note="Description of Artificial Sequence: Synthetic coding sequence"
  source 1..927: mol_type = other DNA
atgattcctgtagaattattactgtgctacctgttgttgcaccccgtagacgccactagttatggcaagcagaccaacgtattgatgcattttcccctttctcttgagtctcaaaccccttcttctgatcccttatcgtgccagttcctgcaccccaagtccctccctggcttctctcacatggctcctcttccaaagtttctggttagccttgctctccggaatgcgctggaggaagccggctgtcaggctgacgtctgggctttgcaactccagctttataggcagggcggagttaacgccacacaggtcctcatccaacacctcagaggcttgcaaaaaggcaggtcaaccgagaggaacgtgtctgtggaggctctggcctcagctttgcagctgctggcgagggagcagcagtctacaggcagagtgggcagatctctgcccacagaagactgcgagaatgaaaaggagcaggctgtacacaatgttgtccaactcttgcccggagtcggaacgttctacaacctgggtacggctttgtattatgccacacagaactgccttgggaaagcccgagaaaggggtcgcgacggcgctatcgaccttggctacgatttgctaatgacaatggccggcatgagtggtggtcccatgggtctcgcgatttcagcagcacttaaacccgcactccggagcggcgtgcagcagctgatccagtattaccaggaccagaaagatgctaatatctcacagccagagaccactaaggaaggactgcgagccataagcgacgttagcgacctcgaggaaactactacgctggccagttttatctccgaagtagtctcctcggccccttattggggttgggccatcatcaagagctacgacctggaccctggtgccgggtctctggaaatatag

SEQ ID NO: 6684 - DNA, 2862 bp, synthetic construct
  misc_feature 1..2862: note = source = /note="Description of Artificial Sequence: Synthetic coding sequence"
  source 1..2862: mol_type = other DNA
atgcgcgtacttgcttgtctgctggcagccctggtcggcattcaagcggtagagcgactacggctcgcggatggtccccatggctgcgccggccgccttgaggtgtggcacggaggccggtggggcacagtgtgtgacgacggatgggacctgagggacgcagctgtggcctgtcgacagctgggatgcggtggtgccctcgccgctcctggaggcgcttttttcggcgaaggagcaggcccagtgtggctgtcagaactggcttgtagaggaaacgagggacaacttggactatgtcatcacagaggttggaaagcgcacatttgcagccacgaagaggacgcaggggtggtgtgtgccgggcagcgggttgctaactcaagagatgattcaacttccccgttggacggggccccctggcctggcctgcttctcgagctgtcaccgagtaccgaagaacccctggtcacacacgcaccacggcccgccgggaatccccaaaacgcttcccggaagaaatcaccccgcccgaaacaggctaagtctactagggccccactcctgaccaccggcgcccccaggcaggaaaggttacgcttggtgagcgggcctcatagatgcgctggcaggctggaagtgtggcatggcgggagatgggggacagtgtgtgacgacggatgggatctgcgcgatgcagcagtggcatgcagagaattaggttgtggaggcgccttggccgctccggggggggctaggtttgggccaggcgctgggccagtgtggatggacgacgtagggtgcggaggaggagagcaagctctgagagactgtcctcgctcaccctggggccggagcaactgtgatcacagcgaggacgctggccttgtttgcacgggaccggcaccaaggctccgcctggcggacggtccccatggctgtgctggccggttagaggtctggcacggcggtaggtggggatcagtgtgcgacgatgcatgggacctccgtgacgctgcggtcgcatgtcgagagctgggatgcgggggcgccctggctgcccccggcggagctttctttggtgagggaagtgggccaattatcctggatgatctgcgctgtcgcggaaacgagacagcgctcaggttctgtccagcacgcccttggggacagcacgattgccaccacagagaggacgccggggccgtatgcgatggcatgcctctaggatatgtgccaccaaccgctcctacggacagcaataactctactccacgggaggctgcttcccgccccccaagcacaatgacctcgcaggcccctgggaccgcaggcgtgtctcctccaccagcttctccaacagttctgtgggaaccaggccccgaggccgggagcccccaactgcggctggtggccggccccagcaagtgctcgggaagactggaagtttggcatgatcaacggtgggggaccgtgtgtgacgactcatgggacatgcgggactcggccgtggtatgcagagaattgggctgcggaggcccacagcagcctgaccctgctgccggcaggttcggctggggggccggacccatatggctagacgacgtggggtgtgtggggacagaagcatctctgtccgactgccccgcagccccgtggggaaaacataattgcgcacataatgaagacgttggtgtcacctgtactggccctcccggtttggattccatatcagaccccttctcgtggagctggattcctggcctaggacgggaccgcgatgcgtggttgccaggagagctcgcaacgaaaccaagtgctagcgttacggcaagcgtgctggagaaaactacgactaaggctccgggcaagatgcccaagagcaccaaaaagtgggtcaccaaaaatgcaaaacgacccaccacgcaaccacctgtgatgcccactaccaagcactccagggcccaaagtcctcctgacctgactagtcaaaccacggccgcactcacaacagaagccagcaggaggcccacctccgagtttactcgccgcccaaccacagaggccccccagagatggactagccacactacagcaacactgacacctcaggcacccagagaacgtacaactaagacaatggcaatgctgacaacccaaggcccccaggagatgaccagtgagtctactataaagtccatcccgcaagcctctctggaacccagcgcggaaatccctgagggatctcccgaatctccaaaggatccagcaccctcaccttcagtctcaaccactggtgaatccggcctgttcagagtgcggttggccgatggaccaaaccggtgtgcgggaaggcttgaagtttggcatgcaggtagatgggggaccgtgtgcgatgacaattgggatctgcgagacgcgactgtcgcctgctgggagctgggctgcggcaaagtgaggccaagagtggggaagactcattatggccctggaaccggtcctatctggttagacgacatggggtgtaagggtagtgaggcctcactatctgactgtccatccggcgcctgggggaaacacaattgcgatcatgaggaagatgtgggtctgacatgcaccggatatacagattacgacgactacccaccttggacctgggatcctactagtcgggaggacttggctaaggggaccactacagccggagtgccaggccacacgctgccctggcgaactactcggcgccctggctcctccagccctgccatccggcgattgcccgacaccgaaccggaagcaggcctccgcgaagttatgttactcgttcagggcctccccgggcttcagagacttccgtctccatag

SEQ ID NO: 6685 - DNA, 474 bp, synthetic construct
  misc_feature 1..474: note = source = /note="Description of Artificial Sequence: Synthetic coding sequence"
  source 1..474: mol_type = other DNA
atgttacggaccgagtcctgtcgtccccgctcacccgccggacaagtcgcagccgcttccccccttctcctgctgctgttgttattggcatggtgtgcaggggcttgtagaggagcacccatcctgccccaagggctgcagcctgaacagcaactgcaattatggaacgaaatcgacgacacttgtagttcatttctctcaatagatagccagccccaggccagtaacgctttggaagagttgtgctttatgattatgggcatgctcccgaagccccaggaacaagatgagaaggataacactaaaaggtcatctgtggtccaccccttgctccaactggttccccacctgcacgagcgcagaatgaaacgcttcagagtggatgaggagtttcaatcaccattcgcctcacagtctcgaggatacttcctgttccgaccaaggaatgggagacggtctgccgggttcatttag

SEQ ID NO: 6686 - DNA, 1545 bp, synthetic construct
  misc_feature 1..1545: note = source = /note="Description of Artificial Sequence: Synthetic coding sequence"
  source 1..1545: mol_type = other DNA
atgccaagcaccgtcctgccttcaactgtgctcccatcgctcctgccaactgcaggcgccggctggtcaatgcgctggatcctatgttggtctctgactctgtgtcttatggctcagacagctctgggtgcactgcatacaaagagaccacaggttgtaacaaaatacggaaccctacaggggaagcaaatgcatgtcggtaagacccccatacaggtatttctcggcgttccattcagccgccctccgctcgggattctgagatttgctccccccgaaccccctgaaccatggaaaggcattcgagacgccaccacctatccccctggctgcctgcaagaaagctggggtcagctggcgtcaatgtatgtgtcaactagagaaagatataagtggcttcggttttcagaagactgcctctaccttaatgtgtatgcacctgcacgggctccaggtgatcctcagttacctgtgatggtgtggttccctggaggagcgttcatagtcggagctgcatcttcctatgaaggctcagacctcgctgcaagagaaaaagtcgtcctagttttcctacagcatcggctcgggatcttcggatttctgagcactgatgacagccacgccagaggcaactggggcctactggatcagatggccgctttgaggtgggttcaggaaaatatcgctgctttcggtggcgaccctggtaatgtcacactcttcggacaatccgccggcgcgatgagcatcagcggcttaatgatgtctccactggcctctgggctattccacagagctatcagccaatcaggcacagccctttttcggctgttcataaccagtaaccctctgaaggtggccaaaaaggtggctcatttggcagggtgtaaccacaattcaactcagatcctggtaaactgcctgagggccctttctggcacaaaggttatgcgagtctccaataaaatgagattccttcagcttaactttcaacgcgatcccgaggagattatttggagcatgtcccctgtggtagatggcgtggttattccagatgatccactggtgctgcttacacaggggaaggtgagctccgttccttatctcctgggagtgaataatcttgagttcaattggctcctgccttacaatattacaaaagaacaggtcccactggtcgtggaagagtacctcgataacgtgaatgagcacgactggaaaatgcttcgcaaccgcatgatggatatcgtacaggatgctacctttgtgtatgctactctgcagacagctcactatcatagaggcctctccatgggtaaagaaaaggcactctccttgcagatgatgaagtactgggctaacttcgctcggactggtaatccaaatgacggaaacctgccctgttggccaaggtataacaaggatgaaaagtacctgcagttggacttcacaactagagtaggcatgaagttaaaggagaagaagatggctttctggatgtcactgtaccagtcgcaacgcccagaaaagcagagacagttctag

SEQ ID NO: 6687 - DNA, 1062 bp, synthetic construct
  misc_feature 1..1062: note = source = /note="Description of Artificial Sequence: Synthetic coding sequence"
  source 1..1062: mol_type = other DNA
atgagcaaccctacccaaaccgacgctgactctgacctggtgggcgatgtctgcgataccaatgaagacagcgacggggatggccaccaagacacaaaagataactgcccacagctgcctaatagttcccagctggattccgataacgatggactgggtgacgagtgtgatggcgacgacgataacgatgggattcctgactacgtgcccccagggcccgacaattgtcgattggtgcccaatcccaaccagaaggattctgacggaaatggggtgggagacgtctgtgaggacgacttcgataatgacgctgtagtggaccccctggatgtttgccccgagtcagcagaggtgacgctcacagacttcagggcttaccaaactgtggttctggacccagagggggatgctcagattgatcccaactgggtggtgctgaatcaggggatggaaatagtgcagacaatgaatagcgatcccgggctggctgtcgggtacacagctttcaatggggtggacttcgagggaacattccatgtcaacaccgtgaccgatgacgattacgccggattcctgttctcctaccaggactccgggcgattttatgtggtgatgtggaagcagactgaacagacctactggcaggccacacctttcagggccgtggcacaacctggactacagctcaaggctgtgactagcgtgtccggtccaggagagcacctgcggaacgcactctggcacactggccatacccccgaccaggtcagacttttgtggactgacccccggaacgtgggctggagggacaagacatcctacagatggcagctgttgcataggccccaggtcgggtacatccgggtaaagttgtacgaaggcccacaattggtggcggattcaggggtgataattgacaccagtatgcgtgggggtcgcctgggcgtcttttgcttctcccaggagaatatcatttggtcaaatctgcagtatcgctgtaatgatacagtccctgaggatttcgagcccttccggagacagttgctacagggccgcgtgtag

SEQ ID NO: 6688 - DNA, 1074 bp, synthetic construct
  misc_feature 1..1074: note = source = /note="Description of Artificial Sequence: Synthetic coding sequence"
  source 1..1074: mol_type = other DNA
atggagatcgagcatactttagaccaaatgattagtaaagttggcaaccatatcgatgtgctgaccgggaagtgggttgcccaggacgctgggattggggcaggggttgacagctacttcgagtacttggtgaagggagccattttacttcaggacaagaagctgatggctatgttcttggagtacaataaggccataagaaactacacccgattcgatgattggtatctgtgggtgcagatgtataaaggcacagtgtctatgccagtgttccaatcactggaagcatactggccaggcttacaatccctgataggagatatcgacaacgcaatgcggacattccttaattactatactgtctggaagcaatttggtgggctccctgagttctataatatcccccagggttatacggtggagaaacgggaaggctaccccctcagacccgagctcattgaaagtgctatgtacctgtatcgtgccaccggggatcccaccctgctcgaactcggacgcgatgcggtcgagtctatcgagaaaatttccaaggtcgaatgcggcttcgccacaattaaggacttacgggatcataagcttgacaataggatggaatcgttcttcctggccgaaacagtcaagtacctatatctgctgtttgatcctactaatttcattcacaataacgggagtacttttgacgctgtgatcactccatatggcgaatgtatactcggcgctgggggctacatttttaatacagaagcccatcccatagaccctgctgccctccattgctgtcagcgacttaaagaagagcaatgggaggttgaagatttgatgagggagttttacagcctgaaaagatcgaggagcaagtttcagaagaacacggtgtcttctgggccctgggaacctccagcaagaccaggcactctttttagccccgagaatcacgaccaggcacgagaaaggaagcccgccaagcagaaagtgcctctgctctcctgcccatctcagccctttacctctaagctggctctcctgggacaggtgttcctagattcaagttag

SEQ ID NO: 6689 - DNA, 1341 bp, synthetic construct
  misc_feature 1..1341: note = source = /note="Description of Artificial Sequence: Synthetic coding sequence"
  source 1..1341: mol_type = other DNA
atgctgcaccctgagacttccccggggcgtggacatctgctcgctgtcttgctagccctgctgggcaccgcttgggccgaagtttggcctcctcagttgcaggaacaggcacctatggccggagctttgaaccgcaaggaaagctttcttttgctgtccctccacaatcgtctcaggagctgggtgcagcccccagcagccgatatgcggagattggattggtctgacagccttgcccaactggcccaggccagggccgctctctgtgggatcccaacgccatctcttgctagtggactctggcggactctccaggtaggatggaatatgcagctcctacctgcgggtttagcctctttcgtggaagtcgtgagcctgtggtttgccgaaggtcaaagatatagtcatgcggcaggtgagtgcgctcggaacgccacatgcacacattatactcagttggtctgggccaccagcagccagctcggctgcggcagacatctgtgctcagctggccaggctgctatcgaggctttcgtctgtgcatacagcccaagaggaaattgggaggtgaatggaaaaacaatagttccttacaaaaagggcgcttggtgctctctttgcacagcctcagtgagcggatgttttaaagcatgggatcacgcaggaggattgtgcgaggtgccgaggaatccctgccgaatgtcttgccaaaatcacggccggctcaatatctcaacttgccattgtcattgtccccccgggtatacgggtcgttactgccaggtacggtgctctctacagtgcgtccacggccgatttagggaggaagagtgctcgtgcgtctgcgacatcggctacggcggagctcagtgtgccactaaggtacatttccctttccacacctgcgacctgcgcattgatggggattgcttcatggtatcttctgaagctgacacctattaccgagcaagaatgaaatgccaacgaaagggaggtgttttagctcagattaaaagtcagaaagtccaagacatcttagcattttatttaggcagactggaaaccacaaacgaggtgatagactcggactttgagaccaggaacttttggattggcctcacgtataagactgccaaggatagttttcgttgggccactggtgagcaccaggcgttcacatcctttgctttcggacagccagataatcacggatttgggaactgcgtcgagttgcaggcttctgccgcgtttaactggaataaccagcgctgtaaaactaggaatcgctacatttgccagttcgcccaggaacacattagtcgatggggccccgggagttag

SEQ ID NO: 6690 - DNA, 900 bp, synthetic construct
  misc_feature 1..900: note = source = /note="Description of Artificial Sequence: Synthetic coding sequence"
  source 1..900: mol_type = other DNA
atgggcggaccccgggcgctgctggccgcactatgggccctggaggcagcaggtacggctgccctccggataggggcatttaatattcaaagcttcggcgacagcaaagtgagtgaccccgcgtgtggttccataattgcaaaaatcctcgcggggtacgatctggccttggtgcaagaggtgcgggaccccgatttatcagcagtgtctgccctcatggaacaaatcaactccgtttctgaacatgaatattctttcgtcagctcacaacccctaggccgggatcaatacaaggagatgtatctgtttgtgtaccggaaagacgctgtgagcgtggttgatacctacctctaccccgatcccgaggatgtattctcccgcgaaccgttcgtggttaaattcagtgcacctggaacgggcgaaagagcgccaccattgccatccagacgggcgttgaccccgccccccctgcccgcagcggcgcagaatctagtgcttattccattacatgcggccccgcaccaggcagtggccgaaattgatgccttgtatgacgtttacctcgatgtaattgataagtggggcacagacgatatgcttttccttggtgactttaacgctgactgtagttatgttcgtgcgcaggattgggctgccattcgcctgaggtccagcgaagttttcaaatggctcatccctgactcagcagacacaacagtgggtaactctgactgcgcatacgatcgcatagtcgcctgcggagctaggctgcgccggtcactgaagccacagtccgccactgtgcacgatttccaagaagagtttggactggatcagactcaggcactagccatttctgatcactttcctgtggaggtgaccctcaaattccacagatag

SEQ ID NO: 6691 - DNA, 1458 bp, synthetic construct
  misc_feature 1..1458: note = source = /note="Description of Artificial Sequence: Synthetic coding sequence"
  source 1..1458: mol_type = other DNA
atggataacaataagcactgcaaacaggacaactgtctgttaacaccaaattccggacaggaagatgccgacaacgacggggtcggcgaccagtgtgatgatgatgccgacggcgacgggatcaaaaacgtggaagataattgccggttgttccctaataaggaccagcagaatagtgataccgatagcttcggtgacgcctgcgacaattgcccaaacgttcccaacaacgatcagaaagataccgatggaaacggcgagggcgacgcgtgcgacaacgatgtagacggagatgggattcccaatggtctcgataattgtccgaaagtacccaatccactccagacagaccgagatgaggatggggttggtgatgcctgcgacagctgtcccgagatgagtaaccctacacaaactgatgccgactcagatctggtcggagacgtgtgcgacacaaatgaggactccgacggggatgggcatcaagacaccaaggacaattgtccccagctccccaattcatcccagcttgactcagacaacgatggactcggagatgaatgcgatggtgacgacgataatgacggaatccccgactacgttccacccggccctgataattgccgcctggtgccaaatcctaaccagaaagactccgacggaaacggcgtaggtgacgtatgtgaagacgactttgataacgatgctgtggtggacccgcttgacgtgtgtccagaatccgctgaagtgaccctgacagatttcagggcctatcagacagttgtgcttgatcccgaaggggatgctcagatcgacccgaactgggttgtcctgaatcagggaatggagatagttcagactatgaattctgacccaggactcgccgttggctatactgccttcaatggggtcgattttgaaggcactttccatgtgaacaccgtaaccgacgacgactatgcaggttttctattctcataccaagactccgggcggttctatgttgtgatgtggaagcagaccgaacagacctattggcaggccaccccgtttcgcgctgttgcacagccagggctccagctgaaggcagtgacttcagtgagcggtccaggcgaacaccttcggaacgctctttggcacactgggcataccccagatcaagtaagactactgtggaccgatccacgcaacgtgggatggcgcgataagacgtcttaccgatggcagctactgcaccgtcctcaagtaggatacattcgtgtcaaactgtacgaaggtccccagctcgtcgccgattccggagtcatcatagatacatcaatgaggggaggccggttgggagttttctgtttctcacaagaaaatatcatctggtccaacctccagtaccggtgtaacgacactgtccctgaggatttcgaaccatttcgacggcagctgttacaggggcgggtctag

SEQ ID NO: 6692 - DNA, 2358 bp, synthetic construct
  misc_feature 1..2358: note = source = /note="Description of Artificial Sequence: Synthetic coding sequence"
  source 1..2358: mol_type = other DNA
atgaaacacacgcttgcgctgctggcccctctgctgggtctcgggttgggcctggcacttagtcaattagcagcgggcgccacagattgcaaatttttagggcccgcagagcacctgactttcacacctgctgcacgtgcccgctggttggctcctagggttcgcgcccccggattgcttgatagcctctatgggacagtaaggagatttctgagtgtggtgcagctcaatccttttccttccgagcttgtcaaggcacttttgaatgaactggccagcgtgaaggttaatgaagttgtgcggtacgaagccggctacgttgtctgtgcagtcatcgcaggactctacctcctgctcgtgccaacagcaggcctatgtttttgttgctgtcggtgtcatcggaggtgcggcggtcgcgtcaagacagaacataaagccctggcttgcgagagggctgctcttatggtattcttactgttgactacgcttctcctgttgattggggtggtgtgcgccttcgtgacgaaccagaggacccacgaacaaatgggacccagcattgaggccatgccagaaacactcctgtctctttgggggctggtgtccgacgttccacaggaactgcaggcagtggcgcagcagtttagcctgcctcaggagcaggttagtgaagaacttgacggcgtcggcgtgtctatagggtccgctatccatactcagcttagaagtagtgtctaccccctgctcgcggctgtcgggagtcttgggcaagtacttcaagtctcagttcatcacctgcaaacactgaatgctaccgttgtcgaactgcaggccggacagcaggatttggaaccagctattcgtgaacatcgggatcggctgcttgagctcctccaggaagctcggtgccagggggattgtgcaggtgccctgtcatgggcgcggacgttggagttaggcgccgattttagtcaggttccctcagtggaccacgtgctccaccagcttaagggggtccccgaagccaacttttcatctatggttcaggaagaaaattcgactttcaacgcactgccagcactggccgctatgcagacatcatctgtggtgcaggaactgaaaaaggccgttgcccagcagcctgagggggtcagaacattggccgagggtttccccgggctcgaagctgcatctagatgggctcaggccctgcaggaagtagaagagagctccagaccttacttacaggaggtacagcgatacgagacctaccgctggatcgttgggtgcgtcctttgttcagtggttctattcgttgtgctgtgtaatctattgggtctcaacctgggaatctggggccttagcgccagggacgatccctcccacccagaggcaaaaggggaggccggcgcccggtttctgatggccggcgtggggctttctttcttgttcgccgctccccttattctgctggtttttgcaacttttcttgtgggtggaaacgtgcagacgcttgtgtgccagtcttgggagaatggcgaacttttcgagtttgccgacacccccgggaatttacctcctagtatgaatctgtcccagttgctgggacttaggaagaatatatctatccatcaggcttaccaacagtgtaaagaaggtgcggcactgtggacagttctgcagcttaacgattcttacgatctggaagagcacttggacatcaaccagatccagagacctgttgttaaaaccagcatggaacagttggcccaggagctgcaaggcctcgctcaggcacaggacaatagtgtgctgggtcagagactccaagaagaagcgcaggggcttcgtaatttacaccaagagaaggtggtgccacaacagagcctagttgctaagctgaatctgtccgtgcgagccctggagtcctctgcccccaatctacagcttgagacctccgacgtactggccaatgtaacttacctcaagggcgaattgccagcatgggctgcccgcattctgcggaatgtgtccgaatgttttcttgctagggagatgggatacttctcccagtacgtagcatgggtcagagaagaagtgacgcagcgcattgccacctgtcaacctctttccggcgctctggataatagccgtgttattctctgcgatatgatggccgacccttggaacgctttttggttttgcctggcttggtgtacattctttctcataccttctattattttcgccgtgaagacaagcaagtacttccgtcccatacgcaagcggcttagcagcaccagtagtgaagagactcagctgttccacatacctcgggtaacaagccttaagctctag

SEQ ID NO: 6693 - DNA, 792 bp, synthetic construct
  misc_feature 1..792: note = source = /note="Description of Artificial Sequence: Synthetic coding sequence"
  source 1..792: mol_type = other DNA
atgggtagagttctggaagaagcccggttcgcagtagcattcactgaaagtatgaaggagatggcccaggcccagtggaaggcccgccagattagcctagcagtcacctcggccgtcccagtgcaaccacacgcgaaaggaaaagtttatgttcagtctcagggcatcgctacaacacctaacgctgcctttaactggaataccttcctgcagcgctccgaaatcaaccagagcgcggacaatcttcatatctttctactgatatgtggtcttcgccaggtgaaagaccccctctacctggtggacgccttctccgcctggcatcaagaggaaccaaatgtgcacctagtgatcgtcggacccgaggttgaccccgtcttcacacgggaggtcaaggccaaagtaaagcgcgcggctggggtccgactcataggagaaatgcctcaggaagacctccatgccgtggttaaaaactgtttcgcagtcgtcaattccagcgtgtccgagggcatgtcagcagccatcctggaagcaatggacctggaggtgccggttctcgcacgcaacatcccagggaacgcggccgtcgtcaaacacgaggtaaccggcctgttattctctaacccccaagaattcgtgcacctggctaaacgcctggtgtccgaccccgcacttgagaaagagatcgtcgttaacggccgggagtatgtaaggatgtatcacagctggcaggtagaaagggatacttatcagcagttgattcgtaagcttgaagggtctacggaagactag

SEQ ID NO: 6694 - DNA, 456 bp, synthetic construct
  misc_feature 1..456: note = source = /note="Description of Artificial Sequence: Synthetic coding sequence"
  source 1..456: mol_type = other DNA
atgaagaccgctgtcatgaaggaactgtacagcttcctgcatcatcagaatcgttatgggtctgagcaggaattcgttgacgacctgaagaatatgtggtttggcctgtactccagagggaacgaggaaggcgacagtagcgggtttgaacatgtgttcagcggggaggtcaagaaggggaaggttaccgggtttcataactggatacgcttttatctggaagagaaagaaggcctcgtcgattattactcacatatatacgacgggcccgtgccagtcaagccaggccgaatttcactttcatgcccggacatctacctgggacaggtgcatctctgggagtggcaggaggtacacagacactcactccacagcgtgtttcacctcattgagctccgtgcacggaaaggacatgagggatcctgtgagacagaagtattgtcaagccttgactag

SEQ ID NO: 6695 - DNA, 363 bp, synthetic construct
  misc_feature 1..363: note = source = /note="Description of Artificial Sequence: Synthetic coding sequence"
  source 1..363: mol_type = other DNA
atgcttcctcagtggcttctacttctgtttctgttgttcttctttttgttcctgctgaccaggggaagtctttccccaactaagtataaccttctggagcttaaggagtcctgcatcagaaatcaggattgcgagactggatgttgtcaacgagctcctgacaattgcgagagccactgcgccgagaagggctcagaaggctccctctgccagactcaggtcttctttggtcagtaccgggcctgtccgtgcttgagaaacctgacttgcatctactcaaagaacgaaaaatggctctctattgcttatggccggtgccagaaaattggcaggcagaagctggccaagaagatgttcttttag

SEQ ID NO: 6696 - DNA, 951 bp, synthetic construct
  misc_feature 1..951: note = source = /note="Description of Artificial Sequence: Synthetic coding sequence"
  source 1..951: mol_type = other DNA
atggccgaagccgcgctggaggccgtccgtagcgagctcagagagttcccagccgccgcccgcgaactgtgcgtaccactggctgtcccctatcttgacaaaccaccgacacctttgcacttttacagagactgggtttgcccgaacagaccttgtatcattcgaaatgcattgcaacattggcccgctttgcagaaatggagcctgccctatttcagagccacagttggttcaacagaggtctccgtcgcagttacccctgatggatacgctgatgctgtcagaggagacaggttcatgatgccggccgagcgtcggctgccactgagctttgtacttgacgtcctggaaggaagagctcagcacccgggggtcctctacgtccaaaaacaatgcagcaacctcccaagtgaactaccccagctgttgcctgacctggagtcgcacgtcccctgggcgtctgaagccttgggcaaaatgcctgacgcagtaaacttctggctgggggaagctgccgcggtcaccagcttgcacaaagatcactacgaaaatctatactgtgttgtgagcggcgagaagcacttccttttccatccaccctccgataggccattcattccctacgaactctacacccctgcaacataccagttaacagaagagggcacctttaaagtcgtggacgaggaggctatggagaaggtgccctggatccctttggaccctcttgctcctgatctggcccgttacccaagctattctcaggcccaggctctcagatgcacagttcgagccggagagatgttgtacctacctgctctgtggtttcaccatgtgcagcagtctcagggatgtatcgcagtcaatttttggtatgacatggaatatgatttgaaatacagctactttcagctactggactccctcacgaaggccagcggcttggattag

SEQ ID NO: 6697 - DNA, 657 bp, synthetic construct
  misc_feature 1..657: note = source = /note="Description of Artificial Sequence: Synthetic coding sequence"
  source 1..657: mol_type = other DNA
atgggtcgcgtatttctaacaggggaaaaggcaaatagcattctcaagcggtaccctcgggcgaacggtttctttgaggagattcgccagggcaatatagagcgcgagtgtaaagaggagttttgcacattcgaagaagcacgcgaggcgtttgagaataacgaaaagacaaaggagttttggagtacgtacaccaaagcccaacagggcgagagcaatcgggggagcgactggttccagttttatctgacattcccacttatttttgggctgtttataattctcctggtgatctttctgatttggcggtgcttcctgcggaacaagactcgacgccagacagttacagaaggacacatccccttcccacagcatctcaacatcatcacgcccccgccccctcccgatgaagtttttgatagctctggactgtctccgggttttttaggctacgtcgtcggtcgcagcgactctgtgagcacaagactgtcaaactgtgacccacctcctacttacgaggaagccactggccaggtcaatctgcaacgtagcgagaccgaaccccacctcgacccaccgcctgagtatgaggacattgtaaactctaacagtgcctccgctattccaatggtccccgtcgtcaccacgattaagtag

SEQ ID NO: 6698 - DNA, 909 bp, synthetic construct
  misc_feature 1..909: note = source = /note="Description of Artificial Sequence: Synthetic coding sequence"
  source 1..909: mol_type = other DNA
atggctatgttcctggaatacaacaaagccataaggaattataccagatttgatgattggtacctgtgggttcagatgtacaagggtaccgtctccatgccggtgtttcaatccctcgaagcctactggccagggttgcaatctttgatcggagacattgacaatgctatgaggacttttctgaattactacaccgtgtggaaacagtttggaggcttacctgagttttataacatccctcaggggtatactgtggagaagcgcgaggggtatccgctgagaccggagctaattgagtccgccatgtacctttacagggccaccggggaccccacacttctggaattggggcgcgacgccgttgaatctatcgagaaaatttctaaagtcgagtgcggatttgcaaccataaaggacctgcgagatcataaactggacaatcgcatggagtctttctttttggcagaaaccgtgaaatacctgtacttgctgtttgatccaaccaatttcatccataataatggttctacctttgatgcagttattactccttacggcgaatgtattcttggcgccggcggctacatcttcaacacagaggcccaccccatcgatcccgctgccctccactgctgccaacgcttgaaagaagagcagtgggaagtggaggatctgatgagggagttttattcattgaaacgctctagatctaaattccaaaaaaacaccgtgtcatcagggccttgggaaccccctgcaaggcctggtaccctgttcagcccagagaaccatgatcaagcccgagagcgcaagcctgctaagcagaaggtgccacttctgtcttgcccaagtcagccctttaccagcaaacttgcattactggggcaggtgttcctagattcctcttag

SEQ ID NO: 6699 - DNA, 459 bp, synthetic construct
  misc_feature 1..459: note = source = /note="Description of Artificial Sequence: Synthetic coding sequence"
  source 1..459: mol_type = other DNA
atgctcgtggatggtccttccgaaaggcctgcactatgttttctgttgctcgccgtggcaatgtccttctttgggtccgcactgagtattgacgagaccagagcgcacctgttactgaaggagaaaatgatgcgcctcggcggccgcctggtcctgaacacaaaggaggagctggcaaacgaacggcttatgaccctgaagatcgcggagatgaaggaagctatgagaaccttgatctttcctccaagcatgcatttcttccaagcgaagcacctgatcgagaggagccaggtcttcaacatactgaggatgatgccaaaaggcgccgctttgcacttacatgacatcgggatcgtgacaatggactggcttgtccgcaacgttacttataggccccactgccacatttgctttacacctcggggcatcatgcaattccgctttgcccatccaacatag

SEQ ID NO: 6700 - DNA, 3951 bp, synthetic construct
  misc_feature 1..3951: note = source = /note="Description of Artificial Sequence: Synthetic coding sequence"
  source 1..3951: mol_type = other DNA
atggaaccccgccttttttgctggaccacgttgttccttctggcaggttggtgtctgcccggcctcccttgcccctcaagatgtctgtgctttaagtctacagtgcgttgtatgcacctgatgctggatcatatccctcaagtgcctcaacagactacagtactggaccttcggtttaacagaatccgggaaatcccaggatccgccttcaaaaaattaaagaacctgaacacacttctgcttaataacaatcacattaggaaaatctctaggaatgctttcgaggggctggaaaaccttctgtacctgtacttgtacaaaaacgaaattcacgctctggataagcagacctttaaaggcctcatcagtctcgagcacctctacattcactttaatcagcttgagatgctgcagcccgaaactttcggagacctgttgcgactggagcggctttttttgcacaataacaaattgagtaagattccggccgggagtttctccaatcttgactccctcaaacgcctgagattagattctaacgcacttgtttgcgattgtgacttaatgtggctaggcgaactcctacaagggttcgcccagcatgggcacacgcaggctgcagcgacgtgcgaatatcccagacgcctacatgggagagcagtcgctagtgtgacggtggaagaattcaattgtcagtcaccacggatcactttcgaaccccaggatgtggaggtccccagcgggaatacggtgtactttacctgccgtgccgaggggaaccctaagccagagattatctggatacacaataaccactcattggatctggaggatgatacaagactgaacgtgttcgatgatggcacgctgatgatacgcaacacacgtgaatcagatcaaggggtctaccagtgtatggctcgaaattctgcgggcgaagctaaaacacaatcagctatgctacggtattcttctctgcctgcaaaacccagtttcgtgattcagccacaggatacagaagtcctgattggtacaagcaccacactggagtgcatggcaactgggcatcctcaccctctgatcacatggactcgggacaacggacttgaactggacggatctaggcatgttgccacatcttccgggttatatctgcaaaatatcacacagagggatcacggcagatttacatgtcacgctaacaatagccatggcacagtgcaggccgctgcgaatattatcgttcaggcccccccccagttcaccgtcacacctaaggatcaagtcgtcctagaagaacatgcagttgaatggctgtgtgaagcagacgggaacccaccacctgtcatcgtgtggactaagactgggggtcagctacccgtggaggggcagcacaccgttctctcatccgggactctgcgtatcgaccgggctgcgcagcatgaccagggtcaatacgaatgtcaagccgtctcttccctgggggtgaaaaaagtctcagtgcagcttactgtcaagcctaaggcccttgcagtttttacgcaactgccacaagatacatccgtggaggtcgggaagaatatcaatataagctgccatgcccagggcgaaccccaaccaataatcacctggaacaaagagggggtccagatcaccgagtccggtaagttccacgttgatgacgaaggaactctcactatctatgacgcagggttccctgaccaaggccgttacgaatgcgtcgcgcggaattcttttggcctcgcagtgacaaacatgttcctcacggtcacggccatacaagggaggcaggcaggcgatgatttcgtggaatctagtattttggacgctgtccagagggttgatagtgctattaactcaacgcgtagacacctgttctcccagaagccacacacctcttctgatctgctggctcagttccactaccctagggacccacttatcgtagagatggctcgggccggggagatttttgaacacactctacagcttatacgggagcgagtaaaacagggactcaccgtggatctggagggtaaggaattccgatacaacgatctggtcagccctcgcagcctgtcactgatcgccaacctatctgggtgtacagctagaagaccccttcctaactgctcgaacagatgtttccatgccaaataccgcgctcatgacggcacatgtaacaacctccagcaaccgacttggggggccgctctgacagcctttgctcggctgttgcagccagcttaccgtgatggcattagggctccacgcggtctgggtcttccagttggatctaggcagccactccctcctccccgtctcgtggccacggtgtgggcccgcgcggccgcggtgacacctgaccactcttatacccggatgctcatgcactgggggtggtttcttgagcatgatctggatcatactgtacccgcgctatctaccgcacgcttctctgacggacggccatgttcctccgtctgcaccaacgaccccccatgcttccctatgaacaccagacatgctgatccaagaggtacacacgctccctgtatgctgtttgcaagatctagcccagcatgtgcttccgggagaccctctgcaactgtggatagtgtctacgctcgagaacaaatcaaccaacagacggcctatatcgatgggagtaatgtgtacggttcttccgaacgggagtcgcaagctttgagagatccatcagtaccaagaggcctactaaagactggattcccttggccaccgtctggcaaacctctgttgcccttttcaaccggccccccaacagaatgtgccaggcaggaacaggaaagtccctgtttcctggcgggtgaccatcgggctaacgaacatctagccctcgcagcgatgcacaccctctggtttagagagcacaatcgtatggcaacagagctctctgctttgaacccacactgggagggcaacaccgtatatcaggaggcccgaaagatcgtgggtgccgagctgcagcacattacatattcgcattggctgcccaaagtgcttggggacccaggcacacgaatgctgaggggctatcgagggtacaatcctaatgtgaacgccgggattatcaattccttcgcgacggcagcatttcggttcggtcacactctgattaaccctattttgtatagactcaacgccactttgggcgaaatctcggagggacacctgccctttcataaggcgctgttctctcctagcagaataatcaaggagggaggtatagatcctgtgctcagagggctgttcggggtagccgcaaaatggagggctccatcatatctgctgagccccgaactgacccagaggctgttttctgccgcatactccgctgcggtcgattcagccgccactatcatccaacggggccgggaccacggaatccccccctacgtagacttccgtgtgttctgtaacttgacaagcgtgaagaactttgaggatctgcagaatgaaatcaaggactccgagattagacaaaagttacggaagctgtatggcagccccggagacatcgatctgtggccagcccttatggtcgaggatttgattcccggaacaagggtgggccccacactgatgtgtctctttgtgacacagtttcagagattgcgggatggggataggttttggtatgaaaatcccggggtgttcaccccagcccagttgacccagctcaaacaggctagcctgagtcgtgtattgtgcgacaatggtgactcaatccaacaggttcaggccgatgtgtttgtaaaggccgagtacccccaggattatctgaattgttcagaaatacctaaggtggaccttcgggtgtggcaggactgttgtgcagataaacaagcagggggaacaccggaggccggacgcgtttacagatgctag

SEQ ID NO: 6701 - DNA, 891 bp, synthetic construct
  misc_feature 1..891: note = source = /note="Description of Artificial Sequence: Synthetic coding sequence"
  source 1..891: mol_type = other DNA
atggacccctccaaaatagctcatacagaatatcctgtaaatacaatcattatccatgaggattttgataataatagtatgagtaacaacatcgcgctgctgaagacggatacagccatgcattttggtaacctcgtgcagagtatttgctttttaggaaggatgctccacactccaccagtcctacagaactgctgggttagcggctggaatcctacttcagcgacagggaaccacatgactatgagcgtgcttcgaaagatctttgtgaaggacttagacatgtgtcctctgtacaagctgcagaaaacagaatgtggtagccataccaaggaggagaccaaaacggcctgtctcggtgacccagggtcccccatgatgtgccagctccagcagtttgacctgtgggtgctccgcggagtgttgaactttgggggtgaaacttgcccagggctgttcctctacaccaaagtggaggactattctaagtggataacatctaaagctgagagggccggcccacccttgtctagcctccatcactgggaaaaactcatatccttctctcaccatggtccgaacgccacaatgacccagaaaacctacagtgactcagaactgggacacgtgggcagctatctgcaggggcagcgccggaccattacacatagccggttgggtaactcttcccgtgacagtctggacgtgcgggagaaggatgttaaggagtcaggtcgctcgcctgaagcaagtgtccagcctttgtactatgactactatggaggagaagtgggtgagggccgaatctttgccggccagaaccggctctaccagccagaggagataatccttgtgagcttcgttctagtattcttttgtagttccatttag

SEQ ID NO: 6702 - DNA, 2808 bp, synthetic construct
  misc_feature 1..2808: note = source = /note="Description of Artificial Sequence: Synthetic coding sequence"
  source 1..2808: mol_type = other DNA
atgcgaaagcctcgtcgcaagtctagacagaatgccgaaggccggagaagccctagcccatacagtctgaaatgcagccctaccagggaaaccttgacctatgctcaggcccagcggatcgtagaagtggatatcgatggaaggctccatcggatctcaatctatgatcctttaaagattatcaccgaagacgagcttactgcgcaggacattaccgagtgcaacagcaataaggagaacagtgaacagccccaattccctggaaaatctaaaaagccttcttctaagggcaagaaaaaggagtcctgcagtaagcacgcatctggtactagttttcacctccctcagccttctttccgaatggttgactctggtattcaacccgaggccccgccccttcccgcagcctattacagatatatcgagaagcctcccgaagacctcgacgctgaagtggaatatgatatggacgaggaagatctggcctggctcgatatggtcaacgagaagcgtcgtgttgatgggcattctctggtgagtgcagacacatttgagctactcgttgacaggcttgagaaagaaagttatctggagtcacgaagcagtggcgcccagcaatccttgattgacgaagacgccttttgttgcgtttgtcttgacgatgagtgtcacaatagtaacgtgatcctcttttgcgatatctgcaatttggccgtgcaccaggaatgctacggcgttccttatatacccgagggccagtggctctgccgctgctgcttgcaatctccaagtaggcctgttgattgtattctttgtccgaacaagggcggagcttttaaacagacctccgacgggcactgggcacatgtagtctgtgccatttggattcctgaggtgtgcttcgccaataccgtttttttagagcctattgagggaattgataatatacctcccgctaggtggaaattgacctgttacatttgtaagcagaagggtttaggagccgccatccagtgtcataaggttaactgctacactgctttccacgtgacatgcgctcagagggcaggcctttttatgaagatcgagcctatgagggaaactagtcttaacggaaccatctttacggtacgtaaaactgcgtactgtgaggcccatagcccacctggcgctgctaccgccaggaggaaaggcgactcccctaggagtatctcagagaccggggacgaggagggcctcaaggagggcgacggagaagaggaggaggaagaggaggtggaggaggaggaacaggaagcacaaggaggtgtgagcggcagcctgaaaggtgtgcccaagaaatcaaagatgtccctgaaacagaagatcaaaaaggaacccgaggaggcaggacaagacaccccttccactttgcccatgctggcggtaccacagatcccgtcatatcgtctgaataagatatgctctggtcttagtttccagcgaaaaaaccagtttatgcagcggttacacaattactggctactgaaacgccaagctcgtaacggagttcctctgatccgccgactccatagccatttgcagagccaacgcaacgccgaacagcgggagcaagacgagaaaacatctgcagtgaaagaagagcttaagtactggcagaagctcaggcatgatctggagcgggcacgcctcttaatcgaactcatcaggaagcgggagaaactgaagcgggagcaagtgaaggtccagcaggcagccatggaactcgagcttatgccattcaacgtcttgctgaggaccacgttagatctcctgcaggagaaggacccagctcatatatttgccgagccagtcaatctttctgaggtgcccgattaccttgagtttatctcgaagcctatggatttttcaacaatgcgaagaaagctggaatcgcatttgtatcgcactttggaggaatttgaggaggactttaatctgatagtgaccaattgcatgaagtacaacgctaaggataccatctttcatcgtgccgcagtacggctacgcgacttaggaggagctatattaagacacgcacgaagacaggccgagaatatcgggtatgatccagaacgcggcacacacttgccagaatccccaaagttagaggatttctacaggtttagctgggaggacggcatgactaacgggtttgggaaacacactgaatccggctccgattccgaatgttctctcggactcagcgggggtcttgcatttgaggcctgttctggacttaccccaccaaaacgtagtaggggaaagccagccctgagccgcgtgcccttcctcgagggggtaaacggggacagcgattataatggctccggaaggagcctgttgttgccctttgaggacaggggcgacttggagccactggaactggtttgggccaagtgccgcggttatccctcgtatccagccctaatcatcgaccccaaaatgccccgcgagggcttgcttcataacggagtgcccatccccgtgccccccctggacgtgcttaagctaggtgaacagaaacaagctgaagccggcgagaaactcttcctggtgctgttcttcgacaataagcgtacgtggcaatggttgccaagagataaagtgttgcccctcggtgtggaagacaccgtagacaagctgaaaatgctggagggtcgcaagacaagcattcggaagtcagtacaggtggcttatgacagggccatgattcacctgtcccgagtccgtggcccccatagcttcgtgactagcagctatttatag

SEQ ID NO: 6703 - DNA, 270 bp, synthetic construct
  misc_feature 1..270: note = source = /note="Description of Artificial Sequence: Synthetic coding sequence"
  source 1..270: mol_type = other DNA
atgaaaacaggccttttcttcttgtgtctgctgggcacagcggccgcaattcctaccaatgccaggttacttagtgaccattccaagccaaccgccgagaccgttgcaccagacaacactgcgattccatctctgcgagcggaggcagaagaaaacgagaaggaaacggcagtttctaccgaggacgactcccatcataaggccgagaagagtagcgtgcttaaatcaaaggaggagtctcacgaacagtccgctgagcagggaaagtag

SEQ ID NO: 6704 - DNA, 657 bp, synthetic construct
  misc_feature 1..657: note = source = /note="Description of Artificial Sequence: Synthetic coding sequence"
  source 1..657: mol_type = other DNA
atgggaagagtattcctcaccggcgaaaaggctaactccatcctaaagcgttatcctcgcgctaatggtttctttgaagagattagacaggggaacatagagagggagtgcaaggaggaattttgcacatttgaagaagcacgtgaagcttttgaaaataatgaaaagaccaaggagttctggtccacatatactaaggcgcaacagggcgagtcaaacagggggtctgattggttccagttttaccttacttttcctctgatcttcgggctctttattatccttctagttatttttttgatctggcggtgcttccttcgtaataaaactagacgacagaccgttacggagggccacatcccctttcctcagcacctcaacattattactcctccacccccgcccgatgaagtcttcgacagtagtggcttatctcccgggttcttggggtacgtagtaggcaggagcgactctgtttccactcggctgagtaactgcgatcctccccctacttacgaggaggcaactggccaagtaaatttacagcgatccgaaactgagccacacttagacccacctccagagtacgaagatattgtgaactctaactctgcgtctgccatccctatggtgcctgttgtcaccaccataaagtag

SEQ ID NO: 6705 - DNA, 540 bp, synthetic construct
  misc_feature 1..540: note = source = /note="Description of Artificial Sequence: Synthetic coding sequence"
  source 1..540: mol_type = other DNA
atgtcactcggccccgaggtcttcctgggtcctcccgaagcccagtccttcttaagctcccatacacgcatcccccgagccaaccattgggacctggaactcctgacacctggtaatctggagcgggagtgcctagaagagaggtgttcttgggaagaagccagggagtatttcgaggataatactttaacggaaaggttttgggaatcctatatttataatggaaagggcggacggggacgggtggatgtggcctccctggcggtgggtctgaccggcggcatcctgctaatcgtgcttgccggcctcggggctttttggtacctgaggtggcgtcagcatagggggcagcagccatgccctcaggaggctggtcttatttcccccctctcccccctcaacccattgggcccacccactcctttgccaccaccgccccctccacccccaggcttgcccacctacgaacaagccctggcggcctctggggtacacgacgcaccgccccctccttataccagccttaggaggccccactag

SEQ ID NO: 6706 - DNA, 765 bp, synthetic construct
  misc_feature 1..765: note = source = /note="Description of Artificial Sequence: Synthetic coding sequence"
  source 1..765: mol_type = other DNA
atgacgctagaagacattgtgcagagggaagtgtggggaaccgttgttgcccggggggctcccgcaccaccagggcccgtcccgactcgtggagctgcctcccggagattgtcagtgtcaccagcctccacctcagagacaagcctgtatcaggttctcctgggcgcacgacagcttgttcagcctgggccccacgccatgtatgccagagtacggcaggtggaatctaaccccctttaccagggcaccgcatcgtccgcagacgtggcgctcgtggaactagaggctcctgtcccgtttacaaactatattctgccggtgtgtctgcccgatcctagcgtaatctttgagacgggtatgaattgttgggtgactgggtggggcagcccttccgaagaggacctcctgcccgaacccagaatactgcagaaacttgcggtacccattatcgatacacctaagtgcaatctcctctactctaaagatacagagttcggctaccaacctaagactatcaaaaatgatatgctgtgtgccgggttcgaggagggaaagaaagacgcctgcaagggagatagcgggggtccacttgtgtgcctggttggacagtcctggctgcaggccggagttatctcctggggagagggatgtgcccgacagaacaggcctggagtttacattcgggtgaccgcccaccacaactggatacaccgcatcataccaaaactccagtttcagcccgcccgactgggcgggcagaagtag

SEQ ID NO: 6707 - DNA, 1899 bp, synthetic construct
  misc_feature 1..1899: note = source = /note="Description of Artificial Sequence: Synthetic coding sequence"
  source 1..1899: mol_type = other DNA
atgacgccacccgtcctcacaaccgccgaaactagcgtgaagccttctgtaagcgcatttacccatagtcctcccgaaaacaccaccggtattagctcaactatctccttccactcacgcactttgaacctgacagatgttattgaagagcttgctcaggcttccacccagacactgaaatcaactatcgccagcgagaccacactcagcagtaagtctcaccagagcacgactacaagaaaagccatcatccgacactccaccattccacctttcttgtctagttctgccacactcatgcctgtccccatttcaccacccttcacccagagagctgtgactgacaatgtcgctacacccatatcagggttgatgacaaacaccgtcgttaaacttcacgaaagcagccgacataacgccaagcctcagcaactggtggccgaagtcgctacatctcccaaggtccacccgaacgcgaagttcaccattggcacaacccactttatctactccaatctgctgcatagcaccccaatgccagccctgacaaccgtgaagtctcagaatagtaagcttacaccctcgccttgggccgaaaaccagttttggcacaaaccatattctgagatagctgagaagggtaagaagccagaggtatctatgctggctacgactggtctgtctgaggccaccacattggtgtcggattgggacggccagaagaacactaaaaagagtgatttcgataaaaagcccgttcaggaggccacgacatcaaaattgctgccatttgattcactctccaggtatattttcgagaaaccgcgcattgtcggtggcaaggcggcaagctttactatccccgcaaacagcgatgcctttcttccttgcgaggcagttgggaaccctctccccactattcactggacaagggtaccgagtggactggatctcagcaaaagaaaacaaaacagccgagtccaggtccttccaaatggcacactcagcattcagagagtggagattcaggaccgtggacaatatctttgttctgcatcaaacttgtttggcaccgaccatctccatgttacactatccgttgtgagctacccccctaggatcctggagcgacggaccaaagagataacagtgcatagcggctccacggtggaactaaagtgcagggctgaaggccggcccagtccaaccgtcacctggatactcgccaaccagaccgtggtatccgagagtagccagggatcgcggcaggccgtagtgacagtagacggaaccctggtgctccacaacctgtcaatttacgataggggcttttataaatgtgtagcctcgaatcctgggggtcaggacagtctgctggtgaaaatccaagtgatcgctgcccccccagtgatcctggaacagcggagacaagttatcgtggggacctggggcgagtctttgaaactcccttgcacagccaagggaaccccgcagccaagtgtttactgggtcctaagtgacggcacggaggtcaagcctcttcagtttacaaacagcaaactatttttgttttctaacggtacgctctacatccgaaacctggcttcctcagaccggggcacttacgagtgtatcgcaacctcatcgacaggcagcgaacggcgggttgtcatgctcactatggaagaaagggtgaccagcccgaggatcgaagcagcctcccaaaagagaactgaagtgaacttcggagataagttgttgctcaactgttcagcgactggagaacccaaaccacagattatgtggaggctaccaagtaaggcggtagttgatcaacagcaccgggtggcagctggatccacaagtacactgatggatccatgcttgctggatcagtag

SEQ ID NO: 6708 - DNA, 681 bp, synthetic construct
  misc_feature 1..681: note = source = /note="Description of Artificial Sequence: Synthetic coding sequence"
  source 1..681: mol_type = other DNA
atggatattatcgtgttgctccctaagggtcattgtacaaagattcaagaactccagatgaccacggtgctgaagcaaaatgtgcacgtcttcggcgtcgagggcaacagtgatgagctggacgaacccatcaagaccgtctttgcagacgttgcttttgtgaaaaaacataacctcatgagtcttaacagcattaattggtcaagggtgctggtgcagatggctcaccacttttttgcgtattttcaatgtactccatccctggatacacatcctctccccttggttgaggtggtggtgccgacgggcgccgctgggaaccttgctgccgggtatatcgcacagaagatcggcctgcctatcaggctcgttgtggccgtaaaccggaatgacattatccaccgtaccgtgcaacagggcgacttctccttgagtgaggctgtaaagagcacactagcgtccgcaatggacattcaggtgccctataatatggagcgggtgttctggctgctgtccggcagtgattctcaggtgactcgggcgcttatggagcagttcgaacgcactcagagcgttaatctgccaaaagagctccatagcaagcactcaccggtcttgccccgcccttgcctctgtagtcaggttcccggaagctgtccaggctgttggcccgatccatag

SEQ ID NO: 6709 - DNA, 729 bp, synthetic construct
  misc_feature 1..729: note = source = /note="Description of Artificial Sequence: Synthetic coding sequence"
  source 1..729: mol_type = other DNA
atgttccagaccggaggcctcattgtcttttacggactcctggctcagacacttccactcaatgtcaatcccgcactcccactgagtcctacgggcctggcaggatcgctgaccaacgcactgagcaacgggctgctgtccggggggttgctcggaattctcgagaatctgcctctgctcgatatcctgaaaccagggggaggaacctccggcggactgctggggggactcttgggtaaagtgacgtccgttattcctggtttgaataacatcatcgatatcaaggtcacggatccacaactgttagagttgggactggttcaaagccccgacggccatcgcctatatgtcaccatacccctcggcatcaaattacaggtcaatacgccactggttggggcttctctgttgcggctggctgttaaattggacattaccgccgagattctggccgtcagagataagcaggagcggatccaccttgtgttgggggactgcacccactctccgggctctctgcagatctcactgctggacgggttgggccctctgcctatccaggggctcctggatagtcttaccggcattctgaataaggtactaccagagctcgtccagggcaatgtctgtcctctagtgaatgaggttctgcgcggactcgacatcaccctggtgcacgacattgtgaatatgctgatacacggactgcagttcgtaatcaaggtttag

SEQ ID NO: 6710 - DNA, 1422 bp, synthetic construct
  misc_feature 1..1422: note = source = /note="Description of Artificial Sequence: Synthetic coding sequence"
  source 1..1422: mol_type = other DNA
atgagcctcgaagccagtctgtgttctcttgaagaatgcgccgcctttcagccgagctcgccttcccctctgcagccccaaggcccggtgaagtctaataatatagtgaccgttactggcattagcctgtgtctgtttattattatcgctactgttctgattaccctgtggcgtaggttcggaagacctgctaagtgtagcacgccggcaagacataattctatccatagcccatccttcagaaaaaattccgacgaggagaacatctgtgagctgagtgaacagagaggaagcttcagcgacggaggggatggccccacaggtagtccgggggataccggtattcctctgacctatcgccgttctggaccagtgcctccagaagatgatgctagtgggtccgaatcttttcagtcaaacgctcagaagattatccccccgctcttttcctacaggctggcacagcagcagctcaaggagatgaaaaaaaaaggcttgaccgagaccacgaaagtgtatcacgtgagtcaatccccgctgactgacacagcgatcgacgcagccccatctgcacccctggatctcgagagccctgaggaagccgcagcgaataagttccggatcaagtctcccttccccgagcagcctgctgtgtcggcaggcgagcgccctcccagcaggctggacctgaacgtgactcaggcctcatgtgctattagcccgtcccaaactctgatcaggaagagtcaggcacggcacgtgggttctcggggtggccctagtgaacggagtcacgcaaggaatgcccatttccggagaactgccagctttcacgaggctagacaggctagaccgttccgggaaaggagtatgtctaccctcacccccagacaagcccctgcgtatagctccagaacccgcacttgtgaacaggctgaggaccggtttaggccacagagcagaggcgcccatctctttcccgaaaaacttgagcacttccaggaagcaagcggcacaaggggcccgctcaatcctctgcccaagagttataccttagggcagcctctccgcaaaccggatctgggagaccaccaggcaggtttggttgcaggcatcgagaggaccgagccgcaccgagcccgccgcggacctagtccaagccacaaaagcgtcagtcgtaaacagagctcacccatctctccaaaggataactaccagcgcgtgagctcactctctccaagccaatgtcggaaggacaaatgccagagtttccctacgcacccagagttcgctttctatgataatactagtttcggtctcaccgaggcagagcaacgtatgctcgacctgccaggatatttcggaagcaatgaagaggatgaaaccacaagtacgctgtcggtggagaagcttgtgatttag

SEQ ID NO: 6711 - DNA, 2310 bp, synthetic construct
  misc_feature 1..2310: note = source = /note="Description of Artificial Sequence: Synthetic coding sequence"
  source 1..2310: mol_type = other DNA
atgttaagcaaaaagggtatctttccttggatattgacctgcatttccgaggaaatggcctttcggacaatttgtgtgttggtgggggtgtttatttgttccatctgtgtcaaagggagctctcagccccaggcccgagtgtacttaacctttgatgagcttcgagaaacaaagacctctgagtacttttccctctcccaccacccacttgattaccgaatcttacttatggatgaggaccaggacaggatttatgtgggatcaaaggatcatatcctatcactgaatattaataacatttcccaagaagccttgagtgtgttttggccagcctcgaccataaaagttgaggagtgcaagatggccggaaaagaccctacccatggctgcggaaactttgttagagttattcagacattcaatagaacccatctgtatgtgtgcggatccggtgcgttctctccagtttgtacatatctgaaccggggacgccgtagcgaggatcaggtcttcatgatcgattccaagtgtgagtctggaaaaggccggtgcagctttaatcccaatgttaacactgttagcgtgatgattaatgaggagctcttcagcggtatgtatatcgactttatgggcacggacgcagccatttttaggagcctgactaaacgcaatgccgtccggactgatcaacacaatagtaagtggctaagcgaaccaatgttcgtcgacgcacacgtcattccagatggcaccgatcctaacgacgccaaagtctactttttctttaaggagaaacttactgataacaatcgcagcacaaaacagattcacagcatgattgccagaatctgccccaacgacacaggcgggctaagatctttggtgaataaatggacaacgttcctgaaagctcggctggtgtgctccgtgactgacgaagatggcccagaaactcacttcgacgagctagaggacgtattcctgctggagactgataaccctagaaccactctggtttacggaatcttcaccacatcttctagtgtcttcaaaggctcggccgtttgcgtgtaccatctctctgatattcagacagtgtttaatggcccattcgctcacaaagagggacccaaccaccaacttatttcttaccagggccgtatcccataccctcgccctggtacttgccccggtggcgcttttacaccaaacatgcggacaaccaaagaatttcccgatgatgtcgtgacgtttattcgaaaccaccccctgatgtacaacagcatataccccatccataaacgcccgctcatcgtcagaatcggcacagactacaagtatactaagatcgctgtagatcgcgtaaatgccgccgatggtagataccacgtgctttttttgggcacagataggggcaccgtgcaaaaggtggttgttctgcccacaaataattccgtcagtggtgagttgattctcgaagagctagaggtcttcaaaaatcacgctcccatcaccaccatgaaaataagttcaaaaaaacagcagttgtacgtttcctcgaatgaaggggttagtcaagtttccctgcaccgctgtcatatttacggaacagcatgtgcagattgttgtctggctcgagacccatattgcgcctgggacggtcactcatgctcacggttctacccaacgggcaagcggaggtctcggcggcaagacgtgagacacggcaaccccctcacacagtgtcggggtttcaacttgaaagcttacaggaatgcagcggagatagtgcaatacggagtgaagaacaacaccacattcctggagtgcgccccaaagtcgccacaagcatccataaagtggttgctgcagaaagacaaagatcgacgcaaagaggtcaagttgaacgagcgcatcatcgctacatctcagggcttacttattaggtccgtgcaaggcagcgaccagggactctaccactgtatcgcaaccgagaatagcttcaaacagaccattgcaaaaatcaattttaaagtgctggactcagaaatggtggccgtggtgaccgataagtggagtccttggacctgggcatctagtgttagagcgctccctttccaccctaaagacatcatgggcgccttcagccattccgaaatgcagatgattaatcaatattgcaaagacaccagacagcaacatcagcaaggagacgagtctcagaagatgcgaggggactacggtaagctgaaagccctgattaactctagaaagtcgagaaaccgcagaaatcaactgcctgaatcatag

SEQ ID NO: 6712 - DNA, 942 bp, synthetic construct
  misc_feature 1..942: note = source = /note="Description of Artificial Sequence: Synthetic coding sequence"
  source 1..942: mol_type = other DNA
atgcctggatggctcaccctacccacgctgtgccgatttctcctttgggctttcacgatctttcacaaggcacagggagatcccgcctcccacccggggacaacaccaccttcctataaggttcggtggagtaaggtcgaaccaggcgaattgagagagaccctgattctcatcacaaacggacttcatgcccgaggttacggaccccttggaggcagagcccgaatgcgaagaggccatcggctcgacgcttcactggtaatcgcgggggtccggctggaggacgaagggcggtaccgttgtgagttgattaacgggattgaggacgaatccgtggccttgaccctctctctggaaggtgtcgtgtttccataccagccctcacgtggtcggtaccaatttaactattacgaagccaagcaggcttgtgaggaacaggatggacgcctggccacctattctcagttgtatcaggcctggaccgaggggcttgattggtgcaacgcaggatggcttcttgaagggagcgtaaggtatccagtgctgacagccagggcgccgtgtgggggcagaggtcgccctgggatcagaagctatggaccccgggatcgaatgcgtgatcggtatgacgccttttgcttcacgtcagcccttgccgggcaagtgttcttcgtccccgggcggctcaccttgtcagaagcgcatgcagcctgtagacgcaggggcgccgtggtcgccaaagtcggacacctctatgccgcttggaaattctccggcctggatcagtgcgacgggggttggttggccgatggaagcgtccgctttccaatcaccacgcccaggcccagatgtggcggcctcccggacccaggagtaagatcctttggcttcccgcggcctcagcaggctgcctacggaacatattgctacgctgaaaactag

SEQ ID NO: 6713 - DNA, 1089 bp, synthetic construct
  misc_feature 1..1089: note = source = /note="Description of Artificial Sequence: Synthetic coding sequence"
  source 1..1089: mol_type = other DNA
atggcctggacgttcgagtgctcaaggacaacctctcctgagccccttagtacctctccctgccgaaccacttcttccagaaactctcccactatgtcctgccctgccagcgttgcgtgcgaacctagcacatcaacgactaccagcagtccacccaaggcttgccttacgagacctagtagtccaagcccgtcttgttccacttcagcttggcataataaaaataacctcatcagcaaagttcctagaggagccttgagtaggcagacacagttgagggaactgtatcttcagcacaatcagctgaccgactccgggctggatgcgaccacctttagtaaactccatagtctggagtacctcgacctgagccacaaccagcttaccaccgtgccagcaggccttccaaggaccctcgctattctgcacctggggcgtaaccgtatacgccaagttgaagcggctcggttgcatggggccagaggtctgagataccttttgttgcagcacaaccaactcgggtcctcgggcctcccggctggagcgctgcggccactgagggggcttcataccctccacctttacggcaacggcctggaccgggtaccccctgctctgcctcgccggttgagagctctcgttctcccccacaaccatgtcgcggccttaggggccagagatctggtcgccactccagggctaactgaattgaatctggcctataaccggttggcttccgcccgggtgcatcaccgtgctttcaggcgactgagggctctgagaagtctggacctggcaggcaaccagcttacaagactcccgatgggcctccccacaggtctaagaacactgcagctacagaggaaccagctgcgtatgttggaaccggagcccctcgcaggtttggaccagctccgggaactgtcactcgcacacaatagactccgggtgggcgacattggtcccgggacttggcacgaactgcaggccctccaggtgcgtcatagattggtctctcacaccgttcccagggccccgcccagcccctgcctgccttgccacgttcctaatattctggtgtcgtggtag

SEQ ID NO: 6714 - DNA, 900 bp, synthetic construct
  misc_feature 1..900: note = source = /note="Description of Artificial Sequence: Synthetic coding sequence"
  source 1..900: mol_type = other DNA
atgttacaccccgagacaagccctgggcggggccacctgttggctgtgttactcgctctcctgggcaccgcatgggccgaggtatggccaccccagctgcaagagcaagccccgatggcaggagctttaaaccggaaggaatctttcctgcttctttccttgcacaacaggctgcgatcctgggttcagccacctgccgccgatatgagaaggctggactggagcgactcccttgcccagctggctcagggtagtccgctctggaatcctaacccagaacccggggtgagaccagttgctcaccccgcaagcggccttgagcacgcggccgcaccaagggcatggtgccccctctcaaagtggtctttatggttcgctgagggacagagatattcccatgctgccggtgaatgcgcgcgtaatgccacttgcacccattatacacaactggtctgggcaacatcgtctcaacttgggtgcggccgccatctttgcagcgcaggccaggccgcaattgaggcttttgtgtgcgcctattctcctcggggaaactgggaagttaatggcaaaacaatagtgccatacaagaaaggggcttggtgctcgctgtgcacagccagcgttagtgggtgttttaaggcctgggatcacgcaggaggactttgcgaggtgccacgaaacccatgccggatgagttgccagaatcacgggagactcaatatctccacatgccattgtcattgccctcccggatacaccgggcggtattgtcaagttcggtgcagccttcagtgtgtccacggaaggttcagagaggaagagtgcagttgtgtctgtgacattggatacgaaccctctgttcctcccagatgtatttttccatcaaccccagtcacgtag

SEQ ID NO: 6715 - DNA, 1047 bp, synthetic construct
  misc_feature 1..1047: note = source = /note="Description of Artificial Sequence: Synthetic coding sequence"
  source 1..1047: mol_type = other DNA
atgctggatacaaatcttattctgctgcctctattccagttcatcgtgcccaaagaatggaacagtaagtacagacccgtgtgcatacatttggcggggaccggggaccaccactactggcggaggcgcacattgatggcccgccctatgatcaaagaggcacgcatggccagcttgctgctggagaatccttattatggatgtcgaaaacctaaggatcaggtgcgttcatctcttaaaaatgtgagtgacttgttcgtgatggggggcgccctggtactggagagcgccgcattactgcactggcttgaacgcgaggggtacggacccctgggcatgactggcattagtatgggcggtcatatggcttccctggcagtgtctaattggccgaagccaatgcctctgatcccgtgccttagctggtctacggcaagcggggtgtttactacaacagatagtttcaagatgggccaagagttcgttaagcacttcaccagctcagccgacaagctgactaacctcaacctcgtcagcagaacccttaatcttgatatctccaatcaggtggtgagtcagaaacctgcggattgccacaacagttctaaaacgagcgtgtcggcaacgagcgagggattgttactgcaggacacctctaagatgaaacggttcaaccagaccctgagcacaaacaagtccggatatacatccaggaaccctcagtcataccacctcctgtccaaggagcagtcccgtaactccctgcggaaggagtcattgatcttcatgaagggtgtgatggacgagtgcactcacgtggccaacttctccgtgcccgtagacccctccctgataattgtggtgcaagccaaggaagacgcttacataccccggacaggggtgaggtcactccaggaaatatggcccgggtgcgaaatcagatacctggaaggaggccatatctctgcttatttgtttaagcagggactattccgccaagccatttatgatgccttcgacagattcctgcataaatatgctaattag

SEQ ID NO: 6716 - DNA, 1044 bp, synthetic construct
  misc_feature 1..1044: note = source = /note="Description of Artificial Sequence: Synthetic coding sequence"
  source 1..1044: mol_type = other DNA
atgcgggcttgcatcagtctcgtccttgccgttctgtgcggccttgcttgggccgatttatactccgctcctacttcttgccaagggcgatgctatgaagccttcgacaaacaccatcaatgccattgcaacgctcgatgccaggaatttggcaactgttgtaaggactttgaatctctctgtagcgatcacgaggtcagccactcttctgatgcaatcacaaaggaggagatacagagtatttcagagaagatatatagagctgatacaaataaggcccagaaagaagatatcgtgctaaacagccagaactgcatcagcccctctgaaaccagaaatcaggtcgacaggtgtccaaaacccctctttacctacgtgaacgagaaactgtttagcaagcccacctacgcagcgttcattaatctcttgaataactatcagcgcgctaccggtcacggagagcatttctccgctcaagagcttgctgagcaggatgcctttcttcgcgaaattatgaagactgcagtgatgaaggagctttacagctttctgcaccaccagaacagatacggcagcgagcaggagttcgtagacgacttaaagaatatgtggttcggcctatatagcagaggcaatgaggagggcgacagctcaggcttcgagcatgtgttctctggcgaagtgaaaaaggggaaagtcaccggattccacaactggatcagattttatttagaagagaaagaaggattagtcgactattactcacatatctacgatggaccttgggattcataccccgacgttctcgcgatgcaatttaactgggatgggtactataaggaggtgggttccgcgtttatcggctcttcgccagagtttgagttcgccctctattctctgtgtttcatcgcccgcccaggtaaagtttgccagctgtcgttgggaggatatccgctcgctgtcaggacctatacatgggacaagagcacatatggcaatggtaagaagtacatcgcgaccgcttacatcgtctcctccacttag

SEQ ID NO: 6717 - DNA, 864 bp, synthetic construct
  misc_feature 1..864: note = source = /note="Description of Artificial Sequence: Synthetic coding sequence"
  source 1..864: mol_type = other DNA
atgctgaagaaaatttcagtgggagtcgcaggcgatcttaatacagttacaatgaagctgggttgcgtcctgatggcttgggctctttacctgtcactgggagtgctctgggtggcgcagatgcttctcgccgcatcattcgaaaccctgcagtgcgagggacccgtctgtacggaggaaagcagttgccacaccgaagacgacttaaccgatgcccgtgaagcaggcttccaggtcaaggcatacacgttctccgagccttttcatctgatcgtttcgtatgagttgttccccgctccgattcttagagccgtgccgtctgccgagccccaggccggctcaccgatgacactctcatgccagacaaagcttcctctgcagcgaagcgcagcaagactgctgttttccttctacaaggacggccgaattgtccaatctcgcgggttgagttctgaattccaaattcccacggcatctgaggaccactctggatcttactggtgcgaggccgccacagaggacaaccaggtttggaagcaatcaccgcagctcgaaatcagagtacagggcgcctctagttcagcggctccacccactctgaacccggcccctcagaagagcgctgcacctggaacagcacctgaagaggcccccgggcccctgcctccccctccaacacccagtagcgaggatccaggtttttcatctcccctcgggatgccagacccacatctgtatcatcagatgggactgctcctgaagcatatgcaggacgtgagagtgttgctgggtcacctgctgatggaattgcgagaacttagcggccaccgcaaacccggcaccaccaaggccactgccgagtag

SEQ ID NO: 6718 - DNA, 1815 bp, synthetic construct
  misc_feature 1..1815: note = source = /note="Description of Artificial Sequence: Synthetic coding sequence"
  source 1..1815: mol_type = other DNA
atgatgagagcagtgtgggaagcactggccgctctagcagccgtcgcttgtctggttggggcggtgagagggggtccagggctttccatgtttgccggacaggctgcacagccagacccctgttcagacgagaacggccacccacgtcgatgcatacccgactttgtcaatgcagccttcggcaaggacgttcgcgtaagttcaacatgtgggcggccgcctgcccggtattgcgttgtatctgaaaggggggaggaacgactgaggagctgtcacttgtgtaacgctagcgacccaaagaaggcacaccccccagcatttttgaccgatctcaacaacccacacaaccttacttgctggcaatcggaaaactacctgcagtttccccacaatgtgaccttgacacttagcctggggaagaagttcgaggtgacatatgtcagcctgcaattttgctcaccacgcccagaatccatggctatttacaagagtatggattatggccgcacctgggtgcctttccagttctattccacacagtgtcgcaaaatgtacaacaggccccatagggccccaatcacaaagcagaacgaacaggaagcagtgtgcactgacagccacacagatatgcgaccattgtctggaggactgatagcgttttccactttggatggaaggccctccgctcacgatttcgacaattcacccgtcctccaggattgggtgacagcaacagatataagagtggctttttcccgtctgcatacatttggagacgagaatgaagacgactccgaactggctagagacagctatttctacgccgtgtcagatttacaagtgggaggaaggtgcaagtgcaatgggcacgccgcccggtgcgtaagggatagggatgactccttagtgtgcgattgcagacacaacacagctgggcctgagtgtgacaggtgtaagccatttcattacgataggccctggcaacgcgccacggccagggaagccaatgagtgcgtcgcctgtaattgtaacctgcatgcaagacgctgtagattcaatatggagctgtataaattgagcggcaggaaatccgggggggtctgtctgaactgtcgacacaacacggccgggcgtcactgccattactgtaaagaaggctactacagagatatgggtaaacccattacgcaccgcaaggcctgcaaggcctgtgattgccaccctgtcggggccgcaggcaagacttgtaatcaaaccacagggcagtgtccatgcaaggacggggtgaccggcattacctgcaacaggtgtgctaaaggttaccagcaatccaggtccccaattgctccatgtatcaagatacccgtggctccccctacgactgcagcgagttccgtagaggagcctgaagactgtgacagctattgcaaagcaagcaaaggcaaactaaaaataaatatgaaaaaatattgtaaaaaagactatgcagtgcagattcacatactgaaggctgacaaagcaggagactggtggaaatttacagtgaacattattagcgtgtataaacagggcacatctcgcatccgacggggagatcagagtctgtggattcgttcccgggatatcgcttgcaagtgtcccaagataaagccgctgaaaaaatatctactgctcgggaatgccgaggactccccagatcaatcaggcattgtcgcggacaagtcatccctcgtcattcagtggcgtgatacgtgggcaagacgtttgcgaaaattccagcagcgggagaagaagggaaagtgcaaaaaggcctag

SEQ ID NO: 6719 - DNA, 1005 bp, synthetic construct
  misc_feature 1..1005: note = source = /note="Description of Artificial Sequence: Synthetic coding sequence"
  source 1..1005: mol_type = other DNA
atgagatccgcgggcgggagaggagagattaaggttagacgtgagttgcagccgtcgaagcaggtctcaggtctgacaaatcacgcacgcacaggacaggaaaagaggaatctacaacgccttgtcctcgaaactccatcccagaacatctttttctctcctgtcagcgtgtcgacatccttggcgatgctctccctaggggcccactccgtcaccaaaactcagattctccaggggctgggatttaacctgacccatacacccgagtcagcaattcaccaaggattccagcacctggtccactcactgaccgttcctagcaaagacctgacactgaaaatgggaagtgccttattcgtgaagaaggagctgcagctgcaagcaaatttcctgggcaacgtgaagagactgtatgaagctgaggtctttagtactgacttttcgaaccccagtattgcgcaggcgcgcattaactcccacgtaaaaaaaaagacccaagggaaggtggtcgacatcattcaggggcttgaccttcttaccgctatggttctagtgaaccatatcttcttcaaggcaaaatgggagaagccttttcacccagaatatactcggaaaaattttccttttctggtgggggaacaagtgacggtacacgttcccatgatgcatcagaaggagcagtttgcatttggagtggacacagaattgaattgtttcgtgctccagatggattataagggtgatgccgttgcctttttcgtcttgccatccaaggggaagatgaggcagttggagcaggcactgagtgccagaacactgcgcaagtggagccattccttgcagaagagatggattgaagtgtttatcccccgattctccatctctgcgtcctacaatctagagactatccttccaaaaatgggaatccagaacgtattcgacaagaacgccgacttctccggcattgccaagagagattcgctgcaagtaagcaaggttagctag

SEQ ID NO: 6720 - DNA, 1065 bp, synthetic construct
  misc_feature 1..1065: note = source = /note="Description of Artificial Sequence: Synthetic coding sequence"
  source 1..1065: mol_type = other DNA
atggcaccagctagacgcccagcgggcgcaagactgctgctggtgtatgccgggctgctggcagctgcggcagctgggctcggcagtccggagcctggagctcccagtaggtcccgcgctcgcagggagccaccccccggcaacgagctacctcggggcccaggtgagtcccgcgccggaccagctgcaaggcctcccgagccaacggccgagagagcgcatagtgtggacccaagagacgcttggatgctgtttgttagacagagcgataaaggggtgaacgggaagaagcgttccaggggaaaggctaagaagctcaagtttgggttgccagggccccctggcccccctggtccccagggtccgccgggcccaatcattcctccggaagctttgctaaaggagttccaactactcctgaagggcgccgttaggcagagagagagagctgaaccagaaccttgcacatgcgggccagcggggcctgtcgcagccagcctggcacctgttagcgctactgcaggcgaagacgacgatgatgtggttggagatgttctggctcttctggctgcccccctggcacccggaccgagagccccaagagtcgaagcagccttcctttgccgtttgcgtagagatgccctggtcgaaaggcgcgccctccacgagctcggggtctattatctgcctgatgcggaaggagcatttcggagaggtccgggtcttaacctgacctcagggcagtaccgcgccccagtggccgggttttacgccctggccgccaccctacacgtcgcacttggagagcctcccaggcgggggcctccgcgccctcgggatcacctccggctgttgatctgtatccagagtcgctgtcagaggaacgcttccctcgaggccatcatgggcctggagagttcctctgagctgttcacaattagcgtcaatggggtcttgtacctccagatgggtcagtggacctctgtgtttctcgataatgcctccgggtgcagcctgacagtgcggtctggctctcactttagcgccgtgctcctgggtgtctag

SEQ ID NO: 6721 - DNA, 2685 bp, synthetic construct
  misc_feature 1..2685: note = source = /note="Description of Artificial Sequence: Synthetic coding sequence"
  source 1..2685: mol_type = other DNA
atgtccttgccgaggtgctgcccgcaccctcttaggcccgaagggtctggggcaatgggacctgaagccctctccagcctgttgcttctgctcttggttgcctccggtgatgctgatatgaaggggcactttgatccggcaaagtgtcgatatgccctcggaatgcaggacagaaccattccagactctgacatttccgcctcctcttcctggagcgactctactgctgctcggcattctcgcctggaatccagtgacggcgatggcgcttggtgtcccgcaggttcggttttccctaaggaagaggaatacctacaggtagatctccagaggttacacctggtcgctctggttgggacgcaggggcgtcacgccggcggactgggcaaggaattttctcgatcttatcgactgcggtattctcgggatggaagacggtggatgggttggaaggacaggtgggggcaggaggtgataagcggaaatgaggatcctgaaggagtcgtcctgaaagacctcggcccgccaatggtggccaggcttgttagattctatcctagagcagatagggttatgtcggtgtgtctccgggttgagctgtatgggtgtctatggagagacggactgctgagctacactgcacccgttggccagacaatgtatttatctgaagcagtttatctgaacgacagcacttacgacggtcataccgtgggggggctgcagtacggcggccttgggcagctagcggatggggtggtcgggctggatgactttcgtaagtcccaagagctgagggtgtggcctggctacgattacgtaggatggtccaatcatagcttttcatccggatacgtggagatggagttcgagtttgaccggctgcgggcttttcaagcgatgcaggtccattgtaataacatgcacactctgggcgctcgacttcccggcggtgtggaatgtaggttcagacgcggccctgcgatggcctgggagggcgagcccatgcgccataatcttggcggcaatctgggagacccacgcgcacgggctgtcagtgtacctttggggggccgagtggcacgcttccttcagtgtagattcctctttgccgggccttggctgctattttctgagatctctttcatctctgacgtcgtgaataattcaagcccagcccttggcggaacgttcccccccgcgccctggtggccaccaggacccccgccaaccaacttcagttctctggagttggaaccacgcggccagcagcctgttgctaaggcggaggggtcaccaaccgcaatcctgatcggctgccttgtcgccatcatcctgcttctactgctcatcattgctttgatgctctggaggctccactggcgtagactcctttccaaagcagaacgtcgagtgttggaagaagagctaactgttcaccttagtgtccccggagacaccatattgatcaacaatcgacccgggccaagagaacctcctccctatcaggagccccgcccccggggcaatcccccccactctgccccatgcgttccaaacggctctgcttactcaggtgactacatggagccggagaaacctggggcgcccttattgcccccccctccccaaaacagtgtgcctcactacgcggaggccgatatcgtgaccctgcagggcgtgaccgggggaaatacctatgcagttccagcactgccacccggggccgtcggggacggccctccacgcgtcgacttcccacggagtaggcttcgattcaaagagaaacttggggaaggacaatttggagaagtgcacctgtgtgaggtcgattcaccacaagaccttgtatccctggacttccccctgaatgtgcgtaaggggcacccactgctcgtcgcagtgaaaatcctgcggccagacgctaccaaaaacgctcgaaatgacttcttgaaggaggtgaagattatgtccagactgaaggatccaaacataataaggctgcttggggtttgtgttcaggacgaccccctgtgcatgattacagactacatggagaacggagatcttaatcaatttctgtcagcccatcagttagaagacaaggcggctgaaggagccccaggcgatggtcaggctgcccagggaccgaccatttcataccccatgctccttcatgttgctgcacagattgcaagtggaatgcggtatctcgccacactcaatttcgttcacagggatctggctactaggaactgcctggttggcgagaacttcacaattaagatcgctgatttcggcatgtctcggaatctatacgcaggtgactactacagggtgcagggaagagccgtccttccaattcgctggatggcatgggagtgcatacttatggggaagtttacgactgccagtgacgtctgggcctttggcgtgacactgtgggaagtgctcatgttgtgcagagctcaaccattcggccaactgaccgatgagcaggtgatcgagaatgcaggcgagttcttccgcgatcagggccgccaggtgtacctgagccgacctccagcgtgcccccagggcttgtacgaactgatgctgaggtgctggagtagggagtctgagcaaagacccccattctcccagttacatcggttcctcgcagaggatgcactgaatacagtttag

SEQ ID NO: 6722 - DNA, 2685 bp, synthetic construct
  misc_feature 1..2685: note = source = /note="Description of Artificial Sequence: Synthetic coding sequence"
  source 1..2685: mol_type = other DNA
atgtcactccctcggtgctgtcctcaccccctgaggccagaggggtccggagcaatgggccccgaagccctttccagtcttcttctgctgctgctggtggcctctggcgacgcagatatgaagggccattttgacccagccaagtgtcggtatgcgctggggatgcaggacaggacgatcccagactctgacattagcgcctcctcatcctggtctgactcaacagcagcccgacactctagactggagtctagcgacggtgacggagcttggtgcccggccggctcggtctttcccaaggaagaggaatacttgcaagtagaccttcagcgcctgcacctcgtcgccttagttggcacacaaggccgtcacgcgggtggtctggggaaagagttttcacgctcttatagactgaggtacagccgagacgggaggcgttggatgggatggaaagaccggtgggggcaggaggtcataagtgggaatgaggaccccgaaggagtcgtgttaaaggacctgggacctcccatggttgcacgactggttagattctacccaagagccgatagggtcatgagcgtctgcctcagggttgaactgtatgggtgtctgtggagagatggcttgttgtcctatacagctcccgtgggccaaaccatgtatttgtctgaagcagtctatttaaacgactcgacttacgacggccacaccgtgggaggcctccagtatgggggattaggtcaactggccgatggagtggtcggcctggacgatttccgcaagtcccaggagctgagagtgtggcccggctacgattacgttgggtggagcaaccacagcttctcatcaggatacgtcgaaatggaattcgaattcgatagactgcgcgcatttcaagcaatgcaggttcactgtaacaacatgcacaccctgggggctcgactgcccggcggagtggagtgtcgctttcgacggggaccggccatggcctgggaaggggaacccatgcgacacaacctggggggaaacttgggggacccaagagccagggccgtcagtgtgcctctgggcggcagagtcgccagattccttcagtgtaggttcctgtttgcgggcccatggctcctgttttccgaaattagcttcatctctgacgttgttaataactcctcccctgctttgggaggcactttcccacctgccccatggtggcctcccggccccccaccaactaactttagctccctcgagctcgaaccaagaggtcagcaacccgtcgctaaagccgagggttccccaacagctatcctcattggctgcctggtggccatcatccttctgttactgctgattattgccctgatgctgtggaggttacattggaggcggctgctatctaaggccgaaaggagggtgttggaagaggagctcactgtgcatctctcagtccccggtgatacaatcctgataaacaatcggcctggcccacgcgagcctcctccctaccaggagccacgcccgcgtgggaacccgccccactcggccccttgcgttccgaatggttcagcctactccggagactatatggaacccgaaaagcccggagccccattgctccccccacctccacagaactcggtgccccattacgccgaagccgacatcgttacccttcaaggagtgactggaggcaacacttacgcggtgcccgccctgccccctggggccgtgggagatggacccccaagggtagactttcccaggagtagactgaggttcaaagagaagctgggagaggggcagttcggggaggtgcacctgtgtgaggtagacagccctcaggatctcgtctctttggactttcccctgaacgtacggaagggccacccccttctggtggccgttaagatacttaggcccgatgctaccaagaatgcccgtaatgacttcctcaaggaggtgaaaattatgtccagacttaaagatccaaacatcatccggctgctgggcgtgtgcgtgcaggacgacccattatgtatgattaccgactacatggagaacggagacctgaatcaatttttatccgcccatcagctggaagacaaagcagccgaaggagctccaggggacggtcaggcagctcaaggaccgaccatttcctacccaatgttgcttcacgttgccgctcaaattgctagcgggatgagatacttagccaccctgaacttcgtccaccgggaccttgcgacccgcaattgcctggtgggcgaaaatttcacgatcaagatcgccgacttcggaatgtctaggaacctctatgccggggactactacagagttcaggggagagcagtgctacctattagatggatggcctgggagtgcatcttaatgggtaaattcactactgcttctgacgtctgggcattcggggtaaccctgtgggaggtgttaatgctgtgccgagctcagcccttcggccagctgaccgatgagcaggtaatagaaaatgctggcgaattctttagagatcaggggcggcaggtgtatctgagcagaccgccagcttgtccccagggcctgtatgagctcatgctaagatgctggagcagggagtcagagcagaggccgccctttagccagttacaccggtttcttgccgaagatgcccttaatacagtctag

SEQ ID NO: 6723 - DNA, 2886 bp, synthetic construct
  misc_feature 1..2886: note = source = /note="Description of Artificial Sequence: Synthetic coding sequence"
  source 1..2886: mol_type = other DNA
atgttgttgctactgcttctcgctcccctgttccttagaccaccaggcgcagggggcgcacaaacacccaacgctacatccgagggatgccaaattatccacccgccttgggaggggggcattagataccgcgggctcactagggatcaggtgaaggccatcaacttcctgcccgtggattacgagatagagtatgtttgccgtggtgagcgcgaggtggtggggcctaaagtaagaaaatgcctggctaacggtagctggacggatatggacaccccaagccggtgcgtgcgcatttgttctaaatcttaccttaccctagagaacgggaaggtgttcctgaccggtggagatctacccgccctggacggggctcgggtagatttcaggtgcgaccctgatttccatcttgtgggctcttcacggtccatctgctcacagggacagtggagtaccccaaaaccccattgccaagtcaatcgtactcctcattcagaacgcagggcagtatatatcggcgcccttttccctatgtcaggggggtggcccggcggccaggcttgccaaccagcagtcgagatggcactggaggatgtgaactccaggcgcgacatcctccctgattacgaacttaagttaatccatcacgatagcaagtgcgatcccggccaggctaccaaatacctgtatgaattgctctacaacgatccaattaaaatcatactgatgcctgggtgctcaagcgtgagcacgttagtggcagaggccgcacgcatgtggaacttgatcgtcttgagttacggctcatcctccccagcattatccaatcggcaacgatttccaactttcttccgcacacacccaagcgcaacattacacaacccaactagggtgaagttgtttgagaaatgggggtggaagaaaatagccactatccaacagaccacagaggttttcacttcaacccttgacgatctagaggaacgcgtgaaagaagccggcatcgagataacattcaggcagtcattcttctcagatccagccgtgccagtgaaaaacctgaaacggcaggacgctcgaatcattgtaggcctattctatgaaactgaggcccgcaaagttttttgtgaagtttataaagaacggctgtttggtaaaaaatacgtgtggtttctcattggctggtacgccgataattggtttaagatttacgacccctcaataaactgcactgtcgatgagatgactgaggccgtcgagggacacattactacggagatcgtgatgcttaaccccgcaaatacacgctctatcagtaatatgacgtcccaggaatttgttgaaaaactgacaaagcggctgaaacgacacccagaggaaacgggagggtttcaggaggctcccctggcttacgacgccatctgggctcttgcgttagccctcaacaagaccagcggcggagggggccgcagcggagttagactagaagattttaattataacaatcagacaatcacagatcaaatctaccgagccatgaacagcagcagcttcgaaggggttagcgggcatgtggtgtttgatgccagcggttcaagaatggcttggacactaatcgagcagctccagggaggtagttacaagaaaattggctactacgactctaccaaggatgacctgtcctggagcaagactgacaaatggatcggcgggtccccgcctgcagatcaaaccctggtcattaagactttccgttttctgtctcagaaattgttcattagcgtgagtgttttgtcaagtctgggcatcgttctcgctgtggtctgtttgagttttaacatctacaatagccatgtgcggtatatccagaattcacaaccaaatctgaataacttaacagccgtgggatgtagtcttgccttggctgcggtctttccgttgggacttgatgggtaccacataggccgcaaccaattcccattcgtgtgtcaagctagactttggctcctgggactggggttttctcttgggtatggctccatgttcacaaaaatttggtgggtgcacactgtctttaccaaaaaagaggaaaagaaggagtggagaaagaccctagagccgtggaaactttacgccactgtaggactgcttgttggcatggatgtgctgacattagcgatttggcagattgttgatccattacatcgtacgattgagacctttgccaaggaggaaccgaaagaggatatagacgtcagtattctgcctcagcttgagcactgtagctcccgaaagatgaatacttggctcgggattttttatggctacaagggacttctcttgctgcttggcatattcttagcctatgagaccaaatcggtgtcaacagagaagattaacgaccaccgggcagtaggcatggctatttataacgtcgctgtcctgtgtttaattactgcccccgtgaccatgattctctccagccagcaggatgccgctttcgcctttgcttccctcgcgatcgtgttttcaagctacatcacactcgtggtcctgttcgtccctaaaatgagaaggttaattactaggggagaatggcaatcagaggcgcaggacacaatgaagacaggtagcagtactaacaacaatgaggaagagaaatcacgccttttagagaaggagaacagggagctggagaaaatcattgcagaaaaagaggaacgggtgtccgagctcagacaccaattgcagtcccggcagcagctacgttcaagacgccaccctccgactccacctgagccatcgggtgggttgcctcgcggcccacccgaacctccagatcgcctctcatgcgacggttccagagtgcatcttctgtataagtag

SEQ ID NO: 6724 - DNA, 2559 bp, synthetic construct
  misc_feature 1..2559: note = source = /note="Description of Artificial Sequence: Synthetic coding sequence"
  source 1..2559: mol_type = other DNA
atgctgcccactgaggtgccacaatcacacccgggtccttcagcactgctgttgctacagcttctcctgccgcctacttctgctttcttccctaatatctggtccctgctcgctgctcctggttctattactcatcaggacctgactgaggaggctgcattgaacgtcaccttacagctcttcctggaacagcctccgccaggacgaccacctctgaggttagaggattttctgggccggactttactagcggacgatctgttcgccgcctacttcggcccaggatcctccaggcggtttcgggctgctctgggggaagtctccagagcgaacgctgcacaggacttcttgcccacttcacgcaatgatcccgacctgcacttcgacgcagaaaggctcggccagggcagagcgaggctcgtgggagcactcagagaaactgtggtggccgcccgggcactagaccataccctggctcgccagaggcttggcgctgcactccatgccctccaggatttctacagccacagcaattgggtggaattgggcgagcagcagccacacccacatctcctctggccccgacaggagcttcagaacttagctcaggtagctgaccctacgtgctcagattgtgaggagctgtcatgtccccgcaattggctgggcttcaccctgctaaccagcggctatttcggaacccatccaccaaagccccccggtaaatgctcccacggagggcacttcgatagatcctcatcccagccccctcgtggtggtatcaacaaggattccacctctcctggattcagtccccatcacatgttacacctccaggccgccaagttagcactcctggcctctattcaggctttttctttactgaggtctagacttggcgatcgggatttttctagactcctggatattactccagccagttcactcagctttgtgctggatacaacagggtcgatgggcgaggagataaacgcagccaaaattcaagcaagacacctggtggaacagcgccgcggatccccgatggaaccagtacactatgtactggtgcctttccacgaccctgggttcgggcccgtgttcacgacttctgaccctgattccttttggcagcagctcaatgagattcatgctctgggcggcggagacgagcccgaaatgtgtttaagtgccctacagctggcacttctacacacaccgccactaagcgatattttcgtgtttactgacgccagtcccaaagacgccttcttgaccaaccaggtggagtctctcacccaggagcgccgatgcagggtcacattccttgtgaccgaggatacttctagagtgcagggccgcgccagacgggagattctgagtcctctgcgctttgaaccatataaagctgtggcactggcttcggggggggaggtgatcttcactaaagatcagcacatcagagatgtcgctgctatagtgggggagtccatggcagcactcgttactttacccctggacccccctgtggttgttccaggccaacccctcgtgtttagtgtcgatggattgttgcagaagatcaccgtgcgcatacacggcgacatctcttcgttttggataaaaaaccctgccggagtctcacaaggccaagaggaaggtggcggcccccttgggcatactcgccgctttggacagttttggatggtgacaatggatgacccaccacagacaggcacatgggaaattcaggtgacggctgaggacactccaggagtgcgtgttcaagcgcagaccagtttggactttctgttccactttgggatccctatggaagacggtccgcaccccggcttgtatccgcttactcaacccgtggccgggctgcagacccagttactggtagaggtgacggggcttggatctagagccaaccctggcgatccacagccccatttcagtcacgttattttgcgaggcgtccccgagggagctgagctgggtcaggtgcctttggaaccagtgggcccacctgaaagaggccttctcgctgcctcgttgtctccaacgctgctttccaccccccggcctttctctctagagctgatcgggcaggacgccgccggacggaggttgcaccgagccgcccctcagccgtctacggtggtcccagtacttctggagctaagcggcccctcaggcttcctcgcccctgggagcaaggttccactttccctgcgaattgcatcgttttccggcccgcaggatctcgatctgaggacattcgttaatccttccttcagcttaacttcaaacctgagtagggcccatctggaactgaacgagagtgcatgggggcggctgtggctggaagttcccgacagtgcagctcccgatagtgtggtgatggtgacagtaaccgccggcggacgcgaagcgaaccctgtgcctccaacacacgcatttctgcggcttctcgtgtcggcccctgccccccaggtcagaaatcactactttccatcgcaggggccagcccaccacccctacagactgatttag

SEQ ID NO: 6725 - DNA, 756 bp, synthetic construct
  misc_feature 1..756: note = source = /note="Description of Artificial Sequence: Synthetic coding sequence"
  source 1..756: mol_type = other DNA
atgccccacctagcatctcttttcacggcgtctagccggtgctgtccccaccctcttagaccagaagggagtggtgccatgggccccgaggccttatccagcctgcttctcttactgctggtggcaagcggggacgcagacatgaaagggcacttcgacccagccaaatgtcgatacgctcttggaatgcaggacaggaccatcccagattccgacatcagcgcctcctcatcctggtcagattcaactgccgcccgacacagtcgcctcgagagctcggacggcgatggcgcatggtgcccagccggttctgttttcccaaaagaggaagagtacctccaggtggacctccagcgattacacctggtcgccttggtgggaacacaggggcgccacgccggaggtctggggaaggagttctcgcgaagttacaggctgcgttattctcgcgatgggagacgatggatgggttggaaggacaggtggggccaggaagtgattagtggtaacgaggacccagagggcgtcgtgctcaaagaccttggcccaccaatggtggctcgcttagttcggttttacccccgtgctgatcgggttatgagtgtatgtctgagagtagaactatatggctgcttgtggcgcggggagtggttgagctttctcggaatctgtttcctgtcaaggggactggagggcggcgaatgcggtgaatgggctagccggataccctcccccgccggcaagctgtcgctctag

SEQ ID NO: 6726 - DNA, 726 bp, synthetic construct
  misc_feature 1..726: note = source = /note="Description of Artificial Sequence: Synthetic coding sequence"
  source 1..726: mol_type = other DNA
atgaagttcatacttctctgggcccttcttaatctgactgtggctctggcgttcaatccagattataccgtgagttccacgcccccgtacctggtctatttaaagagcgactacctcccctgcgcgggcgtcctgatacaccctctttgggtgatcaccgcagcccattgcaacctgccgaagctgagagttattcttggcgtgactatccctgccgactccaacgaaaaacacctgcaggtgatcggctacgagaaaatgatccatcaccctcacttctctgttacgtcaatcgatcatgatatcatgctaatcaagctgaaaaccgaggccgagcttaacgactatgtgaagctcgccaatttgccctatcaaaccatcagtgaaaacaccatgtgttctgtgtctacctggagctacaacgtatgtgacatttataaagagccggattcccttcagacagtgaatatctccgtcatcagcaaacctcagtgtcgggacgcctacaagacatacaacatcactgaaaacatgctctgcgtggggattgtccccgggaggcgccagccgtgtaaggaggtgagtgctgcccctgcaatctgcaacggcatgctgcagggcatactcagcttcgcagatggttgcgtcctgagggctgatgtcggcatatatgccaaaatcttctactatattccttggattgagaatgttatccagaacaattag

SEQ ID NO: 6727 - DNA, 1536 bp, synthetic construct
  misc_feature 1..1536: note = source = /note="Description of Artificial Sequence: Synthetic coding sequence"
  source 1..1536: mol_type = other DNA
atggccaaaggcctgtcagtacagaacgacaagcacccgggctaccagccagcattgctcctgtccccgggcgcaccgctgttcgcagacggaccagcctatgcactcttgcacctgctgctgcacgagggcaaagctgagatggcagaccaggccgccgcatggctgaccagacagggctcctttcagggcggcttccgcagtacgcaggacaccgttattgccctggacgccctcagcgcttactggatagcatctcacaccaccgaggaacgggggctgaatgtgactctatccagtaccggccgcaatggctttaagtcacacgctctgcagcttaataaccgtcaaattcgaggcttggaagaggagctgcagttttccctggggtctaaaatcaatgtgaaggtgggtgggaactcaaaaggcacattgaaggtccttcggacgtacaacgttctcgacatgaagaacaccacatgccaggatctgcagatcgaggtcaccgtcaagggacacgtcgagtacacgatggaggccaatgaagattacgaggactacgagtatgatgagctcccagcgaaggatgatcctgacgccccactgcaacctgtgaccccattgcaactcttcgaagggcggcgaaacaggcgcaggagagaggcccctaaggtagtggaggaacaggagagtagagttcactacaccgtgtgtatttggcgcaacggcaaggtcggcctgtccggcatggccatagctgacgttactctgctcagcggcttccacgcactgcgagcagatctggagaagttgacctcactctcagatcgttatgtatcccatttcgaaacagaagggccacatgtcctgttgtattttgattcagtgccaacgtcccgagagtgtgttggttttgaggctgtacaggaggtaccggttgggctggtacagcctgccagtgcgaccctttacgattactataatcctgaaagaagatgttctgtcttttacggcgcgccaagtaagtcccggctcctagccactctgtgttccgctgaggtatgccagtgtgccgaggggaagtgccctcgccaaaggcgggccctcgagcggggcttgcaagacgaggacggctatcggatgaaatttgcatgttactaccctagagtggagtatgggttccaagtgaaggttctccgcgaagactcccgggctgccttcaggctgttcgaaaccaaaatcacccaagtgctccattttacgaaggacgtcaaagccgccgccaatcaaatgcgtaatttcttggtacgcgcctcttgtcgtctgagacttgagcctggcaaagagtatcttatcatgggactcgatggcgctacgtatgacctggaaggacaccctcaatatctactggatagcaatagctggatcgaggagatgccctccgaacgcctgtgcagatcaactaggcagagggctgcttgcgctcagctaaacgattttcttcaggagtatgggacgcagggctgccaggtatag

SEQ ID NO: 6728 - DNA, 2067 bp, synthetic construct
  misc_feature 1..2067: note = source = /note="Description of Artificial Sequence: Synthetic coding sequence"
  source 1..2067: mol_type = other DNA
atgctcccgaccgaggtgcctcagtcacatcctggcccctcagctctgctccttctccagctcctgcttccaccaacatcagcgttcttccccaatatatggagcctgctggcagccccgggaagcattactcatcaggatctgacagaagaagctgcactcaatgtgacactccagttgtttctagaacaaccccctccggggagacccccgctccggcttgaggatttcctagggaggacacttttggcagatgatttgttcgctgcctacttcggtcctgggtcttcaagacgcttccgggccgccctcggagaagttagccgggcaaacgctgctcaggactttttaccgaccagtcgtaacgaccctgacttgcattttgatgccgaaagactcggtcaggggagagcacgtctggtgggtgccttgcgggaaacggtggtagcggcccgtgcattagaccacaccctcgcgcggcagcggctgggggctgccctccacgcccttcaggatttctacagccattctaactgggtggaactgggggaacagcagccccaccctcacctcctctggccgcgccaagaattgcagaacctggcccaggtggctgacccaacatgctctgactgtgaggaactttcctgccctagaaattggctaggcttcaccttgctcacatctggctacttcggtactcacccccccaaacctccaggcaagtgtagccacggggggcactttgatcgttcatccagccagcccccgcgaggcggaattaacaaagattccacctcccctggctttagcccacaccatatgctccaccttcaggcagcaaagctcgcgctcctggcttcaatccaagctttctcactccttcgcagcagattgggcgaccgagatttttcacggcttctggacatcaccccagcctcctcattgtctttcgtgttggacaccacaggatccatgggggaggaaataaatgcagctaaaatccaggcgaggcaccttgtggaacaaaggcgcggttcccccatggaaccagtgcactacgttttagtgccttttcatgaccctgggttcggaccagtgttcactacaagcgacccagacagtttctggcaacagctgaatgaaatacatgcattggggggaggtgacgagccggagatgtgtctgtctgctctgcaattggccttgctgcatacaccgcctctatcagatatattcgtgtttaccgacgccagtcccaaggacgcctttcttactaaccaggttgagtcactgacacaggagcgaaggtgtcgggtcaccttcctcgtgaccgaagacacttcccgtgtccagggtcgcgcaagaagagaaattctgagcccactgagattcgaaccctacaaggcagtggctcttgcttctggcggtgaggtgatcttcacaaaagaccagcacattcgagacgttgccgctattgtgggcgagtcaatggccgccctggttactctccctctggatccacccgtggtggtgcccggtcaaccactggtcttttcagtggacgggctgctccagaagataactgtgcgcattcatggggatatttccagtttttggatcaagaatccagcaggtgtctcacagggacaggaagaagggggaggccccctcggacacacaagaaggttcgggcagttctggatggtgactatggacgacccgccccagacggggacgtgggaaatacaggtgacagcggaggacacgccaggagtcagagtccaggcacaaacaagcctcgactttctgtttcatttcggcatccctatggaggacggacctcatcctgggttataccctctcacccagcccgtggctggactgcaaacccagctgctggtcgaaagccaatcctggggatcatctgctgctttcttgccaagacacccctcccgtggtccaagagggtgtagaacacgaccgggcgccctgggagcacggggaacctctggggctaggtctccacgctcattggccgtggctcacgccgctgtgcacccatag

SEQ ID NO: 6729 - DNA, 2559 bp, synthetic construct
  misc_feature 1..2559: note = source = /note="Description of Artificial Sequence: Synthetic coding sequence"
  source 1..2559: mol_type = other DNA
atgctcccgacagaggtcccccagtcgcaccccggtccttccgctctgctgctgctgcaacttctcctgcctcccacctctgctttcttccccaatatttggtcactgctggctgcacctggaagtattacacaccaggacctcaccgaggaggctgccctgaatgtgactctgcagctatttctggagcagcccccacccggcaggccacccctgagactggaggacttcctcggaaggactttattagccgacgacctctttgctgcttatttcggtccaggttcatcgcgtcggtttagggccgcattaggggaggtcagtagggctaatgccgcacaggactttctgccgacctccagaaacgatccagaccttcactttgacgcagagcgcttggggcagggtagagcccgtctggtgggggcccttcgagaaaccgtcgtcgcggcccgcgccctcgaccatactctggcccgccagagactgggagcagctctgcacgcactgcaggacttttactcccactcaaattgggtggagttaggcgaacagcagcctcacccacatcttctgtggccacgtcaggagctccagaacctagcccaagtggccgacccaacctgcagcgactgcgaggagctttcctgcccaaggaactggttaggcttcactttgttgactagtggctacttcggtacgcacccgccgaagccccctggaaagtgctcacacggcggacatttcgatcggtcgagctcccagccccctcgcgggggtattaataaagattccaccagcccgggctttagtccccaccacatgctgcaccttcaagctgcaaagctggccctgctggcctctatccaggcctttagcctgctaaggtcgcgcctgggtgaccgcgacttttctaggctattagacatcacacccgccagtagcctgagctttgtcctcgacactacagggagcatgggcgaggaaattaatgccgccaagatacaagcacggcacctggtggaacagaggaggggctccccaatggagccggtgcattatgtactggtgccattccacgatccgggatttggtcccgtgtttacaacgtcagatcctgactctttctggcagcagctcaacgagattcacgccctgggtggaggagatgaaccggaaatgtgtctctctgctttgcaactcgctttgctccatacaccacctctgtccgacatcttcgtttttacagacgcttcacccaaggacgcattcctgacaaatcaggtggagagccttacacaggaaagacgctgccgcgtgaccttcctggtcacggaggacactagtcgggtacagggtcgagctaggagagagatactatctcctctacggtttgaaccctataaagctgtggccttggcgtccggaggtgaggtgatctttaccaaggaccagcatatccgcgatgtggcagcaattgtgggtgagagtatggctgcccttgtcaccctgccattggatccccccgtagttgtccccggacagcctttggtgttttccgtcgacggcctcctgcagaagattaccgttagaatacatggggacatctccagcttttggatcaaaaatccggcaggcgtttcccagggccaagaagagggcgggggtccacttggacacaccagacggttcgggcagttctggatggtgacgatggatgatccccctcagacagggacctgggagattcaggtgactgctgaggacacccccggcgtccgtgttcaggctcagacgtccttagacttcctgttccactttggcatccccatggaggatggccctcaccccgggctgtatccgctcacacagccggttgctgggctgcaaacccagcttctcgtcgaggtcacaggattaggctcacgggcaaatccaggcgatccgcagccccacttttcccacgtgatactccgcggtgtgcctgaaggagctgaattaggtcaggtacctcttgaacctgtagggcctcccgaaaggggactgttagccgccagcctctctccaactctcctttccactccccgcccattttccctcgagctaatcggacaggacgccgccggcagacgcctccatagagccgccccacagccctcaacagtggtgccggtgttgttagaacttagtggcccttctgggtttctggcgcctggtagtaaggttcccttgagcctcaggatcgcctcatttagtggacctcaggatctagatcttaggacctttgttaacccttccttctcattgacctcaaacctcagtcgggcccaccttgagctgaatgagtccgcgtggggcagactctggctggaggtgccggactcagccgctccagactcagtagtaatggtgaccgtgaccgcaggtggccgcgaagcaaaccctgtgcccccaacacatgcctttctcaggctattagtgtcagcacccgcgccccaggtgagaaaccactacttcccctcccagggacctgctcatcatccttacagactcatatag

SEQ ID NO: 6730 - DNA, 1737 bp, synthetic construct
  misc_feature 1..1737: note = source = /note="Description of Artificial Sequence: Synthetic coding sequence"
  source 1..1737: mol_type = other DNA
atgttgctgcttctcttactcgctccactctttctgcggcctcctggcgccgggggcgcccagacacctaatgccacctccgaaggctgtcagatcattcaccctccgtgggagggaggaattcgatacagagggctgacaagggaccaggtgaaggctataaacttcctgcccgtcgattatgagattgaatacgtgtgtaggggcgaaagggaggtcgttggtcctaaggtcaggaagtgtctggccaatggcagttggaccgatatggataccccgtctcgttgtgttaggatatgcagcaagtcatacctgacactcgagaacggcaaagtgttccttactggcggcgatcttcctgcactggacggagcgagggtcgactttcgctgcgacccagactttcacctggtgggcagcagtaggtctatatgctctcagggccagtggtcaacccctaaacctcactgccaggttaatagaacgccacacagcgagcgcagagctgtatacatcggtgctctgttccctatgtctggtggatggcctggagggcaggcatgccaaccagccgttgagatggcactcgaggacgttaactctcggcgagacatcttgccagactacgagttaaagttgatacaccacgactctaaatgtgaccccggacaggccacaaaatacctatacgaactcctgtataacgatccaataaagatcattctgatgcctgggtgcagttctgtcagtaccctcgtggccgaagcggccagaatgtggaacctgattgtattatcttatggttcttcgagtcccgctctgagtaatcgtcagcgattccctacattttttcgtactcacccctcggccacactgcacaacccgacacgagtgaagctgttcgagaagtggggttggaagaaaattgccacgatccagcagactaccgaggtgttcacctcaacgctggacgacttggaggagcgagttaaggaggcaggcatcgaaatcacattccggcagtcattcttttccgaccccgccgtgccagtgaagaacctgaagcgccaggatgcaagaattatcgttggcctattctacgagaccgaagctagaaaggtgttttgtgaggtctacaaagagagattatttggaaaaaagtatgtttggttcctgataggatggtacgccgataattggttcaagatctacgacccatctatcaattgcaccgtggacgagatgaccgaagccgtggagggtcacatcaccaccgagatcgtgatgcttaatccagcaaatactcggtcaataagcaacatgacttcacaggagtttgtggagaagctcactaaacgcctcaaaaggcaccctgaggagaccgggggttttcaggaggcacccctagcgtacgacgctatctgggcactggccctcgctctcaacaaaacatcagggggcgggggtagatccggcgtccggcttgaagattttaattacaacaatcagactattaccgaccaaatctacagggccatgaattccagttctttcgagggcgtgagcggtcacgttgtcttcgatgcatcaggtagccgtatggcctggaccctgatcgaacagctacagggggggtcgtacaaaaaaatcggctactacgattctacaaaagatgatttaagttggtctaaaaccgacaaatggattgtgatctcaaggacacattcccctacatag

SEQ ID NO: 6731 - DNA, 1326 bp, synthetic construct
  misc_feature 1..1326: note = source = /note="Description of Artificial Sequence: Synthetic coding sequence"
  source 1..1326: mol_type = other DNA
atggagtttgagttcgatcgactgagagcattccaggccatgcaggttcactgtaacaatatgcataccttaggagctagactaccaggaggggtggaatgtagatttcgccggggccctgcaatggcctgggagggggagcccatgaggcacaacttggggggtaatctaggggatccacgcgctcgggcggtgtcggtgcctctgggggggagagtggctcggtttttacagtgtcgcttcctcttcgccggaccctggcttctgttctctgaaattagcttcatctcagacgtggtcaataactcgagtcctgcactcgggggcaccttcccacccgctccctggtggccgccgggcccgccacccaccaactttagcagcctcgagctggagcccaggggccagcagcccgtcgccaaggctgaggggtcccccactgctatcctgataggatgcctagtcgcaatcattttactccttctgctcatcatcgccctaatgctatggcgcctgcactggagaagactgctgagtaaagttctggagagccatccccgcacaaggagccccgggcttgtaggcattaggcccacccctttgcccgtcagccctatggctctgcggtgttgctcgcctatccagccaactgcgtcgttttggccccttacacctgttcccttagaagccagggcccccccgcacccacctggccctaacccacctacaccccgcggcgtcacaggcggaaatacatacgccgtgcctgcgttaccgcccggcgctgttggagatgggcctccacgtgtggatttccctcggagtagactgcgatttaaggaaaagttgggagagggacagttcggcgaagtccacttatgcgaagtggattcaccgcaagaccttgtgtcactcgatttcccactcaacgtacggaagggacaccccctgctggtcgccgtgaaaatccttcgcccggacgctactaaaaatgcacgcaacgacttccttaaagaagtcaaaattatgagcagacttaaggaccctaacataattcgactattaggagtgtgcgtgcaagatgaccccctgtgcatgatcacagattatatggagaacggtgacctgaaccagttcctaagcgcccaccagttggaggataaggcagcagaaggagcaccaggagacggccaagctgcccagggcccgactatttcatacccaatgctcctccacgtggccgctcaaatcgccagtggaatgcggtacctcgcgactcttaactttgtccacttctggggcgagaggcacaggttccttcactag

SEQ ID NO: 6732 - DNA, 2685 bp, synthetic construct
  misc_feature 1..2685: note = source = /note="Description of Artificial Sequence: Synthetic coding sequence"
  source 1..2685: mol_type = other DNA
atgtcccttcctcggtgttgcccccaccccttaagacccgaggggtcgggggctatggggccagaggccttatcttcacttctcctcttgctgctggtcgccagcggggacgcagatatgaagggacacttcgacccagcaaagtgtagatatgcgttgggtatgcaagaccggaccatccccgatagcgacatctccgcttctagctcttggtccgactcaactgccgctaggcactcacgccttgagagctcagacggggacggtgcctggtgccctgcggggtccgtatttcccaaggaagaagaatacctgcaagtggacctgcaacgcctgcatctcgtcgccctcgtcggtacgcagggtcggcacgcaggtggtttaggaaaagaatttagcagaagttacagactgaggtattcccgcgacggtaggagatggatggggtggaaggacagatggggccaggaagtcatttctggaaatgaagaccctgagggggtggtgctgaaagatctgggccccccaatggtggccaggctcgtgagattttaccctcgagccgatagagtgatgagcgtgtgtctcagagtcgagctttacgggtgcctgtggcgcgacgggctgctcagctacactgctcccgtagggcaaaccatgtacctctccgaggctgtgtatttgaatgattctacatacgacgggcacacggtcggaggtttacagtatgggggcctaggtcaactggccgatggtgttgttggactcgatgatttcaggaaaagtcaggagcttagagtctggcccggctatgactacgtaggctggagcaaccacagcttctcaagcgggtacgtggagatggaattcgagttcgaccgtctgagggcctttcaggccatgcaggtgcactgtaacaacatgcacacactgggcgcccggttgccagggggagtcgagtgtagattcaggcgtgggccagctatggcctgggaaggtgaaccaatgcgccacaacttggggggcaatctcggcgaccctagagctcgcgccgtatctgttccactggggggacgtgtggcccggttcttgcagtgccggtttctgtttgctgggccctggcttctgttctcggaaataagctttatcagcgacgtggttaacaattcttccccagccctgggaggtaccttcccacctgccccctggtggcctccaggacctcctcctaccaatttttcaagtctagagctggagcccagaggccagcaaccagttgcgaaggccgaaggctctccaaccgccatcttgattggttgtctggtggcaatcatcctgctactgctgttaatcatcgcccttatgctctggaggttgcattggcgtagacttttgtcaaaggcggagcgccgggtacttgaggaagaactcaccgtccacctaagcgtacccggggataccattttgatcaacaatagacctgggccccgagagccgcctccctaccaggaaccgcgaccaagggggaaccccccccactcagcaccttgcgtccccaacgggtcggcttattccggagattacatggaacccgaaaaaccaggcgcacccttgttgccaccgccacctcaaaacagtgtgccacactatgctgaggccgatattgtcaccctgcagggcgtgactggaggtaatacatacgccgttccagccctacctcccggggccgtgggggacggacctccccgggtggatttcccacgcagtagactgagatttaaagagaaactaggggaagggcaattcggggaagtacacctctgcgaagtggattccccccaggacctggtgtcactggattttcctttgaacgttaggaagggccaccctctgctcgtcgctgtgaagatactgaggccagatgcgactaaaaatgctaggaacgatttcttgaaggaggtgaaaatcatgagcaggctgaaggatcctaacatcatacgactgttgggggtttgcgtgcaggatgaccctttgtgcatgatcactgattatatggaaaatggcgatctcaatcagtttctttccgcccaccagctcgaagataaagcggctgagggcgcccccggagacggccaggccgctcaggggcccaccatcagctacccgatgctccttcacgtggccgcacaaatagccagcggcatgaggtacctcgcaacactgaacttcgtgcatcgggatctggctaccagaaactgtttggttggggaaaatttcactataaagatcgcagattttggcatgtccaggaacttgtacgcgggcgactactacagggtccagggaagggctgttctgcctattcggtggatggcttgggaatgcatactgatgggcaaattcacaaccgcgagtgacgtgtgggccttcggggtgacgctttgggaggtgcttatgttgtgtcgcgcccaaccatttggacagttgaccgacgaacaggtgattgagaacgccggcgaattctttcgggaccagggaagacaggtttacctatctcgcccacctgcttgcccgcagggactttacgagctgatgctgcgctgctggtccagggagtctgaacagcggcccccattcagccagctacatcgatttctcgctgaagacgccctgaacaccgtgtag

SEQ ID NO: 6733 - DNA, 216 bp, synthetic construct
  misc_feature 1..216: note = source = /note="Description of Artificial Sequence: Synthetic coding sequence"
  source 1..216: mol_type = other DNA
atgcccgcgggcgttccgatgagtacctatctcaagatgtttgcggccagtcttctggctatgtgcgccggtgcagaggtggtgcacaggtactaccggcccgacttaacaatccccgaaatcccccccaagcggggcgagctgaagaccgaattacttggccttaaagagaggaaacataaaccacaggtttcccaacaagaagagttaaaatag

SEQ ID NO: 6734 - DNA, 2760 bp, synthetic construct
  misc_feature 1..2760: note = source = /note="Description of Artificial Sequence: Synthetic coding sequence"
  source 1..2760: mol_type = other DNA
atgggcccagaggcgctgagctcgctgctgttgctgcttctagtggcttccggagatgccgacatgaagggccactttgaccccgctaaatgtagatacgccctcggcatgcaagatcgaacgatcccagatagcgatatctcagcctcaagctcgtggtcagacagcactgccgcgaggcacagcaggctggagtcctctgacggggacggagcatggtgtccggcaggcagtgtgtttcccaaagaagaagaatacctgcaggtggatctgcaaaggctgcacctggtcgccctagtcggaactcaggggagacacgcaggcggcttaggcaaggaattcagtagatcataccgtcttaggtactcccgggacggtcggcggtggatgggatggaaggaccggtgggggcaggaggttatatccgggaatgaagaccccgagggcgtggtgctgaaggatctcggaccacccatggttgccagactggtgcgcttctaccctcgggccgaccgggtcatgtccgtttgtctacgcgtggagctttacggctgtctttggcgggacggacttctgagttacaccgcaccggttgggcagacaatgtacttgtctgaggccgtctacctcaacgatagtacctacgatggccacactgttggtggtctccaatatggaggcctggggcaactggctgatggggtggtgggattagatgactttcgaaagagccaggagctgagggtctggccaggctacgattatgtgggttggtcaaatcacagtttctcgtcaggctatgtggagatggagttcgagttcgacaggctgcgggccttccaggccatgcaggtgcattgtaacaacatgcacacactcggcgccaggctccctggcggtgtggagtgcaggttcagacgtggacctgccatggcatgggaaggcgaacccatgaggcacaatctcggggggaatcttggtgatccccgggctagggccgtgtctgtgcccttgggcggaagagtcgcaagattcctccagtgtcgtttcctgttcgcagggccatggcttttgttttcagagatctcattcatcagcgacgtggtgaacaactcgagccccgccttggggggcactttcccacctgccccttggtggcctcctggcccgccccccactaactttagtagccttgagctggaacctcggggacaacagcccgtggctaaggccgaaggatctcccacggcaatactgatcggttgcctggtggccatcatacttctgttgctcctgataattgcactaatgttatggcgtcttcactggcgccggctgttgtccaaggcagaacggcgcgtgctggaagaagaactgaccgtccatctctccgtacctggggatactatcttaatcaacaacaggccaggcccaagggaaccccccccatatcaagagccgcgtccacgcggcaatccacctcatagcgctccttgcgtaccgaatggttccgctctccttctgagcaatcctgcataccggctgctgctcgcaacttatgcacgtcctccccgtggtcccggtcccccaacacccgcttgggctaaaccaaccaacacccaggcatactccggcgactacatggagcctgaaaagcccggcgccccactgctgcctccccctccccagaactccgtgcctcattatgcagaagccgacatcgtgaccctgcagggcgtgactggaggtaatacctacgccgtcccggctcttccacccggggccgtcggcgatgggcccccacgagttgatttccctcggtcacggctgcgcttcaaagagaaacttggggagggccagttcggagaagtccacctctgtgaggtggactctccacaggacctggtgagcctggacttccctctcaacgtcaggaagggccaccctctgctggtcgctgtcaagattttaaggccagacgccactaagaatgcttccttttcgctgttttccaggaacgattttctgaaagaagtgaaaattatgtccagactcaaggaccctaacataatacggctgttgggtgtgtgcgtccaggatgaccccctctgcatgatcacagactacatggaaaatggggacctcaatcaatttctctcagctcatcaactggaggataaagccgccgaaggggctcctggcgacggccaagccgctcagggtccaactatctcataccctatgctcttgcacgttgctgcgcagatcgcgagcggcatgcgatatttggcaaccctgaactttgtgcaccgcgaccttgcaactaggaactgcctggttggggagaacttcacgattaagattgctgattttggtatgagccgaaatctctacgcgggcgactattatcgcgtgcaggggcgtgccgtgcttcccatcagatggatggcatgggagtgcatcctgatgggcaaattcacaactgcaagtgatgtttgggcctttggggttaccctgtgggaagttcttatgttgtgtcgcgctcagccttttggacagttgaccgatgagcaggtaattgagaatgccggggagttttttagagaccagggccgccaggtttatctttcgcggcccccggcctgcccccaaggcctctatgagctgatgttaaggtgttggtccagagagtcggaacagcgcccacccttctcacaactgcatcggtttctggcagaggatgctttgaatactgtttag

SEQ ID NO: 6735 - DNA, 447 bp, synthetic construct
  misc_feature 1..447: note = source = /note="Description of Artificial Sequence: Synthetic coding sequence"
  source 1..447: mol_type = other DNA
atgcaaactttccctgtagccggcgcactggatcccgccattctcgacacctcttctcctcaggctctttacactgtactcctgatcgtgctggttatgatgtcactggtgtttggtaaattcgttccagtgaactgggagcctccccagccactgccgttccccaagtacctgcgctgctaccgctgtttgctcgaaaccaaagaactaggctgtctattgggatccgacatctgtttgaccccagccggctcatcctgcattacgcttcataagaagaactcaagtggttcggatgtcatggtgtctgattgtaggtcaaaagaacagatgtctgactgtagcaatactaggacttcaccagtcagcggattctggatattttcccagtactgtttcctggacttctgcaacgaccctcaaaatcgtggcctctataccccatag

SEQ ID NO: 6736 - DNA, 5097 bp, synthetic construct
  misc_feature 1..5097: note = source = /note="Description of Artificial Sequence: Synthetic coding sequence"
  source 1..5097: mol_type = other DNA
atgcgtctgctctggggtctcatttgggcatcctctttttttacactgtctctgcagaagccaaggctgctgctatttagcccatctgtcgtgcatcttggagtaccactgtcggtcggcgttcagttgcaggacgtcccgagaggccaagttgtgaagggcagtgtgttcttgagaaaccctagccgcaacaatgtgccctgcagcccgaaagtggactttacgttaagcagtgagcgtgatttcgctctgctgagccttcaggtgcctctcaaagacgccaaatcttgcggacttcaccaactgctaaggggcccagaagtccaactcgtcgcccacagtccatggttgaaagatagcctctcacggaccaccaatatccaaggcatcaacctgttgttctcctctagacgtggtcatctcttcctgcaaacagatcagcctatctacaaccctggtcaacgggttagatacagggttttcgccctcgaccagaaaatgcgcccctcaaccgatacaatcaccgtgatggtcgaaaacagccacggattaagagtgcggaagaaagaagtgtatatgccttcatctatctttcaggatgactttgtaataccggatattagcgagcccggaacctggaagattagcgcacggttcagcgatggcctcgaatcaaactccagcacgcagttcgaggttaagaaatatgtcctgcctaatttcgaggttaaaattactccgggcaagccctatattttaaccgtgcctggtcacctggacgagatgcaacttgacatacaggctagatacatatacggcaagcccgttcagggggttgcctatgtcagattcggtcttttggacgaggatgggaagaaaacatttttccgtggccttgagagccaaacaaaactggtcaacgggcagtcccatatatccctgtcaaaagcagagttccaagacgcacttgaaaaacttaatatgggtattaccgatctgcagggcttgaggttgtatgtcgccgccgcgatcattgagtaccccggtggggagatggaagaggcagaattgacctcttggtactttgtgagcagccccttttctctggatctgtcaaagactaagcggcacctggtgcctggtgccccatttctcctgcaggcactcgtgcgcgagatgtctgggagtcctgcctcaggcatacccgttaaagtgagcgccacagtgtcgtcacccgggtcagtcccagaggtgcaggatattcaacagaacaccgatgggtctggtcaagtatcgatccccattatcattccacagacgatctctgaactccaattgtctgtcagcgcgggctcacctcatccagctatagctcggttaacagtcgctgcaccgccatcgggaggcccagggtttctgagtatcgagcgaccagattcacgcccccctagggttggcgatactttgaatttaaatctgcgggctgtgggtagtggcgccactttcagccactattactatatgatcctctctaggggccagattgtgttcatgaatcgagaacccaagaggaccctcacctccgtttccgttttcgtggaccatcaccttgccccgagcttctacttcgttgccttctattatcatggggatcaccctgtggccaacagcctccgggtcgatgtgcaggcgggcgcgtgcgaaggcaaactcgaactctctgtggatggtgcaaaacaatatcggaacggggaatccgtcaagcttcatttggaaacagactccctagccttagtagcattgggagcactggacacagcactctatgcagctggttctaagtctcataagccactgaatatgggcaaggtatttgaagccatgaattcctatgacctgggctgcggacccggggggggggactcagcactccaggtttttcaggctgctggactggcatttagtgatggcgaccaatggacactttcacgaaagcggctgtcctgtcccaaggaaaagaccacccggaagaaacggaacgttaattttcagaaggctataaacgagaagcttggtcagtacgccagtcccacagctaaacgttgctgtcaggatggtgtcactcggttgcctatgatgcggtcatgcgagcagcgggctgctcgggtacagcagcctgattgccgggagcccttcctgagctgttgccagtttgctgagtcccttcgcaaaaagtcacgggacaaaggccaggcaggcttgcaaagggctctggaaatactacaggaagaggaccttattgatgaagacgacatcccagtgagaagctttttcccggaaaactggctgtggagggtagaaacagtggacagatttcagatactgactctctggttgccagactcactgacgacttgggagatccacgggctgtccctctcaaagactaagggtctttgtgtcgctaccccagtgcagctgagggtcttcagagaatttcaccttcatctacgactgccaatgtccgttaggagatttgagcagctggagcttaggccagtgttgtataattatctggacaaaaatctgacagtttccgtgcatgtctccccggttgagggcctctgtctggcaggcgggggagggctcgcccagcaggtcctggtgccagccgggtccgctagaccggtcgccttcagcgtggtgccaactgccgcggctgccgtgtctctgaaggtagtggctcggggatccttcgagtttcccgtgggggatgctgtgagcaaagtactgcaaattgagaaggaaggggctattcatagggaggagctggtctatgagctgaatccattggaccaccgcggcagaacactcgaaattcctggcaattcagatccaaatatgattcctgacggggattttaacagttacgttagggtcacggcttcagacccattggatacattgggctccgaaggggctcttagccctggtggggtagccagtctcttgcgcctgccccgaggatgtggggagcagaccatgatttacttggcgccaaccctggccgccagccgctacctcgacaagaccgagcagtggtcaactctgcctccagagacaaaggaccacgctgtggatctgatccagaaggggtacatgaggatacagcagtttcgcaaggccgacggctcgtatgcagcatggttgtcacgtggcagttccacttggctgaccgccttcgtgctgaaggtgctgagtctcgcacaggagcaggtcggcggaagtcccgagaagctccaggaaacctctaattggctccttagccaacaacaggcagacggatcttttcaggatttgtcaccagtcattcataggtccatgcaggggggtctcgtcggcaatgatgagacagttgcgttgaccgcatttgttacaatcgctctgcaccacggcctggctgtgtttcaggatgaaggcgctgaacccctgaaacagagggtggaagctagcatttcaaaggccagtagcttcttaggggaaaaagcctccgccggcttactcggcgcacatgctgccgctattacagcatatgcactcacactcacaaaagcaccggctgatttaaggggcgtcgctcataacaacctgatggcaatggctcaggaaacaggcgacaatctgtattggggttctgtcactgggtcacagagtaatgcggtgagcccgacccccgcacccaggaacccatctgatcccatgcctcaggccccagcgctctggattgagacgactgcctacgccctcttgcatctattactccacgagggcaaggctgaaatggcagaccaggccgcagcctggctcacacgacaagggtcattccaaggcggtttcaggagcacccaagacaccgtgatcgcgctggacgccctgtctgcttattggatcgccagccacacaactgaggagagaggcctgaacgtgaccctttcgtccaccgggcggaacgggtttaagtcccacgcactccagctgaacaacaggcagattagaggtctggaagaggagttgcagttcagcctcggtagtaagattaacgtcaaggtgggagggaactccaaggggaccctgaaagttctgaggacatataatgtgctggatatgaagaacaccacttgccaggacctccagatagaggtgacggtgaagggccacgtcgaatacaccatggaagctaacgaggactatgaagactatgaatacgacgaactgccagcaaaggatgatcctgatgctcccctgcagcctgttaccccactgcagctgttcgagggaaggcgcaaccgcaggcgccgggaagcccccaaactcacgtctctgtcagaccggtatgtttctcactttgaaacagagggaccacacgtgctgctgtactttgattctgtgccaacttcgcgcgagtgtgtcggattcgaagccgtccaggaagtgccagtgggactcgtgcagccggcaagcgcgaccctatatgattattacaaccccgagagacgctgttcagttttctacggcgcaccaagcaaaagccgactgctggcaacactctgcagcgcagaagtttgtcaatgtgcagaggggaagtgcccccgccagagacgagcccttgaacgggggctccaggatgaggacggataccggatgaaatttgcatgctattacccaagggtcgagtatgggttccaggttaaagtgctcagagaagacagtcgggctgcgttccgcctcttcgagactaaaattacacaggtgttgcatttcaccaaagacgttaaggccgctgccaatcagatgcgaaatttcctcgtcagagcaagttgcagactgcgcctggaacccggcaaggagtatctaatcatgggccttgatggagccacatacgatctggaggggcacccccaatacctcctggattctaattcgtggattgaggagatgccatctgagagactttgtcgctccactcgccaaagagcagcttgcgcgcagttgaacgacttcctccaggagtatggtacgcagggatgccaggtgtag

SEQ ID NO: 6737 - DNA, 1986 bp, synthetic construct
  misc_feature 1..1986: note = source = /note="Description of Artificial Sequence: Synthetic coding sequence"
  source 1..1986: mol_type = other DNA
atggatctggttctgaagaggtgcctcctgcatctggctgttattggagccctgttggccgtgggagcgacaaaagtgccaaggaaccaggattggcttggtgtgtccagacagctccgaacgaaggcctggaataggcagttataccccgaatggaccgaggcacagcgcctcgattgttggcggggagggcaggtctccctcaaagtctctaacgacgggcctaccttgatcggggccaacgcttcattttcaatagctttgaattttcccggcagccagaaggtactgccggatgggcaggtcatctgggtcaataatactattattaacggcagccaggtgtggggcggtcagcccgtgtacccgcaggagacagacgacgcttgtattttcccagatggaggcccatgtccgtcaggctcttggagccagaaacggtctttcgtgtacgtgtggaagacatggggacagtattggcaggtgcttggaggtccagtttccggcctgtctatcggcactgggagagccatgctgggaacgcacacaatggaggtaacagtctatcaccggcgcgggtctcgatcctacgtgcctctggcacattcatctagcgcttttaccattaccgatcaggtgcccttctcagtgtctgtgagccagctgcgggccctggacggggggaacaagcattttctccggaaccagcctctcacctttgcccttcaattgcacgacccttccggctatttggcagaagccgatttgtcctacacatgggatttcggtgatagcagcggcaccctgatctctcgggctttagtggtgacccacacctatttggagccaggccccgtcaccgcccaggtggtactgcaggccgcaatcccccttaccagctgcggatccagccccgtgcccggaacgaccgacggacacagacctactgctgaagcccccaacaccaccgccgggcaggtgccaactacagaggtggtaggcactacccctggccaggcacctactgcagaaccgagcggcaccacatcagtgcaggttcccactactgaggttatcagtacggcgccagtacagatgcccactgcggaaagcacaggcatgacacccgagaaggttcctgtgtcagaggtaatggggaccacgctcgccgaaatgagcacccctgaggctacaggtatgactcctgccgaggtctccattgttgtcttgtctggcacgacagcagcccaggttacaacaactgagtgggtcgaaacaaccgcgagggagctgcccatcccagagcccgagggcccggatgcttcatccatcatgtcgactgagagcattacaggctcactaggccccctcctggatgggaccgcaacgttgcggttggtgaagcgccaagtcccattagactgtgttctctacagatacggaagtttctcagtaacgttggatatcgtacaagggattgaatccgccgagattctgcaggcggtaccaagtggggaaggtgatgcctttgagttgactgtgagctgccaaggcggattgcctaaggaagcatgcatggaaatttcttcccctgggtgtcagcctcccgcccagcgcctgtgtcagcccgtcttaccgtcccccgcttgccaactcgtgttacaccagattcttaagggggggtctggcacttactgccttaatgtgagcctcgcagataccaatagcctagcagtcgtgagcactcagctcattatgcctggacaggaggctggtctcgggcaggtgcctcttatagtgggaatccttctggtgctgatggctgtcgttctggcctccctgatctataggaggcggcttatgaagcaggacttctccgtccctcagttacctcactcctcttcacattggctaaggcttcccaggattttctgctcatgcccaataggagagaatagtcccctgctcagtgggcagcaggtgtag

SEQ ID NO: 6738 - DNA, 516 bp, synthetic construct
  misc_feature 1..516: note = source = /note="Description of Artificial Sequence: Synthetic coding sequence"
  source 1..516: mol_type = other DNA
atgaggcataatctgggcggcaatctgggggacccgagggcccgcgctgttagtgtccctctgggcgggcgggttgccagattccttcagtgccgcttcctcttcgccggtccctggctgctgttctccgaaatctccttcatctctgacgtcgtgaataattcaagccccgccttaggaggcacttttcccccggcgccttggtggcctcctggtcctcctcctaccaatttctcatctctggaactagaaccccgggggcagcagcccgttgcgaaagcagaaggaagcccaactgccatacttatcggctgtctggtggccatcatcctgttgctcctgctaattattgcgctgatgctctggagactgcattggagacggttattatccaaggtcttagaatcacatcccagaaccagaagtcccggtctggtgggaatacgccctaccccgctccccgtgtcccctatggctctggtgcatctatgtgaagtggattccccacaagactag

SEQ ID NO: 6739 - DNA, 1986 bp, synthetic construct
  misc_feature 1..1986: note = source = /note="Description of Artificial Sequence: Synthetic coding sequence"
  source 1..1986: mol_type = other DNA
atggacctggtcttgaaacgctgcctcctgcacctggcagttataggggcccttctcgccgtcggagccactaaggtccctaggaaccaggattggcttggggtctctcggcagttaagaaccaaggcatggaatagacagctttaccccgaatggactgaagcccagcgcctggactgttggagaggcgggcaggtctcactgaaagtgtctaacgatggccccacccttattggtgcgaacgcctcattctcaattgccttgaatttcccggggagtcaaaaggtgctccctgacggccaggtcatctgggttaacaacaccattatcaatgggagccaggtgtggggtggacaacccgtgtacccccaagagacagatgacgcatgcatattccctgacggcggaccctgtccatcaggaagctggagtcaaaagcggagttttgtttacgtgtggaagacctggggccagtattggcaggtgttaggcggacccgtctccggactgagcattgggacgggaagggctatgctggggacccacacaatggaggtcacagtttaccacagacgggggtcccgcagctacgttcccctagctcattctagctccgcctttactattaccgaccaagttcccttttcagtatccgtgagccaactacgggcacttgacggcggcaacaaacacttcctcagaaatcaaccccttactttcgcccttcagctacatgacccaagtgggtatctggcggaggccgacctgtcctacacttgggattttggagactcaagtggtaccctgataagcagagcattggttgtcacccatacttacctggagccaggcccagtgacagcccaggtcgtgcttcaggcagctattcctctcacaagctgcggctccagtccggtacccggcactaccgacggacataggcccacagctgaggcaccaaacacaaccgccgggcaagtgcctactacagaggtggtgggaaccacacccggtcaggcgccaacagctgagccttctggtaccacatcagtccaagtgccaacaaccgaggtcatatccactgcccctgttcagatgccaacagctgaatctacgggcatgacccccgagaaggtgcctgtgagtgaggtgatgggaacaacgctggccgaaatgtcaacaccagaagctacgggaatgacacctgcagaggtgagcattgtggtgctcagtggtacgactgctgcccaagtcactaccaccgaatgggtcgagacaaccgcgagagaactacctatcccagaaccagagggccctgatgccagctccattatgtctactgaatccatcaccggctcgttaggacccctgcttgatggcaccgctacgctgcgtctggtaaagagacaggtcccactcgattgcgtgctgtaccgctatggatccttctcggtgaccctcgatattgtgcagggaattgagtcagctgagattttacaggccgtcccttccggtgagggggatgccttcgagttgacggtctcttgtcagggaggacttcctaaagaggcttgtatggagatcagctcaccaggttgtcagccaccagctcagcgactttgtcaacctgtgctcccttcacctgcttgtcagctggtcctgcaccagattttgaagggcggatccggaacatattgcctgaacgtttccctcgctgacaccaattctctggccgtagtgtctacgcagctgattatgccagggcaggaggcaggcctggggcaggttcctctgatcgtcggcatcttattggtcctcatggctgtggtcctagcctccctgatatacaggagaagattgatgaaacaagatttctccgtgcctcagctgccacactctagtagccactggctgcgtctgcctagaatcttttgctcctgtcccattggagaaaattctcctttgctgagcggacagcaggtatag

SEQ ID NO: 6740 - DNA, 1737 bp, synthetic construct
  misc_feature 1..1737: note = source = /note="Description of Artificial Sequence: Synthetic coding sequence"
  source 1..1737: mol_type = other DNA
atgttgctcctgttgctgctggccccgcttttcctgcgccctcctggagctggcggggctcagacaccaaatgccacaagcgaaggatgtcagatcattcacccaccctgggaagggggcattagatatcgggggctgaccagggaccaggttaaagccatcaacttcctgccggtagactacgaaatcgagtatgtctgtcgtggcgaacgggaggtcgtggggcctaaggtgcgtaagtgtctggcaaacgggtcatggaccgacatggataccccaagtagatgcgtccgcatctgctctaaatcctatctcaccctcgaaaatggcaaagtgttcttgacaggcggtgatttacccgcattggatggggccagggtggactttcggtgcgaccccgacttccacttagttgggtcatcccggagcatatgcagccagggccagtggtctacacctaagcctcactgtcaggtgaataggacacctcatagcgagaggcgcgcggtctatattggggccttattccccatgtccggggggtggccagggggccaggcatgtcagcccgctgtcgaaatggccctcgaagatgtgaattccagacgggatatccttccagattacgagctgaagttgatccatcatgactctaaatgtgatcctgggcaggccactaaatatctctacgagctgctttataacgaccctatcaagattatccttatgccgggttgcagcagtgtttctaccctcgtagcagaggctgcccgcatgtggaacctgattgtgctgtcctatggaagcagcagccctgcattgtcaaaccgccaacggtttcccacttttttcaggactcatccctctgccaccctgcacaacccgactagagttaagctgtttgaaaaatggggctggaagaaaatagccacaatccagcagactaccgaggttttcacatcaaccctggacgatctggaagagcgcgtgaaggaagccggcatcgagataacattcaggcagagctttttttctgaccctgccgtgccagtcaaaaacctaaagaggcaagacgcccgcattatagtgggcctgttctatgaaacggaagcccggaaggtattttgtgaagtttacaaggaaagactgttcggcaagaagtacgtgtggttcctgatcggttggtacgcagacaattggttcaagatttacgatccgagcatcaactgcacagtcgacgagatgacagaggccgtggaaggccatataaccacagagatcgtgatgttgaatcctgccaacacccggagcatctctaacatgacgtctcaggagttcgttgagaaattgactaagcggttgaagcggcaccctgaagaaactgggggcttccaggaagcccccctggcctatgacgccatatgggctttggccttagccctcaacaagacaagtgggggcggtgggcgctcaggtgtcagactcgaagatttcaattataataatcagaccattaccgatcagatctacagagccatgaatagctcctctttcgaaggggtgtccggccatgtggtatttgacgcgagtggtagtaggatggcttggacccttatcgagcagctccagggtgggagttataaaaaaattggatattatgatagtacaaaggatgatcttagctggtctaagaccgacaagtggattgtgatttccagaactcacagccctacgtag

SEQ ID NO: 6741 - DNA, 1326 bp, synthetic construct
  misc_feature 1..1326: note = source = /note="Description of Artificial Sequence: Synthetic coding sequence"
  source 1..1326: mol_type = other DNA
atggagttcgagttcgatcgtcttcgagcttttcaagcaatgcaagtgcactgtaacaacatgcacaccttgggggcacgccttcctgggggcgtcgaatgccgatttcggcgaggccctgcaatggcctgggaaggggagccaatgcgacacaatctgggcggcaacctcggtgacccgagggctagagccgtgtccgttccactaggcggacgagttgcacggttcctgcagtgccgcttcctgtttgccggtccatggcttctattttccgagatttcatttatctctgatgttgtcaacaactccagtcctgctctgggaggaaccttcccacctgccccgtggtggccccccgggcctcctcccaccaacttctccagcctcgaactggagccaagaggtcagcagcccgtcgctaaagcggagggcagccccacagccatcctgataggatgcctcgtggcaatcattctgctgctactgcttattattgctttgatgctctggagactgcactggcgccgcctgctgagcaaggtgctagaaagccaccctcgcaccaggtctcctgggctggttggcataaggcccacccccttgcccgtgtcgcctatggccctgagatgttgttcgcccattcagcccactgccagcttctggccactcacgcccgttcctttggaggccagggcaccaccgcatcccccgggaccgaacccccccaccccccgcggcgtgactggcggtaacacctacgctgtgccagctctgcctccgggcgccgtaggcgatggccccccacgggtcgattttccgcggagcaggctgcgcttcaaagaaaaactgggagaggggcagttcggggaggtgcacctctgtgaagtggactctcctcaagatctggtgagcttggactttccactcaatgttcgcaaaggacaccccttactggtagctgtgaagatcttgagaccagatgccactaagaacgcccggaatgacttcttgaaagaggtcaaaatcatgtcacgtctaaaggatcccaacatcatacgcctgttgggagtctgcgtccaggacgacccactatgcatgattacagattacatggaaaatggggacctgaaccagttcctaagcgcccaccagttggaagacaaagcggccgaaggcgcacccggtgacggccaagcagcccagggccctactattagctatccaatgctcctccatgtcgcggcacagattgcgtccggcatgaggtatcttgctactctgaactttgtccacttctggggtgagagacatcggttcctccactag

SEQ ID NO: 6742 - DNA, 447 bp, synthetic construct
  misc_feature 1..447: note = source = /note="Description of Artificial Sequence: Synthetic coding sequence"
  source 1..447: mol_type = other DNA
atgcagactttcccagttgccggggcgctggaccctgccatccttgacactagctcccctcaggcgctatatacagtactcttaatcgtgttagtgatgatgtcgctggtattcggtaaatttgtcccagtgaactgggagccacctcaaccattgccctttccaaagtatctgaggtgttataggtgtctgctggagaccaaggagctggggtgtctcttaggaagcgatatttgcctgacacccgccggttcttcatgtattactctgcacaagaagaacagctcagggagtgatgtcatggtgagcgactgccgatccaaagaacaaatgtcggactgttcaaacacccgtaccagccccgtaagcggattctggatcttcagccagtactgctttctcgacttttgtaacgacccccaaaatcgcgggctttacaccccgtag

SEQ ID NO: 6743 - DNA, 732 bp, synthetic construct
  misc_feature 1..732: note = source = /note="Description of Artificial Sequence: Synthetic coding sequence"
  source 1..732: mol_type = other DNA
atgggccccgaggcgctgtcctccctgctgttactgcttctggtcgcgagcggcgacgccgatatgaagggacactttgatcctgcgaagtgccgctacgccctgggcatgcaggatcggacaattcccgatagcgacatcagcgcctctagtagctggagtgatagcaccgcggcccgacattcacgccttgagagctctgacggggacggagcctggtgccccgccggaagtgtatttccaaaggaagaagagtatctccaggtggaccttcagcggctccatctcgtcgcacttgtggggacccaaggccggcatgcggggggtctgggcaaggagttcagtcgctcctatcggctccgatacagcagagacggccggcgctggatgggctggaaagatcgctggggccaagaggtgatctcgggtaacgaggatcccgagggcgtggtgctcaaggacctgggaccacccatggtagcaagactggttaggttttatccccgagccgacagagtgatgtccgtgtgcctgagagtggaactgtacggatgtctatggagagactgtagcatgggggtctgggcttcgtggcagatggtctggtgggggtggatgacgcttggtagggtcaggagttgcggcagcgggcaagcaatgaccatgtgggacggagccacaacagcctcacccgtggccatgtggagatggagtctgtcactgacggggtag

SEQ ID NO: 6744 - DNA, 732 bp, synthetic construct
  misc_feature 1..732: note = source = /note="Description of Artificial Sequence: Synthetic coding sequence"
  source 1..732: mol_type = other DNA
atggggccagaggctttgtcttctctgcttctgctactgcttgtcgcctccggtgacgcagatatgaagggacattttgatcctgctaagtgtcgctatgccctgggcatgcaggacaggacgatccctgacagcgatatcagtgcctcatcttcgtggagtgactctacagccgcccggcactcaaggctggaaagttcagacggcgacggggcatggtgtcctgccggatctgtgttccccaaggaagaggagtacctccaagtggaccttcagcggctccatctggtagctctggttgggacccaggggcgccacgcaggaggcttggggaaggaatttagccgcagttaccgcttgcgttacagtagagatggaagaaggtggatggggtggaaggaccgatgggggcaggaggtcatttcaggcaatgaagatccagagggcgtggtccttaaagaccttgggcctcccatggtggcgcgactcgtgcggttctaccctcgcgccgaccgtgttatgagcgtttgtttgcgcgtggagctatacgggtgcctgtggcgcgactgttctatgggtgtttgggcctcatggcagatggtgtggtggggatggatgacgctggggagggtgcggtcatgcggaagcggacaggcgatgactatgtgggacggcgccaccaccgcaagccccgtggccatgtggagatggagcctgtccttaaccggctag

SEQ ID NO: 6745 - DNA, 1224 bp, synthetic construct
  misc_feature 1..1224: note = source = /note="Description of Artificial Sequence: Synthetic coding sequence"
  source 1..1224: mol_type = other DNA
atgaggctgctggcctggctgatctttcttgccaattggggcggcgcaagagctgagcccggaaagttttggcacatcgctgacctgcacttggatcccgactacaaagtctccaaggacccttttcaggtttgtcccagcgctggttcccaacccgtacctgacgcaggcccctggggcgactatctgtgcgactctccatgggcactaatcaactcttccatttacgcgatgaaggaaatagagccggagcctgacttcattctgtggactggagacgatacgccgcacgtgccagatgaaaaactcggcgaggcagctgtgttagaaattgttgaaaggctgactaaattgattcgagaggtgttcccgggcgccttttattgcgaaaagctcccaggcccgtcaggcgctgggaggatcgtcgttctaaacacgaatctttattacactagcaatgccctgacagcagacatggcagacccaggccagcagttccagtggctggaggacgtgttgaccgacgcctcaaaggccggcgatatggtatacatcgtgggacatgtgccccccggctttttcgaaaaaacacaaaataaagcctggttccgcgagggattcaatgagaagtacctgaaggtggtgcgcaaacaccacagagttattgctggtcagtttttcggacatcaccatacagactcttttcgtatgctttacgatgatgccggtgtgcccatctccgcaatgtttataacaccgggggttaccccatggaaaaccacactgcctggtgtggtcaatggagctaacaatcctgctatccgggtgttcgagtacgatcgtgcgactctgtccctgaaagatatggtgacatatttcatgaatctgagccaagccaatgcgcaagggactccaaggtgggaactcgaataccagctgaccgaggcctatggcgtgccagacgcatccgcccatagtatgcacaccgtccttgataggattgccggcgatcagagtactctgcagagatactatgtgtacaattctgtgtcttacagcgcaggtgtgtgcgacgaggcttgctcaatgcagcacgtatgtgctatgcggcaagtagacattgacgcttatacaacatgcctgtacgcaagtgggaccaccccagtcccgcagctccccctcctgctgatggcactacttggactctgcactttggtactctag

SEQ ID NO: 6746 - DNA, 756 bp, synthetic construct
  misc_feature 1..756: note = source = /note="Description of Artificial Sequence: Synthetic coding sequence"
  source 1..756: mol_type = other DNA
atgccacatttggcgtccctgtttacagcctctagtcgttgttgtccacatcctcttcgtcctgaaggcagtggggctatggggccagaggcactcagctccctgcttctgctgctcctcgtagcaagtggggatgcggacatgaagggacacttcgatcctgcgaagtgtcgctatgccctcgggatgcaagatcgaacaatccccgattctgatatctctgcctctagttcttggagcgactctaccgccgcacgccacagccgcctggagagctctgacggagacggggcctggtgccccgcgggctccgtgttccccaaggaggaagaatacctccaggtggacctccagcgtctccatctcgtggccctcgtggggacgcagggaaggcatgcgggaggacttggcaaagaattcagcagaagctaccgactgcgatacagccgggacggacgccgatggatgggctggaaggatagatggggacaagaagtgatctcaggcaacgaagaccctgagggagtggttttgaaggacctaggccctcctatggtagcccggctcgttagattttatccgcgtgccgaccgtgtcatgtcagtgtgcctccgggtagagctgtatgggtgtctctggcgaggcgagtggctgtccttcctggggatatgtttcctgtccaggggcctggagggcggggaatgcggggagtgggcgtcacgcattccctcacctgcaggtaaactgagcctctag

SEQ ID NO: 6747 - DNA, 756 bp, synthetic construct
  misc_feature 1..756: note = source = /note="Description of Artificial Sequence: Synthetic coding sequence"
  source 1..756: mol_type = other DNA
atgccacaccttgcatccttgttcactgcctcatcccgatgttgcccacaccccctgcggcccgaaggatctggagccatggggccagaagcactgtccagtctgcttctcctcttgctggtcgcctccggagacgccgatatgaaaggtcactttgaccctgccaaatgtcgctatgcccttggcatgcaggacagaactatcccagactccgacatctccgcttcttcgtcctggagcgattctaccgctgcgcggcattccaggctcgaatcgtccgatggggacggagcctggtgtccagccggaagcgtgtttcccaaagaggaagagtacctccaagtggacctgcaaaggctccacctggtggctctggtgggaactcaaggacgccatgcaggcggcttaggcaaggagttctctaggtcttacaggctgaggtatagcagagacggccgaaggtggatggggtggaaggatagatggggacaggaagtaatcagcggcaacgaagacccagagggtgttgtgctgaaagacctggggcctcctatggtggcgcggttagtccggttctatcctcgggcggaccgcgtgatgtcggtatgcctcagggtcgagctgtatgggtgcctctggcggggtgagtggctgtccttcctgggaatttgcttcctgagccgaggtcttgaaggaggagagtgcggtgaatgggcttcccgtatccccagccccgccggaaagctgtccctgtag

SEQ ID NO: 6748 - DNA, 456 bp, synthetic construct
  misc_feature 1..456: note = source = /note="Description of Artificial Sequence: Synthetic coding sequence"
  source 1..456: mol_type = other DNA
atggatctggtgctgaaacgttgtctactccatctcgcagtgattggagccctgctggccgtgggggccactaaagtgcccaggaatcaggattggctcggtgtgtcacgccagctccgcactaaagcttggaaccggcagctttatccagagtggacagaggcacagcgtcttgactgttggcgcggcggacaggtgagtctcaaagtcagcaacgacggccccacactaatcggcgctaacgcgagcttctcaatagctctcaatttccctgggagccagaaggtgcttcccgatgggcaagttatctgggttaataatactattattaatggctctcaggtctggggaggccaaccggtatatccacaggaaaccgatgatgcttgcatatttcccgacggaggaccctgtccgagtggctcgtggtcccaaaagagatcttttgtatattag

SEQ ID NO: 6749 - DNA, 216 bp, synthetic construct
  misc_feature 1..216: note = source = /note="Description of Artificial Sequence: Synthetic coding sequence"
  source 1..216: mol_type = other DNA
atgccagccggagttccgatgtctacgtacctgaaaatgtttgcggccagccttctggcaatgtgtgctggcgcagaagttgtgcatcggtactatcggccagacctgactatccccgagatccccccgaaaagaggggagctgaaaaccgagctgctgggcctgaaggagagaaaacataagccgcaggtgtcacaacaggaggaacttaagtag

SEQ ID NO: 6750 - DNA, 447 bp, synthetic construct
  misc_feature 1..447: note = source = /note="Description of Artificial Sequence: Synthetic coding sequence"
  source 1..447: mol_type = other DNA
atgcagacattcccggtggccggagccctggacccagctatacttgacacctcaagcccacaggccctctacacagttctcctcattgtgctagtaatgatgagtctggtctttggcaaattcgtgccagtgaactgggaacctccacagccacttcccttccctaagtaccttaggtgttacaggtgcctgttagagacaaaagagctaggttgtcttctgggttctgacatctgtcttacacctgccggaagctcatgcataactctgcataaaaaaaactctagtgggagtgatgtcatggtctcagattgccgctctaaggagcaaatgtccgactgttcaaacacgcggacgtctccggtaagcgggttttggatcttctcccagtactgttttctcgatttttgtaatgatccccagaatcgaggactttataccccctag

SEQ ID NO: 6751 - DNA, 447 bp, synthetic construct
  misc_feature 1..447: note = source = /note="Description of Artificial Sequence: Synthetic coding sequence"
  source 1..447: mol_type = other DNA
atgcagacattccccgtcgccggcgccctggacccagcaatcctggacacaagcagtcctcaggctctctataccgtcttgttaattgtgctggtaatgatgtctctagtatttggcaagtttgtgccggtgaactgggagccaccgcagcctttgcccttcccaaaatacctgaggtgctaccggtgcctgctggagaccaaggagttggggtgcttgctgggatccgatatctgtctgactcctgcggggtccagttgcattaccctgcacaagaaaaattcttcgggctcagacgttatggtgtcggattgcagatccaaggagcaaatgagcgactgtagtaacactaggacaagtcctgtctcagggttttggattttttctcagtactgctttctcgatttctgcaatgatccccagaaccggggactgtacacgccctag

SEQ ID NO: 6752 - DNA, 1326 bp, synthetic construct
  misc_feature 1..1326: note = source = /note="Description of Artificial Sequence: Synthetic coding sequence"
  source 1..1326: mol_type = other DNA
atggaatttgaattcgatagactgagagcatttcaggccatgcaggttcactgcaacaatatgcacaccctgggggccagattgccaggaggagtcgaatgtcggttccgcagaggtcctgcgatggcgtgggagggagaacccatgagacacaatttgggggggaatctcggagacccccgggcccgggccgtttccgtgccactgggtggacgggtcgcacgcttcctgcagtgtcgttttttgttcgccgggccatggctgctgttcagtgaaatctcctttatatcagacgtggtcaacaacagttcccctgcccttgggggcacttttcctccagccccatggtggcctcccggccccccccctactaacttctcgagcctggaactggagccgcggggccagcaacctgtggccaaagccgagggatcaccaactgcaattctcataggctgtctcgtggcaatcatcctgttactactgctcattatcgcactgatgctgtggcggctacactggagaagactactgagcaaggtcctcgagtctcacccacgaactagatctcccggattagtaggcatcagacccactcccctccccgtatctcctatggcactccgctgctgttcacccatccagccaactgcctccttttggccgcttaccccggtccccctggaggctcgggccccaccacacccacccgggcccaatccacccactcccagaggtgttaccggcggaaacacttacgccgtgcccgcactgcctccaggggccgttggcgacggtccacctcgcgtcgattttcctagatctagactgaggttcaaagaaaagttaggcgagggccagttcggtgaggtccatctttgcgaggtagactcaccccaggacctcgtctctctcgactttccgctgaatgtgcgcaaggggcatccgctcctggtggccgtgaagatcctccggcccgatgccacgaaaaatgcccggaatgacttcctgaaggaggtcaagatcatgagtaggctgaaagatccgaacataatcagattactgggtgtttgtgtccaggatgacccgctgtgtatgattaccgattatatggagaacggtgacttgaatcagtttctgtcagctcaccagctcgaggataaagccgcagagggcgcacctggagatggtcaggcggcgcagggaccaactatttcataccccatgctgttacatgttgctgcccagattgcttctggaatgcggtacctggcgaccctgaatttcgtgcatttctggggcgaacgccaccgattccttcattag

SEQ ID NO: 6753 - DNA, 2067 bp, synthetic construct
  misc_feature 1..2067: note = source = /note="Description of Artificial Sequence: Synthetic coding sequence"
  source 1..2067: mol_type = other DNA
atgctgcccaccgaagtgccgcagtctcaccccggtcccagcgccctgctgctgctgcagttgctgctcccacccacctcagctttctttcccaatatctggtcccttcttgctgctcccggaagcataactcaccaggacctgactgaagaagcagccctcaacgttacactgcagttgttcctggagcagccaccccctgggaggccccccctgagactcgaggatttcctcggccggactctgctcgctgatgacctgttcgcagcatactttgggcctgggtcaagcagacgtttcagggcagcactgggggaagtcagtcgtgcgaacgcagctcaggacttcctgcctacaagcagaaacgatccggacctccattttgatgctgagcgtctagggcaaggccgggccagacttgtgggggccctgcgcgaaacggttgtggcggcaagggccctcgaccacacactcgcccgccaacggttgggagcagcgctccatgctcttcaggatttttatagtcactcgaattgggtggaacttggcgaacagcagcctcacccacatctgctatggcctcgccaagaacttcaaaacctcgcccaggtggcggacccgacatgctccgactgcgaggaactctcttgccccagaaactggcttggttttacgctactcacatctgggtatttcggaacacacccgccgaaacctccaggaaagtgttctcacggagggcacttcgaccgtagttcctctcaaccacctcgtggcggcatcaacaaggatagcacctctccaggattcagcccacaccatatgctgcatttacaggctgcaaagttagctcttctagcctcgatccaggccttctctctactacgcagcaggctgggggaccgggatttctccagactgttggacatcacccccgcctcaagcctgagtttcgtgctggacaccaccggtagcatgggtgaggaaatcaacgcagcgaagatccaggcccgtcacctcgtggagcagaggcgtggaagccccatggagcctgtccactacgtgctggtacccttccacgatccgggcttcgggcccgtatttaccacttctgaccccgacagcttctggcagcagcttaatgaaattcatgcactgggcggcggggatgagccggaaatgtgcctttctgcgctgcagcttgccctgctgcataccccccccttgtcagacatctttgtgttcacagatgcttctccaaaggatgcattcctgacgaaccaagtggagagtctgacgcaggaaagaaggtgcagggttacctttctggtcacggaggatacctcacgcgtgcagggaagagcccgaagggagatactgagtcctcttagatttgagccctacaaggccgttgcactggcctcaggcggtgaggtgatctttacgaaagatcagcatatccgggatgtggcagccatcgttggtgaaagtatggcggccttggttaccctcccccttgatcctcccgtggttgtgcctggtcagcccctcgtctttagcgtggatggattgttacagaaaataaccgtcagaatacatggcgacatttcctccttctggattaagaacccagccggagtctctcagggacaggaggagggcgggggccccctgggtcatacacgtcgcttcggtcagttctggatggtgacaatggatgaccctccacagactgggacctgggagatccaggtgacggctgaggatactcctggggtgcgcgtgcaggctcagacctcgcttgacttcctgtttcactttggcatccctatggaggacggtccacacccaggcctatatcctctgacacaaccggttgcgggtttacaaacgcaactacttgtggaatctcagtcctggggcagctctgctgcctttctgcctcggcatccatcccgagggcctcgtggttgtagaacaaggccgggtgcactgggtgccagaggaacatccggggccaggtctcccaggtccctagctgtggcccacgcggctgtccatccatag

SEQ ID NO: 6754 - DNA, 1326 bp, synthetic construct
  misc_feature 1..1326: note = source = /note="Description of Artificial Sequence: Synthetic coding sequence"
  source 1..1326: mol_type = other DNA
atggagtttgaattcgaccggcttcgtgccttccaagctatgcaggtccactgcaacaatatgcatacactcggagcaaggctccctggtggggtggaatgtaggtttcgccgcggccccgctatggcgtgggagggagagccgatgagacataaccttggcggcaacctcggggaccctcgcgccagggctgtctcggtgcccctgggcggccgggtggctagattcctgcagtgcagattcctgttcgctggtccttggctgctgttcagcgaaatcagcttcatttctgacgtcgttaataacagttcacccgcccttggaggcacctttcctcccgccccttggtggcctcccggtccgcctccgacaaatttttcctctttggagctagagcctagggggcaacagcctgtggcaaaagctgagggcagccccaccgctatcctgattgggtgtctcgttgcgattatcctactgctactcctcatcatcgccttgatgctgtggcgtctccattggagaagactgctctccaaggtgctcgaatctcaccctaggaccagaagccccggattggtaggaattagacccaccctcttgccagtgagcccaatggctttgagatgctgcagccccatccaacccaccgcatcattttggccactaacacccgtccccctcgaggcgagggctcctccacaccctccaggacccaatccgcccactcctcgtggtgtgacaggtggcaacacatatgctgttccagctctgccaccaggggccgtaggggatggtccaccacgggttgactttcctcgtagtcggctgcgtttcaaagagaaacttggcgaaggccagtttggagaagtgcatctgtgcgaagtggacagtcctcaggatctcgtgtctctggacttccccctcaatgtacgcaaaggccatcccctcttggttgcggtgaagatcctccgaccggatgccacgaaaaatgccagaaatgacttcctcaaggaggtcaaaatcatgagcaggctgaaagaccctaacatcataaggctgctcggggtgtgcgtacaggatgaccccctgtgcatgattaccgattatatggagaacggcgaccttaatcagtttttgtccgcccatcagctggaggacaaagccgccgagggggcacctggcgatggccaggcagcgcagggaccaaccattagttaccctatgcttctgcacgtggcggcccagatagcaagcggtatgaggtatctggcaaccttaaactttgtgcacttctggggtgagaggcatcgcttcctgcactag

SEQ ID NO: 6755 - DNA, 2559 bp, synthetic construct
  misc_feature 1..2559: note = source = /note="Description of Artificial Sequence: Synthetic coding sequence"
  source 1..2559: mol_type = other DNA
atgctgcccactgaagtgcctcaatcgcatcctggaccaagcgctcttttgcttctgcagctgctccttcctcctacatccgccttttttcccaatatttggagcttgctggccgctcccggaagcattacacaccaagacctcaccgaggaagcagcgcttaacgtaacgctacagctgtttctggaacaacccccccccggccgacctcccctgcggctcgaagactttcttggtcgaaccctgctggcggatgaccttttcgccgcctacttcggaccagggtcgagtaggcgcttcagggcggcactgggagaggtttcaagagccaacgcagctcaggattttttaccaacttcaaggaacgatcctgatctgcatttcgatgctgagaggcttggtcaagggcgggcgcgcttagtgggtgccctgagagaaactgtggtggccgccagagctctagatcacaccttagcccggcaacgactaggcgccgcgctccacgctctgcaggacttttacagccactccaactgggtggagctcggcgagcagcagcctcacccccacctgctctggccccgacaggagttgcagaatctggcccaggtggcagaccccacttgtagtgactgcgaagagctctcctgcccccgtaactggctgggtttcactcttttaacaagcgggtacttcggtactcatcctcctaagccacccggaaagtgttcccacggagggcactttgacaggagttcaagtcagcctcctcgcggcggtattaataaagactcaaccagtccaggcttctcaccccatcatatgctacatctccaggctgccaaactggccctgctagctagcattcaggcattcagcctgctgagatcaagacttggagatcgggacttctctcggctgctggatattacacctgcctcctcactgtcatttgtcctggataccactgggtctatgggggaggaaattaatgcagccaagatccaggcaagacacttagttgaacagcggagagggagtccaatggaacctgtgcattacgtacttgttccatttcacgatcctgggttcgggcccgtgtttaccacttcagatcctgattcgttttggcaacagcttaatgagatccatgccctaggcggaggggatgagcctgaaatgtgcctcagtgctttgcagttagctctgttgcacaccccccccttatcagatatctttgtgtttacagacgcctcccctaaggacgctttcctgaccaaccaggttgagagtctcacccaagaaagaagatgccgggtgacatttcttgtgaccgaagatacaagccgcgtacaggggagggcaaggcgcgagattctaagcccccttaggttcgagccttacaaagcagtagcactcgccagcggtggcgaggtcattttcaccaaagatcagcatattagggacgtcgccgccattgttggggagagcatggcggctctggtgactctgcctctggatccaccagtggttgtccctggtcagccactcgtgttctccgtggacggcttgcttcagaagatcactgtgcggatccacggcgatatttcctccttctggatcaagaatccggcgggggtatctcagggacaagaggaaggcgggggcccactggggcacaccagaaggtttggtcagttttggatggtgacgatggacgatcctccacagactggaacatgggagatccaggtaaccgcagaggataccccaggagttcgagttcaggcacagacatctctggattttctcttccatttcggtatcccgatggaagacggtcctcaccctggactttatcctcttacacaaccagttgccggcctacagacccagctcttagtcgaagtaacgggactggggtcacgcgccaatcctggtgacccgcagcctcatttcagccacgtcattctccggggcgtccctgaaggagctgaattaggacaggttcctctggagccagttggccccccggaaagggggctgctcgcagcatcactttccccaacattgctgagtacaccccggccattttctctggagctcatcggacaagatgccgcaggaagaagactgcatagagccgcaccccagccatctacagttgtgccagtgcttctcgaattatccggcccttccggtttcttagcccctgggagtaaggtgccgctgtctctgcggatagcatcattcagcggtccacaggacctcgaccttaggacgtttgtgaatccctcattcagcttaacaagcaacctgtccagagcccatttagagctgaatgaatcagcttgggggaggctgtggctggaggtccctgactcagcggcacccgattccgttgttatggtcactgtgacagcaggaggaagggaagcgaatcccgtgcctcctacccatgcatttctgcgattactggtaagtgccccagccccccaggtccggaatcattacttcccgagtcaggggcccgcacatcatccttataggttgatttag

SEQ ID NO: 6756 - DNA, 732 bp, synthetic construct
  misc_feature 1..732: note = source = /note="Description of Artificial Sequence: Synthetic coding sequence"
  source 1..732: mol_type = other DNA
atgggccccgaggctctgtcatccctcttgctactactgttagtcgcctcaggtgacgcagatatgaagggtcacttcgatcccgctaaatgccgttacgccttagggatgcaagaccgaacaatacctgatagcgacattagcgcctcttctagctggtccgattccacagcagcccgccatagccgtctcgagagctcagacggtgacggggcgtggtgccccgccggcagcgtgtttcctaaggaggaggagtatctccaagtcgacctacagagattacacttagttgccctggtgggcacccagggacgccatgcaggtggactaggaaaggagttcagccgaagttaccggctgaggtacagccgcgacgggcgcagatggatggggtggaaggaccgatggggacaggaagtcataagcggcaatgaggacccagaaggcgttgtgttaaaggacctgggcccgccaatggtggctcgtcttgtgcggttttaccctcgggcggatcgggtgatgtctgtctgcctcagggttgaactttacgggtgcctgtggagggactgtagcatgggcgtgtgggcctcctggcaaatggtctggtggggctggatgaccttggggcgggtgcggtcttgcgggtcaggccaggccatgacgatgtgggatggggcaacgactgcatcacctgttgccatgtggcgctggtcactgtctctcactgggtag

SEQ ID NO: 6757 - DNA, 2760 bp, synthetic construct
  misc_feature 1..2760: note = source = /note="Description of Artificial Sequence: Synthetic coding sequence"
  source 1..2760: mol_type = other DNA
atgggccctgaggctctttcatccttgctgcttctccttctggtcgcgagcggggatgcggacatgaagggacactttgatccggccaaatgccgctatgctttgggaatgcaggacaggacaatccctgactctgacattagcgccagcagcagttggtccgattccaccgcagcacgccacagcagactggagtccagcgacggggatggtgcctggtgtcccgccggctcagtgttcccaaaagaagaagaatacctacaagtggacctgcagcgactccatctggtggccttggttggcacccagggcaggcacgccggaggtttgggcaaggaattctctagaagctataggcttaggtactccagagacggccggagatggatgggctggaaagacaggtggggccaggaggttataagcggaaacgaagatcccgaaggggtggtgttaaaagacctcggacctcccatggtagcacgcctggtcagattttatccacgagcagacagagttatgagcgtctgtttaagggtagagctgtacggctgcttgtggagagatggcttgctaagctacacagcacccgtgggacaaactatgtaccttagtgaggcggtttatcttaatgactccacatatgacgggcatactgtgggcgggctgcagtacggcgggcttggccagctcgccgacggcgtagtaggcctcgacgatttccgcaaatcccaagagctgagggtatggccaggatacgactatgtcggttggtccaatcactccttctcatccggttatgtggaaatggagtttgaattcgatcggctgagagcctttcaggcaatgcaggtccactgcaacaacatgcacactctgggagcacggctgcctgggggagttgaatgccgtttccgccgaggacccgcaatggcttgggaaggcgaacctatgaggcataacctgggggggaacttaggcgatccaagggcccgcgccgtgtccgtgcccctgggcggccgggtggctagatttcttcagtgccgctttctgtttgccggtccctggctgctgtttagtgagattagcttcatttctgatgtggtaaacaattccagcccggcactgggaggtaccttccctcccgcaccatggtggcctccgggcccaccccccaccaatttctcaagtctggaattagagccaagaggccagcagcccgtggcaaaggctgagggctcaccaaccgcaattctcatcggatgtctggtggctatcatccttctgctgctccttatcattgcccttatgctctggaggttgcactggcggcgactgctctccaaagctgagaggcgggtgctcgaagaggagttgacagtgcacctgtctgttccgggggacacaattcttattaacaataggcccggtcctcgtgagcctcccccataccaagaaccgagaccaaggggtaaccctcctcacagtgccccttgtgttcctaacggatctgctctcctcctctcaaatcccgcttacaggctccttctagctacttacgccagaccgccccgtggacccggaccgcccactcccgcatgggccaaaccaactaacactcaggcgtactccggggactacatggagccggaaaaacctggagcacccctcctccctcccccaccccaaaacagtgtgccacactacgcagaggccgatatcgttacgctgcaaggagtgaccgggggcaatacatacgcagtgcctgccctgcctcctggcgctgtgggagatggcccccctcgggtcgacttccccaggagccgcttacggtttaaagagaaactgggcgagggacagtttggagaggttcatctgtgtgaagttgattcaccacaagatcttgtcagtctggacttcccactgaatgtgcgtaaggggcatccattgctggtagctgttaaaatcttgcgtccggacgctactaagaatgcgagcttttcactgtttagccgcaatgacttcttgaaagaggtgaagattatgagtcggctcaaagaccctaacattatccgtttgcttggagtctgcgtccaggatgatccactttgcatgattactgactatatggaaaacggggatctcaaccagttcttatccgcccatcaattagaggacaaggctgctgagggcgcgcccggcgacggccaggcggctcagggccctaccatttcttatcccatgctgcttcacgtggctgcacagatcgcctctggcatgcggtatctagcaaccctcaacttcgtgcaccgagacttagctacaagaaattgtctggtgggtgaaaatttcactatcaagattgcagactttggtatgagtcgaaatctgtatgcgggtgattattaccgggtgcaaggccgggctgtcctaccgatcagatggatggcatgggaatgcatccttatggggaagtttactaccgcctccgacgtgtgggcctttggcgtcacactctgggaagtcttaatgctgtgccgtgctcagcccttcgggcagcttacagatgaacaggtcattgaaaatgcaggcgagttctttagggatcaagggcggcaggtgtatctgagcaggcctcctgcttgtcctcaaggcctgtatgaattgatgttaagatgctggtctagagaaagcgagcaaaggccccctttcagtcagctgcaccgatttctcgctgaagatgcccttaatacggtgtag

SEQ ID NO: 6758 - DNA, 2700 bp, synthetic construct
  misc_feature 1..2700: note = source = /note="Description of Artificial Sequence: Synthetic coding sequence"
  source 1..2700: mol_type = other DNA
atgttactcctgctcctcctggccccattgtttctgcggcctccaggggccggcggggctcagaccccaaatgccacctcagaaggatgtcagatcatccacccgccgtgggaggggggtattcggtacaggggcttgacacgggatcaggtgaaagccatcaattttctgcccgtcgattacgagattgagtatgtgtgccgtggcgagcgggaggttgtcgggccaaaagtaaggaaatgtttagcgaatggatcttggacagatatggatacaccgtcccgttgcgtcaaccgcactccacattccgagagacgcgcagtgtatattggcgctctgtttcctatgtccggagggtggccagggggtcaagcttgtcagcctgcagtggagatggctctggaggatgtcaactcacgacgcgacattctcccagattacgagttaaaactcattcatcatgattccaaatgcgaccccggacaggctactaagtacctctacgaactgctgtacaacgatcctatcaaaatcattctgatgcctggctgctcaagcgtgagcacgttggtcgccgaggccgctaggatgtggaacctgatcgtcctgtcgtatggaagcagtagccccgccctgagcaatagacaacgatttcctactttcttcagaacacatccctctgccaccctccacaacccaacccgggttaagctctttgagaaatggggctggaagaagatcgccacaatacagcaaaccaccgaagtatttacaagtacactggacgacttagaagaaagggtcaaggaggccggcattgaaattactttccgccaaagcttcttcagtgatcctgccgtgcccgtgaagaatttgaagaggcaagatgcaagaattattgtcggcctcttctatgagaccgaggctcgcaaggtcttttgtgaagtgtataaggagaggttgttcggaaagaagtacgtctggttccttatcggttggtacgccgacaattggtttaagatctacgatccgagtattaactgtacggttgacgagatgactgaggccgtcgagggccacatcacaactgagatagtgatgctgaatcctgcgaacacacgaagcataagtaacatgaccagccaggagttcgtggagaaactgacaaagcgtctgaagcggcatccagaagagacaggcggattccaggaggcccccctggcctacgacgcaatctgggcccttgccctggcccttaataaaactagtggtggcggggggagatccggcgtgaggttggaggatttcaactacaacaaccagacaattacagaccaaatatatagggctatgaactctagctcttttgaaggtgtgtccggccatgtggtctttgacgcatcaggttcaaggatggcgtggacccttattgagcaactacagggaggttcgtacaaaaagatcggatactacgacagtacaaaggatgatttgtcttggagcaagaccgataagtggatcggtgggagtcctccagccgaccagacccttgtaattaaaaccttccgctttttgagtcagaaactcttcatttctgtatccgtgctgtcgtccctgggaatcgtccttgcagtggtgtgcctgtcatttaatatatacaatagccacgtgagatacatccagaattcacagccgaacctgaataatctaactgccgtggggtgcagcctggctttagccgccgtgtttcctctgggcctggatggataccacattggccggaatcagtttcctttcgtgtgtcaggcacgcctatggcttctgggcctcggattttccctgggctacggctccatgttcaccaagatatggtgggttcataccgtcttcaccaagaaggaggagaaaaaggagtggcggaagacactggaaccatggaaactatacgccacagtcgggctcctggtcggaatggatgtgctcacactagccatctggcagatagtcgacccgctgcatagaaccatcgaaactttcgctaaggaggagcctaaggaagatatcgatgtttccatcctaccgcaactggaacactgcagttcaagaaagatgaatacgtggctgggaatcttctacgggtataaaggtttattacttctgcttggtatcttcctggcatatgagaccaaaagcgtcagcacagagaaaatcaacgaccaccgggctgttggcatggccatctacaacgtcgctgtgctttgtcttattacagctcccgttaccatgatcctatcttcccaacaagatgcagcttttgcttttgcctccttagcaatcgtgttttcctcctacatcactttggtggttctctttgtgccaaaaatgcgcaggctgatcactcggggagaatggcaaagtgaggctcaggacacaatgaagactggtagttcaacgaacaacaacgaagaagagaaaagtcgattacttgaaaaagagaatagagagttggagaaaatcatcgccgagaaagaggagagagtgtctgagttacgccaccagctgcagtcgcggcagcaacttaggagcagacggcatccccccaccccccccgaacccagtggtggactgccccgtggaccccctgagccaccggaccgtctgtcatgcgatggaagtagagtgcacctgctgtacaagtag

SEQ ID NO: 6759 - DNA, 447 bp, synthetic construct
  misc_feature 1..447: note = source = /note="Description of Artificial Sequence: Synthetic coding sequence"
  source 1..447: mol_type = other DNA
atgcagacattcccagttgctggtgccctggatccagccatactggacaccagcagccctcaggccctctatacggtgctcttgatagtgctcgtgatgatgagcctggtgttcgggaagttcgtcccagtaaactgggagccgccacagccgttaccatttccgaaatatttacggtgctacaggtgcctcctcgaaacaaaagagctgggctgcctgcttggctctgacatttgcctgacgcccgcagggtcctcgtgcattactctgcataaaaagaactcctcagggtcagatgtgatggtgagtgattgtcggtccaaggagcaaatgagtgattgtagcaacactagaacaagccccgtctcgggcttctggatcttcagccagtattgtttcctcgacttttgcaatgatcctcagaacagaggcctttatactccatag

SEQ ID NO: 6760 - DNA, 516 bp, synthetic construct
  misc_feature 1..516: note = source = /note="Description of Artificial Sequence: Synthetic coding sequence"
  source 1..516: mol_type = other DNA
atgagacacaatttaggaggtaacctcggggatccacgggcacgggctgtcagtgtacctctgggagggcgggttgcccggttcttgcagtgcaggtttctcttcgcaggaccctggttgctcttctccgaaatatcttttatatcagatgttgttaacaattccagccctgctctgggaggcactttcccccccgctccctggtggccccctggtccacctcctacaaacttttcaagcctggaactagaaccaagaggacaacaaccggtcgccaaagcggagggaagcccgactgcaatcctgattggctgccttgttgccattattttactgcttttgctgataattgctctgatgttgtggagattgcactggcgcaggctcctgtccaaggtattagagagccatccaagaacaagatcccccggattggtggggatccgcccaacccccttaccggtgagccctatggctctggtgcatctgtgtgaggtcgatagcccccaagattag

SEQ ID NO: 6761 - DNA, 666 bp, synthetic construct
  misc_feature 1..666: note = source = /note="Description of Artificial Sequence: Synthetic coding sequence"
  source 1..666: mol_type = other DNA
atgactacccagctgcgcgtggtccacttactaccactgctcttagcatgtttcgtgcagacatcgcctaaacaggaaaagatgaagatggattgccataaagatgagaagggaaccatctacgactacgaggcaatcgccctaaacaaaaatgagtatgtatctttcaaacagtatgtgggaaaacatatcctgttcgttaacgtcgcaacttactgtggccttaccgcgcagtacccggaactaaacgccctccaggaagaattaaaaccttatggtctggtggtgctcggcttcccttgtaaccagtttggtaaacaggagcctggcgacaataaggaaattctgccaggcctcaagtacgtacgaccgggagggggtttcgtccccagcttccagttgtttgaaaaaggtgatgtgaatggcgagaaggagcagaaggtgttttccttcctcaagcacagctgccctcaccccagcgagatcttggggacctttaagtcaatctcgtgggaccctgtcaaagtgcatgacatccgatggaattttgaaaaattcttggtaggacctgacggaattcctgtcatgcgatggtcacaccgggctacggtgtcttctgtgaagaccgatattcttgcttatcttaaacagttcaagacaaagtag

SEQ ID NO: 6762 - DNA, 447 bp, synthetic construct
  misc_feature 1..447: note = source = /note="Description of Artificial Sequence: Synthetic coding sequence"
  source 1..447: mol_type = other DNA
atgcagactttcccagtagcaggggctctggatcctgccatcttggacaccagtagtccacaggcactctacacagtattgcttatcgtactagtgatgatgtccctggtttttggaaaattcgtgcctgtgaactgggagccaccgcaacctctgcccttcccaaaatacttgagatgctatcgatgcttattggaaaccaaagaactgggatgcctgctgggttccgacatctgtttgaccccagcgggctcctcttgcattactttgcataagaaaaactctagcggcagtgatgttatggtctcagactgccgcagcaaggagcagatgtcagattgctctaacactcggacctcccccgtaagcgggttttggattttctcccaatactgcttcctagatttctgtaacgatccccagaacagggggttgtacacaccgtag

SEQ ID NO: 6763 - DNA, 1737 bp, synthetic construct
  misc_feature 1..1737: note = source = /note="Description of Artificial Sequence: Synthetic coding sequence"
  source 1..1737: mol_type = other DNA
atgctgctgctgctgcttctggcccccctgtttctgcggcctccaggagcaggaggcgctcagaccccgaacgcaaccagcgagggctgtcaaattatccatcctccttgggagggcgggatccgatatcgcggtcttactagagaccaggtgaaagcgattaattttctccccgtggactatgagattgaatacgtgtgcagaggcgagcgtgaagttgtgggccccaaggtgagaaaatgtctggccaatggttcctggactgacatggacacgccaagtagatgtgtgaggatatgctctaagagctaccttacactcgaaaatggcaaggttttcctgaccggcggggatctgccagcactagacggcgccagggtggatttccggtgcgatcccgatttccatttggtagggagcagtaggtccatctgctctcaaggccagtggtccactcccaagccacattgccaggtcaatcgcactccacatagcgaaagacgtgctgtttacattggcgccctcttccccatgtcaggcgggtggccaggaggccaggcctgtcagccggccgttgagatggcgctcgaggacgtcaactcaaggcgcgatatccttcccgactacgagttgaagctgatccatcacgatagtaagtgcgatccagggcaagcgaccaaatatctgtacgagctgctttataacgatccgataaaaattatcttaatgccaggctgttcgtctgtgtctacccttgtcgccgaagcagcccggatgtggaacctgatagtgctctcctatgggtcctctagcccagcactgtccaaccggcagagattccctacgtttttcagaacacatccctctgccactctccataatcctactcgggttaagctgtttgagaagtgggggtggaaaaaaatcgccactatccagcagacgaccgaagtgttcacttccaccttagacgacttggaagaacgcgtgaaggaagctggtatcgaaattacttttagacagagcttcttttccgaccctgccgtcccagtaaagaatttgaaaagacaagatgcccgcatcatcgtcggactgttttatgagactgaggcacgaaaagtgttttgtgaagtctacaaggagaggcttttcggaaagaaatatgtgtggtttctgattggatggtacgccgataactggtttaaaatctatgaccctagcatcaattgtactgtagacgaaatgacagaagcagttgagggccatatcaccacagagatcgtcatgttaaaccctgccaatacacgcagcattagcaatatgacaagccaagaattcgtggagaagttgacaaaacgtctcaaaagacatcccgaagagactggcggattccaggaggccccactggcctacgatgccatttgggcactcgccttagccttgaataaaacatccgggggcggcggacgctctggcgtccgcctcgaagactttaactacaacaaccaaactattaccgaccagatctaccgcgccatgaatagctccagctttgaaggggtcagtgggcatgttgtgttcgacgcctccggctcccgcatggcatggacccttatagaacagttgcagggagggtcttacaaaaaaattggttattacgactcgactaaggacgatctaagttggtctaaaacggacaagtggatcgtgatttcacgaacccactctcctacatag

SEQ ID NO: 6764 - DNA, 1737 bp, synthetic construct
  misc_feature 1..1737: note = source = /note="Description of Artificial Sequence: Synthetic coding sequence"
  source 1..1737: mol_type = other DNA
atgctgctactactcctgctggctcctttgtttctgaggccaccaggagcagggggggcccaaacaccaaacgcgacttccgaggggtgtcagatcatccaccccccttgggaggggggtatccggtaccgcgggctcactagggatcaagtaaaggcaattaattttttgccggtcgattatgaaatagaatatgtctgccggggcgagcgcgaggtggtggggcccaaagtacggaagtgtctggccaacgggagttggacagatatggacacgccgtctaggtgtgtgcgcatctgttcaaagtcctacctgactctcgagaatggcaaagtgttcctgaccggaggggacctgccagcattggacggtgcacgcgtggacttccgatgtgacccagattttcatcttgttggctctagcagatctatttgtagccagggacagtggtccaccccaaagccacactgtcaggttaatcggacacctcacagcgagcgtagagccgtgtacatcggggccctttttccgatgagtggagggtggccgggaggacaagcctgtcagccggctgttgaaatggccctagaggatgtcaacagcagaagagacatactccccgactatgaactcaagctaatccaccatgattcaaaatgcgatcccggacaggctacaaaatacctatatgagctcttgtacaacgaccccattaagatcattctaatgccagggtgcagttctgtgtctacactggttgccgaggcggcacgtatgtggaatctgatcgtgctgagttatggttcttcctcacccgctctgtcgaacagacagagattcccgacttttttcaggacgcatccaagtgccaccttacacaatcccactcgagtgaagctctttgagaaatggggttggaagaagatcgccaccatccagcaaacgaccgaagtattcacgtccaccctggatgacctcgaggagcgcgtgaaagaggctggcatagagatcaccttcaggcagtcctttttcagtgatcctgctgtgcccgtgaaaaacctaaaaagacaggacgccagaattattgtgggactcttttatgagactgaagcaaggaaggtcttctgcgaggtgtacaaggaacgcctctttggaaaaaaatacgtctggttcctgatcgggtggtacgctgataactggtttaaaatttatgacccaagcattaattgcacagtcgatgagatgacagaggccgtcgaaggccatattactactgagatagtcatgctgaatcccgcaaatactaggtccatcagcaatatgaccagtcaggagttcgtggagaaactcaccaaaaggctcaaaagacaccccgaagagacgggcggattccaggaggctccccttgcatatgatgcaatatgggccctggccctggctttgaataaaacctcgggcggcggcggccgatccggggtaagattagaagacttcaattataacaaccagacaattaccgatcagatctatagggccatgaactcgagttctttcgagggggtttctggacacgtcgtgttcgacgctagcggctctaggatggcttggacgctgattgaacaactccaaggcgggtcctacaaaaaaatcggctattacgacagtactaaggatgacctctcatggtccaaaacggacaagtggatcgtgatatctcgaacccatagcccaacttag

SEQ ID NO: 6765 - DNA, 756 bp, synthetic construct
  misc_feature 1..756: note = source = /note="Description of Artificial Sequence: Synthetic coding sequence"
  source 1..756: mol_type = other DNA
atgcctcatctggcaagtctatttactgcatcttccagatgttgccctcaccctctccggccagagggaagtggcgcaatgggtcccgaagcgctctcctctctactcctcctgctccttgttgccagcggggatgcagatatgaagggccatttcgatcctgccaagtgtcggtacgcgttgggaatgcaagatcggaccattccagactcagatattagtgcaagctcatcatggagcgacagcacagccgcccgtcattctaggttagagtcatcggatggggatggggcatggtgccctgccggcagtgtattcccaaaggaggaggaatacctgcaggtagacctgcagcgcctacatctggtcgccctcgtgggcactcaaggtcggcatgctggcgggttagggaaggaattttcccgctcctatagactaaggtacagtagggatggaaggcggtggatgggttggaaggataggtggggtcaagaggtgatttctggaaatgaggatccagagggcgtcgtcctgaaggacctgggaccccctatggttgctagattggtgcgcttttacccaagagctgatcgggtaatgagcgtgtgcttgcgtgtggaactatatggttgcttatggcgcggtgaatggctgtcattcttgggcatctgctttttaagtcgcggactggaggggggggaatgtggcgaatgggcttctcgcatccctagccctgccggaaagttgagcctttag

SEQ ID NO: 6766 - DNA, 1764 bp, synthetic construct
  misc_feature 1..1764: note = source = /note="Description of Artificial Sequence: Synthetic coding sequence"
  source 1..1764: mol_type = other DNA
atgaggcctcggggcctgccccctctcctcgtggtgctgctagggtgctgggctagtgtgagcgcccaaaccgacgctaccccagcggtgacaacagaaggactgaacagcacagaagccgccctcgctactttcgggaccttcccctctacaagacctcctggaactcctcgggccccgggccctagcagtggtcctcgccctacacccgtaactgacgttgccgttctgtgcgtatgcgatctcagcccagcacagtgcgacatcaattgttgctgtgatcccgactgctcaagcgtggattttagcgtgttctccgcctgcagtgttccagtggtgacgggagactcacagttctgctcccagaaagcggtgatctacagtctgaacttcactgctaacccaccccaacgcgtgtttgaactagtcgatcagattaacccgagtattttctgcatccatatcaccaactacaagccagctctgagtttcatcaaccccgaagtaccagacgagaataacttcgatacactgatgaagacatcagatggattcaccctaaacgccgagagctacgtgagttttacaacgaaactggatatacctactgctgctaaatatgaatatggggttcccctccagacttcagactccttcctgcgcttcccttcttctctgacctccagcctctgcacagacaacaatcctgcagcatttctggtcaaccaagccgtgaagtgtacccgtaaaatcaatttggaacaatgtgaggagatagaggctctgtcaatggctttttatagctcaccagaaattctcagagttcccgattctcggaagaaagttcccatcacggttcagtcaattgtgatacaatctctcaacaaaaccctgacacgcagagaggacaccgatgtcttgcagcccacactcgtgaatgcagggcactttagtctgtgcgtaaacgtcgtgctcgaggtgaagtactcactgacctatacagacgcaggagaagtgaccaaggctgacctttcttttgttttggggaccgtgagcagcgtggtggtgccactgcagcagaaattcgaaatacactttcttcaggagaatacccaaccggtccccctatccggcaaccctggatacgtggttggcctgccactggctgcgggcttccagcctcataagggttcaggcattattcagaccactaataggtacggccagctaacaatcctgcactctaccactgaacaggattgccttgcactcgaaggcgtgcgcactcccgtgctctttggctacaccatgcagtcaggctgcaaattgcgcttgactggtgccctcccatgccagctagtggctcagaaagtgaagtcattgctttggggccagggctttcccgattatgttgccccttttggaaactcgcaagctcaggacatgctcgactgggttccaatccactttatcacacagtccttcaatcgtaaggactcatgtcaactgcctggcgcgttggttattgaggtgaaatggaccaaatacggatccctgttgaatccccaggccaagatcgtgaacgtcacagcgaacctgatctctagctcgtttccagaggctaactctgggaacgaaaggacaattctgatttcaactgccgtcacattcgtggatgtttccgcccccgcagaagcgggcttccgagcccctcccgccatcaacgcaaggttgccctttaatttcttcttcccattcgtctag

SEQ ID NO: 6767 - DNA, 2067 bp, synthetic construct
  misc_feature 1..2067: note = source = /note="Description of Artificial Sequence: Synthetic coding sequence"
  source 1..2067: mol_type = other DNA
atgctcccaactgaggttccgcagtctcaccccggcccctccgccctcctactgcttcagctgctgctcccccccaccagcgccttctttcccaatatttggagtctgctggctgctccaggaagtatcactcatcaagacctcacggaggaagccgctctcaacgtgacactccagctcttcctagaacaacctcctccagggcggcctccacttagattggaggactttctgggcaggacccttctggcggatgacctgtttgcggcctatttcggcccaggcagttcccgacgctttagagccgcactgggagaggtgtctcgagctaacgccgcacaagacttcctcccaactagcagaaacgacccggatctgcacttcgacgccgaacgattagggcagggcagggctcggctggtgggcgctctgcgggagaccgtggtggctgctagagcactggaccacacgctggctcggcaacggctgggagccgcactccatgccctccaagacttctattcacattccaattgggtggagctcggggagcagcaaccacacccccatctcttatggccccgtcaggagctgcagaatctggctcaggtggctgacccaacatgctctgactgcgaggaacttagctgcccccgcaactggctggggttcactctgctcacttctgggtacttcggcacccaccctcctaagcctcctggaaagtgttcccacggaggccacttcgataggtcatcaagtcagccacctagggggggaatcaataaggacagcacgagccctggattctctccccatcatatgctgcatctgcaggctgctaaactggcccttctcgcatctattcaggcgttcagcctccttcggtcgcgcctgggagatagggattttagccgcctgttagatatcacaccggccagctccctgtccttcgtgctcgatacaactgggtccatgggcgaagagattaatgccgcaaagatccaggccagacacctcgtcgaacagaggcgaggatctccaatggagcctgtgcattacgttctggtcccttttcatgaccctggctttggtcctgttttcactacaagtgatccagactccttctggcagcaactaaacgagatccatgctctgggcggtggagacgaaccagagatgtgcctgtcggctctacagctggccctcctgcacaccccaccactgagcgacatcttcgtctttacagacgcaagccccaaggacgctttcctgaccaaccaggtggaatcattgactcaggagcgccgttgtcgcgtgacattcctggtgactgaagacacgagtcgcgtgcaaggtagggcccggagggaaattctgagtccactgcgcttcgagccgtacaaggcggtggcccttgcctcagggggcgaagtcatattcacaaaggaccagcacatccgcgacgtagcagcgattgtgggcgaatctatggctgctcttgtgaccctcccgctagatccccctgtagtggtgcccggacagcccctggtgttctccgttgatggcctgctgcaaaagattaccgtccggatccacggcgatattagttccttctggattaagaacccggccggagtgagccagggacaggaggaaggtggcggtccactgggacacactaggagatttggacaattctggatggtgaccatggacgacccccctcagactggcacatgggagattcaggtcacggcagaggatacccccggtgtgcgtgtgcaggcccagactagcctggattttctctttcactttgggattcctatggaagatggcccacacccaggactatacccattgactcagcctgttgcaggattgcagacacagctgctagttgaatctcaaagctggggcagttcagcagcctttctcccccgccatccgtccagaggtcccagaggctgtcggacaaggcctggtgcgttgggcgcccggggaacttcaggggcccggtcaccaagaagcctggccgttgcccacgcggccgtccacccttag

SEQ ID NO: 6768 - DNA, 303 bp, synthetic construct
  misc_feature 1..303: note = source = /note="Description of Artificial Sequence: Synthetic coding sequence"
  source 1..303: mol_type = other DNA
atgaccacccagttgcgagtggttcatctgctccctttgcttttggcctgttttgtgcagacgtccccaaagcaggagaagatgaaaatggactgccacaaggacgaaaaaggcaccatctacgactacgaagctatcgccctcaataaaaacgagtatgtcagcttcaagcagtatgtaggcaagcatatattattcgtcaatgtcgccacgtactgtggcctgacagcacagtatccaggcatgagtgtacagggagaagatttgtacttagtgtcgtcttttcttcggaaaggcatgtag

SEQ ID NO: 6769 - DNA, 705 bp, synthetic construct
  misc_feature 1..705: note = source = /note="Description of Artificial Sequence: Synthetic coding sequence"
  source 1..705: mol_type = other DNA
atgaagaccctcgctgggcttgtcctgggacttgtcatattcgatgcggctgtaacagctcctacacttgaatccataaattacgattccgagacctacgacgccacactagaggatctcgataacctatacaactatgaaaacattcccgtggataaggttgagattgagattgcaactgtcatgccttccggaaatcgggaactgctgacacccccccctcagccagaaaaggcacaggaggaagaagaggaggaggagagcacacctagactgatcgatggcagctcccctcaggaacccgagttcacaggcgtgttgggaccacatacaaacgaagattttcccacatgccttttgtgcacatgcatcagcaccacagtgtactgcgatgatcacgaactcgatgccatcccaccactccccaagaacaccgcatacttttattcacggtttaaccgcataaaaaaaattaataaaaacgactttgcctcactgtccgacctcaagcgaatcgatctgacaagtaacctcatcagtgaaattgatgaagacgcatttagaaaattaccacagctccgggagttggtcctgagagataataagatcaggcagctccccgagctgccgaccaccttaactttcatcgacattagtaacaatcggctgggacggaagggcatcaagcaggaggcctttaaatag

SEQ ID NO: 6770 - DNA, 2559 bp, synthetic construct
  misc_feature 1..2559: note = source = /note="Description of Artificial Sequence: Synthetic coding sequence"
  source 1..2559: mol_type = other DNA
atgctccctacagaggtcccccagtcccacccaggcccatctgctctcctgctcctacagttgcttctgcccccaacatcagccttctttcctaacatctggagccttcttgctgcaccaggatctatcacacatcaagacttgacagaagaggcagccctgaacgtcaccctgcagctgttcctggagcagccccccccaggccgaccacccctgagacttgaggactttctcggtcgcactttactggccgacgacctgttcgctgcttacttcggccccgggtcatctcgtaggtttcgagccgccctgggggaggtaagtagagcaaacgcagcacaagacttcctgcccacgtctcggaacgatcctgacctgcatttcgacgcggaacggctcggacaggggcgagcccggttagtgggggccttacgagagaccgttgtagcagcccgagctctggatcatacattggcccgccagcgcctcggtgccgccttacatgcactgcaggacttctactctcattccaattgggtagagctgggcgagcagcagccccacccccatcttctgtggccgcggcaggagttgcagaatttggctcaagtcgccgaccccacttgttcggactgcgaggaattatcttgtcccaggaactggcttggtttcactctcttaactagcggatatttcggaactcaccctccaaaaccccccggtaaatgttcacacggcgggcacttcgacaggtcttcctcacagcccccacgcggaggaatcaacaaggactctacttctcccgggtttagcccccaccacatgctccacctgcaagcggccaaattggcactgctggccagtatccaagcgttttctctgcttaggagccgtctgggtgatagggacttttccaggcttttggatatcaccccagcgagctccctgagttttgttctcgatactaccgggagtatgggggaagaaattaatgccgcaaaaattcaggcgcgccatcttgtcgagcagcgtcgtggatcgcccatggagcctgttcactatgttctggtgcctttccacgatccagggttcggcccagtgttcacgacatctgatcctgattctttctggcagcaactgaacgaaatccacgctcttggcggaggagatgagcccgagatgtgtctgagcgccctgcagctcgcccttctgcatactccccccttgtcagatatctttgtgtttactgacgcatcaccgaaagatgccttcctgactaaccaggtcgaaagtctgactcaagaaagaaggtgcagggttacctttctggttactgaagatacctccagagtgcaaggcagagccaggagggagatattgtcacctctgagattcgagccctacaaagccgtagctcttgcctctggcggggaagtcatcttcactaaggatcagcacatacgagatgtcgcagctattgtgggtgagtctatggcggcactggttacactgccattagatcctccagtggtggtgcctggccagcctttggtgttctccgttgatgggcttctacagaaaatcactgttagaattcatggtgatatatctagcttttggattaagaaccccgccggcgtgtcccaaggccaggaggagggcggcggccctctgggacacacgagaaggtttggacagttttggatggtgacaatggatgaccccccccagactgggacgtgggagatccaagtgaccgccgaggacacacctggggtgcgggttcaggcacagacttcactggacttcttgttccattttggcattcccatggaagatggccctcacccaggcctatatcccctgacgcagccggtcgccggcctacagacccagctgcttgttgaagtgaccggactcggcagccgtgcgaatccgggagacccccaaccgcacttctctcatgtcatcttgcggggagtgccagagggggctgagctagggcaggtcccactggagcctgtggggcccccagaaagaggacttttggccgcctccctgtctcccacgctgctgtcgacgcctagacccttctctcttgagctgatcggacaagacgcggcgggacgccgccttcaccgggctgcccctcagcctagcactgtagtgccggtcctgttggagctgagtggcccgtccggcttcctcgcacccggatctaaggtccctctgagccttcgtattgcgtcctttagcggcccgcaagacctcgatctgcgaaccttcgtaaacccctccttctcgctcacatccaaccttagtagggcccacctcgaactgaatgaatcagcctggggccggctgtggttagaagttcctgacagcgcggcacccgattccgtggtaatggtgactgtcactgccggaggccgcgaagcgaaccccgtgccaccaactcatgcgtttctccgtctgttagtgagtgctccggccccccaggtgaggaaccactattttccctctcaaggtccagctcaccacccttatcgccttatttag

SEQ ID NO: 6771 - DNA, 2760 bp, synthetic construct
  misc_feature 1..2760: note = source = /note="Description of Artificial Sequence: Synthetic coding sequence"
  source 1..2760: mol_type = other DNA
atggggcccgaagcgttgtcctccttactgcttctgctgcttgtcgcatccggagacgctgacatgaagggtcactttgatcccgctaagtgtcgctacgccctgggaatgcaggatagaacaatacctgactcggatattagtgcttctagctcttggtcagactcgacggcagctcggcactctcggctcgagtctagcgatggcgacggtgcgtggtgccctgcaggaagcgtgttccctaaggaagaggagtatctgcaagtagacctgcagaggttgcaccttgtggccctggtgggaactcagggacggcacgctggtggcctgggtaaagaattcagccgttcctaccgccttcgctactcccgcgacgggcgccgatggatgggttggaaggaccggtgggggcaggaagtgatcagcggtaacgaagatcctgaaggcgtggttctgaaggatttgggtcctccaatggtggctcggctcgtacgcttctatcctcgggccgaccgcgtgatgagcgtgtgcctcagagtggaactttatggatgcctctggcgagacggcttactgtcctacacggcccctgtggggcagactatgtatctgagcgaagcagtgtacctgaacgactcaacatatgatgggcacactgtgggcggccttcaatacgggggtctgggccagctggcggatggcgtagtagggttagacgacttccgtaaatcccaggaactgagagtttggccaggatacgactacgttggatggtccaatcatagcttctccagtgggtatgtggagatggaatttgagttcgatcggctgagagcgtttcaagccatgcaggtccattgcaacaatatgcacaccctgggtgccaggttgccgggtggcgtcgaatgtagatttcggcgaggccctgccatggcctgggaaggagagccgatgcgccacaacctcggcggcaacctgggagatcccagggctcgtgcagtttctgtgccgctcggagggcgggtggcccggtttcttcagtgtaggttcctgttcgccgggccttggcttttattttcagagatatcttttatctcagacgtggttaacaatagctcaccagccctgggcggtaccttccctccagcgccatggtggccgcccggcccccctcctactaatttctctagtttggaattggaacctcggggccagcagccagttgcaaaagccgaggggagtcctacggcaattctcatcggctgcctagtcgccattatcctgctccttctactgattattgccctgatgttatggaggctgcattggcgccggctcctgagcaaggcagaaaggcgggtcttagaagaagagttaacagtccatttatccgtcccaggggacactatcctgatcaacaacagaccaggccccagagaaccccccccttaccaagagccccgcccaagaggcaatcctcctcattccgccccttgcgttccaaatggctctgctctgctactgagcaaccccgcctataggttgttgttggccacttacgcacgcccccctagaggaccagggcctcccaccccagcctgggctaagccaaccaacacccaagcgtacagcggcgattatatggaacccgagaagcctggagccccactgctcccaccacctccccagaactcggtgccccattacgcagaggctgatatcgtcaccctgcaaggggtgactggcggcaacacttatgcagtccctgccctgccccccggagccgttggtgatggacccccccgagtcgactttccgagatcccggttgcgtttcaaagagaaactgggcgaagggcagttcggcgaggtacacctttgcgaagtggacagtccgcaggatctcgtttcccttgatttccctttgaatgtccgcaaagggcacccactgttagtcgcggtgaagatcctcagacctgacgctaccaagaatgcgtcatttagcttattttctcggaacgatttcttgaaggaggtgaagataatgagtcgattaaaggatccaaacattattcgactcctcggggtttgcgtgcaagatgatcccctatgtatgattacagattacatggagaacggggacctgaatcagtttctgtccgcccatcagttggaggacaaggcagccgagggagcccccggtgatgggcaggcggcacagggacccacaatctcctacccaatgctcctccatgtggcggcacagattgcctcggggatgagatatctggcgacacttaacttcgtacacagggatctggccactcgcaactgcctggtgggtgagaacttcaccatcaaaattgccgatttcggaatgtctcgcaacctgtatgccggcgattactaccgagtccaagggagggctgtgctcccaatccgctggatggcctgggagtgcatccttatgggaaaattcactacagcttccgatgtgtgggccttcggtgtcaccctttgggaggtcttaatgctgtgtcgggcccagccatttggtcaacttactgacgaacaggtcatcgaaaacgcaggagagttcttccgcgaccaagggcgccaggtttacctgtctcgaccgccagcctgcccccagggcctgtacgagctgatgctgagatgttggtcaagggaatcggaacaaagacccccattttctcagctgcaccgttttctggcagaggatgctctgaacactgtgtag

SEQ ID NO: 6772 - DNA, 1737 bp, synthetic construct
  misc_feature 1..1737: note = source = /note="Description of Artificial Sequence: Synthetic coding sequence"
  source 1..1737: mol_type = other DNA
atgctgctgctattgctccttgcccccttatttttacggccccctggggccgggggagcccaaacgcctaatgccacatctgaaggttgccaaatcatccatcccccctgggaggggggcatcagataccgcggcctgacgagagaccaggtgaaggccatcaactttctgccggtcgattatgagattgaatacgtgtgtaggggcgaacgcgaagtagtcgggcccaaggtccgtaagtgtttggctaacggatcctggaccgacatggatactcccagtagatgtgtaagaatttgctcaaagtcttaccttaccttggaaaacggcaaagtctttctgaccggcggtgacctgccagctctggatggcgcgagagtagacttccgctgcgaccctgatttccatctagtcggctcaagtaggagcatctgctcccagggacagtggagtacccccaaaccccattgccaggtgaaccggactccacactcagaacggcgcgcagtgtacattggtgcgctttttccaatgagtggcgggtggcctggagggcaggcctgtcaaccagccgtcgagatggcgctggaggacgtgaactctcggcgtgacatcctgcctgattacgagctgaaactgatacatcacgatagtaagtgtgatccaggacaggccactaagtacctctatgagctgctgtataacgatcctatcaagatcatcctaatgcctggatgttcaagcgtcagcaccctggtggcggaagccgccagaatgtggaatttaattgtcctgagctacggctcaagttcccctgctctcagtaaccggcagaggttccctacgtttttcagaacccacccctcagctaccctgcacaacccaactcgggtaaagctgtttgagaaatggggttggaagaaaatcgcaacaattcaacagacgacagaggttttcacctctacgctggacgacctggaagagcgtgttaaagaagcaggcattgaaatcacttttcggcagagcttcttcagtgatccagccgtaccagtgaaaaaccttaagagacaagatgctcgtatcatcgtgggtctattctacgaaacggaagctaggaaagtgttctgcgaggtttacaaggagcgacttttcggcaagaagtacgtctggttcctgattggatggtacgccgataactggtttaaaatttacgatccttccatcaattgtaccgtggacgaaatgactgaggccgtggaaggccacataaccacagaaattgtgatgcttaaccccgctaataccagaagcatatcaaatatgacctcccaggaatttgtggagaaattgacaaagaggctgaagcggcatcccgaagaaacaggtgggtttcaagaggctcccttggcctatgacgcgatctgggccctcgcattggcgcttaacaagacctcaggcggaggaggacgcagtggtgtaaggctcgaggatttcaactacaacaaccagacaattactgaccagatttatagggcaatgaactcatccagcttcgagggggtttccggccacgtggtgtttgatgcgagcggcagccgcatggcgtggacgctaatagaacagctacaaggcggaagttataagaagattggctactatgattccacaaaagatgacctttcatggagcaagacagataagtggattgtcatctcacgcacccattccccaacttag

SEQ ID NO: 6773 - DNA, 516 bp, synthetic construct
  misc_feature 1..516: note = source = /note="Description of Artificial Sequence: Synthetic coding sequence"
  source 1..516: mol_type = other DNA
atgcgccataacctcggcggaaatctgggagacccccgggcccgcgctgtgtctgtgcccctggggggtcgggttgccagattcctgcaatgtcggttcctcttcgcgggaccttggttattgttttcagaaattagcttcatcagtgacgtagttaataacagttcgcccgctctaggcggtacctttcctcctgccccctggtggccacccggcccacctccaacaaatttttcttcactggaattagagcctcgggggcagcaaccagtcgcaaaggctgagggaagtcccacggcaatcttgattggatgcctggtggctattattcttcttctccttctgatcatcgccctgatgctgtggaggttacattggcgccgtctcctgagcaaggtgctggaatcacacccacggacccggtcccctgggctggtggggatccggccgacgccactccctgtctctcccatggccctggtgcacctgtgcgaagttgacagcccacaggattag

SEQ ID NO: 6774 - DNA, 2067 bp, synthetic construct
  misc_feature 1..2067: note = source = /note="Description of Artificial Sequence: Synthetic coding sequence"
  source 1..2067: mol_type = other DNA
atgcttcctactgaggtccctcaatctcacccagggccctctgcacttcttctcctccagttgctgctgccacccacttctgcctttttccctaacatctggagcctgctcgctgcgcccggttctattactcatcaggaccttaccgaggaagcagccttgaatgtcactctccaactgttcctcgagcagcctcctccaggtcgccctcctctgcgactcgaggactttctgggccggaccctcctggcggatgacctgtttgctgcatacttcggaccagggtcgagtcgaagattccgggccgccctcggagaagtctcaagggccaatgctgcccaggacttcttgcccacctcaaggaacgatccggacttgcattttgacgctgaacgactaggccagggtcgcgcccggctggtgggcgctctcagggagacagtcgtagccgctagggcgttagatcacactctggccagacagcgtctgggcgctgctctccatgctttgcaagacttctactcccactctaattgggtcgagctaggcgagcaacaaccgcatcctcatttactatggccccggcaggagcttcagaacctcgcacaggtggccgaccctacgtgttctgattgcgaggagctaagctgcccccgcaattggttagggttcacactcctcaccagcggctacttcggaacccacccccctaagccccccgggaagtgttcacacggaggacatttcgatagatcctcctcccagccgcctagaggcggaattaataaggacagtacaagtcccggattcagcccccatcacatgctccatctgcaggctgccaagcttgccctgctggcttccatccaggccttctctcttttgcgaagtcgcctgggtgaccgcgatttctcccgtctgttggacattacacccgcaagttctctgtctttcgtgctggacactactggttcaatgggggaggagattaatgccgcaaagatccaggcaagacatctcgtggagcaaagacgggggtcgcccatggagccagtacactatgtgctagtcccgttccacgatccaggctttgggcccgtcttcactacgtctgacccggatagtttttggcaacaattaaacgaaattcatgctttaggcggcggcgacgagcccgaaatgtgtctctcagctctgcagttggcgttactccatactccacctctgtcagatattttcgtttttactgatgccagtcctaaagacgccttcctgacaaatcaggtcgaaagtctgacacaggaaagaaggtgccgggttacgttccttgtgaccgaggatacctcacgggtgcaaggccgggctaggcgcgaaatactttctcccctgaggttcgagccctataaggccgtggccctggcatcaggcggtgaggttatctttaccaaagaccaacacatcagagatgtcgcagcgatagtaggtgagtcaatggccgcactcgtgaccctaccattagatccacccgtagtggtcccaggacaacctctagtgttcagtgtggacggcctgctgcagaagatcacggtacgaatccatggagacatttctagcttctggatcaagaatcctgctggcgtgagtcaaggccaggaagagggaggcggacccctggggcatactcggagatttggacaattttggatggttacaatggacgatcctccccagacagggacctgggaaatccaggttacggccgaggacaccccaggagtccgagtgcaggcccaaacctccctggacttcttattccactttggaattccaatggaagacgggccgcacccgggcttgtaccccctcacccaacctgtggctggactgcaaacgcagcttctcgttgagtcccaatcttggggcagtagcgctgctttcctacctcgacacccttcaaggggccctcgcggctgtcgcaccaggcctggagccttgggagcgcggggcaccagcggtgcgagatcaccaagaagcttggccgtggcacatgctgcagtacacccatag

SEQ ID NO: 6775 - DNA, 5097 bp, synthetic construct
  misc_feature 1..5097: note = source = /note="Description of Artificial Sequence: Synthetic coding sequence"
  source 1..5097: mol_type = other DNA
atgagactgctctggggtcttatttgggcctctagtttctttacattaagcctgcagaaaccacgtttactgctgtttagcccctcagtggttcaccttggagtcccactgagtgtgggagtgcagttgcaggacgtcccccggggacaagtggtgaagggctctgtcttcctgcgaaatccctcgcgtaataatgtcccttgctcacctaaggtcgacttcacactctccagtgaacgggactttgctctgttgtctttgcaagtaccgcttaaagatgcaaaatcatgtgggctgcatcagctcttacgcggtcccgaagtgcagctcgtcgcccacagtccatggttaaaagattccctctctaggaccaccaacatacaggggattaacctgctctttagcagcagacgcggacacctgttcctgcagaccgatcagccaatttacaatcccgggcagcgtgtacggtaccgggtatttgcgctcgaccagaaaatgaggccatcaacagacactataaccgtcatggtggagaactcccatggccttagagtcagaaaaaaggaggtctacatgccatcttccattttccaggatgactttgtgataccagatatcagcgagccaggaacatggaaaataagtgcccgtttctcagacggcctggaaagcaattcttccacacaattcgaagtgaaaaagtatgtgctcccaaactttgaggtgaagatcaccccgggcaagccctatattctgaccgtcccgggacacttggacgaaatgcaactggatattcaggctcggtacatatatggcaagcccgtgcaaggcgtcgcctatgtgcgctttggtctgctggacgaggatggcaagaagaccttttttcgggggcttgaatctcaaactaagttggtcaacgggcaatctcacatttccttatcaaaagccgagtttcaggatgcccttgagaaacttaacatggggatcacggaccttcagggcctccggttgtacgtagcagcagctatcattgaatatccaggaggcgagatggaggaggccgagctgacatcttggtatttcgtgtcaagcccttttagtctagacctgtccaagacaaagcgccacttggtgccaggcgccccttttctactacaggcactggtgcgggaaatgtccggctcacccgcttcgggcattccagtcaaagtttccgccaccgtaagtagtcctggatccgtacctgaggtgcaggatattcagcagaatacagacggaagcggccaggtctcaatccctataataattccacagacaatatctgaacttcagctgagtgtcagtgccggcagtccacacccagccatcgccagactcacagtggctgcacctcctagtggcggcccaggatttctgtcaattgaacgccctgactcccgcccaccacgtgtgggtgacaccctgaaccttaatttgcgagccgtgggttcaggagcaaccttctcccattattactatatgattctgtctaggggccagattgtttttatgaaccgggagccaaaaaggactcttaccagcgtgtccgtcttcgtcgaccatcatctggcgccctccttctattttgttgccttctactaccatggagaccaccccgtagccaattctctccgggttgacgttcaagccggggcatgtgaaggtaagcttgagcttagcgtagacggggccaaacaatataggaacggggagtctgtgaagctgcacttggagaccgattctctggctctcgtggctctgggagctctagacaccgccctgtacgctgcggggagtaaaagccataagcctctgaacatgggcaaagtgttcgaggctatgaacagctatgacctgggttgtggtcctggaggaggggactcagcgctgcaagtgtttcaagcagcaggcctggctttctccgatggagaccagtggacactgtcccggaaacggctctcctgccccaaagaaaaaactacgcggaaaaaacggaatgtgaatttccaaaaagcgattaatgagaaactcggccaatacgccagcccaactgcaaaacgatgttgtcaggacggtgtgacccgcctaccaatgatgagaagctgtgaacagcgcgctgctagagtgcagcagcctgattgcagggagcctttcctttcctgttgtcaatttgccgagtctttgcgtaaaaagtcaagagataaaggacaagctggcctgcagagagcccttgaaatacttcaggaagaggatctgatagatgaagatgacatcccggtgagatccttcttcccagagaattggttatggagggtcgaaactgtggatcgttttcagattttgactctgtggcttcccgatagtttgacaacctgggaaatccacggactgtctttgagcaagacaaaaggtctgtgcgtcgccactccagtgcaactccgagtgtttagagagtttcacttacacctgagattacccatgagcgtgcgccgattcgagcagctggagttgaggccagtcctgtacaattaccttgacaagaacctaaccgtaagtgtccatgttagtccagtggaaggcttgtgcctcgccggaggcggcgggcttgcccagcaagtgctcgtcccagcaggtagtgccaggcccgtggctttctccgtagtcccaactgcagcggctgctgtctcactgaaagtggttgctcggggctcctttgaattcccagtgggggatgccgtctccaaggttctccagattgaaaaagaaggcgcgattcacagggaagagctggtttacgagctgaatccattagatcaccggggaagaacactggagatcccgggcaactcagatcctaacatgatccccgacggagatttcaacagctatgtcagagtgacggcctctgacccgcttgacactctgggatccgagggcgccttgtcccccggcggcgtggcgtcattgttacggttacctcgtggctgtggggaacagactatgatatatttagccccaacactggctgcgtcgcggtacctcgacaagactgaacagtggtctacactaccccctgaaacgaaggatcatgctgttgatcttattcaaaaggggtatatgagaatccaacagtttaggaaggctgacgggtcttatgctgcttggctctctcggggatcctctacgtggctgacggcctttgttcttaaggtgctcagtctggcccaggaacaggtgggtgggtcgcccgagaagctccaggaaacctccaactggctgctgagtcaacagcaggctgatgggtcattccaggacctttcacctgtcatacatcgatccatgcaaggcgggctggtaggcaacgatgagactgtggctctcacggcgttcgttaccatcgctctgcaccacggtcttgccgtatttcaggacgagggtgcagaacccctcaagcagcgcgtggaggccagcatttctaaggcaagcagctttctgggggagaaagcgtccgcaggtctgctaggcgcacatgccgcggcaatcactgcctacgcgttgaccctcacaaaggccccagccgatttgcgcggtgtggcccataacaacctgatggccatggcgcaggaaaccggcgacaacctctactggggtagcgttaccggttctcagtccaatgctgtcagccccactcccgccccccgcaacccttccgaccctatgccgcaagcaccagcactctggatcgagacgacagcttacgcccttctacacttactgctccatgaaggaaaggccgagatggccgaccaggctgcggcatggctgaccagacagggatcttttcaggggggtttccgttctacacaggatacagtgatcgcccttgatgctctttccgcttactggatcgcttcacacacaacagaagaacgggggctcaatgtcaccctcagcagtactgggagaaacggttttaagtcccacgcactgcagctcaataatagacagatccggggtttggaagaggaattacagttcagcctaggatctaagattaacgtcaaagtcggtgggaacagtaagggcacgttgaaagtcctccggacatataatgtgctcgacatgaaaaacacaacctgtcaggacttacaaatcgaggtgaccgtcaaagggcatgtggaatacacaatggaggcaaacgaggattacgaagactatgagtacgacgaattgccagctaaggatgaccctgacgcacctctgcagcctgtgaccccgcttcagttatttgagggaaggcggaataggaggagaagagaggcccccaaactgacatccctatcagataggtacgtcagtcattttgaaactgaagggccccacgtactgctatactttgattccgtgcctacttctcgggagtgcgttgggtttgaggctgtgcaggaagtacccgtcggacttgtgcaaccagcaagcgcaacgttgtacgattattacaacccggaacgtagatgctctgtgttctatggagcgccatctaagtcacgcctgctcgcgaccctctgctccgctgaagtatgtcagtgtgcggagggaaagtgcccaaggcaacgccgagccttggagcgtggcctgcaggacgaagacggatatcggatgaaatttgcatgttactatccccgtgtggagtacggcttccaagtcaaagtgttacgcgaagattcacgtgccgcattccgcctgttcgagacaaagatcacacaggtgctccacttcactaaagacgtcaaggctgccgctaaccaaatgagaaactttctagtgagagcttcttgccgcttgcggctagaacccggcaaggagtacctgataatgggattagatggagccacctacgacctggaggggcacccccagtatctcctggattctaattcctggattgaggagatgccaagcgagcggctctgccgttctactagacagagagctgcttgtgcccaactgaatgacttcctgcaagagtacggtacacagggatgtcaagtttag

SEQ ID NO: 6776 - DNA, 726 bp, synthetic construct
  misc_feature 1..726: note = source = /note="Description of Artificial Sequence: Synthetic coding sequence"
  source 1..726: mol_type = other DNA
atgaagttcatcctgttatgggccctgttaaatttgacagtcgctctggcttttaatccagactatactgtgtcttcaacccccccttatctggtgtatctgaaatctgactacttgccctgcgctggcgttctaatccatccattatgggtgattactgccgcgcactgcaatttgcccaaactgagggtgatattaggagtgactatccccgctgattccaacgagaagcacctgcaggtgattggctacgagaaaatgatccaccacccccacttttcggtgactagtatagatcacgacatcatgctaattaaattgaaaactgaagcagagctgaacgactacgtaaaactggcaaacctaccttatcaaactatttccgaaaacaccatgtgttcagtgagcacctggagctataacgtttgcgacatctataaagagcctgattcactgcagaccgtgaatataagcgtgatttctaagcctcagtgtcgcgatgcctacaaaacatacaacattaccgaaaacatgctgtgcgtgggcattgtgcctgggcgtcggcagccctgcaaagaggtatcggcagcacccgccatatgcaacggtatgctgcagggaattctgtctttcgccgatgggtgcgtgctgcgagctgatgtcggtatttatgcaaagatattctattacatcccatggatcgagaatgtgatccagaacaactag

SEQ ID NO: 6777 - DNA, 732 bp, synthetic construct
  misc_feature 1..732: note = source = /note="Description of Artificial Sequence: Synthetic coding sequence"
  source 1..732: mol_type = other DNA
atgggaccggaagccctgagtagcctcctattactcctactggtcgcttccggcgatgcagatatgaaaggacatttcgatcccgccaaatgcaggtacgccctgggaatgcaggatcgaactatcccagacagcgacatttccgcatcgtcctcctggtcggattccacagccgctagacacagccgacttgagagtagcgacggcgatggggcctggtgtccagcgggatccgtcttccctaaggaggaggagtatttacaagtggatctgcagaggttgcacttggtggccttggttgggactcaaggccgccacgcaggaggcctgggcaaggagttttcccggtcctaccggcttcgctacagcagagacggacgaagatggatgggttggaaagaccggtgggggcaggaggttattagtggtaacgaggatcccgaaggagttgtgcttaaggatctcgggccacccatggtcgctaggctggtgcgattctatccccgggctgatagagtgatgagtgtttgcctgagagttgagctatatgggtgcttgtggcgggactgcagcatgggagtctgggcctcgtggcagatggtgtggtggggctggatgactctgggcagagtacggagttgtggctcaggtcaggctatgacgatgtgggatggagccaccactgcttctcctgtagctatgtggaggtggtctctctccctgactggctag

SEQ ID NO: 6778 - DNA, 1986 bp, synthetic construct
  misc_feature 1..1986: note = source = /note="Description of Artificial Sequence: Synthetic coding sequence"
  source 1..1986: mol_type = other DNA
atggacctggtgctgaaaagatgcctcctgcacttggccgttatcggagcacttctggctgttggggccacaaaggtgcctagaaatcaggactggttgggagtgtcccgccagctccgcaccaaagcttggaacaggcaactgtaccctgagtggacggaagctcagaggctggattgttggcgcggtggccaagtgagtctgaaggttagcaacgacgggcctacactgattggcgctaacgcttcattcagcatcgctctcaatttccctggaagccagaaggttttacccgacgggcaagtgatctgggtgaacaacaccattataaatggcagccaagtctgggggggacaacctgtttaccctcaggagaccgatgatgcatgcatcttccctgatggaggcccttgcccgagcggttcgtggtcccagaaaagatcttttgtttatgtgtggaaaacgtggggacagtattggcaagtactgggtggcccagtgagtggattatccatcggtactgggcgggccatgctggggacccacactatggaagtgaccgtctatcaccgacgcggcagtcgttcttatgtcccattggcccactcctcttctgctttcacgataaccgaccaagtgcctttctctgtgtccgtctcccaactgagggctctggatggaggcaacaagcattttttgcggaaccaacccctcactttcgcactgcagctgcacgacccctcgggatacctggcagaggccgatctttcttacacttgggatttcggagattcttcaggcacattgattagccgggcactagtggtgacacacacatatttggaacctggccctgtcactgcacaagtcgtgcttcaggccgccatcccactgacatcatgcggctcatcaccagttcccggcactacagacggccatcgccccacagccgaggcccccaacacaaccgccggccaggtccccacaaccgaggttgtgggcacaaccccggggcaagcacccactgccgaaccttcgggcacaacctctgtgcaggtacctaccaccgaggtgattagtaccgctccagtacagatgccgaccgctgaaagcacaggtatgacaccggagaaggtcccagtttccgaagtgatggggacaacactggcagagatgagtacacccgaggccacaggcatgactccagccgaggtgagcattgtggttctctccggcaccaccgcagcccaagtgaccaccacggagtgggtagaaaccactgcgcgcgagctgcccatcccggaaccagaagggcccgacgctagtagcatcatgtcgacagagtcaattacaggcagtcttggacccctgctcgacggaacagctacactgcggctagtgaagcgccaagtcccactggattgcgtgctgtatagatacgggtccttttctgtgaccctcgacattgttcaagggatagagtcagcagagattttacaagccgtgcccagcggcgagggggacgcctttgagttgacagtgtcttgccagggaggcctacccaaggaggcttgtatggagatctcttcgcccggctgtcagcccccggctcaaaggttatgtcagccagtgttaccttcccctgcctgtcagttagtcctccaccaaatcctcaaaggcggctccggcacctactgccttaatgtgtccctggctgacaccaactctcttgccgtcgtaagcacccagttaatcatgccgggccaggaagccgggcttggccaggtgccgctcatagtcggaatactcttagtgcttatggcagtggtactcgcatcattaatctaccgacgtcggctgatgaaacaggattttagcgtgccacagctgccccattcatcctcacattggctgcggctgcccagaatcttctgctcttgtccgatcggggaaaactctccccttctgagcggacagcaggtgtag

SEQ ID NO: 6779 - DNA, 2760 bp, synthetic construct
  misc_feature 1..2760: note = source = /note="Description of Artificial Sequence: Synthetic coding sequence"
  source 1..2760: mol_type = other DNA
atgggacctgaggcattgtcaagcctgttgttgcttctcctggttgcaagcggagatgccgacatgaaaggccacttcgatccagccaaatgtcggtatgcgctaggtatgcaagaccgcactattccagactccgacatctcagcgtccagcagctggtcagatagcacagctgcccgacactcgcggcttgaatcgtcagacggcgacggagcatggtgtcccgctggctctgtgttcccaaaggaggaagagtatctgcaggttgatcttcagcgcctccacttagtggcactagtaggcacccagggtcgtcatgctggcgggctcggaaaggaattttcacggtcttacagactgcgctactcccgagatggacgccgatggatgggttggaaggacagatggggtcaggaagttatctcaggcaatgaggatcctgaaggggtggtgttgaaggatctggggcctccaatggtggccagactagtgcgtttttaccctcgagcagacagagttatgagcgtgtgccttagagtggagctgtacggatgtctctggcgagatgggctgttaagctacactgcaccggttggccaaacaatgtacttgtccgaggccgtctacctgaatgacagtacatatgacggccatacagtgggcggactgcaatacggagggctcgggcagttggctgatggggttgtgggactggacgatttcagaaaatctcaagaactgagggtttggccaggatatgactatgtagggtggtctaaccactcttttagcagtggatacgtggaaatggagttcgaatttgacagacttcgggcatttcaggcgatgcaggtccattgtaataatatgcacaccttaggggctagactgccaggcggggtagagtgccggttcaggcgaggaccggccatggcttgggaaggtgagcctatgcgccataatttgggaggtaacctgggggatccaagagccagagccgtaagtgtgcctctcggcggaagggtggctagatttcttcaatgccggttcctgtttgcgggaccatggctcttgttcagcgagataagcttcatatccgacgtggtgaataatagttcccccgctcttggaggcacatttccccctgccccgtggtggcctcctggcccccctcccaccaacttttcaagcctggagttagaaccaaggggacagcagccagtcgcgaaggccgaagggtctccaactgccatcctgattggatgcctagtcgcgattatcttgctgcttctgcttattatcgctcttatgctgtggcgccttcattggcggaggctgctcagcaaagccgagagacgcgttcttgaggaggagctaacagtacacctaagtgtacctggagacacaattctgataaataaccgccccggccccagagagcctcctccgtatcaagagcctcggccaaggggcaatcctccccactcggcaccctgtgtgccaaacggctctgcactgctcctgtctaaccctgcctatcggctgctgcttgcaacttacgctcgacccccaaggggaccaggaccccctacgccagcttgggctaaacccacaaacactcaggcgtacagcggagattacatggaacccgaaaagcccggcgcccctctgcttccccccccgcctcagaatagcgtccctcattacgcagaagctgacatcgtgaccctccaaggagtgacaggtgggaatacctatgctgtgccagccctccctcccggggctgttggcgacggacccccacgtgtagacttccctaggagcagattgagattcaaggagaaacttggggagggccagttcggagaagtccacctatgtgaagtagacagtccacaggacctggtgagcttagatttccccctcaatgtaaggaaaggacaccctttactggttgccgttaaaatccttcggccagatgcgactaagaatgccagttttagcctgttcagcaggaacgactttctgaaggaagtcaagattatgtcccggctgaaggacccaaacatcattaggctgcttggtgtgtgcgtccaggacgacccgctctgtatgattaccgactacatggagaatggagatctgaaccaatttctctccgcccaccaactggaagacaaggctgcagagggcgctcctggggacggacaggccgcacagggccctactatcagctatccaatgcttctgcacgtggcagcccagattgccagtggtatgcgctacctcgccacactgaactttgtccacagggatctcgcaactaggaactgcctggtcggggaaaactttaccataaaaatagctgacttcggaatgagcagaaatttgtatgctggcgactattacagggtccagggccgcgcagtcctgccgattcgatggatggcctgggagtgcatcctaatgggaaaattcacgacggccagtgatgtctgggcctttggagtgacactatgggaagtgcttatgttgtgcagagcacagccatttggacagctgacagatgagcaagtgatcgaaaacgccggggaattctttcgggatcaaggtcgccaggtttatttaagccgtccccccgcttgtccgcagggactgtatgagctgatgctcaggtgctggtcccgcgaatcagagcagaggcctccattctcccagctgcaccggtttctagccgaggacgccctcaacaccgtttag

SEQ ID NO: 6780 - DNA, 216 bp, synthetic construct
  misc_feature 1..216: note = source = /note="Description of Artificial Sequence: Synthetic coding sequence"
  source 1..216: mol_type = other DNA
atgcccgcaggggtgcccatgagtacgtatctcaagatgtttgcagcttcactcctggccatgtgtgctggtgccgaagtggtccataggtactatcggcccgacctgacaatcccagagatcccgccaaagagaggtgagctgaaaaccgagctgctgggcctgaaggagcgtaaacacaagccccaagtgtcgcaacaggaggaattgaaatag

SEQ ID NO: 6781 - DNA, 2685 bp, synthetic construct
  misc_feature 1..2685: note = source = /note="Description of Artificial Sequence: Synthetic coding sequence"
  source 1..2685: mol_type = other DNA
atgtccctcccccgatgttgccctcatccactccggccagaaggctccggcgccatgggcccagaagcactgtcctcactactcctgctgcttcttgtggccagcggggatgctgacatgaagggtcactttgatcccgccaaatgtcgttacgcacttggcatgcaggaccggactattcccgacagtgatatctctgcctcatctagctggtctgattcaacggctgccaggcattctcggctggagtcatcagatggtgacggggcttggtgtcctgctggctccgttttccctaaagaagaagagtacttgcaagttgaccttcagcgcctgcacttggtggctcttgtgggcacccaaggcagacacgctgggggcctcggtaaggaattcagtcgcagctatcgcctgcgatacagccgtgatggcaggcgctggatggggtggaaggatagatggggtcaagaagtcatctcagggaacgaagaccctgagggcgtcgtccttaaagacctcggaccacccatggtggcccgcctcgtgcgcttctatcctcgcgctgaccgcgtgatgtcagtgtgccttcgtgttgagctgtacgggtgcctgtggcgggatggtttgttgtcttatactgcgcccgtgggtcagacaatgtatctgagcgaagcagtctacttgaatgatagcacatacgacggacacaccgtcggcgggctgcaatacggcgggctgggacagctggctgacggcgttgtcggactggatgactttaggaaatcccaggagctgcgagtctggcccggttacgactatgtgggatggtccaatcatagcttttcatctggttatgtggaaatggagtttgagttcgacaggctgcgagccttccaggctatgcaggttcactgcaacaatatgcataccctgggggctcgccttcctggaggcgtggaatgtcggttcaggaggggccctgctatggcttgggaaggggaaccaatgcggcacaatctcggcggcaatctgggagatcccagagcacgggccgtatcagtgcctcttggagggcgggtggcacgctttctgcagtgtcgctttctcttcgcaggcccctggctgctcttcagtgagatcagcttcattagcgacgtggtgaataactccagtcccgcccttggaggcactttcccacccgccccctggtggccccctgggcctccccctaccaacttttcatcactggagctcgagcctagggggcagcaaccagtcgcaaaggccgaagggtcacccactgcaatcctcatagggtgcttggtggccatcattctcctgcttcttctcataattgcgctgatgctctggaggctccattggaggcggcttctgagtaaagctgaaagacgggtcctcgaggaggagctgaccgtgcacctatctgtgccaggtgataccatcctcattaacaatcggcccgggcccagggagccacccccttaccaggagcccagacccagggggaatccacctcactcagcaccttgtgtgccaaatgggtcagcctactctggcgactatatggagcccgaaaagcccggcgctccacttctgccaccccccccacagaactctgtaccacattatgccgaagctgacattgtcacactgcaaggcgtgaccggtggaaatacatatgctgtcccagcccttcctccgggcgcagtgggtgacggaccaccccgcgttgatttcccccggtcccgacttcgctttaaggaaaagctgggggagggccaattcggagaggtgcacctgtgtgaagtggatagccctcaggacctggtgtcgttggattttcctcttaatgtcagaaaaggtcatccgttgctagttgcagttaaaatcctgaggcccgacgctacaaagaatgcaagaaacgatttcctcaaggaggtcaagatcatgtcaaggttgaaggaccccaacataatcaggctgctgggagtctgcgtgcaggatgatccactgtgcatgatcacggattacatggaaaatggtgacctgaatcagttcttgtcagctcatcagctggaggataaagcagctgagggtgctccaggtgatgggcaggctgcccagggccctactatctcctaccccatgcttctacacgtggctgctcagattgcatccggcatgaggtacctcgccacgctcaactttgtgcaccgggacctggctacccgaaactgcctggtgggcgagaactttactatcaaaatcgcagacttcgggatgtctaggaacctgtacgctggggactattaccgcgtgcaggggagagccgtccttcctatccgttggatggcatgggaatgtatcctaatggggaagttcaccactgcgtccgacgtttgggctttcggagtgaccctgtgggaagtgctgatgctatgcagagcccaaccattcgggcagctaacagatgaacaggtgattgaaaatgcaggagagtttttccgagaccagggccgacaggtgtacctttccaggccgcccgcctgtccccaaggactatacgaactgatgctacgttgttggtcgcgagagtccgaacagcggccaccatttagccagctgcatcgattccttgcagaggacgctctgaatacagtgtag

SEQ ID NO: 6782 - DNA, 273 bp, synthetic construct
  misc_feature 1..273: note = source = /note="Description of Artificial Sequence: Synthetic coding sequence"
  source 1..273: mol_type = other DNA
atgcagttgttcctacttctgtgcttggttctgttgtctccgcagggggcttcattacacaggcaccatccaagggagatgaagaaaagagtggaagacttgcacgtgggggctacagtggcaccatcttctcgaagggattttacgttcgacctgtacagagctctggcatcagccgccccttcccaaagtatatttttttcccccgtatcaatttcaatgtctctggcaatgctgtctctgggtgctggctctagcacaaagatgcaatag

SEQ ID NO: 6783 - DNA, 618 bp, synthetic construct
  misc_feature 1..618: note = source = /note="Description of Artificial Sequence: Synthetic coding sequence"
  source 1..618: mol_type = other DNA
atgatgaggacattgatcacaacacaccctctgccactgctcctcctgcctcaacagctgctgcagctggtgcagtttcaggaagtcgatactgattttgattttcccgaggaagataagaaggaggagttcgaggagtgcttggagaagttctttagcaccgggcccgcgcggccacctactaaggagaaggtcaaaagacgggtcttgatcgaaccaggtatgcccctgaaccatattgagtattgcaatcacgagataatggggaagaacgtgtactacaagcatagatgggtagccgagcactactttctgctgatgcaatacgatgagctccagaagatctgctacaatagattcgtcccatgcaagaatgggatccggaagtgcaacagatctaaaggcctggtggaaggagtgtattgcaaccttaccgaagctttcgagatcccagcctgtaaatatgagtccctctaccgcaagggatacgtgctgatcacgtgttcgtggcagaatgaaatgcaaaaaagaatcccacacactattaacgatttggtcgaaccaccagaacatcgaagcttcttgagcgaggatggggtcttcgtgatctccccatag

SEQ ID NO: 6784 - DNA, 30 bp, synthetic construct
  misc_feature 1..30: note = source = /note="Description of Artificial Sequence: Synthetic coding sequence"
  source 1..30: mol_type = other DNA
atgtccttctccgctacgattctcttttag

SEQ ID NO: 6785 - DNA, 600 bp, synthetic construct
  misc_feature 1..600: note = source = /note="Description of Artificial Sequence: Synthetic coding sequence"
  source 1..600: mol_type = other DNA
atgtcctttagtgccacaattcttttctcccccccctccgggagtgaagctcgttgctgttgctgtgcctgcaaaagtgagacaaatggcggtaacaccggttctcaaggcggtaatcctcctcctagtacccctatcaccgttacaggacatgggcttgctgttcagagctccgaacagttactacacgtaatctaccagcgggtggataaagccgtgggactggcggaagcggcattgggcctggcacgggccaacaatgaattactgaagcgccttcaggaggaggtgggcgatctgagacagggaaaggtatccattccagatgaggatggggaaagcagggcccattccagtccccctgaagaaccaggccctctgaaagaatcccctggagaagctttcaaggctctgagtgctgtggaagaagaatgtgactctgttggctccggggtccaggttgtgatcgaagagctgaggcaacttggggctgcctccgtgggcccaggaccactggggttccctgccacacagcgcgacatgcgattacccggatgtacattagcagcatccgaggctgcccctcttctcaatccttag

SEQ ID NO: 6786 - DNA, 633 bp, synthetic construct
  misc_feature 1..633: note = source = /note="Description of Artificial Sequence: Synthetic coding sequence"
  source 1..633: mol_type = other DNA
atgagtgcggggaagatgatgaggacactcattaccacacacccacttccacttctgctcttaccccagcagttgcttcaacttgtccaattccaagaggtggataccgatttcgatttcccagaggaggataaaaaagaagagttcgaggagtgcttagaaaaatttttctctaccggacctgcccggccgcctacaaaggagaaagtcaagcgtcgcgtgctcatcgaacccggaatgccactcaaccacatcgagtactgtaaccacgagatcatgggaaaaaacgtgtactataagcacagatgggtggctgagcattattttctcttgatgcagtatgatgagctccagaaaatctgttacaaccggtttgtaccttgcaaaaacggtataagaaagtgcaaccgcagcaaaggtctggtggaaggcgtgtactgtaacctgactgaggcctttgagataccagcttgcaaatacgaaagtctttacagaaaagggtacgtgttgattacttgttcctggcaaaatgagatgcaaaaaaggattccacacaccattaacgacttggtcgaaccccccgagcacagatcttttctctctgaggatggcgtattcgtgatcagtccctag

SEQ ID NO: 6787 - DNA, 1221 bp, synthetic construct
  misc_feature 1..1221: note = source = /note="Description of Artificial Sequence: Synthetic coding sequence"
  source 1..1221: mol_type = other DNA
atgcagctcttccttttgctgtgcctcgttctcctgagcccccagggtgccagcttgcatcgccatcacccacgggaaatgaagaagcgagtggaagacctgcacgtgggtgctacagtggccccgtcaagccgacgtgattttactttcgatctgtaccgagcacttgcaagcgctgcaccatcgcagtcgattttcttcagccccgtgagcattagtatgagcctggctatgctgtctctgggtgctggttcttccacaaaaatgcaaatccttgaaggtctgggcttaaatttgcagaaaagtagtgaaaaagagctgcaccggggctttcagcagctattgcaggaactcaatcagcctcgcgatggctttcagctctcactgggcaacgccctgtttaccgacctggtggtagatctgcaggacaccttcgtatcagccatgaaaaccctttatctggccgacaccttcccaacaaactttcgtgactccgctggggccatgaagcagatcaatgattatgtggctaaacagacaaaagggaagattgtggatctgctgaagaaccttgacagtaacgccgtggtgatcatggtcaactatattttctttaaggcgaagtgggagactagcttcaaccataaaggcacccaagagcaggatttttatgtgactagcgagacagtggtcagggtacccatgatgagcagagaggatcagtaccactacctattggacagaaatctgagctgtcgggtagtgggcgtgccatatcaaggtaatgctacagccctcttcatcctgccgtcagagggcaaaatgcaacaggtggagaacggactgtctgagaaaacactgagaaagtggttgaagatgttcaagaagcggcagcttgagctttacttgcctaagttctcaatcgagggatcttaccaattggaaaaggttctcccctctctaggaatcagcaacgtgtttacttcccacgccgatttgagtgggataagcaaccacagtaacatccaagtctcagaaatggttcataaggccgtcgtggaggtggatgagagcggaactcgcgctgccgcagctacaggcactatcttcaccttccggagcgcccgccttaatagccagcgcttggtcttcaacaggccctttttaatgttcattgtagacaacaacattctatttcttggaaaagtcaataggccatag

SEQ ID NO: 6788 - DNA, 600 bp, synthetic construct
  misc_feature 1..600: note = source = /note="Description of Artificial Sequence: Synthetic coding sequence"
  source 1..600: mol_type = other DNA
atggagacgtttccactcctgctcctgtccctgggtctggtgttagcagaagcttctgaatccaccatgaagattattaaggaggagttcactgacgaggaaatgcagtacgacatggctaaaagcggccaggaaaagcagaccattgagatcctgatgaatcccatcttgctcgtgaagaacacgtcactgtcaatgagtaaggatgatatgtcgagtactttattaacctttcgctcactgcattacaatgatccaaaaggcaacagttccggcaacgacaaggagtgttgcaatgatatgaccgtatggcgaaaagtcagcgaggcgaacggttcctgcaaatggtccaataactttattcgcagttctaccgaagtcatgagacgggtgcaccgagcacctagttgtaagtttgttcaaaatccaggtatttcgtgttgtgaatccctggaattagaaaatactgtgtgccagttcaccaccgggaagcagttcccgagatgtcaatatcacagtgtgacgtccctggaaaaaatacttacagtcctgacgggacattctctgatgtcgtggctcgtgtgcgggtccaagctctag

SEQ ID NO: 6789 - DNA, 411 bp, synthetic construct
  misc_feature 1..411: note = source = /note="Description of Artificial Sequence: Synthetic coding sequence"
  source 1..411: mol_type = other DNA
atgtccttttctgcaacaattctcttcagcccaccttctgggagtgaagcccgctgctgctgctgcgcctgcaaatctgaaaccaacggggggaataccggctcccaaggtggcaatccacccccttctaccccgataactgtgacgggccacggtctggctgtccagtcatcagaacaactgctgcacgttatctaccagcgcgttgataaagcggtggggttggccgaggcagcgttaggactagctcgcgctaataatgaactgctaaaacgcctccaggaagaggtcggcgatctgcggcaagggaaggtttctatccccgatgaggatggggagagccgcgctcactctagtccaccggaggaaccaggtcctctgaaagagtcacctggagaagcctttaaatag

SEQ ID NO: 6790 - DNA, 252 bp, synthetic construct
  misc_feature 1..252: note = source = /note="Description of Artificial Sequence: Synthetic coding sequence"
  source 1..252: mol_type = other DNA
atgagcttcagtgctaccatcctctttagccccccttctgggagcgaagccaggtgctgttgctgcgcttgtaagtccgagacaaacggtggcaataccggcagccaggggggcaatccccccccttcaacgcccatcactgtcacaggccatgggctcgccgtccagagctcagagcagctcctacacgtgatttaccaacgggtggataaagccgtaggactggccgaggctgcactggggctagcttag

SEQ ID NO: 6791 - DNA, 30 bp, synthetic construct
  misc_feature 1..30: note = source = /note="Description of Artificial Sequence: Synthetic coding sequence"
  source 1..30: mol_type = other DNA
atgagtttttcagcaaccatcctgttttag

SEQ ID NO: 6792 - DNA, 519 bp, synthetic construct
  misc_feature 1..519: note = source = /note="Description of Artificial Sequence: Synthetic coding sequence"
  source 1..519: mol_type = other DNA
atgcagctctttttgctgctctgtctagtccttctgtcaccccaaggagcttctcttcatcgtcatcatcctcgcgaaatgaaaaaaagagtggaagacctgcatgtaggcgccactgtggccccctctagtcgtcgggattttacttttgatttatatagggccctggccagcgccgctcctagccagagcatcttcttttcgcccgtgtcaatatccatgtccctggcaatgctatccctgggcgcagggagctctacaaagatgcagatcttggaaggactggggctaaacttgcagaagtcgtcagagaaagagctccatagagggttccagcaattgctccaagagcttaaccagccgcgtgatggctttcagctaagcctcggcaacgccttgtttactgacttggtggtggatctgcaggacaccttcgtgagcgcgatgaagaccttataccttgcggatacctttccaacaaacttccgcgacagtgccggagcaatgaaacaaatatag

SEQ ID NO: 6793 - DNA, 615 bp, synthetic construct
  misc_feature 1..615: note = source = /note="Description of Artificial Sequence: Synthetic coding sequence"
  source 1..615: mol_type = other DNA
atgccaggcggtaagaaggtcgcaggaggtggctcttccggagcgactcccacttctgcggcagcaaccgccccatctggtgtcaggagactagagaccagcgaagggacctcggcgcaaagggacgaggaacccgaagaagaaggtgaggaggatttacgggacggcggcgttccttttttcgtcaatcgcggagggctcccggtggatgaagctacctgggagcgcatgtggaaacatgttgcaaagatacatcccgatggagagaaagtcgcccagcggatccgaggcgccacagatttgcccaaaatccccatcccttcagtacctaccttccagccaagtacccctgtgcccgagcgactcgaggctgtgcagaggtatatcagagagctgcagtacaatcatactggtactcagttctttgagatcaaaaagtcacggccacttactgggcttatggacctggccaaagagatgacaaaggaggcgctcccaattaaatgcttagaagctgtgatccttgggatgtatccctcttcacccgagggagaaggctcaggactcctgtgggcgagcgctagttgttcagaatccgagggcggggtgggatag

SEQ ID NO: 6794 - DNA, 1221 bp, synthetic construct
  misc_feature 1..1221: note = source = /note="Description of Artificial Sequence: Synthetic coding sequence"
  source 1..1221: mol_type = other DNA
atgcagctgtttctgctcttatgtctggtactgctgtcgccccaaggcgcttctctccatagacaccatccccgggaaatgaagaaacgcgtcgaagacctccacgttggggccacagttgcaccttcatcgcggagggatttcactttcgatctctaccgggctcttgcaagtgctgctcccagccagtctatttttttctcccccgtgtccataagcatgtctcttgcaatgttatctctgggcgccggcagttccacgaagatgcagatactggaaggactggggctaaatctgcaaaagtcgtccgaaaaggagctacaccgcggatttcaacagttgttacaggagctgaatcaaccgcgagatggctttcagcttagcctaggaaatgccctgttcaccgatctggtagtggacttgcaggacacatttgtgagcgccatgaagactctttaccttgctgacacttttcctactaatttccgggattcagctggggccatgaaacaaattaatgattatgtggccaaacagactaaaggcaagattgtggaccttctgaaaaatctagactcaaacgcagtagtcattatggtcaactatatcttctttaaggcaaagtgggagacctcctttaaccacaaggggacccaagagcaggatttttacgtcacctccgagaccgtggtgcgggtaccgatgatgagccgtgaggaccagtaccactacctgctggacagaaacctgtcatgtagggtggtgggagtgccttaccaagggaacgctacagcactgtttattctgcccagtgaagggaagatgcagcaggtggaaaacggattgtccgagaagactctccgcaagtggctcaagatgttcaaaaagagacagctcgaactgtacctgcccaagttcagtatagaaggctcttaccagctggaaaaggtgcttcccagcctgggaatttccaatgtctttacatcccatgctgatctctctggcatcagcaatcacagtaatattcaggtctcagaaatggtacataaggccgttgtggaagtggacgagtctgggacgcgtgccgccgccgctactggtactatattcacctttaggagcgcccgattaaacagccagcggctagtcttcaacagacctttcctgatgttcattgtcgataacaatatcctctttctaggtaaagttaacagaccttag

SEQ ID NO: 6795 - DNA, 3837 bp, synthetic construct
  misc_feature 1..3837: note = source = /note="Description of Artificial Sequence: Synthetic coding sequence"
  source 1..3837: mol_type = other DNA
atgcgtctccttttactggttcccctcctgcttgcgcccgctcccggatcatctgcccccaaagttcggaggcagtctgacacgtggggaccatggagccagtggtccccctgctccaggacctgtggcggcggggtcagctttcgggaaaggccctgttacagccagcgcagagacggagggagtagctgtgttggcccggcccgaagccaccggtcatgcagaaccgaaagttgtccagacggagcccgtgatttccgtgccgagcagtgcgccgagttcgatggagcagagtttcagggacgtaggtatcggtggctgccctactacagtgcacccaataagtgtgaactcaactgtatccccaagggagaaaatttttactacaagcaccgagaggctgtagttgatggaacaccgtgcgaacccgggaagcgtgacgtatgcgtcgacggatcttgccgagtagttggatgtgatcatgagcttgatagctcaaaacaggaggacaagtgcctcagatgcggaggcgacgggaccacctgttatcccgtcgccggaacctttgacgcaaacgaccttagccgggggtataatcagatcttgatcgtgccaatgggcgccacatcgatcctgatcgatgaggccgcggccagcagaaacttcctggccgttaaaaacgtccgcggcgagtactacctgaatggccattggaccatcgaggcagccagggccctgcccgccgcgtccactattctgcattatgagcgcggagccgaaggcgacctggcacccgaacggctgcacgcccggggacccacctccgaaccccttgttattgagttgattagccaggagcctaatcctggtgtgcactacgagtaccacctcccactgcgtagacctagtcctggcttctcttggagccatggctcatggtcggattgcagtgccgaatgcggcgggggtcatcaatcaaggctggtgttctgtactatagatcatgaagcctatccggatcacatgtgccaacggcagccgagaccagctgatcgccggtcctgtaacttacatccatgcccagagacgaagagatggaaggctggaccctgggccccctgctccgcaagttgtggcgggggctctcagtcccgtagcgtctactgtatttccagcgacggtgctggaattcaagaagcagtggaggaggccgaatgcgccgggctgccggggaaaccccccgcaattcaagcctgcaacctgcagagatgtgcggcatggtccccggaaccctggggcgagtgttcggtgagctgtggagttggggtgcgcaagcgctcagtaacctgtcgtggcgagagggggagcctgttacacaccgccgcctgcagcctggaagataggccacctttgaccgaaccatgtgtgcatgaggattgccctctgttgtcagaccaggcttggcacgtcgggacctggggtctgtgcagcaaatcctgttcttcaggtacaaggcggcgacaagtaatctgcgccatcggccctccatcccattgcgggtctctgcagcattcaaaacccgtcgacgtggagccttgtaacacccagccttgtcatctccctcaggaagtcccatccatgcaagatgtgcatacccccgccagtaacccctggatgccgttgggacctcaggagtcacctgcctcggactcaagaggccagtggtgggctgcccaggagcacccgagcgcccggggtgaccacaggggcgaacgaggtgaccctagaggggaccagggaacgcacttatccgctctcggcccggcccccagtctccagcagcctccttaccagcagcccctgaggtccgggtctggccctcatgactgtcgtcattcccctcacggctgctgccccgatgggcatacagcctccctgggcccccagtggcagggatgtcctggggccccttgtcagcaaagccgctacgggtgctgtccggacagggtgtccgtggccgaaggacctcatcacgctgggtgtaccaaatcttatggaggcgacagtacaggcggcatgccccgttccagggctgtggcaagcaccgtgcataatactcatcaaccccaggcccaacaaaacgagcccagtgaatgcaggggatcacagttcggctgctgttatgataacgtcgccactgcggcggggcctctaggtgaaggctgtgttgggcagccgagccacgcctaccctgtgagatgcctgttgccatccgcccatggatcatgcgccgattgggcagccagatggtattttgtagccagtgtggggcagtgcaatcgcttttggtacgggggatgccacgggaatgccaataacttcgctagcgaacaggagtgtatgtcttcatgccagggcagtcttcatggccctaggaggccacagccaggcgcaagtggaagatccacacataccgatgggggtggaagtagccccgctggcgagcaggagccttcacagcaccgcacaggggctgctgttcagagaaagccctggccttccggaggtttatggcgccaagaccagcagccaggacccggcgaggcccctcacacacaagcttttggagaatggccatgggggcaggagctgggatcccgggcacccgggttaggaggcgacgccgggtctcctgctcccccatttcacagctcatcttataggatttctcttgctggagtggaaccgtctcttgtgcaggcagccctgggtcagctggtgagactctcctgttcggacgacaccgcacctgaatcgcaagccgcctggcagaaggatgggcagccaattagttccgacagacaccggttacagtttgacggatccctgattattcatccactgcaagctgaggacgcaggaacatattcctgcggttctactaggcctggcagggactctcagaaaatccagctccggattattggaggtgatatggcagtgctctccgaggctgagctgagtagattcccacaaccaagggatcccgcacaggatttcggccaggcaggcgccgcaggacctctaggggcgatcccaagctcccatcctcaaccagccaatcgtctgcgcttagatcagaatcaaccccgcgtcgttgacgctagtcctgggcagaggattaggatgacctgccgagccgagggatttcctccgcccgctatcgaatggcaaagagatgggcagccagtgagtagtcctaggcaccagcttcaacccgacggctctctcgtgattagtcgagttgccgtggaagatgggggtttctacacgtgtgtggcatttaatggccaagaccgagatcagagatgggttcagctgcgagtccttggcgaactgacaatttcggggctgcctccaaccgttaccgtacctgagggagatacagctcgactcctatgtgtggtggccggagaatcggttaatatacgatggtctcgcaacggactccccgtccaggctgatggccatcgggtgcaccaaagccctgatgggaccctgttgatttacaacctgcgagcaagggatgagggcagctacacatgtagcgcctaccagggcagccaggccgtgagcagaagcacagaagtgaaagtcgtgtctccagcgccgaccgctcagcctagggacccgggtcgagactgtgtggaccagccagagttggccaactgtgacctgatcctccaggcccaactctgtggaaacgagtattactcatcattttgttgtgcctcttgttctagatttcagccccatgcacagcctatctggcagtag

SEQ ID NO: 6796 - DNA, 261 bp, synthetic construct
  misc_feature 1..261: note = source = /note="Description of Artificial Sequence: Synthetic coding sequence"
  source 1..261: mol_type = other DNA
atgcaacttttcctgctcctgtgcctggtcttactgtcacctcagggagcctccctgcacaggcaccacccacgcgaaatgaagaagagggtggaggatctccacgtgggggccaccgtagctccaagtagccggagagatttcacttttgacctgtacagggcccttgcatcagcggcaccctcacagtcaattttttttagtcccgtgagcataagtatgtccctagccatgctgagccttggggccgggagctcttag

SEQ ID NO: 6797 - DNA, 906 bp, synthetic construct
  misc_feature 1..906: note = source = /note="Description of Artificial Sequence: Synthetic coding sequence"
  source 1..906: mol_type = other DNA
atgcagctgtttcttctgctgtgcctggtactgttgtcccctcagggcgctagcctgcataggcatcaccctagagagatgaagaagcgcgttgaggacctgcacgtaggggcaacagttgcgcccagttctcggagggatttcacttttgacttatatcgcgctctcgcttccgcagccccatcccagtctatcttctttagccccgtctcaattagcatgtcactggccatgctctcgctgggcgcaggaagtagcaccaagatgcagatcttagaaggactgggcttgaatctgcaaaagtcttctgagaaggagttacatcgcggctttcagcagctgctgcaggagctgaaccagccccgcgatggctttcaattatccctggggaatgcactgttcaccgacctggtggtggatctgcaagatactttcgttagtgcaatgaaaacgttatatctggctgacacttttcccactaattttagggattcagcaggggccatgaaacaaatcaacgactacgtagccaaacaaaccaaggggaaaatcgtggacttgcttaaaaatctggactccaatgccgtggtgatcatggtgaactacatcttcttcaaggccaaatgggagacaagtttcaatcacaaaggcactcaggaacaggatttctacgtgacaagcgaaacggtagtgagagtgcctatgatgtctcgggaggaccagtatcactacttgctggatcgcaacctaagctgcagagtcgtcggggtgccataccagggtaatgccaccgcactgtttatcctgcctagcgaaggtaaaatgcagcaggttgagaatggcctgtccgagaagaccttgcgtaagtggctgaagatgttcaaaaagcgatactttcagacttag

SEQ ID NO: 6798 - DNA, 411 bp, synthetic construct
  misc_feature 1..411: note = source = /note="Description of Artificial Sequence: Synthetic coding sequence"
  source 1..411: mol_type = other DNA
atggaaacttttcccctgctgctgctgagcttgggcctggtgctggcagaagcctccgaaagcactatgaagataataaaagaggaattcactgacgaggaaatgcaatacgacatggctaagtccggtcaggaaaaacagactatagaaattctcatgaatccaattttattggtgaagaacacctcactcagcatgtccaaggacgatatgtcgagtacactgctgactttccgcagcctgcactacaatgatcccaaaggtaattcaagtgggaacgacaaggagtgctgtaacgatatgacagtctggcggaaagtatccgaggctaatggatcatgtaaatggtccaataacttcattcgaagttcaacggaagtgatgaggagggtgcaccgtgctcctagttag

SEQ ID NO: 6799 - DNA, 1221 bp, synthetic construct
  misc_feature 1..1221: note = source = /note="Description of Artificial Sequence: Synthetic coding sequence"
  source 1..1221: mol_type = other DNA
atgcaactgttccttcttctatgcctggtgctccttagtccccagggtgccagtttgcaccgccatcatcctagggagatgaagaagcgcgtggaagacttgcatgtgggcgctacagtcgctcctagctccagacgggattttacattcgacttatacagggctcttgcatctgcagctccaagccagtcaatctttttcagccccgtctccattagtatgagccttgcaatgctttccctgggtgccggttctagtacaaagatgcagattcttgagggactcggcctgaacctccagaaaagctccgagaaggagctccaccgggggttccagcaactacttcaggagcttaatcagccgcgagatggatttcaactctcactgggcaacgctttatttaccgacctcgtcgttgacttgcaggacacttttgtgagcgcaatgaagactctgtaccttgctgatacattcccaaccaatttcagagacagtgccggggccatgaaacaaattaatgattatgtggccaaacagacaaaaggcaaaatcgtcgacctgctgaaaaatttagactccaatgctgtcgtgatcatggtaaattatatattcttcaaagccaaatgggaaaccagcttcaaccataaagggacccaggagcaggacttctacgtgacgagtgagactgttgtcagagtgccaatgatgtctcgcgaggatcagtaccattacctgctggaccgaaatctctcctgccgggttgtgggtgtaccctatcaaggaaatgccacagccctgttcatcttgccaagcgaggggaagatgcaacaggttgagaacggactgtctgagaagacgctgcggaaatggttaaagatgttcaagaaacggcaactggagttgtatctgccaaaattctctatagagggcagctatcaacttgagaaggtcctgccaagtctcggcatctctaacgtcttcacctcccatgctgaccttagtggaatatcaaaccacagtaacatccaagtgtcagagatggttcacaaagcagtcgtggaggtcgatgaaagtggcactagagcagccgccgcaacaggcacaatctttacatttcgcagcgctagattgaactcacagcgtctggtatttaacaggcctttccttatgtttatcgtggataacaatattctgttcctggggaaagtcaaccgtccatag

SEQ ID NO: 6800 - DNA, 618 bp, synthetic construct
  misc_feature 1..618: note = source = /note="Description of Artificial Sequence: Synthetic coding sequence"
  source 1..618: mol_type = other DNA
atgatgcgaaccctgattactacacacccactccctctcctgcttctccctcaacagctcctgcaactcgtgcagttccaggaagtggacacagatttcgactttcctgaggaggacaagaaggaggagttcgaggagtgcctagaaaaatttttttcaaccgggcctgcacggccacctacaaaggagaaggtcaaaagaagagtgctgattgagcccggcatgcctctaaatcacattgagtactgtaaccatgaaatcatgggcaagaacgtgtactataagcacaggtgggtggcggagcattactttcttctcatgcaatacgacgaactgcaaaagatctgttataacaggtttgtgccctgcaagaatggcataaggaagtgcaaccggtcaaagggtttggttgagggcgtctactgtaatctcacggaggcctttgagatccctgcctgcaaatatgagagcctatatcgaaaagggtacgtcctaatcacatgcagttggcagaacgaaatgcagaaaaggatccctcatacaatcaatgatttagtggagccccctgagcatcggtccttccttagcgaggacggcgtcttcgtcatttctccatag

SEQ ID NO: 6801 - DNA, 240 bp, synthetic construct
  misc_feature 1..240: note = source = /note="Description of Artificial Sequence: Synthetic coding sequence"
  source 1..240: mol_type = other DNA
atgtccttttctgcgactattttattcagccctccttcaggttcagaggcgcgctgttgttgttgcgcttgcaaaagtgaaaccaacggggggaacacaggttcacaagggggtaacccgcccccctcaacccccattactgtcaccgggcacggcctggcagtccagtcatccgagcaactgctacatgtcatctatcagagggtcgataaagctgtggggctcgccgaagctgcctag

SEQ ID NO: 6802 - DNA, 618 bp, synthetic construct
  misc_feature 1..618: note = source = /note="Description of Artificial Sequence: Synthetic coding sequence"
  source 1..618: mol_type = other DNA
atgatgagaacgcttattacaacacaccctcttccattgctgctgctgccccaacagctcctgcagctcgtgcagttccaggaagtagacacagatttcgattttccggaggaagacaagaaagaggaattcgaagaatgcctggagaaattcttctccaccggtccagcacggccccctacaaaagagaaggtgaagagaagggtacttatcgaacctgggatgcctcttaatcacatcgagtactgtaaccacgaaataatgggaaagaatgtatattacaaacatcgctgggtggctgagcactactttcttctgatgcagtatgatgagcttcaaaaaatctgctataatcgattcgtgccttgcaagaacggcatcaggaagtgtaacagatcaaagggtctggtggagggggtctactgcaatcttaccgaggctttcgagattcctgcttgcaaatacgagtcattataccgcaagggctacgtgcttatcacatgcagctggcaaaatgaaatgcagaagaggattccccatacaatcaacgatttagtggaaccaccagagcaccgctcatttctgtccgaagatggagtgttcgtgatttctccatag

SEQ ID NO: 6803 - DNA, 3789 bp, synthetic construct
  misc_feature 1..3789: note = source = /note="Description of Artificial Sequence: Synthetic coding sequence"
  source 1..3789: mol_type = other DNA
atgagactcctgctgttagtgcccttacttctggctccagcacccggcagcagtgctcccaaagttcgccggcaaagcgacacctggggtccttggtcccaatggagtccttgttcaagaacctgcggtggcggagtgtcttttcgtgagaggccatgttactcgcagcgtcgagacggcggttccagctgtgttggtccagctcgatcgcacagaagctgccgcacggagtcatgtcccgacggagcccgcgacttcagagcagagcaatgcgcagagttcgacggggccgagttccagggaaggaggtaccgttggctgccatactattccgcgcccaataagtgcgaactgaactgcatccctaagggagagaacttttactacaagcaccgagaagcagtggttgacggcacaccctgtgagcccggcaagcgcgatgtctgcgtcgacggcagctgcagagtggtgggatgtgaccacgaactggatagctcaaagcaagaagataagtgtctgcgatgcggaggcgatggtactacctgctacccagttgccggcacattcgacgccaacgacctgagtcggggatacaatcagatactcatcgttcctatgggggcgactagcattctcatcgatgaggccgccgcaagccggaactttctggccgttaagaatgtgagaggtgaatattatttgaatggacactggaccattgaagccgcccgggccctccccgccgccagcacaatactccattatgagagaggagccgagggcgatctagctcctgagaggctacacgcccgggggccaacctcagaacctctggtgattgaactgatcagccaggaacctaatcccggcgttcactatgaataccacttgcccttgagacgcccttcccctggtttttcgtggtcacacggcagctggtctgactgtagtgctgagtgcggtggcgggcatcagtcacgcttagtattttgcacaatcgatcatgaggcctacccagatcatatgtgtcagcgccagccccgccccgcagacagacgatcatgcaacctgcacccctgtccagaaactaaaagatggaaagcaggtccttgggccccatgctccgcctcatgcggcgggggatcacagtcccggtccgtgtactgtataagttccgacggcgccggtatccaggaggccgtcgaggaggccgagtgtgccggtctccccggcaagccacctgctatccaggcgtgtaatctccaacgctgtgctgcctggagtccggaaccgtggggtgaatgctctgtgagttgcggcgtcggagtgcgcaaaagatctgtgacttgcaggggcgagagaggttccttgctccatacggctgcctgttctctcgaggatcgtccccccctcacagagccgtgcgtccatgaggattgtccactgttgtcagatcaggcctggcacgtggggacctggggcctctgctccaagagctgcagcagcggaacccgcaggcggcaggttatttgcgcaattggccccccaagccactgtgggagccttcaacacagcaagccagtggacgtagaaccttgcaacacccagccatgtcatttgcctcaggaagttccctccatgcaggacgtgcatacgccagcaagtaatccttggatgccgctggggccccaggagagccctgcttccgattcccggggacaatggtgggcagctcaggaacacccatctgctcgaggcgatcaccgcggagaacgaggagaccccagaggtgaccagggtactcacctatctgccctgggaccagcaccttcattgcagcagcccccgtatcagcagcctctgagatctggtagtggcccacacgactgcagacattcccctcatggctgttgccctgatggccacacagcttctctcggcccacagtggcagggctgcccaggagcaccctgccagcaatctaggtacgggtgttgtccagaccgggtttcagtagccgagggaccccatcatgcgggttgtaccaaaagttacggtggcgattccactggcgggatgccaaggagtagggccgtagccagcaccgtgcacaatacccatcaaccccaggcacagcagaatgagccctcggagtgtcgaggcagccagttcggctgctgttacgacaatgtggccactgctgctggccctctgggagagggctgcgtgggacagccatcacacgattgggccgcccggtggtactttgtcgctagcgtcggccagtgcaaccggttttggtatggaggatgtcacgggaatgctaataacttcgcgtccgaacaagagtgtatgagctcgtgccagggatccctgcacgggccccgcaggccacagcctggcgcctccgggcgcagtacacacaccgatggagggggctcgtccccagctggcgagcaagaaccctcacaacataggaccggggcagcagtgcagaggaaaccctggccaagcggagggctttggcgccaggatcaacaacctggtccaggcgaggctccccacacgcaggcctttggcgaatggccatgggggcaggaattaggatcccgggccccaggtctgggcggtgatgccggatcacctgctccaccttttcattcatcttcctaccgaattagcctggctggggtcgagccatcgctggtgcaagccgccctgggccagttagtgaggctgagttgctccgatgacaccgccccagagtcacaggccgcttggcaaaaagacgggcaaccaatttcttctgacaggcatagattgcagtttgacggaagtctcatcattcaccccctacaagccgaagatgcagggacatattcttgcggatccactcggcctggccgcgactcccagaagatacagttgcggatcataggaggggacatggcagttctgtccgaggctgaactgagtcgcttcccccagccacgagatccagctcaggactttgggcaagcaggcgccgctggcccactgggcgcaatcccctcctcacacccccagcctgccaacaggctcagactggatcagaaccaacccagagtggtggatgccagccccggccaacggatcagaatgacctgcagggcggagggctttcctcctccagctatcgagtggcagcgagacggccagccagtcagctctccgcggcatcaactgcagccggacggcagtttggtgataagtcgtgtggccgtagaggacgggggcttttacacgtgtgtcgcctttaacggccaggaccgcgatcaaaggtgggtgcagcttagagtgcttggcgaattgactattagcgggctgcctcctacggtgacggttccggaaggagatactgctcggttactctgtgtagtggctggcgaatccgtcaatatccggtggtcccgcaacggcctccctgttcaggctgacggacatcgcgtgcatcagtcacccgatggtaccctgttaatctacaatttgagagccagagacgaagggtcctacacatgcagcgcataccaaggtagccaggccgtcagtagatcaaccgaagtcaaagtggtgtccccagcacctactgcccagccccgagaccccggcagggactgcgttgatcaacccgaactggccaattgcgaccttatcttacaagcccagctgtgtggaaacgaatactactcatccttttgttgcgccagctgttctagattccagcctcacgcccagccaatatggcaatag

SEQ ID NO: 6804 - DNA, 321 bp, synthetic construct
  misc_feature 1..321: note = source = /note="Description of Artificial Sequence: Synthetic coding sequence"
  source 1..321: mol_type = other DNA
atgagttttagtgctactattctgtttagcccgcccagcggaagcgaagcaagatgctgttgctgcgcatgtaagagtgagacaaacggaggcaataccggttcccagggcggcaacccccccccttctactcctatcacagtgactggtcacgggttagccgtgcagtcttcagaacagctacttcatgtcatttatcaaagagtggacaaggcagtgggtttagctgaggccgcactagggctggccagagccaacaacgagttactgaagcggctgcaggaggaagttggtgacctccgtcagggcaaggtgtcctag

SEQ ID NO: 6805 - DNA, 444 bp, synthetic construct
  misc_feature 1..444: note = source = /note="Description of Artificial Sequence: Synthetic coding sequence"
  source 1..444: mol_type = other DNA
atggctctgcaaagaacacactccttgctcctactcttactgctgactttgcttggcctgggacttgttcagccatcctacggccaggatggtatgtaccagcgattcctcaggcagcacgtgcaccccgaggagactggcggaagtgacaggtattgtaacctcatgatgcaaagacgtaagatgactctataccactgtaaacggtttaacactttcatccatgaggatatctggaatatccgctctatctgttcaactacaaacatccaatgcaaaaatggcaagatgaattgccatgagggagtggtgaaagtgaccgattgccgtgacactgggagctctcgcgcccccaactgccgatacagggctattgcttctacgagaagggtggtgattgcctgtgaggggaatccccaggtccctgtgcactttgatggctag

SEQ ID NO: 6806 - DNA, 435 bp, synthetic construct
  misc_feature 1..435: note = source = /note="Description of Artificial Sequence: Synthetic coding sequence"
  source 1..435: mol_type = other DNA
atgcagctgttccttttgctatgtttagtactcctctcgccccagggagcttctctccacagacatcacccgcgcgagatgaaaaagcgagtcgaggatctgcacgtgggggccacagtggctccatcttcacggcgcgattttacattcgacctgtaccgagccctggccagtgcagcccctagtcagagtatattcttttcacctgtgtcaatcagcatgtcactagccatgttgagtctgggggcagggagcagcaccaagatgcagatactggaggggttgggcctcaatctccagaagtctagtgagaaggagttgcatcggggttttcagcagttgcttcaggagctgaaccagccccgggacgggtttcaactttccctagggaacgccctgttcaccgacctcgtggtggatcttcaagacacttag

SEQ ID NO: 6807 - DNA, 540 bp, synthetic construct
  misc_feature 1..540: note = source = /note="Description of Artificial Sequence: Synthetic coding sequence"
  source 1..540: mol_type = other DNA
atgggatcatctggactgctcagtttgctcgttctgtttgttctgttggccaatgttcagggaccaggcttgactgattggcttttcccccggaggtgcccaaagataagggaggagtgtgaattccaggagagagacgtctgcaccaaggatagacagtgccaggataataagaaatgctgcgtattctcatgcggaaaaaagtgtctggacctaaaacaggatgtctgcgagatgccaaaagaaactggtccctgtttggcctacttcctacattggtggtatgataaaaaagataatacctgttccatgttcgtatatggaggatgccaaggtaacaataataattttcagtccaaagccaactgcctcaacacttgtaaaaacaagcaaccttgccccaaaattaaagtggagtgtgaggtggaagagattgatcaatgcacaaagcccagggactgcccagagaatatgaagtgttgccccttttcacgcggaaaaaagtgtctcgatttccgcaaagcatcattatctacctag

SEQ ID NO: 6808 - DNA, 444 bp, synthetic construct
  misc_feature 1..444: note = source = /note="Description of Artificial Sequence: Synthetic coding sequence"
  source 1..444: mol_type = other DNA
atggcactgcagcgaacacacagcctgctcttgctgctcctgctcactcttctcggcttagggcttgtgcagcccagttacggccaggatggcatgtaccagaggtttcttcgtcagcacgtgcatcccgaggagacaggaggatcggacaggtattgcaatttaatgatgcagagaagaaaaatgacactatatcattgcaaacgcttcaatacgttcattcacgaggatatttggaatatcaggagcatatgtagcaccaccaatattcagtgtaagaacgggaaaatgaactgccacgaaggggtagtgaaggtgaccgactgccgggatactgggagttccagagccccaaactgcagatatagagctatagcctccacccggcgcgtggtgatcgcttgcgaggggaatccacaagtccccgtgcatttcgacggttag

SEQ ID NO: 6809 - DNA, 600 bp, synthetic construct
  misc_feature 1..600: note = source = /note="Description of Artificial Sequence: Synthetic coding sequence"
  source 1..600: mol_type = other DNA
atggagacattcccactgctcctgctgtctttgggtctggtactggccgaggcaagcgagtccactatgaaaataatcaaagaggagttcaccgatgaggaaatgcagtatgacatggccaaaagtggccaggaaaagcagaccatcgaaattcttatgaacccaatactgctggtcaaaaatacaagcctcagtatgtccaaggatgatatgagttcaactctgctgaccttcaggtctctgcattataacgaccccaaggggaacagctcagggaacgataaagaatgctgtaatgatatgacagtatggagaaaggttagtgaggccaacggttcgtgcaaatggtccaataacttcatccggtcctccacggaggtgatgagacgggtgcatcgcgccccttcctgcaagttcgtgcagaaccctggcatttcatgctgcgagtcactggaactggagaacacagtatgccagttcacaactggcaaacagttccccaggtgtcagtaccattctgtcacatctcttgaaaaaattctaacagttctgacaggccattccctcatgtcctggctggtgtgcgggagcaaactatag

SEQ ID NO: 6810 - DNA, 153 bp, synthetic construct
  misc_feature 1..153: note = source = /note="Description of Artificial Sequence: Synthetic coding sequence"
  source 1..153: mol_type = other DNA
atgagcttttctgccacaatcttattctccccgcccagcggatccgaggcccggtgttgctgttgcgcctgtaagtctgagactaacggtggcaatacggggtctcaggggggcaaccccccaccaagcacccccataaccgtaactgggtag

SEQ ID NO: 6811 - DNA, 75 bp, synthetic construct
  misc_feature 1..75: note = source = /note="Description of Artificial Sequence: Synthetic coding sequence"
  source 1..75: mol_type = other DNA
atgcagctctttctgttattatgtcttgtcctgctaagtccccagggcgcctccctgcaccgtcaccatccctag

SEQ ID NO: 6812 - DNA, 633 bp, synthetic construct
  misc_feature 1..633: note = source = /note="Description of Artificial Sequence: Synthetic coding sequence"
  source 1..633: mol_type = other DNA
atgagcgccgggaaaatgatgcgaacactgataaccacacacccactaccactactcctgctgcctcaacagctcctgcagctcgtccagtttcaggaagttgacacagattttgactttcccgaagaagataagaaggaagaatttgaggagtgcttggagaagttcttttcgactggaccagcccgacctccaactaaagagaaagttaagcgtagagtcttaatcgaacccggcatgccactgaatcatatagaatattgtaaccacgagataatgggaaaaaatgtttattataagcatcgttgggtggcggagcactatttcctcctgatgcagtatgatgaattacaaaaaatttgctacaaccggttcgtgccgtgtaagaatgggattcgtaaatgtaacagatccaaaggtctggtggagggcgtttactgcaacctgaccgaggccttcgagattcccgcttgtaaatacgaatcgctctatagaaagggttatgtccttatcacttgctcatggcagaacgagatgcagaagaggatcccgcacaccattaacgacctggtagagcccccggaacacaggagttttctcagcgaggatggcgttttcgtaatcagtccctag

SEQ ID NO: 6813 - DNA, 36 bp, synthetic construct
  misc_feature 1..36: note = source = /note="Description of Artificial Sequence: Synthetic coding sequence"
  source 1..36: mol_type = other DNA
atgagcttttcggccaccatcttgttctcaccatag

SEQ ID NO: 6814 - DNA, 444 bp, synthetic construct
  misc_feature 1..444: note = source = /note="Description of Artificial Sequence: Synthetic coding sequence"
  source 1..444: mol_type = other DNA
atgataatcatggtgatcattttcctcgtgctgcttttctgggaaaatgaagtgaacgatgaggcagtgatgagcacactggagcacctgcatgttgattacccccagaacgacgttccagtacctgcccggtactgtaatcacatgatcatacaaagggtgatccgcgagcctgatcacacgtgtaaaaaagaacacgtcttcatacacgaacggccccggaagattaatggcatatgtattagtcccaagaaagtggcgtgtcaaaatctgagcgcaatcttctgtttccaatcagagaccaagttcaaaatgactgtgtgccagctcatcgagggaacaaggtaccccgcttgtcggtaccactatagccccactgaaggcttcgttttagtaacatgtgatgacctccggcctgatagcttcctgggctatgtgaaatag

SEQ ID NO: 6815 - DNA, 696 bp, synthetic construct
  misc_feature 1..696: note = source = /note="Description of Artificial Sequence: Synthetic coding sequence"
  source 1..696: mol_type = other DNA
atgcaactctttctgctactttgtctggtcctgttgtcccctcagggggccagtctacatcgccatcacccacgcgaaatgaagaagcgcgttgaggacttgcacgtgggcgctactgtcgctccgagttcaaggcgtgatttcaccttcgatctgtaccgggccttggcttctgccgcccccagccagagcatcttttttagtcccgtctctataagcatgtccctcgccatgctttctttgggcgctgggtcctccaccaagatgcagatccttgaagggctaggcctaaatctgcagaagtcatctgagaaggagctccatcgcggatttcagcaattacttcaggaactgaaccagccccgggatggatttcagctctcactcgggaacgcattgttcacagacctggtcgtggacttgcaggatacattcgtgagcgcgatgaagactctttatcttgcagacacttttccgaccaatttcagggattccgccggtgcaatgaaacagattaacgattacgtggccaaacaaacgaaggggaagatcgtggacctgctaaagaatctggacagcaacgccgtggttattatggtcaactacatattttttaaggctaaatgggaaactagcttcaaccacaagggcacccaggagcaagacttttacgtgactagcgagaccgttgtgtag

SEQ ID NO: 6816 - DNA, 1626 bp, synthetic construct
  misc_feature 1..1626: note = source = /note="Description of Artificial Sequence: Synthetic coding sequence"
  source 1..1626: mol_type = other DNA
atggccaagttcggagttcatcggattcttcttttagccatctccctgactaagtgtctcgaatcaaccaaactgttggctgacctgaagaagtgcggagacctggaatgtgaagccctaattaaccgcgtctctgcaatgcgagattataggggacctgattgccgctacttgaattttactaagggtgaggagatcagcgtgtacgttaaattagccggcgagagggaggatctgtgggccggcaagggcaaggagtttggatacttccctcgagacgctgtgcagattgaggaagtgttcattagcgaggagatacagatgtctactaaagaatcagacttcctttgtttgctgggggttagctacactttcgataacgaggacagcgaactgaatggggattacggagagaatatctacccctacgaggaggacaaggacgagaagtcatccatttatgaatctgattttcagatcgaacctggcttttacgctacctatgagtccaccctgtttgaagaccaggtgcccgcactcgaggcaccggaggacatcggaagcaccagcgagtcaaaggactgggaagaggtggtagtggaatcaatggagcaggatagaatccctgaggtacacgtccccccctcgtctgccgtctctggcgtgaaagagtggttcgggctgggaggcgagcaggcagaagagaaagccttcgagtccgttattgaacctgttcaggagtcatcatttaggtccaggaaaatagctgtagaagacgaaaatgatctcgaagagctgaataatggtgagccacagacagaacatcaacaggagtcggaatctgagattgattcagttcctaagacacagagcgaacttgctagcgaatccgaacacatacccaaacctcagtctacagggtggtttgggggaggtttcacgtcatatttggggtttggggacgaggacaccggcctggagctgatcgccgaagagagcaatccacctctgcaggattttccaaattctattagtagtgacaaagaggctaccgtgccatgtaccgaaatcttgaccgagaagaaggatactataaccaacgattccttaagtcttaaaccttcatggtttgatttcggatttgcgatcctggggtttgcttacgctaaagaagataagatcatgctagacgataggaagaatgaagaagatggaggcgctgatgaacatgagcaccccctcacgagcgagttagaccctgaaaaagagcaggaaattgaaactattaagatcattgagaccgaagaccagattgacaagaaaccagtctccgaaaaaacagacgagtccgatacaattccttacctcaagaagtttttatacaactttgacaatccttggaattttcagaatatacctaaggagaccgagttaccgttccctaagcagatactggaccagaacaacgtgattgagaatgaggaaaccggagaattctcaattgataactatccaacagataacactaaggtcatgatcttcaaatcttcctattcccttagcgggtggtatgagaatatctatattcgaatctactttattttcaagcataacttattcctgtag

SEQ ID NO: 6817 - DNA, 1245 bp, synthetic construct
  misc_feature 1..1245: note = source = /note="Description of Artificial Sequence: Synthetic coding sequence"
  source 1..1245: mol_type = other DNA
atgaacccaaccctaggcctcgcaatctttttggcggtcttactaactgtcaaggggctgcttaagccctcctttagcccgcgcaactacaaagctttgtccgaggtgcagggatggaaacagagaatggctgccaaggaactagcacggcaaaatatggacctggggttcaagctgttaaaaaaactggctttttataacccagggcgcaacatctttctgtcccctctgagtatcagcacagctttctccatgttgtgtctcggtgcccaggactctacgctcgatgaaattaagcagggcttcaactttcgtaagatgccagagaaggatttgcatgaggggttccactatatcattcacgaactaacccagaagacgcaggacctcaagctgtcaatagggaacaccctgtttatagatcagcgcttgcagccacagcgcaaatttctcgaagatgccaaaaacttttactctgccgagacaatcctcacaaactttcaaaatctggaaatggctcagaagcagatcaacgactttatttcgcaaaaaactcatggcaaaattaataacttaattgaaaatatagaccctggcacagtaatgctgcttgcgaattatatttttttcagagctcgatggaaacatgaatttgaccctaatgtgacaaaggaggaggattttttcctcgagaagaattcatctgtcaaggtgcccatgatgtttcgcagtggcatctaccaggtgggctatgacgataaactctcatgcacgatcctcgagatcccctaccagaagaacattacagcgatctttatcctcccggacgaaggcaaactgaaacacctggagaagggactgcaggtggacacatttagccgctggaagacactgctctcacggagagtggtggacgtctcagttcctcggttacatatgactggcacattcgacttgaaaaaaaccctctcttacataggagtttctaagatttttgaggagcatggagatctgaccaaaatcgccccacaccggtctctgaaggttggggaagccgtccacaaggctgagctcaagatggatgagagaggcacagagggagccgctggaaccggagcccagacgctccccatggaaacccccctcgtggtgaagattgataagccctacctccttctgatatatagcgaaaagatccctagtgtgctcttcctcgggaaaatcgtcaaccctatcggaaaatag

SEQ ID NO: 6818 - DNA, 618 bp, synthetic construct
  misc_feature 1..618: note = source = /note="Description of Artificial Sequence: Synthetic coding sequence"
  source 1..618: mol_type = other DNA
atgatgcggactctgattactacacaccctctgcctttactactcctaccacagcagctgctgcagttagtccagtttcaggaggtagacacagacttcgacttccctgaggaggacaagaaagaggaattcgaggagtgtctggagaagttcttctctacaggcccagcgagacctcccacgaaggagaaggttaaaaggcgtgtcctcatagagcctggcatgcctttgaaccacatcgagtactgcaaccatgagatcatgggaaagaatgtgtactacaagcataggtgggtcgccgagcactactttctgcttatgcaatacgatgagctgcagaaaatttgctataacagattcgtgccctgcaagaacgggattaggaagtgcaaccggtctaaagggctcgttgagggggtatattgcaaccttactgaggcctttgagatccccgcctgcaaatacgaatctctgtatagaaagggatatgtcttgataacctgctcatggcagaacgagatgcagaaaagaatcccccatacaattaacgacctcgtagaacccccagagcacagatcctttctgagtgaggatggagtcttcgtcatctccccttag

SEQ ID NO: 6819 - DNA, 516 bp, synthetic construct
  misc_feature 1..516: note = source = /note="Description of Artificial Sequence: Synthetic coding sequence"
  source 1..516: mol_type = other DNA
atggagacatttcccctactcttactaagcttaggtttggtcctcgccgaggctagcgagtcaacaatgaaaatcattaaggaagaatttacagacgaggaaatgcagtacgacatggctaagtcagggcaagagaagcagacaatagaaatccttatgaatccgatcctgctggtgaaaaatacttcactgagcatgagcaaggatgatatgagttccacgttacttacatttcggtccctccactacaacgacccaaaggggaacagctcagggaatgacaaagaatgctgtaacgatatgacagtatggcgaaaggtctccgaagctaacgggagttgcaaatggtccaacaatttcatacgcagcagcactgaggtgatgagacgcgtccaccgtgctccctcctgcaagttcgtacagaaccctggaatcagctgctgtgagtccctggaactagaaaataccgtgtgccaattcactactggtaagcagtttccacggtgtcagtactag

SEQ ID NO: 6820 - DNA, 633 bp, synthetic construct
  misc_feature 1..633: note = source = /note="Description of Artificial Sequence: Synthetic coding sequence"
  source 1..633: mol_type = other DNA
atgagcgctggcaagatgatgcgaacattaatcactacccaccccctgccccttctgctgcttccacagcagctgctccagctcgtacagtttcaggaggtcgacaccgactttgacttcccagaagaggataaaaaagaggagttcgaggagtgcctggagaagttcttctctacggggcccgcacggccacccactaaggaaaaggtgaaaaggcgggtccttatcgaaccagggatgccactgaaccatattgagtattgcaatcatgaaattatgggaaagaatgtgtactacaagcatagatgggtggctgaacactattttctgctgatgcagtatgatgaactgcaaaagatctgttacaatagattcgtgccctgcaaaaatggtattcgtaaatgcaatcgaagcaagggacttgtcgagggcgtttactgtaacttaactgaggcattcgagatcccagcctgcaaatatgagtcactctaccggaaaggatatgtgctaatcacctgcagttggcagaatgagatgcagaaacgcattccacacaccattaatgatctggtggagcccccagagcacaggagcttcttgtccgaggacggagtttttgtcatcagcccctag

SEQ ID NO: 6821 - DNA, 537 bp, synthetic construct
  misc_feature 1..537: note = source = /note="Description of Artificial Sequence: Synthetic coding sequence"
  source 1..537: mol_type = other DNA
atggagactttccctctcttactcctgagcttagggttggttctcgccgaagctagtgaaagcacaatgaagattattaaggaagaattcacggatgaagaaatgcagtatgacatggctaagtcagggcaggagaagcagactattgagattctcatgaaccctatcctgcttgttaagaacacgtctctgagcatgtctaaggacgatatgagttccaccttgctgacatttcgctcgctgcactacaatgatccaaaagggaatagcagcggcaacgataaggagtgctgcaacgatatgacagtttggcgcaaagtgtcagaggccaacggcagttgcaagtggagcaacaacttcatccgatctagtacagaggtgatgaggagagtgcaccgtgccccgtcgtgcaagttcgtgcaaaacccgggaatttcctgttgtgagagtctggagttggagaacaccgtgtgccagtttactacggggaagcagtttccaagatgccaataccattctgtcacttctctggaatag

SEQ ID NO: 6822 - DNA, 474 bp, synthetic construct
  misc_feature 1..474: note = source = /note="Description of Artificial Sequence: Synthetic coding sequence"
  source 1..474: mol_type = other DNA
atgcagctttttctacttctctgccttgtacttctcagcccccagggggcgtccttgcatcgacaccacccgcgcgagatgaagaaacgtgtggaagacctacatgtgggcgcaactgttgccccttcctcaaggcgtgattttacattcgatctgtacagagcgctagccagcgctgcgcctagccagtcaatttttttttctccggtgtccatctcaatgtccctggccatgttaagcttaggcgccgggagttctacgaaaatgcaaatcctggagggtctcgggctaaatttgcaaaagagttccgagaaagaactccacagggggtttcagcagctgctgcaagagctaaatcaaccacgggatggtttccagctctcacttgggaatgcactcttcaccgacctggttgtggatctccaggataccttcgtttctgcaatgaagaccctttacctggccgacacttag

SEQ ID NO: 6823 - DNA, 1035 bp, synthetic construct
  misc_feature 1..1035: note = source = /note="Description of Artificial Sequence: Synthetic coding sequence"
  source 1..1035: mol_type = other DNA
atgcccccacgcatgctggtcgctcccctgccattacacttcctgctagccgcagtgagctcggaaaatcggtctggaagacggcagtggcagcaagccgttgccgcaggctcaggcccaggaagaaatagctcacgcgccatacactggtccctccctagggcactcgtccctgccacggggactcgagcttcggggtctcagaagagacagaggcctccgaagggacaggaagccctatggtcccgcccccattctcgccactcagctgagcgagccggcggctctcactccgatcccggaagactctcggctcctctgggcctgggtctcccctcaggacgaggacgtcttacagccatgcccggaagggccccacttaggaccgttccaggagccctcggcgcctggctgctgggtggcctgtgggcgtggacgctgtgtggcctatgttctctcggagctgtcggagcccctaggccatgccaggctccccagcagtgggaaggtagacaggtgatgtatcaacagagttctggacgcaattctcgtgccctcctgagttatgacggtctgaaccagagagtccgggtgctcgacgaacggaaggctcttatcccatgcaagcggctcttcgagtatattctattatataaagatggagtgatgttccagattgaccaggcaactaaacagtgcagcaagatgactctgacacagccttgggatccactggatataccacagaactccacatttgaggaccaatactcaatcggggggcctcaagaacagatcacagtgcaggaatggagcgataggaagtctgcccgcagttacgagacttggatagggatctatactgtgaaagactgttatcccgtgcaggagactttcaccatcaactactccgtaattcttagcacacgattctttgatatccagttggggattaaggacccctctgtgttcaccccaccgtccacgtgccagatggcacaactggagaagatgtctgaggattgttcttggtag

SEQ ID NO: 6824 - DNA, 321 bp, synthetic construct
  misc_feature 1..321: note = source = /note="Description of Artificial Sequence: Synthetic coding sequence"
  source 1..321: mol_type = other DNA
ggacaacctaaggccgctcccagcgtcacgctcttccctccctctagcgaggagctccaggcgaacaaagctacccttgtgtgtcttgtttcagatttctatcctggagctgtaaccgtggcttggaaagccgacggctctcccgtgaaggtgggcgtcgagacgactaaaccctccaagcaaagcaataacaaatacgccgcctctagttatctgagtttgacgcccgagcagtggaagagtcaccgttcatattcttgcagggtgacgcatgagggcagtactgtcgaaaagacagtggcccccgcggaatgcagctag

SEQ ID NO: 6825 - DNA, 672 bp, synthetic construct
  misc_feature 1..672: note = source = /note="Description of Artificial Sequence: Synthetic coding sequence"
  source 1..672: mol_type = other DNA
atgcgcctgcagagacctcggcaggccccagcaggtgggagacgggcacctcgcgggggaagggggagtccctaccggccagacccaggccgtggcgcgaggcggcttcgcaggttccagaaaggcggggaaggagctccacgtgccgaccctccttgggccccacttggcacaatggcactgctggctcttctccttgtggtagccttacctagagtttggacagatgccaatctcacggcgcggcaacgcgatcctgaagacagccaaagaacggatgaaggcgataatcgggtttggtgccacgtatgtgagagagagaatactttcgagtgtcaaaatccacgaaggtgcaagtggaccgaaccctattgcgtgatcgccgctgtgaagatttttccaagattttttatggtggccaaacagtgctccgctggctgtgcggccatggagcgtccaaaacccgaggagaagcggttcctcctcgaggaaccaatgcccttcttctatctgaaatgttgcaagattcgttattgtaatctggaggggcctcctatcaattcctccgtatttaaagagtatgcaggcagtatgggtgagtcctgcgggggcctgtggctggccatactgttgctgctggctagtattgccgctggcttaagtcttagctag

SEQ ID NO: 6826 - DNA, 408 bp, synthetic construct
  misc_feature 1..408: note = source = /note="Description of Artificial Sequence: Synthetic coding sequence"
  source 1..408: mol_type = other DNA
atgacgccaactccaactgccgcttggacacctcccccacctctgcggccttccgcagccgctgcaggtgcacagtgtaggagttgtcccttccgcggaggctgcgccccaagcacagctagaacaccccccgcatgcatgcgccccgccggcccatgcgccccccctacatggccagcgcccagcacaaccacaagcacttgtacctctaggagagctgggtgtacagccagcagtgcaagctactctacccttgcagccgcctgctccctgcggcggtctggggtccgttggcctcccagcagtgcatatagtacatgggcctttgcaagctgttgtgcctcaagcgcgagttgccgctgttgttgttgttgctgggcggcaggtgcctggacctccgcttggtag

SEQ ID NO: 6827 - DNA, 1542 bp, synthetic construct
  misc_feature 1..1542: note = source = /note="Description of Artificial Sequence: Synthetic coding sequence"
  source 1..1542: mol_type = other DNA
atggccccagcacgcacaatggcccgcgcacggcttgcacccgcaggcataccggctgtggccctctggcttctgtgcacgctggggctacagggcacgcaggccggccccccccctgctcctcccgggctcccggccggcgcggactgtcttaactcctttacagcaggggttccaggctttgtgctcgataccaatgcctcggtgtctaatggtgcgacatttctagagagtccgacagtaagaagggggtgggactgtgtccgggcctgctgcacaactcagaactgcaatttggccctcgttgagctgcagccagataggggcgaggatgctattgcggcctgcttccttataaactgtctgtacgaacagaacttcgtgtgtaagtttgctcctcgagagggtttcatcaattacctgacccgggaggtgtaccgcagctatcgccagctgcgcactcagggatttggtgggtccggtatccctaaggcctgggcaggcatcgacctcaaagtccagcctcaggaaccgctggtccttaaggatgtggaaaacactgattggcgactccttcggggagatactgacgtgagagtcgaaagaaaggatcccaatcaggtggaactgtgggggctgaaggagggaacttacctgttccagttgactgtgacctcttcagaccacccggaagacaccgcaaacgtcacagtaaccgtactgagcactaagcagacggaggattactgcctggcgagcaataaagtcgggcgttgtagggggagcttccccaggtggtactatgaccctactgagcagatttgcaaatcgtttgtttacggtggatgtctaggtaacaaaaataattacttacgggaagaggaatgcattctggcttgtaggggagttcagggccccagcatggagcgtcggcatcctgtgtgttcgggtacctgtcagccaacccagtttcgttgctcaaacggctgctgtatcgacagctttctggaatgtgacgatacacccaattgccctgatgcgtctgacgaagccgcttgcgagaagtacacatctgggttcgatgagctccagcggatccactttcccagcgataagggtcattgtgtagacctccctgacaccggcctgtgcaaagagtccatacccaggtggtattacaacccttttagtgagcattgcgcccgcttcacctacggaggatgttatggcaacaaaaacaactttgaggaagagcagcagtgcctggaatcctgtagggggatctccaaaaaagatgtgtttggtctgaggcgcgagattccaatcccatcaacaggctctgtggagatggccgttgctgtgtttctggtgatctgcatagtggtggtcgtggcaatactggggtattgtttcttcaaaaaccagagaaaggactttcacggccatcaccatcacccaccccccacgcctgcttcctctactgttagcacgactgaagatacggaacatctggtgtacaatcacaccacaagaccactgtag

SEQ ID NO: 6828 - DNA, 1341 bp, synthetic construct
  misc_feature 1..1341: note = source = /note="Description of Artificial Sequence: Synthetic coding sequence"
  source 1..1341: mol_type = other DNA
atgctccatccagaaacctctcccggcagaggtcatctgctcgctgtacttttagctctgctgggaacagcctgggctgaagtgtggccccctcaactgcaggagcaggctccaatggctggggccttgaaccgtaaagaaagttttctgctgttgagcctacataaccgcttaaggtcatgggtacagcccccggccgccgatatgaggagactcgattggtccgattcactcgctcagctggcccaggctcgggctgctctgtgcggaattcctactccaagcctggcatcaggattgtggaggaccctgcaggtcggctggaatatgcaactgctgccagcgggcttagcctctttcgtggaagtagtgtccctctggtttgcggagggccagagatactcgcatgccgctggcgagtgcgctagaaacgccacatgtactcactacacccagctggtgtgggcaacaagctcccagttagggtgcggaagacacctgtgcagtgccgggcaggccgctatcgaggcttttgtgtgcgcttactcccccagagggaattgggaggttaatggaaaaacaattgtcccttataagaaaggggcttggtgttcgctttgcactgccagtgtaagcggatgctttaaggcctgggaccacgcgggagggctctgcgaggtgcctagaaatccatgccggatgtcttgtcagaatcacgggagactgaatatctctacttgccactgtcactgccctccaggatatacaggcagatattgccaggttcgatgttctttgcagtgtgtgcacggtaggtttcgtgaggaggaatgtagttgtgtatgcgacattggttacggaggtgcccagtgtgccacaaaagtccacttcccctttcatacatgcgatctgcggatagatggtgattgtttcatggtgagttctgaggctgatacttactaccgggctaggatgaagtgtcagcggaagggaggcgtcctcgctcagatcaaatcccagaaggtgcaggatatcctggccttttatttggggcgcctcgagaccaccaacgaggtgattgacagcgactttgagactcggaacttttggataggcctaacttataaaacagccaaagacagttttagatgggcaacgggcgaacaccaggcgtttactagcttcgcatttggccagcccgacaaccatgggttcggcaattgcgtggagctgcaggcttcagctgccttcaattggaacaatcaacgctgcaagacacggaacaggtacatctgccaattcgctcaagagcatatttccagatggggccctggctcttag

SEQ ID NO: 6829 - DNA, 936 bp, synthetic construct
  misc_feature 1..936: note = source = /note="Description of Artificial Sequence: Synthetic coding sequence"
  source 1..936: mol_type = other DNA
atgggagtgatggcgatgctgatgttaccactgctgctgctgggcattagcggtttgctcttcatctatcaggaggtctcccggttatggtccaagtcagcagtgcagaacaaagtcgtcgtgatcaccgatgcgatatctggcctcggcaaagaatgtgccagagtgtttcacacgggaggggctcgcctagtgctctgtggaaagaattgggagcgcctggagaatctgtacgatgcacttatcagtgtggcagacccaagcaaaaccttcacccccaaacttgtcctgctcgacctcagtgacatctcctgcgtgcctgatgtcgccaaagaagtgctggattgttacggctgcgtagacattctgataaacaatgcaagcgtcaaggtaaagggcccagcccacaagatctcactcgagctcgacaagaagattatggatgccaactatttcgggccaatcacgctgacgaaagccctgctgcccaatatgatctcccgacggacgggtcaaatcgtgctagtgaataacattcaaggcaaatttggcataccattcagaactacctacgcggctagcaaacacgccgcccttggttttttcgactgcctacgggcagaggtagaggaatatgacgtggtaatttctacagtaagtcccacatttattcggagttatcatgtgtaccccgaacaaggcaactgggaagccagcatctggaaattctttttcagaaaacttacttacggagttcacccagttgaagtggccgaagaggtgatgagaacagtgcgtcgcaagaaacaggaggtgtttatggcaaatcctatccccaaagctgctgtgtacgtgagaaccttcttcccagaattcttctttgccgtggttgcctgcggtgtcaaagagaaacttaatgtgccagaagaagggtag

SEQ ID NO: 6830 - DNA, 594 bp, synthetic construct
  misc_feature 1..594: note = source = /note="Description of Artificial Sequence: Synthetic coding sequence"
  source 1..594: mol_type = other DNA
atggccaaaaacggcttggtgatctgcatactggttattactctcctcctggaccagacaacatcgcatactagcaggctgaaagcaagaaagcacagtaaacgcagggtgagagacaaagacggggacttgaagacccagattgagaagctctggacggaggtgaatgcactaaaggaaatccaggcactgcagaccgtgtgtcttagggggacgaaggtccacaagaagtgctaccttgcctccgaaggcctgaagcacttccacgaggcaaatgaggactgtatatctaagggtggaatccttgtgattccaaggaacagcgatgaaattaacgcccttcaggactatgggaagcgtagtttaccaggcgtgaacgacttttggttggggatcaatgacatggtcaccgaaggcaaatttgtggatgtgaatgggattgctattagttttctcaattgggacagagcccagcctaatgggggaaagcgagagaactgcgtgctttttagccaaagtgcccaagggaagtggagtgatgaagcttgtagatcctccaaacgctacatctgcgaatttacgatccctcaatag

SEQ ID NO: 6831 - DNA, 705 bp, synthetic construct
  misc_feature 1..705: note = source = /note="Description of Artificial Sequence: Synthetic coding sequence"
  source 1..705: mol_type = other DNA
atgaaggtactgctgcttaccggccttggggcactgtttttcgcctactactgggacgataatttcgacccgggcggcctggattatctcgtgttgaatcacattggtggtgccccagccggtacaagggcacggtcccctcaagcgactcgctggctgatgcaagtcaactttgtgtcctacgttcaattgacttcccgcgctctgccctctttgactgactccaaagggtctctggtggtggtcagtagcctgctgggcagagtaccaacgtctttcagcaccccgtactcggctgccaaattcgctctcgacggattcttcggaagcctgagacgcgagctggacgtccaagatgtgaatgtcgccatcaccatgtgcgtgcttggattgcgcgatcgtgcatctgccgccgaggctgtgcgctccagcactagccggccaagacagcccgaacataggggagtgcctctacagtcccagacagccatgtttctgccacccacagtcccgggcgctcgaacgctcactgaaactccgcttcgggggtggcctcagcctaaaatgaagtcgtctagacagaagagcaagaccgaaaagaacgatggtcacttagaaccagtcaccgcttgggaggtgcaggtgcccagagttcggcgcctgtgccgcggcctggccaggccccaccttttcggacacgattag

SEQ ID NO: 6832 - DNA, 228 bp, synthetic construct
  misc_feature 1..228: note = source = /note="Description of Artificial Sequence: Synthetic coding sequence"
  source 1..228: mol_type = other DNA
atgaaagtcctgctactcactggactaggggccttattcttcgcatattattgggacgataattttgatcccgcttccctgcagggagcccgagttttattgacaggtgccaacgctggtgtgggcgaggagcttgcctaccactatgccagactcggatcacaccttgtactgaccgcacacacagaagcattactgcagaaagctgggtggactactagttgctag

SEQ ID NO: 6833 - DNA, 225 bp, synthetic construct
  misc_feature 1..225: note = source = /note="Description of Artificial Sequence: Synthetic coding sequence"
  source 1..225: mol_type = other DNA
atgcagccttcagagatggttatgaacccgaaacaggtttttcttagcgtcctgatcttcggtgtggcaggcctgctgctgtttatgtatttgcaggtgtggatcgaggagcaacataccggaagagtggagaaacgacgtgagcagaaggtgaccagtggttggggccccgtgaaatacctgcggcccgtcccaaggattaagccacaggtctcacacgcttag

SEQ ID NO: 6834 - DNA, 861 bp, synthetic construct
  misc_feature 1..861: note = source = /note="Description of Artificial Sequence: Synthetic coding sequence"
  source 1..861: mol_type = other DNA
atgaaggtcctgctgctcaccgggctgggggccctgtttttcgcttactactgggacgataactttgacccagcttccctgcagggagctagagtactcctgacgggagcaaatgctggagtcggggaagagctggcttaccattacgctcggttaggctcgcaccttgttttgaccgctcataccgaagctctcctgcagaaagtggtgggcaattgtagaaagctgggcgcccctaaggtcttttatatcgctgccgatatggcttctcctgaagcgcctgagtccgtggtgcagtttgccttggataaattgggaggccttgactacctggtcctgaatcacataggcggtgctcctgcaggcacccgagcccgctcccctcaggctacgcgatggttaatgcaggtgaatttcgtctcatatgtacagttaacatcaagggccctgccttcattgactgatagtaagggatcattagttgtggtctccagtctgttaggccgggttcccacgagcttctcaacgccgtattctgctgctaagtttgctctggacggcttttttggatctctgaggagagagctggatgtacaggacgtgaacgttgctatcaccatgtgcgtgctgggactcagggacagagcctccgccgctgaggcagttcggggcgtgacgcgtgtgaaagccgcaccgggacccaaggctgctttagctgtcatacgcggaggtgcaactcgggccgctggagtcttctacccatggcgctttcgtctgctttgcctgcttcggaggtggctgccccgacccagagcttggtttattaggcaggagctcaacgtgacggccgctgcggcgtag

SEQ ID NO: 6835 - DNA, 459 bp, synthetic construct
  misc_feature 1..459: note = source = /note="Description of Artificial Sequence: Synthetic coding sequence"
  source 1..459: mol_type = other DNA
atgcaagtgaacttcgtcagctacgtacagctcacgtcacgagcgctaccatctctaacagattctaagggcagtcttgtggtcgtgtcatcccttttaggccgagtcccaacttccttctcaactccctattctgctgcaaagttcgccctcgatggtttttttggaagcctgcgtagggagctggatgtgcaggatgtcaatgtcgcgataactatgtgtgtgttgggattgcgggacagggctagtgcggccgaggctgtcaggggggtcacccgggtgaaggcggccccagggcccaaagccgccctagcagttattcgcgggggcgcaacacgggccgctggagtgttttacccatggcggtttaggctgctctgtctcctgagacgatggctcccccgaccacgggcctggtttatcaggcaggaactgaatgttacagcggccgccgcctag

SEQ ID NO: 6836 - DNA, 2856 bp, synthetic construct
  misc_feature 1..2856: note = source = /note="Description of Artificial Sequence: Synthetic coding sequence"
  source 1..2856: mol_type = other DNA
atgagggtgctggcctgtctcttggccgctttggttggaatacaggcagttgagcgcctgaggctcgctgacggaccccatggttgtgccggaaggctggaagtgtggcatgggggccgttgggggacagtgtgcgatgacggctgggacctgcgggatgctgcagtggcttgtcggcaacttggatgtggcggcgcattagctgctcctggcggggctttcttcggtgagggggccggcccagtgtggctttctgaactcgcttgccggggcaacgaggggcagttagggctgtgtcatcatcgtggatggaaggcccatatctgtagccacgaggaggatgccggtgtcgtatgtgcaggacagcgagtggccaactcaagagatgattccacatctcccctggatggcgctccctggccggggctgttactggagctcagtcccagtaccgaggaacccctcgtgactcacgctcctcgccccgccgggaacccacagaatgcttcccggaagaagtcccctcggccaaagcaggctaaaagcactcgtgcacctctgctgaccactggcgcgccaaggcaggagaggctgagactcgttagtggccctcatagatgtgcaggccgccttgaggtgtggcacgggggtcgctggggcacagtgtgtgatgatgggtgggacttgcgcgatgcggccgtggcgtgtagggaactcggctgtgggggcgcattggcagcacctgggggtgctaggtttggtcccggtgccgggcccgtctggatggacgatgtcggctgcgggggcggagagcaggccctccgggactgtccacggtcaccatggggaaggtcaaactgtgatcacagcgaggatgcgggacttgtgtgtaccggcccagccccccggcttcgccttgctgacggaccgcatggatgcgcaggaagactcgaagtgtggcacggcggacgatgggggtccgtgtgcgatgatgcttgggacctgagggacgccgccgtagcttgtcgggaactgggctgcggaggggccctggccgcgcctggcggagctttttttggagagggaagcgggcccatcatcctagacgacctccggtgtagaggcaatgagaccgctctgcgattctgtcccgccaggccctgggggcagcacgactgccatcacagagaagacgcaggagccgtgtgtgatggcatgcctttggggtatgtgccccctactgcccccacggatagcaacaatagcacgcccagagaagcagcatcccggcctccgtctaccatgacctcccaagcgcccggcacggctggagtgtcgcccccccccgccagccccactgtgctgtgggaaccagggcccgaagccggaagccctcaactgcggctggtggcaggacctagcaagtgctccggcaggctggaagtctggcatgatcagaggtgggggaccgtctgcgacgacagctgggatatgcgagatagcgctgtggtgtgcagggaattgggctgtggtggtccccaacagcccgatccagccgctggtagatttggatggggtgccggtccaatttggctggacgatgtagggtgtgtcggcacagaagcatccttgagcgattgcccggccgcaccctggggaaagcacaattgtgcacacaatgaagacgtgggcgtcacatgtacaggccctccaggattggattcgatttccgatccctttagctggtcctggatcccaggactgggacgagatcgtgatgcttggttgccgggtgagctggcaactaagcctagcgcatctgtgaccgcctctgtgttagagaaaactaccaccaaagcacccggaaaaatgccaaagtctacgaagaaatgggtgacgaaaaacgccaagagacctacaacccagccgcccgtgatgcctactaccaaacactccagagcccagtcaccacctgacctcactagccagacaactgccgccctgaccactgaagcttcgcggaggccaaccagcgagttcacccgacggcctacaaccgaagcaccacaaagatggaccagtcacacaacagccaccctaaccccgcaagctccacgggaacgcacaactaagaccatggctatgttgacgacccaagggccccaagaaatgacttccgaatctaccatcaaaagtatcccccaagcctctctggaaccctcagcggaaatacctgaaggaagccccgaatccccaaaggacccagctcctagtccatccgtcagcactaccggcgaaagcgggctctttcgcgtgcggctggctgacggccccaacaggtgtgccggtaggctggaagtgtggcatgcagggaggtggggcaccgtttgcgacgacaattgggacctgcgtgatgctaccgtcgcctgctgggaattggggtgcgggaaggtaagaccccgcgtgggtaagactcactatgggcccggcactggcccaatttggctggatgacatgggatgtaaaggttctgaggcatccttgagcgattgtccaagcggtgcgtgggggaaacacaattgtgatcatgaagaagacgttgggctgacttgcaccggatatactgattatgatgattacccgccgtggacttgggatcccacatctagagaggatttggcaaaggggacgacaactgcaggggtgcccggtcataccttaccttggaggactactcggagaccaggcagtagcagcccggcaattaggaggctcccagatactgagcctgaagcgggagccccccgaggggacgcgccaaggtcccggactgcgagagtggcagcccctccttag

SEQ ID NO: 6837 - DNA, 8430 bp, synthetic construct
  misc_feature 1..8430: note = source = /note="Description of Artificial Sequence: Synthetic coding sequence"
  source 1..8430: mol_type = other DNA
atgaccttggaaggactgtatctggcacggggacccctggcccggttgttgctagcctggagcgcccttctctgcatggctggtggccagggtcgctgggatggtgctctggaggccgccggccctggcagagtgcggcgaagaggaagcccaggcatcctgcaaggtcccaacgtgtgcggaagcaggttccatgcatactgctgtcctgggtggagaacgttccctggccggagccagtgcgtcgtcccaatctgcagacgagcatgcggcgaagggttctgttctcagcccaacctctgcacctgtgccgacggaacgctcgctccgtcctgcggagtgtcgaggggaagtggctgttccgtgtcttgcatgaatggcggtacatgcagaggagcatcatgcctctgtcaaaagggctatacaggcacagtgtgcggccaacctatatgtgatcgcggctgccacaatggcgggcgatgcattggtcccaatcgctgcgcgtgtgtctacggattcatggggccacagtgtgagcgggattatagaaccggaccgtgttttgggcaggtgggtcctgagggatgccaacatcagttaaccggcctggtgtgcacaaaagctctgtgctgcgccactgtgggcagggcatggggcctgccctgcgagttgtgccccgcgcagcctcatccttgtcgtcgcgggtttattccaaacatccacacaggtgcctgtcaagacgtcgatgaatgccaggccgtgcccgggctttgccagggcgggtcctgtgtgaatatggtgggtagcttccactgccggtgccccgttggtcatcggcttagtgattcctcggcggcgtgcgaggactacagagctggggcgtgcttttcagttctgttcggaggtaggtgcgccggggaccttgccgggcattacactagaagacagtgctgttgtgaccgcggccgatgttgggccgctgggccagtgcccgaactctgtccccctcgaggctcaaacgagtttcagcagctttgtgcacagcgtttgcccctactcccgggacaccctggacttttccctgggttgctggggtttggatcaaatggaatggggccacctttaggacctgctcgtctgaaccctcacggtagtgatgcgcggggcattccttctctgggtccaggtaatagcaatatcggcactgctactctgaaccagaccattgatatatgtcgtcatttcaccaacttgtgtctgaatggcagatgcctcccaaccccttctagctaccggtgcgagtgcaatgtgggatacactcaggacgtgagaggagagtgtatagacgtggacgaatgcacgtccagcccctgccatcatggcgactgcgttaacataccaggtacgtaccattgccgctgttatcccggcttccaggccacccccactagacaagcctgtgtggacgtggatgagtgtatcgtttccggcggcctgtgccacctagggcgttgtgtcaataccgaaggctccttccagtgtgtgtgtaatgcaggctttgaactgtccccggacgggaagaattgcgtcgaccataacgagtgcgccacctccaccatgtgcgtgaacggcgtgtgcttaaatgaggatgggagtttttcatgcctctgcaaacccgggttccttcttgccccagggggtcactattgcatggatatcgacgaatgtcagactcctggtatctgcgtcaacggacattgcaccaacaccgaggggtcattccggtgtcagtgcctcgggggccttgctgtggggaccgacggcagggtttgtgttgatacacacgtgcgttccacctgctatggggctattgaaaaaggttcttgtgcacgcccgttcccaggaaccgttacaaagtccgaatgttgttgcgccaaccccgatcacgggttcggcgagccttgtcagctgtgccccgcaaaggacagcgccgaatttcaggccctatgttcttctggtctgggtattaccaccgacggccgggacatcaacgagtgcgcactggatcctgaggtgtgtgccaacggggtgtgtgagaacctgagagggtcctacagatgtgtatgcaatctgggctatgaggccggtgcctcaggcaaggactgcacggacgtggacgagtgtgctctgaattcgttactgtgcgacaacggatggtgtcagaatagccccggtagttattcctgtagttgcccccctggatttcacttttggcaagataccgagatttgtaaggacgtggatgaatgcctgtcctcgccttgcgtttctggcgtatgtcgaaaccttgcgggcagttatacctgcaagtgtgggcctgggagtaggctagatcccagcggcactttctgcttggactctacaaaggggacatgttggctgaaaattcaggaatcgcgctgcgaggtgaacctgcagggtgcctccctgcggtccgagtgttgcgccactctcggggcagcctggggatctccatgtgaacgctgcgaaatcgatccagcctgtgccagaggattcgccaggatgactggcgtgacgtgcgacgatgttaatgaatgcgagtcctttcccggcgtttgtcctaatggaaggtgcgtaaataccgctggctcttttcggtgtgaatgcccggaagggctgatgctggatgccagcggtcgcctgtgcgtcgacgtccggctggaaccatgctttctcaggtgggatgaagatgaatgcggtgtaacgctgcccgggaaatacaggatggacgtgtgctgctgttcaatcggcgcagtgtggggcgttgagtgtgaggcttgccccgacccggagagtctggagttcgcaagcctgtgtcctcgcggcttaggctttgcttcccgggattttctgtccggtcggcccttttacaaggacgttaacgagtgtaaagtgtttcccgggctttgtacccatggaacatgccgcaacacagtggggagctttcattgtgcctgtgccggaggttttgcgctggatgctcaagagaggaactgcactgatattgatgagtgccggatcagcccggacctctgtggacaaggtacctgcgtgaatacacctggtagcttcgagtgcgaatgttttcccgggtacgagagcgggtttatgctgatgaagaactgtatggatgtcgatgaatgtgcaagggatccgctgctttgcagggggggtacctgtactaatactgatgggtcctacaagtgccagtgtcctcccgggcatgagctgacagcaaaaggtaccgcatgcgaagacatcgacgagtgctctctgtccgatggtctctgcccacacggccagtgtgttaacgttattggggcattccagtgctcttgccatgccggattccagtctacccccgatcgccagggctgtgtggacatcaacgagtgtcgcgtgcagaatggtggttgtgacgtccactgcatcaatacagagggcagctatcggtgctcttgcgggcaggggtacagccttatgccagatggaagggcttgtgctgacgtggacgaatgtgaggagaacccacgagtatgcgaccagggtcactgcaccaacatgccagggggacatagatgcttatgctacgacggatttatggccaccccagatatgaggacatgtgtggacgtcgacgagtgcgatttaaatccccacatttgcttacacggcgattgtgagaatacgaagggctcatttgtgtgtcactgccagctgggatacatggtgcgcaaaggagcaacagggtgcagcgacgtggacgaatgtgaagtgggcggacataactgcgattcacatgctagctgcctcaacataccagggtccttctcctgtcggtgcctgcccgggtgggtgggtgatggcttcgagtgtcacgacttagacgagtgcgtatcccaggaacatcggtgcagtccacgcggagattgcttgaacgtgccgggtagctaccggtgtacttgcagacagggatttgccggcgatggtttcttttgcgaagatcgcgacgaatgcgctgagaacgtggatctgtgtgataatggccaatgccttaacgcaccgggcggctatcgatgtgaatgtgagatggggtttgatccaaccgaggaccatagggcttgccaggacgttgatgaatgtgcgcagggtaatttatgtgcctttggttcgtgtgagaacctgcctggtatgttcagatgtatctgtaacggtgggtatgagctggacagaggcggtggaaactgcaccgatatcaatgaatgtgccgaccccgttaactgcattaatggtgtgtgcattaatacccccggcagttacttatgttcttgcccccaggactttgagctcaatccaagcggcgtggggtgtgttgatacccgggcgggaaactgctttctggaaactcacgaccgaggcgacagtggcatcagctgcagcgctgaaattggtgtgggcgtgacccgcgcaagttgttgttgctccctgggacgcgcatgggggaacccatgcgaactttgcccaatggctaacacgaccgagtaccgtacactgtgccctggcggtgaggggtttcagccgaatcgtataaccgttattctcgaagatatagacgagtgccaggagctacctggcctgtgccagggaggagattgcgtgaacacatttgggagctttcagtgcgaatgtcctccaggataccatttgagcgagcacacccggatttgcgaggatatagacgagtgttctacccattcaggaatctgtgggcctgggacctgctacaataccctgggcaactacacatgtgtctgcccagccgagtatctgcaggttaatggggggaacaactgcatggacatgcggaaatcggtttgtttcagacattacaacggaacatgtcagaatgaactagcatttaatgttacacgaaagatgtgctgctgttcctataatataggacaggcctggaatcgcccttgcgaggcctgtcctaccccaatatccccagattatcagatactctgcggcaaccaggcccccgggtttctgacagacatacatactggtaaacccctggacattgacgagtgcggggaaattccggctatctgtgcaaatgggatttgtatcaaccaaattgggagcttcaggtgcgaatgcccggccggatttaattacaacagcatcctgcttgcctgcgaggatgtcgatgagtgcggaagcagggagtcgccctgtcagcagaatgccgactgcatcaatattcctggatcttaccgttgcaaatgcacacgcggctacaagttgagtcccggcggggcctgcgttgggcgtaacgaatgcagagagatcccaaatgtctgctcacacggagactgtatggacacagaagggtcttacatgtgtctatgtcacaggggattccaagcttctgcagaccagacgctctgtatggatattgatgaatgtgaccggcagccctgtggcaacggtacgtgtaagaatatcatagggtcttacaactgcctctgcttcccagggttcgtcgtgacgcacaacggcgattgtgtggactttgatgaatgcaccacattggtgggccaggtctgcaggttcggtcactgccttaataccgcagggagttttcattgcctgtgccaggatggctttgagctgaccgcggatggtaaaaattgcgttgacactaacgagtgtctttctctggctgggacttgccttcccggtacttgccagaatttggagggctcttttaggtgtatttgtcctcccggctttcaggtgcagagcgaccattgtattgatattgacgagtgtagcgaagaaccaaacctgtgcctatttggcacatgtacaaatagtcctggtagtttccagtgtctgtgcccaccaggatttgttttgagcgacaatggacaccgatgtttcgacacaagacagtctttctgtttcacaagattcgaggcagggaagtgttctgtcccaaaggccttcaatacaactaaaacccggtgctgctgtagcaagagaccaggagagggttggggagacccctgcgagctttgtccacaggagggaagcgctgcttttcaggagctttgtcccttcggacatggcgctgtaccagggccagacgactcaagagaggatgtgaacgaatgtgctgaaaaccccggagtatgcaccaacggcgtttgcgttaataccgacggctcattccgatgcgagtgtcccttcggctactctctggactttaccggaatcaattgcgttgacacagacgagtgttcagtgggacacccgtgtggacagggaacatgcaccaatgtgattggagggttcgagtgtgcttgcgctgacggatttgaaccgggactgatgatgacatgcgaggatatcgatgaatgcagcctcaatcctcttctatgcgcctttcgctgtcataacaccgaggggtcttacctctgtacttgtcctgccggatacacattgcgggaggacggagccatgtgccgcgatgtagatgagtgtgccgacgggcagcaggattgccatgcccgtggcatggagtgcaagaacctgatcgggacgttcgcttgcgtttgccccccaggaatgcgcccattgcccggcagtggggaaggatgtactgacgataacgagtgtcacgcacagccagacttatgcgtgaatggtaggtgtgtcaacacagctggctccttcagatgcgattgcgacgaaggctttcaaccgtctcctacattaactgaatgccacgacattcgtcagggcccctgtttcgccgaagttctacagaccatgtgcaggagcctgtccagctcctccgaggcggtgaccagggccgagtgctgctgtggaggcggacgcgggtggggcccacgctgcgaactctgcccgctgcctgggacaagtgcctaccgtaagctctgcccacatggttcaggctatacagctgaggggcgcgatgtcgatgaatgtcgcatgctcgcccatctctgcgcacacggtgagtgtatcaattcactcggttcgtttcggtgtcattgtcaggccggctacactcctgatgccacagcgaccacatgcttagatatggatgagtgctcccaggtaccaaagccatgtactttcttgtgcaaaaacacaaagggaagtttcctttgttcttgcccgcgcggatatctcctggaggaggatgggcggacatgcaaagatctggatgagtgtaccagcaggcagcacaattgccaattcttgtgtgttaacactgtcggcgccttcacctgtaggtgccctcctgggtttacacagcatcaccaggcatgctttgataacgatgagtgctcggctcagcccggaccctgtggggcgcacggacactgtcataacaccccaggctccttcagatgtgaatgccaccagggcttcactctggtgtcttcaggacacggttgtgaggacgtaaatgaatgcgacggtcctcaccgctgccagcatggctgccaaaaccaactcggcgggtatcgctgcagctgtccacaagggttcacgcagcattctcagtgggctcagtgtgtggatgagaatgagtgtgccctgtcccccccgacatgcggcagtgccagctgtaggaacactctcgggggattccgatgcgtgtgtccatccggtttcgatttcgaccaggccctgggcgggtgtcaggaagttgacgagtgtgctggcaggaggggaccctgctcttactcatgcgccaacactccaggaggctttttgtgcggttgccctcagggctacttccgggcaggccagggccattgcgtgagtggcctggggttcagcccaggaccccaggacacacccgacaaagaggaactcctatcgtcagaagcctgttacgagtgcaagataaacgggctgtccccacgggatcgccctagacggtcagctcaccgagaccatcaggtcaatctggcaaccctggattcggaggcgcttctaactttaggactgaaccttagtcacttgggcagggcggagagaatcctggaattgaggcccgcccttgagggcttagaaggaagaatccggtatgtaatcgtacggggaaacgagcagggatttttccggatgcatcatctacgtggggtgtcatccttgcaactgggtagacgacgacctggaccaggcacctacaggcttgaggtggtcagtcacatggccggtccatggggcgtccagcccgaaggccagcccggcccttggggacaagctttgcggcttaaagtacagttgcagttgctctag

SEQ ID NO: 6838 - DNA, 291 bp, synthetic construct
  misc_feature 1..291: note = source = /note="Description of Artificial Sequence: Synthetic coding sequence"
  source 1..291: mol_type = other DNA
atgagagtgacgtcagcaacctgtgccctgcttctcgcgctgatctgttccgtgcagctaggagatgcctgtctcgatatcgataaactattggccaacgtggttttcgacgtgtcccaggacctgcttaaggaagagctcgcccgttacaacccgagccccctgactgaagaaagcttcctgaacgttcagcagtgtttcgccaacgtgagcgtgaccgaaagatttgcccatagcgtggtgatcaagaagatccttcaatccaatgactgcatcgaagctgctttttag

SEQ ID NO: 6839 - DNA, 1890 bp, synthetic construct
  misc_feature 1..1890: note = source = /note="Description of Artificial Sequence: Synthetic coding sequence"
  source 1..1890: mol_type = other DNA
atgcaacaagatggattgggcgttggtactagaaatggttcaggtaagggcagatcagttcaccccagctggccttggtgcgctcccagacctctgcgatacttcgggcgcgacgcccgcgcacgaagggctcagacggccgccatggccttacttgccggcggtctttctcgtggtcttggatcacatcccgccgcagccggccgggacgcagtagtttttgtctggctactgctgtccacctggtgtaccgcccccgcccgggccatccaggtgaccgtgagcaatccctaccacgttgttatcctgtttcagccagttacgctcccttgcacataccagatgacatccactcccacgcagcccatcgtcatctggaagtacaagagtttttgcagagatcgaattgctgacgcattctcacctgcgtccgtggacaatcaactgaatgcccagttggcagccggaaaccccggatacaatccgtatgtcgagtgccaggacagcgtcaggactgtccgggttgtcgccaccaaacagggaaacgccgttaccctgggcgactactaccagggtagacgaattactataaccggaaacgcagatcttacgttcgatcagaccgcgtggggagattctggagtctactattgcagcgtggtgagcgcgcaggaccttcaggggaataacgaggcttacgccgagctcattgtgctagattggcttttcgtggttgttgtgtgcctggcagcattcttaatcttccttctgctgggcatatgttggtgtcagtgttgcccccacacttgttgttgctacgttcgctgtccgtgctgccccgataaatgttgttgcccggaggccttatatgcagccggaaaagccgcgacatctggcgtcccatcgatttacgccccatctacatacgctcaccttagccccgcgaaaactccgccacccccagctatgattcctatgggacctgcttataacggctatcccggcgggtacccaggcgatgtcgaccggagctcctccgctggcggacaaggatcttacgtgcctctcctcagggatacagattccagtgtggcatcagtgcggagcgggtacagaattcaggcttcccagcaggacgactctatgcgggtgctgtactatatggaaaaggaactcgcgaactttgacccttcacgccccggacccccctcaggaagagtggagagggctatgagtgaggttacgtctctacacgaagatgactggcgatcgaggccctcccgtgggccagccttaactcctatccgagatgaggaatggggggggcacagccccagatcaccacggggctgggatcaggagccagcgcgtgagcaggccggcggtgggtggcgtgctcgcagaccgagggcccggtcagtggacgcgctagatgatcttacccccccctccacagccgaatctggtagccggtctccgacctctaacggtggcaggtcgagagcatatatgccgccacgatctcggagccgggacgatttgtacgaccaggatgactcccgggattttcctcggtctcgcgacccacattacgacgattttagaagccgtgaaagaccaccggccgacccccggtctcatcatcataggactagggatcccagggataatggatctaggagcggcgatttgccgtatgatgggaggctgctggaggaggccgtacgcaaaaagggcagcgaggagcggcgtaggccccacaaggaggaggaggaagaagcatactaccccccagcacctccaccttatagtgaaacggattcacaggcctccagggagcgcaggttgaagaagaatctggccctgagcagggagtctttagtggtgtag

SEQ ID NO: 6840 - DNA, 591 bp, synthetic construct
  misc_feature 1..591: note = source = /note="Description of Artificial Sequence: Synthetic coding sequence"
  source 1..591: mol_type = other DNA
atgagcagaagatccatgctgctggcctgggccctgcccagcctgctgcggctgggcgccgcccaggagacagaagatcctgcctgctgcagccccatcgtgcccagaaatgagtggaaggccctggcctctgaatgtgcccagcacctgagcctgcccctgcgctacgtggtggtgagccacacagctggcagcagctgcaacaccccagccagctgccagcagcaggccagaaatgtgcagcactaccacatgaagaccctgggctggtgtgatgtgggctacaacttcctgattggagaagatggcctggtgtatgagggccggggctggaacttcaccggggcccacagcggccacctgtggaaccccatgagcatcggcatctccttcatgggcaactacatggacagagtgcccaccccccaggccatccgggccgcccagggcctgctggcctgtggggtggcccagggcgccctgcggagcaactacgtgctgaagggccacagagatgtgcagaggaccctgagccctggcaaccagctgtaccacctgatccagaactggccccactaccgcagcccctag

SEQ ID NO: 6841 - DNA, 1056 bp, synthetic construct
  misc_feature 1..1056: note = source = /note="Description of Artificial Sequence: Synthetic coding sequence"
  source 1..1056: mol_type = other DNA
atggaggcctttgccctgggccctgcccggcggggcagaagaaggaccagggctgctggcagcctgctgagccgggccgccatcctgctcttcatcagcgccttcctggtgcgggtgcccagctctgtgggccacctggtgcggctgccccgggccttccggctgaccaaggacagcgtgaagatcgtgggcagcaccagcttccctgtgaaggcctacgtgatgctgcaccagaagagcccccacgtgctgtgtgtgacccagcagctgagaaatgctgagctgattgaccccagcttccagtggtacggccccaagggcaaggtggtgtctgtggagaacagaacagcccagatcaccagcacaggcagcctggtgttccagaactttgaggagagcatgagcggcatctacacctgcttcctggagtacaagcccaccgtggaggagatcgtgaagaggctgcagctgaagtatgccatctatgcctaccgggagccccactactactaccagttcaccgcccgctaccacgccgccccctgcaacagcatctacaacatcagctttgagaagaagctgctgcagatcctgagcaagctgctgctggacctgagctgtgagatcagcctgctgaagtctgagtgccaccgggtgaagatgcagagagctggcctgcagaatgagctgttctttgccttctctgtgagcagcctggacacagagaagggccccaagcgctgcacagaccacaactgtgagccctacaagaggctcttcaaggccaagaacctgattgagcgcttcttcaaccagcaggtggagatcctgggcagaagagctgagcagctgccccagatctactacatcgagggcaccctgcagatggtgtggatcaaccgctgcttccctggctacggcatgaatgtgcagcagcaccccaagtgcccagagtgctgcgtcatctgcagccctggcagctacaaccccagagatggcatccactgcctgcagtgcaacagcagcctggtgtatggagccaagacctgcctgtag

SEQ ID NO: 6842 - DNA, 420 bp, synthetic construct
  misc_feature 1..420: note = source = /note="Description of Artificial Sequence: Synthetic coding sequence"
  source 1..420: mol_type = other DNA
atggagaccaacgtgttccacctgatgctgtgtgtgaccagcgcccggacccacaagagcaccagcctgtgcttcggccacttcaacagctaccccagcctgcccctcatccatgacctgctgctggagatctccttccagctgagcgcccctcatgaagatgcccggctgaccccagaggagctggagcgggccagcctgctgcagatcctgcctgagatgctgggcgctgagcggggggacatcctgaggaaggctgacagcagcaccaacatcttcaacccccggggcaacctgaggaagttccaggacttcagcggccaggaccccaacatcctgctgagccacctgctggcccgcatctggaagccctacaagaagcgggagaccccagactgcttctggaagtactgtgtgtag

SEQ ID NO: 6843 - DNA, 606 bp, synthetic construct
  misc_feature 1..606: note = source = /note="Description of Artificial Sequence: Synthetic coding sequence"
  source 1..606: mol_type = other DNA
atgggcagcggcagaagagccctgtctgctgtgcctgctgtgctgctggtgctgaccctgcccggcctgcctgtgtgggcccagaatgacacagagcccatcgtgctggagggcaagtgcctggtggtgtgtgacagcaacccagccacagacagcaagggcagcagcagcagccccctgggcatctctgtgcgggccgccaacagcaaggtggccttctctgctgtgcgcagcaccaaccacgagcccagcgagatgagcaacaagacccgcatcatctactttgaccagatcctggtgaatgtgggcaacttcttcaccctggagagcgtgtttgtggcccccaggaagggcatctacagcttctccttccacgtgatcaaggtgtaccagagccagaccatccaggtgaacctgatgctgaatggcaagcctgtgatcagcgcctttgctggggacaaggatgtgacccgggaggccgccaccaatggagtgctgctgtacctggacaaggaggacaaggtgtacctgaagctggagaagggcaacctggtgggcggctggcagtacagcaccttcagcggcttcctggtgttccccctgtag

SEQ ID NO: 6844 - DNA, 264 bp, synthetic construct
  misc_feature 1..264: note = source = /note="Description of Artificial Sequence: Synthetic coding sequence"
  source 1..264: mol_type = other DNA
atgaaggtgctgcgggcctggctgctgtgcctgctgatgctgggcctggccctgcggggagctgccagcaggacccaccgccacagcatggagatccgcaccccagacatcaacccagcctggtacgccagccggggcatccggcctgtgggccgctttggaagaagaagagccaccctgggagatgtgcccaagccaggcctgcggccccggctgacctgcttccccctggagggcggggccatgagcagccaggacggctag

SEQ ID NO: 6845 - DNA, 1098 bp, synthetic construct
  misc_feature 1..1098: note = source = /note="Description of Artificial Sequence: Synthetic coding sequence"
  source 1..1098: mol_type = other DNA
atgcctgggggcaagaaggtggccggcggcggcagcagcggggccacccccaccagcgctgctgccacagcccccagcggcgtgcggcggctggagaccagcgagggcaccagcgcccagagagatgaggagcctgaggaggagggggaggaggacctgagagatggaggagtgcccttctttgtgaacagaggaggcctgcctgtggatgaggccacctgggagaggatgtggaagcacgtggccaagatccacccagatggagagaaggtggcccagaggatccggggggccacagacctgcccaagatccccatccccagcgtgcccaccttccagcccagcacccctgtgcctgagcggctggaggccgtgcagcgctacatccgggagctgcagtacaaccacacaggcacccagttctttgagatcaagaagagccggcccctgaccggcctgatggacctggccaaggagatgaccaaggaggccctgcccatcaagtgcctggaggccgtcatcctgggcatctacctgaccaacagcatgcccaccctggagcgcttccccatctccttcaagacctacttcagcggcaactacttccgccacatcgtgctgggcgtgaactttgctggccgctatggagccctgggcatgagccggcgggaggacctgatgtacaagcccccagccttccgcaccctgtctgagctggtgctggactttgaagctgcctacggccgctgctggcacgtgctgaagaaggtgaagctgggccagagcgtgtcccatgacccccacagcgtggagcagatcgagtggaagcacagcgtgctggatgtggagcggctgggcagagatgacttcaggaaggagctggagagacatgcccgggacatgaggctgaagattggaaaaggaactggaccacccagccccaccaaggacaggaagaaggatgtgagcagcccccagagggcccagagcagcccccacagaagaaacagccgctcagaaagaagacccagcggggacaagaagaccagcgagcccaaggccatgccagacctgaatggctaccagatccgggtgtag

SEQ ID NO: 6846 - DNA, 1377 bp, synthetic construct
  misc_feature 1..1377: note = source = /note="Description of Artificial Sequence: Synthetic coding sequence"
  source 1..1377: mol_type = other DNA
atggcctgggccagccggctgggcctgctgctggccctgctgctgcctgtggtgggcgccagcaccccaggcaccgtggtgcggctgaacaaggccgccctgtcctatgtgtctgagatcggcaaggcccccctgcagagggccctgcaggtgacagtgccccacttcctggactggagcggggaggccctgcagcccacccgcatccgcatcctgaatgtgcacgtgccccggctgcacctgaagttcatcgccggctttggagtgcggctgctggccgccgccaacttcaccttcaaggtgttccgggcccctgagcccctggagctgaccctgcctgtggagctgctggccgacaccagggtgacccagagcagcatccgcacccctgtggtgtccatcagcgcctgcagcctcttcagcggccacgccaatgaatttgatggcagcaacagcaccagccacgccctgctggtgctggtgcagaagcacatcaaggctgtgctgagcaacaagctgtgcctgagcatcagcaacctggtgcagggcgtgaatgtgcacctgggcaccctcatcggcctgaaccctgtgggccctgagagccagatccgctacagcatggtgtctgtgcccaccgtgaccagtgactacatcagcctggaggtgaatgctgtgctcttcctgctgggcaagcccatcatcctgcccacagatgccaccccatttgtgctgcccaggcatgtgggcacagagggctccatggccaccgtgggcctgagccagcagctgtttgacagcgccctgctgctgctgcagaaggccggggccctgaacctggacatcaccggccagctgcggagtgatgacaacctgctgaacaccagcgccctgggccgcctcatccctgaggtggcccggcagtttcctgagcccatgcctgtggtgctgaaggtgcggctgggcgccacccctgtggccatgctgcacaccaacaatgccaccctgcggctgcagccctttgtggaggtgctggccacagccagcaacagcgccttccagagcctcttcagcctggatgtggtggtgaacctgcggctgcagctgtctgtgtccaaggtgaagctgcagggcaccacctctgtgctgggagatgtgcagctgactgtggccagcagcaatgtgggcttcatcgacacagaccaggtgaggaccctgatgggcaccgtgtttgagaagcccctgctggaccacctgaatgccctgctggccatgggcatcgccctgcccggggtggtgaacctgcactacgtggcccctgagatctttgtgtatgagggctacgtggtgatcagcagcggcctcttctaccagagctag

SEQ ID NO: 6847 - DNA, 1815 bp, synthetic construct
  misc_feature 1..1815: note = source = /note="Description of Artificial Sequence: Synthetic coding sequence"
  source 1..1815: mol_type = other DNA
atgatgagagctgtgtgggaggccctggccgccctggccgctgtggcctgcctggtgggcgctgtgcggggcggccctggcctgtccatgtttgctggccaggccgcccagcctgacccctgcagtgatgaaaatggccacccccggcgctgcatcccagactttgtgaatgctgccttcggcaaggatgtgcgggtgagcagcacctgtggccggcccccagcccgctactgtgtggtgtctgagcggggggaggagcggctgcggagctgccacctgtgcaatgccagtgaccccaagaaggcccaccccccagccttcctgacagacctgaacaacccccacaacctgacctgctggcagagcgagaactacctgcagttcccccacaacgtgaccctgaccctgagcctgggcaagaagtttgaggtgacctacgtgtccctgcagttctgcagccccaggcctgagagcatggccatctacaagtccatggactatggccgcacctgggtgcccttccagttctacagcacccagtgcaggaagatgtacaaccggccccaccgggcccccatcaccaagcagaatgagcaggaggccgtgtgcacagacagccacacagacatgaggcccctgagcggcggcctcatcgccttcagcaccctggatggccggcccagcgcccatgactttgacaacagccctgtgctgcaggactgggtgacagccacagacatccgggtggccttcagccggctgcacacctttggagatgaaaatgaagatgattctgagctggcccgggacagctacttctatgctgtgtctgacctgcaggtgggcggccgctgcaagtgcaatggacatgctgcccgctgtgtgcgggacagagatgacagcctggtgtgtgactgccgccacaacacagctggcccagaatgtgaccgctgcaagcccttccactatgaccggccctggcagagggccacagcccgggaggccaatgaatgtgtggcctgcaactgcaacctgcacgcccggcgctgccgcttcaacatggagctgtacaagctgagcggcaggaagagcggcggcgtgtgcctgaactgccgccacaacacagctggccgccactgccactactgcaaggagggctactacagagacatgggcaagcccatcacccacaggaaggcctgcaaggcctgtgactgccaccctgtgggcgccgccggcaagacctgcaaccagaccaccggccagtgcccctgcaaggatggagtgacaggcatcacctgcaacagatgtgccaagggctaccagcagagccgcagccccatcgccccctgcatcaagatccctgtggccccacccaccacagctgccagctctgtggaggagcctgaggactgtgacagctactgcaaggccagcaagggcaagctgaagatcaacatgaagaagtactgcaagaaggactatgctgtgcagatccacatcctgaaggctgacaaggccggggactggtggaagttcaccgtgaacatcatctctgtgtacaagcagggcaccagccgcatcagaagaggagaccagagcctgtggatccgcagccgggacatcgcctgcaagtgccccaagatcaagcccctgaagaagtacctgctgctgggcaatgctgaggacagcccagaccagagcggcatcgtggccgacaagagcagcctggtgatccagtggagggacacctgggcccggcggctgaggaagttccagcagcgggagaagaagggcaagtgcaagaaggcctag

SEQ ID NO: 6848 - DNA, 675 bp, synthetic construct
  misc_feature 1..675: note = source = /note="Description of Artificial Sequence: Synthetic coding sequence"
  source 1..675: mol_type = other DNA
atgcctggccgggcccccctgaggacagtgcctggggccctgggcgcctggctgctgggcggcctgtgggcctggaccctgtgtggcctgtgcagcctgggcgctgtgggcgccccccggccctgccaggccccccagcagtgggagggccggcaggtgatgtaccagcagagcagtggaagaaacagccgggccctgctgtcctatgatggcctgaaccagagggtgcgggtgctggatgagaggaaggccctgatcccctgcaagaggctgtttgagtacatcctgctgtacaaggatggagtgatgttccagattgaccaggccaccaagcagtgcagcaagatgaccctgacccagccctgggaccccctggacatcccccagaacagcacctttgaggaccagtacagcattggaggcccccaggagcagatcaccgtgcaggagtggagcgacaggaagagcgcccggagctatgagacctggattggcatctacacagtgaaggactgctaccctgtgcaggagaccttcaccatcaactacagcgtcatcctgagcacccgcttctttgacatccagctgggcatcaaggaccccagcgtcttcaccccacccagcacctgccagatggcccagctggagaagatgtctgaggactgctcctggtag

SEQ ID NO: 6849 - DNA, 5106 bp, synthetic construct
  misc_feature 1..5106: note = source = /note="Description of Artificial Sequence: Synthetic coding sequence"
  source 1..5106: mol_type = other DNA
atgggcttcctgcccaagctgctgctgctggccagcttcttccctgctggccaggcctcctggggcgtgagcagcccccaggatgtgcagggcgtgaagggcagctgcctgctgatcccctgcatcttctccttcccagcagatgtggaggtgcctgatggcatcacagccatctggtactatgactacagcggccagaggcaggtggtgagccacagcgctgaccccaagctggtggaggcccgcttccggggccgcacagagttcatgggcaaccctgagcaccgggtgtgcaacctgctgctgaaggacctgcagcctgaggacagcggcagctacaacttccgctttgagatcagcgaggtgaaccgctggagcgatgtgaagggcaccctggtgacagtgacagaggagccccgggtgcccaccatcgccagccctgtggagctgctggagggcacagaggtggacttcaactgcagcaccccctacgtgtgcctgcaggagcaggtgcggctgcagtggcagggccaggaccctgcccggtctgtgaccttcaacagccagaagtttgagcccaccggggtgggccacctggagaccctgcacatggccatgtcctggcaggaccacggccgcatcctgcgctgccagctgtctgtggccaaccaccgggcccagagcgagatccacctgcaggtgaagtatgcccccaagggcgtgaagatcctgctgagccccagcggcaggaacatcctgcccggggagctggtgaccctgacctgccaggtgaacagcagctacccagctgtgagcagcatcaagtggctgaaggatggagtgcggctgcagaccaagacaggagtgctgcacctgccccaggccgcctggagcgatgctggggtgtacacctgccaggccgagaatggagtgggcagcctggtgtccccacccatcagcctgcacatcttcatggccgaggtgcaggtgtccccagctggccccatcctggagaaccagacagtgaccctggtgtgcaacaccccaaatgaggcccccagcgacctgcgctacagctggtacaagaaccacgtgctgctggaggatgcccacagccacaccctgcggctgcacctggccaccagggctgacaccggcttctacttctgtgaggtgcagaatgtgcacggcagcgagaggagcggccctgtgtctgtggtggtgaaccacccccccctgacccctgtgctgacagccttcctggagacccaggccggcctggtgggcatcctgcactgcagcgtggtgtctgagcccctggccaccctggtgctgagccatggaggccacatcctggccagcaccagcggggacagcgaccacagcccccgcttcagcggcaccagcggccccaacagcctgcggctggagatccgggacctggaggagacagacagcggggagtacaagtgcagcgccaccaacagcctgggcaatgccaccagcaccctggacttccacgccaatgctgcccggctgctgatcagccctgctgctgaggtggtggagggccaggccgtgaccctgagctgccgcagcggcctgagccccaccccagatgcccgcttctcctggtacctgaatggagccctgctgcacgagggccctggcagcagcctgctgctgcctgctgccagcagcacagatgctggcagctaccactgccgggccagagatggccacagcgccagcggccccagcagccctgctgtgctgactgtgctgtacccaccccggcagcccaccttcaccacccggctggacctggatgctgctggggccggggccggccggcggggcctgctgctgtgccgggtggacagcgaccccccagcccggctgcagctgctgcacaaggacagagtggtggccaccagcctgcccagcggcggcggctgcagcacctgtggcggctgcagccccaggatgaaggtgaccaaggcccccaacctgctgcgggtggagatccacaaccccctgctggaggaggagggcctgtacctgtgtgaggccagcaatgccctgggcaatgccagcaccagcgccaccttcaacggccaggccaccgtgctggccatcgcccccagccacaccctgcaggagggcacagaggccaacctgacctgcaatgtgtcccgggaggccgccggcagccctgccaacttctcctggttcagaaatggagtgctgtgggcccagggccccctggagaccgtgaccctgctgcctgtggccaggacagatgctgccctgtatgcctgccgcatcctgacagaggccggggcccagctgagcacccctgtgctgctgtctgtgctgtaccccccagaccggcccaagctgagcgccctgctggacatgggccagggccacatggccctcttcatctgcaccgtggacagccggcccctggccctgctggccctcttccatggagagcacctgctggccaccagcctgggcccccaggtgcccagccacggccgcttccaggccaaggccgaggccaacagcctgaagctggaggtgcgggagctgggcctgggggacagcggcagctaccgctgtgaggccaccaacgtgctgggcagcagcaacaccagcctcttcttccaggtgcggggggcctgggtgcaggtgagccccagccctgagctgcaggagggccaggccgtggtgctgagctgccaggtgcacactggagtgcctgagggcaccagctaccgctggtacagagatggccagcccctgcaggagagcaccagcgccaccctgcgctttgctgccatcaccctgacccaggccggggcctaccactgccaggcccaggcccctggcagcgccaccaccagcctggccgcccccatcagcctgcacgtgtcctatgcccccaggcatgtgaccctgaccaccctgatggacaccggccctggccgcctgggcctgctgctgtgccgggtggacagcgaccccccagcccagctgcggctgctgcatggagaccggctggtggccagcaccctgcagggcgtgggcggccctgagggcagcagcccccggctgcacgtggccgtggcccccaacaccctgcggctggagatccatggagccatgctggaggatgaaggagtgtacatctgtgaggccagcaacaccctgggccaggccagcgccagcgctgactttgatgcccaggccgtgaatgtgcaggtgtggccaggggccaccgtgcgggagggccagctggtgaacctgacctgcctggtgtggaccacccacccagcccagctgacctacacctggtaccaggacggccagcagaggctggatgcccacagcatccccctgcccaacgtgacagtgagagatgccaccagctaccgctgtggggtgggccccccaggccgggccccccggctgagccggcccatcaccctggatgtgctgtatgcccccaggaacctgcggctgacctacctgctggagagccacggcggccagctggccctggtgctgtgcaccgtggacagccggcccccagcccagctggccctgagccacgccggccgcctgctggccagcagcacagctgcctctgtgcccaacaccctgcggctggagctgcggggcccccagcccagagatgagggcttctacagctgcagcgcccggagccccctgggccaggccaacaccagcctggagctgcggctggagggcgtgcgggtcatcctggcccctgaggccgctgtgcctgagggcgcccccatcaccgtgacctgtgccgaccctgctgcccacgcccccaccctgtacacctggtaccacaacggccgctggctgcaggagggccctgctgccagcctgtccttcctggtggccacccgggcccatgctggggcctacagctgccaggcccaggatgcccagggcaccaggagcagcaggcctgctgccctgcaggtgctgtatgccccccaggatgctgtgctgagcagcttccgggacagccgggcccgctccatggctgtgatccagtgcaccgtggacagcgagcccccagctgagctggccctgagccatgatggcaaggtgctggccaccagcagcggcgtgcacagcctggccagcggcactggacatgtgcaggtggccagaaatgccctgcggctgcaggtgcaggatgtgcctgctggagatgacacctacgtgtgcacagcccagaacctgctgggcagcatcagcaccatcggccgcctgcaggtggagggcgcccgggtggtggccgagcccggcctggatgtgcctgagggcgccgccctgaacctgagctgccgcctgctgggcggccctggccctgtgggcaacagcacctttgcctggttctggaatgaccggcggctgcacgccgagcctgtgcccaccctggccttcacccacgtggcccgggcccaggccggcatgtaccactgcctggccgagctgcccactggagctgctgccagcgcccctgtgatgctgcgggtgctgtacccacccaagacccccaccatgatggtgtttgtggagcctgagggcggcctgcggggcatcctggactgccgggtggacagcgagcccctggccagcctgaccctgcacctgggcagccggctggtggccagcagccagccccagggcgccccagctgagccccacatccacgtgctggccagccccaatgccctgcgggtggacatcgaggccctgcggcccagcgaccagggcgagtacatctgcagcgccagcaatgtgctgggcagcgccagcaccagcacctactttggagtgcgggccctgcaccggctgcaccagttccagcagctgctgtgggtgctgggcctgctggtgggcctgctgctgctgctgctgggcctgggcgcctgctacacctggagcagcctcatcctgatgcagccccacgtgcggccccagcctgtgccccacccctgggccgaccagtggtgctgcctgcccagcggcggggagagcggccagaacctgtag

SEQ ID NO: 6850 - DNA, 708 bp, synthetic construct
  misc_feature 1..708: note = source = /note="Description of Artificial Sequence: Synthetic coding sequence"
  source 1..708: mol_type = other DNA
atgacagtgctggccccagcctggagccccaccacctacctgctgctgctgctgctgctgagcagcggcctgagcggcacccaggactgcagcttccagcacagccccatcagcagtgactttgctgtgaagatccgggagctgagtgactacctgctgcaggactaccctgtgacagtggccagcaacctgcaggatgaggagctgtgtggcggcctgtggaggctggtgctggcccagcgctggatggagcggctgaagacagtggccggcagcaagatgcagggcctgctggagcgggtgaacacagagatccactttgtgaccaagtgtgccttccagcccccacccagctgcctgcgctttgtgcagaccaacatcagccggctgctgcaggagaccagcgagcagctggtggccctgaagccctggatcacccggcagaacttcagccgctgcctggagctgcagtgccagcctgacagcagcaccctgcccccaccctggagcccccggcccctggaggccacagcccccacagccccccagccccccctgctgctgctgctgctgctgcctgtgggcctgctgctgctggccgccgcctggtgcctgcactggcagaggaccaggaggaggacccccaggcctggagagcaggtgccccctgtgcccagcccccaggacctgctgctggtggagcactag

SEQ ID NO: 6851 - DNA, 3297 bp, synthetic construct
  misc_feature 1..3297: note = source = /note="Description of Artificial Sequence: Synthetic coding sequence"
  source 1..3297: mol_type = other DNA
atgaccctgcaggagctggtgcacaaggccgccagctgctacatggacagagtggccgtgtgctttgatgagtgcaacaaccagctgcctgtgtactacacctacaagacagtggtgaatgctgccagcgagctgagcaacttcctgctgctgcactgtgacttccagggcatccgggagatcggcctgtactgccagcccggcatcgacctgcccagctggatcctgggcatcctgcaggtgcctgctgcctacgtgcccatcgagccagacagcccccccagcctgagcacccacttcatgaagaagtgcaacctgaagtacatcctggtggagaagaagcagatcaacaagttcaagagcttccacgagaccctgctgaactatgacaccttcaccgtggagcacaatgacctggtgctcttccggctgcactggaagaacacagaggtgaacctgatgctgaatgatggcaaggagaagtatgagaaggagaagatcaagagcatcagcagcgagcacgtgaatgaggagaaggccgaggagcacatggacctgcggctgaagcactgcctggcctacgtgctgcacaccagcggcaccaccggcatccccaagatcgtgcgggtgccccacaagtgcatcgtgcccaacatccagcacttccgggtgctgtttgacatcacccaggaggatgtgctcttcctggccagccccctgacctttgaccccagcgtggtggagatcttcctggccctgagcagcggggccagcctgctgattgtgcccacctctgtgaagctgctgcccagcaagctggcctctgtgctcttcagccaccaccgggtgacagtgctgcaggccacccccaccctgctgcggcgcttcggcagccagctgatcaagagcacagtgctgagcgccaccaccagcctgcgggtgctggccctgggcggggaggccttccccagcctgactgtgctgcgctcctggagaggagagggcaacaagacccagatcttcaacgtgtatggcatcacagaggtgtcctcctgggccaccatctaccgcatccctgagaagaccctgaacagcaccctgaagtgtgagctgcctgtgcagctgggcttccccctgctgggcaccgtggtggaggtgcgggacaccaacggcttcaccatccaggagggcagcggccaggtgttcctgggcggcaggaacagagtgtgcttcctggatgatgaggtgacagtgcccctgggcaccatgagggccaccggggactttgtgacagtgaaggatggagagatcttcttcctgggcaggaaggacagccagatcaagagacatggcaagaggctgaacatcgagctggtgcagcaggtggccgaggagctgcagcaggtggagagctgtgctgtgacctggtacaaccaggagaagctgatcctcttcatggtgtccaaggatgcctctgtgaaggagtacatcttcaaggagctgcagaagtacctgcccagccatgctgtgcctgatgagctggtgctgattgacagcctgcccttcaccagccacggcaagattgatgtgtctgagctgaacaagatctacctgaactacatcaacctgaagtctgagaacaagctgagcggcaaggaggacctgtgggagaagctgcagtacctgtggaagagcaccctgaacctgcctgaggacctgctgcgggtgcctgatgagagcctcttcctgaacagcggcggggacagcctgaagagcatccggctgctgtctgaaattgagaagctggtgggcacctctgtgcccggcctgctggagatcatcctgagcagcagcatcctggagatctacaaccacatcctgcagacagtggtgcctgatgaagatgtgaccttcaggaagagctgtgccaccaagaggaagctgagtgacatcaaccaggaggaggccagcggcaccagcctgcaccagaaggccatcatgaccttcacctgccacaatgagatcaatgcctttgtggtgctgagccggggcagccagatcctgagcctgaacagcacccgcttcctgaccaagctgggccactgcagcagcgcctgccccagcgacagcgtgtcccagaccaacatccagaacctgaagggcctgaacagccctgtgctgattggcaagagcaaggaccccagctgtgtggccaaggtgtctgaggagggcaagccagccatcggcacccagaagatggagctgcacgtgcgctggaggagtgacacaggaaaatgtgtggatgccagccccctggtggtgatccccacctttgacaagagcagcaccaccgtgtacatcggcagccacagccacaggatgaaggctgtggacttctacagcggcaaggtgaagtgggagcagatcctgggggaccgcatcgagagcagcgcctgtgtgtccaaatgtggcaacttcatcgtggtgggctgctacaacggcctggtgtatgtgctgaagagcaacagcggggagaagtactggatgttcaccacagaagatgctgtgaagagcagcgccaccatggaccccaccaccggcctcatctacatcggcagccatgaccagcacgcctatgccctggacatctacaggaagaagtgtgtgtggaagagcaaatgtggcggcaccgtcttcagcagcccctgcctgaacctgatcccccaccacctgtactttgccaccctgggcggcctgctgctggccgtgaacccagccactggaaatgtcatctggaagcacagctgtgggaagcccctcttcagcagcccccagtgctgcagccagtacatctgcatcggctgtgtggatggcaacctgctgtgcttcacccactttggagagcaggtgtggcagttcagcaccagcggccccatcttcagcagcccctgcaccagccccagcgagcagaagatcttcttcggcagccatgactgcttcatctactgctgcaacatgaagggccacctgcagtggaagtttgagaccaccagccgggtgtatgccaccccatttgccttccacaactacaacggcagcaatgagatgctgctggccgccgccagcacagatggcaaggtgtggatcctggagagccagagcggccagctgcagagcgtgtatgagctgcccggggaggtgttcagcagccctgtggtgctggagagcatgctgatcatcggctgccgggacaactacgtgtactgcctggacctgctgggcggcaaccagaagtag

SEQ ID NO: 6852 - DNA, 774 bp, synthetic construct
  misc_feature 1..774: note = source = /note="Description of Artificial Sequence: Synthetic coding sequence"
  source 1..774: mol_type = other DNA
atggccagcaagattggcagccgccgctggatgctgcagctgatcatgcagctgggctctgtgctgctgacccgctgccccttctggggctgcttcagccagctgatgctgtatgcagagcgggcagaggcccggaggaagccagacatccctgtgccctacctgtactttgacatgggcgctgctgtgctgtgtgccagcttcatgagctttggagtgaagaggcgctggtttgccctgggcgccgccctgcagctggccatcagcacctacgccgcctacatcggcggctacgtgcactatggagactggctgaaggtgaggatgtacagcaggacagtggccatcattggaggcttcctggtgctggccagcggggccggggagctgtacagaaggaagcccaggagccgcagcctgcagagcacaggccaggtgttcctgggcatctacctgatctgtgtggcctacagcctgcagcacagcaaggaggaccggctggcctacctgaaccacctgcccggcggggagctgatgatccagctgttctttgtgctgtatggcatcctggccctggccttcctgagcggctactacgtgaccctggccgcccagatcctggccgtgctgctgccccctgtgatgctgctgattgatggaaatgtggcctactggcacaacaccaggagagtggagttctggaaccagatgaagctgctgggggagagcgtgggcatctttggaacagctgtgatcctggccacagatggatag

SEQ ID NO: 6853 - DNA, 2118 bp, synthetic construct
  misc_feature 1..2118: note = source = /note="Description of Artificial Sequence: Synthetic coding sequence"
  source 1..2118: mol_type = other DNA
atggagaagcccaggagcattgaggagacccccagcagcgagcccatggaggaggaggaggatgatgacctggagctgtttggaggctatgacagcttccgcagctacaacagctctgtgggcagcgagagcagcagctacctggaggagagcagcgaggctgaaaatgaagatcgggaggccggggagctgcccaccagccccctgcacctgctgagccctggcacccccaggagcctggatggcagcggcagcgagcctgctgtgtgtgagatgtgtggcatcgtgggcacccgggaggccttcttcagcaagaccaagcgcttctgcagcgtgtcctgcagccgcagctacagcagcaacagcaagaaggccagcatcctggcccggctgcagggcaagccacccaccaagaaggccaaggtgctgcacaaggccgcctggagcgccaagatcggggccttcctgcacagccagggcaccggccagctggctgatggcacccccaccggccaggatgccctggtgctgggctttgactggggcaagttcctgaaggaccacagctacaaggccgcccctgtgtcctgcttcaagcacgtgcccctgtatgaccagtgggaggatgtgatgaagggcatgaaggtggaggtgctgaacagtgatgctgtgctgcccagccgggtgtactggatcgccagcgtcatccagacagctggctacagagtgctgctgcgctatgagggctttgaaaatgatgccagccatgacttctggtgcaacctgggcaccgtggatgtgcaccccatcggctggtgtgccatcaacagcaagatcctggtgccccccaggaccatccacgccaagttcacagactggaagggctacctgatgaagaggctggtgggcagcaggaccctgcctgtggacttccacatcaagatggtggagagcatgaagtaccccttccggcagggcatgaggctggaggtggtggacaagagccaggtgtccaggaccaggatggctgtggtggacacagtgattggaggccgcctgcggctgctgtatgaagatggagacagtgatgatgacttctggtgccacatgtggagccccctcatccaccctgtgggctggagccggcgggtgggccacggcatcaagatgtctgaaagaagaagtgacatggcccaccaccccaccttcaggaagatctactgtgatgctgtgccctacctgttcaagaaggtgcgggctgtgtacacagaaggaggctggtttgaggagggcatgaagctggaggccatcgaccccctgaacctgggcaacatctgtgtggccaccgtgtgcaaggtgctgctggatggctacctgatgatctgtgtggatggcggccccagcacagatggcctggactggttctgctaccacgccagcagccacgccatcttccctgccaccttctgccagaagaatgacatcgagctgaccccacccaagggctatgaggcccagaccttcaactgggagaactacctggagaagaccaagagcaaggccgcccccagccgcctcttcaacatggactgccccaaccacggcttcaaggtgggcatgaagctggaggccgtggacctgatggagcccaggctcatctgtgtggccaccgtgaagagggtggtgcaccggctgctgagcatccactttgatggctgggacagtgaatatgaccagtgggtggactgtgagagcccagacatctaccctgtgggctggtgtgagctgaccggctaccagctgcagccccctgtggccgctgagcccgccacccccctgaaggccaaggaggccaccaagaagaagaagaagcagtttgggaagaagaggaagaggatcccccccaccaagacccggcccctgcggcagggcagcaagaagcccctgctggaggatgacccccagggcgccaggaagatcagcagcgagcctgtgcctggagagatcatcgctgtgcgggtgaaggaggagcacctggatgtggccagcccagacaaggccagcagccctgagctgcctgtgtctgtggagaacatcaagcaggagacagatgactag

SEQ ID NO: 6854 - DNA, 2103 bp, synthetic construct
  misc_feature 1..2103: note = source = /note="Description of Artificial Sequence: Synthetic coding sequence"
  source 1..2103: mol_type = other DNA
atgagcaggaggacccgctgtgaggacctggatgagctgcactaccaggacacagacagtgatgtgcctgagcagagggacagcaagtgcaaggtgaagtggacccatgaggaggatgagcagctgcgggccctggtgcggcagtttggccagcaggactggaagttcctggccagccacttccccaacagaacagaccagcagtgccagtaccgctggctgcgggtgctgaacccagacctggtgaagggcccctggaccaaggaggaggaccagaaggtgattgagctggtgaagaagtatggcaccaagcagtggaccctgattgccaagcacctgaagggccgcctgggcaagcagtgccgggagcgctggcacaaccacctgaaccctgaggtgaagaagagctgctggacagaggaggaggaccgcatcatctgtgaggcccacaaggtgctgggcaaccgctgggccgagatcgccaagatgctgcccggccgcacagacaatgctgtgaagaaccactggaacagcaccatcaagaggaaggtggacaccggcggcttcctgtctgagagcaaggactgcaagccccctgtgtacctgctgctggagctggaggacaaggatggcctgcagagcgcccagcccacagagggccagggcagcctgctgaccaactggcccagcgtgccccccaccatcaaggaggaggagaacagcgaggaggagctggccgccgccaccaccagcaaggagcaggagcccatcggcacagacctggatgctgtgaggaccccagagcccctggaggagttccccaagcgggaggaccaggagggcagccccccagagaccagcctgccctacaagtgggtggtggaggccgccaacctgctgatcccagctgtgggcagcagcctgtctgaggccctggacctgattgaaagtgaccctgatgcctggtgtgacctgagcaagtttgacctgcctgaggagcccagcgcagaagattccatcaacaacagcctggtgcagctgcaggccagccaccagcagcaggtgctgcccccccggcagcccagcgccctggtgcccagcgtgacagagtaccgcctggatggccacaccatcagtgacctgagccgcagcagcagaggagagctgatccccatcagccccagcacagaggtgggcggcagcggcatcggcaccccacccagcgtgctgaagaggcagaggaagagaagagtggccctgagccctgtgacagagaacagcaccagcctgtccttcctggacagctgcaacagcctgacccccaagagcacccctgtgaagaccctgcccttcagccccagccagttcctgaacttctggaacaagcaggacaccctggagctggagagccccagcctgaccagcacccctgtgtgcagccagaaggtggtggtgaccacccccctgcaccgggacaagacccccctgcaccagaagcatgctgcctttgtgaccccagaccagaagtacagcatggacaacaccccccacacccccacccccttcaagaatgccctggagaagtatggccccctgaagcccctgccccagaccccccacctggaggaggacctgaaggaggtgctgcggtctgaggccggcatcgagctgatcattgaagatgacatccggcctgagaagcagaagaggaagccaggcctgcggcgcagccccatcaagaaggtgaggaagagcctggccctggacatcgtggatgaagatgtgaagctgatgatgagcaccctgcccaagagcctgagcctgcccaccacagcccccagcaacagcagcagcctgaccctgagcggcatcaaggaggacaacagcctgctgaaccagggcttcctgcaggccaagccagagaaggctgctgtggcccagaagcccaggagccacttcaccaccccagcccccatgagcagcgcctggaagacagtggcctgtggcggcacccgggaccagctgttcatgcaggagaaggcccggcagctgctgggccgcctgaagcccagccacaccagcaggaccctcatcctgtcctag

SEQ ID NO: 6855 - DNA, 528 bp, synthetic construct
  misc_feature 1..528: note = source = /note="Description of Artificial Sequence: Synthetic coding sequence"
  source 1..528: mol_type = other DNA
atgctgaggacagaggtgccccggctgcccaggagcaccacagccatcgtgtggagctgccacctgatggccacagccagcgccatggccggccccagcagcgagaccaccagcgaggagcagctgatcacccaggagcccaaggaggccaacagcaccaccagccagaagcagagcaagcagaggaagagaggaagacatggcccccggcgctgccacagcaactgccgcggggacagctttgccacctacttccggcgggtgctgaagcaggtgcaccagggcctgagcctgagccgggaggccgtgtctgtgatggacagcctggtgcatgacatcctggacagaattgccacagaagctggccgcctggcccggagcaccaagaggcagaccatcacagcctgggagaccaggatggctgtgcggctgctgctgcccggccagatgggcaagctggccgagagcgagggcaccaaggctgtgctgcggaccagcctgtatgccatccagcagcagaggaagtag

SEQ ID NO: 6856 - DNA, 624 bp, synthetic construct
  misc_feature 1..624: note = source = /note="Description of Artificial Sequence: Synthetic coding sequence"
  source 1..624: mol_type = other DNA
atggccccctttgagcccctggccagcggcatcctgctgctgctgtggctgattgcccccagccgggcctgcacctgtgtgcccccccacccccagacagccttctgcaacagcgacctggtgatccgggccaagtttgtgggcaccccagaggtgaaccagaccaccctgtaccagagatatgagatcaagatgaccaagatgtacaagggcttccaggccctgggagatgctgctgacatccgctttgtgtacaccccagccatggagagcgtgtgtggctacttccacaggagccacaacagaagtgaggagttcctgattgctgggaagctgcaggacggcctgctgcacatcaccacctgcagctttgtggccccctggaacagcctgagcctggcccagaggcggggcttcaccaagacctacacagtgggctgtgaagaatgtactgtgttcccctgcctgagcatcccctgcaagctgcagagcggcacccactgcctgtggacagaccagctgctgcagggcagcgagaagggcttccagagccgccacctggcctgcctgccccgggagcccggcctgtgcacctggcagagcctgcggagccagatcgcctag

SEQ ID NO: 6857 - DNA, 1686 bp, synthetic construct
  misc_feature 1..1686: note = source = /note="Description of Artificial Sequence: Synthetic coding sequence"
  source 1..1686: mol_type = other DNA
atggctgaccacaacccagacagcgacagcacccccaggaccctgctgcggcgggtgctggacacagctgaccccaggaccccaagaagacccaggtctgcccgggccggggcccggcgggccctgctggagacagccagccccaggaagctgagcggccagaccaggaccatcgcccggggccgcagccacggggcccggtctgtgggccgcagcgcccacatccaggccagcggccacctggaggagcagacccccaggaccctgctgaagaacatcctgctgacagcccctgagagcagcatcctgatgcctgagagcgtggtgaagcctgtgcctgccccccaggccgtgcagcccagccggcaggagagcagctgtggcagcctggagctgcagctgcctgagctggagccccccaccaccctggcccctggcctgctggcccctggccgcaggaagcagaggctgcggctgagcgtcttccagcagggcgtggaccagggcctgagcctgagccaggagccccagggcaatgctgatgccagcagcctgaccaggagcctgaacctgacctttgccacccccctgcagccccagagcgtgcagaggcctggcctggcccggcggcccccagcccggcgggctgtggatgtgggcgccttcctgcgggacctgcgggacaccagcctggccccacccaacatcgtgctggaggacacccagcccttcagccagcccatggtgggcagccccaacgtgtaccacagcctgccctgcaccccccacactggagcagaagatgctgagcaggccgccggcaggaagacccagagcagcggccctggcctgcagaagaacagccctgggaagccagcccagttcctggccggggaggccgaggaggtgaatgcctttgccctgggcttcctgagcaccagcagtggagtgtctggagaagatgaggtggagcccctgcatgatggagtggaggaggccgagaagaagatggaggaggagggcgtgtctgtgtctgagatggaggccaccggggcccagggccccagccgggtggaggaggccgagggccacacagaggtgacagaggccgagggcagccagggcacagctgaggctgatggccctggggccagcagtggagatgaagatgccagcggccgggccgccagccctgagagcgccagcagcaccccagagagcctgcaggcccggcggcaccaccagttcctggagcccgccccagcccctggagctgctgtgctgagcagcgagcctgctgagcccctgctggtgcgccaccccccccggcccaggaccaccggcccccggccccggcaggacccccacaaggccggcctgagccactacgtgaagctgttctccttctacgccaagatgcccatggagaggaaggccctggagatggtggagaagtgcctggacaagtacttccagcacctgtgtgatgacctggaggtgtttgctgcccatgctggcaggaagacagtgaagccagaggacctggagctgctgatgaggcggcagggcctggtgacagaccaggtgtccctgcacgtgctggtggagcggcacctgcccctggagtaccggcagctgctgatcccctgtgcctacagcggcaacagcgtcttccctgcccagtag

SEQ ID NO: 6858 - DNA, 1134 bp, synthetic construct
  misc_feature 1..1134: note = source = /note="Description of Artificial Sequence: Synthetic coding sequence"
  source 1..1134: mol_type = other DNA
atgacagatgatgagagcgagagcgtgctgagtgacagccatgagggcagcgagctggagctgcccgtcatccagctgtgtggcctggtggaggagctgtcctatgtgaacagcgccctgaagacagaaacagagatgtttgagaagtactatgccaagctggagccccgggaccagaggcctccccggctgtctgagatcaagatctctgctgctgactatgcccagttccggggcagaagaagaagcaagagcaggacaggcatggaccggggcgtgggcctgacagctgaccagaagctggagctggtgcagaaggaggtggccgacatgaaggatgacctgcggcacacccgggccaatgctgagcgggacctgcagcaccacgaggccatcatcgaggaggccgagatccgctggagcgaggtgtcccgggaggtgcatgaatttgagaaggacatcctgaaggccatcagcaagaagaagggcagcatcctggccacccagaaggtgatgaagtacatcgaggacatgaacagaagaagagacaacatgaaggagaagctgcggctgaagaatgtgtccctgaaggtgcagaggaagaagatgctgctgcagctgcggcagaaggaggaggtgtctgaggccctgcatgatgtggacttccagcagctgaagattgaaaatgcccagttcctggagaccatcgaggccaggaaccaggagctgacccagctgaagctgagcagcggcaacaccctgcaggtgctgaatgcctacaagagcaagctgcacaaggccatggagatctacctgaacctggacaaggagatcctgctgaggaaggagctgctggagaagattgagaaggagaccctgcaggtggaggaggaccgggccaaggccgaggccgtgaacaagaggctgaggaagcagctggccgagttccgggccccccaggtgatgacctacgtgcgggagaagatcctgaatgctgacctggagaagagcatccgcatgtgggagaggaaggtggagattgctgagatgagcctgaagggccacaggaaggcctggaacaggatgaagatcaccaatgagcagctgcaggccgactacctggccggcaagtag

SEQ ID NO: 6859 - DNA, 1548 bp, synthetic construct
  misc_feature 1..1548: note = source = /note="Description of Artificial Sequence: Synthetic coding sequence"
  source 1..1548: mol_type = other DNA
atggaggcccgggagcccggccggcccacccccacctaccacctggtgcccaacaccagccagagccaggtggaggaggatgtgagcagccccccccagaggagcagcgagaccatgcagctgaagaaggagatcagcctgctgaatggagtgtccctggtggtgggcaacatgattggcagcggcatctttgtgagccccaagggcgtgctggtgcacacagccagctatggcatgagcctcatcgtgtgggccatcggcggcctcttctctgtggtgggcgccctgtgctacgccgagctgggcaccaccatcaccaagagcggggccagctatgcctacatcctggaggcctttggaggcttcatcgccttcatccggctgtgggtgtccctgctggtggtggagcccaccggccaggccatcatcgccatcacctttgccaactacatcatccagcccagcttccccagctgtgaccccccctacctggcctgccgcctgctggccgccgcctgcatctgcctgctgacctttgtgaactgtgcctacgtgaagtggggcaccagggtgcaggacaccttcacctacgccaaggtggtggccctgattgccatcatcgtgatgggcctggtgaagctgtgccagggccacagcgagcacttccaggatgcctttgagggcagctcctgggacatgggcaacctgagcctggccctgtacagcgccctcttctcctacagcggctgggacaccctgaactttgtgacagaggagatcaagaaccctgagaggaacctgcccctggccatcggcatctccatgcccatcgtgaccctcatctacatcctgaccaacgtggcctactacacagtgctgaacatcagtgatgtgctgagcagtgatgctgtggccgtgacctttgctgaccagaccttcggcatgttctcctggaccatccccatcgctgtggccctgagctgctttggaggcctgaatgccagcatctttgccagcagccgcctcttctttgtgggcagccgggagggccacctgcctgacctgctgtccatgatccacatcgagcgcttcacccccatcccagccctgctcttcaactgcaccatggccctgatctacctgattgtggaggatgtgttccagctgatcaactacttctccttctcctactggttctttgtgggcctgtctgtggtgggccagctgtacctgcgctggaaggagcccaagaggccccggcccctgaagctgtctgtgttcttccccatcgtgttctgcatctgcagcgtcttcctggtgattgtgcccctcttcacagacaccatcaacagcctgattggaattggaattgccctgagcggcgtgcccttctacttcatgggcgtgtacctgcctgagagcagaagacccctcttcatcagaaatgtgctggccgccatcacccggggcacccagcagctgtgcttctgtgtgctgacagagctggatgtggccgaggagaagaaggatgagaggaagacagactag

SEQ ID NO: 6860 - DNA, 1623 bp, synthetic construct
  misc_feature 1..1623: note = source = /note="Description of Artificial Sequence: Synthetic coding sequence"
  source 1..1623: mol_type = other DNA
atgaatggagaggccatctgcagcgccctgcccaccatcccctaccacaagctggccgacctgcgctacctgagcagaggagccagcggcaccgtgagcagcgcccggcatgctgactggagggtgcaggtggccgtgaagcacctgcacatccacacccccctgctggacagcgagaggaaggatgtgctgcgggaggccgagatcctgcacaaggcccgcttctcctacatcctgcccatcctgggcatctgcaatgaacctgagttcctgggcatcgtgacagagtacatgcccaacggcagcctgaatgagctgctgcacaggaagacagagtacccagatgtggcctggcccctgcgcttccgcatcctgcacgagatcgccctgggcgtgaactacctgcacaacatgaccccacccctgctgcaccacgacctgaagacccagaacatcctgctggacaatgagttccacgtgaagattgctgactttggcctgagcaagtggaggatgatgagcctgagccagagccgcagcagcaagagcgcccctgagggcggcaccatcatctacatgcctcctgagaactatgagcccggccagaagagccgggccagcatcaagcatgacatctacagctatgctgtgatcacctgggaggtgctgagcaggaagcagccctttgaagatgtgaccaaccccctgcagatcatgtacagcgtgtcccagggccacaggcctgtgatcaatgaggagagcctgccctatgacatcccccaccgggccaggatgatcagcctgattgaaagtggctgggcccagaacccagatgagcggcccagcttcctgaagtgcctgattgagctggagcctgtgctgcggacctttgaggagatcaccttcctggaggccgtcatccagctgaagaagaccaagctgcagagcgtgtcctctgccatccacctgtgtgacaagaagaagatggagctgagcctgaacatccctgtgaaccacggcccccaggaggagagctgtggcagcagccagctgcatgaaaattctggcagccctgagaccagccgcagcctgcctgccccccaggacaatgacttcctgagcaggaaggcccaggactgctacttcatgaagctgcaccactgccccggcaaccacagctgggacagcaccatcagcggcagccagagagctgccttctgtgaccacaagaccaccccctgcagcagcgccatcatcaaccccctgagcacagctggcaacagcgagcggctgcagcccggcatcgcccagcagtggatccagagcaagagagaagatattgtgaaccagatgacagaggcctgcctgaaccagagcctggatgccctgctgagccgggacctgatcatgaaggaggactatgagctggtgtccaccaagcccaccaggaccagcaaggtgcggcagctgctggacaccacagacatccagggcgaggagtttgccaaggtgattgtgcagaagctgaaggacaacaagcagatgggcctgcagccctacccagagatcctggtggtgagccgcagccccagcctgaacctgctgcagaacaagtccatgtag

SEQ ID NO: 6861 - DNA, 2079 bp, synthetic construct
  misc_feature 1..2079: note = source = /note="Description of Artificial Sequence: Synthetic coding sequence"
  source 1..2079: mol_type = other DNA
atgagggcctgtgccggcagcacccgggaggccggcagcggggcccaggacctgagcaccctgctgtgcctggaggagagcatggaggagcaggatgagaagcccccagagccccccaaggcctgtgcccaggacagcttcctgccccaggagatcatcatcaaggtggagggggaggacaccggcagcctgaccatccccagccaggagggcgtgaacttcaagatcgtgacagtggacttcacccgggaggagcagggcacctggaacccagcccagaggaccctggacagagatgtgatcctggagaaccaccgggacctggtgtcctgggacctggccacagctgtgggcaagaaggacagcaccagcaagcagaggatctttgatgaggagcccgccaatggagtgaagattgagcgcttcaccagagatgacccctggctgagcagctgtgaggaggtggatgactgcaaggaccagctggagaagcagcaggagaagcaggagatcctgctgcaggaggtggccttcacccagaggaaggctgtgatccacgagcgggtgtgcaagagtgatgaaacaggagagaagagcggcctgaacagcagcctcttcagcagccctgtgatccccatccggaaccacttccacaagcacgtgtcccatgccaagaagtggcacctgaatgctgctgtgaacagccaccagaagatcaatgaaaatgagaccctgtatgaaaataatgaatgtgggaagccaccccagagcatccacctgatccagttcaccaggacccagaccaaggacaagtgctacggcttcagtgaccgcatccagagcttctgccacggcacccccctgcacatccacgagaagatccatggaggcggcaagacctttgacttcaaggaatgtggccaggtgctgaaccccaagatcagccacaatgagcagcagaggatcccctttgaggagagccagtacaagtgcagcgagaccagccacagcagcagcctgacccagaacatgaggaacaacagcgaggagaagccctttgagtgcaaccagtgtgggaagagcttctcctggagcagccacctggtggcccaccagaggacccacactggagagaagccctatgagtgcagtgaatgtgggaagagcttcagccgcagcagccacctggtgagccaccagaggacccacactggagagaagccctaccgctgcaaccagtgtgggaagagcttcagccagagctatgtgctggtggtgcaccagaggacccacactggagagaagccctatgagtgcaaccagtgtgggaagagcttccggcagagctacaagctgattgcccaccagaggacccacactggagagaagccctatgagtgcaaccagtgtgggaagagcttcatccagagctacaagctgattgcccaccagaggatccacactggagagaagccctatgagtgcaaccagtgtgggaagagcttcagccagagctacaagctggtggcccaccagaggacccacactggagagaagccctttgagtgcaaccagtgtgggaagagcttctcctggagcagccagctggtggcccaccagaggacccacactggagagaagccctatgagtgcagtgaatgtgggaagagcttcaacagaagcagccacctggtgatgcaccagaggatccacactggagagaagccctatgagtgcaaccagtgtgggaagagcttcagccagagctatgtgctggtggtgcaccagaggacccacactggagagaagccctatgagtgcagccagtgtgggaagagcttccggcagagcagctgcctgacccagcaccagaggacccacactggagagaagccctttgagtgcaaccagtgtgggaagaccttcagcctgagcgcccggctgattgtgcaccagaggacccacactggagagaagcccttcacctgcatccagtgtgggaaggccttcatcaacagctacaagctgatccgccaccaggccacccacacagaggagaagctgtatgagtgcaactag

SEQ ID NO: 6862 - DNA, 942 bp, synthetic construct
  misc_feature 1..942: note = source = /note="Description of Artificial Sequence: Synthetic coding sequence"
  source 1..942: mol_type = other DNA
atggacaacaagaagaggctggcctatgccatcatccagttcctgcatgaccagctgcggcatggaggcctgagcagtgatgcccaggagagcctggaggtggccatccagtgcctggagacagcctttggagtgacagtggaggacagcgacctggccctgccccagaccctgcctgagatctttgaggccgccgccaccgggaaggagatgccccaggacctgcggagccctgcccggaccccacccagcgaggaggacagcgctgaggccgagcggctgaagacagagggcaatgagcagatgaaggtggagaactttgaagctgctgtgcacttctacggcaaggccatcgagctgaacccagccaatgctgtgtacttctgcaacagagctgctgcctacagcaagctgggcaactatgctggagctgtgcaggactgtgagcgggccatctgcatcgaccctgcctacagcaaggcctacggccgcatgggcctggccctgagcagcctgaacaagcacgtggaggccgtggcctactacaagaaggccctggagctggaccctgacaatgagacctacaagagcaacctgaagattgctgagctgaagctgcgggaggcccccagccccactggaggagtgggcagctttgatattgctggcctgctgaacaaccctggcttcatgtccatggccagcaacctgatgaacaacccccagatccagcagctgatgagcggcatgatcagcggcggcaacaaccccctgggcaccccaggcaccagccccagccagaatgacctggccagcctcatccaggccggccagcagtttgcccagcagatgcagcagcagaaccctgagctgattgagcagctgcggagccagatccgcagcaggaccccatctgccagcaatgatgaccagcaggagtag

SEQ ID NO: 6863 - DNA, 1584 bp, synthetic construct
  misc_feature 1..1584: note = source = /note="Description of Artificial Sequence: Synthetic coding sequence"
  source 1..1584: mol_type = other DNA
atgtaccagccagaagatgacaacaacagtgatgtgaccagtgatgatgacatgaccaggaacagaagagagagcagccccccccacagcgtgcacagcttcagcggggaccgggactgggaccggcggggccgcagccgggacatggagccccgggaccgctggagccacaccaggaaccccaggagcaggatgccaccccgggacctgagcctgcctgtggtggccaagaccagctttgagatggacagagaagatgaccgggacagccgggcctatgagagccgcagccaggatgctgagagctaccagaatgtggtggacctggccgaggacaggaagccccacaacaccatccaggacaacatggagaactacaggaagctgctgagcctgggcttcctggcccaggacagcgtgcctgctgagaagaggaacacagagatgctggacaacctgcccagcgctggcagccagttcccagacttcaagcacctgggcaccttcctggtgtttgaggagctggtgacctttgaagatgtgctggtggacttcagccctgaggagctgagcagcctgtctgctgcccagaggaacctgtaccgggaggtgatgctggagaactacagaaacctggtgtccctgggccaccagttcagcaagccagacatcatcagccggctggaggaggaggagagctatgccatggagacagacagccgccacacagtcatctgccagggcgagagccatgatgaccccctggagccccaccagggcaaccaggagaagctgctgacccccatcaccatgaatgaccccaagaccctgaccccagagaggagctatggcagtgatgaatttgagaggagcagcaacctgagcaagcagagcaaggaccccctgggcaaggacccccaggagggcacagcccctggcatctgcaccagcccccagagcgccagccaggagaacaagcacaacagatgtgagttctgcaagaggaccttcagcacccaggtggccctgcggagacatgagcgcatccacacaggcaagaagccctatgagtgcaagcagtgtgccgaggccttctacctgatgccccacctgaacagacaccagaagacccacagcggcaggaagaccagcggctgcaatgaaggaaggaagcccagcgtgcagtgtgccaacctgtgtgagcgggtgcgcatccacagccaggaggactactttgagtgcttccagtgtgggaaggccttcctgcagaatgtgcacctgctgcagcacctgaaggcccacgaggccgcccgggtgctgcccccaggcctgagccacagcaagacctacctgatccgctaccagaggaagcatgactatgtgggggagcgggcctgccagtgctgtgactgtggccgggtcttcagcagaaattcctacctgatccagcactaccgcacccacacccaggagcggccctaccagtgccagctgtgtgggaaatgttttggccggcccagctacctgacccagcactaccagctgcacagccaggagaagacagtggagtgtgaccactgctag

SEQ ID NO: 6864 - DNA, 444 bp, synthetic construct
  misc_feature 1..444: note = source = /note="Description of Artificial Sequence: Synthetic coding sequence"
  source 1..444: mol_type = other DNA
atggccctgaagaggatccagaaggagctgacagacctgcagagggaccccccagcccagtgcagcgctggccctgtgggagatgacctcttccactggcaggccaccatcatgggccccaatgacagcccctaccagggcggcgtcttcttcctgaccatccacttccccacagactaccccttcaagccacccaaggtggccttcaccaccaagatctaccaccccaacatcaacagcaatggcagcatctgcctggacatcctgcggagccagtggagccctgccctgactgtgtccaaggtgctgctgagcatctgcagcctgctgtgtgaccccaacccagatgaccccctggtgcctgagatcgcccacacctacaaggctgaccgggagaagtacaaccggctggcccgggagtggacccagaagtatgccatgtag

SEQ ID NO: 6865 - DNA, 3072 bp, synthetic construct
  misc_feature 1..3072: note = source = /note="Description of Artificial Sequence: Synthetic coding sequence"
  source 1..3072: mol_type = other DNA
atgttccacctgcggacctgtgccgccaagctgcggcccctgacagccagccagacagtgaagaccttcagccagaacagacctgctgctgcccggaccttccagcagatccgctgctacagcgcccctgtggccgctgagcccttcctgagcggcaccagcagcaactacgtggaggagatgtactgtgcctggctggagaaccccaagtctgtgcacaagtcctgggacatcttcttcaggaacaccaatgctggggcccctcctggaacagcctaccagagccccctgcccctgagccggggcagcctggccgctgtggcccacgcccagagcctggtggaggcccagcccaacgtggacaagctggtggaggaccacctggccgtgcagagcctcatccgggcctaccagatccggggccaccacgtggcccagctggaccccctgggcatcctggatgctgacctggacagctctgtgcctgctgacatcatcagcagcacagacaagctgggcttctacggcctggatgaaagtgacctggacaaggtgttccacctgcccaccaccaccttcatcggcggccaggagagcgccctgcccctgcgggagatcatccggcggctggagatggcctactgccagcacatcggcgtggagttcatgttcatcaatgacctggagcagtgccagtggatccggcagaagtttgagaccccaggcatcatgcagttcaccaatgaggagaagaggaccctgctggcccggctggtgcgcagcaccaggtttgaggagttcctgcagaggaagtggagcagcgagaagcgcttcggcctggagggctgtgaggtgctgatcccagccctgaagaccatcatcgacaagagcagtgaaaatggagtggactatgtgatcatgggcatgccccaccggggccgcctgaatgtgctggccaacgtcatcaggaaggagctggagcagatcttctgccagtttgacagcaagctggaggccgcagatgagggcagcggagatgtgaagtaccacctgggcatgtaccaccggcgcatcaacagagtgacagacaggaacatcaccctgagcctggtggccaaccccagccacctggaggccgctgaccctgtggtgatgggcaagaccaaggccgagcagttctactgtggggacacagagggcaagaaggtgatgagcatcctgctgcatggagatgctgcctttgctggccagggcatcgtgtatgagaccttccacctgagtgacctgcccagctacaccacccatggaacagtgcacgtggtggtgaacaaccagatcggcttcaccacagaccccaggatggcccggagcagcccctaccccacagatgtggcccgggtggtgaatgcccccatcttccacgtgaacagtgatgatcctgaggccgtgatgtatgtgtgcaaggtggccgctgagtggaggagcaccttccacaaggatgtggtggtggacctggtgtgctacagaagaaatggccacaatgagatggatgagcccatgttcacccagcccctgatgtacaagcagatcaggaagcagaagcctgtgctgcagaagtatgcagagctgctggtgtcccagggcgtggtgaaccagccagaatatgaggaggagatcagcaaatatgacaagatctgtgaggaggcctttgcccggagcaaggatgagaagatcctgcacatcaagcactggctggacagcccctggccaggcttcttcaccctggatggccagcccaggtccatgagctgccccagcacaggcctgacagaggacatcctgacccacatcggaaatgtggccagctctgtgcctgtggagaacttcaccatccacggcggcctgagccgcatcctgaagaccagaggagagatggtgaagaacagaacagtggactgggccctggccgagtacatggccttcggcagcctgctgaaggagggcatccacatccggctgagcggccaggatgtggagcggggcaccttcagccaccgccaccacgtgctgcatgaccagaatgtggacaagaggacctgcatccccatgaaccacctgtggcccaaccaggccccctacacagtgtgcaacagcagcctgtctgaatatggagtgctgggctttgagctgggctttgccatggccagccccaatgccctggtgctgtgggaggcccagtttggagacttccacaacacagcccagtgcatcatcgaccagttcatctgccccggccaggccaagtgggtgcggcagaatggaattgtgctgctgctgccccacggcatggagggcatgggccctgagcacagcagcgcccggcctgagcgcttcctgcagatgtgcaatgatgatcctgatgtgctgcctgacctgaaggaggccaactttgacatcaaccagctgtatgactgcaactgggtggtggtgaactgcagcaccccaggcaacttcttccacgtgctgcggcggcagatcctgctgcccttcaggaagcccctcatcatcttcacccccaagagcctgctgcggcaccctgaggcccggagcagctttgatgagatgctgcccggcacccacttccagagggtcatcccagaagatggccctgctgcccagaacccagaaaatgtgaagaggctgctcttctgcaccgggaaggtgtactatgacctgacccgggagaggaaggcccgggacatggtgggccaggtggccatcacccgcatcgagcagctgagccccttcccctttgacctgctgctgaaggaggtgcagaagtacccaaatgctgagctggcctggtgccaggaggagcacaagaaccagggctactatgactatgtgaagccccggctgcggaccaccatcagccgggccaagcctgtgtggtacgccggccgggaccctgctgctgccccagccaccggcaacaagaagacccacctgacagagctgcagaggctgctggacacagcctttgacctggatgtgttcaagaacttctcctag

SEQ ID NO: 6866 - DNA, 2667 bp, synthetic construct
  misc_feature 1..2667: note = source = /note="Description of Artificial Sequence: Synthetic coding sequence"
  source 1..2667: mol_type = other DNA
atggagggagatgactgtgagttccgctatggagatggcaccaatgaggcccaggacaatgacttccccaccgtggagaggagccggctgcaggagatgctgagcctgctgggcctggagacctaccaggtgcagaagctgagcctgcaggacagcctgcagatcagctttgacagcatgaagaactgggccccccaggtgcccaaggacctgccctggaacttcctgaggaagctgcaggccctgaatgctgatgccaggaacaccaccatggtgctggatgtgctgcctgatgcccggcctgtggagaaggagagccagatggaggaggagatcatctactgggaccctgcagatgacctggccgctgacatctacagcttcagcgagctgcccaccccagacacccctgtgaaccccctggacctgctgtgtgccctgctgctgagcagtgacagcttcctgcagcaggagatcgccctgaagatggccctgtgccagtttgccctgcccctggtgctgcctgattctgagaaccactaccacaccttcctgctgtgggccatgaggggcatcgtgaggacctggtggagccagcccccccggggcatgggcagcttcagagaagattctgtggtgctgagccgggccccagcctttgcctttgtgaggatggatgtgagcagcaacagcaagagccagctgctgaatgctgtgctgagccctggccaccggcagtgggactgcttctggcaccgggacctgaacctgggcaccaatgcccgggagatcagtgatggcctggtggagatctcctggttcttccccagcggccgggaggacctggacatcttccctgagcctgtggccttcctgaacctgcggggggacatcggcagccactggctgcagttcaagctgctgacagagatcagcagcgctgtgttcatcctgacagacaacatcagcaagaaggagtacaagctgctgtacagcatgaaggagagcaccaccaagtactacttcatcctgagcccctaccggggcaagaggaacaccaacctgcgcttcctgaacaagctgatccctgtgctgaagattgaccacagccacgtgctggtgaaggtgagcagcacagacagcgacagctttgtgaagaggatccgggccatcgtgggcaatgtgctgcgggccccctgcagaagagtgtctgtggaggacatggcccatgctgccaggaagctgggcctgaaggtggatgaggactgtgaggagtgccagaaggccaaggacaggatggagcgcatcaccaggaagatcaaggacagtgatgcctacagaagagatgagctgcggctgcagggcgacccctggaggaaggccgcccaggtggagaaggagttctgccagctgcagtgggccgtggaccccccagagaagcacagagctgagctgcggcggcggctgctggagctgaggatgcagcagaatggacatgaccccagcagtggagtgcaggagttcatcagcggcatcagcagccccagcctgtctgagaagcagtacttcctgcgctggatggagtggggcctggcccgggtggcccagccccggctgcggcagcccccagagaccctgctgaccctgcggcccaagcatggaggcaccacagatgtgggggagcccctgtggccagagcccctgggcgtggagcacttcctgcgggagatgggccagttctatgaagctgagagctgcctggtggaggccggccgcctgcctgctggccagaggagatttgcccacttccctggcctggccagcgagctgctgctgaccggcctgcccctggagctgattgatggcagcaccctgtccatgcctgtgcgctgggtgacaggcctgctgaaggagctgcacgtgcggctggagaggaggagccggctggtggtgctgagcacagtgggcgtgcccggcaccgggaagagcaccctgctgaacaccatgtttggcctgcgctttgccaccgggaagagctgtggccccaggggggccttcatgcagctgatcaccgtggccgagggcttcagccaggacctgggctgtgaccacatcctggtgattgacagcggcggcctcatcggcggggccctgaccagcgctggggacagatttgagctggaggccagcctggccaccctgctgatgggcctgagcaatgtgaccgtcatcagcctggccgagaccaaggacatcccagctgccatcctgcacgccttcctgcggctggagaagacaggccacatgcccaactaccagtttgtgtaccagaacctgcatgatgtgtctgtgcccggcccccggccccgggacaagaggcagctgctggaccccccaggggacctgagcagagctgctgcccagatggagaagcagggagatggcttccgggccctggccggcctggccttctgtgaccctgagaagcagcacatctggcacatccctggcctgtggcacggggccccacccatggctgctgtgtccctggcctacagcgaggccatctttgagctgaagcgctgcctgctggagaacatcagaaatggcctgagcaaccagaacaagaacatccagcagctgattgagctggtgcggcggctgtag

SEQ ID NO: 6867 - DNA, 3744 bp, synthetic construct
  misc_feature 1..3744: note = source = /note="Description of Artificial Sequence: Synthetic coding sequence"
  source 1..3744: mol_type = other DNA
atgatgagggagtgggtgctgctgatgtctgtgctgctgtgtggcctggccggccccacccacctgttccagcccagcctggtgctggacatggccaaggtgctgctggacaactactgcttccctgagaacctgctgggcatgcaggaggccatccagcaggccatcaagagccatgagatcctgagcatcagtgacccccagaccctggcctctgtgctgacagctggggtgcagagcagcctgaatgacccccggctggtgatctcctatgagcccagcaccccagagcccccaccccaggtgcctgccctgaccagcctgtctgaggaggagctgctggcctggctgcagaggggcctgcggcatgaggtgctggagggcaatgtgggctacctgcgggtggacagcgtgcccggccaggaggtgctgtccatgatgggagagttcctggtggcccacgtgtggggcaacctgatgggcaccagcgccctggtgctggacctgcggcactgcacaggaggccaggtgtctggcatcccctacatcatctcctacctgcaccctggcaacaccatcctgcacgtggacaccatctacaaccggcccagcaacaccaccacagagatctggaccctgccccaggtgctgggggagagatatggagctgacaaggatgtggtggtgctgaccagcagccagacccggggcgtggccgaggacatcgcccacatcctgaagcagatgaggcgggccatcgtggtgggggagaggactggaggaggagccctggacctgaggaagctgagaattggagagagtgacttcttcttcaccgtgcctgtgagccgcagcctgggccccctgggcggcggcagccagacctgggagggcagcggcgtgctgccctgtgtgggcaccccagctgagcaggccctggagaaggccctggccatcctgaccctgcggagcgccctgcccggggtggtgcactgcctgcaggaggtgctgaaggactactacaccctggtggacagagtgcccaccctgctgcagcacctggcctccatggacttcagcacagtggtgtctgaggaggacctggtgaccaagctgaatgccggcctgcaggccgccagcgaggacccccggctgctggtgcgggccatcggccccacagagacccccagctggccagccccagatgctgctgctgaggacagccctggggtggcccctgagctgcctgaagatgaggccatccggcaggccctggtggacagcgtcttccaggtgtctgtgctgcctggaaatgtgggctacctgcgctttgacagctttgctgatgcctctgtgctgggcgtgctggccccctacgtgctgcggcaggtgtgggagcccctgcaggacacagagcacctgatcatggacctgcggcacaaccctgggggccccagcagcgctgtgcccctgctgctgagctacttccagggccctgaggccggccctgtgcacctgttcaccacctatgacaggaggaccaacatcacccaggagcacttcagccacatggagctgcccggcccccgctacagcacccagaggggcgtgtacctgctgaccagccacaggacagccacagctgctgaggagtttgccttcctgatgcagagcctgggctgggccaccctggtgggggagatcacagctggcaacctgctgcacaccaggacagtgcccctgctggacaccccagagggcagcctggccctgactgtgcctgtgctgaccttcatcgacaaccacggggaggcctggctgggcggcggcgtggtgcctgatgccatcgtgctggccgaggaggccctggacaaggcccaggaggtgctggagttccaccagagcctgggcgccctggtggagggcaccggccacctgctggaggcccactacgcccggcctgaggtggtgggccagaccagcgccctgctgcgggccaagctggcccagggcgcctacagaacagctgtggacctggagagcctggccagccagctgacagctgacctgcaggaggtgtctggggaccaccggctgctggtgttccacagccctggagagctggtggtggaggaggcccctcctcctcctcctgctgtgcccagccctgaggagctgacctacctgattgaggccctcttcaagacagaggtgctgcccggccagctgggctacctgcgctttgatgccatggccgagctggagaccgtgaaggctgtgggcccccagctggtgcggctggtgtggcagcagctggtggacacagctgccctggtgattgacctgcgctacaaccctggcagctacagcacagccatccccctgctgtgcagctacttctttgaagctgagccccggcagcacctgtacagcgtgtttgaccgggccaccagcaaggtgacagaggtgtggaccctgccccaggtggccggccagagatatggcagccacaaggacctgtacatcctgatgagccacaccagcggcagcgctgctgaggcctttgcccacaccatgcaggacctgcagagggccaccgtcatcggggagcccacagctggaggagccctgtctgtgggcatctaccaggtgggcagcagccccctgtatgcctccatgcccacccagatggccatgtctgccaccaccgggaaggcctgggacctggccggcgtggagccagacatcaccgtgcccatgtctgaggccctgagcatcgcccaggacatcgtggccctgcgggccaaggtgcccaccgtgctgcagacagctgggaagctggtggccgacaactatgccagcgctgagctgggcgccaagatggccaccaagctgagcggcctgcagagccgctacagccgggtgaccagcgaggtggccctggccgagatcctgggcgctgacctgcagatgctgagcggggacccccacctgaaggccgcccacatcccagaaaatgccaaggaccgcatccctggcatcgtgcccatgcagatccccagccctgaggtgtttgaggagctgatcaagttctccttccacaccaacgtgctggaggacaacatcggctacctgcgctttgacatgtttggagatggagagctgctgacccaggtgtcccggctgctggtggagcacatctggaagaagatcatgcacacagatgccatgatcatcgacatgaggttcaacattggaggccccaccagcagcatccccatcctgtgcagctacttctttgatgagggcccccctgtgctgctggacaagatctacagcaggccagatgacagcgtgtctgagctgtggacccacgcccaggtggtgggggagagatatggcagcaagaagtccatggtgatcctgaccagctctgtgacagctggaacagctgaggagttcacctacatcatgaagaggctgggccgggccctggtgattggagaggtgaccagcggcggctgccagcccccccagacctaccacgtggatgacaccaacctgtacctgaccatccccacagcccggtctgtgggcgccagtgatggcagctcctgggagggcgtgggcgtgaccccccacgtggtggtgcctgctgaggaggccctggcccgggccaaggagatgctgcagcacaaccagctgcgggtgaagaggagccctggcctgcaggaccacctgtag

SEQ ID NO: 6868 - DNA, 885 bp, synthetic construct
  misc_feature 1..885: note = source = /note="Description of Artificial Sequence: Synthetic coding sequence"
  source 1..885: mol_type = other DNA
atgaacagcgagctggactactatgagaagtttgaggaggtgcacggcatcctgatgtacaaggactttgtgaagtactgggacaacgtggaggccttccaggcccggccagatgacctggtgattgccacctaccccaagagcggcaccacctgggtgtctgagatcgtgtacatgatctacaaggagggagatgtggagaagtgcaaggaggatgtgatcttcaaccgcatccccttcctggagtgcaggaaggagaacctgatgaatggagtgaagcagctggatgagatgaacagccccagaattgtgaagacccacctgcccccagagctgctgcctgccagcttctgggagaaggactgcaagatcatctacctgtgcagaaatgccaaggatgtggccgtgtccttctactacttcttcctgatggtggccggccaccccaaccctggcagcttccctgagtttgtggagaagttcatgcagggccaggtgccctacggctcctggtacaagcacgtgaagtcctggtgggagaagggcaagagcccccgggtgctcttcctgttctatgaggacctgaaggaggacatcaggaaggaggtgatcaagctgatccacttcctggagaggaagcccagcgaggagctggtggaccgcatcatccaccacaccagcttccaggagatgaagaacaaccccagcaccaactacaccaccctgcctgatgagatcatgaaccagaagctgagccccttcatgaggaagggcatcaccggggactggaagaaccacttcaccgtggccctgaatgagaagtttgacaagcactatgagcagcagatgaaggagagcaccctgaagttcagaacagagatctag

SEQ ID NO: 6869 - DNA, 1446 bp, synthetic construct
  misc_feature 1..1446: note = source = /note="Description of Artificial Sequence: Synthetic coding sequence"
  source 1..1446: mol_type = other DNA
atggcctacaatgacacagacaggaaccagacagagaagctgctgaagagggtgcgggagctggagcaggaggtgcagaggctgaagaaggagcaggccaagaacaaggaggacagcaacatcagagaaaattctgctggggccggcaagaccaagagggcctttgacttcagcgcccacggccgccgccacgtggccctgagaattgcctacatgggctggggctaccagggctttgccagccaggagaacaccaacaacaccatcgaggagaagctgtttgaggccctgaccaagacccggctggtggagagccggcagaccagcaactaccaccgctgtggccgcacagacaagggcgtgtctgccttcggccaggtgatcagcctggacctgcggagccagttcccccggggccgggacagcgaggacttcaacgtgaaggaggaggccaatgctgctgctgaggagatccgctacacccacatcctgaacagagtgctgcccccagacatccgcatcctggcctgggcccctgtggagcccagcttcagcgcccgcttcagctgcctggagaggacctaccgctacttcttccccagggctgacctggacatcgtgaccatggactatgctgcccagaagtatgtgggcacccatgacttcaggaacctgtgcaagatggatgtggccaacggggtcatcaacttccagaggaccatcctgagcgcccaggtgcagctggtgggccagagccctggagagggccgctggcaggagcccttccagctgtgccagtttgaggtgacaggccaggccttcctgtaccaccaggtgcgctgcatgatggccatcctcttcctgattggccagggcatggagaagccagagatcattgatgagctgctgaacatcgagaagaacccccagaagccccagtacagcatggctgtggagttccccctggtgctgtatgactgcaagtttgaaaatgtgaagtggatctatgaccaggaggcccaggagttcaacatcacccacctgcagcagctgtgggccaaccacgctgtgaagacccacatgctgtacagcatgctgcagggcctggacacagtgcctgtgccctgtggcatcggccccaagatggatggcatgacagagtggggcaatgtgaagcccagcgtcatcaagcagaccagcgcctttgtggagggcgtgaagatgaggacctacaagcccctgatggaccggcccaagtgccagggcctggagagccgcatccagcactttgtgcggcggggccgcatcgagcacccccacctgttccacgaggaggagaccaaggccaagagggactgcaatgacaccctggaggaggagaacaccaacctggagacccccaccaagagggtgtgtgtggacacagagatcaagagcatcatctag

SEQ ID NO: 6870 - DNA, 618 bp, synthetic construct
  misc_feature 1..618: note = source = /note="Description of Artificial Sequence: Synthetic coding sequence"
  source 1..618: mol_type = other DNA
atgagcaacttcctgcacctgaagtacaatgagaagtctgtgtctgtgaccaaggccctgactgtgcgcttcctgaccaagcgcttcatcggggagtatgccagcaactttgagagcatctacaagaagcacctgtgcctggagaggaagcagctgaacctggagatctatgacccctgcagccagacccagaaggccaagttcagcctgaccagcgagctgcactgggcagatggcttcgtcatcgtgtatgacatcagtgacaggagcagctttgcctttgccaaggccctgatctaccgcatccgggagccccagaccagccactgcaagagagctgtggagagcgctgtgttcctggtgggcaacaagagggacctgtgccacgtgcgggaggtgggctgggaggagggccagaagctggccctggagaaccgctgccagttctgtgagctgtctgctgctgagcagagcctggaggtggagatgatgttcatccgcatcatcaaggacatcctgatcaacttcaagctgaaggagaagaggcggcccagcggcagcaagtccatggccaagctgatcaacaacgtgtttgggaagaggaggaagtctgtgtag

SEQ ID NO: 6871 - DNA, 1008 bp, synthetic construct
  misc_feature 1..1008: note = source = /note="Description of Artificial Sequence: Synthetic coding sequence"
  source 1..1008: mol_type = other DNA
atgggcaaggtgaaggtgggcgtgaatggatttggccgcatcggccgcctggtgaccagggctgccttcaacagcggcaaggtggacatcgtggccatcaatgaccccttcatcgacctgaactacatggtgtacatgttccagtatgacagcacccacggcaagttccatggaacagtgaaggcagaaaatggcaagctggtgatcaatggaaaccccatcaccatcttccaggagcgggaccccagcaagatcaagtggggagatgctggagcagaatatgtggtggagagcactggagtcttcaccaccatggagaaggccggggcccacctgcagggcggggccaagagggtcatcatcagcgcccccagcgcagatgcccccatgtttgtgatgggcgtgaaccacgagaagtatgacaacagcctgaagatcatcagcaatgccagctgcaccaccaactgcctggcccccctggccaaggtgattcatgacaactttggcatcgtggagggcctgatgaccaccgtgcacgccatcacagccacccagaagacagtggatggccccagcggcaagctgtggagagatggccgcggggccctgcagaacatcatcccagccagcactggagctgccaaggctgtgggcaaggtgattcctgagctgaatggcaagctgaccggcatggccttccgggtgcccacagccaacgtgtctgtggtggacctgacctgccgcctggagaagccagccaagtatgatgacatcaagaaggtggtgaagcaggccagcgagggccccctgaagggcatcctgggctacacagagcaccaggtggtgtccagtgacttcaacagcgacacccacagcagcacctttgatgctggagctggcatcgccctgaatgaccactttgtgaagctgatctcctggtatgacaatgaatttggctacagcaacagagtggtggacctgatggcccacatggccagcaaggagtag

SEQ ID NO: 6872 - DNA, 597 bp, synthetic construct
  misc_feature 1..597: note = source = /note="Description of Artificial Sequence: Synthetic coding sequence"
  source 1..597: mol_type = other DNA
atggacagcctgctgatgaacagaaggaagttcctgtaccagttcaagaatgtgcgctgggccaagggccggcgggagacctacctgtgctacgtggtgaagagaagagacagcgccaccagcttcagcctggactttggctacctgaggaacaagaatggctgccacgtggagctgctcttcctgcgctacatcagtgactgggacctggaccccggccgctgctacagagtgacctggttcacctcctggagcccctgctatgactgtgcccggcacgtggccgacttcctgcggggcaaccccaacctgagcctgcgcatcttcaccgcccggctgtacttctgtgaggacaggaaggccgagcctgagggcctgcggcggctgcaccgggccggcgtgcagatcgccatcatgaccttcaaggactacttctactgctggaacacctttgtggagaaccacgagaggaccttcaaggcctgggagggcctgcatgaaaattctgtgcggctgagccggcagctgcggcgcatcctgctgcccctgtatgaggtggatgacctgagagatgccttccgcaccctgggcctgtag

SEQ ID NO: 6873 - DNA, 5472 bp, synthetic construct
  misc_feature 1..5472: note = source = /note="Description of Artificial Sequence: Synthetic coding sequence"
  source 1..5472: mol_type = other DNA
atggccctgagcagcgcctggaggtctgtgctgcccctgtggctgctgtggagcgctgcctgcagccgggccgccagcggagatgacaatgccttcccctttgacatcgagggcagcagcgctgtgggccggcaggaccccccagagaccagcgagccccgggtggccctgggccgcctgcccccagctgctgagaagtgcaatgccggcttcttccacaccctgagcggggagtgtgtgccctgtgactgcaatggaaacagcaatgaatgtctggatggcagcggctactgtgtgcactgccagaggaacaccaccggggagcactgtgagaagtgcctggatggctacatcggggacagcatccggggggccccccagttctgccagccctgcccctgccccctgccccacctggccaactttgctgagagctgctacaggaagaatggagctgtgcgctgcatctgcaatgaaaattatgccggccccaactgtgagcgctgtgcccctggctactacggcaaccccctgctgattggcagcacctgcaagaagtgtgactgcagcggcaacagcgaccccaacctgatctttgaggactgtgatgaggtgacaggccagtgcaggaactgcctgaggaacaccaccggcttcaagtgtgagcgctgtgcccctggctactatggagatgcccgcatcgccaagaactgtgctgtgtgcaactgtggcggcggcccctgtgacagcgtgactggagagtgcctggaggagggctttgagccccccaccggcatggactgccccaccatcagctgtgacaagtgtgtgtgggacctgacagatgccctgcggctggccgccctgagcattgaggagggcaagagcggcgtgctgtctgtgtcctctggagctgctgcccaccgccacgtgaatgagatcaatgccaccatctacctgctgaagaccaagctgtctgaaagagagaaccagtatgccctgaggaagatccagatcaacaatgctgagaacaccatgaagagcctgctgagtgatgtggaggagctggtggagaaggagaaccaggccagcaggaagggccagctggtgcagaaggagagcatggacaccatcaaccacgccagccagctggtggagcaggcccatgacatgagggacaagatccaggagatcaacaacaagatgctgtactatggagaggagcacgagctgagccccaaggagatcagcgagaagctggtgctggcccagaagatgctggaggagatccgcagccggcagcccttcttcacccagcgggagctggtggatgaggaggctgatgaggcctatgagctgctgagccaggccgagagctggcagaggctgcacaatgagaccaggaccctcttccctgtggtgctggagcagctggatgactacaatgccaagctgagtgacctgcaggaggccctggaccaggccctgaactacgtgagagatgctgaggacatgaacagagccacagctgcccggcagagggaccacgagaagcagcaggagcgggtgcgggagcagatggaggtggtgaacatgagcctgagcaccagcgctgacagcctgaccaccccccggctgaccctgtctgagctggatgacatcatcaagaatgccagcggcatctatgcagaaattgatggagccaagtctgagctgcaggtgaagctgagcaacctgagcaacctgagccatgacctggtgcaggaggccatcgaccacgcccaggacctgcagcaggaggccaatgagctgagcaggaagctgcacagcagtgacatgaatggcctggtgcagaaggccctggatgccagcaatgtgtatgagaacatcgtgaactacgtgtctgaggccaatgaaacagctgagtttgccctgaacaccacagaccgcatctatgatgctgtgtctggcatcgacacccagatcatctaccacaaggatgaaagtgagaacctgctgaaccaggcccgggagctgcaggccaaggccgagagcagcagtgatgaggccgtggccgacaccagccggcgggtgggcggggccctggccaggaagagcgccctgaagacccggctgagtgatgctgtgaagcagctgcaggccgctgagagaggagatgcccagcagaggctgggccagagccgcctcatcacagaggaggccaacagaaccaccatggaggtgcagcaggccacagcccccatggccaacaacctgaccaactggagccagaacctgcagcactttgacagcagcgcctacaacacagctgtgaacagcgccagagatgctgtgaggaacctgacagaggtggtgccccagctgctggaccagctgaggacagtggagcagaagaggcctgccagcaatgtgtctgccagcatccagaggatccgggagctgattgcccagaccaggtctgtggccagcaagatccaggtgtccatgatgtttgatggccagagcgctgtggaggtgcacagcaggacctccatggatgacctgaaggccttcaccagcctgagcctgtacatgaagccccctgtgaagaggcctgagctgacagaaacagctgaccagttcatcctgtacctgggcagcaagaatgccaagaaggagtacatgggcctggccatcaagaatgacaacctggtgtatgtgtacaacctgggcaccaaggatgtggagatccccctggacagcaagcctgtgtcctcctggccagcctacttcagcatcgtgaagattgaaagagtgggcaagcacggcaaggtgttcctgactgtgcccagcctgagcagcacagctgaggagaagttcatcaagaagggggagttctctggagatgacagcctgctggacctggaccctgaggacaccgtcttctacgtgggcggcgtgcccagcaacttcaagctgcccaccagcctgaacctgcccggctttgtgggctgcctggagctggccaccctgaacaatgatgtgatcagcctgtacaacttcaagcacatctacaacatggaccccagcacctctgtgccctgtgcccgggacaagctggccttcacccagagcagagctgccagctacttctttgatggcagcggctatgctgtggtgcgggacatcacccggcggggcaagtttggccaggtgaccaggtttgatattgaggtgaggaccccagctgacaatggcctcatcctgctgatggtgaatggctccatgttcttccggctggagatgagaaatggctacctgcacgtgttctatgactttggcttcagcggcggccctgtgcacctggaggacaccctgaagaaggcccagatcaatgatgccaagtaccacgagatcagcatcatctaccacaatgacaagaagatgatcctggtggtggacagaagacatgtgaagtccatggacaatgagaagatgaagatccccttcacagacatctacatcggcggggcccctcctgagatcctgcagagccgggccctgcgggcccacctgcccctggacatcaacttccggggctgcatgaagggcttccagttccagaagaaggacttcaacctgctggagcagacagagaccctgggcgtgggctacggctgcccagaggacagcctcatcagcagaagagcctacttcaacggccagagcttcatcgccagcatccagaagatctccttctttgatggctttgaaggaggcttcaacttccgcaccctgcagcccaacggcctgctcttctactatgccagcggcagtgatgtgttcagcatcagcctggacaatggcaccgtcatcatggatgtgaagggcatcaaggtgcagagcgtggacaagcagtacaatgatggcctgagccacttcgtcatcagctctgtgagccccaccaggtatgagctgattgtggacaagagccgggtgggcagcaagaaccccaccaagggcaagattgagcagacccaggccagcgagaagaagttctactttggaggcagccccatcagcgcccagtatgccaacttcaccggctgcatcagcaatgcctacttcaccagggtggacagagatgtggaggtggaggacttccagcgctacacagagaaggtgcacaccagcctgtatgaatgtcccatcgagagcagccccctcttcctgctgcacaagaagggcaagaacctgagcaagcccaaggccagccagaacaagaagggcggcaagagcaaggatgcccccagctgggaccctgtggccctgaagctgcctgagaggaacaccccaagaaacagccactgccacctgagcaacagcccccgggccatcgagcacgcctaccagtatggaggaacagccaacagccggcaggagtttgagcacctgaagggggactttggagccaagagccagttcagcatccggctgcggaccaggagcagccacggcatgatcttctacgtgtctgaccaggaggagaatgacttcatgaccctcttcctggcccacggccgcctggtgtacatgttcaacgtgggccacaagaagctgaagatccgcagccaggagaagtacaatgatggcctgtggcatgatgtgatcttcatccgggagaggagcagcggccgcctggtgattgatggcctgcgggtgctggaggagagcctgcccccaacagaggccacctggaagatcaagggccccatctacctgggcggcgtggcccctgggaaggctgtgaagaatgtgcagatcaacagcatctacagcttcagcggctgcctgagcaacctgcagctgaatggagccagcatcaccagcgccagccagaccttctctgtgaccccctgctttgagggccccatggagaccggcacctacttcagcacagaaggaggctacgtggtgctggatgagagcttcaacatcggcctgaagtttgagatcgcctttgaggtgcggcccaggagcagcagcggcaccctggtgcacggccacagcgtgaatggagagtacctgaatgtgcacatgaagaatggccaggtgattgtgaaggtgaacaacggcatccgggacttcagcacctctgtgacccccaagcagagcctgtgtgatggccgctggcaccgcatcaccgtcatccgggacagcaatgtggtgcagctggatgtggacagcgaggtgaaccacgtggtgggccccctgaaccccaagcccatcgaccaccgggagcctgtgtttgtgggcggcgtgcctgagagcctgctgaccccccggctggcccccagcaagcccttcaccggctgcatccgccactttgtgattgatggccaccctgtgtccttcagcaaggccgccctggtgtctggagctgtgtccatcaacagctgcccagctgcctag

SEQ ID NO: 6874 - DNA, 1434 bp, synthetic construct
  misc_feature 1..1434: note = source = /note="Description of Artificial Sequence: Synthetic coding sequence"
  source 1..1434: mol_type = other DNA
atgaccagcaagttcctgctggtgtccttcatcctggccgccctgagcctgagcaccaccttcagcctgcagcctgaccagcagaaggtgctgctggtgtcctttgatggcttccgctgggactacctgtacaaggtgcccaccccccacttccactacatcatgaagtatggagtgcacgtgaagcaggtgaccaacgtgttcatcaccaagacctaccccaaccactacaccctggtgacaggcctgtttgctgagaaccacggcatcgtggccaatgacatgtttgaccccatccggaacaagagcttcagcctggaccacatgaacatctatgacagcaagttctgggaggaggccacccccatctggatcaccaaccagagagctggccacaccagcggggccgccatgtggccaggcacagatgtgaagatccacaagcgcttccccacccactacatgccctacaatgaatctgtgtcctttgaggacagagtggccaagatcatcgagtggttcaccagcaaggagcccatcaacctgggcctgctgtactgggaggaccctgatgacatgggccaccacctgggccctgacagccccctgatgggccctgtgatcagtgacatcgacaagaagctgggctacctgatccagatgctgaagaaggccaagctgtggaacaccctgaacctgatcatcaccagtgaccacggcatgacccagtgcagcgaggagcggctcatcgagctggaccagtacctggacaaggaccactacaccctgattgaccagagccctgtggccgccatcctgcccaaggagggcaagtttgatgaggtgtatgaggccctgacccacgcccaccccaacctgactgtgtacaagaaggaggatgtgcctgagcgctggcactacaagtacaacagccgcatccagcccatcatcgctgtggctgatgagggctggcacatcctgcagaacaagagtgatgacttcctgctgggcaaccacggctatgacaatgccctggccgacatgcaccccatcttcctggcccacggccctgccttcaggaagaacttcagcaaggaggccatgaacagcacagacctgtaccccctgctgtgccacctgctgaacatcacagccatgccccacaacggcagcttctggaatgtgcaggacctgctgaacagcgccatgccccgggtggtgccctacacccagagcaccatcctgctgcccggctctgtgaagccagcagaatatgaccaggagggcagctacccctacttcatcggcgtgtccctgggcagcatcatcgtgattgtgttcttcgtcatcttcatcaagcacctgatccacagccagatcccagccctgcaggacatgcacgccgagatcgcccagcccctgctgcaggcctag

SEQ ID NO: 6875 - DNA, 1254 bp, synthetic construct
  misc_feature 1..1254: note = source = /note="Description of Artificial Sequence: Synthetic coding sequence"
  source 1..1254: mol_type = other DNA
atgagatttgcctggacagtgctgctgctgggccccctgcagctgtgtgccctggtgcactgtgcccctcctgctgctggccagcagcagcccccccgggagcccccagctgcccctggggcctggaggcagcagatccagtgggagaacaacggccaggtgttcagcctgctgagcctgggcagccagtaccagccccagaggagaagagaccccggggctgctgtgcctggagctgccaatgccagcgcccagcagcccaggacccccatcctgctgatccgggacaacagaacagctgctgcccggaccaggacagctggcagcagcggcgtgacagctggccggccccggcccacagcccggcactggttccaggccggctacagcaccagccgggcccgggaggccggggccagcagagctgagaaccagacagcccctggagaggtgcctgccctgagcaacctgcggccccccagccgggtggatggcatggtgggagatgacccctacaacccctacaagtacagtgatgacaacccctactacaactactatgacacctatgaaagacccaggcctgggggccgctacagacctggctatggaacaggctacttccagtatggcctgcctgacctggtggccgacccctactacatccaggccagcacctacgtgcagaagatgtccatgtacaacctgcgctgtgccgctgaggagaactgcctggccagcacagcctacagagcagatgtgcgggactatgaccaccgggtgctgctgcgcttcccccagagggtgaagaaccagggcaccagtgacttcctgcccagccggccccgctacagctgggagtggcacagctgccaccagcactaccacagcatggatgagttcagccactatgacctgctggatgccaacacccagaggagagtggccgagggccacaaggccagcttctgcctggaggacaccagctgtgactatggctaccacagaagatttgcctgcacagcccacacccagggcctgagccctggctgctatgacacctatggagctgacatcgactgccagtggattgacatcacagatgtgaagccaggcaactacatcctgaaggtgtctgtgaaccccagctacctggtgcctgagagtgactacaccaacaacgtggtgcgctgtgacatccgctacacaggccaccacgcctatgccagcggctgcaccatcagcccctactag

SEQ ID NO: 6876 - DNA, 879 bp, synthetic construct
  misc_feature 1..879: note = source = /note="Description of Artificial Sequence: Synthetic coding sequence"
  source 1..879: mol_type = other DNA
atgggagagaagtctgagaactgtggggtgcctgaggacctgctgaatggcctgaaggtgacagacacccaggaggctgaatgtgccggcccccctgtgcctgaccccaagaaccagcacagccagagcaagctgctgagagatgatgaggcccacctgcaggaggaccagggcgaggaggagtgcttccatgactgcagcgccagctttgaggaggagcccggggctgacaaggtggagaacaagagcaatgaagatgtgaacagcagcgagctggatgaggagtacctgattgagctggagaagaacatgtctgatgaggagaagcagaagaggcgggaggagagcacccggctgaaggaggagggcaatgagcagttcaagaagggggactacattgaagctgagagcagctacagccgggccctggagatgtgccccagctgcttccagaaggagaggagcatcctcttcagcaacagagctgctgccaggatgaagcaggacaagaaggagatggccatcaatgactgcagcaaggccatccagctgaaccccagctacatccgggccatcctgcggcgggcagagctgtatgagaagacagacaagctggatgaggccctggaggactacaagagcatcctggagaaggaccccagcatccaccaggcccgggaggcctgcatgaggctgcccaagcagatcgaggagagaaatgaaaggctgaaggaggagatgctgggcaagctgaaggacctgggcaacctggtgctgcggcccttcggcctgagcacagagaacttccagatcaagcaggacagcagcacaggcagctacagcatcaactttgtgcagaaccccaacaacaacagatag

SEQ ID NO: 6877 - DNA, 2316 bp, synthetic construct
  misc_feature 1..2316: note = source = /note="Description of Artificial Sequence: Synthetic coding sequence"
  source 1..2316: mol_type = other DNA
atgagcggcttcttcaccagcctggaccccaggagagtgcagtggggcgccgcctggtacgccatgcacagccgcatcctgcggaccaagcctgtggagagcatgctggagggcaccggcaccaccacagcccacggcaccaagctggcccaggtgctgaccaccgtggacctgatcagcctgggcgtgggcagctgtgtgggcaccggcatgtatgtggtgtctggcctggtggccaaggagatggccggccctggggtcatcgtgtccttcatcatcgctgctgtggccagcatcctgtctggagtgtgctacgccgagtttggagtgcgggtgcccaagaccaccggcagcgcctacacctacagctatgtgacagtgggggagtttgtggccttcttcatcggctggaacctgatcctggagtacctgattggaacagctgctggggccagcgccctgagctccatgtttgacagcctggccaaccacaccatcagccgctggatggctgacagcgtgggcaccctgaatggcctgggcaagggggaggagagctacccagacctgctggccctgctgattgctgtgattgtgaccatcatcgtggccctgggcgtgaagaacagcatcggcttcaacaacgtgctgaatgtgctgaacctggccgtgtgggtgttcatcatgattgctggcctcttcttcatcaatggcaagtactgggccgagggccagttcctgccccacggctggagcggcgtgctgcagggcgccgccacctgcttctacgccttcatcggctttgacatcatcgccaccaccggggaggaggccaagaaccccaacaccagcatcccctatgccatcacagccagcctggtgatctgcctgacagcctacgtgtctgtgtctgtcatcctgaccctgatggtgccctactacaccatcgacacagagagccccctgatggagatgtttgtggcccacggcttctatgctgccaagtttgtggtggccatcggctctgtggccggcctgactgtgtccctgctgggcagcctcttccccatgcccagggtcatctatgccatggctggagatggcctgctcttccgcttcctggcccacgtgtcctcctacacagagacccctgtggtggcctgcatcgtgtctggcttcctggccgccctgctggccctgctggtgtccctgcgggacctgattgagatgatgagcatcggcaccctgctggcctacaccctggtgtctgtgtgtgtgctgctgctgcgctaccagcctgagagtgacattgatggctttgtgaagttcctgtctgaggagcacaccaagaagaaggagggcatcctggccgactgtgagaaggaggcctgcagccctgtgtctgaaggagatgagttcagcggccctgccaccaacacctgtggggccaagaacctgcccagcctgggggacaatgagatgctgattggcaagagtgacaagagcacctacaacgtgaaccaccccaactatggaacagtggacatgaccaccggcatcgaggctgatgaaagtgagaacatctacctgatcaagctgaagaagctgattggcccccactactacaccatgaggatccggctgggcctgcccgggaagatggaccggcccacagctgccaccggccacacagtgaccatctgtgtgctgctgctcttcatcctgatgttcatcttctgcagcttcatcatctttggaagtgactacatcagcgagcagagctggtgggccatcctgctggtggtgctgatggtgctgctgatcagcaccctggtgtttgtgatcctgcagcagcctgagaaccccaagaagctgccctacatggccccctgcctgccctttgtgcctgcctttgccatgctggtgaacatctacctgatgctgaagctgagcaccatcacctggatccgctttgctgtgtggtgctttgtgggcctgctgatctacttcggctacggcatctggaacagcaccctggagatcagcgcccgggaggaggccctgcaccagagcacctaccagagatatgatgtggatgaccccttctctgtggaggagggcttctcctatgccacagaaggagagagccaggaggactggggcggccccacagaagataaaggcttctactaccagcagatgtctgatgccaaggccaacggccgcaccagcagcaaggccaagagcaagagcaagcacaagcagaacagcgaggccctgattgccaatgatgagctggactacagccctgagtag

SEQ ID NO: 6878 - DNA, 513 bp, synthetic construct
  misc_feature 1..513: note = source = /note="Description of Artificial Sequence: Synthetic coding sequence"
  source 1..513: mol_type = other DNA
atgggaaatgaggccagctaccccctggagatgtgcagccactttgatgctgatgagatcaagaggctgggcaagcgcttcaagaagctggacctggacaacagcggcagcctgtctgtggaggagttcatgagcctgcctgagctgcagcagaaccccctggtgcagagggtgattgacatctttgacacagatggaaatggagaggtggacttcaaggagttcatcgagggcgtgtcccagttctctgtgaagggggacaaggagcagaagctgcgctttgccttccgcatctatgacatggacaaggatggctacatcagcaatggagagctgttccaggtgctgaagatgatggtgggcaacaacctgaaggacacccagctgcagcagatcgtggacaagaccatcatcaatgctgacaaggatggagatggccgcatcagctttgaggagttctgtgctgtggtgggcggcctggacatccacaagaagatggtggtggatgtgtag

SEQ ID NO: 6879 - DNA, 1218 bp, synthetic construct
  misc_feature 1..1218: note = source = /note="Description of Artificial Sequence: Synthetic coding sequence"
  source 1..1218: mol_type = other DNA
atgagcagctctgtgaagaccccagccctggaggagctggtgcccggcagcgaggagaagcccaagggccgcagccccctgtcctggggcagcctgtttggccacaggtctgagaagatcgtgtttgccaagagtgatggcggcacagatgaaaatgtgctgactgtgaccatcacagagaccaccgtcatcgagagtgacctgggcgtgtggagcagccgggccctgctgtacctgaccctgtggttcttcttctccttctgcaccctcttcctgaacaagtacatcctgagcctgctgggcggggagcccagcatgctgggcgctgtgcagatgctgagcaccaccgtcatcggctgtgtgaagaccctggtgccctgctgcctgtaccagcacaaggcccggctgagctacccacccaacttcctgatgaccatgctgtttgtgggcctgatgagatttgccaccgtggtgctgggcctggtgtccctgaagaatgtggccgtgtcctttgctgagaccgtgaagagcagcgcccccatcttcaccgtcatcatgagcaggatgatcctgggggagtacacaggcctgctggtgaacctgagcctcatccctgtgatgggcggcctggccctgtgcacagccacagagatctccttcaacgtgctgggcttctctgctgccctgagcaccaacatcatggactgcctgcagaatgtgttcagcaagaagctgctgagcggggacaagtaccgcttcagcgcccctgagctgcagttctacaccagcgctgctgctgtggccatgctggtgcctgcccgggtcttcttcacagatgtgcctgtgattggccgcagcggcaagagcttctcctacaaccaggatgtggtgctgctgctgctgacagatggagtgctcttccacctgcagagcgtgacagcctatgccctgatgggcaagatcagccctgtgaccttctctgtggccagcacagtgaagcacgccctgagcatctggctgtctgtgattgtgtttggaaacaagatcaccagcctgtctgctgtgggcacagccctggtgacagtgggcgtgctgctgtacaacaaggcccggcagcaccagcaggaggccctgcagagcctggccgccgccaccggccgggccccagatgacacagtggagcccctgctgccccaggacccccggcagcacccctag

SEQ ID NO: 6880 - DNA, 1131 bp, synthetic construct
  misc_feature 1..1131: note = source = /note="Description of Artificial Sequence: Synthetic coding sequence"
  source 1..1131: mol_type = other DNA
atgctgaagaagatctctgtgggcgtggccggggacctgaacacagtgaccatgaagctgggctgtgtgctgatggcctgggccctgtacctgagcctgggcgtgctgtgggtggcccagatgctgctggccgccagctttgagaccctgcagtgtgagggccctgtgtgcacagaggagagcagctgccacacagaagatgacctgacagatgcccgggaggccggcttccaggtgaaggcctacaccttcagcgagcccttccacctgattgtgtcctatgactggctgatcctgcagggccctgccaagcctgtgtttgaaggagacctgctggtgctgcgctgccaggcctggcaggactggcccctgacccaggtgaccttctacagagatggcagcgccctgggccccccaggccccaaccgggagttcagcatcaccgtggtgcagaaggctgacagcggccactaccactgcagcggcatcttccagagccctggccctggcatccctgagacagcctctgtggtggccatcaccgtgcaggagctgtttcctgcccccatcctgcgggctgtgcccagcgctgagccccaggccggcagccccatgaccctgagctgccagaccaagctgcccctgcagaggtctgctgcccggctgctcttctccttctacaaggatggccgcatcgtgcagagccggggcctgagcagcgagttccagatccccacagccagcgaggaccacagcggcagctactggtgtgaggccgccacagaggacaaccaggtgtggaagcagagcccccagctggagatccgggtgcagggcgccagcagcagcgctgccccacccaccctgaacccagccccccagaagtctgctgcccctggaacagcccctgaggaggcccctggccccctgcccccaccacccacccccagcagtgaagatcctggcttcagcagccccctgggcatgccagacccccacctgtaccaccagatgggcctgctgctgaagcacatgcaggatgtgcgggtgctgctgggccacctgctgatggagctgcgggagctgagcggccacaggaagccaggcaccaccaaggccacagctgagtag

SEQ ID NO: 6881 - DNA, 1572 bp, synthetic construct
  misc_feature 1..1572: note = source = /note="Description of Artificial Sequence: Synthetic coding sequence"
  source 1..1572: mol_type = other DNA
atggccaggaaggccctgaagctggcctcctggacctccatggccctggccgccagcggcatctacttctacagcaacaagtacctggaccccaatgactttggagctgtgcgggtgggccgggctgtggccaccacagctgtgatctcctatgactacctgaccagcctgaagtctgtgccctacggcagcgaggagtacctgcagctgcggagcaaggtgcacctgcggagcgcccggcggctgtgtgagctgtgctgtgccaacagaggcaccttcatcaaggtgggccagcacctgggcgccctggactacctgctgcctgaggagtacaccagcaccctgaaggtgctgcacagccaggccccccagagctccatgcaggagatccggcaggtgatccgggaggacctgggcaaggagatccatgacctcttccagagctttgatgacacccccctgggcacagccagcctggcccaggtgcacaaggctgtgctgcatgatggccgcacagtggccgtgaaggtgcagcaccccaaggtgcgggcccagagcagcaaggacatcctgctgatggaggtgctggtgctggccgtgaagcagctgtttcctgagtttgagttcatgtggctggtggatgaggccaagaagaacctgcccctggagctggacttcctgaatgaaggaagaaatgctgagaaggtgtcccagatgctgcggcactttgacttcctgaaggtgccccgcatccactgggacctgagcacagagcgggtgctgctgatggagtttgtggatggcggccaggtgaatgaccgggactacatggagaggaacaagattgatgtgaatgagatcagccgccacctgggcaagatgtacagcgagatgatctttgtgaatggatttgtgcactgtgacccccaccctggaaatgtgctggtgaggaagcaccctggcaccgggaaggccgagatcgtgctgctggaccacggcctgtaccagatgctgacagaggagttccggctgaactactgccacctgtggcagagcctcatctggacagacatgaagagggtgaaggagtacagccagaggctgggcgctggggacctgtaccccctgtttgcctgcatgctgacagcccgctcctgggacagcgtgaacagaggcatcagccaggcccctgtgacagccacagaggacctggagatcagaaataatgctgccaactacctgccccagatcagccacctgctgaaccacgtgccccggcagatgctgctgatcctgaagaccaatgacctgctgcggggcattgaagctgccctgggcacccgggccagcgccagcagcttcctgaacatgagccgctgctgcatccgggccctggccgagcacaagaagaagaacacctgcagcttcttccggaggacccagatctccttcagcgaggccttcaacctgtggcagatcaacctgcacgagctgatcctgcgggtgaagggcctgaagctggccgacagagtgctggccctgatctgctggctgtttcctgcccccctgtag

SEQ ID NO: 6882 - DNA, 1197 bp, synthetic construct
  misc_feature 1..1197: note = source = /note="Description of Artificial Sequence: Synthetic coding sequence"
  source 1..1197: mol_type = other DNA
atgtggctgctgctgaccatggccagcctcatctctgtgctgggcaccacccacggcctgtttgggaagctgcaccctggcagccctgaggtgaccatgaacatcagccagatgatcacctactggggctacccaaatgaggagtatgaggtggtgacagaagatggctacatcctggaggtgaaccgcatcccctacggcaagaagaacagcggcaacacaggccagaggcctgtggtgttcctgcagcacggcctgctggccagcgccaccaactggatcagcaacctgcccaacaacagcctggccttcatcctggctgatgctggctatgatgtgtggctgggcaacagccggggcaacacctgggcccggaggaacctgtactacagcccagacagcgtggagttctgggccttctcctttgatgagatggccaagtatgacctgcctgccaccatcgacttcatcgtgaagaagacaggccagaagcagctgcactacgtgggccacagccagggcaccaccatcggcttcatcgccttcagcaccaaccccagcctggccaagaggatcaagaccttctacgccctggcccctgtggccaccgtgaagtacaccaagagcctcatcaacaagctgcgctttgtgccccagagcctcttcaagttcatctttggagacaagatcttctacccccacaacttctttgaccagttcctggccacagaggtgtgcagccgggagatgctgaacctgctgtgcagcaatgccctcttcatcatctgtggctttgacagcaagaacttcaacaccagccggctggatgtgtacctgagccacaacccagctggcacctctgtgcagaacatgttccactggacccaggccgtgaagagcggcaagttccaggcctatgactggggcagccctgtgcagaacaggatgcactatgaccagagccagcccccctactacaacgtgacagccatgaatgtgcccatcgctgtgtggaatggaggcaaggacctgctggccgacccccaggatgtgggcctgctgctgcccaagctgcccaacctgatctaccacaaggagatccccttctacaaccacctggacttcatctgggccatggatgccccccaggaggtgtacaatgacatcgtgtccatgatcagcgaggacaagaagtag

SEQ ID NO: 6883 - DNA, 555 bp, synthetic construct
  misc_feature 1..555: note = source = /note="Description of Artificial Sequence: Synthetic coding sequence"
  source 1..555: mol_type = other DNA
atgaggggccagggcaggaaggagagcctgagtgacagccgggacctggatggcagctatgaccagctgacagacagcgtggatgatgaatttgagctgagcacagtgtgccacaggcctgagggcctggagcagctgcaggagcagaccaagttcaccaggaaggagctgcaggtgctgtaccggggcttcaagaatgaatgtcccagcggcatcgtgaatgaggagaacttcaagcagatctacagccagttcttcccccagggcgacagcagcacctacgccaccttcctgttcaatgcctttgacaccaaccatgatggctctgtgtcctttgaggagatgctggacatcatgaagagcatctatgacatgatgggcaagtacacctacccagccctgcgggaggaggccccccgggagcacgtggagagcttcttccagaagatggacaggaacaaggatggagtggtgaccatcgaggagttcatcgagagctgccagaaggtgcagctgcctgccctgtacatcaccctgacctggacccaggcctag

SEQ ID NO: 6884 - DNA, 3900 bp, synthetic construct
  misc_feature 1..3900: note = source = /note="Description of Artificial Sequence: Synthetic coding sequence"
  source 1..3900: mol_type = other DNA
atgagcctgcaggagatgttccgcttccccatgggcctgctgctgggctctgtgctgctggtggccagcgccccagccaccctggagcccccaggctgcagcaacaaggagcagcaggtgacagtgagccacacctacaagattgatgtgcccaagagcgccctggtgcaggtggatgctgacccccagcccctgagtgatgatggagccagcctgctggccctgggggaggcccgggaggagcagaacatcatcttccgccacaacatccggctgcagaccccccagaaggactgtgagctggccggctctgtgcaggacctgctggcccgggtgaagaagctggaggaggagatggtggagatgaaggagcagtgcagcgcccagcgctgctgccagggcgtgacagacctgagccgccactgcagcggccacggcaccttcagcctggagacctgcagctgccactgtgaggagggccgggagggccctgcctgtgagcggctggcctgccctggggcctgcagcggccacggccgctgtgtggatggccgctgcctgtgccacgagccctacgtgggcgctgactgtggctacccagcctgcccagagaactgcagcggccatggagaatgtgtgcggggcgtgtgccagtgccacgaggacttcatgtctgaggactgcagcgagaagcgctgccctggggactgcagcggccacggcttctgtgacacaggagagtgctactgtgaggagggcttcaccggcctggactgtgcccaggtggtgaccccccagggcctgcagctgctgaagaacacagaggacagcctgctggtgtcctgggagcccagcagccaggtggaccactacctgctgagctactaccccctgggcaaggagctgagcggcaagcagatccaggtgcccaaggagcagcacagctatgagatcctgggcctgctgcccggcaccaagtacatcgtgaccctgagaaatgtgaagaatgaggtgagcagcagcccccagcacctgctggccaccacagacctggccgtgctgggcacagcctgggtgacagatgaaacagagaacagcctggatgtggagtgggagaaccccagcacagaggtggactactacaagctgcgctatggccccatgacaggccaggaggtggccgaggtgacagtgcccaagagcagtgaccccaagagccgctatgacatcaccggcctgcaccctggaacagagtacaagatcaccgtggtgcccatgagaggagagctggagggcaagcccatcctgctgaatggccgcacagaaattgacagccccaccaacgtggtgacagacagagtgacagaggacacagccaccgtgtcctgggaccctgtgcaggccgtcatcgacaagtatgtggtgcgctacaccagcgcagatggagacaccaaggagatggctgtgcacaaggatgagagcagcacagtgctgaccggcctgaagccaggagaggcctacaaggtgtatgtgtgggccgagcggggcaaccagggcagcaagaaggctgacaccaatgccctgacagaaattgacagccctgccaacctggtgacagacagagtgacagagaacacagccaccatctcctgggaccctgtgcaggccaccatcgacaagtatgtggtgcgctacaccagcgcagatgaccaggagacccgggaggtgctggtgggcaaggagcagagcagcacagtgctgaccggcctgcggcctggggtggagtacacagtgcacgtgtgggcccagaagggggaccgggagagcaagaaggctgacaccaatgcccccacagacatcgacagccccaagaacctggtgacagacagagtgacagagaacatggccaccgtgtcctgggaccctgtgcaggccgccatcgacaagtatgtggtgcgctacaccagcgctggaggagagacccgggaggtgcctgtgggcaaggagcagagcagcacagtgctgaccggcctgcggcccggcatggagtacatggtgcacgtgtgggcccagaagggggaccaggagagcaagaaggctgacaccaaggcccagacagacatcgacagcccccagaacctggtgacagacagagtgacagagaacatggccaccgtgtcctgggaccctgtgcgggccaccatcgaccgctacgtggtgcgctacaccagcgccaaggatggagagacccgggaggtgcctgtgggcaaggagcagagcagcacagtgctgaccggcctgcggcctggggtggagtacacagtgcacgtgtgggcccagaagggggcccaggagagcaagaaggctgacaccaaggcccagacagacatcgacagcccccagaacctggtgacagactgggtgacagagaacacagccaccgtgtcctgggaccctgtgcaggccaccatcgacagatatgtggtgcactacaccagcgccaatggagagacccgggaggtgcctgtgggcaaggagcagagcagcacagtgctgaccggcctgcggcccggcatggagtacacagtgcacgtgtgggcccagaagggcaaccaggagagcaagaaggctgacaccaaggcccagacagaaattgatggccccaagaacctggtgacagactgggtgacagagaacatggccaccgtgtcctgggaccctgtgcaggccaccatcgacaagtacatggtgcgctacaccagcgcagatggagagacccgggaggtgcctgtgggcaaggagcacagcagcacagtgctgaccggcctgcggcccggcatggagtacatggtgcacgtgtgggcccagaagggggcccaggagagcaagaaggctgacaccaaggcccagacagagctggaccccccaagaaacctgcggcccagcgctgtgacccagagcggcggcatcctgacctggaccccaccttctgcccagatccacggctacatcctgacctaccagttcccagatggcaccgtgaaggagatgcagctgggccgggaggaccagagatttgccctgcagggcctggagcagggcgccacctaccctgtgtccctggtggccttcaagggcggccgccgcagcagaaatgtgtccaccaccctgagcacagtgggcgcccgcttcccccaccccagcgactgcagccaggtgcagcagaacagcaatgctgccagcggcctgtacaccatctacctgcatggagatgccagccggcccctgcaggtgtactgtgacatggagacagatggcggcggctggatcgtgttccagaggaggaacacaggccagctggacttcttcaagcgctggaggagctatgtggagggctttggagaccccatgaaggagttctggctgggcctggacaagctgcacaacctgaccaccggcaccccagcccgctatgaggtgcgggtggacctgcagacagccaatgaaagtgcctatgccatctatgacttcttccaggtggccagcagcaaggagcgctacaagctgactgtgggcaagtaccggggcacagctggagatgccctgacctaccacaacggctggaagttcaccacctttgaccgggacaatgacatcgccctgagcaactgtgccctgacccaccacggcggctggtggtacaagaactgccacctggccaaccccaacggccgctacggggagaccaagcacagcgagggcgtgaactgggagccctggaagggccacgagttcagcatcccctacgtggagctgaagatccggccccacggctacagccgggagcctgtgctgggcaggaagaagaggaccctgcggggccgcctgcggaccttctag

SEQ ID NO: 6885 - DNA, 1662 bp, synthetic construct
  misc_feature 1..1662: note = source = /note="Description of Artificial Sequence: Synthetic coding sequence"
  source 1..1662: mol_type = other DNA
atgacccggggcggccctgggggccggcccggcctgccccagcccccacccctgctgctgctgctgctgctgctgcccctgctgctggtgacagctgagccccccaagccagctggggtgtactatgccacagcctactggatgcctgctgagaagacagtgcaggtgaagaatgtgatggacaagaatggagatgcctacggcttctacaacaacagcgtgaagaccaccggctggggcatcctggagatccgggccggctacggcagccagaccctgagcaatgagatcatcatgtttgtggccggcttcctggagggctacctgacagccccccacatgaatgaccactacaccaacctgtacccccagctgatcaccaagcccagcatcatggacaaggtgcaggacttcatggagaagcaggacaagtggaccaggaagaacatcaaggagtacaagacagacagcttctggaggcacacaggctacgtgatggcccagattgatggcctgtatgtgggcgccaagaagagggccatcctggagggcaccaagcccatgaccctcttccagatccagttcctgaacagcgtgggggacctgctggacctgatccccagcctgagccccaccaagaatggcagcctgaaggtgttcaagcgctgggacatgggccactgcagcgccctgatcaaggtgctgcccggctttgagaacatcctgtttgcccacagctcctggtacacctacgccgccatgctgcgcatctacaagcactgggacttcaacgtcatcgacaaggacaccagcagcagccggctgtccttcagcagctacccaggcttcctggagagcctggatgacttctacatcctgagcagcggcctcatcctgctgcagaccaccaacagcgtcttcaacaagaccctgctgaagcaggtgattcctgagaccctgctgtcctggcagagggtgcgggtggccaacatgatggctgacagcggcaagcgctgggccgacatcttcagcaagtacaacagcggcacctacaacaaccagtacatggtgctggacctgaagaaggtgaagctgaaccacagcctggacaagggcaccctgtacatcgtggagcagatccccacctacgtggagtacagcgagcagacagatgtgctgaggaagggctactggcccagctacaacgtgcccttccacgagaagatctacaactggagcggctaccccctgctggtgcagaagctgggcctggactacagctatgacctggccccccgggccaagatcttccggcgggaccagggcaaggtgacagacacagcctccatgaagtacatcatgagatacaacaactacaagaaggacccctacagcagaggagacccctgcaacaccatctgctgccgggaggacctgaacagccccaaccccagccctgggggctgctatgacaccaaggtggccgacatctacctggccagccagtacaccagctatgccatcagcggccccaccgtgcagggcggcctgcccgtcttccgctgggaccgcttcaacaagaccctgcaccagggcatgcctgaggtgtacaactttgacttcatcaccatgaagcccatcctgaagctggacatcaagtag

SEQ ID NO: 6886 - DNA, 2271 bp, synthetic construct
  misc_feature 1..2271: note = source = /note="Description of Artificial Sequence: Synthetic coding sequence"
  source 1..2271: mol_type = other DNA
atgagccggcccggcacagccaccccagccctggccctggtgctgctggccgtgaccctggccggcgtgggcgcccagggcgccgccctggaggaccctgactactacggccaggagatctggagccgggagccctactatgcccggcctgagcctgagctggagaccttcagcccccccctgcctgctggccctggagaggagtgggagcggcggccccaggagccccggccccccaagagggccaccaagcccaagaaggcccccaagcgggagaagagcgcccctgagcccccacctcctgggaagcacagcaacaagaaggtgatgaggaccaagagcagcgagaaggccgccaatgatgaccacagcgtgcgggtggcccgggaggatgtgcgggagagctgcccccccctgggcctggagaccctgaagatcacagacttccagctgcacgccagcacagtgaagagatatggcctgggcgcccaccggggccgcctgaacatccaggccggcatcaatgaaaatgacttctatgatggagcctggtgtgccggcagaaatgacctgcagcagtggattgaggtggatgcccggcggctgacccgcttcaccggggtcatcacccagggcaggaacagcctgtggctgagtgactgggtgaccagctacaaggtgatggtgtccaatgacagccacacctgggtgacagtgaagaatggaagtggggacatgatctttgagggcaacagcgagaaggagatccctgtgctgaatgagctgcctgtgcccatggtggcccgctacatccgcatcaacccccagagctggtttgacaatggcagcatctgcatgaggatggagatcctgggctgccccctgcctgaccccaacaactactaccacagaagaaatgagatgaccaccacagatgacctggacttcaagcaccacaactacaaggagatgaggcagctgatgaaggtggtgaatgagatgtgccccaacatcacccgcatctacaacatcggcaagagccaccagggcctgaagctgtatgctgtggagatcagtgaccaccctggagaacatgaggtgggggagcctgagttccactacatcgccggggcccatggaaatgaggtgctgggccgggagctgctgctgctgctggtgcagtttgtgtgccaggagtacctggccagaaatgccagaattgtgcacctggtggaggagacccgcatccacgtgctgcccagcctgaacccagatggctatgagaaggcctatgaaggaggcagcgagctgggcggctggagcctgggccgctggacccatgatggcatcgacatcaacaacaacttcccagacctgaacaccctgctgtgggaggctgaagatcggcagaatgtgcccaggaaggtgcccaaccactacatcgccatccctgagtggttcctgtctgaaaatgccaccgtggccgctgagacccgggccgtcatcgcctggatggagaagatcccctttgtgctgggcggcaacctgcagggcggggagctggtggtggcctacccctatgacctggtgcgcagcccctggaagacccaggagcacacccccaccccagatgaccacgtgttccgctggctggcctacagctatgccagcacccaccggctgatgacagatgccaggagaagagtgtgccacacagaggacttccagaaggaggagggcaccgtgaatggagcctcctggcacacagtggccggcagcctgaatgacttctcctacctgcacaccaactgctttgagctgagcatctacgtgggctgtgacaagtacccccatgagagccagctgcctgaggagtgggagaacaaccgggagagcctcatcgtgttcatggagcaggtgcaccggggcatcaagggcctggtgcgggacagccacggcaagggcatccccaatgccatcatctctgtggagggcatcaaccacgacatcagaacagccaatgatggagactactggaggctgctgaaccctggagaatatgtggtgacagccaaggccgagggcttcaccgccagcaccaagaactgcatggtgggctatgacatgggcgccacccgctgtgacttcaccctgagcaagaccaacatggcccgcatccgggagatcatggagaagtttgggaagcagcctgtgtccctgcctgcccggcggctgaagctgcggggccagaagaggcggcagaggggctag

SEQ ID NO: 6887 - DNA, 702 bp, synthetic construct
  misc_feature 1..702: note = source = /note="Description of Artificial Sequence: Synthetic coding sequence"
  source 1..702: mol_type = other DNA
atggccaccccacccttccgcctcatcaggaagatgttctccttcaaggtgagccgctggatgggcctggcctgcttccgcagcctggccgccagcagccccagcatccggcagaagaagctgatgcacaagctgcaggaggagaaggccttccgggaggagatgaagatcttccgggagaagattgaggacttccgggaggagatgtggaccttccggggcaagatccacgccttccggggccagatcctgggcttctgggaggaggagcggcccttctgggaggaggagaagaccttctggaaggaggagaagagcttctgggagatggagaagagcttccgggaggaggagaagaccttctggaagaagtaccgcaccttctggaaggaggacaaggccttctggaaggaggacaatgccctgtgggagcgggacaggaacctgctgcaggaggacaaggccctgtgggaggaggagaaggccctgtgggtggaggagcgggccctgctggagggggagaaggccctgtgggaggacaagaccagcctgtgggaggaggagaatgccctgtgggaggaggagcgggccttctggatggagaacaacggccacatcgccggggagcagatgctggaggatggcccccacaatgccaacagaggccagaggctgctggccttcagccggggccgggcctag

SEQ ID NO: 6888 - DNA, 696 bp, synthetic construct
  misc_feature 1..696: note = source = /note="Description of Artificial Sequence: Synthetic coding sequence"
  source 1..696: mol_type = other DNA
atgatgctgagctgcctcttcctgctgaaggccctgctggccctgggcagcctggagagctggatcacagctggggagcacgccaaggagggggagtgccccccccacaagaacccctgcaaggagctgtgccagggagatgagctgtgcccagctgagcagaagtgctgcaccaccggctgcggccgcatctgccgggacatccccaagggcaggaagagggactgccccagggtcatcaggaagcagagctgcctgaagcgctgcatcacagatgagacctgccctggggtgaagaagtgctgcaccctgggctgcaacaagagctgtgtggtgcccatcagcaagcagaagctggccgagtttggaggagaatgtcctgctgaccccctgccctgtgaggagctgtgtgatggagatgccagctgcccccagggccacaagtgctgcagcacaggctgcggccgcacctgcctgggggacatcgagggcggccggggcggggactgccccaaggtgctggtgggcctgtgcatcgtgggctgtgtgatggatgagaactgccaggccggggagaagtgctgcaagagcggctgcggccgcttctgtgtgccccctgtgctgccccccaagctgaccatgaaccccaactggacagtgcggagtgacagcgagctggagatccctgtgccctag

SEQ ID NO: 6889 - DNA, 1050 bp, synthetic construct
  misc_feature 1..1050: note = source = /note="Description of Artificial Sequence: Synthetic coding sequence"
  source 1..1050: mol_type = other DNA
atgggccccatcagcgcccccagctgccgctggaggatcccctggcagggcctgctgctgacagccagcctcttcaccttctggaacccccccaccacagcccagctgaccatcgaggccgtgcccagcaatgctgctgagggcaaggaggtgctgctgctggtgcacaacctgccccaggacccccggggctacaactggtacaagggggagaccgtggatgccaacagacgcatcatcggctacgtgatcagcaaccagcagatcaccccaggccctgcctacagcaaccgggagaccatctacccaaatgccagcctgctgatgagaaatgtgaccagaaatgacaccggcagctacaccctgcaggtgatcaagctgaacctgatgtctgaggaggtgacaggccagttctctgtgcaccctgagacccccaagcccagcatcagcagcaacaacagcaaccctgtggaggacaaggatgctgtggccttcacctgtgagcctgagacccagaacaccacctacctgtggtgggtgaatggccagagcctgcctgtgagcccccggctgcagctgagcaatggaaacagaaccctgaccctgctgtctgtgaccagaaatgatgtgggcccctatgaatgtgagatccagaacccagccagcgccaacttcagtgaccctgtgaccctgaatgtgctgtatggcccagatgcccccaccatcagccccagcgacacctactaccacgccggcgtgaacctgaacctgagctgccacgccgccagcaacccccccagccagtacagctggagcgtgaatggcaccttccagcagtacacccagaagctgttcatccccaacatcaccaccaagaacagcggcagctatgcctgccacaccaccaacagcgccaccggcaggaacagaaccaccgtgaggatgatcaccgtgtctgatgccctggtgcagggcagcagccctggcctgagcgcccgggccaccgtgtccatcatgattggagtgctggcccgggtggccctgatctag

SEQ ID NO: 6890 - DNA, 510 bp, synthetic construct
  misc_feature 1..510: note = source = /note="Description of Artificial Sequence: Synthetic coding sequence"
  source 1..510: mol_type = other DNA
atgacagctggaagaaggatggagatgctgtgtgccggccgggtgcctgccctgctgctgtgcctgggcttccacctgctgcaggccgtgctgagcaccaccgtcatccccagctgcatccctggagagagcagtgacaactgcacagccctggtgcagacagaggacaacccccgggtggcccaggtgtccatcaccaagtgcagcagtgacatgaatggctactgcctgcacggccagtgcatctacctggtggacatgagccagaactactgccgctgtgaggtgggctacacaggagtgcgctgtgagcacttcttcctgactgtgcaccagcccctgagcaaggagtatgtggccctgaccgtcatcctgatcatcctcttcctgatcaccgtggtgggcagcacctactacttctgccgctggtacagaaacaggaagagcaaggagcccaagaaggagtatgaaagagtgaccagcggggaccctgagctgccccaggtgtag

SEQ ID NO: 6891 - DNA, 273 bp, synthetic construct
  misc_feature 1..273: note = source = /note="Description of Artificial Sequence: Synthetic coding sequence"
  source 1..273: mol_type = other DNA
atgaagctgtctgtgtgcctgctgctggtgaccctggccctgtgctgctaccaggccaatgctgagttctgcccagccctggtgtctgagctgctggacttcttcttcatcagcgagcccctcttcaagctgagcctggccaagtttgatgcccctcctgaggccgtggccgccaagctgggcgtgaagcgctgcacagaccagatgagcctgcagaagaggagcctgattgctgaggtgctggtgaagatcctgaagaagtgcagcgtgtag

SEQ ID NO: 6892 - DNA, 429 bp, synthetic construct
  misc_feature 1..429: note = source = /note="Description of Artificial Sequence: Synthetic coding sequence"
  source 1..429: mol_type = other DNA
atgccccgctgccgctggctgagcctcatcctgctgaccatccccctggccctggtggccaggaaggaccccaagaagaatgaaacaggagtgctgaggaagctgaagcctgtgaatgccagcaatgccaacgtgaagcagtgcctgtggtttgccatgcaggagtacaacaaggagagcgaggacaagtatgtgttcctggtggtgaagaccctgcaggcccagctgcaggtgaccaacctgctggagtacctgattgatgtggagatcgcccggagtgactgcaggaagcccctgagcaccaatgagatctgtgccatccaggagaacagcaagctgaagaggaagctgagctgcagcttcctggtgggcgccctgccctggaatggagagttcaccgtgatggagaagaagtgtgaagatgcctag

SEQ ID NO: 6893 - DNA, 438 bp, synthetic construct
  misc_feature 1..438: note = source = /note="Description of Artificial Sequence: Synthetic coding sequence"
  source 1..438: mol_type = other DNA
atgggcatcggctgctggaggaaccccctgctgctgctgattgccctggtgctgagcgccaagctgggccacttccagcgctgggagggcttccagcagaagctgatgagcaagaagaacatgaacagcaccctgaacttcttcatccagagctacaacaatgccagcaatgacacctacctgtacagagtgcagaggctcatccgcagccagatgcagctgaccaccggggtggagtacatcgtgacagtgaagattggctggaccaagtgcaagagaaatgacaccagcaacagcagctgccccctgcagagcaagaagctgaggaagagcctcatctgtgagagcctcatctacaccatgccctggatcaactacttccagctgtggaacaacagctgcctggaggccgagcacgtgggcaggaacctgaggtag

SEQ ID NO: 6894 - DNA, 552 bp, synthetic construct
  misc_feature 1..552: note = source = /note="Description of Artificial Sequence: Synthetic coding sequence"
  source 1..552: mol_type = other DNA
atgaagctgctcttccccatctttgccagcctgatgctgcagtaccaggtgaacacagagttcatcggcctgcggcgctgcctgatgggcctgggccgctgccgggaccactgcaatgtggatgagaaggagatccagaagtgcaagatgaagaagtgctgcgtgggccccaaggtggtgaagctgatcaagaactacctgcagtatggcaccccaaatgtgctgaatgaagatgtgcaggagatgctgaagccagccaagaacagcagcgctgtgatccagaggaagcacatcctgtctgtgctgccccagatcaagagcaccagcttctttgccaacaccaacttcgtcatcatccccaatgccacccccatgaacagcgccaccatcagcaccatgaccccaggccagatcacctacacagccaccagcaccaagagcaacaccaaggagagccgggacagcgccacagccagccccccaccagcccctcctccacccaacatcctgcccacccccagcctggagctggaggaggccgaggagcagtag

SEQ ID NO: 6895 - DNA, 609 bp, synthetic construct
  misc_feature 1..609: note = source = /note="Description of Artificial Sequence: Synthetic coding sequence"
  source 1..609: mol_type = other DNA
atgaggggccaccccagcctgctgctgctgtacatggccctgaccacctgcctggacaccagccccagcgaggagacagaccaggaggtgttcctgggccccccagaggcccagagcttcctgagcagccacacccgcatcccccgggccaaccactgggacctggagctgctgaccccaggcaacctggagcgggagtgcctggaggagcgctgctcctgggaggaggcccgggagtactttgaggacaacaccctgacagagcgcttctgggagagctacatctacaatggaaaaggaggccggggccgggtggatgtggccagcctggccgtgggcctgactggaggcatcctgctgattgtgctggccggcctgggcgccttctggtacctgcgctggaggcagcaccggggccagcagccctgcccccaggaggccggcctcatcagccccctgagccccctgaaccccctgggcccccccacccccctgcccccacctcctcctcctcctcctggcctgcccacctatgagcaggccctggccgccagcggcgtgcatgatgcccctcctccaccctacaccagcctgcggcggccccactag

SEQ ID NO: 6896 - DNA, 558 bp, synthetic construct
  misc_feature 1..558: note = source = /note="Description of Artificial Sequence: Synthetic coding sequence"
  source 1..558: mol_type = other DNA
atgaggctgctgatcctgacctgcctggtggccgtggccctggcccggcccaagctgcccctgcgctacccagagcggctgcagaaccccagcgagagcagcgagcccatccccctggagagccgggaggagtacatgaatggcatgaaccggcagaggaacatcctgcgggagaagcagacagatgagatcaaggacaccagaaatgaaagcacccagaactgtgtggtggccgagcctgagaagatggagagcagcatcagcagcagcagcgaggagatgagcctgagcaaatgtgccgagcagttctgccgcctgaatgagtacaaccagctgcagctgcaggccgcccacgcccaggagcagatccggaggatgaatgaaaacagccacgtgcaggtgcccttccagcagctgaaccagctggccgcctacccctatgctgtgtggtactacccccagatcatgcagtatgtgcccttcccccccttcagtgacatcagcaaccccacagcccacgagaactatgagaagaacaacgtgatgctgcagtggtag

SEQ ID NO: 6897 - DNA, 1410 bp, synthetic construct
  misc_feature 1..1410: note = source = /note="Description of Artificial Sequence: Synthetic coding sequence"
  source 1..1410: mol_type = other DNA
atgatcacagaaggagcccaggccccccggctgctgctgccccccctgctgctgctgctgaccctgcctgccactggaagtgaccctgtgctgtgcttcacccagtatgaggagagcagcggcaagtgcaagggcctgctgggcggcggcgtgtctgtggaggactgctgcctgaacacagcctttgcctaccagaagaggtctgggggcctgtgccagccctgccgcagcccccgctggagcctgtggagcacctgggccccctgcagcgtgacctgcagcgagggcagccagctgcgctaccgccgctgtgtgggctggaatggccagtgcagcggcaaggtggcccctggcaccctggagtggcagctgcaggcctgtgaggaccagcagtgctgcccagagatgggcggctggagcggctggggcccctgggagccctgcagcgtgacctgcagcaagggcaccaggacccggcggcgggcctgcaaccacccagcccccaagtgtggcggccactgccccggccaggcccaggagagcgaggcctgtgacacccagcaggtgtgccccacccatggagcctgggccacctggggcccctggaccccctgcagcgccagctgccacggcggcccccatgagcccaaggagaccaggagcaggaaatgttctgcccctgagcccagccagaagcccccaggcaagccctgccccggcctggcctatgagcagaggcgctgcaccggcctgcccccctgccctgtggccggcggctggggcccctggggccctgtgagcccctgccctgtgacctgtggcctgggccagaccatggagcagaggacctgcaaccaccctgtgccccagcacggcggccccttctgtgctggagatgccaccaggacccacatctgcaacacagctgtgccctgccctgtggatggagagtgggacagctggggcgagtggagcccctgcatcagaagaaacatgaagagcatcagctgccaggagatccctggccagcagagccggggccgcacctgccggggcaggaagtttgatggccaccgctgtgccggccagcagcaggacatccgccactgctacagcatccagcactgccccctgaagggctcctggagcgagtggagcacctggggcctgtgcatgccaccctgtggccccaaccccacccgggcccggcagaggctgtgcacccccctgctgcccaagtacccacccaccgtgtccatggtggagggccagggcgagaagaatgtgaccttctggggccggcccctgccccgctgtgaggagctgcagggccagaagctggtggtggaggagaagaggccctgcctgcacgtgcctgcctgcaaggaccctgaggaggaggagctgtag

SEQ ID NO: 6898 - DNA, 453 bp, synthetic construct
  misc_feature 1..453: note = source = /note="Description of Artificial Sequence: Synthetic coding sequence"
  source 1..453: mol_type = other DNA
atgctgattgccaccagcttcttcctgttcttcagctctgtggtggccgcccccacccacagcagcttctggcagttccagaggagagtgaagcacatcaccggccgcagcgccttcttctcctactacggctacggctgctactgcggcctgggggacaagggcatccctgtggatgacacagacagccccagcagccccagcccctatgagaagctgaaggagttcagctgccagcctgtgctgaacagctaccagttccacatcgtgaatggagctgtggtgtgtggctgcaccctgggccctggggccagctgccactgccgcctgaaggcctgtgaatgtgacaagcagagcgtgcactgcttcaaggagagcctgcccacctatgagaagaacttcaagcagttcagcagccagccccgctgtggccgccacaagccctggtgctag

SEQ ID NO: 6899 - DNA, 1347 bp, synthetic construct
  misc_feature 1..1347: note = source = /note="Description of Artificial Sequence: Synthetic coding sequence"
  source 1..1347: mol_type = other DNA
atgagggagtgcatctctgtgcacgtgggccaggccggcgtgcagatgggaaatgcctgctgggagctgtactgcctggagcacggcatccagccagatggccagatgcccagcgacaagaccatcggcggcggagatgacagcttcaccaccttcttctgtgagaccggggccggcaagcacgtgcccagggctgtgtttgtggacctggagcccaccgtgattgatgagatcagaaatggcccctaccggcagctgttccaccctgagcagctgatcaccgggaaggaggatgctgccaacaactatgcccggggccactacaccatcggcaaggagatcattgatcctgtgctggaccgcatcaggaagctgagtgaccagtgcaccggcctgcagggcttcctggtgttccacagctttggaggcggcactggaagtggcttcaccagcctgctgatggagcggctgtctgtggactatggcaagaagagcaagctggagttcagcatctacccagccccccaggtgtccacagctgtggtggagccctacaacagcatcctgaccacccacaccaccctggagcacagcgactgtgccttcatggtggacaatgaggccatctatgacatctgcagaagaaacctggacatcgagcggcccacctacaccaacctgaacagactcatcagccagatcgtgagcagcatcacagccagcctgcgctttgatggagccctgaatgtggacctgacagagttccagaccaacctggtgccctacccccgcatccacttccccctggccacctacgcccctgtgatctctgctgagaaggcctaccacgagcagctgtctgtggccgagatcaccaatgcctgctttgagcccgccaaccagatggtgaagtgtgaccccaggcatggcaagtacatggcctgctgcctgctgtacagaggagatgtggtgcccaaggatgtgaatgctgccatcgccgccatcaagaccaagaggagcatccagtttgtggactggtgccccaccggcttcaaggtgggcatcaactaccagcccccaacagtggtgcctggaggagacctggccaaggtgcagagagctgtgtgcatgctgagcaacaccacagccatcgccgaggcctgggcccggctggaccacaagtttgacctgatgtatgccaagagggcctttgtgcactggtacgtgggggagggcatggaggagggggagttcagcgaggcccgggaggacatggccgccctggagaaggactatgaggaggtgggcatcgacagctatgaagatgaagatgaaggagaggagtag

SEQ ID NO: 6900 - DNA, 942 bp, synthetic construct
  misc_feature 1..942: note = source = /note="Description of Artificial Sequence: Synthetic coding sequence"
  source 1..942: mol_type = other DNA
atgagggtggtgaccatcgtcatcctgctgtgcttctgcaaggctgctgagctgaggaaggccagccctggctctgtgcgcagccgggtgaaccacggccgggccggcggcggcagaagaggcagcaaccctgtgaagagatatgcccctggcctgccctgtgatgtgtacacctacctgcacgagaagtacctggactgccaggagaggaagctggtgtatgtgctgcccggctggccccaggacctgctgcacatgctgctggccaggaacaagatccgcaccctgaagaacaacatgttcagcaagttcaagaagctgaagagcctggacctgcagcagaatgagatcagcaagattgagagcgaggccttcttcggcctgaacaagctgaccaccctgctgctgcagcacaaccagatcaaggtgctgacagaggaggtgttcatctacacccccctgctgagctacctgcggctgtatgacaacccctggcactgcacctgtgaaattgagaccctcatctccatgctgcagatccccaggaacagaaacctgggcaactatgccaagtgtgagagcccccaggagcagaagaacaagaagctgcggcagatcaagtctgagcagctgtgcaatgaggaggagaaggagcagctggaccccaagccccaggtgtctggccggccccctgtgatcaagccagaggtggacagcaccttctgccacaactacgtgttccccatccagaccctggactgcaagaggaaggagctgaagaaggtgcccaacaacatccccccagacatcgtgaagctggacctgagctacaacaagatcaaccagctgcggcccaaggagtttgaagatgtgcatgagctgaagaagctgaacctgagcagcaatggcatcgagttcattgatcctggcagcctgaggtag

SEQ ID NO: 6901 - DNA, 972 bp, synthetic construct
  misc_feature 1..972: note = source = /note="Description of Artificial Sequence: Synthetic coding sequence"
  source 1..972: mol_type = other DNA
atgcaggccgcctggctgctgggcgccctggtggtgccccagctgctgggcttcggccacggggcccggggagctgagcgggagtgggagggcggctggggcggggcccaggaggaggagcgggagcgggaggccctgatgctgaagcacctgcaggaggccctgggcctgcctgctggaagaggagatgagaacccagctggcaccgtggagggcaaggaggactgggagatggaggaggaccagggcgaggaggaggaggaggaggccacccccacccccagcagcggccccagccccagccccaccccagaagatattgtgacctacatcctgggccgcctggccggcctggatgctggcctgcaccagctgcacgtgcggctgcacgccctggacaccagggtggtggagctgacccagggcctgcggcagctgagaaatgctgctggggacaccagagatgctgtgcaggccctgcaggaggcccagggccgggcagagcgggagcacggccgcctggagggctgcctgaagggcctgcggctgggccacaagtgcttcctgctgagccgggactttgaggcccaggccgccgcccaggcccgctgcacagcccggggcggcagcctggcccagcctgctgaccggcagcagatggaggccctgacccgctacctgcgggccgccctggccccctacaactggcctgtgtggctgggcgtgcatgacagaagagctgagggcctgtacctgtttgaaaatggccagagggtgtccttctttgcctggcacaggagccccaggcctgagctgggcgcccagcccagcgccagcccccaccccctgagcccagaccagcccaatggaggcaccctggagaactgtgtggcccaggccagtgatgatggctcctggtgggaccatgactgccagaggcggctgtactacgtgtgtgagttccccttctag

SEQ ID NO: 6902 - DNA, 1086 bp, synthetic construct
  misc_feature 1..1086: note = source = /note="Description of Artificial Sequence: Synthetic coding sequence"
  source 1..1086: mol_type = other DNA
atgaatggcctgagcctgtctgagctgtgctgcctcttctgctgccccccctgccccggcagaattgctgccaagctggccttcctgcccccagaggccacctacagcctggtgcctgagcctgagcccggccctggaggagctggggccgcccccctgggcaccctgcgggccagcagcggggcccctggccgctggaagctgcacctgacagaaagagctgacttccagtacagccagcgggagctggacaccatcgaggtgttccccaccaagagcgcccggggcaacagagtgtcctgcatgtatgtgcgctgtgtgcctggggcccggcagggccaccaggcccagggcggccacccccagctggcctgggtgggccgcctgggggacagcaacaacccagcccctgggggctgcctgctgggcaagtcctggggcaccggggccgccctggcctgtggctacatccacctgctggcccgctacacagtgctcttcagccatggaaatgctgtggacctgggccagatgagcagcttctacatcggcctgggcagccggctgcactgcaacatcttctcctatgactacagcggctatggagccagcagcggccggcccagcgagaggaacctgtatgctgacattgatgctgcctggcaggccctgcggaccaggtatggcatcagcccagacagcatcatcctgtatggccagagcatcggcaccgtgcccaccgtggacctggccagccgctatgaatgtgccgctgtggtgctgcacagccccctgaccagcggcatgagggtggccttcccagacaccaagaagacctactgctttgatgccttccccaacatcgagaaggtgtccaagatcaccagccctgtgctgatcatccacggcacagaagatgaggtgattgacttcagccacggcctggccctgtatgagcgctgccccaaggctgtggagcccctgtgggtggagggcgccggccacaatgacatcgagctgtacagccagtacctggagcggctgcggcgcttcatcagccaggagctgcccagccagagggcctag

SEQ ID NO: 6903 - DNA, 1404 bp, synthetic construct
  misc_feature 1..1404: note = source = /note="Description of Artificial Sequence: Synthetic coding sequence"
  source 1..1404: mol_type = other DNA
atgaggacagcccccagcctgcggcgctgtgtgtgcctgctgctggccgccatcctggacctggcccggggctacctgactgtgaacatcgagcccctgccccctgtggtggccggagatgctgtgaccctgaagtgcaacttcaagacagatggccgcatgagagaaattgtgtggtacagagtgacagatggcggcaccatcaagcagaagatcttcacctttgatgccatgttcagcaccaactacagccacatggagaactacaggaagcgggaggacctggtgtaccagagcacagtgcggctgcctgaggtgcgcatcagtgacaatggcccctatgaatgtcatgtgggcatctatgaccgggccacccgggagaaggtggtgctggccagcggcaacatcttcctgaatgtgatggccccacccaccagcattgaggtggtggccgctgacaccccagcccccttcagccgctaccaggcccagaacttcaccctggtgtgcatcgtgtctgggggcaagccagcccccatggtgtacttcaagagagatggagagcccattgatgctgtgcccctgtctgagcccccagctgccagcagcggccccctgcaggacagccggcccttccgcagcctgctgcaccgggacctggatgacaccaagatgcagaagagcctgagcctgctggatgctgaaaatagaggaggccggccctacacagagcggcccagccggggcctgaccccagaccccaacatcctgctgcagcccaccacagagaacatccctgagaccgtggtgtcccgggagttcccccgctgggtgcacagcgctgagcccacctacttcctgcggcacagcaggacccccagcagtgatggcaccgtggaggtgcgggccctgctgacctggaccctgaacccccagattgacaatgaggccctcttcagctgtgaggtgaagcacccagccctgtccatgcccatgcaggccgaggtgaccctggtggcccccaagggccccaagatcgtgatgacccccagccgggcccgggtgggggacacagtgcgcatcctggtgcacggcttccagaatgaggtgtttcctgagcccatgttcacctggaccagggtgggcagccggctgctggatggcagcgctgagtttgatggcaaggagctggtgctggagcgggtgcctgctgagctgaatggctccatgtaccgctgcacagcccagaaccccctgggcagcacagacacccacacccggctgattgtgtttgagaaccccaacatcccccggggcacagaggacagcaatggcagcatcggccccaccggggcccggctgaccctggtgctggccctgaccgtcatcctggagctgacctag

SEQ ID NO: 6904 - DNA, 783 bp, synthetic construct
  misc_feature 1..783: note = source = /note="Description of Artificial Sequence: Synthetic coding sequence"
  source 1..783: mol_type = other DNA
atggcccggcccggcatggagcgctggagggaccggctggccctggtgactggagccagcggcggcattggagctgctgtggcccgggccctggtgcagcagggcctgaaggtggtgggctgtgccaggacagtgggcaacatcgaggagctggccgctgagtgcaagtctgctggctacccaggcaccctcatcccctaccgctgtgacctgagcaatgaggaggacatcctgtccatgttcagcgccatccgcagccagcacagcggcgtggacatctgcatcaacaatgccggcctggcccggccagacaccctgctgagcggcagcaccagcggctggaaggacatgtttaatgtgaatgtgctggccctgagcatctgcacccgggaggcctaccagagcatgaaggagagaaatgtggatgatggccacatcatcaacatcaacagcatgagcggccaccgggtgctgcccctgtctgtgacccacttctacagcgccaccaagtatgctgtgacagccctgacagagggcctgcggcaggagctgcgggaggcccagacccacatccgggccacctgcatcagccctggggtggtggagacccagtttgccttcaagctgcatgacaaggaccctgagaaggccgccgccacctatgagcagatgaagtgcctgaagccagaagatgtggccgaggccgtcatctacgtgctgagcaccccagcccacatccagatcggggacatccagatgaggcccacagagcaggtgacctag

SEQ ID NO: 6905 - DNA, 1218 bp, synthetic construct
  misc_feature 1..1218: note = source = /note="Description of Artificial Sequence: Synthetic coding sequence"
  source 1..1218: mol_type = other DNA
atgagcagccctgccctgacagctggggccagcggcaaggtgatggacttcaacaacggcacctacctggtgtccttcaccctcttctgggagggccaggtgtccctgagcctgctgctgatccaccccagcgagggcgccagcgccctgtggagggccaggaaccagggctatgacaagatcatcttcaagggcaagtttgtgaatggcaccagccacgtgttcacagaatgtggcctgaccctgaacagcaatgctgagctgtgtgagtacctggatgaccgggaccaggaggccttctactgcatgaagccccagcacatgccctgtgaggccctgacctacatgaccaccaggaaccgggaggtgtcctacctgacagacaaggagaacagcctcttccacaggagcaaggtgggcgtggagatgatgaaggacaggaagcacattgatgtgaccaactgcaacaagcgggagaagattgaggagacctgccaggtgggcatgaagccccctgtgcctgggggctacaccctgcagggcaagtggatcaccaccttctgcaaccaggtgcagctggacaccatcaagatcaatggctgcctgaagggcaagctgatctacctgctgggggacagcaccctgcggcagtggatctactacttccccaaggtggtgaagaccctgaagttctttgacctgcatgaaacaggcatcttcaagaagcacctgctgctggatgctgagcggcacacccagatccagtggaagaagcacagctacccctttgtgaccttccagctgtacagcctgattgaccatgactacatcccccgggagattgaccggctgagcggggacaagaacacagccatcgtcatcaccttcggccagcacttccggcccttccccatcgacatcttcatccggcgggccatcggcgtgcagaaggccatcgagcggctcttcctgcggagccctgccaccaaggtgatcatcaagacagagaacatccgggagatgcacattgaaacagaaagatttggagacttccacggctacatccactacctgatcatgaaggacatcttcaaggacctgaatgtgggcatcattgatgcctgggacatgaccatcgcctatggaacagacaccatccaccccccagaccacgtgattggcaaccagatcaacatgttcctgaactacatctgctag

SEQ ID NO: 6906 - DNA, 597 bp, synthetic construct
  misc_feature 1..597: note = source = /note="Description of Artificial Sequence: Synthetic coding sequence"
  source 1..597: mol_type = other DNA
atgcctgtgcctgccctgtgcctgctgtgggccctggccatggtgaccaggcctgccagcgctgcccccatgggcggccctgagctggcccagcacgaggagctgaccctgctcttccacggcaccctgcagctgggccaggccctgaatggagtgtaccgcaccacagagggccgcctgaccaaggccaggaacagcctgggcctgtatggccgcaccatcgagctgctgggccaggaggtgtcccggggcagagatgctgcccaggagctgcgggccagcctgctggagacccagatggaggaggacatcctgcagctgcaggccgaggccacagctgaggtgctgggggaggtggcccaggcccagaaggtgctgcgggacagcgtgcagaggctggaggtgcagctgcggagcgcctggctgggccctgcctaccgggagtttgaggtgctgaaggcccacgccgacaagcagagccacatcctgtgggccctgactggacatgtgcagaggcagaggcgggagatggtggcccagcagcaccggctgcggcagatccaggagcggctgcacacagctgccctgcctgcctag

SEQ ID NO: 6907 - DNA, 1455 bp, synthetic construct
  misc_feature 1..1455: note = source = /note="Description of Artificial Sequence: Synthetic coding sequence"
  source 1..1455: mol_type = other DNA
atggccggcccctggaccttcaccctgctgtgtggcctgctggccgccaccctcatccaggccaccctgagccccacagctgtgctgatcctgggccccaaggtgatcaaggagaagctgacccaggagctgaaggaccacaatgccaccagcatcctgcagcagctgcccctgctgagcgccatgagggagaagccagctgggggcatccctgtgctgggcagcctggtgaacacagtgctgaagcacatcatctggctgaaggtgatcacagccaacatcctgcagctgcaggtgaagcccagcgccaatgaccaggagctgctggtgaagatccccctggacatggtggccggcttcaacacccccctggtgaagaccatcgtggagttccacatgaccacagaggcccaggccaccatccgcatggacaccagcgccagcggccccacccggctggtgctgagtgactgtgccaccagccacggcagcctgcgcatccagctgctgcacaagctgtccttcctggtgaatgccctggccaagcaggtgatgaacctgctggtgcccagcctgcccaacctggtgaagaaccagctgtgccctgtgattgaggccagcttcaacggcatgtatgctgacctgctgcagctggtgaaggtgcccatcagcctgagcattgaccggctggagtttgacctgctgtacccagccatcaagggggacaccatccagctgtacctgggcgccaagctgctggacagccagggcaaggtgaccaagtggttcaacaacagcgctgccagcctgaccatgcccaccctggacaacatccccttcagcctgattgtgtcccaggatgtggtgaaggctgctgtggccgctgtgctgagccctgaggagttcatggtgctgctggacagcgtgctgcctgagagcgcccaccggctgaagagcagcatcggcctcatcaatgagaaggctgctgacaagctgggcagcacccagatcgtgaagatcctgacccaggacaccccagagttcttcatcgaccagggccacgccaaggtggcccagctgattgtgctggaggtgttccccagcagcgaggccctgcggcccctcttcaccctgggcatcgaggccagcagcgaggcccagttctacaccaagggggaccagctgatcctgaacctgaacaacatcagcagtgaccgcatccagctgatgaacagcggcatcggctggttccagccagatgtgctgaagaacatcatcacagagatcatccacagcatcctgctgcccaaccagaatggcaagctgcggtctggagtgcctgtgtccctggtgaaggccctgggctttgaggccgctgagagcagcctgaccaaggatgccctggtgctgaccccagccagcctgtggaagcccagcagccctgtgtcccagtag

SEQ ID NO: 6908 - DNA, 750 bp, synthetic construct
  misc_feature 1..750: note = source = /note="Description of Artificial Sequence: Synthetic coding sequence"
  source 1..750: mol_type = other DNA
atgctgcagctgtggaagctggtgctgctgtgtggggtgctgaccggcaccagcgagagcctgctggacaacctgggcaatgacctgagcaatgtggtggacaagctggagcctgtgctgcacgagggcctggagaccgtggacaacaccctgaagggcatcctggagaagctgaaggtggacctgggcgtgctgcagaagagcagcgcctggcagctggccaagcagaaggcccaggaggccgagaagctgctgaacaacgtcatcagcaagctgctgcccaccaacacagacatcttcggcctgaagatcagcaacagcctcatcctggatgtgaaggccgagcccattgatgatggcaagggcctgaacctgtccttccctgtgacagccaacgtgacagtggccggccccatcatcggccagatcatcaacctgaaggccagcctggacctgctgacagctgtgaccatcgagacagacccccagacccaccagcctgtggccgtgctgggagaatgtgccagtgaccccaccagcatcagcctgagcctgctggacaagcacagccagatcatcaacaagtttgtgaacagcgtcatcaacaccctgaagagcacagtgagcagcctgctgcagaaggagatctgccccctcatccgcatcttcatccacagcctggatgtgaatgtcatccagcaggtggtggacaacccccagcacaagacccagctgcagaccctcatctag

SEQ ID NO: 6909 - DNA, 1959 bp, synthetic construct
  misc_feature 1..1959: note = source = /note="Description of Artificial Sequence: Synthetic coding sequence"
  source 1..1959: mol_type = other DNA
atgcagggccccctgctgctgcccggcctgtgcttcctgctgagcctgtttggagctgtgacccagaagaccaagaccagctgtgccaagtgccccccaaatgccagctgtgtgaacaacacccactgcacctgcaaccacggctacaccagcggcagcggccagaagctgttcaccttccccctggagacctgcaatgacatcaatgaatgtaccccaccctacagcgtgtactgcggcttcaatgctgtgtgctacaacgtggagggcagcttctactgccagtgtgtgcccggctaccgcctgcacagcggaaatgagcagttcagcaacagcaatgaaaacacctgccaggacaccaccagcagcaagaccacagagggcaggaaggagctgcagaagatcgtggacaagtttgagagcctgctgaccaaccagaccctgtggaggacagagggccggcaggagatcagcagcacagccaccaccatcctgagagatgtggagagcaaggtgctggagacagccctgaaggaccctgagcagaaggtgctgaagatccagaatgattctgtggccatcgagacccaggccatcacagacaactgcagcgaggagaggaagaccttcaacctgaatgtgcagatgaacagcatggacatccgctgcagcgacatcatccagggcgacacccagggccccagcgccatcgccttcatctcctacagcagcctgggcaacatcatcaatgccaccttctttgaggagatggacaagaaggaccaggtgtacctgaacagccaggtggtgtctgctgccatcggccccaagagaaatgtgtccctgagcaagtctgtgaccctgaccttccagcacgtgaagatgacccccagcaccaagaaggtgttctgtgtgtactggaagagcacaggccagggcagccagtggagcagagatggctgcttcctgattcatgtgaacaagagccacaccatgtgcaactgcagccacctgagcagctttgctgtgctgatggccctgaccagccaggaggaggaccctgtgctgaccgtcatcacctacgtgggcctgtctgtgtccctgctgtgcctgctgctggccgccctgaccttcctgctgtgcaaggccatccggaacaccagcaccagcctgcacctgcagctgagcctgtgcctcttcctggcccacctgctcttcctggtgggcatcgacagaacagagcccaaggtgctgtgcagcatcatcgccggggccctgcactacctgtacctggccgccttcacctggatgctgctggagggcgtgcacctgttcctgacagccaggaacctgactgtggtgaactacagcagcatcaaccggctgatgaagtggatcatgtttcctgtgggctacggcgtgcctgctgtgacagtggccatctctgctgcctcctggccccacctgtatggaacagctgaccgctgctggctgcacctggaccagggcttcatgtggagcttcctgggccctgtgtgtgccatcttcagcgccaacctggtgctcttcatcctggtgttctggatcctgaagaggaagctgagcagcctgaacagcgaggtgtccaccatccagaacaccaggatgctggccttcaaggccacagcccagctgttcatcctgggctgcacctggtgcctgggcctgctgcaggtgggccctgctgcccaggtgatggcctacctgttcaccatcatcaacagcctgcagggcttcttcatcttcctggtgtactgcctgctgagccagcaggtgcagaagcagtaccagaagtggttccgggagatcgtgaagagcaagtctgagagcgagacctacaccctgagcagcaagatgggccctgacagcaagcccagtgaaggagatgtgtttcctggccaggtgaagaggaagtactag

SEQ ID NO: 6910 - DNA, 1263 bp, synthetic construct
  misc_feature 1..1263: note = source = /note="Description of Artificial Sequence: Synthetic coding sequence"
  source 1..1263: mol_type = other DNA
atgagccccccacccctgctgcagcccctgctgctgctgctgcccctgctgaatgtggagcccagcggggccaccctcatccgcatccccctgcaccgggtgcagcccggccgccgcatcctgaacctgctgcggggctggagggagcctgctgagctgcccaagctgggcgcccccagccctggggacaagcccatctttgtgcccctgagcaactacagagatgtgcagtactttggagagatcggcctgggcaccccaccccagaacttcaccgtggcctttgacaccggcagcagcaacctgtgggtgcccagccgccgctgccacttcttctctgtgccctgctggctgcaccacagatttgaccccaaggccagcagcagcttccaggccaacggcaccaagtttgccatccagtatggaacaggccgggtggatggcatcctgtctgaggacaagctgaccatcggcggcatcaagggggccagcgtcatctttggagaggccctgtgggagcccagcctggtgtttgcctttgcccactttgatggcatcctgggcctgggcttccccatcctgtctgtggagggcgtgcggccccccatggatgtgctggtggagcagggcctgctggacaagcctgtgttctccttctacctgaacagagatcctgaggagccagatggaggagagctggtgctgggcggcagtgaccctgcccactacatcccccccctgacctttgtgcctgtgacagtgcctgcctactggcagatccacatggagcgggtgaaggtgggccctggcctgaccctgtgtgccaagggctgtgccgccatcctggacaccggcaccagcctcatcaccggccccacagaggagatccgggccctgcatgctgccatcggcggcatccccctgctggccggggagtacatcatcctgtgcagcgagatccccaagctgcctgctgtgtccttcctgctgggcggcgtgtggttcaacctgacagcccatgactatgtgatccagaccaccagaaatggagtgcggctgtgcctgagcggcttccaggccctggatgtgcccccacctgctggccccttctggatcctgggagatgtgttcctgggcacctacgtggccgtgtttgacagaggagacatgaagagcagcgcccgggtgggcctggcccgggcccggaccagaggagctgacctgggctggggcgagacagcccaggcccagtttcctggatag

SEQ ID NO: 6911 - DNA, 1293 bp, synthetic construct
  misc_feature 1..1293: note = source = /note="Description of Artificial Sequence: Synthetic coding sequence"
  source 1..1293: mol_type = other DNA
atggcctggacctttgagtgcagcaggaccaccagccctgagcccctgagcaccagcccctgcaggaccaccagcagcaggaacagccccaccatgagctgcccagcctctgtggcctgtgagcccagcaccagcaccaccaccagcagcccccccaagctgtctgtggccccccagttcctgcccaggagcctgcgggtggccgacctggccgccaaccaggtgatggagatcttccccctgacctttggagagaagccagccctgcggtctgtgtacctgcacaacaaccagctgagcaatgccggcctgcccccagatgccttccggggcagcgaggccatcgccaccctgagcctgagcaacaaccagctgagctacctgccccccagcctgccccccagcctggagcggctgcacctgcagaacaacctgatcagcaaggtgcccaggggggccctgagccggcagacccagctgcgggagctgtacctgcagcacaaccagctgacagattctggcctggatgccaccaccttcagcaagctgcacagcctggagtacctggacctgagccacaaccagctgaccaccgtgcctgctggcctgcccaggaccctggccatcctgcacctgggcaggaaccgcatccggcaggtggaggccgcccggctgcacggggcccggggcctgcgctacctgctgctgcagcacaaccagctgggcagcagcggcctgcctgctggggccctgcggcccctgcggggcctgcacaccctgcacctgtatggaaatggcctggacagagtgcccccagccctgccccggcggctgcgggccctggtgctgccccacaaccacgtggccgccctgggcgcccgggacctggtggccaccccaggcctgacagagctgaacctggcctacaaccggctggccagcgcccgggtgcaccaccgggccttccggcggctgcgggccctgcggagcctggacctggccggcaaccagctgacccggctgcccatgggcctgcccaccggcctgcggaccctgcagctgcagaggaaccagctgaggatgctggagcctgagcccctggccggcctggaccagctgcgggagctgagcctggcccacaaccggctgcgggtgggggacatcggccctggcacctggcatgagctgcaggccctgcaggtgcgccaccggctggtgagccacacagtgccccgggccccacccagcccctgcctgccctgccacgtgcccaacatcctggtgtcctggtag

SEQ ID NO: 6912 - DNA, 3162 bp, synthetic construct
  misc_feature 1..3162: note = source = /note="Description of Artificial Sequence: Synthetic coding sequence"
  source 1..3162: mol_type = other DNA
atgtggcagccccggcggccctggccccgggtgccctggcgctgggccctggccctgctggccctggtgggcgccggcctgtgccacgccggcccccagcccggctacccagcccggcccagcgccaggaacaagaactggtgtgcctacatcgtgaacaagaatgtgtcctgcagcgtgctggagggcagcgagagcttcatccaggcccagtacaactgtgcctggaaccagatgccctgccccagcgccctggtgtacagagtgaacttccggcccaggtatgtgacccgctacaagacagtgacccagctggagtggcgctgctgccccggcttccggggcggggactgccaggagggccccaaggaccctgtgaagaccctgcggcccaccccagcccggcccaggaacagcctgaagaaggccacagacaatgagcccagccagttcagcgagcccaggaagaccctgagccccactggaacagcccagcccagctggggcgtggaccccaaggagggcccccaggagctgcaggagaagaagatccaggtgctggaggagaaggtgctgcggctgaccaggacagtgctggacctgcagagcagcctggccggcgtgtctgagaacctgaagcacgccacccaggatgatgccagcaggacccgggcccctggcctgagcagccagcaccccaagccagacaccaccgtgtctggggacacagaaacaggccagagccctggggtcttcaacaccaaggagagcggcatgaaggacatcaagtctgagctggccgaggtgaaggacaccctgaagaacaagagtgacaagctggaggagctggatggcaaggtgaagggctatgagggccagctgcggcagctgcaggaggccgcccagggccccaccgtgaccatgaccaccaatgagctgtaccaggcctacgtggacagcaagattgatgccctgcgggaggagctgatggagggcatggacaggaagctggccgacctgaagaacagctgtgagtacaagctgaccggcctgcagcagcagtgtgatgattatggcagcagctacctgggcgtcatcgagctgattggagagaaggagaccagcctgaggaaggagatcaacaacctgcgggcccggctgcaggagcccagcgcccaggccaactgctgtgacagcgagaagaatggagacatcggccagcagatcaagaccctggaccagaagattgaaagagtggccgaggccaccaggatgctgaatggccgcctggacaatgaatttgacaggctcatcgtgcctgagccagatgtggactttgatgccaagtggaatgagctggatgcccgcatcaacgtgacagagaagaatgctgaggagcactgcttctacatcgaggagaccctgcggggggccatcaacggggaggtgggggacctgaagcagctggtggaccagaagatccagagcctggaggaccggctgggctctgtgctgctgcagatgaccaacaacacaggagctgagctgagccccccaggagctgctgccctgcccggggtgtctggcagcggagatgagcgggtgatgatggagctgaaccacctgaaggacaaggtgcaggtggtggaggacatctgcctgctgaacatccagggcaagccccacggcatggagggcgccctgcccaaccgggaggacagagctgtgcgggacagcctgcacctgctgaagagcctgaatgacaccatgcacaggaagttccaggagacagagcagaccatccagaagctgcagcaggacttctccttcctgtacagccagctgaaccacacagaaaatgatgtgacccacctgcagaaggagatgagcaactgccgggccggggagaatgccggcatgggccgcttcaccaaggtgggggagcaggagaggacagtggacaccctgcccagcccccagcaccctgtggcccactgctgcagccagctggaggagcgctggcagaggctgcagagccaggtgatcagcgagctggatgcctgcaaggagtgcacccagggcgtgcagcgggaggtgtccatggtggagggccgggtgagccacatggagaagacctgcagcaagctggacagcatcagcggcaacctgcagaggatcaaggagggcctgaacaagcacgtgagcagcctgtggaactgtgtgcggcagatgaatggcaccctgcggagccacagccgggacatcagcggcctgaagaacagcgtgcagcagttctacagccacgtgttccagatcagcacagacctgcaggacctggtgaagttccagcccagcgccaaggcccccagccccccacctcctgctgaggcccccaaggagcccctgcagcctgagcccgccccaccccggcccagcggccctgccacagctgaggaccccggccggcggcctgtgctgccccagaggcctcctgaggagaggcctccccagcccccaggcagcactggagtgattgctgagaccggccaggccggccccccagctggagctggggtgtctggccggggcctgccccggggcgtggatggccagacaggcagcggcaccgtgcctggagctgagggctttgctggggcccctggctaccccaagagcccccctgtggccagccctggggcccctgtgcccagcctggtgtccttctctgctggcctgacccagaagcccttccccagtgatggcggcgtggtgctcttcaacaaggtgctggtgaatgatggagatgtgtacaaccccagcactggagtcttcaccgccccctatgatggccgctacctgatcacagccaccctgaccccagagagagatgcctacgtggaggccgtgctgtctgtgtccaatgcctctgtggcccagctgcacacagctggctaccgccgggagttcctggagtaccacaggcctcctggggccctgcacacctgtggcggccctggggccttccacctgattgtgcacctgaaggctggagatgctgtgaatgtggtggtgactggaggcaagctggcccacacagactttgatgagatgtacagcaccttcagcggggtcttcctgtaccccttcctgagccacctgtag

SEQ ID NO: 6913 - DNA, 1548 bp, synthetic construct
  misc_feature 1..1548: note = source = /note="Description of Artificial Sequence: Synthetic coding sequence"
  source 1..1548: mol_type = other DNA
atggcccagctgttcctgcccctgctggccgccctggtgctggcccaggccccagctgccctggctgatgtgctggagggggacagcagtgaagatcgggccttccgggtgagaattgctggagatgcccccctgcagggcgtgctgggcggggccctgaccatcccctgccacgtgcactacctgcggcccccacccagccggcgggctgtgctgggcagcccccgggtgaagtggaccttcctgagccggggccgggaggccgaggtgctggtggcccggggcgtgcgggtgaaggtgaatgaggcctaccgcttccgggtggccctgcctgcctacccagccagcctgacagatgtgtccctggccctgtctgagctgcggcccaatgacagcggcatctaccgctgtgaggtgcagcacggcattgatgacagcagtgatgctgtggaggacagccagctgtaccccatccagaccccccgggaggcctgctacggggacatggatggcttccctggggtgaggaactacggcgtggtggaccctgatgacctgtatgatgtgtactgctacgccgaggacctgaatggagagctgttcctgggggaccccccagagaagctgaccctggaggaggcccgggcctactgccaggagagaggagctgagatcgccaccaccggccagctgtatgctgcctgggatggcggcctggaccactgcagccctggctggctggctgatggctctgtgcgctaccccatcgtgacccccagccagagatgtggcggcggcctgcccggggtgaagaccctcttcctgttccccaaccagacaggcttccccaacaagcacagccgcttcaacgtgtactgcttccggggcagcacctgcctgctgcccagcctgcggccccccacccagccccccacccaggacggcctggaggccatcgtgacagtgacagagaccctggaggagctgcagctgccccaggaggccacagagagcgagagcagaggagccatctacagcatccccatcatggaggatggcggcggcggcagcagcaccccagaagatcctgctgaggcccccaggaccctgctggagtttgagacccagagcatggtgccccccaccggcttcagcgaggaggagggcaaggccctggaggaggaggagaagtatgaagatgaggaggagaaggaggaggaggaggaggaggaggaggtggaggatgaggccctgtgggcctggcccagcgagctgagcagccctggccctgaggccagcctgcccacagagcctgctgcccaggaggagagcctgagccaggccccagcccgggctgtgctgcagcccggggccagccccctgcctgatggagagagcgaggccagcaggcctccccgggtgcacggccccccaacagagaccctgcccaccccccgggagaggaacctggccagccccagccccagcaccctggtggaggcccgggaggtgggggaggccaccggcggccctgagctgagcggctag

SEQ ID NO: 6914 - DNA, 1023 bp, synthetic construct
  misc_feature 1..1023: note = source = /note="Description of Artificial Sequence: Synthetic coding sequence"
  source 1..1023: mol_type = other DNA
atgcctggctggctgaccctgcccaccctgtgccgcttcctgctgtgggccttcaccatcttccacaaggcccagggcgaccctgccagccaccctggcccccactacctgctgccccccatccacgaggtgatccacagccacagaggagccacagccaccctgccctgtgtgctgggcaccaccccacccagctacaaggtgcgctggagcaaggtggagcctggagagctgcgggagaccctcatcctgatcaccaacggcctgcacgcccggggctacggccccctgggcggccgggccaggatgaggcggggccaccggctggatgccagcctggtgattgctggggtgcggctggaggatgagggccgctaccgctgtgagctgatcaatggaattgaagatgagagcgtggccctgaccctgagcctggagggcgtggtgttcccctaccagcccagccggggccgctaccagttcaactactatgaggccaagcaggcctgtgaggagcaggacggccgcctggccacctacagccagctgtaccaggcctggacagagggcctggactggtgcaatgccggctggctgctggagggctctgtgcgctaccctgtgctgacagcccgggccccctgtggcggccggggccggcccggcatccgctcctatggcccccgggacaggatgagggacagatatgatgccttctgcttcaccagcgccctggccggccaggtgttctttgtgcccggccgcctgaccctgtctgaggcccatgctgcctgcagaagaagaggagctgtggtggccaaggtgggccacctgtatgctgcctggaagttcagcggcctggaccagtgtgatggcggctggctggctgatggctctgtgcgcttccccatcaccaccccccggccccgctgtggcggcctgcctgaccccggggtgcgcagctttggcttcccccggccccagcaggccgcctacggcacctactgctacgcagaaaattag

SEQ ID NO: 6915 - DNA, 690 bp, synthetic construct
  misc_feature 1..690: note = source = /note="Description of Artificial Sequence: Synthetic coding sequence"
  source 1..690: mol_type = other DNA
atggacctgctgcagttcctggccttcctgtttgtgctgctgctgagcggcatgggcgccaccggcaccctgcggaccagcctggaccccagcctggagatctacaagaagatgtttgaggtgaagagaagagagcagctgctggccctgaagaacctggcccagctgaatgacatccaccagcagtacaagatcctggatgtgatgctgaagggcctcttcaaggtgctggaggacagcaggacagtgctgacagctgctgatgtgctgcctgatggccccttcccccaggatgagaagctgaaggatgccttcagccacgtggtggagaacacagccttctttggagatgtggtgctgcgcttccccagaattgtgcactactactttgaccacaacagcaactggaacctgctgatccgctggggcatctccttctgcaaccagacaggagtcttcaaccagggcccccacagccccatcctgagcctgatggcccaggagctgggcatcagcgagaaggacagcaacttccagaaccccttcaagattgacagaacagagttcatccccagcacagaccccttccagaaggccctgcgggaggaggagaagaggaggaagaaggaggagaagaggaaggagatcaggaagggcccccgcatcagccgcagccagagcgagctgtag

SEQ ID NO: 6916 - DNA, 465 bp, synthetic construct
  misc_feature 1..465: note = source = /note="Description of Artificial Sequence: Synthetic coding sequence"
  source 1..465: mol_type = other DNA
atgtctgtgggcaccagcctggagcaggcccagatgagcaccctgacctgccccctcttcatccccaccgtgggcaggaagacagccctgcacagcggggaggacttccagaccctgctgtttgagcgggtgtttgtgaacctggatggctgctttgacatggccaccggccagtttgctgcccccctgcggggcatctacttcttcagcctgaatgtgcacagctggaactacaaggagacctacgtgcacatcatgcacaaccagaaggaggccgtcatcctgtatgcccagcccagcgagaggagcatcatgcagagccagagcgtgatgctggacctggcctacggggacagagtgtgggtgcggctcttcaagaggcagcgggagaatgccatctacagcaatgactttgacacctacatcaccttcagcggccacctgatcaaggccgaggatgactag

SEQ ID NO: 6917 - DNA, 900 bp, synthetic construct
  misc_feature 1..900: note = source = /note="Description of Artificial Sequence: Synthetic coding sequence"
  source 1..900: mol_type = other DNA
atgaggtctgtgggggagggcgcccgggagtggatccgggagtgccagcaccagttccgccaccaccgctggaactgcaccaccctggaccgggaccacacagtgtttggccgggtgatgctgcggagcagccgggaggccgcctttgtgtatgccatcagcagcgctggggtggtgcacgccatcacccgggcctgcagccagggcgagctgtctgtgtgcagctgtgacccctacacccggggccgccaccacgaccagagaggagactttgactggggcggctgcagcgacaacatccactacggcgtgcgctttgccaaggcctttgtggatgccaaggagaagaggctgaaggatgcccgggccctgatgaacctgcacaacaacagatgtggccgcacagctgtgcggcgcttcctgaagctggagtgcaagtgccacggcgtgtctggcagctgcaccctgcggacctgctggagggccctgagtgacttcagaagaactggagactacctgcggaggagatatgatggagctgtgcaggtgatggccacccaggatggagccaacttcaccgctgcccggcagggctaccgccgggccaccaggacagacctggtgtactttgacaacagcccagactactgtgtgctggacaaggctgctggcagcctgggcacagctggccgggtgtgcagcaagaccagcaagggcacagatggctgtgagatcatgtgctgcggccggggctatgacaccaccagggtgaccagggtgacccagtgtgagtgcaagttccactggtgctgtgctgtgcgctgcaaggaatgtagaaacacagtggatgtgcacacctgcaaggcccccaagaaggccgagtggctggaccagacctag

SEQ ID NO: 6918 - DNA, 1710 bp, synthetic construct
  misc_feature 1..1710: note = source = /note="Description of Artificial Sequence: Synthetic coding sequence"
  source 1..1710: mol_type = other DNA
atgctgctgctcttcagcgtcatcctgatctcctgggtgtccacagtgggcggggagggcaccctgtgtgacttccccaagatccaccacggcttcctgtatgatgaggaggactacaaccccttcagccaggtgcccactggagaggtgttctactacagctgtgagtacaactttgtgagccccagcaagagcttctggacccgcatcacctgcacagaggagggctggagccccacccccaagtgcctgaggatgtgcagcttcccctttgtgaagaatggccacagcgagagcagcggcctcatccacctggagggggacacagtgcagatcatctgcaacacaggctacagcctgcagaacaatgagaagaacatcagctgtgtggagcggggctggagcaccccacccatctgcagcttcaccaagggggagtgccacgtgcccatcctggaggccaacgtggatgcccagcccaagaaggagagctacaaggtgggagatgtgctgaagttcagctgcaggaagaacctgatccgggtgggcagtgacagcgtgcagtgctaccagtttggctggagccccaacttccccacctgcaagggccaggtgcgcagctgtggccccccaccccagctgagcaatggagaggtgaaggagatcaggaaggaggagtatggccacaatgaggtggtggagtatgactgcaaccccaacttcatcatcaatggccccaagaagatccagtgtgtggatggagagtggaccaccctgcccacctgtgtggagcaggtgaagacctgtggctacatccctgagctggagtatggctacgtgcagcccagcgtgcccccctaccagcacggcgtgtctgtggaggtgaactgcagaaatgaatatgccatgattggcaacaacatgatcacctgcatcaatggcatctggacagagctgcccatgtgtgtggccacccaccagctgaagcgctgcaagattgctggggtgaacatcaagaccctgctgaagctgagcggcaaggagttcaaccacaacagccgcatccgctaccgctgcagcgacatcttccgctaccgccacagcgtgtgcatcaacgggaagtggaaccctgaggtggactgcacagagaagcgggagcagttctgccccccaccaccccagatccccaatgcccagaacatgaccaccaccgtgaactaccaggatggagagaaggtggccgtgctgtgcaaggagaactacctgctgcctgaggccaaggagatcgtgtgcaaggatggccgctggcagagcctgccccgctgtgtggagagcacagcctactgcggccccccacccagcatcaacaatggagacaccaccagcttccccctgtctgtgtacccacctggcagcacagtgacctaccgctgccagagcttctacaagctgcagggctctgtgacagtgacctgcaggaacaagcagtggagcgagcccccacgctgcctggacccctgtgtggtgtctgaggagaacatgaacaagaacaacatccagctgaagtggagaaatgatggcaagctgtatgccaagacaggagatgctgtggagttccagtgcaagttcccccacaaggccatgatcagcagcccccccttccgggccatctgccaggagggcaagtttgagtaccccatctgtgagtag

SEQ ID NO: 6919 - DNA, 351 bp, synthetic construct
  misc_feature 1..351: note = source = /note="Description of Artificial Sequence: Synthetic coding sequence"
  source 1..351: mol_type = other DNA
atgaagggcctgcggagcctggccgccaccaccctggccctcttcctggtgtttgtgttcctgggcaacagcagctgtgccccccagaggctgctggagaggaggaactggaccccccaggccatgctgtacctgaagggggcccagggccgccgcttcatcagtgaccagagcaggaggaaggacctgagtgaccggcccctgcctgagaggaggagccccaacccccagctgctgaccatccctgaggccgccaccatcctgctggccagcctgcagaagagcccagaagatgaggagaagaactttgaccagacccgcttcctggaggacagcctgctgaactggtag

SEQ ID NO: 6920 - DNA, 192 bp, synthetic construct
  misc_feature 1..192: note = source = /note="Description of Artificial Sequence: Synthetic coding sequence"
  source 1..192: mol_type = other DNA
atgaagcacgtgctgaacctgtacctgctgggcgtggtgctgaccctgctgagcatctttgtgcgggtgatggagagcctggagggcctgctggagagccccagccctggcacctcctggaccaccaggagccagctggccaacacagagcccaccaagggcctgcctgaccaccccagccgctccatgtag

SEQ ID NO: 6921 - DNA, 567 bp, synthetic construct
  misc_feature 1..567: note = source = /note="Description of Artificial Sequence: Synthetic coding sequence"
  source 1..567: mol_type = other DNA
atggtgcctggagctgctggctggtgctgcctggtgctgtggctgcctgcctgtgtggccgcccacggcttccgcatccatgactacctgtacttccaggtgctgagccctggggacatccgctacatcttcaccgccaccccagccaaggactttggaggcatcttccacaccaggtatgagcagatccacctggtgcctgctgagcccccagaggcctgtggggagctgagcaatggcttcttcatccaggaccagatcgccctggtggagcggggcggctgcagcttcctgagcaagaccagggtggtgcaggagcacggcggccgggctgtgatcatcagtgacaatgctgtggacaatgacagcttctacgtggagatgatccaggacagcacccagaggacagctgacatcccagccctcttcctgctgggcagagatggctacatgatcagaagaagcctggagcagcacggcctgccctgggccatcatcagcatccctgtgaatgtgaccagcatccccacctttgagctgctgcagcccccctggaccttctggtag

SEQ ID NO: 6922 - DNA, 2559 bp, synthetic construct
  misc_feature 1..2559: note = source = /note="Description of Artificial Sequence: Synthetic coding sequence"
  source 1..2559: mol_type = other DNA
atgaagcccatgctgaaggacttcagcaacctgctgctggtggtgctgtgtgactatgtgctgggggaggccgagtacctgctgctgcgggagcccggccacgtggccctgagcaatgacacagtgtatgtggacttccagtactttgatggagccaacggcaccctgagaaatgtgtctgtgctgctgctggaggccaacaccaaccagacagtgaccaccaagtacctgctgaccaaccagagccagggcaccctgaagtttgagtgcttctacttcaaggaggccggggactactggttcaccatgaccccagaggccacagacaacagcacccccttcccctggtgggagaagagcgccttcctgaaggtggagtggcctgtgttccacgtggacctgaacagaagtgccaaggctgctgagggcaccttccaggtgggcctcttcaccagccagcccctgtgccccttccctgtggacaagcccaacatcgtggtggatgtgatcttcaccaacagcctgcctgaggcccggaggaacagccggcagcccctggagatccgcaccagcaagaggacagagctggcccagggccagtgggtggagtttggctgtgcccccctgggccctgaggcctacgtgacagtggtgctgaagctgctgggccgggacagcgtcatcaccagcacaggccccatcgacctggcccagaagtttggctacaagctggtgatggtgcctgagctgacctgtgagagcggcgtggaggtgacagtgctgcccccaccctgcacctttgtgcagggcgtggtgacagtgttcaaggaggccccccgctacccaggcaagaggaccatccacctggccgagaacagcctgcccctgggggagaggaggaccatcttcaactgcaccctgtttgacatgggcaagaacaagtactgctttgattttggcatcagcagccgcagccacttcagcgccaaggaggagtgcatgctgatccagaggaacacagagacctggggcctgtggcagccctggagccagtgcagcgccacctgtggagatggagtgcgggagcggcggcgggtgtgcctgaccagcttccccagcagccctgtgtgccccggcatgagcctggaggccagcctgtgcagcctggaggagtgtgccgccttccagcccagcagccccagccccctgcagccccagggccctgtgaagagcaacaacatcgtgacagtgacaggcatcagcctgtgcctcttcatcatcatcgccaccgtgctgatcaccctgtggaggagatttggccggcctgccaagtgcagcaccccagcccggcacaacagcatccacagccccagcttcaggaagaacagtgatgaggagaacatctgtgagctgtctgagcagaggggcagcttcagtgatggaggagatggccccaccggcagccctggggacaccggcatccccctgacctacagaagaagtggccctgtgcccccagaagatgatgccagcggcagcgagagcttccagagcaatgcccagaagatcatccccccactcttctcctaccgcctggcccagcagcagctgaaggagatgaagaagaagggcctgacagagaccaccaaggtgtaccacgtgtcccagagccccctgacagacacagccattgatgctgcccccagcgcccccctggacctggagagccctgaggaggccgccgccaacaagttccgcatcaagagccccttccctgagcagcctgctgtgtctgctggggagaggcctcccagccggctggacctgaatgtgacccaggccagctgtgccatcagccccagccagaccctcatcaggaagagccaggcccggcacgtgggcagcagaggaggccccagcgagaggagccacgccagaaatgcccacttcagaagaacagccagcttccacgaggcccggcaggcccggcccttccgggagaggtccatgagcaccctgaccccccggcaggccccagcctacagcagcaggaccaggacctgtgagcaggccgaggaccgcttccggccccagagcagaggagcccacctgtttcctgagaagctggagcacttccaggaggccagcggcacccggggccccctgaaccccctgcccaagagctacaccctgggccagcccctgaggaagccagacctgggggaccaccaggccggcctggtggccggcattgaaagaacagagccccaccgggcccggcggggccccagccccagccacaagtctgtgtccaggaagcagagcagccccatcagccccaaggacaactaccagagggtgagcagcctgagccccagccagtgcaggaaggacaagtgccagagcttccccacccaccctgagtttgccttctatgacaacaccagctttggcctgacagaggccgagcagaggatgctggacctgcccggctacttcggcagcaatgaggaggatgagaccaccagcaccctgtctgtggagaagctggtgatctag

SEQ ID NO: 6923 - DNA, 369 bp, synthetic construct
  misc_feature 1..369: note = source = /note="Description of Artificial Sequence: Synthetic coding sequence"
  source 1..369: mol_type = other DNA
atgggcttccacttctgcatctggatcatcttcctgctgcccccaccctgcaagaagtgcctgagcccccccaccatgaacctgcggccccccaagagctgtggaaatgtgttctactgggtgctggtgctgaacagcggcctgctgtacaagttctgccagaccatcaagtgccgggccaactggaggcctgcccgggccccccggggctggaatgaggccacagagcggcaccaggagaggaggacccagatggagacagagatgggcggcatcagcaccacctactggcaccggctgtgcacctgcacagaccggcgggcagagaagctggtgatggatggcaacaactgctggttccacaagtag

SEQ ID NO: 6924 - DNA, 978 bp, synthetic construct
  misc_feature 1..978: note = source = /note="Description of Artificial Sequence: Synthetic coding sequence"
  source 1..978: mol_type = other DNA
atgcagggccgggtggccggcagctgtgcccccctgggcctgctgctggtgtgcctgcacctgcccggcctgtttgcccggagcattggagtggtggaggagaaggtgtcccagaacctgggcaccaacctgccccagctgggccagcccagcagcacaggccccagcaacagcgagcacccccagcctgccctggaccccaggagcaatgacctggcccgggtgcccctgaagctgtctgtgcctgccagtgatggcttccccccagctgggggcagcgctgtgcagcgctggcccccatcctggggcctgcctgccatggacagctggcccccagaggacccctggcagatgatggctgctgctgctgaggaccggctgggggaggccctgcctgaggagctgagctacctgagcagcgctgctgccctggcccctggcagcggccccctgcccggggagagcagcccagatgccaccggcctgagccccaaggccagcctgctgcaccaggacagcgagagccggcggctgcccaggagcaacagcctgggcgctgggggcaagatcctgagccagaggcctccctggagcctcatccaccgggtgctgcctgaccacccctggggcaccctgaaccccagcgtgtcctggggcggcggcggccctggcaccggctggggcacccggcccatgccccaccctgagggcatctggggcatcaacaaccagcccccaggcacctcctggggcaacatcaaccgctacccaggcggctcctggggcaacatcaaccgctacccaggcggctcctggggcaacatcaaccgctacccaggcggctcctggggcaacatccacctgtacccaggcatcaacaaccccttccccccaggagtgctgcggcccccaggcagctcctggaacatcccagctggcttccccaacccccccagcccccggctgcagtggggctag

SEQ ID NO: 6925 - DNA, 2631 bp, synthetic construct
  misc_feature 1..2631: note = source = /note="Description of Artificial Sequence: Synthetic coding sequence"
  source 1..2631: mol_type = other DNA
atgggccctgaggccctgagcagcctgctgctgctgctgctggtggccagcggagatgctgacatgaagggccactttgatcctgccaagtgccgctatgccctgggcatgcaggacaggaccatcccagacagcgacatcagcgccagcagctcctggagcgacagcacagctgcccggcacagccggctggagagcagtgatggagatggagcctggtgcccagctggcagcgtcttccccaaggaggaggagtacctgcaggtggacctgcagaggctgcacctggtggccctggtgggcacccagggcagacatgctgggggcctgggcaaggagttcagccgcagctaccgcctgcgctacagcagagatggaagacgctggatgggctggaaggaccgctggggccaggaggtgatctctggaaatgaagatcctgagggcgtggtgctgaaggacctgggcccccccatggtggcccggctggtgcgcttctaccccagggctgacagagtgatgtctgtgtgcctgcgggtggagctgtatggctgcctgtggagagatggcctgctgagctacacagcccctgtgggccagaccatgtacctgtctgaggccgtgtacctgaatgacagcacctatgatggccacacagtgggcggcctgcagtatggaggcctgggccagctggctgatggagtggtgggcctggatgacttcaggaagagccaggagctgcgggtgtggccaggctatgactatgtgggctggagcaaccacagcttcagcagcggctacgtggagatggagtttgaatttgaccggctgcgggccttccaggccatgcaggtgcactgcaacaacatgcacaccctgggcgcccggctgcccggcggcgtggagtgccgcttccggcggggccctgccatggcctgggagggggagcccatgaggcacaacctgggcggcaacctgggggacccccgggcccgggctgtgtctgtgcccctgggcggccgggtggcccgcttcctgcagtgccgcttcctgtttgctggcccctggctgctcttcagcgagatctccttcatcagtgatgtggtgaacaacagcagccctgccctgggcggcaccttccccccagccccctggtggcccccaggccccccacccaccaacttcagcagcctggagctggagccccggggccagcagcctgtggccaaggccgagggcagccccacagccatcctgattggctgcctggtggccatcatcctgctgctgctgctgatcatcgccctgatgctgtggaggctgcactggaggcggctgctgagcaaggccgagcggcgggtgctggaggaggagctgactgtgcacctgtctgtgcctggggacaccatcctgatcaacaaccggcccggcccccgggagcccccaccctaccaggagccccggccccggggcaaccccccccacagcgccccctgtgtgcccaacggcagcgcctacagcggggactacatggagcctgagaagccaggggcccccctgctgcccccaccaccccagaacagcgtgccccactatgcagaggccgacatcgtgaccctgcagggcgtgactggaggcaacacctatgctgtgcctgccctgcccccaggagctgtgggagatggccccccccgggtggacttccccaggagccggctgcgcttcaaggagaagctgggggagggccagtttggagaggtgcacctgtgtgaggtggacagcccccaggacctggtgtccctggacttccccctgaatgtgaggaagggccaccccctgctggtggccgtgaagatcctgcggccagatgccaccaagaatgccagaaatgacttcctgaaggaggtgaagatcatgagccggctgaaggaccccaacatcatccggctgctgggcgtgtgtgtgcaggatgaccccctgtgcatgatcacagactacatggagaatggagacctgaaccagttcctgagcgcccaccagctggaggacaaggctgctgagggcgcccctggagatggccaggccgcccagggccccaccatctcctaccccatgctgctgcacgtggccgcccagatcgccagcggcatgagatacctggccaccctgaactttgtgcaccgggacctggccaccaggaactgcctggtgggggagaacttcaccatcaagattgctgactttggcatgagcaggaacctgtatgctggggactactacagagtgcagggccgggctgtgctgcccatccgctggatggcctgggagtgcatcctgatgggcaagttcaccacagccagtgatgtgtgggccttcggcgtgaccctgtgggaggtgctgatgctgtgccgggcccagcccttcggccagctgacagatgagcaggtgattgaaaatgctggggagttcttccgggaccagggccggcaggtgtacctgagccggcccccagcctgcccccagggcctgtatgagctgatgctgcgctgctggagccgggagagcgagcagaggcctcccttcagccagctgcaccgcttcctggccgaggatgccctgaacacagtgtag

SEQ ID NO: 6926 - DNA, 672 bp, synthetic construct
  misc_feature 1..672: note = source = /note="Description of Artificial Sequence: Synthetic coding sequence"
  source 1..672: mol_type = other DNA
atgaagtttgtgccctgcctgctgctggtgaccctgagctgcctgggcaccctgggccaggccccccggcagaagcagggcagcactggagaggagttccacttccagacaggaggccgggacagctgcaccatgaggcccagcagcctgggccagggcgctggggaggtgtggctgcgggtggactgcaggaacacagaccagacctactggtgtgagtaccggggccagcccagcatgtgccaggcctttgctgctgaccccaagccctactggaaccaggccctgcaggagctgcggcggctgcaccacgcctgccagggcgcccctgtgctgcggcccagcgtgtgccgggaggccggcccccaggcccacatgcagcaggtgaccagcagcctgaagggcagccctgagcccaaccagcagcctgaggccggcacccccagcctgcggcccaaggccaccgtgaagctgacagaggccacccagctgggcaaggacagcatggaggagctgggcaaggccaagcccaccacccggcccacagccaagcccacccagcccggccccaggcctggaggaaatgaggaggccaagaagaaggcctgggagcactgctggaagcccttccaggccctgtgtgccttcctgatctccttcttccggggctag

SEQ ID NO: 6927 - DNA, 585 bp, synthetic construct
  misc_feature 1..585: note = source = /note="Description of Artificial Sequence: Synthetic coding sequence"
  source 1..585: mol_type = other DNA
atgaccatgaggcacaactggaccccagacctgagccccctgtgggtgctgctgctgtgtgcccacgtggtgaccctgctggtgcgggccacccctgtgtcccagaccaccacagctgccacagcctctgtgcgcagcaccaaggacccctgccccagccagccccctgtgtttcctgctgccaagcagtgcccagccctggaggtgacctggccagaggtggaggtgcccctgaatggcaccctgagcctgagctgtgtggcctgcagccgcttccccaacttcagcatcctgtactggctgggcaatggcagcttcatcgagcacctgcccggccgcctgtgggagggcagcaccagccgggagcggggcagcacaggcacccagctgtgcaaggccctggtgctggagcagctgaccccagccctgcacagcaccaacttcagctgtgtgctggtggaccctgagcaggtggtgcagagacatgtggtgctggcccagctgtgggccggcctgcgggccaccctgccccccacccaggaggccctgcccagcagccacagcagcccccagcagcagggctag

SEQ ID NO: 6928 - DNA, 777 bp, synthetic construct
  misc_feature 1..777: note = source = /note="Description of Artificial Sequence: Synthetic coding sequence"
  source 1..777: mol_type = other DNA
atgattgccatctctgctgtgtcctctgccctgctcttcagcctgctgtgtgaggccagcacagtggtgctgctgaacagcacagacagcagcccccccaccaacaacttcacagacatcgaggccgccctgaaggcccagctggacagcgctgacatccccaaggcccggaggaagcgctacatcagccagaatgacatgattgccatcctggactaccacaaccaggtgcggggcaaggtgtttcctcctgctgccaacatggagtacatggtgtgggatgagaacctggccaagtctgctgaggcctgggccgccacctgcatctgggaccacggccccagctacctgctgcgcttcctgggccagaacctgtctgtgaggacaggccgctaccgcagcatcctgcagctggtgaagccctggtatgatgaggtgaaggactatgccttcccctacccccaggactgcaacccccgctgccccatgcgctgcttcggccccatgtgcacccactacacccagatggtgtgggccaccagcaaccgcatcggctgtgccatccacacctgccagaacatgaatgtgtggggctctgtgtggaggagagctgtgtacctggtgtgcaactatgcccccaagggcaactggattggagaggccccctacaaggtgggcgtgccctgcagcagctgccccccatcctatggaggcagctgcacagacaacctgtgcttccctggggtgaccagcaactacctgtactggttcaagtag

SEQ ID NO: 6929 - DNA, 906 bp, synthetic construct
  misc_feature 1..906: note = source = /note="Description of Artificial Sequence: Synthetic coding sequence"
  source 1..906: mol_type = other DNA
atgctgcccctgaccatgacagtgctgatcctgctgctgctgcccaccggccaggccgcccccaaggatggagtgaccaggccagacagcgaggtgcagcaccagctgctgcccaaccccttccagcccggccaggagcagctgggcctgctgcagagctacctgaagggcctgggccgcacagaggtgcagctggagcacctgagccgggagcaggtgctgctgtacctgtttgccctgcatgactatgaccagagcggccagctggatggcctggagctgctgtccatgctgacagctgccctggcccctggggccgccaacagccccaccaccaaccctgtgatcctgattgtggacaaggtgctggagacccaggacctgaatggagatggcctgatgaccccagctgagctgatcaacttccctggggtggccctgcggcacgtggagcccggggagcccctggcccccagcccccaggagccccaggccgtgggccggcagagcctgctggccaagagccccctgcggcaggagacccaggaggcccctggcccccgggaggaggccaagggccaggtggaggcccggcgggagagcctggaccctgtgcaggagcccggcggccaggccgaggctgatggagatgtgcccggccccagaggagaggccgagggccaggccgaggccaagggagatgcccctggccccagaggagaggccggcggccaggccgaggccgagggagatgcccctggccccagaggagaggccggcggccaggccgaggccagagaaaatggagaggaggccaaggagctgcccggggagaccctggagagcaagaacacccagaatgactttgaggtgcacatcgtgcaggtggagaatgatgagatctag

SEQ ID NO: 6930 - DNA, 969 bp, synthetic construct
  misc_feature 1..969: note = source = /note="Description of Artificial Sequence: Synthetic coding sequence"
  source 1..969: mol_type = other DNA
atgaagaccctggccggcctggtgctgggcctggtgatctttgatgctgctgtgacagcccccaccctggagagcatcaactatgacagcgagacctatgatgccaccctggaggacctggacaacctgtacaactatgagaacatccctgtggacaaggtggagattgagatcgccaccgtgatgcccagcggcaaccgggagctgctgaccccaccaccccagcctgagaaggcccaggaggaggaggaggaggaggagagcaccccccggctgattgatggcagcagcccccaggagcctgagttcaccggggtgctgggcccccacaccaatgaagacttccccacctgcctgctgtgcacctgcatcagcaccaccgtgtactgtgatgaccacgagctggatgccatcccccccctgcccaagaacacagcctacttctacagccgcttcaaccgcatcaagaagatcaacaagaatgactttgccagcctgagtgacctgaagagaattgacctgaccagcaacctgatcagcgagattgatgaagatgccttcaggaagctgccccagctgcgggagctggtgctgcgggacaacaagatccggcagctgcctgagctgcccaccaccctgaccttcatcgacatcagcaacaaccggctgggcaggaagggcatcaagcaggaggccttcaaggacatgtatgacctgcaccacctgtacctgacagacaacaacctggaccacatccccctgcccctgcctgagaacctgcgggccctgcacctgcagaacaacaacatcctggagatgcatgaggacaccttctgcaatgtgaagaacctgacctacatcaggaaggccctggaggacatccggctggatggcaaccccatcaacctgagcaagaccccccaggcctacatgtgcctgccccggctgcctgtgggcagcctggtgtag

SEQ ID NO: 6931 - DNA, 618 bp, synthetic construct
  misc_feature 1..618: note = source = /note="Description of Artificial Sequence: Synthetic coding sequence"
  source 1..618: mol_type = other DNA
atggtgaacctggccgccatggtgtggaggcggctgctgaggaagcgctgggtgctggccctggtgtttggcctgagcctggtgtacttcctgagcagcaccttcaagcaggaggagagagctgtgcgggacaggaacctgctgcaggtgcatgaccacaaccagcccatcccctggaaggtgcagttcaacctgggcaacagcagccggcccagcaaccagtgcaggaacagcatccagggcaagcacctgatcacagatgagctgggctacgtgtgtgagaggaaggacctgctggtgaatggctgctgcaatgtgaatgtgcccagcaccaagcagtactgctgtgatggctgctggcccaacggctgctgcagcgcctatgagtactgtgtgtcctgctgcctgcagcccaacaagcagctgctgctggagcgcttcctgaacagagctgctgtggccttccagaacctcttcatggctgtggaggaccactttgagctgtgcctggccaagtgcaggaccagcagccagagcgtgcagcacgagaacacctacagagaccccatcgccaagtactgctatggagagagccccccagagctgtttcctgcctag

SEQ ID NO: 6932 - DNA, 3057 bp, synthetic construct
  misc_feature 1..3057: note = source = /note="Description of Artificial Sequence: Synthetic coding sequence"
  source 1..3057: mol_type = other DNA
atggtgagccacttcatgggcagcctgtctgtgctgtgcttcctgctgctgctgggcttccagtttgtgtgcccccagcccagcacccagcacaggaaggtgccccagaggatggctgctgagggcgccccagaagatgatggcggcggcggggcccctggggtgtggggcgcctggggcccctggagcgcctgcagccgcagctgcagcggcggcgtgatggagcagacccggccctgcctgcccaggagctaccgcctgcggggcggccagaggcctggggccccagcccgggcctttgctgaccacgtggtgtctgctgtgaggacctctgtgcccctgcacaggagcagagatgagaccccagccctggccggcacagatgccagccggcagggccccaccgtgctgcggggcagccgccacccccagccccagggcctggaggtgactggagaccggcgcagcaggacccggggcaccatcggccctgggaagtatggctacggcaaggccccctacatcctgcccctgcagacagacacagcccacaccccccagaggctgcggcggcagaagctgagcagccgccacagccgcagccagggcgccagcagcgcccggcacggctacagcagccctgcccaccaggtgccccagcacggccccctgtaccagagcgacagcggccccaggagcggcctgcaggccgctgaggcccccatctaccagctgcccctgacccatgaccagggctacccagctgccagcagcctcttccacagccctgagaccagcaacaaccacggcgtgggcacccacggggccacccagagcttcagccagcctgcccggagcacagccatcagctgcatcggggcctaccggcagtacaagctgtgcaacaccaacgtgtgcccagagagcagccgcagcatccgggaggtgcagtgtgccagctacaacaacaagcccttcatgggccgcttctatgagtgggagccctttgctgaggtgaagggcaacagaaaatgtgagctgaactgccaggccatgggctaccgcttctacgtgcggcaggccgagaaggtgattgatggcaccccctgtgaccagaatggaacagccatctgtgtgtctggccagtgcaagagcatcggctgtgatgactacctgggcagtgacaaggtggtggacaagtgtggggtgtgtggcggggacaacacaggctgccaggtggtgtctggagtcttcaagcacgccctgaccagcctgggctaccaccgggtggtggagatccctgagggcgccaccaagatcaacatcacagagatgtacaagagcaacaactacctggccctgcggagccgcagcggccgcagcatcatcaatggaaactgggccatcgacaggcctgggaagtatgaaggaggcggcaccatgttcacctacaagaggcccaatgagatcagcagcacagctggggagagcttcctggccgagggccccaccaatgagatcctggatgtgtacatgatccaccagcagcccaaccctggggtgcactatgaatatgtgatcatgggcaccaatgccatcagcccccaggtgcccccccacagaagacctggagagcccttcaacggccagatggtgacagagggccgcagccaggaggagggggagcagaagggcagaaatgaggagaaggaggacctgcggggggaggcccctgagatgttcaccagcgagagcgcccagaccttccctgtgcgccacccagaccgcttcagcccccacaggccagacaacctggtgcccccagccccccagcccccccggcgcagccgggaccacaactggaagcagctgggcaccacagagtgcagcaccacctgtgggaagggcagccagtaccccatcttccgctgtgtgcacaggagcacccatgaggaggcccctgagagctactgtgacagctccatgaagcccaccccagaggaggagccctgcaacatcttcccctgcccagccttctgggacatcggggagtggagcgaatgttccaagacctgtggcctgggcatgcagcaccggcaggtgctgtgccggcaggtgtatgccaacagaagcctgactgtgcagccctaccgctgccagcacctggagaagccagagaccaccagcacctgccagctgaagatctgcagcgagtggcagatcagaacagactggaccagctgcagcgtgccctgtggggtgggccagaggaccagagatgtgaagtgtgtgagcaacattggagatgtggtggatgatgaggagtgcaacatgaagctgcggcccaatgacatcgagaactgtgacatgggcccctgtgccaagtcctggttcctgacagagtggagcgagcgctgcagcgcagaatgtggggccggcgtgaggaccaggtctgtggtgtgcatgaccaaccacgtgagcagcctgcccctggagggctgcggcaacaacagacctgctgaggccaccccctgtgacaatggcccctgcaccgggaaggtggagtggtttgctggctcctggagccagtgcagcattgaatgtggcagcggcacccagcagcgggaggtgatctgtgtgaggaagaatgctgacacctttgaggtgctggaccccagcgagtgcagcttcctggagaagccacccagccagcagagctgccacctgaagccctgtggggccaagtggttcagcacagagtggagcatgtgcagcaagagctgccagggcggcttccgggtgcgggaggtgcgctgcctgagtgatgacatgaccctgagcaacctgtgtgacccccagctgaagccagaggagcgggagagctgcaacccccaggactgtgtgcctgaggtggatgagaactgcaaggacaagtactacaactgcaatgtggtggtgcaggcccggctgtgtgtgtacaactactacaagacagcctgctgtgccagctgcaccagggtggccaaccggcagacaggcttcctgggcagcaggtag

SEQ ID NO: 6933 - DNA, 1503 bp, synthetic construct
  misc_feature 1..1503: note = source = /note="Description of Artificial Sequence: Synthetic coding sequence"
  source 1..1503: mol_type = other DNA
atgaagtgcacagcccgggagtggctgcgggtgaccaccgtgctcttcatggcccgggccatcccagccatggtggtgcccaatgccaccctgctggagaagctgctggagaagtacatggatgaagatggagagtggtggatcgccaagcagaggggcaagagggccatcacagacaatgacatgcagagcatcctggacctgcacaacaagctgcggagccaggtgtaccccacagccagcaacatggagtacatgacctgggatgtggagctggagaggtctgctgagagctgggccgagagctgcctgtgggagcacggccctgccagcctgctgcccagcatcggccagaacctgggcgcccactggggccgctacagaccacccaccttccacgtgcagagctggtatgatgaggtgaaggacttctcctacccctatgaacatgagtgcaacccctactgccccttccgctgcagcggccctgtgtgcacccactacacccaggtggtgtgggccaccagcaacagaattggctgtgccatcaacctgtgccacaacatgaacatctggggccagatctggcccaaggctgtgtacctggtgtgcaactacagccccaagggcaactggtggggccacgccccctacaagcacggccggccctgcagcgcctgcccccccagctttggaggcggctgccgggagaacctgtgctacaaggagggcagtgaccgctactacccaccccgggaggaggagaccaatgaaattgagcggcagcagagccaggtgcatgacacccacgtgaggaccaggagtgatgacagcagcagaaatgaagtcatcagcgcccagcagatgagccagatcgtgtcctgtgaggtgcggctgcgggaccagtgcaagggcaccacctgcaacagatatgagtgcccagctggctgcctggacagcaaggccaaggtgattggctctgtgcactatgagatgcagagcagcatctgcagagctgccatccactacggcatcatcgacaatgatggcggctgggtggacatcacccggcagggcaggaagcactacttcatcaagagcaacagaaatggcatccagaccatcggcaagtaccagagcgccaacagcttcaccgtgtccaaggtgacagtgcaggccgtgacctgtgagaccaccgtggagcagctgtgccccttccacaagccagccagccactgcccccgggtgtactgccccaggaactgcatgcaggccaacccccactacgcccgggtgattggcaccagggtgtacagcgacctgagcagcatctgcagagctgctgtgcatgctggggtggtgagaaatcatggaggctacgtggatgtgatgcctgtggacaagaggaagacctacatcgccagcttccagaatggcatcttcagcgagagcctgcagaaccccccaggcggcaaggccttccgggtgtttgctgtggtgtag

SEQ ID NO: 6934 - DNA, 2070 bp, synthetic construct
  misc_feature 1..2070: note = source = /note="Description of Artificial Sequence: Synthetic coding sequence"
  source 1..2070: mol_type = other DNA
atgaagtttggagctgtgaccagaattggaggcccccccctgggcaaccagagccccagcagctgcagcctgctgcacgagaaggacccccccaccaccagcggcccccagacagaccagcccaagaagcacctgaccaacttcaagagcgccaccaggagagtggcccggacccagtggctgacagctgaccggcagacctgggccagcatcagctctgtgccctgggcccagaccatcagcgagaagaagccaggcggcagcctgtgggagaccaggagcagcccccccaccacagctggaacagaggaggccatgaacaccaccagcctgctggccccagctgctgagatcatggccaccccaggcagccccagccaggccagccccaccctgggcgccttcacccacggcacccagacccccagccccaccaaggccacagccccccgctacccccagacaggagacctgtctgctgagtggcccttcaccgctggggaggagcctgtgctggtgccccggccccaccaggtgtcccgggtgcgcagcagctgctgcctgagccccatcctgtgcagccctgccatgattgccttcctgctgacctctgtgctgatgatcccccatgctgggggccaccccctggacaccccccacctgccccaggagctgcccccaggcctgcccaacaacatcaacatcaccttcttcagcggcatgttcaagaatgtggagagcgtggccgagatctttgactgcctgggcccccacttcacctggctgcaggccgtgttcaccaacttccctgtgctgatccagtttgtgaatggcatgaagtgtgtggccggcctgtgcccccgggactttgaagattatggctgcacctgccgctttgagatggagggcctgcctgtggatgaaagtgacagctgctgcttccagcaccggcgctgctatgaggaggccgctgagatggactgcctgcaggaccctgccaagctgagcacagaggtgaactgtgtgtccaagaagatcatctgtgagagcaaggacaactgtgagcacctgctgtgcacctgtgacaaggccgccattgaatgtctggcccggagcagcctgaacagcagcctgaacctgctggacaccagcttctgcctggcccagaccccagagaccaccatcaaggaggacctgaccaccctgctgccccgggtggtgcctgtggagcccacagacaccagcctgacagccctgagcggggaggtggccgctgagacagaagctgacaggctcatcaccctgagcaagaagaaggccggccatgaccaggagggcgtgggcgccgcccgggccaccagccccccaggcagcgctgagatcgtggccaccagggtgacagccaagatcgtgaccctggtgcctgctggcatcaagagcctgggcctggccgtgtcctctgtggagaatgaccctgaggagaccacagagaaggcctgtgaccgcttcaccttcctgcacctgggcagcggggacaacatgcaggtgatgccccagctgggggagatgctgttctgcctgaccagccgctgcccagaggagtttgagagctatggctgctactgcggccaggagggccgcggggagcccagagatgacctggaccgctgctgcctgagccaccactgctgcctggagcaggtgcggcggctgggctgcctgctggagcggctgccctggagccctgtggtgtgtgtggaccacacccccaagtgtggcggccagagcctgtgtgagaagctgctgtgtgcctgtgaccagacagctgctgagtgcatgaccagcgccagcttcaaccagagcctgaagagccccagccggctgggctgccccggccagcctgctgcctgtgaggacagcctgcaccctgtgcctgctgcccccaccctgggcagcagcagcgaggaggacagcgaggaggaccccccccaggaggacctgggccgggccaagcgcttcctgaggaagagcctgggccccctgggcatcggccccctgcatggaagatag

SEQ ID NO: 6935 - DNA, 1359 bp, synthetic construct
  misc_feature 1..1359: note = source = /note="Description of Artificial Sequence: Synthetic coding sequence"
  source 1..1359: mol_type = other DNA
atggagctggccctgcggcgcagccctgtgccccgctggctgctgctgctgcccctgctgctgggcctgaatgctggagctgtgattgactggcccacagaggagggcaaggaggtgtgggactatgtgacagtgaggaaggatgcctacatgttctggtggctgtactatgccaccaacagctgcaagaacttcagcgagctgcccctggtgatgtggctgcagggcggccctgggggcagcagcactggatttggaaactttgaggagatcggccccctggacagcgacctgaagcccaggaagaccacctggctgcaggccgccagcctgctgtttgtggacaaccctgtgggcaccggcttctcctatgtgaatggcagcggggcctatgccaaggacctggccatggtggccagtgacatgatggtgctgctgaagaccttcttcagctgccacaaggagttccagacagtgcccttctacatcttcagcgagagctatggaggcaagatggccgccggcatcggcctggagctgtacaaggccatccagaggggcaccatcaagtgcaactttgctggggtggccctgggggacagctggatcagccctgtggacagcgtgctgtcctggggcccctacctgtacagcatgagcctgctggaggacaagggcctggccgaggtgtccaaggtggccgagcaggtgctgaatgctgtgaacaagggcctgtaccgggaggccacagagctgtggggcaaggccgagatgatcatcgagcagaacacagatggagtgaacttctacaacatcctgaccaagagcacccccaccagcaccatggagagcagcctggagttcacccagagccacctggtgtgcctgtgccagagacatgtgcgccacctgcagagagatgccctgagccagctgatgaatggccccatcaggaagaagctgaagatcatccctgaggaccagagctggggcggccaggccaccaacgtgtttgtgaacatggaggaggacttcatgaagcctgtgatcagcatcgtggatgagctgctggaggccggcatcaacgtgacagtgtacaacggccagctggacctgattgtggacaccatgggccaggaggcctgggtgaggaagctgaagtggccagagctgcccaagttcagccagctgaagtggaaggccctgtacagcgaccccaagagcctggagaccagcgcctttgtgaagagctacaagaacctggccttctactggatcctgaaggccggccacatggtgcccagcgaccagggcgacatggccctgaagatgatgaggctggtgacccagcaggagtag

SEQ ID NO: 6936 - DNA, 1395 bp, synthetic construct
  misc_feature 1..1395: note = source = /note="Description of Artificial Sequence: Synthetic coding sequence"
  source 1..1395: mol_type = other DNA
atggtgcggctggccgctgagctgctgctgctgctgggcctgctgctgctgaccctgcacatcaccgtgctgcggggcagcggggctgctgatggcccagatgctgctgctggaaatgccagccaggcccagctgcagaacaacctgaatgtgggcagtgacaccaccagcgagaccagcttcagcctgagcaaggaggccccccgggagcacctggaccaccaggccgcccaccagcccttcccccggccccgcttccggcaggagaccggccaccccagcctgcagagggacttccccaggagcttcctgctggacctgcccaacttcccagacctgagcaaggctgacatcaatggccagaaccccaacatccaggtgaccatcgaggtggtggatggcccagattctgaggccgacaaggaccagcaccctgagaacaagcccagctggagcgtgcccagcccagactggagggcctggtggcagaggagcctgagcctggcccgggccaacagcggggaccaggactacaagtatgacagcaccagtgatgacagcaacttcctgaaccccccccggggctgggaccacacagcccctggccacaggacctttgagaccaaggaccagccagaatatgacagcacagatggagagggggactggagcctgtggagcgtgtgcagcgtgacctgtggaaatggaaaccagaagaggaccaggagctgtggctacgcctgcacagccacagagagcaggacctgtgaccggcccaactgccccggcatcgaggacaccttcagaacagctgccacagaggtgtccctgctggccggcagcgaggagttcaatgccaccaagctgtttgaggtggacacagacagctgtgagcgctggatgagctgcaagtctgagttcctgaagaagtacatgcacaaggtgatgaatgacctgcccagctgcccctgcagctaccccacagaggtggcctacagcacagctgacatctttgaccgcatcaagaggaaggacttccgctggaaggatgccagcggccccaaggagaagctggagatctacaagcccacagcccgctactgcatccgctccatgctgagcctggagagcaccaccctggccgcccagcactgctgctatggagacaacatgcagctgatcacccggggcaagggggccggcacccccaacctgatcagcacagagttctctgctgagctgcactacaaggtggatgtgctgccctggatcatctgcaagggggactggagccgctacaatgaggcccggccccccaacaacggccagaagtgcacagagagccccagtgatgaggactacatcaagcagttccaggaggcccgggagtactag

SEQ ID NO: 6937 - DNA, 1536 bp, synthetic construct
  misc_feature 1..1536: note = source = /note="Description of Artificial Sequence: Synthetic coding sequence"
  source 1..1536: mol_type = other DNA
atgctggtggatggccccagcgagaggcctgccctgtgcttcctgctgctggccgtggccatgtccttcttcggcagcgccctgagcattgatgagacccgggcccacctgctgctgaaggagaagatgatgaggctgggcggccgcctggtgctgaacaccaaggaggagctggccaatgaaaggctgatgaccctgaagattgctgagatgaaggaggccatgaggaccctcatcttccccccatccatgcacttcttccaggccaagcacctgattgaaagaagccaggtgttcaacatcctgaggatgatgcccaagggagctgccctgcacctgcatgacatcggcatcgtgaccatggactggctggtgagaaatgtgacctaccggccccactgccacatctgcttcaccccccggggcatcatgcagttccgctttgcccaccccaccccccggcccagcgagaagtgcagcaagtggatcctgctggaggactacaggaagagggtgcagaatgtgacagaatttgatgacagcctgctgaggaacttcaccctggtgacccagcaccctgaggtgatctacaccaaccagaatgtggtgtggagcaagtttgagaccatcttcttcaccatcagcggcctcatccactacgcccctgtgttccgggactatgtgttccgctccatgcaggagttctatgaagataatgtgctgtacatggagatccgggcccggctgctgcctgtgtatgagctgagcggggagcaccatgatgaggagtggagcgtgaagacctaccaggaggtggcccagaagtttgtggagacccaccctgagttcatcggcatcaagatcatctacagcgaccacaggagcaaggatgtggccgtgattgctgagagcatccgcatggccatgggcctgcgcatcaagttccccaccgtggtggccggctttgacctggtgggccacgaggacaccggccacagcctgcatgactacaaggaggccctgatgatcccagccaaggatggagtgaagctgccctacttcttccacgccggggagacagactggcagggcaccagcattgacaggaacatcctggatgccctgatgctgaacaccacccgcatcggccacggctttgccctgagcaagcaccctgctgtgaggacctacagctggaagaaggacatccccatcgaggtgtgccccatcagcaaccaggtgctgaagctggtgtctgacctgaggaaccaccctgtggccaccctgatggccaccggccaccccatggtgatcagcagtgatgatcctgccatgtttggagccaagggcctgtcctatgacttctatgaggtgttcatgggcatcggcggcatgaaggctgacctgcggaccctgaagcagctggccatgaacagcatcaagtacagcaccctgctggagagcgagaagaacaccttcatggagatctggaagaagcgctgggacaagttcatcgcagatgtggccaccaagtag

SEQ ID NO: 6938 - DNA, 777 bp, synthetic construct
  misc_feature 1..777: note = source = /note="Description of Artificial Sequence: Synthetic coding sequence"
  source 1..777: mol_type = other DNA
atgaagcagatcctgcacccagccctggagaccacagccatgaccctcttccctgtgctgctcttcctggtggccggcctgctgcccagcttccctgccaatgaagacaaggaccctgccttcaccgccctgctgaccacccagacccaggtgcagcgggagatcgtgaacaagcacaatgagctgcggcgggctgtgagccccccagccaggaacatgctgaagatggagtggaacaaggaggccgccgccaatgcccagaagtgggccaaccagtgcaactaccgccacagcaaccccaaggacaggatgaccagcctgaagtgtggagaaaatctctacatgagcagcgccagcagctcctggagccaggccatccagagctggtttgatgagtacaatgactttgattttggagtgggccccaagaccccaaatgctgtggtgggccactacacccaggtggtgtggtacagcagctacctggtgggctgtggaaatgcctactgccccaaccagaaggtgctgaagtactactacgtgtgccagtactgcccagctggcaactgggccaaccggctgtatgtgccctatgagcagggcgccccctgtgccagctgcccagacaactgtgatgatggcctgtgcaccaacggctgcaagtatgaagatctctacagcaactgcaagagcctgaagctgaccctgacctgcaagcaccagctggtgcgggacagctgcaaggccagctgcaactgcagcaacagcatctactag

SEQ ID NO: 6939 - DNA, 714 bp, synthetic construct
  misc_feature 1..714: note = source = /note="Description of Artificial Sequence: Synthetic coding sequence"
  source 1..714: mol_type = other DNA
atggtgaccccacctcctcctcctgtgttcagcctgctgaagatcagccagagaattgtgtgcctggtgctggacaagagcggctccatgggcggcaaggaccggctgaacaggatgaaccaggccgccaagcacttcctgctgcagacagtggagaatggctcctgggtgggcatggtgcactttgacagcacagccaccatcgtgaacaagctgatccagatcaagagcagtgatgaaagaaacaccctgatggccggcctgcccacctaccccctgggcggcaccagcatctgcagcggcatcaagtatgccttccaggtgattggagagctgcacagccagctggatggcagcgaggtgctgctgctgacagatggagaggacaacacagccagcagctgcattgatgaggtgaagcagagcggggccatcgtgcacttcatcgccctgggccgggctgctgatgaggccgtcatcgagatgagcaagatcaccggcggcagccacttctacgtgtctgatgaggcccagaacaacggcctgattgatgccttcggggccctgaccagcggcaacacagacctgagccagaagagcctgcaggtgcgggtgctgatcccctgggtgttcatgttcacctttgccaccaggaagaaccacctggtggtgatcagctttgagttccacatcttcctgaaggtgaacttctag

SEQ ID NO: 6940 - DNA, 459 bp, synthetic construct
  misc_feature 1..459: note = source = /note="Description of Artificial Sequence: Synthetic coding sequence"
  source 1..459: mol_type = other DNA
atggacaacgtgcagcccaagatcaagcaccggcccttctgcttctctgtgaagggccacgtgaagatgctgcggctggccctgactgtgacctccatgaccttcttcatcatcgcccaggcccctgagccctacatcgtcatcactggatttgaggtgaccgtcatcctcttcttcatcctgctgtatgtgctgcggctggaccggctgatgaagtggctgttctggcccctgctggacatcatcaacagcctggtgaccaccgtcttcatgctgattgtgtctgtgctggccctgatccctgagaccaccaccctgactgtgggcggcggcgtgtttgccctggtgacagctgtgtgctgcctggctgatggagccctgatctacaggaagctgctcttcaaccccagcggcccctaccagaagaagcctgtgcatgagaagaaggaggtgctgtag

SEQ ID NO: 6941 - DNA, 3744 bp, synthetic construct
  misc_feature 1..3744: note = source = /note="Description of Artificial Sequence: Synthetic coding sequence"
  source 1..3744: mol_type = other DNA
atgctggccagcagcagccgcatccgggccgcctggacccgggccctgctgctgcccctgctgctggccggccctgtgggctgcctgagccggcaggagctgttcccctttggacctggccagggcgacctggagctggaggatggagatgactttgtgtccccagccctggagctgagcggggccctgcgcttctatgacagaagtgacattgatgctgtgtatgtgaccaccaacggcatcatcgccaccagcgagcccccagccaaggagagccaccctggcctcttcccccccacctttggagctgtggcccccttcctggccgacctggacaccacagatggcctgggcaaggtgtactaccgggaggacctgagccccagcatcacccagagagctgctgaatgtgtgcaccggggcttccctgagatctccttccagcccagcagcgctgtggtggtgacctgggagagcgtggccccctaccagggccccagccgggaccctgaccagaagggcaagaggaacaccttccaggccgtgctggccagcagtgacagcagcagctatgccatcttcctgtacccagaagatggcctgcagttccacaccaccttcagcaagaaggagaacaaccaggtgcctgctgtggtggccttcagccagggctctgtgggcttcctgtggaagagcaatggagcctacaacatctttgccaatgaccgggagagcgtggagaacctggccaagagcagcaacagcggccagcagggcgtgtgggtgtttgaaattggcagccctgccaccaccaacggggtggtgcctgcagatgtgatcctgggcacagaagatggagcagaatatgatgatgaagatgaggactatgacctggccaccacccggctgggcctggaggatgtgggcaccacccccttctcctacaaggccctgcggcggggcggcgctgacacctacagcgtgcccagcgtgctgagccccaggagagctgccacagagcggcccctgggccccccaacagagaggaccaggagcttccagctggccgtggagaccttccaccagcagcacccccaggtgattgatgtggatgaggtggaggagaccggggtggtgttctcctacaacacagacagccggcagacctgtgccaacaacagacaccagtgcagcgtgcatgctgagtgccgggactatgccaccggcttctgctgcagctgtgtggccggctacacaggaaatggccggcagtgtgtggccgagggcagcccccagagggtgaatggcaaggtgaagggccgcatctttgtgggcagcagccaggtgcccatcgtgtttgagaacacagacctgcacagctatgtggtgatgaaccacggccgcagctacacagccatcagcaccatccctgagaccgtgggctacagcctgctgcccctggcccctgtgggcggcatcatcggctggatgtttgctgtggagcaggacggcttcaagaatggcttcagcatcaccggcggggagttcacccggcaggccgaggtgacctttgtgggccaccctggcaacctggtgatcaagcagcgcttcagcggcattgatgaacatggccacctgaccatcgacacagagctggagggccgggtgccccagatccccttcggcagctctgtgcacatcgagccctacacagagctgtaccactacagcaccagcgtcatcaccagcagcagcacccgggagtacacagtgacagagcctgagagagatggagccagccccagccgcatctacacctaccagtggaggcagaccatcaccttccaggagtgtgtgcatgatgacagcaggcctgccctgcccagcacccagcagctgtctgtggacagcgtgtttgtgctgtacaaccaggaggagaagatcctgcgctatgccctgagcaacagcatcggccctgtgcgggagggcagcccagatgccctgcagaacccctgctacatcggcacccacggctgtgacaccaatgctgcctgcaggcctggccccaggacccagttcacctgtgagtgcagcatcggcttcagaggagatggccgcacctgctatgacattgatgaatgttctgagcagcccagcgtgtgtggcagccacaccatctgcaacaaccaccctggcaccttccgctgtgaatgtgtggagggctaccagttcagtgatgagggcacctgtgtggccgtggtggaccagaggcccatcaactactgtgagaccggcctgcacaactgtgacatcccccagagggcccagtgcatctacacaggaggcagcagctacacctgcagctgcctgcccggcttctctggagatggccaggcctgccaggatgtggatgagtgccagcccagccgctgccacccagatgccttctgctacaacaccccaggcagcttcacctgccagtgcaagccaggctaccagggagatggcttccgctgtgtgcctggagaggtggagaagacccgctgccagcacgagcgggagcacatcctgggcgccgccggggccacagacccccagaggcccatccccccaggcctgtttgtgcctgaatgtgatgcccacggccactacgcccccacccagtgccacggcagcacaggctactgctggtgtgtggacagagatggccgggaggtggagggcaccaggaccaggcctggcatgaccccaccctgcctgagcacagtggccccacccatccaccagggccctgctgtgcccacagctgtgatccccctgcccccaggcacccacctgctgtttgcccagacaggcaagattgaaaggctgcccctggagggcaacaccatgaggaagacagaggccaaggccttcctgcacgtgcctgccaaggtgatcatcggcctggcctttgactgtgtggacaagatggtgtactggacagacatcacagagcccagcatcggccgggccagcctgcacggcggggagcccaccaccatcatccggcaggacctgggcagccctgagggcattgctgtggaccacctgggcaggaacatcttctggacagacagcaacctggacagaattgaggtggccaagctggatggcacccagaggagagtgctgtttgaaacagacctggtgaacccccggggcatcgtgacagattctgtgcggggcaacctgtactggacagactggaacagagacaaccccaagattgagaccagctacatggatggcaccaacagacgcatcctggtgcaggatgacctgggcctgcccaacggcctgacctttgatgccttcagcagccagctgtgctgggtggatgctggcaccaacagagctgagtgcctgaaccccagccagcccagcaggaggaaggccctggagggcctgcagtacccctttgctgtgaccagctatggcaagaacctgtacttcacagactggaagatgaacagcgtggtggccctggacctggccatcagcaaggagacagatgccttccagccccacaagcagacccggctgtatggcatcaccacagccctgagccagtgcccccagggccacaactactgcagcgtgaacaacggcggctgcacccacctgtgcctggccaccccaggcagcaggacctgccgctgcccagacaacaccctgggcgtggactgcatcgagcagaagtag

SEQ ID NO: 6942 - DNA, 525 bp, synthetic construct
  misc_feature 1..525: note = source = /note="Description of Artificial Sequence: Synthetic coding sequence"
  source 1..525: mol_type = other DNA
atgctgaggacagagagctgccggcccaggagccctgctggccaggtggccgccgccagccccctgctgctgctgctgctgctgctggcctggtgtgccggggcctgccgcggggcccccatcctgccccagggcctgcagcctgagcagcagctgcagctgtggaatgaaattgatgacacctgcagcagcttcctgagcattgacagccagccccaggccagcaatgccctggaggagctgtgcttcatgatcatgggcatgctgcccaagccccaggagcaggatgagaaggacaacaccaagcgcttcctgttccactacagcaagacccagaagctgggcaagagcaatgtggtgtcctctgtggtgcaccccctgctgcagctggtgccccacctgcatgaaagaaggatgaagcgcttccgggtggatgaggagttccagagcccctttgccagccagagccggggctacttcctgttccggcccagaaatggccgccgctctgctggcttcatctag

SEQ ID NO: 6943 - DNA, 1218 bp, synthetic construct
  misc_feature 1..1218: note = source = /note="Description of Artificial Sequence: Synthetic coding sequence"
  source 1..1218: mol_type = other DNA
atggacaccatcttcctgtggagcctgctgctgctcttcttcggcagccaggccagccgctgcagcgcccagaagaacacagaatttgctgtggacctgtaccaggaggtgtccctgagccacaaggacaacatcatcttcagccccctgggcatcaccctggtgctggagatggtgcagctgggcgccaagggcaaggcccagcagcagatccggcagaccctgaagcagcaggagaccagcgctggggaggagttctttgtgctgaagagcttcttcagcgccatcagcgagaagaagcaggagttcaccttcaacctggccaatgccctgtacctgcaggagggcttcaccgtgaaggagcagtacctgcacggcaacaaggagttcttccagagcgccatcaagctggtggacttccaggatgccaaggcctgtgccgagatgatcagcacctgggtggagaggaagacagatggcaagatcaaggacatgttttctggagaggagtttggccccctgacccggctggtgctggtgaatgccatctacttcaagggggactggaagcagaagttcaggaaggaggacacccagctgatcaacttcaccaagaagaatggcagcacagtgaagatccccatgatgaaggccctgctgcggaccaagtatggctacttcagcgagagcagcctgaactaccaggtgctggagctgagctacaagggagatgagttcagcctcatcatcatcctgcctgctgagggcatggacatcgaggaggtggagaagctgatcacagcccagcagatcctgaagtggctgtctgagatgcaggaggaggaggtggagatcagcctgccccgcttcaaggtggagcagaaggtggacttcaaggatgtgctgtacagcctgaacatcacagagatcttcagcggcggctgtgacctgagcggcatcacagacagcagcgaggtgtatgtgtcccaggtgacccagaaggtgttctttgagatcaatgaagatggcagcgaggccgccaccagcacaggcatccacatccctgtgatcatgagcctggcccagagccagttcatcgccaaccaccccttcctgttcatcatgaagcacaaccccacagagagcatcctcttcatgggccgggtgaccaacccagacacccaggagatcaagggccgggacctggacagcctgtag

SEQ ID NO: 6944 - DNA, 3687 bp, synthetic construct
  misc_feature 1..3687: note = source = /note="Description of Artificial Sequence: Synthetic coding sequence"
  source 1..3687: mol_type = other DNA
atgaagggggcccggctgtttgtgctgctgagcagcctgtggagcggcggcatcggcctgaacaacagcaagcacagctggaccatcccagaagatggcaacagccagaagaccatgcccagcgcctctgtgccccccaacaagatccagagcctgcagatcctgcccaccaccagggtgatgtctgctgagatcgccaccaccccagaggcccggaccagcgaggacagcctgctgaagagcaccctgccccccagcgagaccagcgccccagctgagggcgtgaggaaccagaccctgaccagcacagagaaggccgagggcgtggtgaagctgcagaacctgaccctgcccaccaatgccagcatcaagttcaaccctggagctgagagcgtggtgctgagcaacagcaccctgaagttcctgcagagctttgccaggaagagcaatgagcaggccaccagcctgaacacagtgggcggcaccggcggcattggaggagtgggcggcactggaggagtgggcaacagagccccccgggagacctacctgagcagaggagacagcagcagcagccagaggacagactaccagaagagcaactttgagaccacccggggcaagaactggtgtgcctacgtgcacacccggctgagccccaccgtcatcctggacaaccaggtgacctacgtgcctgggggcaagggcccctgtggctggacaggaggcagctgcccccagaggagccagaagatcagcaaccctgtgtacaggatgcagcacaagatcgtgaccagcctggactggcgctgctgccccggctacagcggccccaagtgccagctgcgggcccaggagcagcagagcctcatccacaccaaccaggccgagagccacacagctgtgggccggggcgtggccgagcagcagcagcagcagggctgtggggaccctgaggtgatgcagaagatgacagaccaggtgaactaccaggccatgaagctgaccctgctgcagaagaagattgacaacatcagcctgactgtgaatgatgtgaggaacacctacagcagcctggagggcaaggtgtctgaggacaagagccgggagttccagagcctgctgaagggcctgaagagcaagagcatcaacgtgctgatccgggacatcgtgcgggagcagttcaagatcttccagaatgacatgcaggagaccgtggcccagctgttcaagacagtgagcagcctgtctgaggacctggagagcacccggcagatcatccagaaggtgaatgaatctgtggtgtccattgctgcccagcagaagtttgtgctggtgcaggagaaccggcccaccctgacagacatcgtggagctgaggaaccacatcgtgaatgtgcggcaggagatgaccctgacctgtgagaagcccatcaaggagctggaggtgaagcagacccacctggagggcgccctggagcaggagcacagccgcagcatcctgtactatgagagcctgaacaagaccctgagcaagctgaaggaggtgcatgagcagctgctgagcacagagcaggtgtctgaccagaagaatgccccagctgctgagagcgtgagcaacaacgtgacagagtacatgagcaccctgcacgagaacatcaagaagcagagcctgatgatgctgcagatgtttgaggacctgcacatccaggagagcaagatcaacaacctgactgtgtccctggagatggagaaggagagcctgcggggagaatgtgaggacatgctgagcaagtgcagaaatgacttcaagttccagctgaaggacacagaggagaacctgcacgtgctgaaccagaccctggccgaggtgctcttccccatggacaacaagatggacaagatgtctgagcagctgaatgacctgacctatgacatggagatcctgcagcccctgctggagcagggcgccagcctgcggcagaccatgacctatgagcagcccaaggaggccatcgtcatcaggaagaagattgagaacctgaccagcgctgtgaacagcctgaacttcatcatcaaggagctgaccaagaggcacaacctgctgagaaatgaggtgcagggcagagatgatgccctggagcggcgcatcaatgaatatgccctggagatggaggatggcctgaacaagaccatgaccatcatcaacaatgccatcgacttcatccaggacaactatgccctgaaggagaccctgagcaccatcaaggacaacagcgagatccaccacaagtgcaccagtgacatggagaccatcctgaccttcatcccccagttccaccggctgaatgacagcatccagaccctggtgaatgacaaccagcgctacaactttgtgctgcaggtggccaagaccctggccggcatccccagagatgagaagctgaaccagagcaacttccagaagatgtaccagatgtttaatgagaccaccagccaggtgaggaagtaccagcagaacatgagccacctggaggagaagctgctgctgaccaccaagatcagcaagaactttgagacccggctgcaggacatcgagagcaaggtgacccagaccctcatcccctactacatctctgtgaagaagggctctgtggtgaccaatgaaagagaccaggccctgcagctgcaggtgctgaacagccgcttcaaggccctggaggccaagagcatccacctgagcatcaacttcttcagcctgaacaagaccctgcacgaggtgctgaccatgtgccacaatgccagcacctctgtgtctgagctgaatgccaccatccccaagtggatcaagcacagcctgcctgacatccagctgctgcagaagggcctgacagaatttgtggagcccatcatccagatcaagacccaggccgccctgagcaacctgacctgctgcatcgacaggagcctgcccggcagcctggccaacgtggtgaagagccagaagcaggtgaagagcctgcccaagaagatcaatgccctgaagaagcccaccgtgaacctgaccaccgtgctgattggccgcacccagaggaacacagacaacatcatctacccagaggagtacagcagctgcagccgccacccctgccagaatggaggcacctgcatcaatggccgcaccagcttcacctgtgcctgccgccaccccttcaccggggacaactgcaccatcaagctggtggaggagaatgccctggccccagacttcagcaagggcagctaccgctatgcccccatggtggccttctttgccagccacacctacggcatgaccatccctggccccatcctcttcaacaacctggatgtgaactacggggccagctacacccccaggacaggcaagttccgcatcccctacctgggcgtgtatgtgttcaagtacaccatcgagagcttcagcgcccacatcagcggcttcctggtggtggatggcatcgacaagctggcctttgaaagtgagaacatcaacagcgagatccactgtgacagagtgctgactggagatgccctgctggagctgaactacggccaggaggtgtggctgcggctggccaagggcaccatcccagccaagtttcctcctgtgaccaccttcagcggctacctgctgtaccgcacctag

SEQ ID NO: 6945 - DNA, 1365 bp, synthetic construct
  misc_feature 1..1365: note = source = /note="Description of Artificial Sequence: Synthetic coding sequence"
  source 1..1365: mol_type = other DNA
atgtggcccctgactgtgcccccacccctgctgctgctgctgtgcagcggcctggccggccagaccctcttccagaaccctgaggagggctggcagctgtacaccagcgcccaggccccagatggcaagtgcatctgcacagctgtgatcccagcccagagcacctgcagcagagatggccgcagccgggagctgcggcagctgatggagaaggtgcagaatgtgtcccagagcatggaggtgctggagctgcggacctacagagacctgcagtatgtgcggggcatggagaccctgatgaggagcctggatgcccggctgcgggcagcagatggcagcctgagcgccaagagcttccaggagctgaaggacaggatgacagagctgctgcccctgagctctgtgctggagcagtacaaggctgacaccaggaccatcgtgcggctgcgggaggaggtgaggaacctgagcggcagcctggccgccatccaggaggagatgggcgcctacggctatgaggacctgcagcagagggtgatggccctggaggcccggctgcacgcctgtgcccagaagctgggctgcggcaagctgactggagtgagcaaccccatcaccgtgcgggccatgggcagccgcttcggctcctggatgacagacaccatggcccccagcgctgacagccgggtgtggtacatggatggctactacaagggccggcgggtgctggagttccgcaccctgggggacttcatcaagggccagaacttcatccagcacctgctgccccagccctgggccggcactggacatgtggtgtacaacggcagcctcttctacaacaagtaccagagcaatgtggtggtgaagtaccacttccgcagccgctctgtgctggtgcagaggagcctgcctggagctggctacaacaacaccttcccctacagctggggcggcttcagtgacatggacttcatggtggatgagagcggcctgtgggccgtgtacaccaccaaccagaatgccggcaacatcgtggtgtcccggctggacccccacaccctggaggtgatgaggtcctgggacaccggctaccccaagaggtctgctggggaggccttcatgatctgtggggtgctgtatgtgaccaacagccacctggccggggccaaggtgtactttgcctacttcaccaacaccagcagctatgagtacacagatgtgcccttccacaaccagtacagccacatctccatgctggactacaacccccgggagcgggccctgtacacctggaacaacggccaccaggtgctgtacaacgtgaccctcttccacgtgatcagcaccagcggggacccctag

SEQ ID NO: 6946 - DNA, 909 bp, synthetic construct
  misc_feature 1..909: note = source = /note="Description of Artificial Sequence: Synthetic coding sequence"
  source 1..909: mol_type = other DNA
atgtgtgccgagcggctgggccagttcatgaccctggccctggtgctggccacctttgatcctgcccggggcacagatgccaccaaccccccagagggcccccaggacaggagcagccagcagaagggccgcctgagcctgcagaacacagctgagatccagcactgcctggtgaatgctggagatgtgggctgtggggtgtttgaatgttttgagaacaacagctgtgagatccggggcctgcacggcatctgcatgaccttcctgcacaatgctgggaagtttgatgcccagggcaagagcttcatcaaggatgccctgaagtgcaaggcccacgccctgcggcaccgcttcggctgcatcagcaggaagtgcccagccatccgggagatggtgtcccagctgcagcgggagtgctacctgaagcatgacctgtgtgccgccgcccaggagaacaccagggtcatcgtggagatgatccacttcaaggacctgctgctgcacgagccctacgtggacctggtgaacctgctgctgacctgtggggaggaggtgaaggaggccatcacccacagcgtgcaggtgcagtgtgagcagaactggggcagcctgtgcagcatcctgtccttctgcaccagcgccatccagaagccacccacagcccctcctgagcggcagccccaggtggacaggaccaagctgagccgggcccaccacggggaggccggccaccacctgcctgagcccagcagccgggagaccggccgcggggccaagggggagcggggcagcaagagccaccccaatgcccacgcccggggccgggtgggcggcctgggcgcccagggccccagcggcagcagcgagtgggaggatgagcagagcgagtacagcgacatcagaagatag

SEQ ID NO: 6947 - DNA, 2529 bp, synthetic construct
  misc_feature 1..2529: note = source = /note="Description of Artificial Sequence: Synthetic coding sequence"
  source 1..2529: mol_type = other DNA
atgaagccaggcggcttctggctgcacctgaccctgctgggcgccagcctgcctgctgccctgggctggatggaccccggcaccagccggggcccagatgtgggcgtgggggagagccaggccgaggagcccaggagctttgaggtgacccggcgggagggcctgagcagccacaatgagctgctggccagctgtgggaagaagttctgcagccggggcagccgctgtgtgctgagcaggaagacaggagagcctgagtgccagtgcctggaggcctgccggcccagctatgtgcctgtgtgtggcagtgatggccgcttctatgagaaccactgcaagctgcacagagctgcctgcctgctgggcaagaggatcaccgtcatccacagcaaggactgcttcctgaagggggacacctgcaccatggccggctacgcccggctgaagaatgtgctgctggccctgcagacccggctgcagcccctgcaggagggggacagccggcaggaccctgccagccagaagaggctgctggtggagagcctcttccgggacctggatgctgatggaaatggccacctgagcagcagcgagctggcccagcacgtgctgaagaagcaggacctggatgaggacctgctgggctgcagccctggggacctgctgcgctttgatgactacaacagcgacagcagcctgaccctgcgggagttctacatggccttccaggtggtgcagctgagcctggcccctgaggacagagtgtctgtgaccaccgtgacagtgggcctgagcacagtgctgacctgtgctgtgcatggagacctgcggccccccatcatctggaagagaaatggcctgaccctgaacttcctggacctggaggacatcaatgactttggagaagatgacagcctgtacatcaccaaggtgaccaccatccacatgggcaactacacctgccacgccagcggccacgagcagctgttccagacccacgtgctgcaggtgaatgtgccccctgtgatccgggtgtacccagagagccaggcccaggagcccggggtggccgccagcctgcgctgccacgccgagggcatccccatgccccgcatcacctggctgaagaatggagtggatgtgtccacccagatgagcaagcagctgagcctgctggccaacggcagcgagctgcacatcagctctgtgcgctatgaggacaccggggcctacacctgcatcgccaagaatgaggtgggcgtggatgaggacatcagcagcctcttcattgaagattctgccaggaagaccctggccaacatcctgtggagggaggagggcctgtctgtgggcaacatgttttatgtgttcagtgatgatggcatcatcgtcatccaccctgtggactgtgagatccagaggcacctgaagcccacagagaagatcttcatgtcctatgaggagatctgcccccagcgggagaagaatgccacccagccctgccagtgggtgtctgctgtgaatgtgaggaaccgctacatctacgtggcccagcctgccctgagccgggtgctggtggtggacatccaggcccagaaggtgctgcagagcattggagtggaccccctgcctgccaagctgtcctatgacaagagccatgaccaggtgtgggtgctgtcctggggagatgtgcacaagagccggcccagcctgcaggtgatcacagaggccagcacaggccagagccagcacctgatccgcaccccatttgctggggtggatgacttcttcatcccccccaccaacctgatcatcaaccacatccgcttcggcttcatcttcaacaagagtgaccctgctgtgcacaaggtggacctggagaccatgatgcccctgaagaccatcggcctgcaccaccacggctgtgtgccccaggccatggcccacacccacctgggcggctacttcttcatccagtgccggcaggacagccctgccagcgctgcccggcagctgctggtggacagcgtgacagacagcgtgctgggccccaatggagatgtgacaggcaccccccacaccagcccagatggccgcttcatcgtgtctgctgctgctgacagcccctggctgcacgtgcaggagatcaccgtgcggggggagatccagaccctgtatgacctgcagatcaacagcggcatcagtgacctggccttccagaggagcttcacagagagcaaccagtacaacatctatgctgccctgcacacagagccagacctgctcttcctggagctgagcacaggcaaggtgggcatgctgaagaacctgaaggagcccccagctggccctgcccagccctggggcggcacccaccgcatcatgagggacagcggcctgtttggccagtacctgctgaccccagcccgggagagcctcttcctgatcaatggccggcagaacaccctgcgctgtgaggtgtctggcatcaagggcggcaccaccgtggtgtgggtgggggaggtgtag

SEQ ID NO: 6948 - DNA, 2256 bp, synthetic construct
  misc_feature 1..2256: note = source = /note="Description of Artificial Sequence: Synthetic coding sequence"
  source 1..2256: mol_type = other DNA
atggccttccgcaccatctgtgtgctggtgggcgtcttcatctgcagcatctgtgtgaagggcagcagccagccccaggcccgggtgtacctgacctttgatgagctgcgggagaccaagaccagcgagtacttcagcctgagccaccaccccctggactaccgcatcctgctgatggatgaggaccaggaccgcatctacgtgggcagcaaggaccacatcctgagcctgaacatcaacaacatcagccaggaggccctgagcgtcttctggccagccagcaccatcaaggtggaggagtgcaagatggccggcaaggaccccacccacggctgcggcaactttgtgcgggtcatccagaccttcaacagaacccacctgtatgtgtgtggcagcggggccttcagccctgtgtgcacctacctgaacagaggccgccgctctgaggaccaggtgttcatgattgacagcaaatgtgagagcggcaagggccgctgcagcttcaaccccaacgtgaacacagtgtctgtgatgatcaatgaggagctgttcagcggcatgtacatcgacttcatgggcacagatgctgccatcttccgcagcctgaccaagagaaatgctgtgaggacagaccagcacaacagcaagtggctgtctgagcccatgtttgtggatgcccacgtgatcccagatggaacagaccccaatgatgccaaggtgtacttcttcttcaaggagaagctgacagacaacaacagaagcaccaagcagatccacagcatgattgcccgcatctgccccaatgacaccggcggcctgcggagcctggtgaacaagtggaccaccttcctgaaggcccggctggtgtgcagcgtgacagatgaagatggccctgagacccactttgatgagctggaggatgtgttcctgctggagacagacaaccccaggaccaccctggtgtatggcatcttcaccaccagcagcagcgtcttcaagggcagcgctgtgtgtgtgtaccacctgagtgacatccagacagtgttcaacggcccctttgcccacaaggagggccccaaccaccagctgatctcctaccagggccgcatcccctaccccaggcctggcacctgccctggaggagccttcacccccaacatgaggaccaccaaggagttcccagatgatgtggtgaccttcatccggaaccaccccctgatgtacaacagcatctaccccatccacaagaggcccctcatcgtgagaattggaacagactacaagtacaccaagattgctgtggacagagtgaatgctgctgatggccgctaccacgtgctcttcctgggcacagaccggggcaccgtgcagaaggtggtggtgctgcccaccaacaacagcgtgtctggagagctgatcctggaggagctggaggtgttcaagaaccacgcccccatcaccaccatgaagatcagcagcaagaagcagcagctgtatgtgagcagcaatgaaggagtgtcccaggtgtccctgcaccgctgccacatctatggaacagcctgtgccgactgctgcctggcccgggacccctactgtgcctgggatggccacagctgcagccgcttctaccccaccgggaagaggaggagccggcggcaggatgtgagacatggcaaccccctgacccagtgccggggcttcaacctgaaggcctacagaaatgctgctgagatcgtgcagtatggagtgaagaacaacaccaccttcctggagtgtgcccccaagagcccccaggccagcatcaagtggctgctgcagaaggacaaggacaggaggaaggaggtgaagctgaatgaaagaatcatcgccaccagccagggcctgctgatccgctctgtgcagggcagtgaccagggcctgtaccactgcatcgccacagaaaattccttcaagcagaccatcgccaagatcaacttcaaggtgctggacagcgagatggtggccgtggtgacagacaagtggagcccctggacctgggccagctctgtgcgggccctgcccttccaccccaaggacatcatgggcgccttcagccacagcgagatgcagatgatcaaccagtactgcaaggacacccggcagcagcaccagcagggagatgagagccagaagatgagaggagactatggcaagctgaaggccctgatcaacagcaggaagagcaggaacagaagaaaccagctgcctgagagctag

SEQ ID NO: 6949 - DNA, 2316 bp, synthetic construct
  misc_feature 1..2316: note = source = /note="Description of Artificial Sequence: Synthetic coding sequence"
  source 1..2316: mol_type = other DNA
atgggctggctgaccagaattgtgtgcctcttctggggcgtgctgctgacagcccgggccaactaccagaatggcaagaacaacgtgccccggctgaagctgagctacaaggagatgctggagagcaacaacgtcatcaccttcaacggcctggccaacagcagcagctaccacaccttcctgctggatgaggagaggagccggctgtatgtgggcgccaaggaccacatcttctcctttgacctggtgaacatcaaggacttccagaagatcgtgtggcctgtgtcctacaccaggagagatgagtgcaagtgggccggcaaggacatcctgaaggaatgtgccaacttcatcaaggtgctgaaggcctacaaccagacccacctgtatgcctgtggcaccggggccttccaccccatctgcacctacatcgagatcggccaccaccctgaggacaacatcttcaagctggagaacagccactttgaaaatggccggggcaagagcccctatgaccccaagctgctgacagccagcctgctgattgatggagagctgtacagcggcacagctgctgacttcatgggccgggactttgccatcttccgcaccctgggccaccaccaccccatcagaacagagcagcacgacagccgctggctgaatgaccccaagttcatcagcgcccacctgatcagcgagagtgacaacccagaagatgacaaggtgtacttcttcttcagagaaaatgccattgatggagagcacagcggcaaggccacccacgccagaattggccagatctgcaagaatgactttggaggccacaggagcctggtgaacaagtggaccaccttcctgaaggcccggctcatctgcagcgtgcccggccccaatggaattgacacccactttgatgagctgcaggatgtgttcctgatgaacttcaaggaccccaagaaccctgtggtgtatggagtcttcaccaccagcagcaacatcttcaagggcagcgctgtgtgcatgtacagcatgtctgatgtgagaagagtcttcctgggcccctatgcccacagagatggccccaactaccagtgggtgccctaccagggccgggtgccctacccccggcccggcacctgccccagcaagaccttcggcggctttgacagcaccaaggacctgcctgatgatgtgatcacctttgcccggagccacccagccatgtacaaccctgtgttccccatgaacaaccggcccatcgtcatcaagacagatgtgaactaccagttcacccagatcgtggtggacagagtggatgctgaagatggccagtatgatgtgatgtttattggaacagatgtgggcaccgtgctgaaggtggtgtccatccccaaggagacctggtatgacctggaggaggtgctgctggaggagatgacagtgttccgggagcccacagccatcagcgccatggagctgagcaccaagcagcagcagctgtacatcggcagcacagctggggtggcccagctgcccctgcaccgctgtgacatctacggcaaggcctgtgccgagtgctgcctggcccgggacccctactgtgcctgggatggcagcgcctgcagccgctacttccccacagccaagaggaggacccggcggcaggacatcagaaatggagaccccctgacccactgcagcgacctgcaccacgacaaccaccacggccacagccctgaggagcgcatcatctacggcgtggagaacagcagcaccttcctggagtgcagccccaagagccagagggccctggtgtactggcagttccagaggagaaatgaggagaggaaggaggagatccgggtggatgaccacatcatcagaacagaccagggcctgctgctgcggagcctgcagcagaaggacagcggcaactacctgtgccacgctgtggagcacggcttcatccagaccctgctgaaggtgaccctggaggtgattgacacagagcacctggaggagctgctgcacaaggatgatgatggagatggcagcaagaccaaggagatgagcaacagcatgacccccagccagaaggtgtggtacagagacttcatgcagctgatcaaccaccccaacctgaacaccatggatgagttctgtgagcaggtgtggaagagggacaggaagcagaggcggcagaggcctggccacaccccaggcaacagcaacaagtggaagcacctgcaggagaacaagaagggcaggaacagaaggacccatgaatttgagcgggcccccaggtctgtgtag

SEQ ID NO: 6950 - DNA, 4605 bp, synthetic construct
  misc_feature 1..4605: note = source = /note="Description of Artificial Sequence: Synthetic coding sequence"
  source 1..4605: mol_type = other DNA
atggccctgaccccaggctggggcagcagcgctggccctgtgcggcctgagctgtggctgctgctgtgggccgccgcctggaggctgggcgccagcgcctgcccagccctgtgcacctgcaccggcaccaccgtggactgccacggcaccggcctgcaggccatccccaagaacatccccaggaacacagagcggctggagctgaatggaaacaacatcacccgcatccacaagaatgactttgctggcctgaagcagctgcgggtgctgcagctgatggagaaccagattggagctgtggagcggggggcctttgatgacatgaaggagctggagcggctgcggctgaacagaaaccagctgcacatgctgcctgagctgctcttccagaacaaccaggccctgagccggctggacctgtctgaaaatgccatccaggccatccccaggaaggccttccggggggccacagacctgaagaacctgcagctggacaagaaccagatcagctgcatcgaggagggcgccttccgggccctgcggggcctggaggtgctgaccctgaacaacaacaacatcaccaccatccctgtgagcagcttcaaccacatgcccaagctgcggaccttccggctgcacagcaaccacctgttctgtgactgccacctggcctggctgagccagtggctgcggcagaggcccaccatcggcctcttcacccagtgcagcggccctgccagcctgcggggcctgaatgtggccgaggtgcagaagtctgagttcagctgcagcggccagggcgaggccggccgggtgcccacctgcaccctgagcagcggcagctgcccagccatgtgcacctgcagcaatggcatcgtggactgccggggcaagggcctgacagccatcccagccaacctgcctgagaccatgacagagatccggctggagctgaatggcatcaagagcatccccccaggggccttcagcccctacaggaagctgcggagaattgacctgagcaacaaccagattgctgagatcgccccagatgccttccagggcctgcggagcctgaacagcctggtgctgtatggcaacaagatcacagacctgccccggggcgtgtttggaggcctgtacaccctgcagctgctgctgctgaatgccaacaagatcaactgcatccggccagatgccttccaggacctgcagaacctgagcctgctgagcctgtatgacaacaagatccagagcctggccaagggcaccttcaccagcctgcgggccatccagaccctgcacctggcccagaaccccttcatctgtgactgcaacctgaagtggctggccgacttcctgcggaccaaccccatcgagaccagcggggcccgctgtgccagcccccggcggctggccaacaagagaattggccagatcaagagcaagaagttccgctgcagcgccaaggagcagtacttcatccctggaacagaggactaccagctgaacagcgagtgcaacagtgatgtggtgtgcccccacaagtgccgctgtgaggccaacgtggtggagtgcagcagcctgaagctgaccaagatccctgagcgcatcccccagagcacagctgagctgcggctgaacaacaatgagatcagcatcctggaggccaccggcatgttcaagaagctgacccacctgaagaagatcaacctgagcaacaacaaggtgtctgaaattgaagatggagcctttgaaggagctgcctctgtgtctgagctgcacctgacagccaaccagctggagagcatccgcagcggcatgttccggggcctggatggcctgcggaccctgatgctgaggaacaaccgcatcagctgcatccacaatgacagcttcaccggcctgagaaatgtgcggctgctgagcctgtatgacaaccagatcaccaccgtgtcccctggggcctttgacaccctgcagagcctgagcaccctgaacctgctggccaaccccttcaactgcaactgccagctggcctggctgggcggctggctgaggaagaggaagatcgtgactggaaacccccgctgccagaacccagacttcctgcggcagatccccctgcaggatgtggccttcccagacttccgctgtgaggagggccaggaggagggcggctgcctgccccggccccagtgcccccaggagtgtgcctgcctggacacagtggtgcgctgcagcaacaagcacctgcgggccctgcccaagggcatccccaagaatgtgacagagctgtacctggatggcaaccagttcaccctggtgcccggccagctgagcaccttcaagtacctgcagctggtggacctgagcaacaacaagatcagcagcctgagcaacagcagcttcaccaacatgagccagctgaccaccctcatcctgagctacaatgccctgcagtgcatcccccccctggccttccagggcctgcggagcctgcggctgctgagcctgcacggcaatgacatcagcaccctgcaggagggcatctttgctgatgtgaccagcctgagccacctggccatcggggccaaccccctgtactgtgactgccacctgcgctggctgagctcctgggtgaagacaggctacaaggagcccggcatcgcccgctgtgccggcccccaggacatggagggcaagctgctgctgaccaccccagccaagaagtttgagtgccagggcccccccaccctggccgtgcaggccaagtgtgacctgtgcctgagcagcccctgccagaaccagggcacctgccacaatgaccccctggaggtgtaccgctgtgcctgccccagcggctacaagggccgggactgtgaggtgtccctggacagctgcagcagcggcccctgtgaaaatggaggcacctgccacgcccaggagggagaagatgcccccttcacctgcagctgccccactggatttgagggccccacctgtggggtgaacacagatgactgtgtggaccacgcctgtgccaacggcggcgtgtgtgtggatggagtgggcaactacacctgccagtgccccctgcagtatgagggcaaggcctgtgagcagctggtggacctgtgcagcccagacctgaacccctgccagcacgaggcccagtgtgtgggcaccccagatggcccccgctgtgagtgcatgcctggctacgccggggacaactgcagcgagaaccaggatgactgccgggaccaccgctgccagaatggagcccagtgcatggatgaggtgaacagctacagctgcctgtgtgccgagggctacagcggccagctgtgtgagatccccccccacctgcctgcccccaagagcccctgtgagggcacagagtgccagaatggagccaactgtgtggaccagggcaacagacctgtgtgccagtgcctgcccggctttggaggcccagaatgtgagaagctgctgtctgtgaactttgtggaccgggacacctacctgcagttcacagacctgcagaactggccccgggccaacatcaccctgcaggtgtccacagctgaggacaatggcatcctgctgtacaacggggacaatgaccacatcgctgtggagctgtaccagggccacgtgcgggtgtcctatgaccccggcagctaccccagcagcgccatctacagcgctgagaccatcaatgatggccagttccacacagtggagctggtggcctttgaccagatggtgaacctgagcattgatggcggcagccccatgaccatggacaactttgggaagcactacaccctgaacagcgaggcccccctgtatgtgggcggcatgcctgtggatgtgaacagcgctgccttccggctgtggcagatcctgaatggcaccggcttccacggctgcatccggaacctgtacatcaacaatgagctgcaggacttcaccaagacccagatgaagccaggagtggtgcccggctgtgagccctgcaggaagctgtactgcctgcacggcatctgccagcccaatgccaccccaggccccatgtgccactgtgaggccggctgggtgggcctgcactgtgaccagcctgcagatggcccctgccacggccacaagtgtgtgcacggccagtgtgtgcccctggatgccctgagctacagctgccagtgccaggacggctacagcggggccctgtgcaaccaggccggggccctggccgagccctgccggggcctgcagtgcctgcacggccactgccaggccagcggcaccaagggggcccactgtgtgtgtgaccccggcttctctggagagctgtgtgagcaggagagcgagtgccgcggggaccctgtgcgggacttccaccaggtgcagaggggctacgccatctgccagaccacccggcccctgtcctgggtggagtgccggggcagctgccccggccagggctgctgccagggcctgcggctgaagaggaggaagttcacctttgaatgttctgatggcaccagctttgctgaggaggtggagaagcccaccaagtgtggctgtgccctgtgtgcctag

SEQ ID NO: 6951 - DNA, 342 bp, synthetic construct
  misc_feature 1..342: note = source = /note="Description of Artificial Sequence: Synthetic coding sequence"
  source 1..342: mol_type = other DNA
atggacagccggcaggccgccgccctgctggtgctgctgctgctgattgatggcggctgtgccgagggccctgggggccagcaggaggaccagctgtctgctgaggaggacagcgagcccctgcccccccaggatgcccagaccagcggcagcctgctgcactacctgctgcaggccatggagaggcctggccgcagccaggccttcctgttccagccccagcgcttcggcaggaacacccagggctcctggagaaatgagtggctgagccccagggctggggagggcctgaacagccagttctggagcctggccgccccccagagatttgggaagaagtag

SEQ ID NO: 6952 - DNA, 2568 bp, synthetic construct
  misc_feature 1..2568: note = source = /note="Description of Artificial Sequence: Synthetic coding sequence"
  source 1..2568: mol_type = other DNA
atggcccggcacctgctgctgcccctggtgatgctggtgatcagccccatccctggggccttccaggacagcgccctgagccccacccaggaggagcctgaggacctggactgtggccggcctgagcccagcgccagaattgtgggcggcagcaatgcccagcccggcacctggccctggcaggtgtccctgcaccacggcggcggccacatctgtggcggcagcctgattgcccccagctgggtgctgtctgctgcccactgcttcatgaccaacggcaccctggagcctgctgctgagtggagcgtgctgctgggcgtgcacagccaggacggccccctggatggagcccacaccagggctgtggccgccatcgtggtgcctgccaactacagccaggtggagctgggcgctgacctggccctgctgcggctggccagccctgccagcctgggccctgctgtgtggcctgtgtgcctgccccgggccagccacagatttgtgcatggaacagcctgctgggccaccggctggggagatgtgcaggaggccgaccccctgcccctgccctgggtgctgcaggaggtggagctgcggctgctgggggaggccacctgccagtgcctgtacagccagcccggccccttcaacctgaccctgcagatcctgcccggcatgctgtgtgccggctacccagagggcagaagagacacctgccagggcgacagcggcggccccctggtgtgtgaggagggcggccgctggttccaggccggcatcaccagctttggatttggctgcggcagaagaaacagacctggggtcttcaccgctgtggccacctatgaggcctggatccgggagcaggtgatgggcagcgagcccggccctgccttccccacccagccccagaagacccagagcgacccccaggagccccgggaggagaactgcaccatcgccctgcctgaatgtgggaaggcccccaggcctggggcctggccctgggaggcccaggtgatggtgcccggcagccggccctgccacggggccctggtgtctgagagctgggtgctggccccagccagctgcttcctggaccccaacagcagtgacagccccccccgggacctggatgcctggagggtgctgctgcccagccggcccagggctgagcgggtggcccggctggtgcagcatgaaaatgcctcctgggacaatgccagtgacctggccctgctgcagctgcggacccctgtgaacctgtctgctgccagcaggcctgtgtgcctgccccaccctgagcactacttcctgcccggcagccgctgccgcctggcccgctggggccgcggggagcccgccctgggccctggggccctgctggaggccgagctgctgggcggctggtggtgccactgcctgtatggccggcagggcgctgctgtgcccctgcccggggacccccctcatgccctgtgcccagcctaccaggagaaggaggaggtgggcagctgctggaatgacagccgctggagcctgctgtgccaggaggagggcacctggttcctggccggcatccgggacttccccagcggctgcctgcggccccgggccttcttccccctgcagacccacggcccctggatcagccacgtgaccaggggggcctacctggaggaccagctggcctgggactggggcccagatggagaggagacagagacccagacctgccccccccacacagaacatggagcctgtggcctgcggctggaggccgcccctgtgggcgtgctgtggccctggctggccgaggtgcacgtggccggggacagagtgtgcaccggcatcctgctggcccctggctgggtgctggccgccacccactgtgtgctgcggcccggcagcaccaccgtgccctacatcgaggtgtacctgggccgggccggggccagcagcctgccccagggccaccaggtgtcccggctggtgatcagcatccggctgccccagcacctgggcctgcggccccccctggccctgctggagctgagcagccgggtggagcccagccccagcgccctgcccatctgcctgcaccctgctggcatccccccaggggccagctgctgggtgctgggctggaaggagccccaggacagagtgcctgtggccgctgctgtgtccatcctgacccagaggatctgtgactgcctgtaccagggcatcctgcccccaggcaccctgtgtgtgctgtatgcagagggccaggagaacagatgtgagatgaccagcgccccacccctgctgtgccagatgacagagggctcctggatcctggtgggcatggctgtgcagggcagccgggagctgtttgctgccatcggccctgaggaggcctggatcagccagacagtgggggaggccaacttcctgccccccagcggcagcccccactggcccactggaggcagcaacctgtgccccccagagctggccaaggccagcggcagcccccatgctgtgtacttcctgctgctgctgaccctgctgatccagagctag

SEQ ID NO: 6953 - DNA, 912 bp, synthetic construct
  misc_feature 1..912: note = source = /note="Description of Artificial Sequence: Synthetic coding sequence"
  source 1..912: mol_type = other DNA
atgctgcaccctgagaccagccctggccggggccacctgctggccgtgctgctggccctgctgggcaccacctgggccgaggtgtggccaccccagctgcaggagcaggcccccatggccggggccctgaacaggaaggagagcttcctgctgctgagcctgcacaaccggctgcgctcctgggtgcagcccccagctgctgacatgaggcggctggactggagcgacagcctggcccagctggcccaggcccgggccgccctgtgtggcatccccacccccagcctggccagcggcctgtggaggaccctgcaggtgggctggaacatgcagctgctgcctgctggcctggccagctttgtggaggtggtgtccctgtggtttgctgagggccagcgctacagccatgctgctggggagtgtgccagaaatgccacctgcacccactacacccagctggtgtgggccaccagcagccagctgggctgcggccgccacctgtgcagcgctggccagacagccatcgaggcctttgtgtgtgcctacagcccccggggcaactgggaggtgaatggcaagaccatcatcccctacaagaagggggcctggtgcagcctgtgcacagcctctgtgtctggctgcttcaaggcctgggaccatgctgggggcctgtgtgaggtgcccaggaacccctgcaggatgagctgccagaaccacggccgcctgaacatcagcacctgccactgccactgccccccaggctacacaggccgctactgccaggtgcgctgcagcctgcagtgtgtgcacggccgcttccgggaggaggagtgcagctgtgtgtgtgacatcggctacggggagcccagcgtgcccccacgctgcatcttccccagcacccctgtgacctag

SEQ ID NO: 6954 - DNA, 1158 bp, synthetic construct
  misc_feature 1..1158: note = source = /note="Description of Artificial Sequence: Synthetic coding sequence"
  source 1..1158: mol_type = other DNA
atgaagatgctgcccggggtgggcgtgtttggcaccggcagcagcgcccgggtgctggtgcccctgctgcgggcagagggcttcaccgtggaggccctgtggggcaagacagaggaggaggccaagcagctggccgaggagatgaacatcgccttctacaccagcaggacagatgacatcctgctgcaccaggatgtggacctggtgtgcatcagcatccccccacccctgacccggcagatctctgtgaaggccctgggcatcggcaagaatgtggtgtgtgagaaggccgccacctctgtggatgccttcaggatggtgacagccagccgctactacccccagctgatgagcctggtgggcaatgtgctgcgcttcctgcctgcctttgtgaggatgaagcagctgatcagcgagcactacgtgggcgctgtgatgatctgtgatgcccgcatctacagcggcagcctgctgagccccagctatggctggatctgtgatgagctgatgggcggcggcggcctgcacaccatgggcacctacatcgtggacctgctgacccacctgaccggccggcgggcagagaaggtgcacggcctgctgaagacctttgtgcggcagaatgctgccatccggggcatccgccacgtgaccagtgatgacttctgcttcttccagatgctgatgggcggcggcgtgtgcagcacagtgaccctgaacttcaacatgcctggggcctttgtgcatgaggtgatggtggtgggcagcgctggccgcctggtggcccggggagctgacctgtatggccagaagaacagcgccacccaggaggagctgctgctgcgggacagcctggccgtgggcgccggcctgcctgagcagggcccccaggatgtgcccctgctgtacctgaagggcatggtgtacatggtgcaggccctgcggcagagcttccagggccagggcgacaggaggacctgggacaggacccctgtgtccatggccgccagctttgaagatggcctgtacatgcagagcgtggtggatgccatcaagaggagcagccgctctggagagtgggaggccgtggaggtgctgacagaggagccagacaccaaccagaacctgtgtgaggccctgcagaggaacaacctgtag

SEQ ID NO: 6955 - DNA, 1470 bp, synthetic construct
  misc_feature 1..1470: note = source = /note="Description of Artificial Sequence: Synthetic coding sequence"
  source 1..1470: mol_type = other DNA
atgcctgtgacctttgccctgctgctgctgctgggccaggccacagctgacccctgctatgacccccagggccggccccagttctgcctgccccctgtgacccagctggccgctgtggccgccagctgcccccaggcctgtgccctgagccctggcaaccacctgggcgcccgggagacctgcaatggcagcctgaccctggccctgggcggccccttcctgctgacctctgtgtccctgcgcttctgcaccccaggccccccagccctgatcctgtctgctgcctgggccagcggcggcccctggaggctgctgtggcacaggcctgcctggccaggggccctgggcggccctgagcgggtgaccttccacagcaccccaggccccaaggccaccgtggccgccagccacctgcgggtggagtttggaggccaggccggcctggccgctgctggcctgcggggccgctgccagtgccacggccatgctgcccgctgtgccgcccgggcccggcccccacgctgccactgccgccaccacaccaccggccctggctgtgagagctgccggcccagccaccgggactggccctggaggcctgccacccccaggcacccccacccctgcctgccctgcagctgcaaccagcacgcccggcgctgccgcttcaacagcgagctgttccggctgagcggcggccgctctggaggagtgtgtgagcgctgccgccaccacacagctggccgccactgccactactgccagcccggcttctggagggaccccagccagcccatcttcagcagaagagcctgccgggcctgccagtgccaccccatcggggccactggaggcacctgcaaccagaccagcggccagtgcacctgcaagctgggcgtgacaggcctgacctgcaacagatgtggccctggctaccagcagagccgcagccccaggatgccctgccagagaattcctgaggccaccaccaccctggccaccacccctggggcctacagcagtgacccccagtgccagaactactgcaacatgtctgacaccagggtgcacatgagcctgcggcgctactgccagcaggaccacgtgctgcgggcccaggtgctggccagcgaggccgccggccctgcctggcagaggctggccgtgcgggtgctggccgtgtacaagcagagggcccagcctgtgagaagaggagaccaggatgcctgggtgcccagggctgacctgacctgtggctgcctgcggctgcagcctggaacagactacctgctgctgggcagcgctgtgggggaccctgaccccaccaggctcatcctggacagacatggcctggccctgccctggaggccccgctgggcccggcccctgaagaggctgcagcaggaggagcgggccggcggctgccggggcgtgcgggcccccacccccagccccaggcctgagcactag

SEQ ID NO: 6956 - DNA, 8430 bp, synthetic construct
  misc_feature 1..8430: note = source = /note="Description of Artificial Sequence: Synthetic coding sequence"
  source 1..8430: mol_type = other DNA
atgaccctggagggcctgtacctggcccggggccccctggcccggctgctgctggcctggagcgccctgctgtgcatggccggcggccagggccgctgggatggagccctggaggccgccggccctggccgggtgagaagaagaggcagccctggcatcctgcagggccccaacgtgtgtggcagccgcttccacgcctactgctgccccggctggaggaccttccctggccgcagccagtgtgtggtgcccatctgcagaagagcctgtggggagggcttctgcagccagcccaacctgtgcacctgtgctgatggcaccctggcccccagctgtggggtgtcccggggcagcggctgcagcgtgtcctgcatgaatggaggcacctgccgcggggccagctgcctgtgccagaagggctacacaggcaccgtgtgtggccagcccatctgtgaccggggctgccacaatggaggccgctgcatcggccccaacagatgtgcctgtgtgtatggcttcatgggcccccagtgtgagcgggactacagaacaggcccctgcttcggccaggtgggccctgagggctgccagcaccagctgaccggcctggtgtgcaccaaggccctgtgctgtgccaccgtgggccgggcctggggcctgccctgtgagctgtgcccagcccagccccacccctgcagaagaggcttcatccccaacatccacactggagcctgccaggatgtggatgagtgccaggccgtgcccggcctgtgccagggcggcagctgtgtgaacatggtgggcagcttccactgccgctgccctgtgggccaccggctgagtgacagcagcgctgcctgtgaggactaccgggccggggcctgcttctctgtgctgtttggaggccgctgtgccggggacctggccggccactacacccggcggcagtgctgctgtgaccggggccgctgctgggccgccggccctgtgcctgagctgtgccccccccggggcagcaatgagttccagcagctgtgtgcccagaggctgcccctgctgcccggccaccctggcctcttccctggcctgctgggcttcggcagcaatggcatgggcccccccctgggccctgcccggctgaacccccacggcagtgatgcccggggcatccccagcctgggccctggcaacagcaacatcggcacagccaccctgaaccagaccatcgacatctgccgccacttcaccaacctgtgcctgaatggccgctgcctgcccacccccagcagctaccgctgtgagtgcaatgtgggctacacccaggatgtgcggggggagtgcattgatgtggatgagtgcaccagcagcccctgccaccacggggactgtgtgaacatccctggcacctaccactgccgctgctacccaggcttccaggccacccccacccggcaggcctgtgtggatgtggatgagtgcatcgtgtctgggggcctgtgccacctgggccgctgtgtgaacacagagggcagcttccagtgtgtgtgcaatgccggctttgagctgagcccagatggcaagaactgtgtggaccacaatgaatgtgccaccagcaccatgtgtgtgaatggagtgtgcctgaatgaagatggcagcttcagctgcctgtgcaagccaggcttcctgctggcccctgggggccactactgcatggacattgatgagtgccagaccccaggcatctgtgtgaatggccactgcaccaacacagagggcagcttccgctgccagtgcctgggcggcctggccgtgggcacagatggccgggtgtgtgtggacacccacgtgcgcagcacctgctatggagccatcgagaagggcagctgtgcccggcccttccctggcaccgtgaccaagtctgagtgctgctgtgccaacccagaccacggctttggagagccctgccagctgtgcccagccaaggacagcgctgagttccaggccctgtgcagcagcggcctgggcatcaccacagatggccgggacatcaatgaatgtgccctggaccctgaggtgtgtgccaatggagtgtgtgagaacctgcggggcagctaccgctgtgtgtgcaacctgggctatgaagctggggccagcggcaaggactgcacagatgtggatgaatgtgccctgaacagcctgctgtgtgacaatggctggtgccagaacagccctggcagctacagctgcagctgccccccaggcttccacttctggcaggacacagagatctgcaaggatgtggatgaatgtctgagcagcccctgtgtgtctggagtgtgcaggaacctggccggcagctacacctgcaagtgtggccctggcagccggctggaccccagcggcaccttctgcctggacagcaccaagggcacctgctggctgaagatccaggagagccgctgtgaggtgaacctgcagggcgccagcctgcggtctgagtgctgtgccaccctgggcgccgcctggggcagcccctgtgagcgctgtgaaattgatcctgcctgtgcccggggctttgccaggatgactggagtgacctgtgatgatgtgaatgaatgtgagagcttccctggggtgtgccccaacggccgctgtgtgaacacagctggcagcttccgctgtgaatgtcctgagggcctgatgctggatgccagcggccgcctgtgtgtggatgtgcggctggagccctgcttcctgcgctgggatgaagatgaatgtggggtgaccctgcccgggaagtacaggatggatgtgtgctgctgcagcattggagctgtgtggggcgtggagtgtgaggcctgcccagaccctgagagcctggagtttgccagcctgtgcccccggggcctgggctttgccagccgggacttcctgagcggccggcccttctacaaggatgtgaatgaatgcaaggtgtttcctggcctgtgcacccacggcacctgcaggaacacagtgggcagcttccactgtgcctgtgccggcggctttgccctggatgcccaggagaggaactgcacagacattgatgaatgtcgcatcagcccagacctgtgtggccagggcacctgtgtgaacaccccaggcagctttgaatgtgagtgcttccctggctatgaaagtggcttcatgctgatgaagaactgcatggatgtggatgaatgtgcccgggaccccctgctgtgccggggcggcacctgcaccaacacagatggcagctacaagtgccagtgccccccaggccacgagctgacagccaagggcacagcctgtgaggacattgatgagtgcagcctgagtgatggcctgtgcccccacggccagtgtgtgaatgtgattggagccttccagtgcagctgccacgccggcttccagagcaccccagaccggcagggctgtgtggacatcaatgaatgtcgggtgcagaatggaggctgtgatgtgcactgcatcaacacagagggcagctaccgctgcagctgtggccagggctacagcctgatgccagatggccgggcctgtgctgatgtggatgaatgtgaggagaacccccgggtgtgtgaccagggccactgcaccaacatgcctgggggccaccgctgcctgtgctatgatggcttcatggccaccccagacatgaggacctgtgtggatgtggatgaatgtgacctgaacccccacatctgcctgcatggagactgtgagaacaccaagggcagctttgtgtgccactgccagctgggctacatggtgaggaaaggagccaccggctgcagtgatgtggatgaatgtgaggtgggcggccacaactgtgacagccacgccagctgcctgaacatccctggcagcttcagctgccgctgcctgcccggctgggtgggagatggctttgagtgccacgacctggatgaatgtgtgtcccaggagcaccgctgcagccccaggggggactgcctgaatgtgcccggcagctaccgctgcacctgccggcagggctttgctggagatggcttcttctgtgaagatagagatgaatgtgccgagaatgtggacctgtgtgacaatggccagtgcctgaatgcccctgggggctaccgctgtgaatgtgagatgggctttgaccccacagaggaccaccgggcctgccaggatgtggatgaatgtgcccagggcaacctgtgtgccttcggcagctgtgagaacctgcccggcatgttccgctgcatctgcaatggaggctatgagctggacagaggaggcggcaactgcacagacatcaatgaatgtgccgaccctgtgaactgcatcaatggagtgtgcatcaacaccccaggcagctacctgtgcagctgcccccaggactttgagctgaaccccagcggcgtgggctgtgtggacaccagggctggcaactgcttcctggagacccatgacagaggagacagcggcatcagctgcagcgctgagattggagtgggcgtgacccgggccagctgctgctgcagcctgggccgggcctggggcaacccctgtgagctgtgccccatggccaacaccacagagtaccgcaccctgtgccctggaggagagggcttccagcccaaccgcatcaccgtcatcctggaggacattgatgagtgccaggagctgcccggcctgtgccagggcggggactgtgtgaacaccttcggcagcttccagtgtgaatgtcctcctggctaccacctgtctgagcacacccgcatctgtgaggacattgatgagtgcagcacccacagcggcatctgtggccctggcacctgctacaacaccctgggcaactacacctgtgtgtgcccagctgagtacctgcaggtgaatggaggcaacaactgcatggacatgaggaagtctgtgtgcttccgccactacaacggcacctgccagaatgagctggccttcaacgtgaccaggaagatgtgctgctgcagctacaacatcggccaggcctggaaccggccctgtgaggcctgccccacccccatcagcccagactaccagatcctgtgtggcaaccaggcccctggcttcctgacagacatccacacaggcaagcccctggacattgatgaatgtggggagatcccagccatctgtgccaacggcatctgcatcaaccagatcggcagcttccgctgtgaatgtcctgctggcttcaactacaacagcatcctgctggcctgtgaagatgtggatgaatgtggcagccgggagagcccctgccagcagaatgctgactgcatcaacatccctggcagctaccgctgcaagtgcacccggggctacaagctgagccctggaggagcctgtgtgggcagaaatgaatgtcgggagatccccaacgtgtgcagccacggggactgcatggacacagagggcagctacatgtgcctgtgccaccggggcttccaggccagcgctgaccagaccctgtgcatggacattgatgaatgtgaccggcagccctgtggaaatggcacctgcaagaacatcatcggcagctacaactgcctgtgcttccctggctttgtggtgacccacaatggagactgtgtggactttgatgaatgtaccaccctggtgggccaggtgtgccgcttcggccactgcctgaacacagctggcagcttccactgcctgtgccaggacggctttgagctgacagcagatggcaagaactgtgtggacaccaatgaatgtctgagcctggccggcacctgcctgcccggcacctgccagaacctggagggcagcttccgctgcatctgccccccaggcttccaggtgcagagcgaccactgcatcgacattgatgagtgcagcgaggagcccaacctgtgcctgtttggcacctgcaccaacagccctggcagcttccagtgcctgtgccccccaggctttgtgctgagtgacaatggccaccgctgctttgacacccggcagagcttctgcttcaccaggtttgaagctggaaaatgttctgtgcccaaggccttcaacaccaccaagacccgctgctgctgcagcaagaggcctggagagggctggggagacccctgtgagctgtgcccccaggagggcagcgctgccttccaggagctgtgccccttcggccacggggctgtgcccggcccagatgacagcagagaagatgtgaatgaatgtgccgagaaccctggggtgtgcaccaatggagtgtgtgtgaacacagatggcagcttccgctgtgagtgccccttcggctacagcctggacttcaccggcatcaactgtgtggacacagatgaatgttctgtgggccacccctgtggccagggcacctgcaccaacgtgattggaggctttgaatgtgcctgtgctgatggctttgagcccggcctgatgatgacctgtgaagatattgatgaatgttccctgaaccccctgctgtgtgccttccgctgccacaacacagagggcagctacctgtgcacctgcccagctggctacaccctgcgggaggatggagccatgtgcagagatgtggatgaatgtgctgatggccagcaggactgccacgcccggggcatggagtgcaagaacctgattggcacctttgcctgtgtgtgccccccaggcatgaggcccctgcccggcagcggggagggctgcacagatgacaatgaatgtcatgcccagcctgacctgtgtgtgaatggccgctgtgtgaacacagctggcagcttccgctgtgactgtgatgagggcttccagcccagccccaccctgacagaatgtcatgacatccggcagggcccctgctttgctgaggtgctgcagaccatgtgccgcagcctgagcagcagcagcgaggccgtgaccagggctgagtgctgctgcggcggcggccggggctggggcccccgctgtgagctgtgccccctgcccggcaccagcgcctacaggaagctgtgcccccacggcagcggctacacagctgagggcagagatgtggatgagtgcaggatgctggcccacctgtgtgcccacggggagtgcatcaacagcctgggcagcttccgctgccactgccaggccggctacaccccagatgccacagccaccacctgcctggacatggatgagtgcagccaggtgcccaagccctgcaccttcctgtgcaagaacaccaagggcagcttcctgtgcagctgcccccggggctacctgctggaggaggatggccgcacctgcaaggacctggatgaatgtaccagccggcagcacaactgccagttcctgtgtgtgaacacagtgggcgccttcacctgccgctgccccccaggcttcacccagcaccaccaggcctgctttgacaatgatgagtgcagcgcccagcccggcccctgtggggcccacggccactgccacaacaccccaggcagcttccgctgtgagtgccaccagggcttcaccctggtgagcagcggccacggctgtgaagatgtgaatgaatgtgatggcccccaccgctgccagcacggctgccagaaccagctgggcggctaccgctgcagctgcccccagggcttcacccagcacagccagtgggcccagtgtgtggatgaaaatgaatgtgccctgagcccccccacctgtggcagcgccagctgcaggaacaccctgggcggcttccgctgtgtgtgccccagcggctttgattttgaccaggccctgggcggctgccaggaggtggatgaatgtgccggcagaagaggcccctgcagctacagctgtgccaacaccccaggcggcttcctgtgtggctgcccccagggctacttccgggccggccagggccactgtgtgtctggcctgggcttcagccctggcccccaggacaccccagacaaggaggagctgctgagcagcgaggcctgctatgagtgcaagatcaatggcctgagcccccgggaccggccccggcgcagcgcccaccgggaccaccaggtgaacctggccaccctggacagcgaggccctgctgaccctgggcctgaacctgagccacctgggccgggcagagcgcatcctggagctgcggcctgccctggagggcctggagggccgcatccgctacgtgattgtgagaggaaatgagcagggcttcttcaggatgcaccacctgcggggcgtgagcagcctgcagctgggcagaagaagacctggccctggcacctaccgcctggaggtggtgagccacatggccggcccctggggcgtgcagcctgagggccagcccggcccctggggccaggccctgcggctgaaggtgcagctgcagctgctgtag

SEQ ID NO: 6957 - DNA, 303 bp, synthetic construct
  misc_feature 1..303: note = source = /note="Description of Artificial Sequence: Synthetic coding sequence"
  source 1..303: mol_type = other DNA
atggagacccggcaggtgagccgcagcccccgggtgcggctgctgctgctgctgctgctgctgctggtggtgccctggggcgtgaggacagccagcggcgtggccctgccccctgtgggcgtgctgagcctgcggcccccaggccgggcctgggccgaccctgccaccccccggccccggcgcagcctggccctggctgatgatgctgccttccgggagcgggcccggctgctggccgccctggagaggaggcactggctgaacagctacatgcacaagctgctggtgctggatgccccctag

SEQ ID NO: 6958 - DNA, 1404 bp, synthetic construct
  misc_feature 1..1404: note = source = /note="Description of Artificial Sequence: Synthetic coding sequence"
  source 1..1404: mol_type = other DNA
atgtggcgctgccccctgggcctgctgctgctgctgcccctggccggccacctggccctgggcgcccagcagggccggggccggcgggagctggcccctggcctgcacctgcggggcatcagagatgctgggggccgctactgccaggagcaggacctgtgctgccggggccgggcagatgactgtgccctgccctacctgggcgccatctgctactgtgacctcttctgcaacagaacagtgtctgactgctgcccagacttctgggacttctgcctgggcgtgcccccacccttcccccccatccagggctgcatgcatggaggccgcatctaccctgtgctgggcacctactgggacaactgcaaccgctgcacctgccaggagaaccggcagtggcagtgtgaccaggagccctgcctggtggaccctgacatgatcaaggccatcaaccagggcaactacggctggcaggccggcaaccacagcgccttctggggcatgaccctggatgagggcatccgctaccgcctgggcaccatccggcccagcagctctgtgatgaacatgcatgagatctacacagtgctgaaccctggagaggtgctgcccacagcctttgaggccagcgagaagtggcccaacctgatccacgagcccctggaccagggcaactgtgccggctcctgggccttcagcacagctgctgtggccagtgacagagtgtccatccacagcctgggccacatgacccctgtgctgagcccccagaacctgctgagctgtgacacccaccagcagcagggctgccggggcggccgcctggatggagcctggtggttcctgcggcggcggggcgtggtgtctgaccactgctaccccttcagcggccgggagagagatgaagctggccctgccccaccctgcatgatgcacagccgggccatgggccggggcaagaggcaggccacagcccactgccccaacagctatgtgaacaacaatgacatctaccaggtgacccctgtgtaccgcctgggcagcaatgacaaggagatcatgaaggagctgatggagaatggacctgtgcaggccctgatggaggtgcatgaggacttcttcctgtacaagggcggcatctacagccacacccctgtgtccctgggccggcctgagcgctacagaagacatggcacccacagcgtgaagatcaccggctggggcgaggagaccctgcctgatggccgcaccctgaagtactggacagctgccaacagctggggccctgcctggggcgagcggggccacttcagaattgtgcggggcgtgaatgaatgtgacatcgagagctttgtgctgggcgtgtggggccgggtgggcatggaggacatgggccaccactag

SEQ ID NO: 6959 - DNA, 2205 bp, synthetic construct
  misc_feature 1..2205: note = source = /note="Description of Artificial Sequence: Synthetic coding sequence"
  source 1..2205: mol_type = other DNA
atgttttatgtgtgcagcagctgtgtgttcctgtgtggcagcaacttccccaacttccccttccaggtggccagcgccaagagcgcccctgagatccccaccatcgaccaggcctacagcaagctgagcaacagcatcaccgtggagtgggccaccgtgcctggggccaccagctacctgctgacagcagaagatggagacaccgtcatcgagaccaccgtggccaacagccctggcaccgtgacaggcctgaaggccgccacctggtatgagatcaccatccgcagcatctctgctgctggccgcagccaggccagcccccccaagcaggccaagacagtgctggccgcccccatcctggaggtgagcagccccagcagtgacagcatcctggtgcagtgggaggccgtgtacatggccatcgccttctctgtgtccatcatgagggccaacggcctgggcagcatctggaaggagaacaccaccaacaccagcctgaccttcaccagcctggaggccggcaccctgtacaccatcaaggcctatgcctggaatgccaaccgcatccctggagatgacagcacctgcaaccagaggaccagcccccgggccccagccaacatccaggtgtcctttgacagcggggccctgaaggccagcttctcctgggcccgggcagagggcgccttcaactacacagtgatggccctgagtgacagcagcgagctgacctgcagcaccaccttcagcagctgcaccatcagcagcctgcagtgtggcacagagtacctgatctctgtgctggccagcaatgatgctggcagcagcaagagcagcagcgccatgaccctgaagacagtggcctgtgcccctggccgggtgaccatccaggaggaccccccaggccacctgtctgtggcctggagctctgtggacctgggggactactacgtggtgtttgtgaagagtgatgatggcctggaggtgcactgcaacaccagcctgacccagtgcaacttcctgtctgaatgtggcttcacctacttcatctctgtgtttgtgtacaacaaggccggccagagccccctgggggacatcttcaactacaccacagccccctgctgccccagcgacatcaaccctgtgctggtgtccagtgacagagtggagatcgtgtggagccctgtgagaggagctgagctgtatgagaccaaggctgtggatggctacaacatggtggagtgcaatgacaccaccccagcctgcaccctgagcgccctggagtgtgacaccaagtacaacatcaccgtgtacagcttcaatgaggtgcggggcagcaacatgagctgcaccccccagttcatcaccacagccccctgcagccctgagatcaagaatgtgtccagagatgccttctccatgatcaacgtgcactggaggagcaccaatgatgatgccacctacacagtgacagcccagggcgagaagggcctgtaccagtgcagcagcactggagagagctgcaccatgaggggcctgccctgtggctctgtgttttctgtgacagctgtggccgagacccaggccggccgcagcctgcccagctacagcgtgcccctggagaccgtgccctgctgccccaccggcctgactgtgacccagatcacccagagcgtcatcaacgtgtcctggaccatcggccgggtggcccagacccacgtggccgtgctggagagccacacaggccagagcaagtgccacacccaccagaaccactgcctgctgggctgcatcacctgtggcatcaactacacagtgaccctgaaggccatcagcgccaccggcctgacagctgactgcagctaccagagctacttcagcggggcctgctgccccctgggcgtgaagctgtaccgcctgggccccaacggcatccgcatctactggcaggccagccggggcagcgccaactacagcacagacctgtatggcagcaagggcatcttcacctgcacccccagcgctggcctgtccttctgtgatgtgacagagatcccctgtggagatgtgtacacagtgatggtgtcccctgtggccaagacaggcctgaagctgaccttctgccccaagaagatctacagcgtgacctgcagcggcagcaccctgggcatggtgatctaccggggcaagagaaatgaggagtag

SEQ ID NO: 6960 - DNA, 1098 bp, synthetic construct
  misc_feature 1..1098: note = source = /note="Description of Artificial Sequence: Synthetic coding sequence"
  source 1..1098: mol_type = other DNA
atgctggatggcagccccctggcccgctggctggccgccgccttcggcctgaccctgctgctggccgccctgcggcccagcgctgcctacttcggcctgaccggcagcgagcccctgaccatcctgcccctgaccctggagcctgaggccgccgcccaggcccactacaaggcctgtgaccggctgaagctggagaggaagcagaggaggatgtgcagaagagaccccggggtggccgagaccctggtggaggccgtgtccatgtctgccctggagtgccagttccagttccgctttgagcgctggaactgcaccctggagggccgctaccgggccagcctgctgaagaggggcttcaaggagacagccttcctgtatgccatcagcagcgctggcctgacccacgccctggccaaggcctgcagcgctggccgcatggagcgctgcacctgtgatgaggccccagacctggagaaccgggaggcctggcagtggggcggctgtggggacaacctgaagtacagcagcaagtttgtgaaggagttcctgggcagaagaagcagcaaggacctgcgggcccgggtggacttccacaacaacctggtgggcgtgaaggtgatcaaggccggcgtggagaccacctgcaagtgccacggcgtgtctggcagctgcaccgtgaggacctgctggaggcagctggcccccttccacgaggtgggcaagcacctgaagcacaagtatgaaacagccctgaaggtgggcagcaccaccaatgaggccgccggggaggccggggccatcagccccccccggggccgggccagcggggccggcggcagtgaccccctgcccaggaccccagagctggtgcacctggatgacagccccagcttctgcctggccggccgcttcagccctggaacagctggaagacgctgccaccgggagaagaactgtgagagcatctgctgcggccggggccacaacacccagagccgggtggtgacccggccctgccagtgccaggtgcgctggtgctgctacgtggagtgccggcagtgcacccagcgggaggaggtgtacacctgcaagggctag

SEQ ID NO: 6961 - DNA, 795 bp, synthetic construct
  misc_feature 1..795: note = source = /note="Description of Artificial Sequence: Synthetic coding sequence"
  source 1..795: mol_type = other DNA
atgaggctgcggcccctgcccctggtggtggtgcccggcctgctgcagctgctcttctgtgacagcaaggaggtggtgcacgccacagagggcctggactgggaggacaaggatgcccctggcaccctggtgggcaatgtggtgcacagccgcatcatcagccccctgcggctgtttgtgaagcagagccctgtgcccaagccaggccccatggcctatgctgacagcatggagaacttctgggactggctggccaacatcacagagatccaggagcccctggcccggaccaagagaagacccatcgtgaagacaggcaagttcaagaagatgtttggctggggagacttccacagcaacatcaagacagtgaagctgaacctgctgatcaccgggaagatcgtggaccatggaaatggcaccttctctgtgtacttccgccacaacagcacaggcctgggcaatgtgtctgtgtccctggtgccccccagcaaggtggtggagtttgaggtgagcccccagagcaccctggagaccaaggagagcaagagcttcaactgcagaattgaatatgagaagacagaccgggccaagaagacagccctgtgcaactttgaccccagcaagatctgctaccaggagcagacccagagccacgtgtcctggctgtgcagcaagcccttcaaggtgatctgcatctacatcgccttctacagcgtggactacaagctggtgcagaaggtgtgcccagactacaactaccacagcgagaccccctacctgagcagtggatag

SEQ ID NO: 6962 - DNA, 1125 bp, synthetic construct
  misc_feature 1..1125: note = source = /note="Description of Artificial Sequence: Synthetic coding sequence"
  source 1..1125: mol_type = other DNA
atgaagcccctgctggagaccctgtacctgctgggcatgctggtgcctgggggcctgggctatgacaggagcctggcccagcaccggcaggagatcgtggacaagtctgtgagcccctggagcctggagacctacagctacaacatctaccaccccatgggagagatctatgagtggatgagggagatcagcgagaagtacaaggaggtggtgacccagcacttcctgggcgtgacctatgagacccaccccatgtactacctgaagatcagccagcccagcggcaaccccaagaagatcatctggatggactgtggcatccacgcccgggagtggatcgccccagccttctgccagtggtttgtgaaggagatcctgcagaaccacaaggacaacagcagcatcaggaagctgctgaggaacctggacttctacgtgctgcctgtgctgaacattgatggctacatctacacctggaccacagaccggctgtggaggaagagccgcagcccccacaacaacggcacctgcttcggcacagacctgaacagaaacttcaatgcctcctggtgcagcattggagccagcaggaactgccaggaccagaccttctgtggcactggacctgtgtctgagcctgagaccaaggctgtggccagcttcatcgagagcaagaaggatgacatcctgtgcttcctgaccatgcacagctatggccagctgatcctgaccccctacggctacaccaagaacaagagcagcaaccaccctgagatgatccaggtgggccagaaggccgccaatgccctgaaggccaagtatggcaccaactacagagtgggcagcagcgctgacatcctgtatgccagcagcggcagcagccgggactgggcccgggacatcggcatccccttctcctacacctttgagctgcgggacagcggcacctacggctttgtgctgcctgaggcccagatccagcccacctgtgaggagaccatggaggccgtgctgtctgtgctggatgatgtgtatgccaagcactggcacagcgacagcgctggccgggtgaccagcgccaccatgctgctgggcctgctggtgtcctgcatgagcctgctgtag

SEQ ID NO: 6963 - DNA, 1728 bp, synthetic construct
  misc_feature 1..1728: note = source = /note="Description of Artificial Sequence: Synthetic coding sequence"
  source 1..1728: mol_type = other DNA
atggcctcctggctgcggaggaagctgcggggcaagagaagacctgtgattgccttctgcctgctgatgatcctgagcgccatggctgtgacccgcttccccccccagaggccttctgctggccctgaccccggccccatggagccccagggcgtgactggagccccagccacccacatccggcaggccctgagcagcagccggcggcagagggccaggaacatgggcttctggaggagccgggccctgcccagaaattccatcctggtgtgtgccgaggagcagggccaccgggcccgggtggacaggagccgggagagccctggaggagacctgcggcaccctggccgggtgagaagagacatcaccctgagcggccacccccggctgagcacccagcacgtggtgctgctgcgggaggatgaggtgggggaccccggcaccaaggacctgggccacccccagcacggcagccccatccaggagacccagagcgaggtggtgaccctggtgagccccctgcccggcagtgacatggccgccctgcctgcctggagggccaccagcggcctgaccctgtggccccacacagctgagggccgggacctgctgggcgcagaaaatagagccctgaccggcggccagcaggccgaggaccccaccctggccagcggggcccaccagtggccaggctctgtggagaagctgcagggctctgtgtggtgtgatgctgagaccctgctgagcagcagcaggactggaggccaggccccaccctggctgacagaccatgatgtgcagatgctgcggctgctggcccagggcgaggtggtggacaaggcccgggtgcctgcccacggccaggtgctgcaggtgggcttcagcacagaggccgccctgcaggacctgagcagcccccggctgagccagctgtgcagccagggcctgtgtggcctcatcaagaggcctggggacctgcctgaggtgctgtccttccacgtggacagagtgctgggcctgcggcgcagcctgcctgctgtggcccggcgcttccacagccccctgctgccctaccgctacacagatggaggagcccggcctgtgatctggtgggccccagatgtgcagcacctgagtgaccctgatgaggaccagaacagcctggccctgggctggctgcagtaccaggccctgctggcccacagctgcaactggccaggccaggccccctgccccggcatccaccacacagagtgggcccggctggccctgtttgacttcctgctgcaggtgcatgaccggctggaccgctactgctgcggctttgagcctgagcccagcgacccctgtgtggaggagcggctgcgggagaagtgccagaacccagctgagctgcggctggtgcacatcctggtgcgcagcagtgaccccagccacctggtgtacatcgacaatgccggcaacctgcagcaccctgaggacaagctgaacttccggctgctggagggcattgatggcttccctgagagcgctgtgaaggtgctggccagcggctgcctgcagaacatgctgctgaagagcctgcagatggaccccgtcttctgggagagccagggcggggcccagggcctgaagcaggtgctgcagaccctggagcagaggggccaggtgctgctgggccacatccagaagcacaacctgaccctcttcagagatgaggacccctag

SEQ ID NO: 6964 - DNA, 1680 bp, synthetic construct
  misc_feature 1..1680: note = source = /note="Description of Artificial Sequence: Synthetic coding sequence"
  source 1..1680: mol_type = other DNA
atgtggaccaacttcttcaagctgcggctcttctgctgcctgctggccgtgctgatggtggtggtgctggtgatcaacgtgacccaggtggagtacctggaccatgaaacagtgtctgccaccttcatcgacagcagcggccagtttgtgagcagccaggtgacaggcatcagcaggaacccctactgcggctatgaccagcagaccctgagcagccaggagaggatggaggaggacagcctgctggccgccctgcaccggcaggtgcctgatgtgggccctgtgccctttgtgaagagcacagaccccagcagcagctacttcgtcatcctgaacagcgctgccttcttcaaggtgggcagccagctggaggtgctggtgcacgtgcaggacttccagaggaagcccaagaagtatggaggagactacctgcaggcccgcatccacagcctgaagctgcaggccggggctgtgggccgggtggtggactaccagaatggcttctacaaggtgttcttcaccctgctgtggccaggcaaggtgaaggtgtctgtgtccctggtgcaccccagcgagggcatccgggtgctgcagaggctgcaggaggacaagccagacagagtgtacttcaagagcctcttccgcagcggccgcatcagcgagaccacagagtgcaatgtgtgcctgcccggcaacctgcccctgtgcaacttcacagacctgtacacaggagagccctggttctgcttcaagcccaagaagctgccctgcagcagccgcatcacccacttcaagggcggctacctgaagggcctgctgacagctgctgagagcgccttcttccagagcggcgtgaacatcaagatgcctgtgaacagcagcggccctgactgggtgaccgtcatcccccggcgcatcaaggagaccaacagcctggagctgagccagggcagcggcaccttccccagcggctactactacaaggaccagtggaggcccaggaagttcaagatgaggcagttcaatgaccctgacaacatcacagaatgtctgcagaggaaggtggtgcacctgtttggagacagcaccatccggcagtggtttgagtacctgaccacctttgtgcctgacctggtggagttcaacctgggcagccccaagaatgtgggccccttcctggccgtggaccagaagcacaacatcctgctgaagtaccgctgccacggcccccccatccgcttcaccaccgtcttcagcaatgagctgcactacgtggccaatgagctgaatggcatcgtgggcggcaagaacacagtggtggccatcgctgtgtggagccacttcagcaccttccccctggaggtgtacatccggcggctgaggaacatccggcgggctgtggtgcggctgctggacaggagccccaagacagtggtggtgatcagaacagccaatgcccaggagctgggccctgaggtgtccctcttcaacagcgactggtacaacttccagctggacaccatcctgcggaggatgttcagcggcgtgggcgtgtacctggtggatgcctgggagatgaccctggcccactacctgccccacaagctgcacccagatgaagtcatcgtgaagaaccagctggacatgttcctgagctttgtgtgccccctggagacctag

SEQ ID NO: 6965 - DNA, 3624 bp, synthetic construct
  misc_feature 1..3624: note = source = /note="Description of Artificial Sequence: Synthetic coding sequence"
  source 1..3624: mol_type = other DNA
atgaggctgacccacatctgctgctgctgcctgctgtaccagctgggcttcctgagcaatggcatcgtgtctgagctgcagtttgccccagaccgggaggagtgggaggtggtgtttcctgccctgtggaggcgggagcctgtggaccctgctgggggcagcggcggcagcgctgaccccggctgggtgcggggcgtgggcggcggcggcagcgcccgggcccaggccgccggcagcagccgggaggtgcgctctgtggcccctgtgcccctggaggagcctgtggagggccgctctgagagccggctgcggcccccacctccttctgagggggaggaggatgaggagctggagagccaggagctgccccggggcagcagtggagctgctgccctgagccctggggccccagcctcctggcagcccccacctccaccccagcccccacccagccccccaccagcccagcacgccgagccagatggagatgaggtgctgctgcgcatcccagccttcagccgggacctgtacctgctgctgcggagagatggccgcttcctggcccccaggtttgctgtggagcagaggcccaaccctggccctggccccaccggggccgccagcgccccccagcccccagcccccccagatgctggctgcttctacacaggagctgtgctgcggcaccctggcagcctggccagcttcagcacctgtggcggcggcctgatgggcttcatccagctgaatgaagacttcatcttcatcgagcccctgaatgacaccatggccatcaccggccacccccaccgggtgtaccggcagaagaggtccatggaggagaaggtgacagagaagagcgccctgcacagccactactgcggcatcatcagtgacaagggccggcccaggagcaggaagattgctgagagcggccggggcaagcgctacagctacaagctgccccaggagtacaacattgaaacagtggtggtggccgaccctgccatggtgtcctaccatggagcagatgctgcccggcgcttcatcctgaccatcctgaacatggtgttcaacctcttccagcacaagagcctgtctgtgcaggtgaacctgcgggtcatcaagctgatcctgctgcacgagaccccacctgagctgtacatcggccaccacggggagaagatgctggagagcttctgcaagtggcagcacgaggagtttgggaagaagaatgacatccacctggagatgagcaccaactggggcgaggacatgacctctgtggatgctgccatcctgatcaccaggaaggacttctgtgtgcacaaggatgagccctgtgacacagtgggcatcgcctacctgagcggcatgtgcagcgagaagaggaagtgcatcatcgccgaggacaatggcctgaacctggccttcaccatcgcccacgagatgggccacaacatgggcatcaaccacgacaatgaccaccccagctgtgctgatggcctgcacatcatgtctggagagtggatcaagggccagaacctgggagatgtgtcctggagccgctgcagcaaagaagacctggagcgcttcctgcggagcaaggccagcaactgcctgctgcagaccaacccccagagcgtgaacagcgtgatggtgcccagcaagctgcccggcatgacctacacagcagatgagcagtgccagatcctgtttggccccctggccagcttctgccaggagatgcagcacgtgatctgcaccggcctgtggtgcaaggtggagggggagaaggagtgcaggaccaagctggacccccccatggatggaacagactgtgacctgggcaagtggtgcaaggccggggagtgcaccagcaggaccagcgcccctgagcacctggccggggagtggagcctgtggagcccctgcagcaggacctgcagcgctggcatcagcagccgggagaggaaatgtcctggcctggacagcgaggcccgggactgcaatggccccaggaagcagtaccgcatctgtgaaaatccaccctgcccagctggcctgcccggcttccgggactggcagtgccaggcctacagcgtgaggaccagcagccccaagcacatcctgcagtggcaggccgtgctggatgaggagaagccctgtgccctcttctgcagccctgtgggcaaggagcagcccatcctgctgtctgagaaggtgatggatggcaccagctgtggctaccagggcctggacatctgtgccaacggccgctgccagaaggtgggctgtgatggcctgctgggcagcctggcccgggaggaccactgcggcgtgtgcaatggaaatggcaagagctgcaagatcatcaagggggacttcaaccacaccaggggggccggctacgtggaggtgctggtgatcccagctggggcccggcgcatcaaggtggtggaggagaagccagcccacagctacctggccctgagagatgctgggaagcagagcatcaacagcgactggaagattgagcacagcggggccttcaacctggccggcaccaccgtgcactacgtgcggcggggcctgtgggagaagatcagcgccaagggccccaccacagcccccctgcacctgctggtgctgctcttccaggaccagaactacggcctgcactatgagtacaccatccccagcgaccccctgcctgagaaccagagcagcaaggcccctgagcccctcttcatgtggacccacacctcctgggaggactgtgatgccacctgtggcggcggggagaggaagaccaccgtgtcctgcaccaagatcatgagcaagaacatcagcatcgtggacaatgagaagtgcaagtacctgaccaagccagagccccagatcaggaagtgcaatgagcagccctgccagacccgctggatgatgacagagtggaccccctgcagcaggacctgtgggaagggcatgcagagccggcaggtggcctgcacccagcagctgagcaatggcaccctcatccgggcccgggagcgggactgcatcggccccaagccagccagcgcccagagatgtgagggccaggactgcatgacagtgtgggaggccggcgtgtggagcgaatgttctgtgaagtgtgggaagggcatccgccacaggacagtgcgctgcaccaaccccaggaagaagtgtgtgctgagcacccggccccgggaggccgaggactgtgaggactacagcaaatgttatgtgtggaggatgggagactggagcaagtgcagcatcacctgtgggaagggcatgcagagcagggtcatccagtgcatgcacaagatcaccggccgccacggcaatgaatgcttcagcagcgagaagccagctgcctaccggccctgccacctgcagccctgcaatgagaagatcaacgtgaacaccatcaccagcccccggctggccgccctgaccttcaagtgcctgggggaccagtggcctgtgtactgcagggtcatccgggagaagaacctgtgccaggacatgcgctggtaccagcgctgctgtgagacctgccgggacttctacgcccagaagctgcagcagaagagctag

SEQ ID NO: 6966 - DNA, 258 bp, synthetic construct
  misc_feature 1..258: note = source = /note="Description of Artificial Sequence: Synthetic coding sequence"
  source 1..258: mol_type = other DNA
atgaagatcaccggcggcctgctgctgctgtgcaccgtggtgtacttctgcagcagcagcgaggccgccagcctgagccccaagaaggtggactgcagcatctacaagaagtaccctgtggtggccatcccctgccccatcacctacctgcctgtgtgtggcagtgactacatcacctatggaaatgaatgccacctgtgcacagagagcctgaagagcaatggccgggtgcagttcctgcatgatggcagctgctag

SEQ ID NO: 6967 - DNA, 2982 bp, synthetic construct
  misc_feature 1..2982: note = source = /note="Description of Artificial Sequence: Synthetic coding sequence"
  source 1..2982: mol_type = other DNA
atgggcagcggccgggtgcccggcctgtgcctgctggtgctgctggtgcacgcccgggccgcccagtacagcaaggccgcccaggatgtggatgaatgtgtggagggcacagacaactgccacattgatgccatctgccagaacacccccaggagctacaagtgcatctgcaagagcggctacacaggagatggcaagcactgcaaggatgtggatgaatgtgaaagagaagataatgccggctgtgtgcatgactgtgtgaacatccctggcaactaccgctgcacctgctatgatggcttccacctggcccatgatggccacaactgcctggatgtggatgaatgtgccgagggcaatggaggctgccagcagagctgtgtgaacatgatgggcagctatgagtgccactgccgggagggcttcttcctgagtgacaaccagcacacctgcatccagaggcctgaggagggcatgaactgcatgaacaagaaccacggctgtgcccacatctgccgggagacccccaagggcggcatcgcctgtgaatgtcggcccggctttgagctgaccaagaaccagagggactgcaagctgacctgcaactatggaaatggaggctgccagcacacctgtgatgacacagagcagggcccccgctgtggctgccacatcaagtttgtgctgcacacagatggcaagacctgcatcgagacctgtgctgtgaacaacggcggctgtgacagcaagtgccatgatgctgccaccggggtgcactgcacctgccctgtgggcttcatgctgcagcctgacaggaagacctgcaaggacattgatgagtgccgcctgaacaatggaggctgtgaccacatctgcaggaacacagtgggcagctttgagtgcagctgcaagaagggctacaagctgctgatcaatgaaagaaactgccaggacattgatgaatgttcctttgacaggacctgtgaccacatctgtgtgaacaccccaggcagcttccagtgcctgtgccaccggggctacctgctgtatggcatcacccactgtggagatgtggatgagtgcagcatcaacagaggaggctgccgcttcggctgcatcaacaccccaggcagctaccagtgcacctgcccagctggccagggccgcctgcactggaatggcaaggactgcacagagcccctgaagtgccagggcagccctggggccagcaaggccatgctgagctgcaacagaagtggcaagaaggacacctgtgccctgacctgccccagccgggcccgcttcctgcctgagagtgaaaatggcttcaccgtgtcctgtggcacccccagcccccgggccgccccagcccgggccggccacaacggcaacagcaccaacagcaaccactgccacgaggccgctgtgctgagcatcaagcagagggccagcttcaagatcaaggatgccaagtgccgcctgcacctgagaaataaaggcaagacagaggaggccggccgcatcactggacctggaggagccccctgcagcgagtgccaggtgaccttcatccacctgaagtgtgacagcagcaggaaaggaaaaggaagaagagcccggaccccacctgggaaggaggtgacccggctgaccctggagctggaggccgaggtgcgggcagaggagaccacagccagctgtggcctgccctgcctgcggcagaggatggagcggcggctgaagggcagcctgaagatgctgaggaagagcatcaaccaggaccgcttcctgctgcggctggccggcctggactatgagctggcccacaagccaggcctggtggccggggagagagctgagcccatggagagctgcaggcctggccagcaccgggccggcaccaagtgtgtgtcctgcccccagggcacctactaccacggccagacagagcagtgtgtgccctgcccagctggcaccttccaggagcgggagggccagctgagctgtgacctgtgccccggcagtgatgcccacggccccctgggcgccaccaacgtgaccacctgtgccggccagtgccccccaggccagcacagcgtggatggcttcaagccctgccagccctgcccccggggcacctaccagcctgaggccggccgcaccctgtgcttcccctgtggcggcggcctgaccaccaagcatgagggcgccatctccttccaggactgtgacaccaaggtgcagtgcagccctggccactactacaacaccagcatccaccgctgcatccgctgtgccatgggcagctaccagcctgacttccggcagaacttctgcagccgctgccccggcaacaccagcacagactttgatggcagcacctctgtggcccagtgcaagaaccggcagtgtggcggggagctgggggagttcaccggctacatcgagagccccaactacccaggcaactacccagctggggtggagtgcatctggaacatcaaccccccacccaagaggaagatcctgattgtggtgcctgagatcttcctgcccagtgaagatgaatgtggagatgtgctggtgatgaggaagaacagcagccccagcagcatcaccacctatgagacctgccagacctatgagcggcccatcgccttcaccgcccggagcaggaagctgtggatcaacttcaagaccagcgaggccaacagcgcccggggcttccagatcccctacgtgacctatgatgaggactatgagcagctggtggaggacatcgtgagagatggccgcctgtatgccagcgagaaccaccaggagatcctgaaggacaagaagctgatcaaggccttctttgaggtgctggcccacccccagaactacttcaagtacacagagaagcacaaggagatgctgcccaagagcttcatcaagctgctgcggagcaaggtgtcctccttcctgcggccctacaagtag

SEQ ID NO: 6968 - DNA, 4773 bp, synthetic construct
  misc_feature 1..4773: note = source = /note="Description of Artificial Sequence: Synthetic coding sequence"
  source 1..4773: mol_type = other DNA
atgcctgggggcgcctgtgtgctggtgattgccctgatgttcctggcctggggcgaggcccaggagtgcagccctgggggccaccagttcctgcggagcccctacagatctgtgcgctttgacagctggcacctgcagcagagcgctgtgcaggacctgatctgtgaccacagcctgagccctggctggtaccgcttcctgatcctggacaggcctgctgagatgcccaccaagtgtgtggagatgaaccactgcggcacccaggcccccatctggctgagcctgcgggacagcgagaccctgcccagccctggagagatcaagcagctgacagcctgtgccacctggcagttcctgttcagcaccaccaaggactgctgcctcttccagatccctgtgtctgtgaggaactgtggcaacttctctgtgtacctgctgcagcccacccagggctgcatgggctactgtgccgaggccatcagtgatgcccggctgcacccctgtggcagtgatgaaacagaaacaggaggagactgtgtgcggcagctggccgccagcctgcccccacctcctgctggccggcctgaggtgctggtggagctgattgagagccgcctcttctgccgctgcagctttgatgtgcctgccaccaagaacagcgtgggcttccacatcgcctggagccggctgagcagccaggaggtgaaggaggagctgacccaggagaccaccgtgcaggccttcagcctgctggagctggatggcatcaacctgcggctgggggaccgcatcttctgcagcgcctctgtgttcttcctggagaacccccacgtgcagagcgtggccatcgagagccaggagttctttgctggcttcaagctgcagcctgagctgagcaccatcagtgaagatggcaaggagtactacctgcgcatcgagagcacagtgcccatcatctgcagcgagttcagcgagctggaccaggagtgcaagatcagcctgaagctgaagaccatcggccagggccgggagcacctgggcctgaacctggccctgagcagctgccacgtggacctgctgcagaccagcagctgtgccaacggcacctgcagccacacctttgtgtactacacagctgtgacagacttcagcagagatggagacagagtgagcaacatcgtggtgcagcccatcgtgaatgaagacttcctgtggaacaactacatcccagacagcatccagatcaaggtgaaggatgtgcccacagcctactgctacaccttcacagacccccacatcatcacctttgatggccgggtgtatgacaacttcaagacaggcacctttgtgctgtacaagtccatgagccgggactttgaggtgcacgtgcggcagtgggactgccgcagcctgcactaccctgtgtcctgcaactgtggctttgtggcccaggagggcggggacatcgtgacctttgacatgtgcaatggccagctgcgggagagccagccctacctgttcatcaagagccaggatgtgaccaggaacatcaagatcagcgagagctacctgggcaggaaggtgaccatctggttcagcagcggggccttcatccgggctgacctgggggagtggggcatgagcctgaccatccgggcccccagcgtggactacagaaacaccctgggcctgtgtggcacctttgatgagaacccagaaaatgacttccatgacaagaatggcatgcagattgaccagaacttcaacaactacgtggccttcatcaatgagtggaggatcctgcccgggaagtccatgtctgacaccctgcctgtgtccatgaccagccctgggaagcccagctactgcagctgcagcctggacacagctgcctaccccagcagcgaggacctggacagcgtgagccgctctgagatcgccctgggctgcaaggacctgaaccacgtgtccctgagcagcctcatccctgagctggatgtgaccagcgagtacatcaacagcgacaccctggtgcgggagatcaacaagcacaccagccctgaggagtacaacctgaacctcttcctgcaggagaagaagcacatcaacctgaccaagctgggcctgaatgtgcagaagcaccctggaaatgagaaggaggacagcctgcagtacctggccaacaagaagtacacccagggccggggcagccacagccaggagatgagatacaaccggcagaaccgctggaagaggcagaacttccacgagttcccccccctgtttgccttccccagcctgagccagacagacctggaggagctgacctacttcttcccagaagatcatgctgaagatgtgcagcaggagttcttccccagctggcccaccccatctggcctgacagagtacagcaccctgaccctgtgccaggagaccctggccaacagcagcatcggccgcctgtgcctggccttcctgggcaagaggctggacagcgtgattgagatgtgtgtgaaggatgtgctgctgaaggatgacctgtcctgggccgaggccggcgtggccctgctggagaatgaatgtgagaagagaattgtggaggagggcaagtacaacacagaggagtatggcaccagcattgaggacatcctgtctgtgctgaagtgccccaacctgtgcagcggaaatggccagtgcatggagtggggctgtgcctgcagccccagcttcagcagctatgactgcagcgacagctatgacaaggcccctgagatcacagagctgggcaatgccggcttctgtgatgtgcagaagtacaactgcatgatggtgcgggtgtttgggaagggcttcaaggagctgcccagcatcaagtgtgaggtgaccaagctgcagtacaacagcagcgagtggatgcctggagagcccatctacacccagaccgtcttccacaacagcagagctgtggactgccagctgcccacagatgtgcagcagtttgacaccatggacctggtgggcggcaagcccaccgggaagtggcagctgaaggtgtccaatgatggctacaagttcagcaaccccaagatcaccgtcatctatgatggagcctgccaggtgtgtggcctgtacaagaatgacagctgcaccatcaaggaaaatgtgtgcatcattgatggcctgtgctacgtggagggggacaagaaccccaccagcccctgcctgatctgccggcccaagatcagccgcttcacctggagcttcctggagaacaaccagccccctgtgatccaggccctgcaggacaagctgcagaccttctatggagaaaattttgagtaccagtttgtggcctttgatcctgagggcagtgacatccacttcaccctggacagcggccctgagggcgcctctgtgagcagcgctggcctcttcatgtggaagacagacctgctgaccacccagcagatcaccgtgcggctgaatgatgactgtgatgctgagaccagggtgaccatcgaggtgacagtgaagagctgtgactgcctgaatggaggcagctgtgtgtctgacaggaacttcagccctggcagcggcgtgtacctgtgtgtgtgcctgcccggcttccacggcagcctgtgtgaggtggacatcagcggctgccagagcaacccctgtggcctgggcagctacatcagcggcttccacagctacagctgtgactgccccccagagctgaaggtggagacccagtttgtgaaccagttcaccacccagacagtggtgctgaccaggagtgacaagtctgtgaacaaggaggaggatgacaagaatgcccagggcaggaagagacatgtgaagcccaccagcggaaatgccttcaccatctgcaagtacccctgtgggaagagcagagaatgtgtggcccccaacatctgcaagtgcaagccaggctacatcggcagcaactgccagacagccctgtgtgaccctgactgcaagaaccacggcaagtgcatcaagcccaacatctgccagtgcctgcccggccacggcggggccacctgtgatgaggagcactgcaaccccccctgccagcacggcggcacctgcctggccggcaacctgtgcacctgcccctacggctttgtgggcccccgctgtgagaccatggtgtgcaacagacactgtgaaaatggaggccagtgcctgaccccagacatctgccagtgcaagccaggctggtacggccccacctgcagcacagccctgtgtgaccctgtgtgcctgaatggaggcagctgcaacaagcccaacacctgcctgtgccccaacggcttctttggagagcactgccagaatgccttctgccaccccccctgcaagaatggaggccactgcatgaggaacaacgtgtgtgtgtgccgggagggctacacaggaagacgcttccagaagagcatctgtgaccccacctgcatgaatggaggaaaatgtgtgggccccagcacctgcagctgccccagcggctggagcggcaagcgctgcaacacccccatctgcctgcagaagtgcaagaatggaggagaatgtattgcccccagcatctgccactgccccagctcctgggagggcgtgcgctgccagatccccatctgcaaccccaagtgcctgtatggaggccgctgcatcttccccaacgtgtgcagctgcaggacagagtacagcggcgtgaagtgtgagaagaagatccagatccgccgccactag

SEQ ID NO: 6969 - DNA, 624 bp, synthetic construct
  misc_feature 1..624: note = source = /note="Description of Artificial Sequence: Synthetic coding sequence"
  source 1..624: mol_type = other DNA
atgagcaccaagccagacatgatccagaagtgcctgtggctggagatcctgatgggcatcttcatcgccggcaccctgagcctggactgcaacctgctgaatgtgcacctgcggcgggtgacctggcagaacctgcggcacctgagctccatgagcaacagcttccctgtggagtgcctgcgggagaacatcgcctttgagctgccccaggagttcctgcagtacacccagcccatgaagagggacatcaagaaggccttctatgagatgagcctgcaggccttcaacatcttcagccagcacaccttcaagtactggaaggagcggcacctgaagcagatccagatcggcctggaccagcaggccgagtacctgaaccagtgcctggaggaggacaagaatgaaaatgaagacatgaaggagatgaaggaaaatgagatgaagcccagcgaggcccgggtgccccagctgagcagcctggagctgcggcgctacttccacagaattgacaacttcctgaaggagaagaagtacagcgactgtgcctgggagatcgtgcgggtggagatccgccgctgcctgtactacttctacaagttcaccgccctcttccggaggaagtag

SEQ ID NO: 6970 - DNA, 939 bp, synthetic construct
  misc_feature 1..939: note = source = /note="Description of Artificial Sequence: Synthetic coding sequence"
  source 1..939: mol_type = other DNA
atggagagcgccctgcctgctgctggcttcctgtactgggtgggcgccggcaccgtggcctacctggccctgcgcatctcctacagcctcttcaccgccctgcgggtgtggggcgtgggcaatgaagctggggtgggccctggcctgggggagtgggccgtggtgacaggcagcacagatggcatcggcaagagctatgcagaggagctggccaagcacggcatgaaggtggtgctgatcagccgcagcaaggacaagctggaccaggtgagcagcgagatcaaggagaagttcaaggtggagaccaggaccatcgctgtggactttgccagcgaggacatctatgacaagatcaagacaggcctggccggcctggagatcggcatcctggtgaacaacgtgggcatgtcctatgagtacccagagtacttcctggatgtgcctgacctggacaacgtcatcaagaagatgatcaacatcaacatcctgtctgtgtgcaagatgacccagctggtgctgcccggcatggtggagaggagcaaaggagccatcctgaacatcagcagcggcagcggcatgctgcctgtgcccctgctgaccatctacagcgccaccaagacctttgtggacttcttcagccagtgcctgcacgaggagtaccgcagcaaaggagtgtttgtgcagagcgtgctgccctactttgtggccaccaagctggccaagatcaggaagcccaccctggacaagcccagccctgagacctttgtgaagagcgccatcaagacagtgggcctgcagagcaggaccaacggctacctgattcatgccctgatgggcagcatcatcagcaacctgcccagctggatctacctgaagatcgtgatgaacatgaacaagagcacccgggcccactacctgaagaagaccaagaagaactag

SEQ ID NO: 6971 - DNA, 2214 bp, synthetic construct
  misc_feature 1..2214: note = source = /note="Description of Artificial Sequence: Synthetic coding sequence"
  source 1..2214: mol_type = other DNA
atggagctgggctgctggacccagctgggcctgaccttcctgcagctgctgctgatcagcagcctgccccgggagtacaccgtcatcaatgaggcctgccctggagctgagtggaacatcatgtgccgggagtgctgtgaatatgaccagattgaatgtgtgtgccctgggaagcgggaggtggtgggctacaccatcccctgctgcagaaatgaagaaaatgaatgtgacagctgcctgatccaccctggctgcaccatctttgagaactgcaagagctgcagaaatggctcctggggcggcaccctggatgacttctacgtgaagggcttctactgtgctgaatgtcgggccggctggtatggaggagactgcatgagatgtggccaggtgctgcgggcccccaagggccagatcctgctggagagctaccccctgaatgcccactgtgagtggaccatccacgccaagccaggcttcgtcatccagctgcgctttgtgatgctgagcctggagtttgactacatgtgccagtatgactatgtggaggtgagagatggagacaacagagatggccagatcatcaagagggtgtgtggaaatgaaagacctgcccccatccagagcatcggcagcagcctgcacgtgctcttccacagtgatggcagcaagaactttgatggcttccacgccatctatgaggagatcacagcctgcagcagcagcccctgcttccatgatggcacctgtgtgctggacaaggccggcagctacaagtgtgcctgcctggccggctacacaggccagagatgtgagaacctgctggaggccggcaagagcaagatcaaggccagcgaggacagcctgtctgtgctggaggagaggaactgcagcgaccccggcggccctgtgaatggctaccagaagatcactggaggccctggcctcatcaatggaagacatgccaagattggcaccgtggtgtccttcttctgcaacaacagctatgtgctgtctggaaatgagaagaggacctgccagcagaatggagagtggagcggcaagcagcccatctgcatcaaggcctgccgggagcccaagatcagtgacctggtgagaagaagagtgctgcccatgcaggtgcagagccgggagacccccctgcaccagctgtacagcgctgccttcagcaagcagaagctgcagagcgcccccaccaagaagccagccctgccctttggagacctgcccatgggctaccagcacctgcacacccagctgcagtatgagtgcatcagccccttctacagaaggctgggcagcagcaggaggacctgcctgaggacaggcaagtggagcggccgggcccccagctgcatccccatctgtgggaagattgagaacatcacagcccccaagacccagggcctgcgctggccctggcaggccgccatctacagaaggaccagcggcgtgcatgatggcagcctgcacaagggggcctggttcctggtgtgcagcggggccctggtgaatgaaagaacagtggtggtggccgcccactgtgtgacagacctgggcaaggtgaccatgatcaagacagctgacctgaaggtggtgctgggcaagttctacagagatgatgacagagatgagaagaccatccagagcctgcagatcagcgccatcatcctgcaccccaactatgaccccatcctgctggatgctgacatcgccatcctgaagctgctggacaaggcccgcatcagcaccagggtgcagcccatctgcctggccgccagccgggacctgagcaccagcttccaggagagccacatcaccgtggccggctggaatgtgctggctgatgtgcgcagccctggcttcaagaatgacaccctgcggtctggagtggtgtctgtggtggacagcctgctgtgtgaggagcagcacgaggaccacggcatccctgtgtctgtgacagacaacatgttctgtgcctcctgggagcccacagcccccagcgacatctgcacagctgagaccggcggcattgctgctgtgtccttccctggccgggccagccctgagccccgctggcacctgatgggcctggtgtcctggagctatgacaagacctgcagccaccggctgagcacagccttcaccaaggtgctgcccttcaaggactggattgaaagaaacatgaagtag

SEQ ID NO: 6972 - DNA, 1503 bp, synthetic construct
  misc_feature 1..1503: note = source = /note="Description of Artificial Sequence: Synthetic coding sequence"
  source 1..1503: mol_type = other DNA
atgggcacagcccgctggctggccctgggcagcctgtttgccctggccggcctgctggagggccgcctggtgggggaggaggaggccggctttggagaatgtgacaagttcttctacgccggcaccccacctgctggcctggccgctgacagccacgtgaagatctgccagagagctgagggcgctgagagatttgccaccctgtacagcacccgggaccgcatccctgtgtacagcgccttccgggcccccaggcctgcccctgggggcgctgagcagcgctggctggtggagccccagattgatgaccccaacagcaacctggaggaggccatcaatgaagctgaggccatcacctctgtgaacagcctgggcagcaagcaggccctgaacacagactacctggacagcgactaccagaggggccagctgtaccccttcagcctgagcagtgatgtgcaggtggccaccttcaccctgaccaacagcgcccccatgacccagagcttccaggagcgctggtacgtgaacctgcacagcctgatggaccgggccctgaccccccagtgtggcagcggggaggacctgtacatcctgaccggcaccgtgcccagcgactacagagtgaaggacaaggtggccgtgcctgagtttgtgtggctggccgcctgctgtgctgtgcctgggggcggctgggccatgggctttgtgaagcacacccgggacagcgacatcattgaagatgtgatggtgaaggacctgcagaagctgctgcccttcaacccccagctgttccagaacaactgtggggagacagagcaggacacagagaagatgaagaagatcctggaggtggtgaaccagatccaggatgaggagaggatggtgcagagccagaagagcagcagccccctgagcagcaccaggagcaagaggagcaccctgctgcccccagaggccagcgagggcagcagcagcttcctgggcaagctgatgggcttcatcgccacccccttcatcaagctgttccagctgatctactacctggtggtggccatcctgaagaacatcgtgtacttcctgtggtgtgtgaccaagcaggtgatcaatggcatcgagagctgcctgtaccgcctgggcagcgccaccatctcctacttcatggccatcggggaggagctggtgtccatcccctggaaggtgctgaaggtggtggccaaggtgatccgggccctgctgcgcatcctgtgctgcctgctgaaggccatctgccgggtgctgagcatccctgtgcgggtgctggtggatgtggccaccttccctgtgtacaccatgggcgccatccccatcgtgtgcaaggacatcgccctgggcctgggcggcaccgtgtccctgctgtttgacacagccttcggcaccctgggcggcctcttccaggtggtgttttctgtgtgcaagagaattggctacaaggtgacctttgacaacagcggggagctgtag

SEQ ID NO: 6973 - DNA, 300 bp, synthetic construct
  misc_feature 1..300: note = source = /note="Description of Artificial Sequence: Synthetic coding sequence"
  source 1..300: mol_type = other DNA
atgaagagcgccaagctgggcttcctgctgcgcttcttcatcttctgcagcctgaacaccctgctgctgggcggcgtgaacaagattgctgagaagatctgtggggacctgaaggacccctgcaagctggacatgaactttggcagctgctatgaggtgcacttccgctacttctacaacagaaccagcaagagatgtgagacctttgtgttcagcggctgcaatggaaacctgaacaacttcaagctgaagattgagcgggaggtggcctgtgtggccaagtacaagcccccaagatag

SEQ ID NO: 6974 - DNA, 390 bp, synthetic construct
  misc_feature 1..390: note = source = /note="Description of Artificial Sequence: Synthetic coding sequence"
  source 1..390: mol_type = other DNA
atgcccatggccagcccccagaccctggtgctgtacctgctggtgctggccgtgacagaggcctggggccaggaggccgtcatccctggctgccacctgcaccccttcaacgtgacagtgcggagtgaccggcagggcacctgccagggcagccacgtggcccaggcctgtgtgggccactgtgagagcagcgccttccccagccgctacagcgtgctggtggccagcggctaccgccacaacatcacctctgtgtcccagtgctgcaccatcagcggcctgaagaaggtgaaggtgcagctgcagtgtgtgggcagcagaagagaggagctggagatcttcaccgcccgggcctgccagtgtgacatgtgccgcctgagccgctactag

SEQ ID NO: 6975 - DNA, 1965 bp, synthetic construct
  misc_feature 1..1965: note = source = /note="Description of Artificial Sequence: Synthetic coding sequence"
  source 1..1965: mol_type = other DNA
atggccaagtttggagtgcaccgcatcctgctgctggccatcagcctgaccaagtgcctggagagcaccaagctgctggccgacctgaagaagtgtggggacctggagtgtgaggccctgatcaacagagtgtctgccatgagggactaccggggccctgactgccgctacctgaacttcaccaagggggaggagatctctgtgtatgtgaagctggccggggagcgggaggacctgtgggccggcagcaagggcaaggagtttggctacttccccagagatgctgtgcagatcgaggaggtgttcatcagcgaggagatccagatgagcaccaaggagagtgacttcctgtgcctgctgggcgtgtcctacacctttgacaatgaagattctgagctgaatggagactatggagagaacatctacccctatgaggaggacaaggatgagaagagcagcatctatgaaagtgacttccagatcgagcccggcttctacgccacctatgagagcaccctgtttgaggaccaggtgcctgccctggaggccccagaagatattggcagcaccagcgagagcaaggactgggaggaggtggtggtggagagcatggagcaggaccgcatccctgaggtgcacgtgccccccagcagcgctgtgtctggagtgaaggagtggtttggcctgggcggggagcaggccgaggagaaggcctttgaatctgtgattgagcctgtgcaggagagcagcttccgcagcaggaagattgctgtggaggatgaaaatgacctggaggagctgaacaatggagagccccagacagagcaccagcaggagagcgagagcgagattgacagcgtgcccaagacccagagcgagctggccagcgagagcgagcacatccccaagccccagagcacaggctggtttggaggcggcttcaccagctacctgggctttggagatgaggacaccggcctggagctgattgctgaggagagcaacccccccctgcaggacttccccaacagcatcagcagtgacaaggaggccaccgtgccctgcacagagatcctgacagagaagaaggacaccatcaccaatgacagcctgagcctgaagcccagctggtttgattttggatttgccatcctgggctttgcctatgccaaggaggacaagatcatgctggatgacaggaagaatgaggaggatggaggagcagatgaacatgagcaccccctgaccagcgagctggaccctgagaaggagcaggagattgagaccatcaagatcattgaaacagaggaccagattgacaagaagcctgtgtctgagaagacagatgaaagtgacaccatcccctacctgaagaagttcctgtacaactttgacaacccctggaacttccagaacatccccaaggagacagagctgcccttccccaagcagatcctggaccagaacaacgtgattgaaaatgaggagactggagagttcagcattgacaactaccccacagacaacaccaaggtgatgatcttcaagagcagctacagcctgagtgacatggtgagcaacatcgagctgcccacccgcatccacgaggaggtgtactttgagcccagcagcagcaaggacagtgatgagaacagcaagcccagcgtggacacagagggccctgccctggtggagattgacagatctgtggagaacaccctgctgaacagccagatggtgtccacagacaacagcctgagcagccagaactacatcagccagaaggaggatgccagcgagttccagatcctgaagtacctgttccagattgatgtgtatgacttcatgaacagcgccttcagccccatcgtcatcctgacagagcgggtgtccctgcccttcaagccctttgccatcatcctgcccatcctgctgaacatccgggtggccaccaagtatgtgtag

SEQ ID NO: 6976 - DNA, 1152 bp, synthetic construct
  misc_feature 1..1152: note = source = /note="Description of Artificial Sequence: Synthetic coding sequence"
  source 1..1152: mol_type = other DNA
atggccggcatccctggcctgctcttcctgctcttcttcctgctgtgtgctgtgggccaggtgagcccctacagcgccccctggaagcccacctggccagcctaccgcctgcctgtggtgctgccccagagcaccctgaacctggccaagccagactttggagctgaggccaagctggaggtgagcagcagctgtggcccccagtgccacaagggcacccccctgcccacctatgaggaggccaagcagtacctgtcctatgagaccctgtatgccaacggcagcaggacagagacccaggtgggcatctacatcctgagcagcagtggagatggagcccagcaccgggacagcggcagcagcggcaagagcaggaggaagaggcagatctacggctatgacagccgcttcagcatctttgggaaggacttcctgctgaactaccccttcagcacctctgtgaagctgagcacaggctgcaccggcaccctggtggccgagaagcacgtgctgacagctgcccactgcatccatgatggcaagacctacgtgaagggcacccagaagctgcgggtgggcttcctgaagcccaagttcaaggatggcggccgcggggccaatgacagcaccagcgccatgcctgagcagatgaagttccagtggatccgggtgaagaggacccacgtgcccaagggctggatcaagggaaatgccaatgacatcggcatggactatgactatgccctgctggagctgaagaagccccacaagaggaagttcatgaagattggagtgtccccaccagccaagcagctgcccggcggccgcatccacttcagcggctatgacaatgacaggcctggcaacctggtgtaccgcttctgtgatgtgaaggatgagacctatgacctgctgtaccagcagtgtgatgcccagcccggggccagcggcagcggcgtgtatgtgaggatgtggaagaggcagcagcagaagtgggagaggaagatcatcggcatcttcagcggccaccagtgggtggacatgaatggcagcccccaggacttcaacgtggccgtgcgcatcacccccctgaagtatgcccagatctgctactggatcaagggcaactacctggactgccgggagggctag

SEQ ID NO: 6977 - DNA, 1662 bp, synthetic construct
  misc_feature 1..1662: note = source = /note="Description of Artificial Sequence: Synthetic coding sequence"
  source 1..1662: mol_type = other DNA
atgaagtggtgctggggccctgtgctgctgattgctggggccaccgtgctgatggagggcctgcaggccgcccagagggcctgtggccagaggggccctggcccccccaagccccaggagggcaacacagtgcctggagagtggccctggcaggcctctgtgcggcggcagggcgcccacatctgcagcggcagcctggtggccgacacctgggtgctgacagctgcccactgctttgagaaggctgctgccacagagctgaacagctggagcgtggtgctgggcagcctgcagcgggagggcctgagccctggagctgaggaggtgggcgtggccgccctgcagctgccccgggcctacaaccactacagccagggcagtgacctggccctgctgcagctggcccaccccaccacccacacccccctgtgcctgccccagcctgcccaccgcttcccctttggagccagctgctgggccaccggctgggaccaggacaccagtgatgcccctggcaccctgaggaacctgcggctgcggctcatcagccggcccacctgcaactgcatctacaaccagctgcaccagaggcacctgagcaacccagcccggcccggcatgctgtgtggcggcccccagcccggggtgcagggcccctgccagggcgacagcggcggccctgtgctgtgcctggagccagatggccactgggtgcaggccggcatcatcagctttgccagcagctgtgcccaggaggatgcccctgtgctgctgaccaacacagctgcccacagctcctggctgcaggcccgggtgcagggcgccgccttcctggcccagagccctgagaccccagagatgtctgatgaggacagctgtgtggcctgtggcagcctgaggacagctggcccccaggccggggcccccagcccctggccctgggaggcccggctgatgcaccagggccagctggcctgtggcggggccctggtgtctgaggaggccgtgctgacagctgcccactgcttcatcggccggcaggcccctgaggagtggagcgtgggcctgggcaccaggcctgaggagtggggcctgaagcagctgatcctgcatggagcctacacccaccctgagggcggctatgacatggccctgctgctgctggcccagcctgtgaccctgggcgccagcctgcggcccctgtgcctgccctacccagaccaccacctgcctgatggagagcggggctgggtgctgggccgggcccggcctggggccggcatcagcagcctgcagacagtgcctgtgaccctgctgggcccccgggcctgcagccggctgcatgctgcccctggaggagatggcagccccatcctgcccggcatggtgtgcaccagcgctgtgggggagctgcccagctgtgagggcctgagcggggcccccctggtgcatgaggtgcggggcacctggttcctggccggcctgcacagctttggagatgcctgccagggccctgcccggcctgctgtgttcaccgccctgcctgcctatgaggactgggtgagcagcctggactggcaggtgtactttgctgaggagcctgagcctgaggccgagcccggcagctgcctggccaacatcagccagcccaccagctgctag

SEQ ID NO: 6978 - DNA, 936 bp, synthetic construct
  misc_feature 1..936: note = source = /note="Description of Artificial Sequence: Synthetic coding sequence"
  source 1..936: mol_type = other DNA
atgggcatcatccagagcatcctggccaccagccgggactgctacagcttcaagaagaagcccatccccaagaagcccaccatgctggccctggccaagatcctgctgatcagcaccctcttctacagcctgctgagcggcagccacggcaaggagaaccaggacatcaacaccacccagaacattgctgaggtgttcaagaccatggagaacaagcccatcagcctggagagcgaggccaacctgaacagcgacaaggagaacatcaccaccagcaacctgaaggccagccacagcccccccctgaacctgcccaacaacagccacggcatcacagacttcagcagcaacagcagcgctgagcacagcctgggcagcctgaagcccaccagcaccatcagcaccagccccccactcatccacagctttgtgtccaaggtgccctggaatgcccccatcgcagatgaggacctgctgcccatcagcgcccaccccaatgccaccccagccctgagcagcgagaacttcacctggagcctggtgaatgacacagtgaagaccccagacaacagcagcatcaccgtgtccatcctgagcagcgagcccaccagccccagcgtgacccccctgattgtggagcccagcggctggctgaccaccaacagcgacagcttcaccggcttcaccccctaccaggagaagaccaccctgcagcccaccctgaagttcaccaacaacagcaagctgttccccaacaccagtgacccccagaaggtgctgcggctggacaatgcccctgagccctatgatgtgtcctttggaaacagcagctactacaaccccaccctgaatgacagcgccatgcctgagagtgaagaaaatgccagagatggcatccccatggatgacatcccccccctgcggacctctgtgtag

SEQ ID NO: 6979 - DNA, 3120 bp, synthetic construct
  misc_feature 1..3120: note = source = /note="Description of Artificial Sequence: Synthetic coding sequence"
  source 1..3120: mol_type = other DNA
atgcagagccggctgctgctgctgggcgcccctgggggccacggcggccctgccagcaggaggatgaggctgctgctgcggcaggtggtgcagaggaggcctggaggagaccggcagaggcctgaggtgcggctgctgcacgccggcagcggggctgacaccggggacacagtgaacattggagatgtgtcctacaagctgaagatccccaagaaccctgagctggtgccccagaactacatcagtgacagcctggcccagagcgtggtgcagcacctgcgctggatcatgcagaaggacctgctgggccaggatgtgttcctgattggccccccaggccccctgcggcgcagcatcgccatgcagtacctggagctgaccaagcgggaggtggagtacatcgccctgagccgggacaccacagaaacagacctgaagcagaggcgggagatccgggccggcacagccttctacatcgaccagtgtgctgtgcgggccgccacagagggccgcaccctcatcctggagggcctggagaaggccgagagaaatgtgctgcctgtgctgaacaacctgctggagaaccgggagatgcagctggaggatggccgcttcctgatgtctgctgagagatatgacaagctgctgcgggaccacaccaagaaggagctggacagctggaagatcgtgcgggtgtctgagaacttccgggtgattgccctgggcctgcctgtgccccgctacagcggcaaccccctggacccccccctgcggagccgcttccaggcccgggacatctactacctgcccttcaaggaccagctgaagctgctgtacagcattggagccaacgtgtctgctgagaaggtgtcccagctgctgagctttgccaccaccctgtgcagccaggagagcagcaccctgggcctgcctgacttccccctggacagcctggccgctgctgtgcagatcctggacagcttccccatgatgcccatcaagcacgccatccagtggctgtacccctacagcatcctgctgggccacgagggcaagatggctgtggagggcgtgctgaagagatttgagctgcaggacagcggcagcagcctgctgcccaaggagatcgtgaaggtggagaagatgatggagaaccacgtgtcccaggcctctgtgaccatcagaattgctgacaaggaggtgaccatcaaggtgcctgctggcacccggctgctgagccagccctgtgccagtgaccgcttcatccagaccctgagccacaagcagctgcaggccgagatgatgcagagccacatggtgaaggacatctgcctgattggaggcaagggctgcggcaagacagtcatcgccaagaactttgctgacaccctgggctacaacatcgagcccatcatgctgtaccaggacatgacagcccgggacctgctgcagcagcgctacaccctgcccaatggagacacagcctggaggagcagccccctggtgaatgctgccctggagggcaagctggtgctgctggatggcatccaccgggtgaatgccggcaccctggccgtgctgcagaggctcatccatgaccgggagctgagcctgtatgatggcagccggctgctgagagaagatcgctacatgaggctgaaggaggagctgcagctgagtgatgagcagctgcagaagaggagcatcttccccatccaccccagcttccgcatcatcgccctggccgagccccctgtgattggcagcacagcccaccagtggctgggccctgagttcctgaccatgttcttcttccactacatgaagcccctggtgaagtctgaggagatccaggtgatcaaggagaaggtgcccaacgtgccccaggaggccctggacaagctgctgtccttcacccacaagctgcgggagacccaggaccccacagcccagagcctggccgccagcctgagcacccggcagctgctgcgcatcagccggcggctgagccagtacccaaatgaaaacctgcacagcgctgtgaccaaggcctgcctgagccgcttcctgcccagcctggcccggagcgccctggagaagaacctggctgatgccaccatcgagatcaacacagatgacaacctggagcctgagctgaaggactacaagtgtgaggtgaccagcggcaccctgagaattggagctgtgtctgcccccatctacaatgcccacgagaagatgaaggtgcctgatgtgctcttctatgacaacatccagcacgtgattgtgatggaggacatgctgaaggacttcctgctgggggagcacctgctgctggtgggcaaccagggcgtgggcaagaacaagatcgtggaccgcttcctgcacctgctgaaccggccccgggagtacatccagctgcaccgggacaccaccgtgcagaccctgaccctgcagcccagcgtgaaggatggcctgattgtgtatgaggacagccccctggtgaaggctgtgaagctgggccacatcctggtggtggatgaagctgacaaggcccccaccaacgtgacctgcatcctgaagaccctggtggagaatggagagatgatcctggctgatggaagaagaattgtggccaacagcgccaacgtgaatggccgggagaatgtggtggtgatccacccagacttcaggatgattgtgctggccaaccggcccggcttccccttcctgggcaatgacttcttcggcaccctgggggacatcttcagctgccacgctgtggacaaccccaagccccacagcgagctggagatgctgcggcagtatggccccaacgtgcctgagcccatcctgcagaagctggtggccgcctttggagagctgcggagcctggccgaccagggcatcatcaactacccctacagcacccgggaggtggtgaacatcgtgaagcacctgcagaagttccccacagagggcctgagctctgtggtgagaaatgtgtttgattttgacagctacaacaatgacatgagggagatcctgatcaacaccctgcacaagtatggcatccccatcggggccaagcccacctctgtgcagctggccaaggagtag

SEQ ID NO: 6980 - DNA, 801 bp, synthetic construct
  misc_feature 1..801: note = source = /note="Description of Artificial Sequence: Synthetic coding sequence"
  source 1..801: mol_type = other DNA
atgaggctgctcttcctggccgtgctgcggccccacactggaaatgctgtgacagcccagagggtgcgggcccacctggaggccgccggccacgtgtgtgtgctgaaggatgcctttgattttgagagccgctcagaaattgccaacctgatcctggccgagaactgtgaggccgccctggccctgcacctgtacagaggaggccgcctgctgcagggccaccgcatcccctttggagtcatctttggaggaacagatgtgaatgaagatgccaaccaggccgagaagaacacagtgatgggccgggtgctggaggaggccaggtttgctgtggccttcacagagagcatgaaggagatggcccaggcccagtgggtggaccccgtcttcacccgggaggtgaaggccaaggtgaagagagctgctggggtgcggctgattggagagatgccccaggaggacctgcatgctgtggtgaagaactgctttgctgtggtgaacagctctgtgtctgagggcatgtctgctgccatcctggaggccatggacctggaggtgcctgtgctggccaggaacatccctggaaatgctgctgtggtgaagcatgaggtgacaggcctgctcttcagcaacccccaggagtttgtgcacctggccaagaggctggtgtctgaccctgccctggagaaggagatcgtggtgaatggccgggagtatgtgaggatgtaccacagctggcaggtggagcgggacacctaccagcagctgatcaggaagctggagggcagcacagaagattag

SEQ ID NO: 6981 - DNA, 2478 bp, synthetic construct
  misc_feature 1..2478: note = source = /note="Description of Artificial Sequence: Synthetic coding sequence"
  source 1..2478: mol_type = other DNA
atgttttctggcttcaacgtgttccgggtgggcatcagctttgtgatcatgtgcatcttctacatgcccaccgtgaacagcctgcctgagctgagcccccagaagtacttcagcaccctgcagcccgggaaggccagcctggcctacttctgccaggccgacagccccaggacctctgtgttcctggaggagctgaatgaggccgtgcggcccctgcaggactatggcatctctgtggccaaggtgaactgtgtgaaggaggagatcagccgctactgcggcaaggagaaggacctgatgaaggcctacctgttcaagggcaacatcctgctgcgggagttccccacagacaccctgtttgatgtgaatgccatcgtggcccacgtgctgtttgccctgctcttcagcgaggtgaagtacatcaccaacctggaggacctgcagaacattgaaaatgccctgaagggcaaggccaacatcatcttctcctatgtgcgggccatcggcatccctgagcacagagctgtgatggaggccgcctttgtgtatggcaccacctaccagtttgtgctgaccacagaaattgccctgctggagagcatcggctctgaagatgtggagtatgcccacctgtacttcttccactgcaagctggtgctggacctgacccagcagtgcaggaggaccctgatggagcagcccctgaccaccctgaacatccacctgttcatcaagaccatgaaggcccccctgctgacagaggtggccgaggacccccagcaggtgtccacagtgcacctgcagctgggcctgcccctggtgttcatcgtgtcccagcaggccacctatgaagctgacagaagaacagctgagtgggtggcctggaggctgctgggcaaggccggcgtgctgctgctgctgcgggacagcctggaggtgaacatcccccaggatgccaacgtggtgttcaagagagctgaggagggcgtgcctgtggagttcctggtgctgcatgatgtggacctgatcatcagccacgtggagaacaacatgcacatcgaggagatccaggaggatgaggacaatgacatggagggccctgacattgatgtgcaggatgatgaggtggccgagaccgtcttccgggacaggaagaggaagctgcccctggagctgactgtggagctgacagaggagaccttcaatgccaccgtgatggccagtgacagcatcgtgctcttctacgccggctggcaggccgtgtccatggccttcctgcagagctacattgatgtggccgtgaagctgaagggcaccagcaccatgctgctgacccgcatcaactgtgccgactggagcgatgtgtgcaccaagcagaatgtgacagagttccccatcatcaagatgtacaagaagggggagaaccctgtgtcctatgccggcatgctgggcacagaggacctgctgaagttcatccagctgaaccgcatctcctaccctgtgaacatcaccagcatccaggaggccgaggagtacctgagcggggagctgtacaaggacctgatcctgtacagctctgtgtctgtgctgggcctcttcagccccaccatgaagacagccaaggaggacttcagcgaggccggcaactacctgaagggctacgtgatcaccggcatctacagtgaagaagatgtgctgctgctgagcaccaagtatgctgccagcctgcctgccctgctgctggcccggcacacagagggcaagattgagagcatccccctggccagcacccacgcccaggacatcgtgcagatcatcacagatgccctgctggagatgtttcctgagatcaccgtggagaacctgcccagctacttccggctgcagaagcccctgctgatcctcttcagtgatggcaccgtgaacccccagtacaagaaggccatcctgaccctggtgaagcagaagtacctggacagcttcaccccctgctggctgaacctgaagaacacccctgtgggccggggcatcctgcgggcctactttgaccccctgccccccctgcccctgctggtgctggtgaacctgcacagcggcggccaggtgtttgccttccccagcgaccaggccatcatcgaggagaacctggtgctgtggctgaagaagctggaggccggcctggagaaccacatcaccatcctgcctgcccaggagtggaagccacccctgcctgcctatgacttcctgtccatgattgatgctgccaccagccagaggggcaccaggaaggtgcccaagtgcatgaaggagacagatgtgcaggagaatgacaaggagcagcacgaggacaagtctgctgtgaggaaggagcccatcgagaccctgcgcatcaagcactggaacagaagcaactggttcaaggaggccgagaagagcttccggcgggacaaggagctgggctgcagcaaggtgaactag

SEQ ID NO: 6982 - DNA, 672 bp, synthetic construct
  misc_feature 1..672: note = source = /note="Description of Artificial Sequence: Synthetic coding sequence"
  source 1..672: mol_type = other DNA
atgacctggaggcaccacgtgcggctgctcttcaccgtgtccctggccctgcagatcatcaacctgggcaacagctaccagcgggagaagcacaacggcggccgggaggaggtgaccaaggtggccacccagaagcaccggcagagccccctgaactggaccagcagccactttggagaggtgacaggcagcgctgagggctggggccctgaggagcccctgccctacagctgggccttcggggagggcgccagcgcccggccccgctgctgcagaaatggaggcacctgtgtgctgggcagcttctgtgtgtgcccagcccacttcaccggccgctactgtgaacatgaccagaggagaagtgaatgtggggccctggagcacggggcctggaccctgcgggcctgccacctgtgccgctgcatctttggagccctgcactgcctgcccctgcagaccccagacagatgtgaccccaaggacttcctggccagccacgcccacggccccagcgctgggggcgcccccagcctgctgctgctgctgccctgtgccctgctgcaccggctgctgcggccagatgccccagcccaccccaggagcctggtgcccagcgtgctgcagcgggagcggcggccctgtggccggcccggcctgggccaccggctgtag

SEQ ID NO: 6983 - DNA, 1320 bp, synthetic construct
  misc_feature 1..1320: note = source = /note="Description of Artificial Sequence: Synthetic coding sequence"
  source 1..1320: mol_type = other DNA
atgcctgccatcgctgtgctggccgctgctgctgctgcctggtgcttcctgcaggtggagagccgccacctggatgccctggccggcggggccggccccaaccacggcaacttcctggacaatgaccagtggctgagcacagtgtcccagtatgaccgggacaagtactggaaccgcttcagagatgatgactacttcaggaactggaaccccaacaagccctttgaccaggccctggaccccagcaaggacccctgcctgaaggtgaagtgcagcccccacaaggtgtgtgtgacccaggactaccagacagccctgtgtgtgtccaggaagcacctgctgccccggcagaagaagggaaatgtggcccagaagcactgggtgggccccagcaacctggtgaagtgcaagccctgccctgtggcccagagcgccatggtgtgtggcagtgatggccacagctacaccagcaagtgcaagctggagttccacgcctgcagcacaggcaagagcctggccaccctgtgtgatggcccctgcccctgcctgcctgagcctgagccccccaagcacaaggccgagaggtctgcctgcacagacaaggagctgaggaacctggccagccggctgaaggactggtttggagccctgcatgaagatgccaacagagtcatcaagcccaccagcagcaacacagcccagggccgctttgacaccagcatcctgcccatctgcaaggacagcctgggctggatgttcaacaagctggacatgaactatgacctgctgctggaccccagcgagatcaatgccatctacctggacaagtatgagccctgcatcaagcccctcttcaacagctgtgacagcttcaaggatggcaagctgagcaacaatgagtggtgctactgcttccagaagccaggcggcctgccctgccagaatgagatgaaccgcatccagaagctgagcaagggcaagagcctgctgggcgccttcatcccccgctgcaatgaggagggctactacaaggccacccagtgccacggcagcacaggccagtgctggtgtgtggacaagtatggaaatgagctggccggcagcaggaagcagggcgctgtgtcctgtgaggaggagcaggagaccagcggggactttggcagcggcggctctgtggtgctgctggatgacctggagtatgaaagagagctgggccccaaggacaaggagggcaagctgcgggtgcacaccagggctgtgacagaagatgatgaagatgaagatgatgacaaggaggatgaggtgggctacatctggtag

SEQ ID NO: 6984 - DNA, 7872 bp, synthetic construct
  misc_feature 1..7872: note = source = /note="Description of Artificial Sequence: Synthetic coding sequence"
  source 1..7872: mol_type = other DNA
atgaaggtgaagggccggggcatcacctgcctgctggtgtcctttgctgtgatctgcctggtggccacccctgggggcaaggcctgcccccggcgctgtgcctgctacatgcccacagaggtgcactgcaccttccgctacctgaccagcatcccagacagcatcccccccaacgtggagcgcatcaacctgggctacaacagcctggtgcggctgatggagacagacttcagcggcctgaccaagctggagctgctgatgctgcacagcaatggcatccacaccatcccagacaagaccttcagtgacctgcaggccctgcaggtgctgaagatgagctacaacaaggtgaggaagctgcagaaggacaccttctacggcctgcggagcctgacccggctgcacatggaccacaacaacatcgagttcatcaaccctgaggtgttctacggcctgaacttcctgcggctggtgcacctggagggcaaccagctgaccaagctgcacccagacacctttgtgtccctgagctacctgcagatcttcaagatctccttcatcaagttcctgtacctgagtgacaacttcctgaccagcctgccccaggagatggtgtcctacatgccagacctggacagcctgtacctgcacggcaacccctggacctgtgactgccacctgaagtggctgagtgactggatccaggagaagccagatgtgatcaagtgcaagaaggacaggagccccagcagcgcccagcagtgccccctgtgcatgaaccccaggaccagcaagggcaagcccctggccatggtgtctgctgctgccttccagtgtgccaagcccaccatcgacagcagcctgaagagcaagagcctgaccatcctggaggacagcagcagcgccttcatcagcccccagggcttcatggcccccttcggcagcctgaccctgaacatgacagaccagagcggaaatgaggccaacatggtgtgcagcatccagaagcccagcaggaccagccccatcgccttcacagaggagaatgactacatcgtgctgaacaccagcttcagcaccttcctggtgtgcaacatcgactatggccacatccagcctgtgtggcagatcctggccctgtacagcgacagccccctcatcctggagaggagccacctgctgtctgagaccccccagctgtactacaagtacaagcaggtggcccccaagccagaggacatcttcaccaacatcgaggccgacctgcgggctgaccccagctggctgatgcaggaccagatcagcctgcagctgaacagaacagccaccaccttcagcaccctgcagatccagtacagcagtgatgcccagatcaccctgcccagggctgagatgaggcctgtgaagcacaagtggaccatgatcagccgggacaacaacaccaagctggagcacacagtgctggtgggcggcaccgtgggcctgaactgccccggccagggcgaccccaccccccacgtggactggctgctggctgatggcagcaaggtgcgggccccctacgtgtctgaagatggccgcatcctgattgacaagagcggcaagctggagctgcagatggctgacagctttgacaccggggtgtaccactgcatcagcagcaactatgatgatgctgacatcctgacctaccgcatcaccgtggtggagcccctggtggaggcctaccaggagaatggcatccaccacacagtgttcatcggggagaccctggacctgccctgccacagcacaggcatcccagatgccagcatctcctgggtgattcctggcaacaacgtgctgtaccagagcagccgggacaagaaggtgctgaacaacggcaccctgcgcatcctgcaggtgacccccaaggaccagggctactaccgctgtgtggccgccaaccccagcggcgtggacttcctgatcttccaggtgtctgtgaagatgaagggccagaggcccctggagcatgatggagaaacagagggcagcggcctggatgagagcaaccccatcgcccacctgaaggagcccccaggggcccagctgcggaccagcgccctgatggaggccgaggtgggcaagcacaccagcagcaccagcaagaggcacaactaccgggagctgaccctgcagaggagaggagacagcacccaccggcgcttcagagaaaatagaagacacttccccccatctgccaggagaattgacccccagcactgggccgccctgctggagaaggccaagaagaatgccatgccagacaagcgggagaacaccaccgtgtccccacctcctgtggtgacccagctgcccaacatccctggagaagaagatgacagcagcggcatgctggccctgcacgaggagttcatggtgcctgccaccaaggccctgaacctgcctgccaggacagtgacagctgacagcaggaccatcagtgacagccccatgaccaacatcaactacggcacagagttcagccctgtggtgaacagccagatcctgcccccagaggagcccacagacttcaagctgagcacagccatcaagaccacagccatgagcaagaacatcaaccccaccatgagcagccagatccagggcaccaccaaccagcacagcagcaccgtcttccccctgctgctgggcgccacagagttccaggacagcgaccagatgggccggggccgggagcacttccagagccggccccccatcaccgtgaggaccatgatcaaggatgtgaatgtgaagatgctgagcagcaccaccaacaagctgctgctggagagcgtgaacaccaccaacagccaccagacctctgtgcgggaggtgtctgagcccaggcacaaccacttctacagccacaccacccagatcctgagcaccagcaccttccccagcgacccccacacagctgcccacagccagttccccatccccaggaacagcacagtgaacatccccctcttccgccgcttcggccggcagaggaagattggaggccggggccgcatcatcagcccctaccgcacccctgtgctgcggcggcaccgctacagcatcttccgcagcaccacccggggcagcagcgagaagagcaccacagccttcagcgccaccgtgctgaatgtgacctgcctgagctgcctgccccgggagcggctgaccacagccacagctgccctgtccttccccagcgctgcccccatcaccttccccaaggctgacatcgcccgggtgcccagcgaggagagcaccaccctggtgcagaaccccctgctgctgctggagaacaagcccagcgtggagaagaccacccccaccatcaagtacttcagaacagagatcagccaggtgacccccactggagctgtgatgacctacgcccccaccagcatccccatggagaagacccacaaggtgaatgccagctacccccgggtgagcagcaccaatgaggccaagagggacagcgtcatcaccagcagcctgagcggggccatcaccaagccacccatgaccatcatcgccatcacccgcttcagcaggaggaagatcccctggcagcagaactttgtgaacaaccacaaccccaagggccgcctgaggaaccagcacaaggtgtccctgcagaagagcacagctgtgatgctgcccaagaccagccctgccctgccccgggacaaggtgagccccttccacttcaccaccctgagcacctctgtgatgcagatccccagcaacaccctgaccacagcccaccacaccaccaccaagacccacaaccctggcagcctgcccaccaagaaggagctgcccttcccccccctgaaccccatgctgcccagcatcatcagcaaggacagcagcaccaagagcatcatcagcacccagacagccatcccagccaccacccccaccttccctgccagcgtcatcacctatgagacccagacagagaggagccgggcccagaccatccagcgggagcaggagccccagaagaagaacagaacagaccccaacatcagcccagaccagagcagcggcttcaccacccccacagccatgaccccacctgtgctgaccacagctgagacctctgtgaagcccagcgtgtctgccttcacccacagccccccagagaacaccaccggcatcagcagcaccatctccttccacagcaggaccctgaacctgacagatgtgattgaggagctggcccaggccagcacccagaccctgaagagcaccatcgccagcgagaccaccctgagcagcaagagccaccagagcaccaccaccaggaaggccatcatccgccacagcaccatcccccccttcctgagcagcagcgccaccctgatgcctgtgcccatcagcccccccttcacccagagagctgtgacagacaacgtggccacccccatcagcggcctgatgaccaacacagtggtgaagctgcacgagagcagccgccacaatgccaagccccagcagctggtggccgaggtggccaccagccccaaggtgcaccccaatgccaagttcaccatcggcaccacccacttcatctacagcaacctgctgcacagcacccccatgcctgccctgaccaccgtgaagagccagaacagcaagctgacccccagcccctgggccgagaaccagttctggcacaagccctacagcgagattgctgagaagggcaagaagccagaggtgtccatgctggccaccaccggcctgtctgaggccaccaccctggtgtctgactgggatggccagaagaacaccaagaagagtgactttgacaagaagcctgtgcaggaggccaccaccagcaagctgctgccctttgacagcctgagccgctacatctttgagaagccccgcatcgtgggcggcaaggccgccagcttcaccatcccagccaacagtgatgccttcctgccctgtgaggccgtgggcaaccccctgcccaccatccactggaccagggtgcccagcggcctggacctgagcaagaggaagcagaacagccgggtgcaggtgctgcccaacggcaccctgagcatccagagggtggagatccaggaccggggccagtacctgtgcagcgccagcaacctgtttggaacagaccacctgcacgtgaccctgtctgtggtgtcctacccaccccgcatcctggagaggaggaccaaggagatcaccgtgcacagcggcagcacagtggagctgaagtgcagagctgagggccggcccagccccaccgtgacctggatcctggccaaccagacagtggtgtctgagagcagccagggcagccggcaggccgtggtgacagtggatggcaccctggtgctgcacaacctgagcatctatgaccggggcttctacaagtgtgtggccagcaaccctgggggccaggacagcctgctggtgaagatccaggtgattgctgcccctcctgtgatcctggagcagaggcggcaggtgattgtgggcacctggggcgagagcctgaagctgccctgcacagccaagggcaccccccagcccagcgtgtactgggtgctgagtgatggaacagaggtgaagcccctgcagttcaccaacagcaagctgttcctgttcagcaatggcaccctgtacatccggaacctggccagcagtgaccggggcacctatgagtgcatcgccaccagcagcactggaagtgaaagaagagtggtgatgctgaccatggaggagcgggtgaccagccccagaattgaagctgccagccagaagaggacagaggtgaactttggagacaagctgctgctgaactgcagcgccaccggggagcccaagccccagatcatgtggaggctgcccagcaaggctgtggtggaccagcagcaccgggtgggctcctggatccacgtgtaccccaacggcagcctcttcatcggctctgtgacagagaaggacagcggcgtgtacctgtgtgtggccaggaacaagatgggagatgacctgatcctgatgcacgtgtccctgcggctgaagccagccaagattgaccacaagcagtacttcaggaagcaggtgctgcacggcaaggacttccaggtggactgcaaggccagcggcagccctgtgcctgagatctcctggagcctgcctgatggcaccatgatcaacaatgccatgcaggctgatgattctggccacaggacccggcgctacaccctcttcaacaacggcaccctgtacttcaacaaggtgggcgtggccgaggagggggactacacctgctacgcccagaacaccctgggcaaggatgagatgaaggtgcacctgaccgtcatcacagctgccccccgcatccggcagagcaacaagaccaacaagaggatcaaggccggggacacagctgtgctggactgtgaggtgactggagaccccaagcccaagatcttctggctgctgcccagcaatgacatgatctccttcagcattgaccgctacaccttccacgccaacggcagcctgaccatcaacaaggtgaagctgctggacagcggggagtatgtgtgtgtggccaggaaccccagcggagatgacaccaagatgtacaagctggatgtggtgtccaagccacccctcatcaatggcctgtacaccaacagaactgtcatcaaggccacagctgtgcgccacagcaagaagcactttgactgcagagctgagggcacccccagccctgaggtgatgtggatcatgccagacaacatcttcctgacagccccctactacggcagccgcatcaccgtgcacaagaatggcaccctggagatcagaaatgtgcggctgagtgacagcgctgacttcatctgtgtggccagaaatgaaggaggagagagcgtgctggtggtgcagctggaggtgctggagatgctgcggcggcccaccttcaggaaccccttcaatgagaagatcgtggcccagctgggcaagagcacagccctgaactgcagcgtggatggcaaccccccacctgagatcatctggatcctgcccaacggcacccgcttcagcaatggcccccagagctaccagtacctgattgccagcaatggcagcttcatcatcagcaagaccacccgggaggatgctgggaagtaccgctgtgccgccaggaacaaggtgggctacatcgagaagctggtgatcctggagatcggccagaagcctgtgatcctgacctacgcccctggcaccgtgaagggcatcagcggggagagcctgagcctgcactgtgtgtctgatggcatccccaagcccaacatcaagtggaccatgcccagcggctacgtggtggaccggccccagatcaacgggaagtacatcctgcatgacaatggcaccctggtgatcaaggaggccacagcctatgaccggggcaactacatctgcaaggcccagaacagcgtgggccacaccctcatcaccgtgcctgtgatgattgtggcctacccaccccgcatcaccaaccggccccccaggagcatcgtgaccaggactggagctgccttccagctgcactgtgtggccctgggcgtgcccaagccagagatcacctgggagatgccagaccacagcctgctgagcacagccagcaaggagaggacccacggcagcgagcagctgcacctgcagggcaccctggtgatccagaacccccagaccagtgacagcggcatctacaagtgcacagccaagaaccccctgggcagtgactatgctgccacctacatccaggtgatctag

SEQ ID NO: 6985 - DNA, 1995 bp, synthetic construct
  misc_feature 1..1995: note = source = /note="Description of Artificial Sequence: Synthetic coding sequence"
  source 1..1995: mol_type = other DNA
atgaagacaggcctcttcttcctgtgcctgctgggcacagctgctgccatccccaccaatgcccggctgctgagtgaccacagcaagcccacagctgagaccgtggccccagacaacacagccatccccagcctgcgggcagaggccgaggagaatgagaaggagacagctgtgtccacagaagatgacagccaccacaaggccgagaagagctctgtgctgaagagcaaggaggagagccatgagcagagcgctgagcagggcaagagcagcagccaggagctgggcctgaaggaccaggaggacagtgatggccacctgtctgtgaacctggagtatgcccccacagagggcaccctggacatcaaggaggacatgtctgagccccaggagaagaagctgtctgagaacacagacttcctggcccctggggtgtcctccttcacagacagcaaccagcaggagagcatcaccaagcgggaggagaaccaggagcagcccaggaactacagccaccaccagctgaacagaagcagcaagcacagccagggcctgcgggaccagggcaaccaggagcaggaccccaacatcagcaatggagaggaggaggaggagaaggagcccggggaggtgggcacccacaatgacaaccaggagaggaagacagagctgccccgggagcacgccaacagcaagcaggaggaggacaacacccagagtgatgacatcctggaggagagtgaccagcccacccaggtgtccaagatgcaggaggatgaatttgaccagggcaaccaggagcaggaggacaacagcaatgctgagatggaggaggagaatgccagcaatgtgaacaagcacatccaggagacagagtggcagagccaggagggcaagacaggcctggaggccatcagcaaccacaaggagacagaggagaagacagtgtctgaggccctgctgatggagcccacagatgatggcaacaccaccccaagaaatcatggagtggatgatgatggagatgatgatggagatgatggcggcacagatggccccaggcacagcgccagtgatgactacttcatccccagccaggccttcctggaggccgagcgggcccagagcatcgcctaccacctgaagattgaggagcagcgggagaaggtgcatgaaaatgaaaacatcggcaccacagagcctggagagcaccaggaggccaagaaggccgagaacagcagcaatgaggaggagaccagcagcgagggcaacatgagggtgcatgctgtggacagctgcatgtccttccagtgcaagaggggccacatctgcaaggctgaccagcagggcaagccccactgtgtgtgccaggaccctgtgacctgcccccccaccaagcccctggaccaggtgtgtggcacagacaaccagacctacgccagcagctgccacctgtttgccaccaagtgccgcctggagggcaccaagaagggccaccagctgcagctggactactttggagcctgcaagagcatccccacctgcacagactttgaggtgatccagttccccctgaggatgagggactggctgaagaacatcctgatgcagctgtatgaggccaacagcgagcacgccggctacctgaatgagaagcagaggaacaaggtgaagaagatctacctggatgagaagaggctgctggccggggaccaccccatcgacctgctgctgcgggacttcaagaagaactaccacatgtatgtgtaccctgtgcactggcagttcagcgagctggaccagcaccccatggacagagtgctgacccacagcgagctggcccccctgcgggccagcctggtgcccatggagcactgcatcacccgcttctttgaagaatgtgaccccaacaaggacaagcacatcaccctgaaggagtggggccactgcttcggcatcaaggaggaggacattgatgagaacctgctcttctag

SEQ ID NO: 6986 - DNA, 1254 bp, synthetic construct
  misc_feature 1..1254: note = source = /note="Description of Artificial Sequence: Synthetic coding sequence"
  source 1..1254: mol_type = other DNA
atgctggccctgctggtgctggtgacagtggccctggccagcgcccaccacggcggggagcactttgaaggagagaaggtgttccgggtgaatgtggaggatgagaaccacatcaacatcatccgggagctggccagcaccacccagattgacttctggaagccagattctgtgacccagatcaagccccacagcacagtggacttccgggtgaaggccgaggacacagtgacagtggagaatgtgctgaagcagaatgagctgcagtacaaggtgctgatcagcaacctgagaaatgtggtggaggcccagtttgacagccgggtgcgggccaccggccacagctatgagaagtacaacaagtgggagaccatcgaggcctggacccagcaggtggccacagaaaatcctgccctgatcagccgctctgtgattggcaccacctttgagggccgggccatctacctgctgaaggtgggcaaggccggccagaacaagccagccatcttcatggactgtggcttccacgcccgggagtggatcagccctgccttctgccagtggtttgtgcgggaggccgtgaggacctacggccgggagatccaggtgacagagctgctggacaagctggacttctacgtgctgcctgtgctgaacattgatggctacatctacacctggaccaagagccgcttctggaggaagaccaggagcacccacacaggcagcagctgcatcggcacagaccccaacagaaactttgatgctggctggtgtgaaattggagccagcaggaacccctgtgatgagacctactgcggccctgctgctgagagcgagaaggagaccaaggccctggccgacttcatccggaacaagctgagcagcatcaaggcctacctgaccatccacagctacagccagatgatgatctacccctacagctatgcctacaagctgggggagaacaatgctgagctgaatgccctggccaaggccaccgtgaaggagctggccagcctgcacggcaccaagtacacctacggccctggggccaccaccatctacccagctgctgggggcagtgatgactgggcctatgaccagggcatccgctacagcttcacctttgagctgcgggacaccggccgctatggcttcctgctgcctgagagccagatccgggccacctgtgaggagaccttcctggccatcaagtatgtggccagctatgtgctggagcacctgtactag

SEQ ID NO: 6987 - DNA, 588 bp, synthetic construct
  misc_feature 1..588: note = source = /note="Description of Artificial Sequence: Synthetic coding sequence"
  source 1..588: mol_type = other DNA
atggctgtgtcccagggagatggcaccctgtgctttgtgctgctgctgtgctgctggcaggagacagagctgcggcccaggacagtcatccctggcagccccacagagatccccttcagcagcaagcaggaggacatgtctgagctgctggatgagatcctggtgcaggagatcctggacctgaacaagaccaccccatctgagatgcccagcacagccagcaccctgagcacccccctgcacgccggcattgatgagaactaccaggccggcggcagcgagaactaccacgagctgctggagaacctgcagttcagccctggcatcgaggtgaagatcagcaatgatgaggccaatgccaatgccaacctgcatggagaccccagcgagaactaccggggcccccaggtgtccccaggcagcgagaagtctgtgagcagcaaggagaagaacagcaagaacacccagtatgagaacctgagcatcctggaccagatcctgcagaacatcggccgcagcagcggcaacatcttccacaaggagcagcagaggaccagcgcccagaggaggagccagggcagccagtag

SEQ ID NO: 6988 - DNA, 2334 bp, synthetic construct
  misc_feature 1..2334: note = source = /note="Description of Artificial Sequence: Synthetic coding sequence"
  source 1..2334: mol_type = other DNA
atgaatgccaacaaggatgagcggctgaaggcccggagccaggacttccacctgtttcctgccctgatgatgctgtccatgaccatgctgttcctgcctgtgacaggcaccctgaagcagaacatcccccggctgaagctgacctacaaggacctgctgctgagcaacagctgcatccccttcctgggcagcagcgagggcctggacttccagaccctgctgctggatgaggagcggggccgcctgctgctgggcgccaaggaccacatcttcctgctgagcctggtggacctgaacaagaacttcaagaagatctactggccagctgccaaggagcgggtggagctgtgcaagctggccggcaaggatgccaacacagaatgtgccaacttcatccgggtgctgcagccctacaacaagacccacatctacgtgtgtggcaccggggccttccaccccatctgtggctacatcgacctgggcgtgtacaaggaggacatcatcttcaagctggacacccacaacctggagagcggccgcctgaagtgcccctttgacccccagcagccctttgcctctgtgatgacagatgagtacctgtacagcggcacagccagtgacttcctgggcaaggacacagccttcaccaggagcctgggccccacccatgaccaccactacatcagaacagacatcagcgagcactactggctgaatggagccaagttcatcggcaccttcttcatcccagacacctacaacccagatgatgacaagatctacttcttcttccgggagagcagccaggagggcagcaccagtgacaagaccatcctgagccgggtgggccgggtgtgcaagaatgatgtgggcggccagaggagcctcatcaacaagtggaccaccttcctgaaggcccggctcatctgcagcatccctggcagtgatggagctgacacctactttgatgagctgcaggacatctacctgctgcccaccagagatgaaagaaatcctgtggtgtatggagtcttcaccaccaccagcagcatcttcaagggcagcgctgtgtgtgtgtacagcatggctgacatccgggctgtgttcaacggcccctatgcccacaaggagagcgctgaccaccgctgggtgcagtatgatggccgcatcccctaccccaggcctggcacctgccccagcaagacctatgaccccctcatcaagagcacccgggacttcccagatgatgtgatctccttcatcaagaggcacagcgtgatgtacaagtctgtgtaccctgtggccggcggccccaccttcaagaggatcaacgtggactaccgcctgacccagatcgtggtggaccacgtgattgctgaagatggccagtatgatgtgatgttcctgggcacagacattggaacagtgctgaaggtggtgtccatcagcaaggagaagtggaacatggaggaggtggtgctggaggagctgcagatcttcaagcacagcagcatcatcctgaacatggagctgagcctgaagcagcagcagctgtacatcggcagcagagatggcctggtgcagctgagcctgcaccgctgtgacacctacggcaaggcctgtgccgactgctgcctggcccgggacccctactgtgcctgggatggaaatgcctgcagccgctatgcccccaccagcaagaggcgggcccggcggcaggatgtgaagtatggagaccccatcacccagtgctgggacatcgaggacagcatcagccatgaaacagcagatgagaaggtgatcttcggcatcgagttcaacagcaccttcctggagtgcatccccaagagccagcaggccaccatcaagtggtacatccagaggtctggagatgagcaccgggaggagctgaagccagatgagcgcatcatcaagacagaatatggcctgctgatccgcagcctgcagaagaaggacagcggcatgtactactgcaaggcccaggagcacaccttcatccacaccatcgtgaagctgaccctgaatgtgattgaaaatgagcagatggagaacacccagagagctgagcacgaggagggcaaggtgaaggacctgctggccgagagccggctgcgctacaaggactacatccagatcctgagcagccccaacttcagcctggaccagtactgtgagcagatgtggcaccgggagaagaggcggcagagaaataaaggaggccccaagtggaagcacatgcaggagatgaagaagaagaggaacagaagacaccaccgggacctggatgagctgcccagggctgtggccacctag

SEQ ID NO: 6989 - DNA, 1332 bp, synthetic construct
  misc_feature 1..1332: note = source = /note="Description of Artificial Sequence: Synthetic coding sequence"
  source 1..1332: mol_type = other DNA
atgcagcccagcgagatggtgatgaaccccaagcaggtgttcctgtctgtgctgatcttcggcgtggccggcctgctgctcttcatgtacctgcaggtgtggattgaggagcagcacacaggccgggtggagaagaggcgggagcagaaggtgaccagcggctggggccctgtgaagtacctgcggcctgtgccccgcatcatgagcacagagaagatccaggagcacatcaccaaccagaaccccaagttccacatgccagaagatgtgcgggagaagaaggagaacctgctgctgaacagcgagaggagcacccggctgctgaccaagaccagccacagccagggcggggaccaggccctgagcaagagcacaggcagccccacagagaagctgattgagaagaggcagggcgccaagacagtgttcaacaagttcagcaacatgaactggcctgtggacatccaccccctgaacaagagcctggtgaaggacaacaagtggaagaagacagaggagacccaggagaagaggaggagcttcctgcaggagttctgcaagaagtatggaggagtgagccaccaccagagccacctgttccacacagtgagccgcatctacgtggaggacaagcacaagatcctgtactgtgaggtgcccaaggccggctgcagcaactggaagaggatcctgatggtgctgaatggcctggccagcagcgcctacaacatcagccacaatgctgtgcactacggcaagcacctgaagaagctggacagctttgacctgaagggcatctacacccggctgaacacctacaccaaggctgtgtttgtgcgggaccccatggagcggctggtgtctgccttccgggacaagtttgagcaccccaacagctactaccaccctgtgtttgggaaggccatcatcaagaagtaccggcccaatgcctgtgaggaggccctgatcaatggcagcggcgtgaagttcaaggagttcatccactacctgctggacagccacaggcctgtgggcatggacatccactgggagaaggtgtccaagctgtgctacccctgcctgatcaactatgactttgtgggcaagtttgagaccctggaggaggatgccaactacttcctgcagatgattggagcccccaaggagctgaagttccccaacttcaaggacagacacagcagtgatgagaggaccaatgcccaggtggtgcggcagtacctgaaggacctgaccaggacagagcggcagctgatctatgacttctactacctggactacctgatgttcaactacaccacccccttcctgtag

SEQ ID NO: 6990 - DNA, 3228 bp, synthetic construct
  misc_feature 1..3228: note = source = /note="Description of Artificial Sequence: Synthetic coding sequence"
  source 1..3228: mol_type = other DNA
atgagaggaggcaagtgcaacatgctgagcagcctgggctgcctgctgctgtgtggcagcatcaccctggccctgggcaatgcccagaagctgcccaagggcaagaggcccaacctgaaggtgcacatcaacaccaccagtgacagcatcctgctgaagttcctgcggcccagccccaacgtgaagctggagggcctgctgctgggctacggcagcaatgtgagccccaaccagtacttccccctgcctgctgagggcaagttcacagaggccatcgtggatgctgagcccaagtacctgattgtggtgcggcctgcccccccacccagccagaagaagagctgcagcggcaagaccaggagcaggaagcccctgcagctggtggtgggcaccctgacccccagcagcgtcttcctgtcctggggcttcctgatcaacccccaccacgactggaccctgcccagccactgccccaatgaccgcttctacaccatccgctaccgggagaaggacaaggagaagaagtggatcttccagatctgcccagccacagagaccatcgtggagaacctgaagcccaacacagtgtatgaatttggagtgaaggacaacgtggagggcggcatctggagcaagatcttcaaccacaagacagtggtgggcagcaagaaggtgaatggcaagatccagagcacctatgaccaggaccacacagtgcctgcctacgtgcccaggaagctgatccccatcaccatcatcaagcaggtgatccagaatgtgacccacaaggacagcgccaagagccctgagaaggcccccctgggcggcgtcatcctggtgcacctgatcatccctggcctgaatgagaccaccgtgaagctgcctgccagcctgatgtttgagatcagtgatgccctgaagacccagctggccaagaatgagaccctggccctgcctgctgagagcaagaccccagaggtggagaagatcagcgcccggcccaccaccgtgaccccagagaccgtgcccaggagcaccaagcccaccaccagcagcgccctggatgtgtctgagaccaccctggccagcagcgagaagccctggatcgtgcccacagccaagatcagcgaggacagcaaggtgctgcagccccagacagccacctatgatgtgttcagcagccccaccaccagtgatgagcctgagatcagtgacagctacacagccaccagtgaccgcatcctggacagcatcccccccaagaccagcaggaccctggagcagccccgggccaccctggcccccagcgagaccccatttgtgccccagaagctggagatcttcaccagccctgagatgcagcccaccaccccagccccccagcagaccaccagcatccccagcacccccaagaggcggccccggcccaagccacccaggaccaagccagagaggaccaccagcgctggcaccatcacccccaagatcagcaagagccctgagcccacctggaccaccccagcccctgggaagacccagttcatcagcctgaagcccaagatccccctgagccctgaggtgacccacaccaagccagcccccaagcagaccccccgggccccacccaagcccaagaccagcccccggccccgcatcccccagacccagcctgtgcccaaggtgccccagagggtgacagccaagcccaagaccagccccagccctgaggtgtcctacaccaccccagcccccaaggatgtgctgctgccccacaagccctacccagaggtgtcccagagcgagcccgcccccctggagacccggggcatccccttcatccccatgatcagccccagccccagccaggaggagctgcagaccaccctggaggagacagaccagagcacccaggagcccttcaccaccaagatccccaggaccacagagctggccaagaccacccaggccccccaccgcttctacaccaccgtgcggcccaggaccagtgacaagccccacatccggcctggggtgaagcaggccccccggcccagcggggctgacagaaatgtgtctgtggacagcacccaccccaccaagaagccaggcaccaggaggcctcccctgcccccccggcccacccaccccaggaggaagcccctgccccccaacaacgtgacaggcaagccaggcagcgctggcatcatcagcagcggccccatcaccaccccacccctgcggagcaccccccggcccaccggcacccccctggagcgcatcgagacagacatcaagcagcccaccgtgcctgccagcggggaggagctggagaacatcacagacttcagcagcagccccacccgggagacagaccccctgggcaagccccgcttcaagggcccccacgtgcgctacatccagaagccagacaacagcccctgcagcatcacagattctgtgaagcgcttccccaaggaggaggccacagagggcaatgccaccagccccccccagaacccccccaccaacctgactgtggtgacagtggagggctgccccagctttgtgatcctggactgggagaagcccctgaatgacacagtgacagaatatgaagtcatcagcagagaaaatggcagcttcagcggcaagaacaagagcatccagatgaccaaccagaccttcagcacagtggagaacctgaagcccaacaccagctatgagttccaggtgaagcccaagaaccccctgggggagggccctgtgagcaacacagtggccttcagcacagagagcgctgacccccgggtgtctgagcctgtgtctgctggaagagatgccatctggacagagcggcccttcaacagcgacagctacagtgaatgtaaaggcaagcagtatgtgaagaggacctggtacaagaagtttgtgggcgtgcagctgtgcaacagcctgcgctacaagatctacctgagtgacagcctgaccgggaagttctacaacatcggggaccagaggggccacggggaggaccactgccagtttgtggacagcttcctggatggccgcacaggccagcagctgaccagtgaccagctgcccatcaaggagggctacttccgggctgtgcggcaggagcctgtgcagtttggagaaattggaggccacacccagatcaactacgtgcagtggtatgaatgtggcaccaccatccctgggaagtggtag

SEQ ID NO: 6991 - DNA, 483 bp, synthetic construct
  misc_feature 1..483: note = source = /note="Description of Artificial Sequence: Synthetic coding sequence"
  source 1..483: mol_type = other DNA
atgctgcccttcctgttcttcagcaccctcttcagcagcatcttcacagaggcccagaagcagtactgggtgtgcaacagcagtgatgccagcatctcctacacctactgtgacaagatgcagtaccccatcagcatcaacgtgaacccctgcatcgagctgaagaggagcaagggcctgctgcacatcttctacatcccccggcgggacctgaagcagctgtacttcaacctgtacatcaccgtgaacaccatgaacctgcccaagaggaaggaggtgatctgccggggcagtgatgatgactacagcttctgccgggccctgaagggggagaccgtgaacaccaccatctccttctccttcaagggcatcaagttcagcaagggcaagtacaagtgtgtggtggaggccatcagcggcagccctgaggagatgctgttctgcctggagtttgtgatcctgcaccagcccaacagcaactag

SEQ ID NO: 6992 - DNA, 780 bp, synthetic construct
  misc_feature 1..780: note = source = /note="Description of Artificial Sequence: Synthetic coding sequence"
  source 1..780: mol_type = other DNA
atggccgccctgatgaggagcaaggacagcagctgctgcctgctgctgctggccgctgtgctgatggtggagagcagccagatcggcagcagccgggccaagctgaacagcatcaagagcagcctgggcggggagaccccaggccaggccgccaacagatctgctggcatgtaccagggcctggcctttggaggcagcaagaagggcaagaacctgggccaggcctacccctgcagcagtgacaaggaatgtgaggtgggccgctactgccacagcccccaccagggcagcagcgcctgcatggtgtgcaggaggaagaagaagcgctgccacagagatggcatgtgctgccccagcacccgctgcaacaacggcatctgcatccctgtgacagagagcatcctgaccccccacatcccagccctggatggcaccaggcaccgggacaggaaccacggccactacagcaaccacgacctgggctggcagaacctgggccggccccacaccaagatgagccacatcaagggccacgagggggacccctgcctgcggagcagtgactgcatcgagggcttctgctgtgcccggcacttctggaccaagatctgcaagcctgtgctgcaccagggcgaggtgtgcaccaagcagaggaagaagggcagccacggcctggagatcttccagagatgtgactgtgccaagggcctgagctgcaaggtgtggaaggatgccacctacagcagcaaggcccggctgcacgtgtgccagaagatctag

SEQ ID NO: 6993 - DNA, 3030 bp, synthetic construct
  misc_feature 1..3030: note = source = /note="Description of Artificial Sequence: Synthetic coding sequence"
  source 1..3030: mol_type = other DNA
atgggccagctgtgctggctgcccctgctggcccccctgctgctgctgcggcccccaggagtgcagagcgctggccccatccgggcctttgtggtgccccacagccacatggatgtgggctgggtgtacacagtgcaggagagcatgagggcctatgctgccaacgtgtacacctctgtggtggaggagctggcccggggccagcagaggcgcttcatcgctgtggagcaggagttcttccggctgtggtgggatggagtggccagtgaccagcagaagtaccaggtgcggcagctgctggaggagggccgcctggagtttgtgattggaggccaggtgatgcatgatgaggccgtgacccacctggatgaccagatcctgcagctgacagagggccacggcttcctgtatgagaccttcggcatccggccccagttctcctggcacgtggacccctttggagccagcgccaccacccccaccctgtttgccctggccggcttcaatgcccacctgggcagcagaattgattatgacctgaaggccgccatgcaggaggcccggggcctgcagtttgtgtggaggggcagccccagcctgtctgagcggcaggagatcttcacccacatcatggaccagtacagctactgcacccccagccacatccccttcagcaacagaagtggcttctactggaatggagtggccgtgttccccaagccaccccaggatggagtgtaccccaacatgtctgagcctgtgaccccagccaacatcaacctgtatgcagaggccctggtggccaacgtgaagcagagagctgcctggttccgcacccctcatgtgctgtggccctggggctgtgacaagcagttcttcaatgcctctgtgcagtttgccaacatggaccccctgctggaccacatcaacagccatgctgctgagctgggcgtgtctgtgcagtatgccaccctgggggactacttccgggccctgcacgccctgaatgtgacctggagggtgcgggaccaccacgacttcctgccctacagcacagagcccttccaggcctggacaggcttctacaccagccgcagcagcctgaagggcctggcccggcgggccagcgccctgctgtatgctggggagagcatgttcacccgctacctgtggccagccccccggggccacctggaccccacctgggccctgcagcagctgcagcagctgcgctgggccgtgtctgaggtgcagcaccatgatgccatcaccggcacagagagccccaaggtgcgggacatgtatgccacccacctggccagcggcatgctgggcatgaggaagctgatggccagcatcgtgctggatgagctgcagccccaggcccccatggccgccagcagtgatgctggccctgctggccactttgcctctgtgtacaaccccctggcctggacagtgaccaccatcgtgaccctgactgtgggcttccctggggtgcgggtgacagatgaggccggccaccctgtgcccagccagatccagaacagcacagagacccccagcgcctatgacctgctgatcctgaccaccatccctggcctgagctaccgccactacaacatccggcccacagctggggcccaggagggcacccaggagcctgctgccaccgtggccagcaccctgcagtttggaagaaggctgcggcggaggaccagccacgccggccgctacctggtgcctgtggccaatgactgctacatcgtgctgctggaccaggacaccaacctgatgcacagcatctgggagcggcagagcaacagaacagtgcgggtgacccaggagttcctggagtaccacgtgaatggagatgtgaagcagggccccatcagtgacaactacctgttcaccccaggcaaggctgctgtgcctgcctgggaggccgtggagatggagatcgtggccggccagctggtgacagagatccggcagtacttctacagaaacatgacagcccagaactacacctacgccatccgcagccggctgacccacgtgccccagggccatgatggagagctgctgtgccaccgcatcgagcaggagtaccaggccggccccctggagctgaaccgggaggccgtgctgcggaccagcaccaacctgaacagccagcaggtgatctacagcgacaacaacggctaccagatgcagaggcggccctacgtgtcctatgtgaacaacagcatcgccaggaactactaccccatggtgcagagcgccttcatggaggatggcaagagccggctggtgctgctgtctgagcgggcccacggcatcagcagccagggcaatggccaggtggaggtgatgctgcaccggcggctgtggaacaactttgactgggacctgggctacaacctgaccctgaatgacacctctgtggtgcaccctgtgctgtggctgctgctgggctcctggagcctgaccacagccctgcggcagaggtctgccctggccctgcagcacaggcctgtggtgctgtttggagacctggccggcacagcccccaagctgcccggcccccagcagcaggaggccgtgaccctgccccccaacctgcacctgcagatcctgagcatccctggctggagatacagcagcaaccacacagagcacagccagaacctgaggaagggccacagaggagaggcccaggccgacctgcggcgggtgctgctgcggctgtaccacctgtatgaggtgggagaagatcctgtgctgagccagcctgtgacagtgaacctggaggccgtgctgcaggccctgggctctgtggtggccgtggaggagaggagcctgaccggcacctgggacctgtccatgctgcaccgctggagctggaggactggacctggccgccacagaggagacaccaccagccccagccggcccccaggcggccccatcatcaccgtgcaccccaaggagatccgcaccttcttcatccacttccagcagcagtag

SEQ ID NO: 6994 - DNA, 1443 bp, synthetic construct
  misc_feature 1..1443: note = source = /note="Description of Artificial Sequence: Synthetic coding sequence"
  source 1..1443: mol_type = other DNA
atgctgttcaggaaccgcttcctgctgctgctggccctggccgccctgctggcctttgtgtccctgagcctgcagttcttccacctgatccctgtgtccacccccaagaatggcatgagcagcaagagcaggaagaggatcatgccagaccctgtgacagagccccctgtgacagatcctgtgtatgaggccctgctgtactgcaacatccccagcgtggccgagaggtccatggagggccacgccccccaccacttcaagctggtgtctgtgcacgtgttcatcagacatggagaccgctaccccctgtatgtgatccccaagaccaagaggcctgagattgactgcaccctggtggccaacaggaagccctaccaccccaagctggaggccttcatcagccacatgagcaagggcagcggggccagctttgagagccccctgaacagcctgcccctgtaccccaaccaccccctgtgtgagatgggagagctgacccagacaggagtggtgcagcacctgcagaatggccagctgctgcgggacatctacctgaagaagcacaagctgctgcccaatgactggagcgctgaccagctgtacctggagaccaccgggaagagcaggaccctgcagagcggcctggccctgctgtatggcttcctgcctgactttgactggaagaagatctacttccgccaccagcccagcgccctcttctgcagcggcagctgctactgccctgtgaggaaccagtacctggagaaggagcagaggcggcagtacctgctgcggctgaagaacagccagctggagaagacctatggagagatggccaagatcgtggatgtgcccaccaagcagctgcgggccgccaaccccatcgacagcatgctgtgccacttctgccacaacgtgtccttcccctgcaccagaaatggctgtgtggacatggagcacttcaaggtgatcaagacccaccagattgaagatgagcgggagcggcgggagaagaagctgtacttcggctacagcctgctgggcgcccaccccatcctgaaccagaccatcggccgcatgcagagggccacagagggcaggaaggaggagctgtttgccctgtacagcgcccatgatgtgaccctgagccctgtgctgagcgccctgggcctgtctgaggcccgcttccccaggtttgctgcccggctcatctttgagctgtggcaggaccgggagaagcccagcgagcacagcgtgcgcatcctgtacaacggggtggatgtgaccttccacaccagcttctgccaggaccaccacaagaggagccccaagcccatgtgccccctggagaacctggtgcgctttgtgaagagggacatgtttgtggccctgggcggcagcggcaccaactactatgatgcctgccaccgggagggcttctag

SEQ ID NO: 6995 - DNA, 1341 bp, synthetic construct
  misc_feature 1..1341: note = source = /note="Description of Artificial Sequence: Synthetic coding sequence"
  source 1..1341: mol_type = other DNA
atgctgcaccctgagaccagccctggccggggccacctgctggccgtgctgctggccctgctgggcacagcctgggccgaggtgtggccaccccagctgcaggagcaggcccccatggccggggccctgaacaggaaggagagcttcctgctgctgagcctgcacaaccggctgcgctcctgggtgcagcccccagctgctgacatgaggcggctggactggagcgacagcctggcccagctggcccaggcccgggccgccctgtgtggcacccccacccccagcctggccagcggcctgtggaggaccctgcaggtgggctggaacatgcagctgctgcctgctggcctggtgtcctttgtggaggtggtgtccctgtggtttgctgagggccagcgctacagccatgctgctggggagtgtgccagaaatgccacctgcacccactacacccagctggtgtgggccaccagcagccagctgggctgcggccgccacctgtgcagcgctggccaggccgccatcgaggcctttgtgtgtgcctacagcccccggggcaactgggaggtgaatggcaagaccatcgtgccctacaagaagggggcctggtgcagcctgtgcacagcctctgtgtctggctgcttcaaggcctgggaccatgctgggggcctgtgtgaggtgcccaggaacccctgcaggatgagctgccagaaccacggccgcctgaacatcagcacctgccactgccactgccccccaggctacacaggccgctactgccaggtgcgctgcagcctgcagtgtgtgcacggccgcttccgggaggaggagtgcagctgtgtgtgtgacatcggctacggcggggcccagtgtgccaccaaggtgcacttccccttccacacctgtgacctgagaattgatggagactgcttcatggtgtcctctgaggccgacacctactaccgggccaggatgaagtgccagaggaagggcggcgtgctggcccagatcaagagccagaaggtgcaggacatcctggccttctacctgggccgcctggagaccaccaatgaagtcatcgacagcgactttgagaccaggaacttctggattggcctgacctacaagacagccaaggacagcttccgctgggccaccggggagcaccaggccttcaccagctttgccttcggccagcctgacaaccacggctttggaaactgtgtggagctgcaggccagcgctgccttcaactggaatgaccagcgctgcaagaccaggaaccgctacatctgccagtttgcccaggagcacatcagccgctggggccctggcagctag

SEQ ID NO: 6996 - DNA, 2313 bp, synthetic construct
  misc_feature 1..2313: note = source = /note="Description of Artificial Sequence: Synthetic coding sequence"
  source 1..2313: mol_type = other DNA
atggtggagagcgctggccgggccggccagaagaggcctggcttcctggagggcggcctgctgctgctgctgctgctggtgacagctgccctggtggccctgggcgtgctgtatgctgacagaagaggcaagcagctgccccggctggccagccggctgtgcttcctgcaggaggagaggacctttgtgaagaggaagccccggggcatccctgaggcccaggaggtgtctgaggtgtgcaccaccccaggctgtgtgattgctgctgcccgcatcctgcagaacatggaccccaccacagagccctgtgatgacttctaccagtttgcctgtggcggctggctgcggcggcacgtgattcctgagaccaacagccgctacagcatctttgatgtgctgagagatgagctggaggtgatcctgaaggctgtgctggagaacagcacagccaaggacaggcctgctgtggagaaggcccggaccctgtaccgcagctgcatgaaccagagcgtcatcgagaagaggggcagccagcccctgctggacatcctggaggtggtgggcggctggcctgtggccatggaccgctggaatgagaccgtgggcctggagtgggagctggagcggcagctggccctgatgaacagccagttcaacagaagagtgctgattgacctcttcatctggaatgatgaccagaacagcagccgccacatcatctacatcgaccagcccaccctgggcatgcccagccgggagtactacttcaatggaggcagcaacaggaaggtgcgggaggcctacctgcagttcatggtgtctgtggccaccctgctgagagaagatgccaacctgccccgggacagctgcctggtgcaggaggacatggtgcaggtgctggagctggagacccagctggccaaggccaccgtgccccaggaggagagacatgatgtgattgccctgtaccacaggatgggcctggaggagctgcagagccagtttggcctgaagggcttcaactggaccctcttcatccagacagtgctgagctctgtgaagatcaagctgctgcctgatgaggaggtggtggtgtatggcatcccctacctgcagaacctggagaacatcatcgacacctacagcgcccggaccatccagaactacctggtgtggaggctggtgctggacagaattggcagcctgagccagcgcttcaaggacaccagggtgaactacaggaaggccctgtttggcaccatggtggaggaggtgcgctggagagaatgtgtgggctacgtgaacagcaacatggagaatgctgtgggcagcctgtatgtgcgggaggccttccctggggacagcaagtccatggtgcgggagctgattgacaaggtgaggacagtgtttgtggagaccctggatgagctgggctggatggatgaggagagcaagaagaaggcccaggagaaggccatgagcatccgggagcagatcggccacccagactacatcctggaggagatgaacagaaggctggatgaggagtacagcaacctgaacttcagcgaggacctgtactttgagaacagcctgcagaacctgaaggtgggcgcccagaggagcctgaggaagctgcgggagaaggtggaccccaacctgtggatcattggagctgctgtggtgaatgccttctacagccccaacagaaaccagatcgtgtttcctgctggcatcctgcagccccccttcttcagcaaggagcagccccaggccctgaactttggaggcatcggcatggtgattggccacgagatcacccacggctttgatgacaatggaagaaactttgacaagaatggaaacatgatggactggtggagcaacttcagcacccagcacttccgggagcagagcgagtgcatgatctaccagtatggcaactacagctgggacctggctgatgagcagaatgtgaatggcttcaacaccctgggagaaaatattgctgacaatggaggagtgcggcaggcctacaaggcctacctgaagtggatggccgagggcggcaaggaccagcagctgcccggcctggacctgacccatgagcagctgttcttcatcaactatgcccaggtgtggtgtggcagctacagacctgagtttgccatccagagcatcaagacagatgtgcacagccccctgaagtacagagtgctgggcagcctgcagaacctggccgcctttgctgacaccttccactgtgcccggggcacccccatgcaccccaaggagcgctgccgggtgtggtag

SEQ ID NO: 6997 - DNA, 1317 bp, synthetic construct
  misc_feature 1..1317: note = source = /note="Description of Artificial Sequence: Synthetic coding sequence"
  source 1..1317: mol_type = other DNA
atgagcaagagggacaaggccggcaaggacacagcccggggcaagggcaaggacatcagcaaatatggctctgtgcagaagagctttgctgaccggggcctgcccaagccacccaaggagaagctgctgcaggtggagaagctgaggaaggagagcggcaagggcagcttcctgcagcccacagccaagccccgggccctggcccagcagcaggccgtcatccggggcttcacctactacaaggccggcaagcaggaggtgacagaggccgtggccgacaacaccctgcagggcacctcctggctggagcagctgccccccaaggtggagggccgcagcaacagcgctgagcccaacagcgctgagcaggatgaggccgagcccaggagcagcgagcgggtggacctggccagcggcacccccaccagcatcccagccaccaccaccacagccaccaccacccccacccccaccaccagcctgctgcccacagagccccccagcggccctgaggtgagcagccagggccgggaggccagctgtgagggcaccctgcgggctgtggacccccctgtgcgccaccacagctatggaagacatgagggcgcctggatgaaggaccctgctgccagagatgaccgcatctacgtgaccaactactactacggcaacagcctggtggagttcaggaacctggagaacttcaagcagggccgctggagcaacatgtacaagctgccctacaactggattggaactggacatgtggtgtaccagggcgccttctactacaacagagccttcaccaagaacatcatcaagtatgacctgcggcagagatttgtggcctcctgggccctgctgcctgatgtggtgtatgaggacaccaccccctggaagtggaggggccacagcgacatcgactttgctgtggatgagagcggcctgtgggtgatctacccagctgtggatgacagagatgaggcccagcctgaggtgattgtgctgagccggctggaccccggggacctgtctgtgcaccgggagaccacctggaagacccggctgcggaggaacagctatggcaactgcttcctggtgtgtggcatcctgtatgctgtggacacctacaaccagcaggagggccaggtggcctatgcctttgacacccacactggaacagatgcccggccccagctgcccttcctgaatgagcacgcctacaccacccagattgactacaaccccaaggagcgggtgctgtatgcctgggacaatggccaccagctgacctacaccctgcactttgtggtgtag

SEQ ID NO: 6998 - DNA, 3570 bp, synthetic construct
  misc_feature 1..3570: note = source = /note="Description of Artificial Sequence: Synthetic coding sequence"
  source 1..3570: mol_type = other DNA
atgcctggcctgctgaactggatcactggagctgccctgcccctgacagccagtgatgtgaccagctgtgtgtctggctacgccctgggcctgacagccagcctgacctacggcaacctggaggcccagcccttccagggcctgtttgtgtaccccctggatgaatgtaccaccgtcatcggctttgaggccgtgattgctgacagagtggtgacagtgcagatcaaggacaaggccaagctggagagcggccactttgatgccagccacgtgcgcagccccaccgtgactggaaacatcctgcaggatggagtgtccatcgccccccacagctgcacccctgggaaggtgaccctggatgaggacctggagcgcatcctgtttgtggccaacctgggcaccatcgcccccatggagaatgtgaccatcttcatcagcaccagcagcgagctgcccaccctgcccagcggggctgtgcgggtgctgctgcctgctgtgtgtgcccccaccgtgccccagttctgcaccaagagcacaggcaccagcaaccagcaggcccagggcaaggacagacactgcttcggggcctgggcccctggctcctggaacaagctgtgcctggccaccctgctgaacacagaggtgagcaaccccatggagtatgagttcaacttccagctggagatccggggcccctgcctgctggccggcgtggagagccccacccatgagatccgggcagatgctgcccccagcgcccggagcgccaagagcatcatcatcaccctggccaacaagcacacctttgacaggcctgtggagatcctgatccaccccagcgagccccacatgccccacgtgctgattgaaaaaggagacatgaccctgggggagtttgaccagcacctgaagggccgcacagacttcatcaagggcatgaagaagaagagcagagctgagaggaagacagagatcatcaggaagaggctgcacaaggacatcccccaccacagcgtcatcatgctgaacttctgcccagacctgcagagcgtgcagccctgcctgaggaaggcccatggagagttcatcttcctgattgacaggagcagctccatgagcggcatctccatgcaccgggtgaaggatgccatgctggtggccctgaagagcctgatgcctgcctgcctcttcaacatcatcggcttcggcagcaccttcaagagcctcttccccagcagccagacctacagcgaggacagcctggccatggcctgtgatgacatccagaggatgaaggctgacatgggcggcaccaacatcctgagccccctgaagtgggtgatccggcagcctgtgcaccggggccacccccggctgctgtttgtgatcacagatggagctgtgaacaacacaggcaaggtgctggagctggtgagaaatcatgccttcagcacccgctgctacagctttggcatcggccccaacgtgtgccaccggctggtgaagggcctggcctctgtgtctgagggcagcgctgagctgctgatggagggggagcggctgcagcccaagatggtgaagagcctgaagaaggccatggcccctgtgctgagtgatgtgacagtggagtggatcttccctgagaccacagaggtgctggtgtcccctgtgtctgccagcagcctcttccctggagagcggctggtgggctatggaattgtgtgtgatgccagcctgcacatcagcaaccccaggagtgacaagagaagacgctacagcatgctgcacagccaggagagcggcagctctgtgttctaccacagccaggatgatggccctggcctggagggcggggactgtgccaagaacagcggggcccccttcatcctgggccaggccaagaatgcccggctggccagcggggacagcaccaccaagcatgacctgaacctgagccagaggagaagagcctacagcaccaaccagatcaccaaccacaagcccctgccccgggccaccatggccagtgaccccatgcctgctgccaagcgctaccccctgaggaaggcccggctgcaggacctgaccaaccagaccagcctggatgtgcagcgctggcagattgacctgcagcccctgctgaacagcggccaggacctgaaccagggccccaagctgcggggccctggggcccggcggcccagcctgctgccccagggctgccagcccttcctgccctggggccaggagacccaggcctggagccctgtgcgggagaggaccagtgacagccgcagccctggggacctggagcccagccaccaccccagcgcctttgaaacagagaccagcagtgactgggaccccccagctgagagccaggagcgggccagccccagcaggcctgccaccccagcccctgtgctgggcaaggccctggtgaagggcctgcatgacagccagaggctgcagtgggaggtgtcctttgagctgggcaccccaggccctgagcggggcggggcccaggatgctgacctgtggagcgagaccttccaccacctggccgcccgggccatcatccgggactttgagcagctggccgagcgggagggggagattgagcagggcagcaacagacgctaccaggtgtctgccctgcacaccagcaaggcctgcaacatcatcagcaagtacacagcctttgtgcctgtggatgtgtccaagagccgctacctgcccaccgtggtggagtaccccaacagcgctgccctgaggatgctgggcagccgggccctggcccagcagtggaggggcaccagcagcggcttcggccggccccagaccatgctgggggaggacagcgcccctggaaatggcccccagaggagcctggccaccaacaccctgagctccatgaaggccagcgagaacctgtttggctcctggctgaacctgaacaagagccggctgctgacccgggccgccaagggcttcctgagcaagcccctcatcaaggctgtggagagcaccagcggcaaccagagctttgactacatccccctggtgtccctgcagctggccagcggggccttcctgctgaatgaggccttctgtgaggccacccacatccccatggagaagctgaagtggaccagccccttcacctgccaccgggtgtccctgaccacccggcccagcgagagcaagacccccagcccccagctgtgcaccagcagcccccccaggcaccccagctgtgacagcttcagcctggagcccctggccaagggcaagctgggcctggagcccagggctgtggtggagcacacaggcaagctgtgggccaccgtggtgggcctggcctggctggagcacagcagcgccagctacttcacagagtgggagctggtggccgccaaggccaacagctggctggagcagcaggaggtgcctgagggccgcacccagggcaccctgaaggccgccgcccggcagctgtttgtgctgctgcggcactgggatgagaacctggagttcaacatgctgtgctacaaccccaactacgtgtag

SEQ ID NO: 6999 - DNA, 1344 bp, synthetic construct
  misc_feature 1..1344: note = source = /note="Description of Artificial Sequence: Synthetic coding sequence"
  source 1..1344: mol_type = other DNA
atgcctcatgtgctgattgagaagggggacatgaccctgggggagtttgaccagcacctgaagggccgcacagacttcatcaagggcatgaagaagaagagcagagctgagaggaagacagagatcatcaggaagaggctgcacaaggacatcccccaccacagcgtcatcatgctgaacttctgcccagacctgcagagcgtgcagccctgcctgaggaaggcccacggggagttcatcttcctgattgacaggagcagctccatgagcggcatctccatgcaccgggtgaaggatgccatgctggtggccctgaagagcctgatgcctgcctgcctcttcaacatcattggatttggcagcaccttcaagagcctcttccccagcagccagacctacagcgaggacagcctggccatggcctgtgatgacatccagaggatgaaggctgacatgggcggcaccaacatcctgagccccctgaagtgggtgatccggcagcctgtgcaccggggccacccccggctgctcttcgtcatcacagatggagctgtgaacaacacaggcaaggtgctggagctggtgaggaaccacgccttcagcacccgctgctacagctttggaattggccccaacgtgtgccaccggctggtgaagggcctggcctctgtgtctgagggcagcgctgagctgctgatggagggggagcggctgcagcccaagatggtgaagagcctgaagaaggccatggcccctgtgctgagtgatgtgacagtggagtggatcttccctgagaccacagaggtgctggtgtcccctgtgtctgccagcagcctcttccctggagagcggctggtgggctacggcatcgtgtgtgatgccagcctgcacatcagcaaccccaggagtgacaagagaagacgctacagcatgctgcacagccaggagagcggcagcagcgtcttctaccacagccaggatgatggccctggcctggagggcggggactgtgccaagaacagcggggcccccttcatcctgggccaggccaagaatgcccggctggccagcggggacagcaccaccaagcatgacctgaacctgagccagaggcggcgggcctacagcaccaaccagatcaccaaccacaagcccctgccccgggccaccatggccagtgaccccatgcctgctgccaagcgctaccccctgaggaaggcccggctgcaggacctgaccaaccagaccagcctggatgtgcagcgctggcagattgacctgcaggccttcatctgcctgaccagcgaggacaccttccagatccgcacccccaccggccagtag

SEQ ID NO: 7000 - DNA, 726 bp, synthetic construct
  misc_feature 1..726: note = source = /note="Description of Artificial Sequence: Synthetic coding sequence"
  source 1..726: mol_type = other DNA
atgtggacagtgaggacagagggcggccacttccccctgcacagccccaccttctcctggagaaatgtggccttcctgctgctgctgagcctggccctggagtggaccagcgccatgctgaccaagaagatcaagcacaagccaggcctgtgccccaaggagcggctgacctgcaccacagagctgcctgacagctgcaacacagactttgactgcaaggagtaccagaagtgctgcttctttgcctgccagaagaagtgcatggaccccttccaggagccctgcatgctgcctgtgagacatggcaactgcaaccacgaggcccagcgctggcactttgacttcaagaactaccgctgcacccccttcaagtaccggggctgtgagggcaatgccaacaacttcctgaatgaagatgcctgcaggacagcctgcatgctgattgtgaaggatggccagtgccccctcttccccttcacagagaggaaggagtgcccccccagctgccacagcgacatcgactgcccccagacagacaagtgctgtgagagccgctgtggctttgtgtgtgcccgggcctggacagtgaagaagggcttctgccccaggaagcccctgctgtgcaccaagattgacaagcccaagtgcctgcaggatgaagaatgtcccctggtggagaagtgctgcagccactgcggcctgaagtgcatggaccccaggaggtag

SEQ ID NO: 7001 - DNA, 1074 bp, synthetic construct
  misc_feature 1..1074: note = source = /note="Description of Artificial Sequence: Synthetic coding sequence"
  source 1..1074: mol_type = other DNA
atgaggcctcctccagccctggccctggccggcctgtgcctgctggccctgcctgctgctgctgccagctacttcggcctgaccggccgggaggtgctgacccccttccctggcctgggcacagctgctgccccagcccagggcggggcccacctgaagcagtgtgacctgctgaagctgagccggcggcagaagcagctgtgcagaagagagcccggcctggccgagaccctgagagatgctgcccacctgggcctgctggagtgccagttccagttcagacatgagcgctggaactgcagcctggagggccgcatgggcctgctgaagaggggcttcaaggagacagccttcctgtatgctgtgagcagcgctgccctgacccacaccctggcccgggcctgcagcgctggccgcatggagcgctgcacctgtgatgacagccctggcctggagagccggcaggcctggcagtggggcgtgtgtggggacaacctgaagtacagcaccaagttcctgagcaacttcctgggcagcaagaggggcaacaaggacctgcgggcccgggcagatgcccacaacacccacgtgggcatcaaggctgtgaagagcggcctgcggaccacctgcaagtgccacggcgtgtctggcagctgtgctgtgaggacctgctggaagcagctgagccccttccgggagaccggccaggtgctgaagctgcgctatgacagcgctgtgaaggtgagcagcgccaccaatgaggccctgggccgcctggagctgtgggccccagcccggcagggcagcctgaccaagggcctggcccccaggtctggggacctggtgtacatggaggacagccccagcttctgccggcccagcaagtacagccctggaacagctggccgggtgtgcagccgggaggccagctgcagcagcctgtgctgcggccggggctatgacacccagagccggctggtggccttcagctgccactgccaggtgcagtggtgctgctacgtggagtgccagcagtgtgtgcaggaggagctggtgtacacctgcaagcactag

SEQ ID NO: 7002 - DNA, 810 bp, synthetic construct
  misc_feature 1..810: note = source = /note="Description of Artificial Sequence: Synthetic coding sequence"
  source 1..810: mol_type = other DNA
atggtgcgctgcctgggccctgccctgctgctgctgctgctgctgggcagcgccagctctgtgggcggcaacagatgtgtggatgctgctgaggcctgcacagcagatgcccgctgccagaggctgcggagtgaatatgtggcccagtgcctgggccgggccgcccagggcggctgcccccgggcccgctgcagaagagccctgcggcgcttctttgcccggggccccccagccctgacccacgccctgctcttctgcccctgtgccggccctgcctgtgccgagcggcggcggcagacctttgtgcccagctgtgccttcagcggccctggccctgccccacccagctgcctggagcccctgaacttctgtgagaggagccgggtgtgccggccccggctgctggccttccaggtgtcctgcaccccagcccccagcgccccagatggctgcctgctggaccagggcgcccgctgcctgcgggcctatgccggcctggtgggcacagctgtgacccccaactacgtggacaacgtgtctgcccgggtggccccctggtgtgactgtggggccagcggcaacagaagagaggactgtgaggccttccggggcctcttcaccaggaaccgctgcctggatggagccatccaggcctttgccagcggctggccccctgtgctgctggaccagctgaacccccagggcgaccctgagcacagcctgctgcaggtgagcagcacaggccgggccctggagaggaggagcctgctgagcatcctgcctgtgctggccctgcctgccctgctgtag

SEQ ID NO: 7003 - DNA, 1728 bp, synthetic construct
  misc_feature 1..1728: note = source = /note="Description of Artificial Sequence: Synthetic coding sequence"
  source 1..1728: mol_type = other DNA
atgagcggcaactgggtgcaccctggccagatcctgatctgggccatctgggtgctggccgcccccaccaagggccccagcgctgagggcccccagaggaacacccggctgggctggatccagggcaagcaggtgacagtgctgggcagccctgtgcctgtgaatgtgttcctgggcgtgccctttgctgccccacccctgggcagcctgcgcttcaccaacccccagcctgccagcccctgggacaacctgcgggaggccaccagctaccccaacctgtgcctgcagaacagcgagtggctgctgctggaccagcacatgctgaaggtgcactaccccaagtttggagtgtctgaggactgcctgtacctgaacatctatgccccagcccacgccgacaccggcagcaagctgcctgtgctggtgtggttccctggaggagccttcaagacaggcagcgccagcatctttgatggcagcgccctggccgcctatgaagatgtgctggtggtggtggtgcagtaccgcctgggcatcttcggcttcttcaccacctgggaccagcacgcccctggcaactgggccttcaaggaccaggtggccgccctgtcctgggtgcagaagaacatcgagttctttggaggagaccccagctctgtgaccatctttggagagagcgctggggccatctctgtgagcagcctcatcctgagccccatggccaagggcctcttccacaaggccatcatggagagcggcgtggccatcatcccctacctggaggcccatgactatgagaagtctgaggacctgcaggtggtggcccacttctgtggcaacaatgccagtgacagcgaggccctgctgcgctgcctgcggaccaagcccagcaaggagctgctgaccctgagccagaagaccaagagcttcaccagggtggtggatggagccttcttccccaatgagcccctggacctgctgagccagaaggccttcaaggccatccccagcatcattggagtgaacaaccatgaatgtggcttcctgctgcccatgaaggaggcccctgagatcctgagcggcagcaacaagagcctggccctgcacctgatccagaacatcctgcacatccccccccagtacctgcacctggtggccaatgagtacttccatgacaagcacagcctgacagagatccgggacagcctgctggacctgctgggagatgtgttctttgtggtgcctgccctgatcacagcccgctaccacagagatgctggggcccctgtgtacttctatgagttccgccaccggccccagtgctttgaggacaccaagccagcctttgtgaaggctgaccatgctgatgaggtgcgctttgtgtttggaggagccttcctgaagggggacatcgtgatgtttgagggcgccacagaggaggagaagctgctgagcaggaagatgatgaagtactgggccacctttgccaggacaggcaaccccaatggaaatgacctgagcctgtggccagcctacaacctgacagagcagtacctgcagctggacctgaacatgagcctgggccagaggctgaaggagccccgggtggacttctggaccagcaccatccccctcatcctgagcgccagtgacatgctgcacagccccctgagcagcctgaccttcctgagcctgctgcagcccttcttcttcttctgtgccccctag

SEQ ID NO: 7004 - DNA, 1026 bp, synthetic construct
  misc_feature 1..1026: note = source = /note="Description of Artificial Sequence: Synthetic coding sequence"
  source 1..1026: mol_type = other DNA
atgggcaccctgccctggctgctggccttcttcatcctgggcctgcaggcctgggacacccccaccatcgtgtccaggaaggagtggggcgcccggcccctggcctgccgggccctgctgaccctgcctgtggcctacatcatcacagaccagctgcccggcatgcagtgccagcagcagagcgtgtgcagccagatgctgcggggcctgcagagccacagcgtgtacaccatcggctggtgtgatgtggcctacaacttcctggtgggagatgatggccgggtgtatgagggcgtgggctggaacatccagggcctgcacacccagggctacaacaacatcagcctgggcatcgccttctttggaaacaagattggcagcagccccagccctgctgccctgtctgctgctgagggcctcatctcctatgccatccagaagggccacctgagcccccgctacatccagcccctgctgctgaaggaggagacctgcctggacccccagcaccctgtgatgcccaggaaggtgtgccccaacatcatcaagaggtctgcctgggaggcccgggagacccactgccccaagatgaacctgcctgccaagtatgtgatcatcatccacacagctggcaccagctgcaccgtgtccacagactgccagacagtggtgaggaacatccagagcttccacatggacaccaggaacttctgtgacatcggctaccacttcctggtgggccaggatggaggagtgtatgaaggagtgggctggcacatccagggcagccacacctacggcttcaatgacatcgccctgggcatcgccttcatcggctactttgtggagaagcccccaaatgctgctgccctggaggccgcccaggacctgatccagtgtgctgtggtggagggctacctgacccccaactacctgctgatgggccacagtgatgtggtgaacatcctgagccctggccaggccctgtacaacatcatcagcacctggccccacttcaagcactag

SEQ ID NO: 7005 - DNA, 897 bp, synthetic construct
  misc_feature 1..897: note = source = /note="Description of Artificial Sequence: Synthetic coding sequence"
  source 1..897: mol_type = other DNA
atgggcatcgtgtgtgcccagtgcagcttcatcctgctgctgagcatcatccgggcccggcccccacccttcctgttctgccccctgagcagccagaggacagagagcccctacaagcctgtgcacctgggcctgggccccacagacaaggtggccgccatcgccatggcccgcatcatcgacctggtgccctgggatgatggcagcacccacgtgtatgccagccctgccatcctgctgcccatggagcggcagaggaaccagctggccggcgtgaagcagcagctgtaccacccagccctgcccaccctgcggcacatggaccgggacacagtgaaggcctgcctgcctgatgagcactgccagagcaccacctactgcaggaaggatgaatttgacaatgcccacttcaccctgctgggcgtgcccaacaagcccctgcagtgcctggacatcacagccaccggccagaagctgaggaaccgctaccacgagggcaagctggcccccatcgcccctggcatcaacagagtggactggccctgcttcacccgggccatcgaggactggagccactttgtgagcagcgctggggagttcaagctgccctgcctgaggaagagagctgagggcctgagcggctatgctgtgcgctacctgaagccagatgtgacccagacctggaggcaggaggccctgtgtggggcctgggccggccggccctgcagcccagacagcccccggccctacccctgctgccccccccagtactgcctgagccagaaccccagcctggacagatatggccagaagcccctgccctttgacagcctgaacaccttccgcagctttggcagcagctacagccgggtgaactacctgaccccctggcactag

SEQ ID NO: 7006 - DNA, 5799 bp, synthetic construct
  misc_feature 1..5799: note = source = /note="Description of Artificial Sequence: Synthetic coding sequence"
  source 1..5799: mol_type = other DNA
atggcccctggggccctgcggggcggctgtgagcagagggcccctgggggcggggccaggacagctgccctgggcccctggccctggcccagccctggccctgcccccagccctggggccgccccacccaggagcaggaagatgtctggggccctgctgtggcccctgctgcccctgctgctgctgctgctgagcgccagagatggagtgcgggccgcccagccccaggcccctggctacctgattgctgcccccagcgtcttccgggccggcgtggaggaggtgatctctgtgaccatcttcaacagcccccgggaggtgacagtgcaggcccagctggtggcccagggcgagcctgtggtgcagagccagggcgccatcctggacaagggcaccatcaagctgaaggtgcccaccggcctgcggggccaggccctgctgaaggtgtggggccggggctggcaggccgaggagggccccctcttccacaaccagacctctgtgacagtggatggccgcggggccagcgtcttcatccagacagacaagcctgtgtaccggccccagcaccgggtgctgatcagcatcttcaccgtgagccccaacctgcggcctgtgaatgagaagctggaggcctacatcctggacccccggggcagcaggatgattgagtggaggcacctgaagcccttctgctgcggcatcaccaacatgtccttccccctgagtgaccagcctgtgctgggggagtggttcatctttgtggagatgcagggccacgcctacaacaagagctttgaggtgcagaagtatgtgctgcccaagtttgagctgctgattgaccccccacgctacatccaggacctggatgcctgtgagaccggcaccgtgcgggcccgctacaccttcggcaagcctgtggccggggccctgatgatcaacatgacagtgaatggagtgggctactacagccatgaggtgggccggcctgtgctgcggaccaccaagatcctgggcagccgggactttgacatctgtgtgcgggacatgatcccagcagatgtgcctgagcacttccggggccgggtgtccatctgggccatggtgacctctgtggatggcagccagcaggtggcctttgatgacagcacccctgtgcagaggcagctggtggacatccgctacagcaaggacaccaggaagcagttcaagccaggcctggcctacgtgggcaaggtggagctgagctacccagatggcagccctgctgagggcgtgacagtgcagatcaaggccgagctgacccccaaggacaacatctacaccagcgaggtggtgtcccagaggggcctggtgggctttgagatccccagcatccccaccagcgcccagcacgtgtggctggagaccaaggtgatggccctgaatggcaagcctgtgggcgcccagtacctgcccagctacctgagcctgggctcctggtacagccccagccagtgctacctgcagctgcagccccccagccaccccctgcaggtgggggaggaggcctacttctctgtgaagagcacctgcccctgcaacttcaccctgtactatgaggtggccgcccggggcaacatcgtgctgagcggccagcagcctgcccacaccacccagcagaggagcaagagagctgccccagccctggagaagcccatccggctgacccacctgtctgaaacagagcccccaccagcccctgaggccgaggtggatgtgtgtgtgaccagcctgcacctggccgtgacccccagcatggtgcccctgggccgcctgctggtgttctacgtgagagaaaatggagaaggagtggccgacagcctgcagtttgctgtggagaccttctttgagaaccaggtgtctgtgacctacagcgccaatgagacccagcctggagaggtggtggacctgcgcatccgggccgcccggggcagctgtgtgtgtgtggccgctgtggacaagtctgtgtacctgctgcggagcggcttccggctgaccccagcccaggtgttccaggagctggaggactatgatgtgtctgacagctttggagtgtcccgggaggatggccccttctggtgggccggcctgacagcccagaggagaagaagaagcagcgtcttcccctggccctggggcatcaccaaggacagcggctttgccttcacagaaacaggcctggtggtgatgacagacagagtgtccctgaaccaccggcaggacggcggcctgtacacagatgaagctgtgcctgccttccagccccacacaggcagcctggtggccgtggcccccagccgccacccccccaggacagagaagaggaagaggaccttcttccctgagacctggatctggcactgcctgaacatcagtgaccccagcggggagggcaccctgtctgtgaaggtgcctgacagcatcacctcctgggtgggggaggccgtggccctgagcaccagccagggcctgggcattgctgagcccagcctgctgaagaccttcaagcccttctttgtggacttcatgctgcctgccctgatcatccggggggagcaggtgaagatccccctgtctgtgtacaactacatgggcacctgtgccgaggtgtacatgaagctgtctgtgcccaagggcatccagtttgtgggccaccctgggaagagacatgtgaccaagaagatgtgtgtggcccctggagaggccgagcccatctgggtggtgctgtccttcagtgacctgggcctgaacaacatcacagccaaggccctggcctacggggacaccaactgctgcagagatggccgcagcagcaagcacccagaagaaaatcatgctgaccggcgggtgcccatcggcgtggaccacgtgcggcgctctgtgatggtggaggccgagggcgtgccccgggcctacacctacagcgccttcttctgccccagcgagcgggtgcacatcagcacccccaacaagtatgagttccagtatgtgcagaggcccctgcggctgaccaggtttgatgtggccgtgcgggcccacaatgatgcccgggtggccctgagcagcggcccccaggacacagctggcatgattgaaattgtgctgggcggccaccagaacaccaggtcctggatcagcaccagcaagatgggagagcctgtggccagcgcccacacagccaagatcctgtcctgggatgagttccgcaccttctggatctcctggaggggcggcctcatccaggtgggccacggccctgagcccagcaatgaatctgtcatcgtggcctggaccctgccccggcccccagaggtgcagttcatcggcttcagcacaggctggggctccatgggagagttccgcatctggaggaagatggaggtggatgagagctacagcgaggccttcaccctgggcgtgccccacggggccatccctggcagcgagcgggccacagccagcatcattggagatgtgatgggccccaccctgaaccacctgaacaacctgctgcggctgcccttcggctgtggggagcagaacatgatccactttgcccccaacgtgtttgtgctgaagtacctgcagaagacccagcagctgagccctgaggtggagcgggagaccacagactacctggtgcagggctaccagaggcagctgacctacaagaggcaggacggcagctacagcgcctttggagagagagatgccagcggctccatgtggctgacagcctttgtgctgaagagctttgcccaggcccgctccttcatctttgtggacccccgggagctggccgccgccaagtcctggatcatccagcagcagcaggctgatggcagcttcctggccgtgggccgggtgctgaacaaggacatccagggcggcatccatggaacagtgcccctgacagcctacgtggtggtggccctgctggagactggaacagccagcgaggaggagcggggcagcacagacaaggcccggcacttcctggagagcgctgcccccctggccatggacccctacagctgtgccctgaccacctacgccctgaccctgctgcggagccctgctgcccctgaggccctgaggaagctgcggagcctggccatcatgagagatggagtgacccactggagcctgagcaacagctgggatgtggacaagggcaccttcctgtccttcagtgacagagtgtcccagagcgtggtgtctgctgaggtggagatgacagcctatgccctgctgacctacaccctgctgggagatgtggccgccgccctgcctgtggtgaagtggctgagccagcagagaaatgccctgggcggcttcagcagcacccaggacacctgtgtggccctgcaggccctggccgagtatgccatcctgtcctatgctgggggcatcaacctgactgtgtccctggccagcaccaacctggactaccaggagacctttgagctgcacaggaccaaccagaaggtgctgcagacagctgccatccccagcctgcccaccggcctgtttgtgtctgccaagggagatggctgctgcctgatgcagattgatgtgacctacaacgtgcctgaccctgtggccaagccagccttccagctgctggtgtccctgcaggagcctgaggcccagggccggcccccacccatgcctgccagcgctgctgagggcagcagaggagactggcccccagcagatgatgatgatcctgctgctgaccagcaccaccaggagtacaaggtgatgctggaggtgtgcacccgctggctgcatgctggcagcagcaacatggctgtgctggaggtgcccctgctgagcggcttccgggctgacatcgagagcctggagcagctgctgctggacaagcacatgggcatgaagagatatgaggtggccggcagaagagtgctcttctactttgatgagatccccagccgctgcctgacctgtgtgcgcttccgggccctgagagaatgtgtggtgggccgcaccagcgccctgcctgtgtctgtgtatgactactatgagcccgcctttgaggccacccgcttctacaacgtgtccacccacagccccctggcccgggagctgtgtgccggccctgcctgcaatgaggtggagcgggccccagcccggggccctggctggttccctggagagagcggccctgctgtggcccctgaggagggcgccgccatcgcccgctgtggctgtgaccatgactgtggggcccagggcaaccctgtgtgtggcagtgatggagtggtgtatgccagcgcctgccgcctgcgggaggccgcctgccggcaggccgcccccctggagcccgccccacccagctgctgtgccctggagcagaggctgcctgccagcagcagcagcacctatggagatgacctggcctctgtggcccctggccccctgcagcaggatgtgaagctgaatggagctggcctggaggtggaggacagcgaccctgagcctgagggggaggccgaggacagagtgacagctggccccaggcctcctgtgagcagcggcaacctggagagcagcacccagagcgccagccccttccaccgctggggccagaccccagccccccagaggcacagcggccgggtggtgggcgcccaccggcccggcctgctgagccctgtgtttgtgtacagccctgccttccagagcggcggggaggagggcctgtggatgagcaacacctgcaccctgaggtag

SEQ ID NO: 7007 - DNA, 1209 bp, synthetic construct
  misc_feature 1..1209: note = source = /note="Description of Artificial Sequence: Synthetic coding sequence"
  source 1..1209: mol_type = other DNA
atggtgtgtgcccgggccgccctgggccctggggccctgtgggccgccgcctggggcgtgctgctgctgacagccccagctggggcccagaggggcaggaagaaggtggtgcacgtgctggagggggagagcggctctgtggtggtgcagacagcccctggccaggtggtgagccacagaggaggcaccatcgtgctgccctgccgctaccactatgaggccgccgcccacggccatgatggagtgcggctgaagtggaccaaggtggtggaccccctggccttcacagatgtgtttgtggccctgggcccccagcaccgggccttcggcagctaccggggccgggcagagctgcagggagatggccctggagatgccagcctggtgctgagaaatgtgaccctgcaggactatggccgctatgaatgtgaggtgaccaatgagctggaggatgatgctggcatggtgaagctggacctggagggcgtggtgttcccctaccacccccggggcggccgctacaagctgacctttgctgaggcccagagggcctgtgccgagcaggacggcatcctggccagcgctgagcagctgcacgccgcctggagagatggcctggactggtgcaatgccggctggctgagagatggctctgtgcagtaccctgtgaaccggccccgggagccctgtggcggcctgggcggcaccggcagcgctgggggcggcggagatgccaacggcggcctgaggaactacggctaccgccacaatgctgaggagagatatgatgccttctgcttcaccagcaacctgcccggccgggtcttcttcctgaagcccctgcggcctgtgcccttctctggagctgcccgggcctgtgccgcccggggagctgctgtggccaaggtgggccagctgtttgctgcctggaagctgcagctgctggaccgctgcacagctggctggctggctgatggcagcgcccgctaccccatcgtgaacccccgggcccgctgtggcggccggcggcctggggtgcgcagcctgggcttcccagatgccacccggcggctgtttggagtgtactgctaccgggcccctggggccccagaccctgcccctgggggctggggctggggctgggccggcggcggcggctgggccggcggggcccgggaccctgctgcctggacccccctgcacgtgtag

SEQ ID NO: 7008 - DNA, 1740 bp, synthetic construct
  misc_feature 1..1740: note = source = /note="Description of Artificial Sequence: Synthetic coding sequence"
  source 1..1740: mol_type = other DNA
atgtctgccctgcggcccctgctgctgctgctgctgcccctgtgccccggccctggccctggccctggcagcgaggccaaggtgaccaggagctgtgccgagacccggcaggtgctgggcgcccggggctacagcctgaacctgatccccccagccctgatctctggagagcacctgcgggtgtgcccccaggagtacacctgctgcagcagcgagacagagcagaggctcatccgggagacagaggccaccttccggggcctggtggaggacagcggcagcttcctggtgcacaccctggccgcccggcacaggaagtttgatgagttcttcctggagatgctgtctgtggcccagcacagcctgacccagctgttcagccacagctatggccgcctgtatgcccagcacgccctgatcttcaacggcctcttcagccggctgcgggacttctacggggagagcggggagggcctggatgacaccctggccgacttctgggcccagctgctggagagggtcttccccctgctgcacccccagtacagcttccccccagactacctgctgtgcctgagccggctggccagcagcacagatggcagcctgcagccctttggagacagcccccggcggctgcggctgcagatcaccaggaccctggtggccgcccgggcctttgtgcagggcctggagactggaagaaatgtggtgtctgaggccctgaaggtgcctgtgtctgagggctgcagccaggccctgatgaggctcatcggctgccccctgtgccggggcgtgcccagcctgatgccctgccagggcttctgcctgaatgtggtgcggggctgcctgagcagccggggcctggagccagactggggcaactacctggatggcctgctgatcctggccgacaagctgcagggccccttctcctttgagctgacagctgagagcattggagtgaagatcagcgagggcctgatgtacctgcaggagaacagcgccaaggtgtctgcccaggtgttccaggagtgtggccccccagaccctgtgcctgccaggaacagaagagcccccccaccccgggaggaggccggccgcctgtggagcatggtgacagaggaggagcggcccaccacagctgctggcaccaacctgcaccggctggtgtgggagctgcgggagcggctggccaggatgaggggcttctgggcccggctgagcctgactgtgtgtggggacagcaggatggccgcagatgccagcctggaggccgccccctgctggacaggagctggccggggccgctacctgccccctgtggtgggcggcagccctgctgagcaggtgaacaaccctgagctgaaggtggatgccagcggcccagatgtgcccaccaggagaagaaggctgcagctgcgggccgccacagccaggatgaagacagctgccctgggccatgacctggatggccaggatgctgatgaagatgccagcggcagcggcggcggccagcagtatgcagatgactggatggccggggctgtggcccccccagcccggcccccccggcccccctaccccccaagaagagatggcagcggcggcaagggcggcggcggcagcgcccgctacaaccagggccgcagccgctctggaggagccagcatcggcttccacacccagaccatcctgatcctgagcctgagcgccctggccctgctgggccccaggtag

SEQ ID NO: 7009 - DNA, 498 bp, synthetic construct
  misc_feature 1..498: note = source = /note="Description of Artificial Sequence: Synthetic coding sequence"
  source 1..498: mol_type = other DNA
atggccctgctggccctgctgctggtggtggccctgccccgggtgtggacagatgccaacctgacagcccggcagagggaccctgaggacagccagaggacagatgaaggagacaacagagtgtggtgccacgtgtgtgaaagagagaacacctttgagtgccagaacccccggcgctgcaagtggacagagccctactgtgtgattgctgctgtgaagatcttcccccgcttcttcatggtggccaagcagtgcagcgctggctgtgccgccatggagcggcccaagccagaggagaagcgcttcctgctggaggagcccatgcccttcttctacctgaagtgctgcaagatccgctactgcaacctggagggcccccccatcaacagctctgtgttcaaggagtatgccggctccatgggagagagctgtggcggcctgtggctggccatcctgctgctgctggccagcattgctgctggcctgagcctgtcctag

SEQ ID NO: 7010 - DNA, 933 bp, synthetic construct
  misc_feature 1..933: note = source = /note="Description of Artificial Sequence: Synthetic coding sequence"
  source 1..933: mol_type = other DNA
atgaatggcctgagcctgtctgagctgtgctgcctcttctgctgccccccctgccccggcagaattgctgccaagctggccttcctgcccccagaggccacctacagcctggtgcctgagcctgagcccggccctggaggagctggggccgcccccctgggcaccctgcgggccagcagcggggcccctggccgctggaagctgcacctgacagaaagagctgacttccagtacagccagcgggagctggacaccatcgaggtgttccccaccaagagcgcccggggcaacagagtgtcctgcatgtatgtgcgctgtgtgcctggggcccgctacacagtgctcttcagccacggcaatgctgtggacctgggccagatgagcagcttctacatcggcctgggcagccggctgcactgcaacatcttctcctatgactacagcggctacggggccagcagcggccggcccagcgagaggaacctgtatgctgacattgatgctgcctggcaggccctgcggaccaggtatggcatcagcccagacagcatcatcctgtatggccagagcattggaacagtgcccaccgtggacctggccagccgctatgaatgtgccgctgtggtgctgcacagccccctgaccagcggcatgagggtggccttcccagacaccaagaagacctactgctttgatgccttccccaacatcgagaaggtgtccaagatcaccagccctgtgctgatcatccatggaacagaagatgaagtcatcgacttcagccacggcctggccctgtatgagcgctgccccaaggctgtggagcccctgtgggtggagggcgccggccacaatgacatcgagctgtacagccagtacctggagcggctgcggcgcttcatcagccaggagctgcccagccagagggcctag

SEQ ID NO: 7011 - DNA, 1905 bp, synthetic construct
  misc_feature 1..1905: note = source = /note="Description of Artificial Sequence: Synthetic coding sequence"
  source 1..1905: mol_type = other DNA
atggcccagggcgtgctgtggatcctgctgggcctgctgctgtggagcgaccccggcacagccagcctgcccctgctgatggattctgtcatccaggccctggccgagctggagcagaaggtgcctgctgccaagaccaggcacacagccagcgcctggctgatgtctgcccccaacagcggcccccacaaccggctgtaccacttcctgctgggcgcctggagcctgaatgccacagagctggacccctgccccctgagccctgagctgctgggcctgaccaaggaggtggcccggcatgatgtgcgggagggcaaggagtatggagtggtgctggccccagatggcagcacagtggccgtggagcccctgctggccggcctggaggccggcctgcagggcagaagagtcatcaacctgcccctggacagcatggccgccccctgggagactggagacaccttcccagatgtggtggccatcgccccagatgtgcgggccaccagcagccctggcctgagagatggcagcccagatgtgaccacagctgacattggagccaacaccccagatgccaccaagggctgcccagatgtgcaggccagcctgcctgatgccaaggccaagagcccccccaccatggtggacagcctgctggccgtgaccctggccggcaacctgggcctgaccttcctgcggggcagccagacccagagccacccagacctgggcacagagggctgctgggaccagctgagcgcccccaggaccttcaccctgctggaccccaaggccagcctgctgaccatggccttcctgaatggagccctggatggagtcatcctgggggactacctgagcaggaccccagagccccggcccagcctgagccacctgctgagccagtactacggggccggcgtggcccgggaccccggcttccgcagcaacttccggcggcagaatggagctgccctgaccagcgccagcatcctggcccagcaggtgtggggcaccctggtgctgctgcagaggctggagcctgtgcacctgcagctgcagtgcatgagccaggagcagctggcccaggtggccgccaatgccaccaaggagttcacagaggccttcctgggctgcccagccatccacccccgctgccgctggggcgccgccccctaccggggccggcccaagctgctgcagctgcccctgggcttcctgtatgtgcaccacacctacgtgcctgccccaccctgcacagacttcacccgctgtgccgccaacatgaggtccatgcagcgctaccaccaggacacccagggctggggagacatcggctacagctttgtggtgggcagtgatggctacgtgtatgagggccggggctggcactgggtgggcgcccacaccctgggccacaacagccggggcttcggcgtggccatcgtgggcaactacacagctgccctgcccacagaggccgccctgaggacagtgcgggacaccctgcccagctgtgctgtgcgggccggcctgctgcggccagactatgccctgctgggccaccggcagctggtgaggacagactgccctggagatgccctgtttgacctgctgcggacctggccccacttcaccgctgtgtccctgcggagcctgcactacacagcccggcggcccagcgtgtacaccagcagcacccggcccctgcccccagcctgcaacagctgtgccaggacagccagcgcccggccccccaccagcagaagacatgtgtacagcggcaacctgggccctgcctttgctggccacagcgctggcaacatcccagaccctgtgaccagcgcctatgctgccagcgcccagccccagacccagcctgcctgccccttccccagcagctag
